(19) United States
(12) Patent Application Publication
(10) Pub. No.: US 2018/0346981 A1
(43) Pub. Date: Dec. 6, 2018

(54) Panel-based Genetic Diagnostic Testing for Inherited Eye Diseases

(71) Applicant: Massachusetts Eye and Ear Infirmary, Boston, MA (US)

(72) Inventors: Eric A. Pierce, Brookline, MA (US); Mark B. Consugar, Watertown, MA (US)

(21) Appl. No.: 15/527,918

(22) PCT Filed: Nov. 20, 2015
(86) PCT No.: PCT/US2015/061956

§ 371 Date: May 18, 2017

Related U.S. Application Data
(60) Provisional application No. 62/082,522, filed on Nov. 20, 2014.

(51) Int. Cl. C12Q 1/6883

(52) U.S. Cl. CPC C12Q 1/6883; C12Q 2600/156

(57) ABSTRACT

Methods of detecting a mutation associated with a genetic eye disease in a subject, using target enrichment and next generation sequencing.

### CLAIM OF PRIORITY

[0001] This application claims the benefit of U.S. Patent Application Ser. No. 62/082,522, filed on Nov. 20, 2014. The entire contents of the foregoing are hereby incorporated by reference.

### FEDERALLY SPONSORED RESEARCH OR DEVELOPMENT

[0002] This invention was made with Government support under Grant Nos. EY012910 and P3OEY014104 awarded by the National Institutes of Health. The Government has certain rights in the invention.

### TECHNICAL FIELD

[0003] Described herein are methods of detecting a mutation associated with a genetic eye disease in a subject, using target enrichment and next-generation sequencing.

### BACKGROUND

[0004] Inherited eye disorders are important causes of vision loss. IRDs are among the most common causes of blindness in working age people¹¹, and glaucoma is a leading cause of irreversible blindness worldwide^{12,13}. Genetic diagnostic testing for these disorders is challenging due to their genetic heterogeneity. For example, mutations in over 200 genes can cause IRDs (complete gene list available on the web at sph.uth.edu/retnet/), and multiple genes are known to underlie inherited forms of glaucoma and optic atrophy¹⁴⁻¹⁶.

### SUMMARY

[0005] Next-generation sequencing (NGS) based methods are being adopted broadly for genetic diagnostic testing, but the performance characteristics of these techniques have not been fully defined with regard to test accuracy and reproducibility. Described herein is a targeted enrichment and NGS approach for genetic diagnostic testing of patients with inherited eye disorders, including inherited retinal degenerations, optic atrophy and glaucoma. We performed experiments to measure the sensitivity, specificity, reproducibility as well as the clinical sensitivity of one embodiments of the test, the Genetic Eye Disease (GEDi) test as described herein. The GEDi test was highly reproducible and accurate, with sensitivity and specificity for single nucleotide variant detection of 97.9% and 100%, respectively. The sensitivity for variant detection was notably better than the 88.3% achieved by whole exome sequencing (WES) using the same metrics, due to better coverage of targeted genes in the GEDi test compared to commercially available exome capture sets. Prospective testing of 192 patients with IRDs indicated that the clinical sensitivity of the GEDi test is high, with a diagnostic rate of 51%.

[0006] Thus, in a first aspect provided herein are methods for detecting a genetic variation, e.g., a mutation, in a genomic region associated with a genetic disease, e.g., a genetic eye disease, in a subject (e.g., a mammalian, preferably human, subject). The methods include contacting a sample comprising fragmented genomic DNA (gDNA) from the subject with a plurality of bait ribonucleotides, wherein each bait binds to (forms a complex with) a fragment of gDNA comprising a genomic target sequence that is within a genomic region associated with a genetic eye disease, e.g., within 5-200 nucleotides of a selected gene, region or mutation associated with a genetic eye disease; the plurality of baits comprises sufficient baits to sequence each target sequence is sequenced at least 10 times; and the plurality comprises baits that bind to mutations in at least 100, 150, 200, or 230 genes, e.g., genes listed in Table 1a, 11, or 12; enriching the sample for the bait/gDNA complexes; isolating the gDNA fragments; determining the sequences of the isolated gDNA fragments using next generation sequencing, wherein each selected mutation is sequenced at least 10 times (i.e., a Depth of Coverage of at least 10×); and comparing the determined sequences to corresponding reference sequences, thereby detecting the presence of genetic variations, e.g., mutations, in a genomic region associated with genetic eye disease in the subject.

[0007] In some embodiments, the plurality of bait oligonucleotides comprises at least 10,000 oligonucleotides, e.g., at least 15,000 or at least 18,000 bait oligonucleotides, e.g., at least 10K, 15K, 18K, or all of the bait oligonucleotides listed in Table 11.

[0008] In some embodiments, the mutations include one or more (e.g., two, three, four, five, ten, 20, 30, 40, 50 or more) mutations listed in Tables 2, 3, 4, 9, or 10.

[0009] In some embodiments, the reference sequences include the normal (i.e., wild-type or non-mutated sequence, or non-disease associated) sequence, and wherein differences between the subject's genomic sequences and normal reference sequences indicate the presence of mutations, e.g., disease causing mutations, and identity between the subject's genomic sequences and normal reference sequences indicate the absence of mutations, e.g., the absence of disease causing mutations.

[0010] In some embodiments, the reference sequences include the mutant (i.e., a known mutation associated with eye disease) sequences, and wherein identity between the subject's genomic sequences and mutant reference sequences indicate the presence of mutations, e.g., disease causing mutations, and differences between the subject's genomic sequences and mutant reference sequences indicate the absence of mutations, e.g., the absence of disease causing mutations.

[0011] Depth of coverage is determined by the number of times a region of interest is sequenced, counting duplicate reads only once. See FIGS. 6A-6C for a schematic illustration. In some embodiments, sequence of each selected mutation at least 10 times (i.e., a Depth of Coverage of at least 10×) is obtained by one or more of: (1) stochastically increasing the number of baits per target; (2) near-target capture, using bait sequences up to 75 bp away from the mutation of interest; and/or (3) tiling the baits such that numerous overlapping baits target the same region.

[0012] In another aspect, kits are provided herein for use in a method described herein, e.g., for detecting a mutation in a genomic region associated with a genetic eye disease in a subject. The kits can include a plurality of bait ribonucleotides, wherein each bait is complementary to a genomic target sequence that is within a genomic region associated with a genetic eye disease, e.g., within 5-200 nucleotides of a selected gene, region or mutation associated with a genetic eye disease; the plurality of baits comprises sufficient baits to sequence each target sequence is sequenced at least 10 times; and the plurality comprises baits that bind to regions in at least 100, 150, 200, or 230 genes, e.g., genes listed in Table 1a, 11, or 12; reagents for enriching the sample for the bait/gDNA complexes; reagents for isolating the gDNA fragments; and reagents for determining the sequences of the isolated gDNA fragments using next generation sequencing.

[0013] In some embodiments, the plurality of bait oligonucleotides comprises at least 10,000 oligonucleotides, e.g., at least 15,000 or at least 18,000 bait oligonucleotides, e.g., at least 10K, 15K, 18K, or all of the bait oligonucleotides listed in Table 11.

[0014] In some embodiments, the target regions include one or more (e.g., two, three, four, five, ten, 20, 30, 40, 50 or more) genes or regions listed in Tables 2, 3, 4, 9, or 10.

[0015] Unless otherwise defined, all technical and scientific terms used herein have the same meaning as commonly understood by one of ordinary skill in the art to which this invention belongs. Methods and materials are described herein for use in the present invention; other suitable methods and materials known in the art can also be used. The materials, methods, and examples are illustrative only and not intended to be limiting. All publications, patent applications, patents, sequences, database entries, and other references mentioned herein are incorporated by reference in their entirety. In case of conflict, the present specification, including definitions, will control.

[0016] Other features and advantages of the invention will be apparent from the following detailed description and figures, and from the claims.

### REFERENCE TO SEQUENCE LISTING

[0017] This application includes a sequence listing filed herewith electronically. The entire content of this file is hereby incorporated by reference.

### DESCRIPTION OF DRAWINGS

[0018] FIGS. 1A-B. (A) Analysis of empiric GEDi data shows that design gaps ≤75 bp were relatively well covered by “near-target” capture. (B) Representative Depth-of-Coverage (DoC) plot for a 12×-multiplexed capture sample using the custom GEDi targeted enrichment kit manufactured by Agilent Technologies, Inc. and 2×121 bp paired-end sequenced using a MiSeq next-generation sequencing (NGS) instrument manufactures by Illumina, Inc.

[0019] FIGS. 2A-C. (A) Integrative Genomics Viewer (IGV) screenshot of representative GEDi NGS validation data at chr15:78397352. The Omni 2.5 SNP data were determined to be incorrect in all samples due to a single base deletion adjacent to the interrogated base that shifted the analyzed base. (B) IGV screenshot of the putative c.1028T>G mutation of FSCN2 in OGI-267-573, clarifying the false positive variant call was due to misalignment of some NGS sequencing reads. (C) GEDi vs. Omni 2.5 concordance histogram plot corresponding to the 2,443 shared SNPs between the GEDi design and Omni 2.5 SNP microarray design for all 36 replicates of the 4 validation samples used in this study. KEY: MATCH-13 All GEDi NGS replicates matched Omni 2.5 SNP data; NO CALL-13 no NGS result; NO MATCH—≥1 NGS replicate did not match Omni 2.5 SNP data; OMNI NO VALUE—no Omni 2.5 SNP result; NO CALL/MATCH—≥1 NGS replicate had no result; all other NGS replicates matched Omni 2.5 SNP data.

[0020] FIG. 3. Comparison of V4+UTR WES and GEDi capture baits at the 5′-end of ABCC6. The ABCC6 reference used is a “collapsed” reference that accounts for all known gene isoforms.

[0021] FIG. 4. SAMtools view of incorrect Platinum alignments. View of individual GEDi sequence reads at position chr17:21311916 showing 4 haplotypes (numbered on right), consistent with incorrect alignment of at least some of the reads to this location.

[0022] FIGS. 5A-E Fundus Photos. A, B. Fundus photos for subject OGI-035-090, a male proband with a clinical diagnosis of cone dysfunction syndrome. Fundus exam showed normal optic nerves (ON) and retinal blood vessels, with bull's eye patterns detected in the maculae (arrows; panels A, C). The retinal peripheries were normal (not shown). C, D. Fundus photos for subject OGI-019-047, a female who presented at age 5 with peripheral field loss and nyctalopia. Fundus exam showed regions of chorioretinal atrophy (*) near the vascular arcades and optic nerves. ON, optic nerve. E, F. Fundus photos for subject OGI-314-749, a 31-year old with a history of renal disease and RP. Fundus exam showed pigment mottling in the maculae (arrows), early atrophic changes in the retina, with bone spicule pigmentation noted (arrow heads). ON, optic nerve.

[0023] FIGS. 6A-6C are schematics illustrating the concept of Depth of Coverage (DoC) and Breadth of Coverage (BoC). In 6A, 16 different sequencing reads included the boxed nucleotide, so the DoC in this case is 16. In 6B, 5 duplicate reads are present; they are all counted as one, so the DoC in this case is 12. In 6C, the Breadth of Coverage=100%, and the average DoC≅5×.

### DETAILED DESCRIPTION

[0024] It is increasingly desirable to obtain genetic diagnoses for patients with genetic eye disorders, as this information can influence patient care by both informing genetic risk assessment and identifying patients who would benefit from novel gene-based therapies¹⁷⁻²¹.

[0025] Next-generation sequencing (NGS) based testing methods are increasingly being used for genetic diagnostic testing. This is especially true for genetically heterogeneous disorders, such as inherited retinal degenerations (IRDs), hearing loss, cardiomyopathies, mitochondrial disorders and cancer¹⁻⁴. There are multiple advantages to these approaches, including the ability to simultaneously sequence many genes and to quantify allele frequency^{1,3,5,6}. The Next-generation Sequencing: Standardization of Clinical Testing (Nex-StoCT) workgroup of the CDC and the American College of Medical Genetics and Genomics (ACMG) have issued guidelines for clinical laboratory standards for NGS-based testing methods, which include determination of test accuracy, analytical sensitivity and specificity, reproducibility and repeatability^{7,8}. Defining these test characteristics is important, and despite the increased use of NGS-based tests in Clinical Laboratory Improvement Amendments (CLIA) and/or College of American Pathologists (CAP) certified laboratories^{3,6,9}, the sensitivity, specificity and reproducibility of these techniques have been defined for only a small subset of tests^{1,5,10}.

[0026] We developed a targeted enrichment and NGS approach for genetic diagnostic testing of patients with inherited eye disorders, including IRDs, optic atrophy and glaucoma, with improved accuracy, sensitivity and specificity, reproducibility and repeatability and/or clinical sensitivity as compared to previously reported uses of NGS techniques for genetic diagnostic testing of patients with IRDs, optic atrophy, and glaucoma²²⁻²⁶.

[0027] Our results suggest that selective targeted enrichment and NGS is the preferred method for diagnostic testing, especially for genetically heterogeneous disorders such as IRDs. The GEDi test has improved sensitivity when compared to WES while maintaining nearly perfect specificity. Our results show that the higher sensitivity of the GEDi test is due to improved probe design compared to the commercially available V4+UTR exome capture set (Agilent Technologies, Inc.) where probes were missing for approximately 10% of the regions targeted by the GEDi test. While the concept that targeted sequencing can out-perform standard exome sequencing based on better coverage has been discussed in reviews and commentaries regarding genetic diagnostic testing, only limited empiric comparisons of these two approaches to genetic diagnostic testing have been previously reported^{3,10,34}. Thus, while WES is now available as a clinical diagnostic test at some centers, and reports of using WES for diagnostic testing have been published, quantitation of the performance characteristics of the GEDi test makes it possible to identify and quantify the advantages of selective targeted enrichment over WES^{6,35,36} .

[0028] There are additional advantages of selective enrichment (or panel tests) over WES for diagnostic testing. The turn-around-time for the GEDi panel test run on a MiSeq NGS platform is approximately 1 day, which is considerably less than WES samples run on a HiSeq 2000 instrument (˜12 days). The current costs of selective exon capture tests are also lower than WES, although it is likely that this difference will continue to diminish over time. At present (August 2014), the cost of the materials needed for GEDi testing per patient is approximately $430, compared to $1,325 per patient for WES using the sequence depth described. In addition, panel testing has a higher pre-test probability of finding a meaningful result, and reduces the potential for making incidental sequence findings, which can be challenging for both health care providers and patients^{37,38}.

[0029] Some hybridization-based capture approaches are subject to limitations by “design gaps”: genomic regions where it is not possible to design targeted enrichment probes. Specifically, design gaps are commonly associated with genome regions with high GC content and/or repetitive nonunique elements that can be resistant to accurate capture probe design³. Fortunately, based on the data obtained for the GEDi test, near-target sequence coverage limits this problem to gaps larger than 75 bp, which significantly reduces this problem. It is also possible to use alternative approaches to capture regions in hybridization design gaps, including amplification-based strategies such as Agilent Technologies' HaloPlex technique³⁹.

[0030] Sufficient sequence depth is also needed to make accurate base calls from the NGS data. For GEDi we showed that a minimum depth of coverage of 10× gave a specificity of 100%. Even with sufficient depth of coverage, misalignment of short NGS reads can lead to incorrect base identification, especially for repetitive regions or genes with paralogous copies elsewhere in the genome, which we observed in both the GEDi and WES data. Until longer sequencing reads become routinely available, this is likely to remain a problem; however, familial segregation studies and Sanger validation of likely pathogenic alleles can be useful to resolve these discrepancies.

[0031] We carefully evaluated the overall performance characteristics of the GEDi test and showed that the test is both sensitive and specific and is highly reproducible and accurate. Thorough analyses of these test characteristics have been reported for one other NGS-based diagnostic test, a targeted enrichment and NGS-based test for 25 genes associated with cancer called the WUCaMP assay⁵. The sensitivity and specificity of the WUCaMP assay were determined by comparing test data with WGS data from Complete Genomics for HapMap sample NA19240. For these studies, the test samples were sequenced to a high depth of coverage, with 96.9% of the targeted regions covered at ≥50× depth. The reported sensitivity and specificity for detecting SNVs were 98.3% and 100%, respectively⁵. The sensitivity and specificity of the GEDi test for SNV detection are comparable, at 96.4% to 97.9% and 99.9% to 100%, respectively, with an overall accuracy for both the SNPs and indels of 99.9%. We also showed that the GEDi test is highly repeatable and reproducible, with kappa statistics of 0.83088 and 0.76366, respectively, indicating excellent agreement between the data obtained in the replicate testing of the 4 individual DNA samples³².

[0032] The clinical sensitivity of the GEDi test was 51% in patients with IRDs, a rate that is consistent with prior reports²²⁻²⁶. It is hypothesized that subjects without mutations in GEDi target genes must have mutations in novel disease genes, or in non-coding portions of the currently identified IRD disease genes. Exome and genome sequencing will be required for identifications of these mutations. It is also possible that some subjects have mutations that cannot be readily detected by sequencing-based approaches, such as copy number variations (CNVs)^{25,40}.

[0033] Comprehensive genetic diagnostic testing for genetically and phenotypically heterogeneous disorders such as IRDs can also lead to diagnoses outside of the reported genotype-phenotype relationships. Seven of the patients with genetic diagnoses had atypical phenotypic features confirming that it can be difficult to predict the genetic cause of disease based on clinical findings alone²⁶.

[0034] In summary, the GEDi test offers a number of advantages as a clinical diagnostic test for patients with inherited eye disorders. Given the potential for gene-based therapies for inherited disorders in general, and inherited eye disorders specifically, genetic diagnostic testing will increasingly be necessary for optimal care of patients with genetic diseases. Further, the GEDi test statistics make a strong case for the use of targeted tests in the clinical setting, as they are highly accurate, reproducible and have better overall performance than more general tests such as conventional WES analyses.

[0035] Methods of Detecting Genetic Eye Disease

[0036] The methods described herein can be used to identify, and optionally treat, subjects with genetic eye disease. The methods include obtaining a sample comprising genomic DNA from a subject, e.g., a subject suspected of having a genetic eye disease. Samples that are suitable for use in the methods described herein contain genetic material, e.g., genomic DNA (gDNA). Genomic DNA is typically extracted from biological samples such as blood or mucosal scrapings of the lining of the mouth, but can be extracted from other biological samples including urine or expectorant. The sample itself will typically include nucleated cells (e.g., blood or buccal cells) or tissue removed from the subject. The subject can be an adult, child, fetus, or embryo. In some embodiments, the sample is obtained prenatally, either from a fetus or embryo or from the mother (e.g., from fetal or embryonic cells in the maternal circulation). Methods and reagents are known in the art for obtaining, processing, and analyzing samples. In some embodiments, the sample is obtained with the assistance of a health care provider, e.g., to draw blood. In some embodiments, the sample is obtained without the assistance of a health care provider, e.g., where the sample is obtained non-invasively, such as a sample comprising buccal cells that is obtained using a buccal swab or brush, or a mouthwash sample.

[0037] In some cases, a biological sample may be processed for DNA isolation. For example, DNA in a cell or tissue sample can be separated from other components of the sample. Cells can be harvested from a biological sample using standard techniques known in the art. For example, cells can be harvested by centrifuging a cell sample and resuspending the pelleted cells. The cells can be resuspended in a buffered solution such as phosphate-buffered saline (PBS). After centrifuging the cell suspension to obtain a cell pellet, the cells can be lysed to extract DNA, e.g., gDNA. See, e.g., Ausubel et al., 2003, supra. The sample can be concentrated and/or purified to isolate DNA. All samples obtained from a subject, including those subjected to any sort of further processing, are considered to be obtained from the subject. Routine methods can be used to extract genomic DNA from a biological sample, including, for example, phenol extraction, or cell lysis followed by salt-precipitation methods. Alternatively, genomic DNA can be extracted with kits such as the QIAamp® Tissue Kit (Qiagen, Chatsworth, Calif.) and the Wizard® Genomic DNA purification kit (Promega). In some embodiments, the sample is blood, e.g., venous blood, and a method in which the cells are lysed with an anionic detergent in the presence of a DNA stabilizer and then a modified salting-out precipitation method is used for purification of DNA, e.g., with the Gentra Puregene Blood Kit (Qiagen).

[0038] The genomic DNA (gDNA) is then optionally fragmented, e.g., using mechanical (e.g., repeatedly passing the sample through a needle), high-performance liquid chromatography (HPLC) pump, nebulization, sonication, or hydrodynamic shearing using a filter screen with uniform pores. In preferred embodiments, the gDNA is fragmented into random pieces about 150-300 nts in length, e.g., about 200-250 nts in length, e.g., using a Covaris E220 ultrasonicator tuned to shear the gDNA to between 200-250 bp.

[0039] The fragmented DNA is then subjected to targeted enrichment, wherein fragments comprising sequences of interest are captured using complementary RNA bait sequences. See, e.g., Gnirke et al., Nat Biotechnol. 2009 February; 27(2):182-9. The baits are about 100-150 nts long, e.g., 115-125 bp, preferably 120 bp long, and are complementary to coding and select intronic regions, e.g., regions within 10-200, e.g., 10-75, nucleotides of a selected gene or intron that is known or suspected to be associated with eye disease (e.g., associated with IRD, optic atrophy, and glaucoma disease genes (described/listed previously). Such mutations can be identified, e.g., by reference to prior publication, or by empirical observation, and can include those regions described herein in Table 11. The baits provide sufficient coverage that every base within the targeted regions can be sequenced to a depth of coverage (DoC) of at least 10×, and in some embodiments provide coverage of the genes' entire coding regions. The baits are preferably identified by a method described herein and sufficient DoC (e.g., at least 10×) is obtained for every region of interest, e.g., in regions in which a design gap exists, by one or more of (1) stochiometrically increasing the number of baits per target region; (2) near-target capture, using bait sequences up to 75 bp adjacent to the region of interest; and (3) tiling the baits such that numerous overlapping baits target the same region.

[0040] The bait/gDNA complexes are isolated from the sample using methods known in the art, e.g., as described in Gnirke et al., Nat Biotechnol. 2009 February; 27(2):182-9. For example, the bait can be labeled with a bead such as a magnetic bead, or can be bound to a surface such as a bead, e.g., a magnetic bead, using known methods. For example, biotin-conjugated capture probes can be bound onto a streptavidin-coated surface, e.g., a streptavidin coated beads, e.g., magnetic beads. Fragments not containing sequences of interest (i.e., not bound to a bait) are removed from the sample, e.g., by washing, and/or fragments containing sequences of interest (i.e., bound to a bait) are removed from the sample, e.g., by concentration using an appropriate method, e.g., magnetism. The bait/gDNA complexes are then dissociated, e.g., using high salt conditions.

[0041] The gDNA fragments are then sequenced in parallel (e.g., are all sequenced at substantially the same time), preferably using massively parallel next-generation DNA sequencing methods. A number of such methods are known, and include Illumina sequencing (e.g., using a HiSeq or MiSeq system), Roche 454 sequencing, Ion torrent and Ion proton sequencing. The sequences are analyzed and aligned using computer-based methods to determine the subject's genomic sequence, and compared to appropriate reference sequences, e.g., reference sequences comprising areas with known mutations associated with eye disease. The reference sequences can include the normal (i.e., wild-type or non-mutated sequence, or non-disease associated sequence) and/or the mutant (i.e., a known mutation associated with eye disease) sequences. In some embodiments, the normal sequences are obtained from the most recent version of the reference genome, e.g., as described in Falk et al., Nature Genetics. Jul. 29, 2012; 44(9):1040-1045. Differences between the subject's genomic sequences and normal reference sequences indicate the presence of genetic mutations (i.e., variants), of which some variants are disease-causing mutations. Identity between the subject's genomic sequences and mutant reference sequences indicate the presence of mutations, e.g., disease causing mutations. Differences between the subject's genomic sequences and mutant reference sequences indicate the absence of mutations, e.g., the absence of disease causing mutations. Identity between the subject's genomic sequences and normal reference sequences indicate the absence of mutations, e.g., the absence of disease causing mutations.

[0042] Once a subject is identified as having one or more mutations known to be associated with eye disease, the subject can be treated for the disease. For example, a subject who is identified as having a genetic eye disease can be treated using gene therapy to correct the identified defect (e.g., as described in Maguire et al., New England Journal of Medicine. May 22, 2008; 358(21):2240-2248), or can be treated using conventional pharmacological or surgical methods for the disease detected.

[0043] For some patients with inherited retinal degenerations, high dose vitamin A supplementation may reduce the rate of disease progression (Berson et al., Arch Ophthalmol. 2012 Feb. 13). See, e.g., Pierce, Masland, Miller, eds. Retinal Disorders: Genetic Approaches to Diagnosis and Treatment. Cold Spring Harbor: Cold Spring Harbor Laboratory Press, 2014.

[0044] Kits

[0045] Also within the scope of the invention are kits comprising baits that hybridize with regions of genes as described herein and can be used to detect a mutation described herein. The kit can include one or more other elements including: instructions for use; and other reagents, e.g., magnetic beads for isolating the bait/gDNA complexes from the sample. Instructions for use can include instructions for diagnostic applications of the probe for predicting response to treatment in a method described herein. Other instructions can include instructions and reagents for fragmenting gDNA, for isolating the bait/gDNA complexes, for dissociating the bait/gDNA complexes, and/or instructions for obtaining a sample to be analyzed from a subject.

[0046] Devices and reagents for use in obtaining the sample can also be provided. For example, test kits can include devices and instructions that a health care provider or a subject can use to obtain a sample, e.g., of sputum, buccal cells, or blood. For example, buccal cells can be obtained using a buccal swab or brush, or using mouthwash.

[0047] Kits as provided herein can also include a mailer, e.g., a postage paid envelope or mailing pack, that can be used to return the sample for analysis, e.g., to a laboratory. The kit can include one or more containers for the sample, or the sample can be in a standard blood collection vial. The kit can also include one or more of an informed consent form, a test requisition form, and instructions on how to use the kit in a method described herein. Methods for using such kits are also included herein. One or more of the forms, e.g., the test requisition form, and the container holding the sample, can be coded, e.g., with a bar code, for identifying the subject who provided the sample.

[0048] In some embodiments, the kits can include one or more reagents for processing a sample. For example, a kit can include reagents for isolating gDNA from a sample. The kits can also, optionally, contain one or more reagents for performing next-generation sequencing of the target-enriched sample.

[0049] In some embodiments, the kits can include a software package for analyzing the results.

### EXAMPLES

[0050] An exemplary embodiment of the invention (the Genetic Eye Disease (GEDi) test) is further described in the following examples, which do not limit the scope of the invention described in the claims.

[0051] Materials and Methods

[0052] The following materials and methods were used in the examples set forth herein.

[0053] Patient Samples

[0054] The clinical study was approved by the institutional review boards of the University of Pennsylvania and the Massachusetts Eye and Ear Infirmary, and conformed to the tenets of the Declaration of Helsinki. Informed consent was obtained from all participants, who were recruited after having been identified to have a form of inherited retinal degeneration following clinical evaluation by EAP or ABF at Mass Eye and Ear or Children's Hospital Boston, respectively. Genomic DNA (gDNA) was extracted from patient blood using the PreAnalytiX (QIAGEN/BD Biosciences; Valencia, Calif.) PAXgene Blood DNA Kit (PAXgene Blood DNA Kit Handbook, October 2009) or DNAzol (Life Technologies, Carlsbad, Calif.).

[0055] Targeted Enrichment

[0056] i. Targeted Enrichment Bait Library Design

[0057] The custom SureSelect targeted enrichment GEDi capture kit (Agilent Technologies, Inc., Santa Clara, Calif.) was designed to capture and enrich coding exons, 5′-/3′-UTRs, and select deep intronic regions known to harbor pathogenic mutations, associated with the 214 known IRD disease genes described in the Retinal Information Network database (RetNet; sph.uth.edu/Retnet/) up to April 2013, as well as 8 early-onset glaucoma and optic atrophy genes, using Agilent Technologies' eArray web design tool (earny.chem.agilent.com/earray/). The GEDi capture kit also includes 24 candidate IRD disease genes, 9 age-related macular degeneration risk factor genes, and 1 non-syndromic hearing loss gene. Additional information regarding the parameters used for GEDi capture kit design is below. The custom mitochondrial genome targeted enrichment baits we designed previously were also included as part of the GEDi capture kit²⁷. Complete lists of the GEDi targeted genes and intronic regions are shown in Tables 1a and 1b, respectively.

[0058] ii. Capture Library Sample Preparation

[0059] Illumina-compatible paired-end/multiplexable GEDi targeted enrichment capture libraries were generated as described, using the following parameters: a) no less than 1.5 mcg of sheared gDNA was used for pre-capture library generation; b) 5-cycles of pre-capture PCR were used for all samples; c) no less than 400 ng of pre-capture library was used during bait hybridizations; d) 14-cycles of post-capture PCR were used to generate all capture libraries; e) all samples were post-capture indexed; and f) sample multiplex ratios were determined based on post-capture indexed sample concentrations (Agilent methods, part no.: G7530-90000; Protocol v2.1, May 2011).

[0060] NGS Analysis

[0061] GEDi targeted enrichment sample sequencing was performed on an Illumina MiSeq NGS platform (Illumina, Inc., San Diego, Calif.). A 12× patient sample multiplex was clustered to an average cluster density of between 750-900 K clusters per mm² and 121×6×121 bp indexed/paired-end analyzed using Illumina's 300 cycle MiSeq Reagent Kit V2.

[0062] Informatics Analyses

[0063] Analysis of the sequence data obtained was performed using a combination of publically available and custom software tools, as described²⁸. Briefly, BWA (version 0.6.2-r126) was used to align the sequence reads to the human reference genome used by the 1000 Genomes Project. SAMtools (version 0.1.18 or r982:295) was used to remove potential duplicates, and make initial SNP and indel calls, which were refined using a custom program²⁸. A coverage depth cutoff of 10× was applied. Resulting variant calls were annotated using our custom human bp codon resource²⁸. Custom scripts were also developed and used to identify candidate variants that fit different filtering criteria, such as genetic models. Variants that fit the appropriate inheritance patterns, and were rare based on data from the 1000 Genomes Project, the NHLBI Exome Sequencing Project Exome Variant Server, and our own internal controls were considered to be potentially pathogenic. See the Supplementary Methods section for additional information.

[0064] GEDi Capture Kit Design

[0065] To design the GEDi capture kit using Agilent Technologies' eArray web design tool (earray.chem.agilent.com/earray/) the RefSeq CDS exon and 5′-/3′-UTR coordinates corresponding to the genes in Table 1a were queried and downloaded from the UCSC Genome Bioinformatics site (genome.ucsc.edu/). Alternatively, the genomic coordinates corresponding to the deep intronic variants identified in Table 1b were expanded to include ±5 bp flanking either side of the variant (totaling 11 bp) prior to being included with the CDS exon and 5′-/3′-UTR gene coordinates for targeted enrichment bait design. Targeted enrichment coordinates were sorted into two groups: 1) those corresponding to targets ≥121 bp, and 2) those corresponding to targets ≤120 bp. The ≥121 bp group was submitted to eArray under the following design conditions: Platform: Illumina Long Read (75+ bp); Tiling: 2× and Justified; 5′-/3′-target flanking regions: ±10 bp; Masking: Moderately Stringent. The 120 bp group (i.e. “orphan” bait group; coordinate size is ≤the length of a 120 bp capture bait, so only one bait—an “orphan bait”—can be designed against the region) was submitted to eArray under the following design conditions: Platform: Illumina Long Read (75+ bp); Tiling: 1× and Centered; 5′-/3′-target flanking regions: ±20 bp; Masking: Moderately Stringent.

[0066] The resulting .fate files were sorted based primarily on the number of baits designed in the coordinate region and secondarily on the percentage of the coordinate region covered. Regions with zero baits designed and/or ≤75% covered were resubmitted to eArray according to the above design conditions save that the Masking function was turned off. In order to avoid “bait poisoning” during the capture reaction (i.e. preferential capture of non-unique DNA sequences versus the unique targeted regions), the uniqueness of the resulting non-masked baits were determined using UCSC's Batch BLAT tool. Baits that had a homology score (homology score bases match—(bases mismatch+#gaps))≥40 were included in the bait final bait group; those that did not were discarded. Finally, orphan bait replicates were increased two-fold as a means of avoiding a capture bias resultant from an imbalanced 2×-tiled region v. 1×-tiled region bait ratio (i.e. equivalent to the ≥121 bp tiling frequency of 2×). Additional information regarding the capture baits used in the GEDi test is in Table 11.

TABLE 1a
The list of genes and regions targeted in the GEDi capture set.

| | | | | | | | |
|---|---|---|---|---|---|---|---|
| ABCA4 | CAPN5 | DNAH10* | IFT80 | NDP | PDE6H | RGS9 | TPP1 |
| ABCC6 | CC2D2A | DNAH9* | IFT88* | NEK4* | PDZD7 | RGS9BP | TREX1 |
| ABHD12 | CDH23 | EFEMP1 | IKGKB* | NEK8 | PEX1 | RHO | TRIM32 |
| ADAM9 | CDH3 | ELOVL4 | IMPDH1 | NIM1* | PEX10 | RIMS1 | TRPC1* |
| AHI1 | CDHR1 | ELP4 | IMPG2 | NMNAT1 | PEX14 | RLBP1 | TRPM1 |
| AIPL1 | CEP164 | ERCC6^{@} | INPP5E | NPHP1 | PEX16 | ROM1 | TRPM2* |
| AKAP9* | CEP290 | EYS | INVS | NPHP3 | PEX19 | RP1 | TSPAN12 |
| ALMS1 | CEP41 | FAM161A | IQCB1 | NPHP4 | PEX2 | RP1L1 | TTC21B |
| APOE\hat{ } | CERKL | FBLN5^{@} | ITM2B | NR2E3 | PEX5 | RP2 | TTC8 |
| ARL13B | CFB^{@} | FLVCR1 | JAG1 | NRL | PEX6 | RP9* | TTPA |
| ARL6 | CFH | FOXC1⁺ | KCNJ12* | NUB1* | PEX7 | RPE65 | TULP1 |
| ARMS2^{@} | CHM | FSCN2 | KCNJ13 | NXNL1* | PGK1 | RPGR | TYR |
| ATXN7 | CIB2 | FZD4 | KCNV2 | NYX | PHYH | RPGRIP1 | TYRP1 |
| BBS1 | CLN3 | GJB2^{#} | KCTD7 | OAT | PITPNM3 | RPGRIP1L | UNC119 |
| BBS10 | CLN5 | GNAT1 | KIF11 | OCA2 | PITX2⁺ | RS1 | USH1C |
| BBS12 | CLN6 | GNAT2 | KLHL7 | OFD1 | PLA2G5 | SAG | USH1G |
| BBS2 | CLN8 | GNB1* | LCA5 | OPA1+ | PPT1 | SDCCAG8 | USH2A |
| BBS4 | CLRN1 | GNPTG | LRAT | OPA3 | PRCD | SEMA4A | VCAN |
| BBS5 | CNGA1 | GPR143 | LRIT3 | OPN1LW | PRKACA* | SLC24A1 | VPS13B |
| BBS7 | CNGA3 | GPR179 | LAPS | OPN1MW | PROM1 | SLC45A2 | WASF3* |
| BBS9 | CNGB1 | GPR98 | LTBP2⁺ | OPN1SW | PRPF3 | SLC4A5* | WDPCP |
| BEST1 | CNGB3 | GRK1 | LZTFL1 | OPTN⁺ | PRPF31 | SNRNP200 | WDR19 |
| C1QTNF5 | CNNM4 | GRM6 | MAK | OSMR* | PRPF6 | SPATA7 | WDR65* |
| C2^{@} | COL11A1 | GRN | MERTK | OTX2 | PRPF8 | TEAD1 | WFS1 |
| C2orf71 | COL2A1 | GUCA1A | MFN2 | PANK2 | PRPH2 | TIMM8A | ZNF423 |
| C3^{@} | COL9A1 | GUCA1B | MFRP | PAX2 | RAB28 | TIMP3 | ZNF513 |
| C5orf42 | CRB1 | GUCY2D | MFSD8 | PAX6⁺ | RAX2* | TLR3^{@} | |
| C8orf37 | CRX | HARS | MICALCL* | PCDH15 | RBP3 | TLR4^{@} | Mito- |
| CA4 | CTCF* | HMCN1^{@} | MKKS | PDE6A | RBP4 | TMEM126A | chondrial |
| | | | | | | | Genome |
| CABP4 | CYP1B1⁺ | HTRA1^{@} | MKS1 | PDE6B | RD3 | TMEM231 | |
| CACNA1F | CYP4V2 | IDH3B | MTTP | PDE6C | RDH12 | TMEM237 | |
| CACNA1H* | DFNB31 | IFT140 | MYO7A | PDE6D* | RDH5 | TMEM67 | |
| CACNA2D4 | DHDDS | IFT172 | MYOC⁺ | PDE6G | RGR | TOPORS | |

Notes:
⁺Early onset-Glaucoma and Optic Nerve Atrophy genes,
*inherited eye disease candidate gene,
^{@}AMD risk factor gene (genes that also are reported to have roles in inherited retinal disorders, such as ABCA4 and CFH are not included in this category),
^{#}non-syndromic hearing loss gene,
\hat{ }No longer in RetNet (previously identified as AMD risk factor gene).

TABLE 1b
GEDi Targeted Enrichment Deep Intronic Variant List

| | Accession | | | | |
|---|---|---|---|---|---|
| Gene | Number | Position | Mutation | Source | Reference |
| USH2A | NM_ 206933.2 | chr1:216064540 | c.7595 − 2144A > G | PubMed | Vache (2012) Hum |
| | | | | | Mutat 33, 104 |
| ERCC6 | NM_000124.2 | chr10:50681659 | c.2599 − 26T > C | HGMD | Laugel (2009) Hum |
| | | | | | Mutat 31, 113 |
| ERCC6 | NM_000124.2 | chr10:50681663 | c.2599 − 30A > G | HGMD | Troelstra (1992) |
| | | | | | Cell 71, 939 |
| BBS1 | NM_024649.4 | chr11:66291105 | c.951 + 58C > T | HGMD | Abu Safieh (2010) J |
| | | | | | Med Genet 47, 236 |
| MYO7A | NM_000260.3 | chr11:76893448 | c.3109 − 21G > A | HGMD | Janecke (1999) Hum |
| | | | | | Mutat 13, 133 |
| COL2A1 | NM_001844.4 | chr12:48370512 | c.3435 + 83G > C | HGMD | Richards (2012) Eur J |
| | | | | | Hum Genet 20, 552 |
| COL2A1 | NM_001844.4 | chr12:48370516 | c.3435 + 79T > A | HGMD | Richards (2012) Eur J |
| | | | | | Hum Genet 20, 552 |
| COL2A1 | NM_001844.4 | chr12:48380015 | c.1527 + 104A > C | HGMD | Richards (2012) Eur J |
| | | | | | Hum Genet 20, 552 |
| COL2A1 | NM_001844.4 | chr12:48379984 | c.1527 + 135C > T | HGMD | Richards (2006) Hum |
| | | | | | Mutat 27, 696 |
| CEP290 | NM_025114.3 | chr12:88494960 | c.2991 + 1655T > C | HGMD | den Hollander (2006) |
| | | | | | Am J Hum |
| | | | | | Genet 79, 556 |
| OFD1 | NM_003611.2 | chrX:13768358 | c.935 + 706A > G | PubMed | Webb (2012) Hum Mol |
| | | | | | Genet 15, 3647 |
| CHM | NM_000390.2 | chrX:85223644 | c.315 − 4587A > T | HGMD | van den Hurk (2003) |
| | | | | | H Genet 113, 268 |

TABLE 12
Subsets of genes related to genetic eye disease.

| Category | Genes (RefSeq Aliases (for UCSC); v5.0) |
|---|---|
| RetNet <= v2.1 | ABCA4; AHI1; AIPL1; ALMS1; ARL13B; ARL6; ATXN7; BBS1; |
| (FOUNDATION) Genes | BBS10; BBS12; BBS2; BBS4; BBS5; BBS7; BBS9; BEST1; |
| | C1QTNF5; C2ORF71; CA4; CABP4; CACNA1F; CACNA2D4; |
| | CC2D24; CDH23; CDH3; CEP164; CEP290; CERKL; CHM; |
| | CLN3; CLRN1; CNGA1; CNGA3; CNGB1; CNGB3; CNNM4; |
| | VPS13B; COL11A1; COL2A1; COL9A1; CRB1; CRX; CYP4V2; |
| | DFNB31; DHDDS; EFEMP1; ELOVL4; ERCC6; EYS; FAM161A; |
| | FLVCR1; FSCN2; FZD4; GNAT1; GNAT2; GNB1; GPR98; GRK1; |
| | GRM6; GUCA1A; GUCA1B; GUCY2D; IDH38; IFT80; IMPDH1; |
| | IMPG2; INVS; IQCB1; JAG1; KCNJ13; KCNV2; KLHL7; LCA5; |
| | LRAT; LRP5; MERTK; MFRP; NIM1; MKKS; MTTP; MYO7A; |
| | NDP; NEK4; NEK8; NPHP1; NPHP3; NPHP4; NR2E3; NRL; |
| | NUB1; NYX; OAT; OPA1; OPA3; OPN1LW; OPN1MW; |
| | OPN1SW; PANK2; PCDH15; CDHR1; PDE6A; PDE6B; PDE6G; |
| | PDZD7; PEX1; PEX10; PEX14; PEX16; PEX19; PEX2; PEX5; |
| | PEX6; PEX7; PHYH; PITPNM3; PRCD; PRKACA; PROM1; |
| | PRPF3; PRPF31; PRPF6; PRPF8; PRPH2; RAX2; RBP3; RBP4; |
| | RD3; RDH12; RDH5; RGR; RGS9; RGS9BP; RHO; RIMS1; |
| | RLBP1; ROM1; RP1; RP1L1; RP2; RP9; RPE65; RPGR; |
| | RPGRIP1; RPGRIP1L; RS1; SAG; SDCCAG8; SEMA4A; |
| | SLC24A1; SLC4A5; SNRNP200; SPATA7; TEAD1; TIMP3; |
| | TMEM126A; TMEM67; TOPORS; TRIM32; TRPC1; TRPM1; |
| | TRPM2; TSPAN12; TTC21B; TTC8; TULP1; UNC119; USH1C; |
| | USH1G; USH2A; VCAN; WFS1; ZNF513; CTCF; GPR143; |
| | OCA2; SLC45A2; TYR; TYRP1 |
| RetNet v2.2 UPDATE | C8orf37; GNPTG; MAK; PLA2G5; TMEM237; WDPCP; |
| | WDR19 |
| “RetNet v3.1 UPDATE | NMNAT1; CYP1B1; PAX6; FOXC1; PITX2; MYOC; OPTN; |
| (NMNAT1 & Glaucoma)” | OPA1 ; LTBP2 |
| RetNet v3.2 RetNet UPDATE | ABCC6; ADAM9; MKS1; OTX2; PAX2; PDE6C; TIMM8A; |
| | TREX1; TTPA; PDE6H; PDE6D; INPP5E; ABHD12; CAPN5; |
| | CIB2; NXNL1; LRIT3; WASF3; RAB28 |
| RetNet v4.0 UPDATE | MFN2; LZTFL1; HARS; KIF11; GPR179; OFD1; IFT140; IFT88; |
| | CEP41; C5orf42; ZNF423; TMEM231; PGKl; ITM2B; |
| | KIAA2026; WDR34; IFT172 |
| RetNetv 4.1 UPDATE-042513 | PPT1; TPP1; CLN5; CLN6; MFSD8; CLN8; KCTD7; GRN |

[0067] Whole Exome Sequencing

[0068] Whole exome targeted enrichment was performed with a BRAVO automated workstation (Agilent Technologies, Inc.; Santa Clara, Calif.) using the SureSelect Human V4+UTR+Mito All Exon targeted enrichment kit (Agilent) according to their standard automation protocol (Pub. No. G7550-90000, Version D.1, April 2012). This kit includes custom baits designed to capture/enrich the mitochondrial genome¹.

[0069] Next-Generation Sequencing (NGS) analysis was performed using an Illumina HiSeq 2000 NGS instrument (Illumina, Inc.; Carlsbad, Calif.). A 7 picoMolar (pM) 4-sample multiplex sample (i.e. 1.75 pM per capture library) was clustered in duplicate flow cell lanes at ˜750,000 clusters per millimeter-squared, followed by 101|7|101 bp paired-end indexed analysis.

[0070] Informatic Analyses

[0071] Following variant identification using the approach described herein, a custom program was used to further refute the SNP and indel calls. The custom program uses a false discovery rate approach to adjust raw base counts at a candidate position after Benjamini and Hochberg correction based on quality values of all bases². Resulting variant calls were annotated using our custom human bp codon resource (HBCR). The HBCR maps each base position in the human reference genome, based on Ensembl Release 65 gene annotations, to its corresponding, if any, transcripts, genes, codons, encoded amino acids, and translation frames. Additional annotations of each variant call were provided using data sets downloaded from the 1000 Genomes Project website (The 1000 Genomes Project Consortium, Nature 467,1061-1073(28 October 2010)); the NHLBI Exome Sequencing Project Exome Variant Server (EVS); and the UCSC Genome Browser³. These annotations include allele frequencies, SIFT, PolyPhen and Mutation Taster predictions, and phastCons conservation scores^{4,5}. Custom scripts were also developed and used to identify candidate variants that fit different filtering criteria, such as genetic models. The fraction of a variant base has to be between 0.25-0.75 to be called heterozygous and above 0.75 to be called homozygous. The variant frequency cutoff used was ≤0.15%, which is the frequency in the EVS of the most common recessive RP mutation in the USH2A gene [c.2276G>T; p.(Cys759Phe)]; mutations in USH2A are reported to be the most common cause of recessive RP⁶.

[0072] Variant Validation

[0073] All variants deemed likely pathogenic were validated via PCR and Sanger sequencing using standard methods^{3,7}. When possible/available, samples from proband family members were included to confirm segregation and/or bi-parental inheritance. PCR amplicons were between 350-650 bp and spanned the pathogenic variants in question. PCR products were sequenced with the BigDye Terminator v3.1 Cycle Sequencing Kit on ABI 3130×1 or 3730×1 DNA analyzers (Applied Biosystems, Foster City, Calif., USA). Sequence data were analyzed using LaserGene (DNASTAR, Inc., Madison, Wis.) and/or MacVector (MacVector, Inc., Cary, N.C.) software.

[0074] Single Nucleotide Polymorphism (SNP) Genotyping

[0075] Genomic DNA samples were prepared and hybridized using Illumina's Human Omni 2.5 v1.1 BeadChip (Omni 2 5) arrays according to standard methods (part no.: 15023139; Protocol Rev. A, April 2011). All bead arrays were analyzed using Illumina's iScan array scanner; SNP calls were made using the Genotyping module of Illumina's GenomeStudio data analysis software⁸.

[0076] Palmitoyl-Protein Thioesterase-1 (PPT1) Assay

[0077] Punches from blood spotted onto standard collection filter paper were used to assay for PPT1 activity. A one step assay using the fluorescent substrate 4-methylumbelliferyl-6-thiopalmitoyl-b-D-galactopyranoside was performed in triplicate after incubation for 20 hrs at 37° C. as previously described⁹. Fluorescence was measured on a Fluoro-Count (Packard) fluorimeter using filter settings for the released 4-methylumbelliferone (excitation 360 nm, emission 460 nm).

### Example 1. GEDi Test Design

[0078] Probes were designed for 257 genes targeted by the GEDi selective capture system as well as the mitochondrial genome, since retinal degeneration and optic atrophy can accompany mitochondrial disease²⁷. Probes for previously identified deep intronic mutations in CEP290, OFD1, and USH2A have also been included in the GEDi probe set⁷⁹⁻³¹. The targeted regions constitute 1,210,190 bp in total (703,980 bp coding sequence), and are listed in Table 1.

[0079] Probes for some of the targeted regions could not be designed due to the presence of repetitive or non-unique sequence elements. In total, there were 688 such design gaps ranging from 1-2,031 bp in length with an average length of 112 bp, accounting for a total of 76,980 bp (9,220 bp coding sequence). Analysis of empiric GEDi data shows that design gaps ≤75 bp (67% of gaps) were relatively well covered by “near-target” capture (FIG. 1A).

### Example 2. NGS Metrics

[0080] FIG. 1B shows a representative Depth-of-Coverage (DoC) plot for a 12×-multiplexed sample captured using the GEDi targeted enrichment kit and sequenced using an Illumina MiSeq. The data shows relatively uniform coverage of the target regions. The average percentages of the target regions covered at 1× (99.8%), 10× (98.6%) and 20× (96.4%) DoC were also relatively constant for all of the sequencing analyses. The 1.4% of target regions which were not covered with ≥10× read depth included part or all of 14 exons. The overall average DoC for all samples analyzed was 98.8×±14.5×.

### Example 3. Test Performance Metrics

[0081] The Nex-StoCT and ACMG recommend that validation of an NGS-based diagnostic test include performance test characteristics for assay accuracy, analytical sensitivity and specificity, reproducibility and repeatability^{7,8}. To measure these parameters for the GEDi capture and sequencing test, 4 samples (three randomly selected patient samples and the NA12878 HapMap sample) were prepared and sequenced in triplicate on each of three separate days. We also performed WES and SNP array genotyping analyses of these 4 samples using Agilent V4+UTR whole exome enrichment kit and Illumina Omni 2.5 SNP arrays, respectively (see Methods). The HapMap sample was included as an internal control for establishing QC metrics, and is included in all diagnostic runs to evaluate each diagnostic capture and sequencing run.

### Example 4. Sensitivity and Specificity

[0082] To assess the sensitivity and specificity of the GEDi test, we used the 2,443 SNPs located in GEDi genes that are represented on Omni 2.5 SNP array, using the Omni 2.5 data as the “gold standard.” For these analyses, sensitivity was calculated as the ability of the GEDi test to correctly identify a SNP when it was identified in the Omni 2.5 data. Similarly, the specificity was calculated as the ability of the GEDi test to correctly identify the lack of a variant at a given position when reference was detected by the Omni 2.5 array⁵ (Table 13). For example, 495±1 SNPs identified in the 9 GEDi replicates for the OGI-132-357 sample (range 492-497) were also identified in the Omni 2.5 data, and these were scored as true positives (Table 13). The GEDi test did not identify variants at 10 ±1.4 positions where variants were identified in the Omni 2.5 data for OGI-132-357, and these were scored as false negatives, giving a sensitivity of 0.98 for variant detection. The GEDi test did not identify variants at any of the 1,919 SNPs with reference genotypes in the Omni 2.5 data, for a specificity of 1 (Table 13). The average sensitivity of the GEDi test, including data from the 9 replicates of all 4 samples, was 0.979±0.007, and the specificity was 1±0.

[0083] We investigated the false negative base calls in the GEDi data further and found that there were 7-11 discrepancies per sample identified between the GEDi and Omni 2.5 data (Table 14). In total, there were discrepancies detected at 23 positions that were predominantly related to the heterozygous vs. homozygous state of the same identified base, with a different base identified at only 1 position, chr15:78397352. The NGS data showed that at chr15:78397352 the Omni data were incorrect due to a single base deletion adjacent to the interrogated base, which shifted the base analyzed by the single-base extension method used in the Omni arrays (FIG. 2A). Indels were associated with 4 additional GEDi vs. Omni discrepancies, and all but one of the remaining differences were due to low SNP quality scores in the SAMtools variant identification software (Table 14). At one position (chr4:6304087), the Omni data was incorrect (confirmed by Sanger sequencing), without any evident explanation. A small number (7-10) of bases were not called in the GEDi data across all replicates (No Call, FIG. 2C), and Omni 2.5 SNP calls were not obtained for 11-19 positions (Omni No Value, FIG. 2C). Bases were scored as “No Call/Match” if 1 or more replicates for each DNA sample had no call at that position, but all other replicates matched. There were 25-45 of these bases, with many of these (55/87 total=63%) being due to no call in a single replicate (Table 2).

[0084] The accuracy of the GEDi test was also supported by comparison of the GEDi sequence data for the HapMap sample NA12878 with publically available Platinum 200× average depth WGS data for NA12878 from Illumina. Within the 1,197,667 bp in the GEDi capture regions, excluding the mitochondrial chromosome, there were 962 SNPs and 89 indels identified in the NA12878 WGS data by Illumina. The accuracy of the GEDi test to identify both the SNPs and indels was 99.9%. The sensitivity and specificity for SNP detection were 96.4% and 99.9%, and for indel detection were 91.6% and 99.9%, respectively. It is likely that the sensitivity of the GEDi test for SNP detection is even higher, as we identified 47 SNPs called in the Illumina Platinum data that are located in a highly repetitive 11 kb chr17 region (chr17:21311917-21323163) in the gene KCNJ12 that are likely to be incorrect due to poor read alignment (FIG. 4).

TABLE 2
Specific “No Call/Match” bases identified in GEDi vs Omni 2.5
comparison. Bases were scored as “No Call/Match” if 1 or more replicate for each
DNA sample had no call at that position, but all other replicates matched.

| CHROM | POS | NA12878 | OGI-132-357 | OGI-281-608 | OGI-307-717 |
|---|---|---|---|---|---|
| chr1 | 43638457 | 1/9 | | | |
| chr1 | 94473845 | | 3/9 | | |
| chr1 | 94486889 | 1/9 | | | |
| chr1 | 103463976 | 1/9 | | | 2/9 |
| chr1 | 156146218 | 1/9 | | | |
| chr1 | 186101539 | | 1/9 | 1/9 | |
| chr1 | 211652466 | | | 2/9 | |
| chr1 | 213071341 | 1/9 | | | |
| chr2 | 38302923 | | 2/9 | 3/9 | |
| chr2 | 74444431 | 1/9 | | 3/9 | |
| chr2 | 166770120 | | 1/9 | 4/9 | 1/9 |
| chr3 | 52804924 | 2/9 | 3/9 | 5/9 | 2/9 |
| chr3 | 193413502 | 4/9 | | | |
| chr4 | 652826 | | 1/9 | | |
| chr4 | 15482360 | 3/9 | 1/9 | | 1/9 |
| chr4 | 15981874 | 1/9 | | | |
| chr4 | 15982166 | | | | 4/9 |
| chr4 | 16020162 | | 1/9 | | |
| chr4 | 111543554 | | | 1/9 | |
| chr4 | 122748996 | 1/9 | | | |
| chr4 | 123653926 | 1/9 | | | |
| chr5 | 33954511 | 1/9 | 1/9 | 1/9 | |
| chr5 | 149323772 | 1/9 | | | |
| chr5 | 178405421 | | | | 4/9 |
| chr5 | 178407229 | | | | 1/9 |
| chr6 | 42665565 | 1/9 | | | |
| chr6 | 42932200 | 2/9 | 6/9 | 3/9 | 2/9 |
| chr6 | 42932202 | 1/9 | 2/9 | 4/9 | 3/9 |
| chr6 | 65622463 | | 1/9 | | 1/9 |
| chr6 | 70926357 | 2/9 | | 6/9 | 3/9 |
| chr6 | 72809641 | 1/9 | | | |
| chr6 | 137143748 | 3/9 | 5/9 | 6/9 | 2/9 |
| chr7 | 130037805 | 6/9 | | | |
| chr8 | 63998434 | 3/9 | 7/9 | 8/9 | 5/9 |
| chr9 | 12709480 | | | 1/9 | |
| chr9 | 117267172 | | | 2/9 | |
| chr9 | 120478032 | | | | 2/9 |
| chr9 | 139323799 | | | 3/9 | |
| chr9 | 139333236 | | | 1/9 | |
| chr10 | 13320121 | 1/9 | 1/9 | 2/9 | |
| chr10 | 55755491 | | | | 1/9 |
| chr10 | 73461805 | | | 1/9 | |
| chr10 | 73472565 | | | 1/9 | |
| chr10 | 73537449 | 2/9 | 6/9 | 4/9 | 1/9 |
| chr10 | 86004873 | | | 1/9 | |
| chr10 | 95353767 | | 1/9 | | |
| chr10 | 102505815 | 1/9 | | 5/9 | 2/9 |
| chr10 | 102588585 | | | 1/9 | |
| chr10 | 102778967 | 1/9 | 1/9 | 3/9 | |
| chr11 | 45931218 | | 1/9 | | |
| chr11 | 45935689 | 2/9 | | 1/9 | |
| chr11 | 76869378 | | | 1/9 | |
| chr11 | 76914151 | | 1/9 | 5/9 | |
| chr11 | 76917220 | 1/9 | 1/9 | | |
| chr11 | 119217254 | | | 1/9 | |
| chr12 | 88481632 | 1/9 | | | 1/9 |
| chr12 | 124417989 | | | 2/9 | |
| chr13 | 27261862 | | 1/9 | 1/9 | |
| chr14 | 74976852 | | | | 1/9 |
| chr14 | 74988687 | 3/9 | 1/9 | 5/9 | 1/9 |
| chr14 | 74992800 | | | 8/9 | 8/9 |
| chr14 | 75019002 | 2/9 | | 3/9 | 1/9 |
| chr14 | 75022271 | 1/9 | | | |
| chr14 | 75022312 | 1/9 | 1/9 | | |
| chr14 | 88852166 | | | 1/9 | |
| chr14 | 88857819 | 1/9 | | 1/9 | |
| chr15 | 73027478 | | | 1/9 | |
| chr15 | 78397352 | 1/9 | | | |
| chr16 | 1260969 | 1/9 | 1/9 | 2/9 | |
| chr16 | 1265600 | 1/9 | 2/9 | 1/9 | |
| chr16 | 16263663 | | | 1/9 | |
| chr16 | 57917149 | | | | 1/9 |
| chr16 | 57954424 | | | 1/9 | |
| chr16 | 68725783 | | 2/9 | | |
| chr17 | 7923564 | | 1/9 | | |
| chr17 | 11795157 | | 1/9 | | |
| chr17 | 11795158 | | 1/9 | | |
| chr19 | 6686192 | | 1/9 | 1/9 | |
| chr19 | 6697829 | | | | 1/9 |
| chr19 | 6709848 | | | 3/9 | |
| chr19 | 6718387 | | 1/9 | | |
| chr19 | 33167208 | | | 4/9 | |
| chr19 | 46088108 | 1/9 | | | |
| chr19 | 48344849 | | | | 1/9 |
| chr20 | 10624502 | 1/9 | | 1/9 | |
| chr22 | 33257163 | | | 7/9 | 8/9 |
| chrX | 41333549 | | 1/9 | | |

* #NO_CALL/TOTAL_REPLIC

TABLE 13
Sensitivity and specificity calculations for GEDi vs. Omni 2.5 SNP
data. For each DNA sample, the number of positions at which
variants (SNP) or reference (REF) were detected
by the Omni 2.5 SNP arrays and GEDi test are
indicated. For the GEDi data, the ranges derived from the
9 replicates for each sample tested are shown.
The average sensitivity and specificity for each DNA
sample are shown, with the ranges and standard deviation
(SD) included in parentheses. The overall sensitivity
and specificity reported in the text are the averages of these
data for all 4 samples. A standard 2 × 2 contingency table with
definitions of sensitivity and specificity is shown for reference.

| | 2 × 2 Contingency Table | |
|---|---|---|
| | Omni + (SNP) | Omni − (REF) |
| GEDi + (SNP) | True Positive | False Positive |
| GEDi − (REF) | False Negative | True Negative |
| | Sensitivity = True Pos/ | Specificity = True Neg/ |
| | (True Pos + False Neg) | (True Neg + False Pos) |
| | NA12878 | |
| | Omni + (SNP) | Omni − (REF) |
| GEDi + (SNP) | 508 (503-510 SD: 2) | 0 (0-0 SD: 0) |
| GEDi − (REF) | 12 (8-20 SD: 4) | 1933 (1919-1944 SD: 13) |
| | Sensitivity: 0.977 | Specificity: 1 (1-1 SD: 0) |
| | (0.967-0.981 SD: 0.004) | |
| | OGI-281-608 | |
| | Omni + (SNP) | Omni − (REF) |
| GEDi + (SNP) | 469 (462-472 SD: 3) | 0 (0-0 SD: 0) |
| GEDi − (REF) | 13 (10-20 SD: 3) | 1944 (1944-1944 SD: 0) |
| | Sensitivity: 0.973 | Specificity: 1 (1-1 SD: 0) |
| | (0.959-0.979 SD: 0.007) | |
| | OGI-132-357 | |
| | Omni + (SNP) | Omni − (REF) |
| GEDi + (SNP) | 495 (492-497 SD: 1) | 0 (0-0 SD:0) |
| GEDi − (REF) | 10 (8-13 SD: 1.4) | 1919 (1919-1919 SD: 0) |
| | Sensitivity: 0.981 | Specificity: 1 (1-1 SD: 0) |
| | (0.974-0.984 SD: 0.003) | |
| | OGI-307-717 | |
| | Omni + (SNP) | Omni − (REF) |
| GEDi + (SNP) | 508 (506-511 SD: 1.716) | 0 (0-0 SD:0) |
| GEDi − (REF) | 7 (4-9 SD: 2) | 1917 (1917-1917 SD: 0) |
| | Sensitivity: 0.986 | Specificity: 1 (1-1 SD: 0) |
| | (0.983-0.992 SD: 0.003) | |

TABLE 14
GEDi vs. Omni 2.5 Discrepancies Detected. Base positions of
discrepancies detected in at least 1 GEDi sequence replicate and the Omni 2.5 SNP
data for each sample analyzed are shown. The number of replicates with alternate
results are indicated. Fewer than 9 replicates are indicated for some positions at
which base calls were not made in some replicates. Discrepancies located in the top
portion of the table were due to low SNP quality scores in SAMtools; the bottom
portion of the table contains discrepancies specific to the GEDi vs. Omni data
comparisons. The reasons identified for the discrepancies are indicated in the right
column: 1 = low SNP quality score; 2 = heterozygous deletion of target base; 3 =
homozygous deletion adjacent to target base; 4 = heterozygous insertion adjacent to
target base; 5 = Omni incorrect, reason uncertain. Note that position chr4: 15982166
is included in both halves of the table.

| | NA12878 | OGI-132-357 | OGI-281-608 | OGI-307-717 | DISCREPANCY |
|---|---|---|---|---|---|
| chr1: 156146218 | | | 1/9 HOM/HET | | 1 |
| chr1: 213071341 | | | | 1/9 HOM/HET | 1 |
| chr2: 62052380 | | | 1/9 HOM/HET | | 1 |
| chr2: 166770120 | | 3/8 HOM/HET | | | 1 |
| chr3: 150645351 | 2/9 HOM/HET | | | | 1 |
| chr3: 193413502 | 1/5 HOM/HET | | | | 1 |
| chr4: 15982166 | | | | 2/7 HOM/HET | 1 |
| chr5: 178405941 | 2/9 HOM/HET | | | 1/9 HOM/HET | 1 |
| chr6: 42932200 | 1/7 HOM/HET | 1/3 HOM/HET | | 1/7 HOM/HET | 1 |
| chr6: 42932202 | 1/8 HOM/HET | 1/7 HOM/HET | | | 1 |
| chr9: 102861613 | | | 1/9 HOM/HET | | 1 |
| chr9: 139327064 | | 9/9 HOM/HET | 9/9 HOM/HET | 9/9 HOM/HET | 1 |
| chr10: 73461805 | | | 1/9 HOM/HET | | 1 |
| chr10: 85976966 | 9/9 HOM/HET | 9/9 HOM/HET | | | 1 |
| chr16: 1265600 | | 1/7 HOM/HET | | | 1 |
| chr16: 1574863 | | 1/9 HOM/HET | | | 1 |
| chr16: 57937788 | | | 1/9 HOM/HET | | 1 |
| chr17: 11835331 | | | 1/9 HOM/HET | | 1 |
| chr3: 63986047 | 9/9 HOM/HET | | 9/9 HOM/HET | | 2 |
| chr4: 6304087 | | | | 9/9 HOM/HET | 5 |
| chr4: 15981874 | | 9/9 HOM/HET | | | 4 |
| chr4: 15982166 | 9/9 HOM/HET | | 9/9 HOM/HET | | 4 |
| chr11: 76895772 | | 9/9 HOM/HET | 9/9 HOM/HET | | 2 |
| chr15: 78397352 | 9/9 DISCREP | 9/9 DISCREP | 9/9 DISCREP | 9/9 DISCREP | 3 |

### Example 5. GEDi vs. WES

[0085] The GEDi test performance was compared to WES by analyzing the WES data of the same 4 validation samples for the 2,443 Omni 2.5 SNPs in the GEDi gene set. The average depth of coverage achieved by WES in these experiments was 100×, with 98% of the targeted regions covered at 10× sequence depth. Using the Omni 2.5 data as the “gold standard,” the sensitivity of WES was 0.883±0.004, and the specificity of WES was 0.9998±0.0003. While both GEDi and WES have excellent specificity, this comparison shows that WES is approximately 10% less sensitive than the GEDi test. Analysis shows that this is due to lack of sequence coverage in the

[0086] WES data, with approximately 10% of the 2,443 positions interrogated in these analyses having insufficient coverage (≥10×) to make an accurate base call (Table 3). The majority of these positions (76%) were common in all 4 samples, suggesting that these positions were covered less efficiently in the WES capture design. Comparison of the WES and GEDi capture baits at these positions confirmed this hypothesis, and showed that 88% of the positions without coverage in the WES data had no baits in the V4+UTR capture set, whereas the GEDi capture set had at least 1 bait at these positions (Table 3). An example of one of these regions in shown in FIG. 3. Further, there are 947 mutations in IRD disease genes reported in HGMD, ClinVar and Ensemble that would be detected by GEDi sequencing which fall in regions that are not covered in the Agilent V4+UTR WES capture set (Table 4). Conversely, WES did detect bases at an average of 5.5 positions out of 2,443 (0.22%) for which GEDi sequencing provided no call.

TABLE 3
Positions at which WES did not provide sequence coverage. Base
positions at which no call was made in WES due to lack of sequence coverage are
indicated, along with the number of GEDi and WES capture baits at each position.

| | | | OGI- | OGI- | OGI- | | | |
|---|---|---|---|---|---|---|---|---|
| | | | 132- | 281- | 307- | | GEDi # | V4 + UTR # |
| CHR | POS | NA12878 | 357 | 608 | 717 | RESULT | baits | baits |
| chr1 | 20396714 | X | X | X | X | 4/4 | 1 | 0 |
| chr1 | 20396733 | X | X | X | X | 4/4 | 1 | 0 |
| chr1 | 20396902 | X | X | X | X | 4/4 | 2 | 0 |
| chr1 | 20417765 | | X | X | X | 3/4 | 2 | 0 |
| chr1 | 20418323 | X | X | X | X | 4/4 | 2 | 0 |
| chr1 | 103360951 | X | X | X | X | 4/4 | 1 | 0 |
| chr1 | 103463976 | X | X | | X | 3/4 | 1 | 1 |
| chr1 | 211665298 | X | X | X | X | 4/4 | 2 | 0 |
| chr1 | 211665299 | X | X | X | X | 4/4 | 2 | 0 |
| chr1 | 211665454 | X | X | X | X | 4/4 | 2 | 0 |
| chr1 | 211665475 | X | X | X | X | 4/4 | 2 | 0 |
| chr1 | 211666218 | X | X | X | X | 4/4 | 1 | 0 |
| chr1 | 216498911 | | X | X | X | 3/4 | 2 | 0 |
| chr2 | 27667297 | X | X | X | | 3/4 | 2 | 1 |
| chr2 | 38302923 | X | X | X | X | 4/4 | 1 | 0 |
| chr2 | 38303095 | X | X | X | X | 4/4 | 3 | 0 |
| chr2 | 74445333 | X | X | X | X | 4/4 | 2 | 0 |
| chr2 | 74445786 | X | X | X | X | 4/4 | 2 | 0 |
| chr2 | 74466594 | | X | X | X | 3/4 | 2 | 0 |
| chr2 | 74561260 | X | X | X | X | 4/4 | 2 | 0 |
| chr2 | 98962749 | X | X | X | X | 4/4 | 2 | 0 |
| chr2 | 182401388 | X | X | | X | 3/4 | 3 | 0 |
| chr2 | 202502195 | X | X | X | X | 4/4 | 1 | 0 |
| chr2 | 232597042 | X | X | X | X | 4/4 | 1 | 0 |
| chr2 | 233631062 | X | X | X | X | 4/4 | 2 | 0 |
| chr2 | 234216628 | X | X | X | X | 4/4 | 1 | 0 |
| chr2 | 234228005 | X | X | X | X | 4/4 | 1 | 0 |
| chr3 | 48507182 | | | X | | 1/4 | 2 | 0 |
| chr3 | 50233215 | X | X | X | X | 4/4 | 3 | 0 |
| chr3 | 50233317 | X | X | X | X | 4/4 | 2 | 0 |
| chr3 | 50233873 | X | X | X | X | 4/4 | 2 | 0 |
| chr3 | 50234126 | X | X | X | X | 4/4 | 3 | 0 |
| chr3 | 97483609 | X | X | X | X | 4/4 | 1 | 0 |
| chr3 | 100945367 | X | X | X | X | 4/4 | 2 | 0 |
| chr3 | 100945369 | X | X | X | X | 4/4 | 2 | 0 |
| chr3 | 132399969 | X | X | X | X | 4/4 | 2 | 0 |
| chr3 | 132399995 | X | X | X | X | 4/4 | 2 | 0 |
| chr3 | 142522855 | X | | X | X | 3/4 | 1 | 1 |
| chr3 | 142524858 | X | | | | 1/4 | 1 | 1 |
| chr3 | 193412609 | X | X | | X | 3/4 | 4 | 0 |
| chr3 | 193412672 | X | X | X | X | 4/4 | 5 | 0 |
| chr3 | 193412949 | X | X | X | X | 4/4 | 5 | 0 |
| chr3 | 193413502 | X | X | X | X | 4/4 | 4 | 0 |
| chr3 | 193413732 | X | X | X | X | 4/4 | 6 | 0 |
| chr3 | 193413814 | X | X | X | X | 4/4 | 4 | 0 |
| chr3 | 193414481 | X | X | X | X | 4/4 | 4 | 0 |
| chr3 | 193414675 | X | X | X | X | 4/4 | 4 | 0 |
| chr3 | 193414733 | X | X | X | X | 4/4 | 4 | 0 |
| chr3 | 193414780 | X | X | X | X | 4/4 | 4 | 0 |
| chr3 | 193414797 | X | X | X | X | 4/4 | 4 | 0 |
| chr4 | 15539735 | X | X | X | X | 4/4 | 2 | 0 |
| chr4 | 15970349 | X | X | X | X | 4/4 | 2 | 0 |
| chr4 | 39287322 | X | X | X | X | 4/4 | 3 | 0 |
| chr4 | 39287419 | X | X | X | X | 4/4 | 1 | 0 |
| chr4 | 111558994 | X | X | X | X | 4/4 | 2 | 0 |
| chr4 | 123653926 | X | X | X | X | 4/4 | 3 | 0 |
| chr4 | 186990344 | X | X | X | X | 4/4 | 1 | 0 |
| chr4 | 186990345 | X | X | X | X | 4/4 | 1 | 0 |
| chr4 | 187132943 | X | X | X | X | 4/4 | 2 | 0 |
| chr4 | 187133031 | X | X | X | X | 4/4 | 2 | 0 |
| chr4 | 187133433 | X | X | X | X | 4/4 | 2 | 0 |
| chr4 | 187133576 | X | X | X | X | 4/4 | 3 | 0 |
| chr4 | 187133901 | X | X | X | X | 4/4 | 2 | 0 |
| chr4 | 187134084 | X | X | X | X | 4/4 | 3 | 0 |
| chr5 | 43192421 | X | X | X | X | 4/4 | 4 | 0 |
| chr5 | 43192453 | X | X | X | X | 4/4 | 3 | 0 |
| chr5 | 90024735 | | | X | | 1/4 | 1 | 1 |
| chr5 | 90085654 | X | | | | 1/4 | 1 | 1 |
| chr5 | 178405421 | X | X | X | X | 4/4 | 2 | 0 |
| chr5 | 178405711 | X | X | X | X | 4/4 | 2 | 0 |
| chr5 | 178405729 | X | X | X | X | 4/4 | 3 | 0 |
| chr5 | 178405897 | X | X | X | X | 4/4 | 2 | 0 |
| chr5 | 178405912 | X | X | X | X | 4/4 | 1 | 0 |
| chr5 | 178405941 | X | X | X | X | 4/4 | 1 | 0 |
| chr5 | 178406299 | X | X | X | X | 4/4 | 1 | 0 |
| chr5 | 178406388 | X | X | X | X | 4/4 | 2 | 0 |
| chr5 | 178406467 | X | X | X | X | 4/4 | 2 | 0 |
| chr5 | 178407593 | | X | X | X | 3/4 | 1 | 0 |
| chr5 | 178408344 | X | X | X | X | 4/4 | 2 | 0 |
| chr6 | 31901322 | | X | X | | 2/4 | 1 | 0 |
| chr6 | 42142244 | X | X | X | X | 4/4 | 1 | 0 |
| chr6 | 42151556 | X | X | X | X | 4/4 | 3 | 0 |
| chr6 | 42151625 | X | X | X | X | 4/4 | 2 | 0 |
| chr6 | 42942583 | X | X | | | 2/4 | 1 | 1 |
| chr6 | 65622463 | | X | | | 1/4 | 2 | 2 |
| chr6 | 70962039 | | | | X | 1/4 | 1 | 1 |
| chr6 | 70962044 | | | | X | 1/4 | 1 | 1 |
| chr6 | 70981794 | X | | | | 1/4 | 1 | 1 |
| chr7 | 23145952 | | X | X | X | 3/4 | 1 | 0 |
| chr7 | 91715662 | | X | | X | 2/4 | 2 | 1 |
| chr7 | 128415623 | | X | | | 1/4 | 2 | 1 |
| chr7 | 130033630 | X | X | X | X | 4/4 | 1 | 0 |
| chr7 | 130034695 | X | X | X | X | 4/4 | 2 | 0 |
| chr8 | 77912424 | X | X | X | X | 4/4 | 3 | 0 |
| chr8 | 87755891 | X | | | X | 2/4 | 1 | 0 |
| chr8 | 94831346 | X | X | X | X | 4/4 | 4 | 0 |
| chr9 | 102861568 | X | X | X | X | 4/4 | 4 | 0 |
| chr9 | 102861613 | X | X | X | X | 4/4 | 6 | 0 |
| chr9 | 117265406 | X | X | X | X | 4/4 | 2 | 0 |
| chr9 | 120479337 | X | X | X | X | 4/4 | 3 | 0 |
| chr10 | 13142251 | X | X | X | X | 4/4 | 2 | 0 |
| chr10 | 13150265 | X | X | X | X | 4/4 | 1 | 0 |
| chr10 | 50747071 | X | X | X | X | 4/4 | 4 | 0 |
| chr10 | 73157051 | | X | X | | 2/4 | 2 | 1 |
| chr10 | 86004865 | | | X | | 1/4 | 3 | 1 |
| chr10 | 86004873 | | | X | X | 2/4 | 2 | 1 |
| chr10 | 102505815 | | | X | | 1/4 | 1 | 2 |
| chr10 | 102778967 | X | X | X | X | 4/4 | 2 | 0 |
| chr10 | 124249118 | | X | | | 1/4 | 1 | 0 |
| chr10 | 126089434 | X | X | | X | 3/4 | 2 | 0 |
| chr11 | 12308462 | X | X | X | X | 4/4 | 1 | 0 |
| chr11 | 12308485 | X | X | X | X | 4/4 | 1 | 0 |
| chr11 | 12308500 | X | X | X | X | 4/4 | 2 | 0 |
| chr11 | 45931502 | | | X | | 1/4 | 4 | 2 |
| chr11 | 61717607 | X | X | X | X | 4/4 | 2 | 0 |
| chr11 | 67227006 | X | X | X | X | 4/4 | 2 | 0 |
| chr11 | 76833819 | | X | | | 1/4 | 1 | 0 |
| chr11 | 76853829 | | | X | | 1/4 | 2 | 0 |
| chr11 | 76883800 | X | X | X | | 3/4 | 2 | 0 |
| chr11 | 76895772 | X | | | | 1/4 | 4 | 2 |
| chr11 | 76914151 | X | X | X | X | 4/4 | 4 | 1 |
| chr11 | 117198609 | X | X | X | X | 4/4 | 2 | 0 |
| chr11 | 117252437 | | X | X | X | 3/4 | 2 | 0 |
| chr11 | 117261853 | | | X | | 1/4 | 3 | 1 |
| chr12 | 1901546 | X | X | X | X | 4/4 | 1 | 0 |
| chr12 | 1902025 | X | X | X | X | 4/4 | 2 | 0 |
| chr12 | 1902164 | X | X | X | X | 4/4 | 2 | 0 |
| chr12 | 1902354 | X | X | X | X | 4/4 | 2 | 0 |
| chr12 | 1920835 | X | X | X | X | 4/4 | 2 | 1 |
| chr12 | 1920853 | X | X | X | | 3/4 | 2 | 1 |
| chr12 | 1982754 | X | X | X | X | 4/4 | 1 | 0 |
| chr12 | 7362960 | X | X | X | | 3/4 | 2 | 0 |
| chr12 | 7363447 | X | X | X | X | 4/4 | 2 | 0 |
| chr12 | 7363916 | X | X | X | X | 4/4 | 2 | 0 |
| chr12 | 15125989 | X | X | x | X | 4/4 | 2 | 0 |
| chr12 | 15134711 | X | | | | 1/4 | 2 | 0 |
| chr12 | 15134729 | X | X | X | X | 4/4 | 2 | 0 |
| chr12 | 48371802 | X | | | | 1/4 | 2 | 0 |
| chr12 | 56114181 | X | X | X | X | 4/4 | 3 | 0 |
| chr12 | 76738345 | X | X | | X | 3/4 | 1 | 1 |
| chr13 | 48828118 | | | | X | 1/4 | 1 | 0 |
| chr14 | 68189208 | X | X | X | X | 4/4 | 3 | 0 |
| chr14 | 74965434 | X | X | X | X | 4/4 | 2 | 0 |
| chr14 | 74965543 | X | X | X | X | 4/4 | 2 | 0 |
| chr14 | 74966763 | X | X | X | X | 4/4 | 2 | 0 |
| chr14 | 74969615 | | | X | X | 2/4 | 1 | 0 |
| chr14 | 88857819 | X | | | | 1/4 | 1 | 1 |
| chr14 | 92336054 | X | X | X | X | 4/4 | 2 | 0 |
| chr14 | 92336239 | X | X | X | X | 4/4 | 2 | 0 |
| chr14 | 92336242 | X | X | X | X | 4/4 | 2 | 0 |
| chr14 | 92409333 | | | | X | 1/4 | 1 | 1 |
| chr15 | 31453147 | X | X | X | X | 4/4 | 3 | 0 |
| chr15 | 65914282 | X | X | X | X | 4/4 | 1 | 0 |
| chr15 | 65916306 | X | X | X | | 3/4 | 1 | 0 |
| chr15 | 65948035 | X | X | X | X | 4/4 | 2 | 0 |
| chr15 | 65948348 | X | X | X | X | 4/4 | 2 | 0 |
| chr15 | 72107221 | X | X | X | X | 4/4 | 1 | 0 |
| chr15 | 89753136 | X | X | X | X | 4/4 | 1 | 0 |
| chr15 | 89753160 | X | X | X | X | 4/4 | 2 | 0 |
| chr15 | 89753194 | X | X | X | X | 4/4 | 2 | 0 |
| chr15 | 89753220 | X | X | X | X | 4/4 | 2 | 0 |
| chr15 | 89753274 | X | X | X | X | 4/4 | 3 | 0 |
| chr15 | 89764896 | X | X | X | X | 4/4 | 1 | 0 |
| chr16 | 1271240 | X | X | X | X | 4/4 | 3 | 0 |
| chr16 | 1271348 | X | X | X | X | 4/4 | 2 | 0 |
| chr16 | 1271471 | X | X | X | X | 4/4 | 2 | 0 |
| chr16 | 16255205 | X | X | X | X | 4/4 | 1 | 0 |
| chr16 | 16255240 | | X | X | X | 3/4 | 2 | 0 |
| chr16 | 16281007 | | X | X | X | 3/4 | 2 | 1 |
| chr16 | 53634295 | X | X | X | X | 4/4 | 2 | 0 |
| chr16 | 53635251 | X | X | X | X | 4/4 | 2 | 0 |
| chr16 | 56518357 | X | X | X | X | 4/4 | 2 | 0 |
| chr16 | 57916776 | X | X | X | X | 4/4 | 2 | 0 |
| chr16 | 57916835 | X | X | X | X | 4/4 | 3 | 0 |
| chr16 | 57917012 | X | X | X | X | 4/4 | 2 | 0 |
| chr16 | 57917149 | X | X | X | X | 4/4 | 1 | 0 |
| chr16 | 57949224 | X | X | | | 2/4 | 2 | 1 |
| chr16 | 57988797 | X | X | X | X | 4/4 | 1 | 0 |
| chr16 | 57991317 | | | X | | 1/4 | 1 | 1 |
| chr16 | 58000163 | X | X | X | X | 4/4 | 1 | 0 |
| chr16 | 68725783 | | X | | | 1/4 | 2 | 0 |
| chr16 | 75571923 | X | X | X | X | 4/4 | 1 | 0 |
| chr16 | 75572012 | X | X | X | X | 4/4 | 1 | 0 |
| chr16 | 75572495 | X | X | X | X | 4/4 | 2 | 0 |
| chr16 | 75573837 | X | X | X | X | 4/4 | 2 | 0 |
| chr17 | 1588141 | X | X | X | X | 4/4 | 2 | 0 |
| chr17 | 6377804 | | | X | X | 2/4 | 4 | 1 |
| chr17 | 7919931 | | | X | | 1/4 | 1 | 0 |
| chr17 | 7923564 | X | X | X | X | 4/4 | 3 | 0 |
| chr17 | 11786291 | X | X | X | X | 4/4 | 1 | 0 |
| chr17 | 11786308 | X | X | X | X | 4/4 | 1 | 0 |
| chr17 | 11786412 | X | X | X | X | 4/4 | 2 | 0 |
| chr17 | 21321281 | X | X | X | X | 4/4 | 2 | 0 |
| chr17 | 21321657 | X | X | X | X | 4/4 | 2 | 0 |
| chr17 | 21321955 | X | X | X | X | 4/4 | 2 | 0 |
| chr17 | 21322821 | X | X | X | X | 4/4 | 3 | 0 |
| chr17 | 56282763 | | | X | | 1/4 | 2 | 0 |
| chr17 | 63223643 | X | X | X | | 3/4 | 2 | 0 |
| chr17 | 63223645 | X | X | X | | 3/4 | 2 | 0 |
| chr17 | 63223684 | X | X | X | | 3/4 | 2 | 0 |
| chr17 | 63223788 | X | X | X | X | 4/4 | 1 | 0 |
| chr17 | 72912509 | X | X | X | X | 4/4 | 4 | 0 |
| chr17 | 72913320 | X | X | X | X | 4/4 | 2 | 0 |
| chr17 | 74523791 | X | X | X | X | 4/4 | 4 | 0 |
| chr17 | 79617534 | X | X | X | X | 4/4 | 2 | 0 |
| chr19 | 3769470 | X | X | X | X | 4/4 | 4 | 0 |
| chr19 | 3769753 | X | X | X | X | 4/4 | 3 | 0 |
| chr19 | 3769834 | X | X | X | X | 4/4 | 3 | 0 |
| chr19 | 3769939 | X | X | X | X | 4/4 | 1 | 0 |
| chr19 | 3770238 | X | X | X | X | 4/4 | 4 | 0 |
| chr19 | 6710683 | | | X | | 1/4 | 2 | 1 |
| chr19 | 14203542 | X | X | X | X | 4/4 | 4 | 0 |
| chr19 | 33166408 | X | X | X | X | 4/4 | 4 | 0 |
| chr19 | 33168082 | | X | X | | 2/4 | 2 | 0 |
| chr19 | 33168383 | X | X | X | X | 4/4 | 2 | 0 |
| chr19 | 33168412 | X | X | X | X | 4/4 | 2 | 0 |
| chr19 | 33168447 | X | X | X | X | 4/4 | 2 | 0 |
| chr19 | 33168605 | X | X | X | X | 4/4 | 2 | 0 |
| chr19 | 33168627 | X | X | X | X | 4/4 | 3 | 0 |
| chr19 | 33168641 | X | X | X | X | 4/4 | 2 | 0 |
| chr19 | 33168829 | X | X | X | X | 4/4 | 2 | 0 |
| chr19 | 33169003 | X | X | X | X | 4/4 | 2 | 0 |
| chr19 | 33169097 | X | X | X | X | 4/4 | 4 | 0 |
| chr19 | 46031606 | X | X | X | X | 4/4 | 3 | 0 |
| chr19 | 46032124 | X | X | X | X | 4/4 | 4 | 0 |
| chr19 | 46049687 | X | X | X | X | 4/4 | 2 | 0 |
| chr19 | 46052454 | X | X | X | X | 4/4 | 3 | 0 |
| chr19 | 46052639 | X | X | X | X | 4/4 | 1 | 0 |
| chr19 | 46053050 | X | X | X | X | 4/4 | 1 | 0 |
| chr19 | 46053550 | X | X | X | X | 4/4 | 2 | 0 |
| chr19 | 46053560 | X | X | X | X | 4/4 | 3 | 0 |
| chr19 | 46053664 | X | X | X | X | 4/4 | 3 | 0 |
| chr19 | 46053734 | X | X | X | X | 4/4 | 2 | 0 |
| chr19 | 46055385 | X | X | X | X | 4/4 | 2 | 0 |
| chr19 | 46056500 | | X | X | X | 3/4 | 2 | 0 |
| chr19 | 46088108 | | | X | | 1/4 | 1 | 0 |
| chr19 | 48325187 | X | X | X | X | 4/4 | 4 | 0 |
| chr19 | 48344270 | X | X | X | X | 4/4 | 1 | 0 |
| chr19 | 48344346 | X | X | X | X | 4/4 | 2 | 0 |
| chr19 | 48344444 | X | X | X | X | 4/4 | 2 | 0 |
| chr19 | 48344513 | X | X | X | X | 4/4 | 2 | 0 |
| chr19 | 48344570 | X | X | X | X | 4/4 | 2 | 0 |
| chr19 | 48344849 | X | X | X | X | 4/4 | 1 | 0 |
| chr19 | 48345016 | X | X | X | X | 4/4 | 2 | 0 |
| chr19 | 48345395 | X | X | X | X | 4/4 | 2 | 0 |
| chr19 | 48345407 | X | X | X | X | 4/4 | 2 | 0 |
| chr19 | 48345928 | X | X | X | X | 4/4 | 2 | 0 |
| chr19 | 48345982 | X | X | X | X | 4/4 | 3 | 0 |
| chr19 | 48346161 | X | X | X | X | 4/4 | 2 | 0 |
| chr19 | 48346241 | X | X | X | X | 4/4 | 3 | 0 |
| chr19 | 48346341 | X | X | X | X | 4/4 | 2 | 0 |
| chr19 | 48346462 | X | X | X | X | 4/4 | 3 | 0 |
| chr19 | 48346503 | X | X | X | X | 4/4 | 2 | 0 |
| chr19 | 48346525 | X | X | X | X | 4/4 | 1 | 0 |
| chr19 | 54631797 | X | X | X | X | 4/4 | 1 | 0 |
| chr20 | 3869610 | X | X | X | X | 4/4 | 1 | 0 |
| chr20 | 25282967 | X | | X | X | 3/4 | 2 | 1 |
| chr22 | 33197074 | X | X | X | X | 4/4 | 3 | 0 |
| chrX | 18665342 | | | | X | 1/4 | 2 | 0 |
| chrX | 38128538 | X | X | | X | 3/4 | 5 | 0 |
| chrX | 153421844 | X | X | X | X | 4/4 | 2 | 0 |
| chrX | 153421847 | X | X | X | X | 4/4 | 2 | 0 |
| chrX | 153776107 | X | X | X | X | 4/4 | 2 | 0 |

| | # Hits | % Hits |
|---|---|---|
| 4/4 | 199 | 75.67% |
| 3/4 | 25 | 9.51% |
| 2/4 | 10 | 3.80% |
| 1/4 | 29 | 11.03% |
| Total: | 263 | |

TABLE 4
List of mutations in IRD disease genes reported in HGMD, ClinVar
and Ensemble that would be detected by GEDi sequencing that are not covered in the
Agilent V4 + UTR WES capture set.

| Chromo- | | | | |
|---|---|---|---|---|
| some | Genomic coordinate | Gene | dbSNP | Sources |
| 1 | g.10032132G > A | NMNAT1 | | HGMD, |
| 1 | g.10035695T > C | NMNAT1 | | HGMD, |
| 1 | g.10041108T > G | NMNAT1 | | HGMD, |
| 1 | g.10042629G > T | NMNAT1 | rs368062092 | ClinVar, |
| 1 | g.10042635C > T | NMNAT1 | | HGMD, |
| 1 | g.10042642del | NMNAT1 | | HGMD, |
| 1 | g.10042671C > A | NMNAT1 | | HGMD, |
| 1 | g.12061468A > G | MFN2 | rs119103264 | ClinVar, Ensembl, |
| 1 | g.12061480G > A | MFN2 | rs28940294 | ClinVar, |
| 1 | g.12064892G > A | MFN2 | rs138382758 | ClinVar, |
| 1 | g.12071567G > C | MFN2 | rs28940292 | ClinVar, |
| 1 | g.150316677A > C | PRPF3 | rs121434243 | HGMD, |
| 1 | g.150316677C > A | PRPF3 | rs121434243 | ClinVar, Ensembl, |
| 1 | g.171605813G > A | MYOC | | HGMD, |
| 1 | g.171605826C > T | MYOC | rs74315341 | ClinVar, Ensembl, |
| 1 | g.171605828A > G | MYOC | | HGMD, |
| 1 | g.171605844C > T | MYOC | | HGMD, |
| 1 | g.171605846C > T | MYOC | rs74315340 | ClinVar, Ensembl, |
| 1 | g.171605849C > A | MYOC | | HGMD, |
| 1 | g.171605849C > G | MYOC | | HGMD, |
| 1 | g.196659324T > A | CFH | rs121913056 | ClinVar, |
| 1 | g.196716375C > T | CFH | rs121913059 | ClinVar, Ensembl, |
| 1 | g.197297561T > G | CRB1 | | HGMD, |
| 1 | g.197297588G > C | CRB1 | | HGMD, |
| 1 | g.197297593del | CRB1 | | HGMD, |
| 1 | g.197398718A > G | CRB1 | | HGMD, |
| 1 | g.197403836A > G | CRB1 | rs62645748 | HGMD, |
| 1 | g.197403836G > A | CRB1 | rs62645748 | ClinVar, Ensembl, |
| 1 | g.197403868A > G | CRB1 | | HGMD, |
| 1 | g.211654461C > T | RD3 | rs386834260 | ClinVar, HGMD, |
| 1 | g.215813957G > A | USH2A | rs397517994 | Ensembl, |
| 1 | g.215813957T > C | USH2A | | HGMD, |
| 1 | g.215820868del | USH2A | | HGMD, |
| 1 | g.215823990A > G | USH2A | | HGMD, |
| 1 | g.215823990C > T | USH2A | rs397517990 | Ensembl, |
| 1 | g.215823992G > A | USH2A | | HGMD, |
| 1 | g.215844615T > C | USH2A | | HGMD, |
| 1 | g.215844625T > C | USH2A | | HGMD, |
| 1 | g.215916678C > G | USH2A | | HGMD, |
| 1 | g.215955400A > G | USH2A | rs111033265 | HGMD, |
| 1 | g.215955400C > T | USH2A | rs111033265 | Ensembl, |
| 1 | g.215960153G > T | USH2A | | HGMD, |
| 1 | g.216052107T > A | USH2A | | HGMD, |
| 1 | g.216061779A > G | USH2A | | HGMD, |
| 1 | g.216061803G > A | USH2A | | GEDi, |
| 1 | g.216064540T > C | USH2A | | HGMD, |
| 1 | g.216166497C > A | USH2A | | GEDi, |
| 1 | g.216243443C > A | USH2A | | HGMD, |
| 1 | g.216246230C > G | USH2A | | HGMD, |
| 1 | g.216251475T > C | USH2A | | HGMD, |
| 1 | g.216251484T > G | USH2A | | HGMD, |
| 1 | g.216251489A > T | USH2A | | HGMD, |
| 1 | g.216256797C > G | USH2A | | HGMD, |
| 1 | g.216424258del | USH2A | | HGMD, |
| 1 | g.216424275C > G | USH2A | rs696723 | Ensembl, HGMD, |
| 1 | g.216498883A > C | USH2A | | HGMD, |
| 1 | g.216498883T > C | USH2A | | HGMD, |
| 1 | g.216498885T > G | USH2A | | HGMD, |
| 1 | g.216498940A > G | USH2A | | HGMD, |
| 1 | g.216591855C > T | USH2A | | HGMD, |
| 1 | g.2337267A > G | PEX10 | | HGMD, |
| 1 | g.243471334G > T | SDCCAG8 | | HGMD, |
| 1 | g.40544236G > A | PPT1 | | HGMD, |
| 1 | g.40555081C > T | PPT1 | rs386833651 | ClinVar, |
| 1 | g.40555089G > C | PPT1 | rs386833650 | ClinVar, |
| 1 | g.40562786C > T | PPT1 | rs386833628 | ClinVar, |
| 1 | g.40562794A > T | PPT1 | rs386833627 | ClinVar, |
| 1 | g.40562797C > A | PPT1 | rs386833626 | ClinVar, |
| 1 | g.40562797C > T | PPT1 | rs386833626 | ClinVar, |
| 1 | g.40562797del | PPT1 | rs386833625 | ClinVar, |
| 1 | g.5927091del | NPHP4 | | HGMD, |
| 1 | g.5950967del | NPHP4 | | HGMD, |
| 1 | g.5964848G > A | NPHP4 | rs137852923 | ClinVar, |
| 1 | g.6021854C > T | NPHP4 | | HGMD, |
| 1 | g.6021886del | NPHP4 | | HGMD, |
| 1 | g.68903976A > G | RPE65 | rs61752909 | GEDi, ClinVar, Ensembl, |
| 1 | g.68903976C > T | RPE65 | rs61752909 | HGMD, |
| 1 | g.68904631_68904632insCCA | RPE65 | | HGMD, |
| 1 | g.68904634A > G | RPE65 | rs61752908 | HGMD, |
| 1 | g.68910529C > G | RPE65 | rs61752874 | HGMD, |
| 1 | g.68910541G > A | RPE65 | rs61752871 | ClinVar, Ensembl, |
| 1 | g.68910541T > C | RPE65 | rs61752871 | HGMD, |
| 1 | g.68910558A > G | RPE65 | rs61752870 | HGMD, |
| 1 | g.68912500del | RPE65 | | HGMD, |
| 1 | g.68912507A > G | RPE65 | rs61751282 | HGMD, |
| 1 | g.68912520A > G | RPE65 | rs61751281 | HGMD, |
| 1 | g.68912543T > G | RPE65 | rs61751278 | HGMD, |
| 1 | g.94458799C > T | ABCA4 | | HGMD, |
| 1 | g.94463416C > T | ABCA4 | | HGMD, |
| 1 | g.94463425G > C | ABCA4 | rs61748521 | Ensembl, HGMD, |
| 1 | g.94463428G > A | ABCA4 | | HGMD, |
| 1 | g.94463434T > C | ABCA4 | | HGMD, |
| 1 | g.94463437T > G | ABCA4 | | HGMD, |
| 1 | g.94463460A > G | ABCA4 | | HGMD, |
| 1 | g.94466625G > A | ABCA4 | rs2297669 | Ensembl, |
| 1 | g.94466625G > T | ABCA4 | rs2297669 | Ensembl, |
| 1 | g.94466628G > A | ABCA4 | | HGMD, |
| 1 | g.94466638G > T | ABCA4 | | HGMD, |
| 1 | g.94466644del | ABCA4 | | HGMD, |
| 1 | g.94466658C > T | ABCA4 | | HGMD, |
| 1 | g.94471004A > T | ABCA4 | | HGMD, |
| 1 | g.94471022C > T | ABCA4 | | HGMD, |
| 1 | g.94471026G > A | ABCA4 | | HGMD, |
| 1 | g.94473189C > A | ABCA4 | | HGMD, |
| 1 | g.94473189C > T | ABCA4 | | HGMD, |
| 1 | g.94476413C > T | ABCA4 | | HGMD, |
| 1 | g.94476417C > T | ABCA4 | | HGMD, |
| 1 | g.94476419A > T | ABCA4 | | HGMD, |
| 1 | g.94476424 C > T | ABCA4 | | HGMD, |
| 1 | g.94476426T > C | ABCA4 | | HGMD, |
| 1 | g.94476428G > A | ABCA4 | | HGMD, |
| 1 | g.94476467T > A | ABCA4 | | HGMD, |
| 1 | g.94476486C > T | ABCA4 | | HGMD, |
| 1 | g.94480222G > C | ABCA4 | | HGMD, |
| 1 | g.94480222G > T | ABCA4 | | HGMD, |
| 1 | g.94480224A > G | ABCA4 | | HGMD, |
| 1 | g.94480232G > A | ABCA4 | | HGMD, |
| 1 | g.94480235A > T | ABCA4 | | HGMD, |
| 1 | g.94480241A > C | ABCA4 | | HGMD, |
| 1 | g.94480243C > T | ABCA4 | | HGMD, |
| 1 | g.94486815A > C | ABCA4 | rs61753018 | HGMD, |
| 1 | g.94486836G > A | ABCA4 | | HGMD, |
| 1 | g.94495000C > A | ABCA4 | | HGMD, |
| 1 | g.94495003del | ABCA4 | | HGMD, |
| 1 | g.94495005A > C | ABCA4 | | HGMD, |
| 1 | g.94495018C > A | ABCA4 | | HGMD, |
| 1 | g.94495021C > A | ABCA4 | | HGMD, |
| 1 | g.94495021C > T | ABCA4 | | HGMD, |
| 1 | g.94495034G > T | ABCA4 | | HGMD, |
| 1 | g.94495983C > T | ABCA4 | | HGMD, |
| 1 | g.94495990C > T | ABCA4 | | HGMD, |
| 1 | g.94496557G > T | ABCA4 | | HGMD, |
| 1 | g.94496562T > G | ABCA4 | | HGMD, |
| 1 | g.94496571G > A | ABCA4 | | HGMD, |
| 1 | g.94496583A > G | ABCA4 | | HGMD, |
| 1 | g.94497333C > T | ABCA4 | | HGMD, |
| 1 | g.94497360G > A | ABCA4 | | HGMD, |
| 1 | g.94502702T > C | ABCA4 | | HGMD, |
| 1 | g.94502706C > A | ABCA4 | | HGMD, |
| 1 | g.94506902G > A | ABCA4 | | HGMD, |
| 1 | g.94506907C > T | ABCA4 | | HGMD, |
| 1 | g.94506917T > G | ABCA4 | | HGMD, |
| 1 | g.94506921C > G | ABCA4 | | HGMD, |
| 1 | g.94506923C > T | ABCA4 | rs61751399 | ClinVar, Ensembl, |
| 1 | g.94506937G > A | ABCA4 | | HGMD, |
| 1 | g.94506945del | ABCA4 | | HGMD, |
| 1 | g.94506952G > T | ABCA4 | | HGMD, |
| 1 | g.94508895A > G | ABCA4 | | HGMD, |
| 1 | g.94508919G > A | ABCA4 | | HGMD, |
| 1 | g.94508934C > T | ABCA4 | | HGMD, |
| 1 | g.94512478G > T | ABCA4 | | HGMD, |
| 1 | g.94512481G > T | ABCA4 | | HGMD, |
| 1 | g.94512485T > G | ABCA4 | | HGMD, |
| 1 | g.94514513C > T | ABCA4 | | HGMD, |
| 1 | g.94520801C > T | ABCA4 | | HGMD, |
| 1 | g.94520846del | ABCA4 | | HGMD, |
| 1 | g.94520864A > G | ABCA4 | | HGMD, |
| 1 | g.94520869G > C | ABCA4 | | HGMD, |
| 1 | g.94522156C > T | ABCA4 | | HGMD, |
| 1 | g.94522194C > T | ABCA4 | | HGMD, |
| 1 | g.94522202G > T | ABCA4 | | HGMD, |
| 1 | g.94526092C > G | ABCA4 | | HGMD, |
| 1 | g.94526106G > A | ABCA4 | | HGMD, |
| 1 | g.94528137C > T | ABCA4 | | HGMD, |
| 1 | g.94528143C > T | ABCA4 | rs61749417 | Ensembl, |
| 1 | g.94528148C > G | ABCA4 | | HGMD, |
| 1 | g.94528153G > T | ABCA4 | | HGMD, |
| 1 | g.94528806A > G | ABCA4 | rs61751392 | ClinVar, Ensembl, |
| 1 | g.94528815A > C | ABCA4 | | HGMD, |
| 1 | g.94528815T > C | ABCA4 | | HGMD, |
| 1 | g.94528819G > A | ABCA4 | | HGMD, |
| 1 | g.94528836T > C | ABCA4 | | HGMD, |
| 1 | g.94528842T > C | ABCA4 | | HGMD, |
| 1 | g.94528854A > C | ABCA4 | | HGMD, |
| 1 | g.94528859A > C | ABCA4 | | HGMD, |
| 1 | g.94528874C > T | ABCA4 | | HGMD, |
| 1 | g.94543246C > T | ABCA4 | | HGMD, |
| 1 | g.94543269G > A | ABCA4 | | HGMD, |
| 1 | g.94543272del | ABCA4 | | HGMD, |
| 1 | g.94543278T > C | ABCA4 | rs138157885 | HGMD, |
| 1 | g.94543281T > G | ABCA4 | | HGMD, |
| 1 | g.94543290T > G | ABCA4 | | GEDi, |
| 1 | g.94546234G > T | ABCA4 | | HGMD, |
| 1 | g.94546248del | ABCA4 | | HGMD, |
| 1 | g.94546262G > C | ABCA4 | | HGMD, |
| 1 | g.94546265G > A | ABCA4 | | HGMD, |
| 1 | g.94564484G > A | ABCA4 | rs61750200 | ClinVar, Ensembl, |
| 1 | g.94564500G > A | ABCA4 | rs61748536 | Ensembl, |
| 1 | g.94564500G > C | ABCA4 | rs61748536 | Ensembl, HGMD, |
| 1 | g.94564508A > G | ABCA4 | | HGMD, |
| 1 | g.94564544A > G | ABCA4 | rs61748535 | HGMD, |
| 1 | g.94568571C > G | ABCA4 | | HGMD, |
| 1 | g.94568577del | ABCA4 | | HGMD, |
| 1 | g.94568581A > G | ABCA4 | rs202198282 | HGMD, |
| 2 | g.110889347del | NPHP1 | | HGMD, |
| 2 | g.112656371C > G | MERTK | | HGMD, |
| 2 | g.112765985G > C | MERTK | | HGMD, |
| 2 | g.112777100G > T | MERTK | | HGMD, |
| 2 | g.112779003T > C | MERTK | | HGMD, |
| 2 | g.112779023del | MERTK | | HGMD, |
| 2 | g.170349410G > A | BBS5 | rs179363897 | ClinVar, Ensembl, |
| 2 | g.182423333del | CERKL | rs398122964 | ClinVar, HGMD, |
| 2 | g.182521495C > T | CERKL | | HGMD, |
| 2 | g.202493952C > T | TMEM237 | | HGMD, |
| 2 | g.202494451C > A | TMEM237 | | HGMD, |
| 2 | g.234229468T > C | SAG | rs137886124 | HGMD, |
| 2 | g.234243717G > T | SAG | rs397514682 | ClinVar, |
| 2 | g.234243727del | SAG | | HGMD, |
| 2 | g.62066572G > A | FAM161A | rs202193201 | GEDi, ClinVar, Ensembl, |
| 2 | g.62066572G > C | FAM161A | rs202193201 | ClinVar, Ensembl, HGMD, |
| 2 | g.62066572T > C | FAM161A | rs202193201 | HGMD, |
| 2 | g.96962682C > T | SNRNP200 | | HGMD, |
| 2 | g.99008421C > T | CNGA3 | | HGMD, |
| 2 | g.99008427C > G | CNGA3 | | HGMD, |
| 3 | g.100949961T > C | IMPG2 | rs199867882 | HGMD, |
| 3 | g.101023121A > G | IMPG2 | rs201893645 | Ensembl, |
| 3 | g.101023121C > T | IMPG2 | rs201893545 | HGMD, |
| 3 | g.121491530A > G | IQCB1 | rs140630401 | HGMD, |
| 3 | g.121500619G > A | IQCB1 | rs121918244 | ClinVar, |
| 3 | g.129249848A > C | RHO | rs104893793 | HGMD, |
| 3 | g.129249848C > A | RHO | rs104893793 | ClinVar, Ensembl, |
| 3 | g.129249848T > C | RHO | | HGMD, |
| 3 | g.129249856C > T | RHO | | HGMD, |
| 3 | g.129249858G > C | RHO | | HGMD, |
| 3 | g.129249862C > G | RHO | | HGMD, |
| 3 | g.129249866G > C | RHO | | HGMD, |
| 3 | g.129249869A > C | RHO | | HGMD, |
| 3 | g.129249869T > C | RHO | | HGMD, |
| 3 | g.129249877A > G | RHO | | HGMD, |
| 3 | g.129249884T > C | RHO | | HGMD, |
| 3 | g.129251096A > G | RHO | rs104893776 | ClinVar, Ensembl, |
| 3 | g.129251096G > A | RHO | rs104893776 | HGMD, |
| 3 | g.129251098T > A | RHO | | HGMD, |
| 3 | g.129251101G > C | RHO | | HGMD, |
| 3 | g.129251101T > C | RHO | | HGMD, |
| 3 | g.129251104A > G | RHO | | HGMD, |
| 3 | g.129251107A > G | RHO | rs104893780 | HGMD, |
| 3 | g.129251107G > A | RHO | rs104893780 | ClinVar, Ensembl, |
| 3 | g.129252450G > A | RHO | | HGMD, |
| 3 | g.129252450G > T | RHO | | HGMD, |
| 3 | g.129252456dup | RHO | | HGMD, |
| 3 | g.129252459G > C | RHO | | HGMD, |
| 3 | g.129252473A > C | RHO | rs138831590 | HGMD, |
| 3 | g.129252494del | RHO | | HGMD, |
| 3 | g.132432009C > G | NPHP3 | rs119456960 | ClinVar, |
| 3 | g.193311167T > A | OPA1 | | HGMD, |
| 3 | g.193311169T > G | OPA1 | | HGMD, |
| 3 | g.193311172A > G | OPA1 | | HGMD, |
| 3 | g.193311188T > G | OPA1 | | HGMD, |
| 3 | g.193354983G > A | OPA1 | | HGMD, |
| 3 | g.193355740G > A | OPA1 | | HGMD, |
| 3 | g.193355740G > T | OPA1 | | HGMD, |
| 3 | g.193361414G > A | OPA1 | | HGMD, |
| 3 | g.50230572G > A | GNAT1 | rs104893740 | ClinVar, Ensembl, |
| 4 | g.100530134G > T | MTTP | rs199422222 | ClinVar, |
| 4 | g.111543456A > T | PITX2 | rs28936408 | Ensembl, |
| 4 | g.13378177T > C | RAB28 | | HGMD, |
| 4 | g.13383201G > A | RAB28 | rs398123044 | ClinVar, |
| 4 | g.13383201T > C | RAB28 | | HGMD, |
| 4 | g.15542617C > T | CC2D2A | | HGMD, |
| 4 | g.15565097T > C | CC2D2A | | HGMD, |
| 4 | g.15565108C > G | CC2D2A | rs386833750 | ClinVar, |
| 4 | g.15565108C > T | CC2D2A | rs386833750 | ClinVar, |
| 4 | g.15569105G > C | CC2D2A | | HGMD, |
| 4 | g.16010716A > T | PROM1 | | GEDi, |
| 4 | g.16010732C > T | PROM1 | | HGMD, |
| 4 | g.187117161C > T | CYP4V2 | rs119103283 | HGMD, |
| 4 | g.187117161T > C | CYP4V2 | rs119103283 | ClinVar, Ensembl, |
| 4 | g.187117164G > T | CYP4V2 | rs199476188 | HGMD, |
| 4 | g.187117164T > G | CYP4V2 | rs199476188 | ClinVar, Ensembl, |
| 4 | g.187130393A > G | CYP4V2 | rs202204817 | HGMD, |
| 4 | g.187130414G > A | CYP4V2 | rs144109267 | HGMD, |
| 4 | g.187130417G > A | CYP4V2 | | HGMD, |
| 4 | g.187130420C > T | CYP4V2 | | HGMD, |
| 4 | g.39274682G > A | WDR19 | | HGMD, |
| 4 | g.6288894T > C | WFS1 | | HGMD, |
| 4 | g.6290718A > G | WFS1 | rs71530914 | HGMD, |
| 4 | g.6290726A > T | WFS1 | | HGMD, |
| 4 | g.6293062C > T | WFS1 | | HGMD, |
| 4 | g.6293068G > A | WFS1 | | HGMD, |
| 4 | g.6293094A > G | WFS1 | rs138682654 | HGMD, |
| 4 | g.6302396T > C | WFS1 | | HGMD, |
| 4 | g.656302A > G | PDE6B | | HGMD, |
| 4 | g.659043G > A | PDE6B | | HGMD, |
| 5 | g.149277970T > A | PDE6A | | HGMD, |
| 5 | g.178413133G > A | GRM6 | rs62638624 | ClinVar, Ensembl, |
| 5 | g.178413165T > A | GRM6 | | HGMD, |
| 5 | g.178413189del | GRM6 | | HGMD, |
| 5 | g.33944917C > T | SLC45A2 | | HGMD, |
| 5 | g.33944928C > T | SLC45A2 | | HGMD, |
| 5 | g.33954494A > C | SLC45A2 | | HGMD, |
| 5 | g.33964078C > G | SLC45A2 | | HGMD, |
| 5 | g.33964091C > T | SLC45A2 | | HGMD, |
| 5 | g.33982352G > A | SLC45A2 | | HGMD, |
| 5 | g.33984312A > T | SLC45A2 | | HGMD, |
| 5 | g.33984361C > T | SLC45A2 | | HGMD, |
| 5 | g.90007139G > C | GPR98 | | HGMD, |
| 5 | g.90079142G > T | GPR98 | | HGMD, |
| 5 | g.90098692G > A | GPR98 | rs61731030 | HGMD, |
| 5 | g.90124769T > G | GPR98 | | HGMD, |
| 6 | g.10830803C > G | MAK | | HGMD, |
| 6 | g.137143923C > G | PEX7 | rs61753238 | ClinVar, |
| 6 | g.1610966dup | FOXC1 | | HGMD, |
| 6 | g.1610997del | FOXC1 | | HGMD, |
| 6 | g.1611005A > G | FOXC1 | | HGMD, |
| 6 | g.1611015del | FOXC1 | | HGMD, |
| 6 | g.1611015T > C | FOXC1 | rs104893951 | Ensembl, |
| 6 | g.1611024A > C | FOXC1 | | HGMD, |
| 6 | g.1611038C > T | FOXC1 | rs121909339 | Ensembl, |
| 6 | g.1611043del | FOXC1 | | HGMD, |
| 6 | g.1611047C > T | FOXC1 | | HGMD, |
| 6 | g.1611058C > G | FOXC1 | | HGMD, |
| 6 | g.1611060G > A | FOXC1 | | HGMD, |
| 6 | g.1611063A > G | FOXC1 | | HGMD, |
| 6 | g.1611068C > T | FOXC1 | rs121909338 | Ensembl, |
| 6 | g.1611072C > T | FOXC1 | rs104893957 | Ensembl, |
| 6 | g.1611084G > A | FOXC1 | | HGMD, |
| 6 | g.31907147T > C | C2 | rs550605 | Ensembl, |
| 6 | g.31915532C > T | CFB | rs4151670 | Ensembl, |
| 6 | g.35471382T > C | TULP1 | | HGMD, |
| 6 | g.35471401A > C | TULP1 | | HGMD, |
| 6 | g.35477409A > G | TULP1 | | HGMD, |
| 6 | g.42141500C > T | GUCA1A | rs104893968 | ClinVar, Ensembl, |
| 6 | g.42141500T > C | GUCA1A | rs104893968 | HGMD, |
| 6 | g.42146986C > T | GUCA1A | rs121434631 | ClinVar, Ensembl, |
| 6 | g.42146986T > C | GUCA1A | rs121434631 | HGMD, |
| 6 | g.42146999C > A | GUCA1A | | HGMD, |
| 6 | g.42146999G > A | GUCA1A | | HGMD, |
| 6 | g.42147011T > G | GUCA1A | | HGMD, |
| 6 | g.42672106_42672107del | PRPH2 | | HGMD, |
| 6 | g.42672129A > G | PRPH2 | rs62645936 | HGMD, |
| 6 | g.42672134A > G | PRPH2 | rs62645935 | HGMD, |
| 6 | g.42933096G > A | PEX6 | | HGMD, |
| 6 | g.42933788G > A | PEX6 | | HGMD, |
| 6 | g.42935279C > T | PEX6 | | HGMD, |
| 6 | g.42935302C > A | PEX6 | | HGMD, |
| 6 | g.42936027C > T | PEX6 | | HGMD, |
| 6 | g.42936070G > A | PEX6 | | HGMD, |
| 6 | g.42937405del | PEX6 | | HGMD, |
| 6 | g.42941826T > C | PEX6 | | HGMD, |
| 6 | g.42942745del | PEX6 | | HGMD, |
| 6 | g.65149056del | EYS | | HGMD, |
| 6 | g.65303193T > A | EYS | rs190009374 | Ensembl, HGMD, |
| 6 | g.65336015del | EYS | | HGMD, |
| 6 | g.65596736C > A | EYS | | HGMD, |
| 6 | g.66005755C > G | EYS | | HGMD, |
| 6 | g.80202268C > T | LCA5 | | HGMD, |
| 7 | g.128038485A > G | IMPDH1 | rs121912551 | HGMD, |
| 7 | g.128038485C > T | IMPDH1 | rs121912551 | ClinVar, Ensembl, |
| 7 | g.128038511A > G | IMPDH1 | | HGMD, |
| 7 | g.128038575G > A | IMPDH1 | | HGMD, |
| 7 | g.128038580G > A | IMPDH1 | | GEDi, |
| 7 | g.128038595C > G | IMPDH1 | | HGMD, |
| 7 | g.128038607C > T | IMPDH1 | | HGMD, |
| 7 | g.128038611A > G | IMPDH1 | rs121912550 | HGMD, |
| 7 | g.128038611C > T | IMPDH1 | rs121912550 | ClinVar, Ensembl, |
| 7 | g.128038616C > G | IMPDH1 | rs121912552 | ClinVar, Ensembl, HGMD, |
| 7 | g.128040174A > C | IMPDH1 | rs121912554 | ClinVar, Ensembl, |
| 7 | g.128040174G > T | IMPDH1 | rs121912554 | HGMD, |
| 7 | g.128040882G > A | IMPDH1 | rs121912553 | ClinVar, Ensembl, |
| 7 | g.128040882T > C | IMPDH1 | rs121912553 | HGMD, |
| 7 | g.128414670G > A | OPN1SW | | HGMD, |
| 7 | g.33135003G > A | RP9 | rs104894039 | HGMD, |
| 7 | g.33135003T > C | RP9 | rs104894039 | ClinVar, Ensembl, |
| 7 | g.33136162T > A | RP9 | rs104894037 | ClinVar, Ensembl, HGMD, |
| 7 | g.33573603T > A | BBS9 | | HGMD, |
| 7 | g.92123607C > A | PEX1 | | HGMD, |
| 7 | g.92134045C > A | PEX1 | | HGMD, |
| 7 | g.92146589C > A | PEX1 | | HGMD, |
| 7 | g.92146636del | PEX1 | | HGMD, |
| 8 | g.100844596G > T | VPS13B | rs386834119 | ClinVar, HGMD, |
| 8 | g.100871535G > A | VPS13B | rs386834057 | ClinVar, |
| 8 | g.38874730A > G | ADAM9 | | HGMD, |
| 8 | g.38884330G > A | ADAM9 | | HGMD, |
| 8 | g.55534132A > C | RP1 | | HGMD, |
| 8 | g.55534713A > G | RPI | rs145691085 | HGMD, |
| 8 | g.55534723del | RP1 | | HGMD, |
| 8 | g.87591437del | CNGB3 | | HGMD, |
| 8 | g.87591479G > A | CNGB3 | | FIGMD, |
| 8 | g.87645092A > G | CNGB3 | rs147876778 | HGMD, |
| 8 | g.87656917A > C | CNGB3 | | HGMD, |
| 8 | g.87679359G > A | CNGB3 | | HGMD, |
| 8 | g.87683218_87683219insA | CNGB3 | | HGMD, |
| 9 | g.103055321C > T | INVS | | HGMD, |
| 9 | g.117241027del | DFNB31 | rs397517258 | Ensembl, |
| 9 | g.12698611G > A | TYRP1 | | HGMD, |
| 9 | g.12702424G > A | TYRP1 | rs281865424 | ClinVar, Ensembl, |
| 9 | g.139327731C > G | INPP5E | | HGMD, |
| 9 | g.2719087A > T | KCNV2 | | HGMD, |
| 9 | g.2719087G > T | KCNV2 | | HGMD, |
| 9 | g.2729465A > G | KCNV2 | rs104894115 | HGMD, |
| 9 | g.2729465G > A | KCNV2 | rs104894115 | ClinVar, Ensembl, |
| 9 | g.2729470A > G | KCNV2 | rs149648640 | HGMD, |
| 9 | g.2729470T > G | KCNV2 | | HGMD, |
| 9 | g.2729494del | KCNV2 | | HGMD, |
| 10 | g.102510581C > T | PAX2 | | HGMD, |
| 10 | g.102510627C > A | PAX2 | | HGMD, |
| 10 | g.102566202C > G | PAX2 | | HGMD, |
| 10 | g.126086520C > A | OAT | rs1800456 | ClinVar, Ensembl, |
| 10 | g.126086520C > G | OAT | rs1800456 | ClinVar, Ensembl, |
| 10 | g.126086524A > T | OAT | rs386833598 | ClinVar, Ensembl, |
| 10 | g.126086555G > A | OAT | rs121965058 | ClinVar, Ensembl, |
| 10 | g.126086581G > A | OAT | rs121965044 | ClinVar, Ensembl, |
| 10 | g.126086626A > G | OAT | rs121965043 | ClinVar, Ensembl, |
| 10 | g.126086630C > A | OAT | rs121965055 | ClinVar, Ensembl, |
| 10 | g.126089444C > G | OAT | rs121965045 | ClinVar, Ensembl, |
| 10 | g.126089450C > T | OAT | rs386833595 | ClinVar, Ensembl, |
| 10 | g.126089510C > T | OAT | rs121965053 | ClinVar, Ensembl, |
| 10 | g.126090315C > T | OAT | rs121965047 | ClinVar, Ensembl, |
| 10 | g.126090318G > A | OAT | rs386833623 | ClinVar, Ensembl, |
| 10 | g.126090331A > T | OAT | rs386833622 | ClinVar, Ensembl, |
| 10 | g.126090354G > A | OAT | rs121965049 | ClinVar, Ensembl, |
| 10 | g.126090357C > T | OAT | rs386833621 | ClinVar, Ensembl, |
| 10 | g.126090357del | OAT | rs386833620 | ClinVar, Ensembl, HGMD, |
| 10 | g.126091499G > C | OAT | rs121965057 | ClinVar, Ensembl, |
| 10 | g.126091572C > T | OAT | rs267606924 | ClinVar, Ensembl, |
| 10 | g.126091584C > T | OAT | rs121965042 | ClinVar, Ensembl, |
| 10 | g.126092390G > A | OAT | rs386833617 | ClinVar, Ensembl, |
| 10 | g.126092390G > T | OAT | rs386833617 | ClinVar, Ensembl, |
| 10 | g.126100738C > T | OAT | rs121965034 | ClinVar, Ensembl, |
| 10 | g.126100738del | OAT | | HGMD, |
| 10 | g.13151270G > A | OPTN | rs28939688 | Ensembl, |
| 10 | g.13158364G > A | OPTN | | HGMD, |
| 10 | g.13178766G > A | OPTN | rs75654767 | Ensembl, |
| 10 | g.13325695G > A | PHYH | rs104894178 | Ensembl, |
| 10 | g.13330512G > T | PHYH | rs28939672 | Ensembl, |
| 10 | g.13330543T > C | PHYH | | HGMD, |
| 10 | g.48385854A > G | RBP3 | rs146150511 | HGMD, |
| 10 | g.48385854C > T | RBP3 | rs146150511 | ClinVar, Ensembl, |
| 10 | g.55912907G > C | PCDH15 | | HGMD, |
| 10 | g.56077174G > A | PCDH15 | rs111033260 | Ensembl, |
| 10 | g.56077174T > C | PCDH15 | rs111033260 | HGMD, |
| 10 | g.73269965del | CDH23 | | HGMD, |
| 10 | g.73269982G > C | CDH23 | | HGMD, |
| 10 | g.73330661A > G | CDH23 | | HGMD, |
| 10 | g.73330661G > A | CDH23 | | FIGMD, |
| 10 | g.73454017G > A | CDH23 | | HGMD, |
| 10 | g.73485263T > C | CDH23 | | HGMD, |
| 10 | g.73539199T > C | CDH23 | | HGMD, |
| 10 | g.73544858G > A | CDH23 | rs397517341 | Ensembl, |
| 10 | g.73550888G > C | CDH23 | | HGMD, |
| 10 | g.73559011T > C | CDH23 | | HGMD, |
| 10 | g.73563128G > A | CDH23 | rs202052174 | Ensembl, |
| 10 | g.73563177G > A | CDH23 | | HGMD, |
| 10 | g.73567085A > G | CDH23 | | HGMD, |
| 10 | g.85961671A > G | CDHR1 | | HGMD, |
| 10 | g.85971975G > C | CDHR1 | rs143662988 | HGMD, |
| 10 | g.86007463A > C | RGR | rs104894187 | ClinVar, Ensembl, |
| 10 | g.86007463C > A | RGR | rs104894187 | HGMD, |
| 10 | g.94368821G > T | KIF11 | | HGMD, |
| 10 | g.94405401T > C | KIF11 | | HGMD, |
| 10 | g.95380377T > A | PDE6C | | HGMD, |
| 10 | g.95399825A > G | PDE6C | | HGMD, |
| 11 | g.17517141C > T | USH1C | | HGMD, |
| 11 | g.17531360G > A | USH1C | | HGMD, |
| 11 | g.17542894T > C | USH1C | | HGMD, |
| 11 | g.17547892A > C | USH1C | | HGMD, |
| 11 | g.17547896A > C | USH1C | | HGMD, |
| 11 | g.17548589del | USH1C | | HGMD, |
| 11 | g.17552719del | USH1C | | HGMD, |
| 11 | g.31812383G > C | PAX6 | rs121907915 | Ensembl, |
| 11 | g.31815345C > T | PAX6 | rs121907929 | Ensembl, |
| 11 | g.31823109G > T | PAX6 | rs121907928 | ClinVar, |
| 11 | g.31823159G > A | PAX6 | rs121907914 | ClinVar, |
| 11 | g.31824256A > G | PAX6 | | HGMD, |
| 11 | g.31824281G > A | PAX6 | rs397514640 | ClinVar, |
| 11 | g.31824286C > G | PAX6 | | HGMD, |
| 11 | g.61719283A > C | BEST1 | | HGMD, |
| 11 | g.61719283T > C | BEST1 | | HGMD, |
| 11 | g.61719286C > T | BEST1 | | HGMD, |
| 11 | g.61719289T > C | BEST1 | | HGMD, |
| 11 | g.61719291C > T | BEST1 | | HGMD, |
| 11 | g.61719295A > C | BEST1 | | HGMD, |
| 11 | g.61719295G > C | BEST1 | rs281865204 | HGMD, |
| 11 | g.61719304A > T | BEST1 | | HGMD, |
| 11 | g.61719304C > T | BEST1 | rs281865205 | HGMD, |
| 11 | g.61719307T > C | BEST1 | rs281865207 | HGMD, |
| 11 | g.61729746dup | BEST1 | | HGMD, |
| 11 | g.66281934G > T | BBS1 | | HGMD, |
| 11 | g.66283014C > T | BBS1 | | HGMD, |
| 11 | g.66291353G > A | BBS1 | | HGMD, |
| 11 | g.66299149T > A | BBS1 | | HGMD, |
| 11 | g.66299160del | BBS1 | | HGMD, |
| 11 | g.66299163G > T | BBS1 | rs121917777 | Ensembl, |
| 11 | g.6636785A > T | TPP1 | rs121908198 | ClinVar, Ensembl, |
| 11 | g.6636793G > C | TPP1 | | HGMD, |
| 11 | g.6637557A > G | TPP1 | | HGMD, |
| 11 | g.6637564T > G | TPP1 | rs121908206 | ClinVar, Ensembl, |
| 11 | g.6637573G > A | TPP1 | | HGMD, |
| 11 | g.6638858G > A | TPP1 | | HGMD, |
| 11 | g.68157389G > T | LRP5 | rs121908666 | ClinVar, |
| 11 | g.68183946A > G | LRP5 | | HGMD, |
| 11 | g.68197163T > G | LRP5 | | HGMD, |
| 11 | g.68204455A > G | LRP5 | rs28939709 | HGMD, |
| 11 | g.68204455G > A | LRP5 | rs28939709 | Ensembl, |
| 11 | g.68207386T > G | LRP5 | rs80358322 | Ensembl, HGMD, |
| 11 | g.68216290C > G | LRP5 | rs149645175 | ClinVar, |
| 11 | g.68216290C > T | LRP5 | rs149645175 | ClinVar, |
| 11 | g.76853809A > G | MYO7A | | HGMD, |
| 11 | g.76853813A > C | MYO7A | | HGMD, |
| 11 | g.76853829A > C | MYO7A | rs35689081 | HGMD, |
| 11 | g.76853829C > A | MYO7A | rs35689081 | Ensembl, |
| 11 | g.76853829C > T | MYO7A | rs35689081 | Ensembl, |
| 11 | g.76853873G > A | MYO7A | rs397516284 | Ensembl, |
| 11 | g.76866985A > C | MYO7A | | HGMD, |
| 11 | g.76867705G > A | MYO7A | | HGMD, |
| 11 | g.76873170C > G | MYO7A | | HGMD, |
| 11 | g.76873192C > T | MYO7A | rs111033286 | Ensembl, |
| 11 | g.76873192T > C | MYO7A | rs111033286 | HGMD, |
| 11 | g.76873898G > C | MYO7A | | HGMD, |
| 11 | g.76873900A > G | MYO7A | rs111033206 | HGMD, |
| 11 | g.76873900G > A | MYO7A | rs111033206 | Ensembl, |
| 11 | g.76873907del | MYO7A | | HGMD, |
| 11 | g.76877208G > A | MYO7A | rs121965082 | Ensembl, |
| 11 | g.76883791C > G | MYO7A | | HGMD, |
| 11 | g.76883795del | MYO7A | | HGMD, |
| 11 | g.76885811T > C | MYO7A | | HGMD, |
| 11 | g.76885820del | MYO7A | | HGMD, |
| 11 | g.76885835T > C | MYO7A | | HGMD, |
| 11 | g.76892417A > G | MYO7A | | HGMD, |
| 11 | g.76893448G > A | MYO7A | | HGMD, |
| 11 | g.76893467A > G | MYO7A | | HGMD, |
| 11 | g.76900388G > C | MYO7A | | HGMD, |
| 11 | g.76900393A > G | MYO7A | rs111033214 | HGMD, |
| 11 | g.76900393G > A | MYO7A | rs111033214 | Ensembl, |
| 11 | g.76901065del | MYO7A | | HGMD, |
| 11 | g.76901086A > G | MYO7A | rs111033195 | HGMD, |
| 11 | g.76901093T > C | MYO7A | | HGMD, |
| 11 | g.76901895del | MYO7A | | HGMD, |
| 11 | g.76905412del | MYO7A | | HGMD, |
| 11 | g.76912644G > C | MYO7A | | HGMD, |
| 11 | g.76919822del | MYO7A | | HGMD, |
| 11 | g.76919826A > G | MYO7A | rs111033175 | Ensembl, |
| 11 | g.76919840C > T | MYO7A | | HGMD, |
| 11 | g.76919849G > A | MYO7A | | HGMD, |
| 11 | g.89017940G > T | TYR | | HGMD, |
| 11 | g.89017949A > C | TYR | | HGMD, |
| 11 | g.89017949A > G | TYR | | HGMD, |
| 11 | g.89017949A > T | TYR | | HGMD, |
| 11 | g.89017952del | TYR | | HGMD, |
| 11 | g.89017956G > T | TYR | | HGMD, |
| 11 | g.89017961G > A | TYR | rs1126809 | ClinVar, Ensembl, |
| 11 | g.89017961G > A | TYR | rs62645918 | ClinVar, Ensembl, |
| 11 | g.89017963del | TYR | | HGMD, |
| 11 | g.89017967A > C | TYR | | HGMD, |
| 11 | g.89017970G > T | TYR | | HGMD, |
| 11 | g.89017973C > T | TYR | rs104894313 | ClinVar, Ensembl, |
| 11 | g.89017980A > C | TYR | | HGMD, |
| 11 | g.89017983A > C | TYR | | HGMD, |
| 11 | g.89017987T > C | TYR | | HGMD, |
| 11 | g.89017990C > G | TYR | | HGMD, |
| 11 | g.89017993G > T | TYR | | HGMD, |
| 11 | g.89018002G > T | TYR | | HGMD, |
| 11 | g.89018006C > A | TYR | | HGMD, |
| 11 | g.89018011G > A | TYR | rs61754392 | ClinVar, Ensembl, |
| 11 | g.89018021G > A | TYR | rs61754393 | Ensembl, |
| 11 | g.89018027C > T | TYR | | HGMD, |
| 11 | g.89018033T > A | TYR | | HGMD, |
| 11 | g.89018036T > G | TYR | | HGMD, |
| 11 | g.89018048C > T | TYR | | HGMD, |
| 11 | g.89018055C > G | TYR | | HGMD, |
| 11 | g.89018057G > T | TYR | | HGMD, |
| 11 | g.89018059A > G | TYR | | HGMD, |
| 11 | g.89018062G > C | TYR | | HGMD, |
| 11 | g.89018065G > A | TYR | | HGMD, |
| 11 | g.89018080T > C | TYR | | HGMD, |
| 11 | g.89018087A > G | TYR | | HGMD, |
| 11 | g.89018092G > A | TYR | rs104894317 | ClinVar, Ensembl, |
| 11 | g.89018098G > A | TYR | rs104894318 | ClinVar, Ensembl, |
| 11 | g.89018098G > C | TYR | rs104894318 | ClinVar, Ensembl, |
| 11 | g.89018102A > G | TYR | | HGMD, |
| 11 | g.89018108A > G | TYR | | HGMD, |
| 11 | g.89018110C > G | TYR | | HGMD, |
| 11 | g.89018113C > T | TYR | | HGMD, |
| 11 | g.89018123G > A | TYR | | HGMD, |
| 11 | g.89028369G > A | TYR | | HGMD, |
| 11 | g.89028386C > A | TYR | | HGMD, |
| 11 | g.89028413C > A | TYR | | HGMD, |
| 11 | g.89028413C > G | TYR | | HGMD, |
| 11 | g.89028460C > T | TYR | | HGMD, |
| 12 | g.15130981C > G | PDE6H | rs200311463 | ClinVar, Ensembl, |
| 12 | g.48367873G > A | COL2A1 | rs121912886 | ClinVar, |
| 12 | g.48368618C > T | COL2A1 | rs121912887 | Ensembl, |
| 12 | g.48368626del | COL2A1 | | HGMD, |
| 12 | g.48369363del | COL2A1 | | HGMD, |
| 12 | g.48369826C > G | COL2A1 | rs121912883 | ClinVar, |
| 12 | g.48369848del | COL2A1 | | HGMD, |
| 12 | g.48379729C > T | COL2A1 | rs121912888 | ClinVar, |
| 12 | g.48381393del | COL2A1 | | HGMD, |
| 12 | g.48387608C > T | COL2A1 | rs121912877 | ClinVar, |
| 12 | g.48389687G > A | COL2A1 | rs121912869 | ClinVar, Ensembl, |
| 12 | g.48391407del | COL2A1 | | HGMD, |
| 12 | g.48391428del | COL2A1 | | HGMD, |
| 12 | g.56115692T > G | RDH5 | rs104894373 | Ensembl, |
| 12 | g.56117812G > A | RDH5 | rs62638191 | Ensembl, |
| 12 | g.56117812G > T | RDH5 | rs62638191 | Ensembl, |
| 12 | g.56117818dup | RDH5 | | HGMD, |
| 12 | g.88456549del | CEP290 | | HGMD, |
| 12 | g.88456563A > C | CEP290 | | HGMD, |
| 12 | g.88474139del | CEP290 | | HGMD, |
| 12 | g.88482810del | CEP290 | | HGMD, |
| 12 | g.88482837del | CEP290 | | HGMD, |
| 12 | g.88494960T > C | CEP290 | rs281865192 | GEDi, ClinVar, HGMD, |
| 12 | g.88504978C > A | CEP290 | | HGMD, |
| 12 | g.88514052del | CEP290 | | HGMD, |
| 12 | g.88520203del | CEP290 | | HGMD, |
| 12 | g.88534732C > A | CEP290 | | HGMD, |
| 12 | g.88534777C > A | CEP290 | | HGMD, |
| 13 | g.77569368G > C | CLN5 | rs202146713 | ClinVar, |
| 14 | g.21770667del | RPGRIP1 | | HGMD, |
| 14 | g.21771701T > C | RPGRIP1 | | HGMD, |
| 14 | g.21780005C > T | RPGRIP1 | | HGMD, |
| 14 | g.21790154T > C | RPGRIP1 | rs147586703 | HGMD, |
| 14 | g.21793543G > A | RPGRIP1 | | HGMD, |
| 14 | g.21794039T > C | RPGRIP1 | rs142796310 | HGMD, |
| 14 | g.21811346del | RPGRIP1 | | HGMD, |
| 14 | g.57271048dup | OTX2 | | HGMD, |
| 14 | g.68191285T > C | RDH12 | | HGMD, |
| 14 | g.68191297G > T | RDH12 | | HGMD, |
| 14 | g.68191299C > G | RDH12 | | HGMD, |
| 14 | g.68191305C > T | RDH12 | rs104894471 | ClinVar, Ensembl, |
| 14 | g.68191305T > C | RDH12 | rs104894471 | HGMD, |
| 14 | g.68191944T > C | RDH12 | | HGMD, |
| 14 | g.68192773T > A | RDH12 | | HGMD, |
| 14 | g.68193700A > C | RDH12 | rs104894475 | HGMD, |
| 14 | g.68193700C > A | RDH12 | rs104894475 | ClinVar, Ensembl, |
| 14 | g.68193700C > G | RDH12 | rs104894475 | ClinVar, Ensembl, |
| 14 | g.68193700G > C | RDH12 | rs104894475 | HGMD, |
| 14 | g.68193703A > T | RDH12 | | HGMD, |
| 14 | g.68193713C > T | RDH12 | rs121434337 | ClinVar, Ensembl, |
| 14 | g.68193713T > C | RDH12 | rs121434337 | HGMD, |
| 14 | g.68193730T > C | RDH12 | | HGMD, |
| 14 | g.68193755A > G | RDH12 | | HGMD, |
| 14 | g.68196070C > T | RDH12 | | HGMD, |
| 14 | g.68196072T > G | RDH12 | | HGMD, |
| 14 | g.68196093T > G | RDH12 | | GEDi, |
| 14 | g.74969584C > T | LTBP2 | | HGMD, |
| 14 | g.74969614C > T | LTBP2 | rs137854860 | ClinVar, Ensembl, |
| 14 | g.74969955G > A | LTBP2 | rs387907174 | ClinVar, |
| 14 | g.74995814T > G | LTBP2 | rs137854859 | Ensembl, |
| 14 | g.75018036del | LTBP2 | | HGMD, |
| 14 | g.75019595del | LTBP2 | | HGMD, |
| 14 | g.88904181G > A | SPATA7 | | HGMD, |
| 14 | g.89307541G > A | TTC8 | | HGMD, |
| 14 | g.92343965G > A | FBLN5 | rs28939073 | ClinVar, Ensembl, |
| 14 | g.92343965T > C | FBLN5 | rs28939073 | HGMD, |
| 14 | g.92403527T > C | FBLN5 | rs141200859 | HGMD, |
| 15 | g.28096537A > G | OCA2 | | HGMD, |
| 15 | g.28096539G > T | OCA2 | | HGMD, |
| 15 | g.28096543C > G | OCA2 | | HGMD, |
| 15 | g.28096543C > T | OCA2 | | HGMD, |
| 15 | g.28116386G > A | OCA2 | | HGMD, |
| 15 | g.28116392C > A | OCA2 | | HGMD, |
| 15 | g.28202743G > A | OCA2 | rs1800413 | Ensembl, |
| 15 | g.28230211T > C | OCA2 | | HGMD, |
| 15 | g.28230225G > A | OCA2 | | HGMD, |
| 15 | g.28230225G > T | OCA2 | | HGMD, |
| 15 | g.28230238T > C | OCA2 | | HGMD, |
| 15 | g.28259941T > C | OCA2 | | HGMD, |
| 15 | g.28259965G > A | OCA2 | rs121918168 | ClinVar, Ensembl, |
| 15 | g.28273067C > A | OCA2 | | HGMD, |
| 15 | g.28326993G > A | OCA2 | | HGMD, |
| 15 | g.31324894T > G | TRPM1 | | HGMD, |
| 15 | g.31327748C > T | TRPM1 | | HGMD, |
| 15 | g.31332320C > T | TRPM1 | | HGMD, |
| 15 | g.31334214T > G | TRPM1 | | HGMD, |
| 15 | g.31353650A > C | TRPM1 | | HGMD, |
| 15 | g.31360093del | TRPM1 | | HGMD, |
| 15 | g.65944981C > T | SLC24A1 | | HGMD, |
| 15 | g.68504188G > A | CLN6 | | HGMD, |
| 15 | g.68504192G > A | CLN6 | | HGMD, |
| 16 | g.73023673C > T | BBS4 | | HGMD, |
| 15 | g.73029876C > T | BBS4 | | HGMD, |
| 15 | g.78403513C > G | CIB2 | rs145415848 | ClinVar, Ensembl, HGMD, |
| 15 | g.78403513C > T | CIB2 | rs145415848 | ClinVar, Ensembl, |
| 15 | g.89753638del | RLBP1 | | HGMD, |
| 15 | g.89754981A > T | RLBP1 | rs137853291 | Ensembl, HGMD, |
| 15 | g.89760364G > T | RLBP1 | | HGMD, |
| 15 | g.89760390T > C | RLBP1 | rs200725857 | HGMD, |
| 15 | g.89761794A > G | RLBP1 | | HGMD, |
| 16 | g.16244082T > A | ABCC6 | rs72653751 | Ensembl, |
| 16 | g.16244129T > C | ABCC6 | rs212097 | Ensembl, |
| 16 | g.16244424G > C | ABCC6 | rs72664215 | Ensembl, |
| 16 | g.16244461G > A | ABCC6 | rs63750763 | Ensembl, |
| 16 | g.16244463G > A | ABCC6 | rs72547524 | ClinVar, Ensembl, |
| 16 | g.16248476C > T | ABCC6 | rs58760581 | Ensembl, |
| 16 | g.16248495C > T | ABCC6 | rs63751241 | Ensembl, |
| 16 | g.16248501G > A | ABCC6 | rs66913554 | Ensembl, |
| 16 | g.16251627del | ABCC6 | rs72664233 | ClinVar, HGMD, |
| 16 | g.16251627dup | ABCC6 | | HGMD, |
| 16 | g.16251667C > T | ABCC6 | rs63750273 | ClinVar, Ensembl, HGMD, |
| 16 | g.16255205C > T | ABCC6 | rs2376957 | Ensembl, |
| 16 | g.16255240G > A | ABCC6 | rs3213470 | Ensembl, |
| 16 | g.16256992del | ABCC6 | | HGMD, |
| 16 | g.16256994G > A | ABCC6 | rs63750987 | Ensembl, |
| 16 | g.16256994G > C | ABCC6 | rs63750987 | Ensembl, |
| 16 | g.16257016G > A | ABCC6 | rs63749794 | Ensembl, |
| 16 | g.16263524C > G | ABCC6 | rs72657692 | Ensembl, |
| 16 | g.16267111T > C | ABCC6 | rs72664301 | Ensembl, |
| 16 | g.16267140C > A | ABCC6 | rs72664209 | ClinVar, Ensembl, HGMD, |
| 16 | g.16272773G > T | ABCC6 | rs72653789 | Ensembl, |
| 16 | g.16272777G > A | ABCC6 | | HGMD, |
| 16 | g.16272792G > A | ABCC6 | rs72653788 | Ensembl, |
| 16 | g.16272807C > T | ABCC6 | rs72653787 | Ensembl, |
| 16 | g.16272818A > T | ABCC6 | rs72653786 | Ensembl, |
| 16 | g.16276419C > A | ABCC6 | rs72653784 | Ensembl, |
| 16 | g.16276423T > G | ABCC6 | rs72653783 | Ensembl, |
| 16 | g.16276656C > T | ABCC6 | rs72664208 | Ensembl, HGMD, |
| 16 | g.16278896A > C | ABCC6 | rs72664207 | Ensembl, HGMD, |
| 16 | g.16280990dup | ABCC6 | | HGMD, |
| 16 | g.16284053A > G | ABCC6 | rs72653773 | Ensembl, |
| 16 | g.16284093C > G | ABCC6 | | HGMD, |
| 16 | g.16292022G > C | ABCC6 | | HGMD, |
| 16 | g.16292024T > C | ABCC6 | rs72653764 | Ensembl, |
| 16 | g.16295852G > A | ABCC6 | rs72664295 | Ensembl, |
| 16 | g.16295858C > A | ABCC6 | rs72653763 | Ensembl, |
| 16 | g.16295858C > G | ABCC6 | rs72653763 | Ensembl, |
| 16 | g.16295863T > C | ABCC6 | rs72653762 | Ensembl, |
| 16 | g.16295890G > A | ABCC6 | rs72653761 | Ensembl, |
| 16 | g.16295893A > G | ABCC6 | rs72664284 | Ensembl, |
| 16 | g.16295902G > A | ABCC6 | rs72650699 | Ensembl, |
| 16 | g.16295926T > C | ABCC6 | rs72653760 | Ensembl, |
| 16 | g.16295943G > C | ABCC6 | rs72653759 | Ensembl, |
| 16 | g.16295947G > A | ABCC6 | rs72650698 | Ensembl, |
| 16 | g.16295957T > C | ABCC6 | rs72664283 | Ensembl, |
| 16 | g.16295970A > C | ABCC6 | rs72653758 | Ensembl, |
| 16 | g.16297265del | ABCC6 | | HGMD, |
| 16 | g.16297305del | ABCC6 | | HGMD, |
| 16 | g.16297310T > C | ABCC6 | rs72657699 | Ensembl, |
| 16 | g.16297314G > C | ABCC6 | rs78678589 | Ensembl, |
| 16 | g.16297314G > T | ABCC6 | rs78678589 | Ensembl, |
| 16 | g.16297410G > A | ABCC6 | rs4780605 | Ensembl, |
| 16 | g.16297424T > C | ABCC6 | rs4780606 | Ensembl, |
| 16 | g.16302586T > C | ABCC6 | rs72657698 | Ensembl, |
| 16 | g.16302625G > A | ABCC6 | rs72653757 | Ensembl, |
| 16 | g.16302637G > A | ABCC6 | rs72653756 | Ensembl, |
| 16 | g.16302655C > A | ABCC6 | rs72650697 | Ensembl, |
| 16 | g.16302698G > C | ABCC6 | | HGMD, |
| 16 | g.16302703C > T | ABCC6 | rs72653755 | Ensembl, |
| 16 | g.16306030G > A | ABCC6 | rs72664291 | Ensembl, |
| 16 | g.16306030G > C | ABCC6 | rs72664291 | Ensembl, |
| 16 | g.16306030G > T | ABCC6 | rs72664291 | Ensembl, |
| 16 | g.16306050C > A | ABCC6 | rs72653754 | Ensembl, |
| 16 | g.16306059C > T | ABCC6 | rs72664282 | Ensembl, |
| 16 | g.16306085C > T | ABCC6 | rs72657697 | Ensembl, |
| 16 | g.16308158G > A | ABCC6 | rs72664290 | Ensembl, |
| 16 | g.16308186G > A | ABCC6 | | HGMD, |
| 16 | g.16308232C > T | ABCC6 | rs72664281 | Ensembl, |
| 16 | g.16308285G > A | ABCC6 | | HGMD, |
| 16 | g.16308351G > A | ABCC6 | rs2239319 | Ensembl, |
| 16 | g.16313412G > A | ABCC6 | rs2606921 | Ensembl, |
| 16 | g.16313424T > C | ABCC6 | | HGMD, |
| 16 | g.16313499C > T | ABCC6 | rs72653753 | Ensembl, |
| 16 | g.16313512C > A | ABCC6 | | HGMD, |
| 16 | g.16313512C > T | ABCC6 | | HGMD, |
| 16 | g.16313545C > A | ABCC6 | rs55778939 | Ensembl, |
| 16 | g.16313545C > G | ABCC6 | rs55778939 | Ensembl, |
| 16 | g.16313545C > T | ABCC6 | rs55778939 | Ensembl, HGMD, |
| 16 | g.16313653G > A | ABCC6 | rs56019914 | Ensembl, |
| 16 | g.16313653G > C | ABCC6 | rs56019914 | Ensembl, |
| 16 | g.16313653G > T | ABCC6 | rs56019914 | Ensembl, |
| 16 | g.16313805C > G | ABCC6 | rs72664203 | Ensembl, HGMD, |
| 16 | g.16315612C > G | ABCC6 | rs72653752 | Ensembl, |
| 16 | g.16315620del | ABCC6 | | HGMD, |
| 16 | g.16315689C > T | ABCC6 | rs72657702 | Ensembl, HGMD, |
| 16 | g.28493423T > G | CLN3 | rs386833698 | ClinVar, HGMD, |
| 16 | g.28493426C > G | CLN3 | rs386833699 | ClinVar, |
| 16 | g.28493428G > A | CLN3 | rs386833697 | ClinVar, |
| 16 | g.28493434del | CLN3 | rs386833696 | ClinVar, |
| 16 | g.28495324T > G | CLN3 | rs386833738 | ClinVar, |
| 16 | g.28499055A > G | CLN3 | rs386833714 | ClinVar, |
| 16 | g.28502798C > T | CLN3 | rs386833704 | ClinVar, HGMD, |
| 16 | g.28502823C > T | CLN3 | rs386833700 | ClinVar, |
| 16 | g.53639522G > A | RPGRIP1L | rs151332923 | Ensembl, |
| 16 | g.53692694A > G | RPGRIP1L | | HGMD, |
| 16 | 9.56519633C > T | BBS2 | | HGMD, |
| 16 | g.56534792del | BBS2 | | HGMD, |
| 16 | g.56536359T > C | BBS2 | | HGMD, |
| 16 | g.56536362C > T | BBS2 | | HGMD, |
| 16 | g.56536366G > A | BBS2 | rs121908178 | Ensembl, |
| 16 | g.68712779T > C | CDH3 | | HGMD, |
| 16 | g.68713840del | CDH3 | | HGMD, |
| 16 | g.75576500C > T | TMEM231 | rs397514753 | ClinVar, |
| 17 | g.36493523del | GPR179 | | HGMD, |
| 17 | g.56290344T > C | MKS1 | | HGMD, |
| 17 | g.56292193G > A | MKS1 | rs386834049 | ClinVar, |
| 17 | g.56296510A > G | MKS1 | rs386834052 | ClinVar, HGMD, |
| 17 | g.6329126A > G | AIPL1 | | HGMD, |
| 17 | g.6331637C > T | AIPL1 | | HGMD, |
| 17 | g.6337251A > G | AIPL1 | rs62653018 | HGMD, |
| 17 | g.6337271T > C | AIPL1 | rs144822294 | HGMD, |
| 17 | g.6337279C > T | AIPL1 | rs62653017 | HGMD, |
| 17 | g.6337299A > G | AIPL1 | | HGMD, |
| 17 | g.72915558T > A | USH1G | rs397517925 | Ensembl, HGMD, |
| 17 | g.7906368A > G | GUCY2D | | HGMD, |
| 17 | g.7906368C > G | GUCY2D | | HGMD, |
| 17 | g.7909966T > C | GUCY2D | | HGMD, |
| 17 | g.7909997A > C | GUCY2D | rs61749679 | HGMD, |
| 17 | g.7912905G > T | GUCY2D | | HGMD, |
| 17 | g.7915912T > C | GUCY2D | rs34598902 | HGMD, |
| 17 | g.7916429C > T | GUCY2D | | HGMD, |
| 17 | g.7916439T > C | GUCY2D | | HGMD, |
| 17 | g.7918775del | GUCY2D | | HGMD, |
| 17 | g.7918803T > G | GUCY2D | rs61750184 | HGMD, |
| 17 | g.7918815T > A | GUCY2D | | HGMD, |
| 17 | g.7918821del | GUCY2D | | HGMD, |
| 19 | g.48339521A > G | CRX | rs61748436 | HGMD, |
| 19 | g.48339521G > A | CRX | rs61748436 | ClinVar, Ensembl, |
| 19 | g.48339523A > G | CRX | | HGMD, |
| 19 | g.54627127G > A | PRPF31 | | HGMD, |
| 19 | g.54627141T > G | PRPF31 | | HGMD, |
| 19 | g.54627153T > G | PRPF31 | | HGMD, |
| 19 | g.54633399C > G | PRPF31 | | HGMD, |
| 19 | g.6709848C > T | C3 | rs2230204 | Ensembl, |
| 20 | g.10389422T > C | MKKS | rs137853909 | Ensembl, |
| 20 | g.10623135C > A | JAG1 | | HGMD, |
| 20 | g.10623135C > T | JAG1 | | HGMD, |
| 20 | g.10623142G > A | JAG1 | | HGMD, |
| 20 | g.10626619dup | JAG1 | | HGMD, |
| 20 | g.10626634dup | JAG1 | | HGMD, |
| 20 | g.10626642C > T | JAG1 | | HGMD, |
| 20 | g.10628608C > G | JAG1 | | HGMD, |
| 20 | g.10628615del | JAG1 | | HGMD, |
| 20 | g.10629199G > A | JAG1 | | FIGMD, |
| 20 | g.10629238G > A | JAG1 | | HGMD, |
| 20 | g.10629767A > C | JAG1 | | HGMD, |
| 20 | g.10630901G > A | JAG1 | | HGMD, |
| 20 | g.10630917del | JAG1 | | HGMD, |
| 20 | g.10630924del | JAG1 | | HGMD, |
| 20 | g.10632340C > A | JAG1 | | HGMD, |
| 20 | g.10632342del | JAG1 | | HGMD, |
| 20 | g.10633116C > T | JAG1 | | HGMD, |
| 20 | g.10633136del | JAG1 | | HGMD, |
| 20 | g.10633138C > G | JAG1 | | HGMD, |
| 20 | g.10639125A > C | JAG1 | | HGMD, |
| 20 | g.10639138C > A | JAG1 | | HGMD, |
| 20 | g.10639151C > A | JAG1 | | HGMD, |
| 20 | g.10654106G > A | JAG1 | | HGMD, |
| 20 | g.10654109del | JAG1 | | HGMD, |
| 20 | g.3893281G > A | PANK2 | rs137852963 | ClinVar, |
| 20 | g.3897602C > T | PANK2 | rs137852968 | ClinVar, Ensembl, |
| 20 | g.62658491C > T | PRPF6 | rs387907100 | ClinVar, Ensembl, |
| 20 | g.62658491T > C | PRPF6 | | HGMD, |
| X | g.13753465G > A | OFD1 | rs312262808 | ClinVar. |
| X | g.13753465G > C | OFD1 | rs312262808 | ClinVar, |
| X | g.13753467T > C | OFD1 | rs312262809 | ClinVar, |
| X | g.13754606C > T | OFD1 | rs312262810 | ClinVar, |
| X | g.13756989C > T | OFD1 | rs312262825 | ClinVar, |
| X | g.13762552T > A | OFD1 | rs312262835 | ClinVar, |
| X | g.13764918del | OFD1 | rs312262844 | ClinVar, |
| X | g.13767574del | OFD1 | rs312262856 | ClinVar, |
| X | g.13767588A > T | OFD1 | rs312262857 | ClinVar, |
| X | g.13767636del | OFD1 | rs312262860 | ClinVar, |
| X | g.13768358A > G | OFD1 | | HGMD, |
| X | g.13771485A > G | OFD1 | rs312262861 | ClinVar, |
| X | g.13771485A > T | OFD1 | rs312262861 | ClinVar, |
| X | g.13773324del | OFD1 | rs312262867 | ClinVar, |
| X | g.13774778A > C | OFD1 | rs122460150 | ClinVar, |
| X | g.13774794del | OFD1 | rs312262873 | ClinVar, |
| X | g.13774833T > A | OFD1 | rs312262877 | ClinVar, |
| X | g.13775787C > T | OFD1 | rs312262880 | ClinVar, |
| X | g.13778634del | OFD1 | rs312262889 | ClinVar, |
| X | g.13779203G > T | OFD1 | rs312262892 | ClinVar, |
| X | g.13786182del | OFD1 | rs312262894 | ClinVar, HGMD, |
| X | g.13786212dup | OFD1 | | HGMD, |
| X | g.153416373A > G | OPN1LW | | HGMD, |
| X | g.153418532C > T | OPN1LW | rs150391359 | HGMD, |
| X | g.153418535G > A | OPN1LW | rs145009674 | HGMD, |
| X | g.153418541T > G | OPN1LW | rs949431 | Ensembl, |
| X | g.153420077C > T | OPN1LW | rs121434621 | HGMD, |
| X | g.153420077T > C | OPN1LW | rs121434621 | Ensembl, |
| X | g.153420209C > T | OPN1LW | rs104894912 | GEDi, Ensembl, |
| X | g.153420209T > C | OPN1LW | rs104894912 | HGMD, |
| X | g.153421944T > C | OPN1LW | | HGMD, |
| X | g.153455662C > T | OPN1MW | rs267606927 | HGMD, |
| X | g.153455662T > C | OPN1MW | rs267606927 | Ensembl, |
| X | g.153457207T > C | OPN1MW | rs104894914 | Ensembl, |
| X | g.18662723G > A | RS1 | rs199469696 | ClinVar, |
| X | g.18662737A > G | RS1 | | HGMD, |
| X | g.18665312C > A | RS1 | rs104894934 | ClinVar, Ensembl, |
| X | g.18665312C > G | RS1 | rs104894934 | ClinVar, Ensembl, HGMD, |
| X | g.18665312T > G | RS1 | | HGMD, |
| X | g.18665314G > T | RS1 | rs61752072 | HGMD, |
| X | g.18665325G > C | RS1 | rs61752070 | HGMD, |
| X | g.18665333G > A | RS1 | rs61752067 | ClinVar, Ensembl, |
| X | g.18665333T > C | RS1 | rs61752067 | HGMD, |
| X | g.18665336C > G | RS1 | rs61752066 | HGMD, |
| X | g.18665336del | RS1 | | HGMD, |
| X | g.18665344A > C | RS1 | rs61752065 | HGMD, |
| X | g.18665349A > G | RS1 | rs61752064 | HGMD, |
| X | g.18665349C > G | RS1 | | HGMD, |
| X | g.18665351A > G | RS1 | rs61752063 | ClinVar, Ensembl, |
| X | g.18665351C > T | RS1 | rs61752063 | HGMD, |
| X | g.18674860del | RS1 | | HGMD, |
| X | g.18674880T > C | RS1 | | HGMD, |
| X | g.38156535A > T | RPGR | | HGMD, |
| X | g.38156552T > C | RPGR | | HGMD, |
| X | g.38158220G > A | RPGR | | GEDi, |
| X | g.38158220T > C | RPGR | | HGMD, |
| X | g.38163888A > G | RPGR | | HGMD, |
| X | g.38163888T > G | RPGR | | HGMD, |
| X | g.38163918C > T | RPGR | rs62640589 | HGMD, |
| X | g.38169867C > G | RPGR | | HGMD, |
| X | g.38169882T > C | RPGR | | HGMD, |
| X | g.38169899del | RPGR | | HGMD, |
| X | g.38169916T > A | RPGR | rs62638653 | HGMD, |
| X | g.38182652C > T | RPGR | | HGMD, |
| X | g.38182652T > G | RPGR | rs281865296 | HGMD, |
| X | g.38182679A > G | RPGR | rs62638629 | HGMD, |
| X | g.38182684G > C | RPGR | | HGMD, |
| X | g.41332771G > A | NYX | | HGMD, |
| X | g.43809221C > A | NDP | | NDP, |
| X | g.43809224A > G | NDP | | NDP, |
| X | g.43809227G > A | NDP | | NDP, |
| X | g.43809229G > T | NDP | rs104894882 | ClinVar, NDP, |
| X | g.43809242del | NDP | | HGMD, NDP, |
| X | g.43809248C > T | NDP | | NDP, |
| X | g.43809253C > T | NDP | | NDP, |
| X | g.43809260C > A | NDP | | NDP, |
| X | g.43809262A > G | NDP | | NDP, |
| X | g.43809266A > C | NDP | | HGMD, |
| X | g.43809266G > A | NDP | rs104894880 | ClinVar, NDP, |
| X | g.43809266G > T | NDP | | NDP, |
| X | g.43809268A > T | NDP | rs104894869 | ClinVar, NDP, |
| X | g.49062114del | CACNA1F | | HGMD, |
| X | g.49062998G > A | CACNA1F | | HGMD, |
| X | g.49067069G > C | CACNA1F | | HGMD, |
| X | g.49074913C > T | CACNA1F | | HGMD, |
| X | g.49074943G > A | CACNA1F | | HGMD, |
| X | g.49076250C > G | CACNA1F | | HGMD, |
| X | g.49084895C > A | CACNA1F | | HGMD, |
| X | g.49087073T > C | CACNA1F | | HGMD, |
| X | g.85134059T > C | CHM | rs397514603 | ClinVar, Ensembl, |
| X | g.9709377C > T | GPR143 | | HGMD, |
| X | g.9709387C > A | GPR143 | | HGMD, |
| X | g.9709387C > T | GPR143 | | HGMD, |
| X | g.9709389A > C | GPR143 | | HGMD, |
| X | g.9714186G > A | GPR143 | | HGMD, |
| X | g.9714189C > T | GPR143 | | HGMD, |
| X | g.9727456T > C | GPR143 | | HGMD, |
| X | g.9728752C > G | GPR143 | | HGMD, |
| X | g.9728757C > T | GPR143 | | HGMD, |
| X | g.9728764C > T | GPR143 | | HGMD, |
| X | g.9728771A > C | GPR143 | | HGMD, |
| X | g.9728771A > G | GPR143 | | HGMD, |
| X | g.9728781dup | GPR143 | | HGMD, |
| X | g.9728784C > T | GPR143 | | HGMD, |

### Example 6. Reproducibility and Repeatability

[0087] The reproducibility of variant detection by GEDi was assessed by comparing the detection rates for the 2,443 common SNPs in all 9 GEDi datasets from each of the 4 samples. Bases that were discrepant in 1 or more of the 9 datasets for each sample in this “GEDi vs. GEDi” comparison were identified. GEDi capture followed by Illumina sequencing is highly reproducible, with only 4-6 discrepancies detected between the replicates for each DNA sample. In each case, the discrepancies related to the heterozygous vs. homozygous state of the same identified base. In the majority of cases, one out of the 9 sequence runs performed for each DNA sample contained the discrepancy (Table 5). Further analysis of the data for each of the 17 total discrepancies showed that they were due to low SNP quality score in the SAMtools variant identification software. Sixteen of these are the same as those detected in the GEDi vs. Omni 2.5 comparisons described above (Table 5).

[0088] The repeatability and reproducibility of the GEDi test was also evaluated using the kappa statistic, or kappa coefficient of agreement³². For GEDi replicates performed on the same day the kappa statistic was 0.83088, indicating almost perfect agreement between the data obtained in the three replicates for each DNA sample analyzed³². For GEDi tests performed for the 4 individual samples on each of the three separate days the kappa statistic was 0.76366, indicating excellent reproducibility³².

TABLE 5
Details of discrepancies for GEDi vs Omni 2.5 and GEDi vs. GEDi
comparisons. Discrepancies detected in the GEDi vs Omni 2.5, and GEDi vs GEDi
comparisons are indicated. The first worksheet is a summary of all discrepancy data.

| | | | | OGI-132- | | | | | |
|---|---|---|---|---|---|---|---|---|---|
| | | NA12878 | | 357 VS | OGI-281- | OGI-281-608 | OGI-307- | OGI-307-717 | |
| | NA12878 | VS OMNI | OGI-132-357 | OMNI | 608 | VS OMNI | 717 | VS OMNI | DISCREPANCY |
| chr1: | | | 2/6 HOM/HET | NO CALL | | | | | *1 |
| 94473845 | | | | | | | | | |
| chr1: | | | | | 1/9 | 1/9 | | | *1 |
| 156146218 | | | | | HOM/HET | HOM/HET | | | |
| chr1: | | | | | | | | | *1 |
| 186101539 | | | | | | | | | |
| chr1: | | | | | | | 1/9 | 1/9 HOM/HET | *1 |
| 213071341 | | | | | | | HOM/HET | | |
| chr2: | | | | | 1/9 | 1/9 | | | *1 |
| 62052380 | | | | | HOM/HET | HOM/HET | | | |
| chr2: | | | 3/8 HOM/HET | 3/8 | | | | | *1 |
| 166770120 | | | | HOM/HET | | | | | |
| chr3: | | 9/9 | | | | 9/9 | | | *2 GEDi/*2 GEDi |
| 63986047 | | HOM/HET | | | | HOM/HET | | | |
| chr3: | 2/9 | 2/9 | | | | | | | *1 |
| 150645351 | HOM/HET | HOM/HET | | | | | | | |
| chr3: | 1/5 | 1/5 | | | | | | | *1 |
| 193413502 | HOM/HET | HOM/HET | | | | | | | |
| chr4: | | | | | | | | 9/9 HOM/HET | *5 |
| 6304087 | | | | | | | | | |
| chr4: | | | | 9/9 | | | | | *4 |
| 15981874 | | | | HOM/HET | | | | | |
| chr4: | | 9/9 | | | | 9/9 | 2/7 | 2/7 HOM/HET | *1 Omni/*4 GEDi/ |
| 15982166 | | HOM/HET | | | | HOM/HET | HOM/HET | | *1 |
| chr5: | 2/9 | 2/9 | | | | | 1/9 | 1/9 HOM/HET | *1/*1 |
| 178405941 | HOM/HET | HOM/HET | | | | | HOM/HET | | |
| chr6: | 1/7 | 1/7 | 1/3 HOM/HET | 1/3 | | | 1/7 | 1/7 HOM/HET | *1/*1/*1 |
| 42932200 | HOM/HET | HOM/HET | | HOM/HET | | | HOM/HET | | |
| chr6: | 1/8 | 1/8 | 1/7 HOM/HET | 1/7 | | | | | *1/*1/*1 GEDi |
| 42932202 | HOM/HET | HOM/HET | | HO WHET | | | | | |
| chr8: | | | | | | | | | *1 GEDi |
| 10463944 | | | | | | | | | |
| chr9: | | | | | 1/9 | 1/9 | | | *1 |
| 102861613 | | | | | HOM/HET | HOM/HET | | | |
| chr9: | | | | 9/9 | | 9/9 | | 9/9 HOM/HET | *1 OMNI/*1 OMNI/ |
| 139327064 | | | | HOM/HET | | HOM/HET | | | *1 OMNI |
| chr10: | | | | | 1/9 | 1/9 | | | *1 |
| 73461805 | | | | | HOM/HET | HOM/HET | | | |
| chr10: | | 9/9 | | 9/9 | | | | | *1 OMNI/*1 OMNI |
| 85976966 | | HOM/HET | | HOM/HET | | | | | |
| chr11: | | | | 9/9 | | 9/9 | | | *2 GEDi/*2 GEM |
| 76895772 | | | | HOM/HET | | HOM/HET | | | |
| chr11: | | | | | | | | | *1 GEDi |
| 76919478 | | | | | | | | | |
| chr14: | | | | | | | | | *1 GEDi |
| 74976852 | | | | | | | | | |
| chr15: | | | | | | | | | *6 |
| 73023725 | | | | | | | | | |
| chr15: | | 9/9 | | 9/9 | | 9/9 DISCREP | | 9/9 DISCREP | *3 GEDi/*3 GEDi/ |
| 78397352 | | DISCREP | | DISCREP | | | | | *3 GEDi/*3 GEDi |
| chr16: | | | 1/7 HOM/HET | 1/7 | | | | | *1 |
| 1265600 | | | | HOM/HET | | | | | |
| chr16: | | | 1/9 HOM/HET | 1/9 | | | | | *1 |
| 1574863 | | | | HOM/HET | | | | | |
| chr16: | | | | | 1/9 | 1/9 | | | *1 |
| 57937788 | | | | | HOM/HET | HOM/HET | | | |
| chr17: | | | | | 1/9 | 1/9 | | | *1 |
| 11835331 | | | | | HOM/HET | HOM/HET | | | |

Legend for Table 5:
*1 Low SNP quality score in SAMtools
*2 HET Deletion on target base
*3 HOM Deletion close to target base
*4 HET Insertion close to target base
*5 Omni incorect; reason uncertain
*6 Misalignment in WES Sanger match with OMNI and GEDi

### Example 7. Mutation Detection

[0089] The GEDi test correctly identified mutations in 17/18 patient samples with known IRDs, glaucoma and optic atrophy variants, including 10 indels (Table 6). GEDi testing did not correctly identify the pathogenic FOXC1 indel mutation in a patient with glaucoma; however, analysis showed a design gap in FOXC1 where this pathogenic mutation is located.

TABLE 6
Data for 18 Concordance Samples

| | | Chromosome | | Mutation I | Concor- | Chromosome | | | Concor- |
|---|---|---|---|---|---|---|---|---|---|
| SubjectID | Gene | Location | Mutation I | Effect | dance | Location | Mutation II | Mutation II Effect | dance |
| OGI-027- | PDE6B | chr4: | c.2406_ | p.(Asn802del) | Yes | chr4: | c.810C > A | p.(Cys270*) | Yes |
| 065 | | 661695 | 2408delCAA | | | 647739 | | | |
| OGI-054- | EYS | chr6: | c.3243 + | p.? | Yes | chr6: | c.3243 + | p.? | Yes |
| 134 | | 65531537 | 1G > A | | | 65531537 | 1G > A | | |
| OGI-135- | C2orf71 | chr2: | c.478_479insA | p.(Cys160*) | Yes | chr2: | c.478_ | p.(Cys160*) | Yes |
| 352 | | 29296649 | | | | 29296649 | 479insA | | |
| OGI-136- | CNGB1 | chr16: | c.2544_ | p.(Leu849Alafs*) | Yes | chr16: | c.522_ | p. (Lys175Glnfs*) | Yes |
| 364 | | 57938727 | 2545insG | | | 57994755 | 523insC | | |
| OGI-140- | CYP4V2 | chr4: | c.367A > G | p.(Met123Val) | Yes | chr4: | c.367A > | p.(Met123Val) | Yes |
| 381 | | 187117196 | | | | 187117196 | G | | |
| OGI-260- | USH24 | chr1: | c.11216_11223 | p.(Leu3739Glnfs*) | Yes | chr1: | c.10561A > | p.(Trp3521Arg) | Yes |
| 546 | | 215933009 | delTGGAGCCC | | | 215956104 | G | | |
| OGI-305- | ABCA4 | chr1: | c.5882G > A | p.(Gly1961Glu) | Yes | ch1: | c.5461- | p.? | Yes |
| 713 | | 94473807 | | | | 94476951 | 10T > C | | |
| D1830 | PITX2 | chr4: | c.202C > T | p.(Gln68*) | Yes | -NA- | -NA- | -NA- | -NA- |
| | | 111542508 | | | | | | | |
| D4598 | LTBP2 | chr14: | c.956C > A | p.(Pro319Gln) | Yes | -NA- | -NA- | -NA- | -NA- |
| | | 75022271 | | | | | | | |
| D5258 | MYOC | chr1: | c.1041T > C | p.(Tyr347Tyr) | Yes | -NA- | -NA- | -NA- | -NA- |
| (aka 5728) | | 171605539 | | | | | | | |
| D23_1 | PAX6 | chr11: | c.718C > T | p.(Arg240*) | Yes | -NA- | -NA- | -NA- | -NA- |
| | | 31815627 | | | | | | | |
| D61_1 | OPTN | chr10: | c.293T > A | p.(Met98Lys) | Yes | -NA- | -NA- | -NA- | -NA- |
| | | 13152400 | | | | | | | |
| D74_1 | OPA1 | chr3: | NM_015560.2: | p.(Val903Glyfs*) | Yes | -NA- | -NA- | -NA- | -NA- |
| | | 193384959- | c.2708- | | | -NA- | | | |
| | | 193384962 | 2711delAGTT^{¥} | | | | | | |
| D98_1 | OPA1 | chr3: | c.473G > A | p.(Ser158Ans) | Yes | chr3: | c.2274T > | p.(Ala758Ala) | Yes |
| | | 193334991 | | | | 193374964 | C | | |
| D103_1 | OPA1 | chr3: | NM_015560.2: | splicing? | Yes | chr3: | NM_ | splicing? | Yes |
| | | 193355074 | c.870 + 4T > C | | | 193355074 | 015560.2; | | |
| | | | | | | | c.870 + | | |
| | | | | | | | 4T > C | | |
| OGI-273- | MT-ND4 | m: 11778 | m.11778G > A | p. (Arg340His) | Yes | -NA- | -NA- | -NA- | -NA- |
| 581 | | | | | | | | | |
| D2145 | CYP1B1 | chr2: | c.806_814del | p.(Ser269Thrfs*6) | Yes | chr2: | c.1200_ | p.(Thr404Asnfs*27) | Yes |
| | | 38301717- | GCAACTTCA | | | 38298287- | 1209dup | | |
| | | 38301726 | | | | 38298288 | TCATGCCACC | | |
| D5017 | FOXC1 | chr6: | insertion | p.? | No^{%} | -NA- | -NA- | -NA- | -NA- |
| | | 1611803- | of inframe | | | | | | |
| | | 1611852 | (CCG)n | | | | | | |

^{%}Mutation falls within a known GEDi targeted enrichment design gap
^{¥}This deletion has been reported by Delettre C. et al “Nuclear gene OPAI, encoding a mitochondrial dynamin-related protein, is mutated in dominant optic atrophy” Nat Genet. 2000 Oct;26(2): 207-10 as c.2708_2711delTTAG. NGS result: chr3: 193384956, NM_015560.2: c.2708-2delAGTT based on updated annotation rules.

### Example 8. Clinical Sensitivity

[0090] GEDi clinical sensitivity was analyzed using samples from 192 probands with diagnoses of isolated or syndromic IRD, albinism or microphthalmos (Table 7). Analyses of the sequence data identified genetic diagnoses for 98 of the probands, representing a clinical sensitivity of 51%, consistent with findings from other studies (Table 7)^{22-26.} The majority of these diagnoses were consistent with the subject's clinical presentation and family history. Two subjects without a family history of disease were found to have mutations in the known dominant IRD disease genes PRPH2 and IMPDH1, consistent with identification of de novo mutations in the affected individuals; segregation analyses confirmed de novo mutations in these two subjects (OGI-301-703 and OGI-274-582, Table 7). While de novo mutations have been reported as the cause of dominant RP, de novo mutations in the PRPH2 and IMPDH1 genes have not been previously reported. The majority of subjects that were not diagnosed genetically by GEDi testing had non-syndromic RP ( 52/89=58%; Table 8).

TABLE 7
Detailed information for subjects with genetic diagnoses identified
via GEDi testing.

| | | | | | | |
|---|---|---|---|---|---|---|
| OGI-035-090* | OGI-561-1151 | OGI-509-1049 | OGI-494-1018 | OGI-396-856 | OGI-409-877 | Patient ID |
| CD | CD | CD | CD | Best | Best | Clinical |
| | | | | | | Diagnosis¹ |
| X | R | R | R | D | D | Inheritance |
| chrX: | chr1: | chr8: | chr8: | chr11: | chr11: | Chromo- |
| 38145072 | 94574147 | 87656008 | 87641230 | 61719367 | 61724875 | somal |
| | | | | | | Position |
| RPGR | ABCA4 | CNGB3 | CNGB3 | BEST1 | BEST1 | Gene |
| c.3178_ | c.428C > T | c.1148delC | c.1397T > A | c.89A > G | c.653G > A | Mutation 1 |
| 3179delGA | | | | | | |
| p.(Glu1060Argfs*18) | p.(Pro143Leu) | p (Thr383Ilefs*13) | p.(Met466Lys) | p.(Lys30Arg) | p.(Arg218His) | Mutation 1 |
| | | | | | | Effect |
| CD064606 | CM032797 | CD001927 | This study | CM004422 | CM003486 | HGMD |
| 16936086 | 14517951 | 10888875 | This study | 10798642 | 10798642, | PubMed ID |
| | | | | | 17287362 | |
| NA/NA/P | D/P/P | NA/NA/P | D/P/P | D/P/P | D/P/P | SIFT/PolyPhen/ |
| | | | | | | Mutation |
| | | | | | | Taster |
| A1 = 29/ | Absent | A1 = 29/ | Absent | Absent | Absent | EVS |
| R = 10173 | | R = 12487 | | | | Frequency |
| -NA- | chr1: | chr8: | chr8: | -NA- | -NA- | Chromosome |
| | 94574147 | 87656008 | 87656008 | | | Position |
| -NA- | c.428C > T | c.1148delC | c.1148delC | -NA- | -NA- | Mutation 2 |
| -NA- | p.(Pro143Leu) | p.(Thr383Ilefs*13) | p.(Thr383Ilefs*13) | -NA- | -NA- | Mutation 2 |
| | | | | | | Effect |
| -NA- | CM032797 | CD001927 | CD001927 | -NA- | -NA- | HGMD |
| -NA- | 14517951 | 10888875 | 10888875 | -NA- | -NA- | PubMed ID |
| -NA- | D/P/P | NA/NA/P | NA/NA/P | -NA- | -NA- | PolyPhen/ |
| | | | | | | SIFT/Mutation |
| | | | | | | Taster² |
| -NA- | Absent | A1 = 29/ | A1 = 29/ | -NA- | -NA- | EVS |
| | | R = 12487 | R = 12487 | | | Frequency |
| NA | Yes | NA | Yes | NA | Yes | Segregation |
| | | | | | | Validated |
| OGI-431-918 | OGI-430-915 | OGI-430-914 | OGI-297-650 | OGI-563-1155 | OGI-019-047* | Patient ID |
| Ciliopathy | Ciliopathy | Ciliopathy | Ciliopathy | Chorioderemia | ChorD | Clinical |
| | | | | | | Diagnosis¹ |
| R | R | R | R | X | R | Inheritance |
| chr11: | chr12: | chr12: | chr16: | chrX: | chr14: | Chromosomal |
| 66293652 | 76740270 | 76740270 | 56530894 | 85128190 | 24551834 | Position |
| BBS1 | BBS10 | BBS10 | BBS2 | CHM | NRL | Gene |
| c.1169T > G | c.1495G > T | c.1495G > T | c.1895G > A | c.1629_16 | c.223dupC | Mutation 1 |
| | | | | 36delGCC | | |
| | | | | AAGAA | | |
| p.(Met390Arg) | p.(Glu499*) | p.(Glu499*) | p.(Arg632Pro) | p.(Lys543Asnfs*21) | p.(Leu75Profs*19) | Mutation 1 |
| | | | | | | Effect |
| CM021489 | CM117343 | CM117343 | CM016198 | This study | CI043431 | HGMD |
| 12118255, | 21642631 | 21642631 | 11567139, | This study | 15459973; | PubMed ID |
| 18032602 | | | 20498079 | | 1733500 | |
| D/P/P | T/NA/P | T/NA/P | D/P/P | NA/NA/P | NA/NA/P | SIFT/PolyPhen/ |
| | | | | | | Mutation |
| | | | | | | Taster |
| G = 26/ | Absent | Absent | G = 1/ | Absent | Absent | EVS |
| T = 12964 | | | C = 12995 | | | Frequency |
| chr11: | chr12: | chr12: | chr16: | -NA- | chr14: | Chromosome |
| 66293652 | 76740270 | 76740270 | 56553703 | | 24551834 | Position |
| c.1169T > G | c.14950 > T | c.1495G > T | c.72C > G | -NA- | c.223dupC | Mutation 2 |
| p.(Met390Arg) | p.(Glu499*) | p.(Glu499*) | p.(Tyr24*) | -NA- | p.(Leu75Profs*19) | Mutation 2 |
| | | | | | | Effect |
| CM021489 | CM117343 | CM117343 | CM016219 | -NA- | CI043431 | HGMD |
| 12118255, | 21642631 | 21642631 | 11567139 | -NA- | 15459973; | PubMed ID |
| 18032602 | | | | | 1733500 | |
| D/P/P | T/NA/P | T/NA/P | D/NA/P | NA | NA/NA/P | PolyPhen/ |
| | | | | | | SIFT/Mutation |
| | | | | | | Taster² |
| G = 26/ | Absent | Absent | C = 1/ | NA | Absent | EVS |
| T = 12964 | | | G = 12993 | | | Frequency |
| Yes | Yes | Yes | Yes | NA | Yes | Segregation |
| | | | | | | Validated |
| OGI-423-901 | OGI-294-638 | OGI-028-068 | OGI-322-765 | OGI-314-749* | OGI-454-958 | Patient ID |
| CRD | CRD | CRD | Ciliopathy | Ciliopathy | Ciliopathy | Clinical |
| | | | | | | Diagnosis¹ |
| D | R | X | R | R | R | Inheritance |
| chr6: | chr2: | chrX: | chr2: | chr8: | chr4: | Chromosomal |
| 42689937 | 112779860 | 46713145 | 73651590 | 94767167 | 122749661 | Position |
| PRPH2 | MERTK | RP2 | ALMS1 | TMEM67 | B9S7 | Gene |
| c.136C > T | c.2375delA | c.337G > A | c.797G > A | c.25G > A | c.1787- | Mutation 1 |
| | | | | | 1G > C | |
| p.(Arg46*) | p.(Ile793*) | p.(Arg113Thr) | p.(Trp266*) | p.(Val9Met) | r.spl | Mutation 1 |
| | | | | | | Effect |
| CM930635 | This study | This study | This study | This study | This study | HGMD |
| 8111389 | This study | This study | This study | This study | This study | PubMed ID |
| T/NA/P | NA/NA/P | D/PosD/P | D/NA/P | D/NA/Poly | splicing | SIFT/PolyPhen/ |
| | | | | | defect | Mutation |
| | | | | | | Taster |
| Absent | Absent | Absent | Absent | A = 33/ | Absent | EVS |
| | | | | G = 12973 | | Frequency |
| -NA- | chr2: | -NA- | chr2: | chr8: | chr4: | Chromosome |
| | 112779859 | | 73677553 | 94794635 | 122782802 | Position |
| -NA- | c.2375delA | -NA- | c.3896C > A | c.1078A > G | c.198T > G | Mutation 2 |
| -NA- | p.(Ile793*) | -NA- | p.(Ser1299*) | p.(Thr360Ala) | p.(Ile66Met) | Mutation 2 |
| | | | | | | Effect |
| -NA- | This study | -NA- | This study | This study | CM102426 | HGMD |
| -NA- | This study | -NA- | This study | This study | 19797195 | PubMed ID |
| -NA- | NA/NA/P | -NA- | D/NA/P | D/P/P | D/PosD/P | PolyPhen/ |
| | | | | | | SIFT/Mutation |
| | | | | | | Taster² |
| -NA- | Absent | -NA- | Absent | G = 28/ | C = 3/ | EVS |
| | | | | A = 12976 | A = 13003 | Frequency |
| Yes | Yes | Yes | Yes | Yes | Yes | Segregation |
| | | | | | | Validated |
| OGI-300-667 | OGI-455-966 | OGI-420-894* | OGI-533-1088 | OGI-300-666 | OGI-064-149 | Patient ID |
| CRD | CRD | CRD | CRD | CRD | CRD | Clinical |
| | | | | | | Diagnosis¹ |
| R | R | R | R | R | R | Inheritance |
| chr4: | chr1: | chr16: | chr1: | chr4: | chr1: | Chromosomal |
| 16010716 | 197298090 | 56530894 | 94486895 | 16010716 | 94463397 | Position |
| PROM1 | CRB1 | BBS2 | ABCA4 | PROM1 | ABCA4 | Gene |
| c.1157T > A | c.613_ | c.1895G > | c.4919G > A | c.1157T > A | c.6729 + 5_ | Mutation 1 |
| | 619delATAGGAA | C | | | 6729 + | |
| | | | | | 19del15 | |
| p.(Leu386*) | p.(Ile205Aspfs*13) | p.(Arg632Pro) | p.(Arg1640Gln) | p.(Leu386*) | | Mutation 1 |
| | | | | | | Effect |
| This Study | CD011132 | CM016198 | CM003577 | This Study | CD107463 | HGMD |
| This study | 11231775, | 11567139, | 10711710; | This study | 20554613, | PubMed ID |
| | 23379534 | 20498079 | 23755871 | | 22264887 | |
| D/NA/P | NA/NA/P | D/D/P | D/D/P | D/NA/P | r.spl | SIFT/PolyPhen/ |
| | | | | | | Mutation |
| | | | | | | Taster |
| Absent | Absent | G = 1/ | Absent | Absent | Absent | EVS |
| | | C = 12995 | | | | Frequency |
| chr4: | chr1: | chr16: | chr1: | chr4: | chr1: | Chromosome |
| 16010716 | 197298090 | 56548399 | 94528132 | 16010716 | 94463397 | Position |
| c.1157T > A | c.613_ | c.311A > C | c.1937 + | c.1157T > A | c.6729 + 5_ | Mutation 2 |
| | 619delATAGGAA | | 1G > A | | 6729 + | |
| | | | | | 19del15 | |
| p.(Leu386*) | p.(Ile205Aspfs*13) | p.(Asp104Ala) | r. spl | p.(Leu386*) | | Mutation 2 |
| | | | | | | Effect |
| This study | CD011132 | CM012901 | CS003487 | This study | CD107463 | HGMD |
| This study | 11231775, | 11567139, | 10958763 | This study | 20554613, | PubMed ID |
| | 23379534 | 20498079 | | | 22264887 | |
| D/NA/P | NA/NA/P | D/P/P | NA/NA/NA | D/NA/P | splicing | PolyPhen/ |
| | | | | | defect | SIFT/Mutation |
| | | | | | | Taster² |
| Absent | Absent | Absent | Absent | Absent | Absent | EVS |
| | | | | | | Frequency |
| Yes | Yes | Yes | NA | Yes | Yes | Segregation |
| | | | | | | Validated |
| OGI-326- | OGI-069- | OGI-079- | OGI-501- | OGI-153- | OGI-310- | Patient ID |
| 773 | 778 | 194 | 1038 | 408* | 725 | |
| LCA | LCA | LCA | FA | FA | CSNB | Clinical |
| | | | | | | Diagnosis¹ |
| R | R | R | R | R | X | Inheritance |
| chr3: | chr1: | chr14: | chr12: | chr1: | chrX: | Chromosomal |
| 121500637 | 10042426 | 21819307 | 56118211 | 197390645 | 41333593 | Position |
| IQCB1 | NMNAT1 | RPGRIP1 | RDH5 | CRB1 | NYX | Gene |
| c.1363C > T | c.507G > A | c.3793_37 | c.839G > A | c.1687A > G | c.887G > T | Mutation 1 |
| | | 94insGAAA | | | | |
| p.(Arg455*) | p.(Trp169*) | p4Val1265Glyfs*8) | p.(Arg280His) | p.(Ser563Gly) | p.(Gly296Val) | Mutation 1 |
| | | | | | | Effect |
| CM110330 | CM127758 | This study | CM993460 | This Study | This study | HGMD |
| 23188109 | 22842231 | This study | 10617778, | This study | This study | PubMed ID |
| | | | 11675386 | | | |
| T/NA/P | NA/NA/P | NA/NA/P | D/PosD/P | D/P/P | D/D/P | SIFT/PolyPhen/ |
| | | | | | | Mutation |
| | | | | | | Taster |
| Absent | A = 2/ | Absent | Absent | Absent | Absent | EVS |
| | G = 13004 | | | | | Frequency |
| chr3: | chr1: | chr14: | chr12: | chr1: | -NA- | Chromosome |
| 121518149 | 10042553 | 21819307 | 56118211 | 197391001 | | Position |
| c.659delG | c.634G > A | c.3793_ | c.839G > A | c.2043T > G | -NA- | Mutation 2 |
| | | 3794insGAAA | | | | |
| p.(Ser220*) | p.(Val212Met) | p.(Val1265Glyfs*18) | p.(Arg280His) | p.(Cys681Trp) | -NA- | Mutation 2 |
| | | | | | | Effect |
| This study | This study | This study | CM993460 | -NA- | -NA- | HGMD |
| This study | This study | This study | 10617778, | 20956273, | -NA- | PubMed ID |
| | | | 11675386 | 11231775 | | |
| NA/NA/P | T/B/Poly | NA/NA/P | D/PosD/P | D/P/P | -NA- | PolyPhen/ |
| | | | | | | SIFT/Mutation |
| | | | | | | Taster² |
| A1 = 1/ | Absent | Absent | Absent | Absent | -NA- | EVS |
| R = 12511 | | | | | | Frequency |
| Yes | Yes | NA | NA | Yes | Yes | Segregation |
| | | | | | | Validated |
| OGI-532- | OGI-523- | OGI-039- | OGI-011- | OGI-010- | OGI-391- | Patient ID |
| 1087 | 1075 | 096 | 033* | 032 | 846 | |
| LCA | LCA | LCA | LCA | LCA | LCA | Clinical |
| | | | | | | Diagnosis¹ |
| R | R | R | R | R | R | Inheritance |
| chr6: | chr1: | chr14: | chr6: | chr12: | chr1: | Chromosomal |
| 80203350 | 10042680 | 88899496 | 42689551 | 88487732 | 68903976 | Position |
| LCA5 | NMNAT1 | SPATA7 | PRPH2 | CEP290 | RPE65 | Gene |
| c.838C > T | c.761A > G | c. 1102_ | c.522C > T | c.3124dupA | c.1022T > C | Mutation 1 |
| | | 1103delCT | | | | |
| p.(Arg280*) | p.(Tyr254Cys) | p.(Leu368Glufs*4) | p.(Trp174*) | p.(Ala1043Glyfs*9) | p.(Leu341Ser) | Mutation 1 |
| | | | | | | Effect |
| This study | This study | This Study | This Study | This Study | CM983763 | HGMD |
| This study | This study | This study | This study | This study | 9501220, | PubMed ID |
| | | | | | 19854499 | |
| T/NA/P | D/P/P | NA/NA/P | NA/NA/P | NA/NA/P | D/P/P | SIFT/PolyPhen/ |
| | | | | | | Mutation |
| | | | | | | Taster |
| Absent | Absent | Absent | Absent | Absent | Absent | EVS |
| | | | | | | Frequency |
| chr6: | chr1: | chr14: | chr6: | chr12: | chr1: | Chromosome |
| 80203350 | 10042688 | 88892690 | 42689551 | 88494960 | 68903976 | Position |
| c.838C > T | c.769G > A | c.487A > T | c.552C > T | c.2991 + | c.1022T > C | Mutation 2 |
| | | | | 1655A > G | | |
| p.(Arg280*) | p.(Glu257Lys) | p.(Lys163*) | p.(Trp174*) | r.spl | p.(Leu341Ser) | Mutation 2 |
| | | | | | | Effect |
| This study | CM127755 | This study | This study | CS064383 | CM983763 | HGMD |
| This study | 22842227; | This study | This study | 16909394 | 9501220, | PubMed ID |
| | 22842231 | | | | 19854499 | |
| T/NA/P | D/P/P | NA/NA/P | NA/NA/P | splicing | D/P/P | PolyPhen/ |
| | | | | defect | | SIFT/Mutation |
| | | | | | | Taster² |
| Absent | A = 14/ | Absent | Absent | -NA- | Absent | EVS |
| | G = 12992 | | | | | Frequency |
| NA | NA | Yes | NA | Yes | NA | Segregation |
| | | | | | | Validated |
| OGI-138- | OGI-315- | OGI-428- | OGI-296- | OGI-520- | OGI-535- | Patient ID |
| 376 | 751 | 910 | 644 | 1072 | 1092 | |
| MD | MD | MD | MD | LCA | LCA | Clinical |
| | | | | | | Diagnosis¹ |
| R | D | R | D | R | R | Inheritance |
| chr11: | chr6: | chr1: | chr6: | chr1: | chr1: | Chromosomal |
| 61719350 | 42689937 | 94495083 | 42689609 | 10035731 | 10032184 | Position |
| BEST1 | PRPH2 | ABCA4 | PRPH2 | NMNAT1 | NMNAT1 | Gene |
| c.72G > A | c.136C > T | c.4457C > T | c.461_ | c.197G > A | c.53A > G | Mutation 1 |
| | | | 463delAGA | | | |
| p.(Trp24*) | p.(Arg46*) | p.(Pro1486Leu) | p.(Lys154del) | p.(Arg66Gln) | p.(Asn18Ser) | Mutation 1 |
| | | | | | | Effect |
| This Study | CM930635 | CM990054 | CD931050 | This study | This study | HGMD |
| This study | 8111389 | 9973280 | 8240110 | -NA- | This study | PubMed ID |
| NA/NA/P | T/NA/P | T/P/P | NA/NA/P | D/P/P | D/P/P | SIFT/PolyPhen/ |
| | | | | | | Mutation |
| | | | | | | Taster |
| Absent | Absent | Absent | Absent | Absent | Absent | EVS |
| | | | | | | Frequency |
| chr11: | -NA- | chr1: | -NA- | chr1: | chr1: | Chromosome |
| 61724418 | | 94495083 | | 10042688 | 10032184 | Position |
| c.584C > T | -NA- | c.4457C > T | -NA- | c.769G > A | c.53A > G | Mutation 2 |
| p.(Ala195Val) | -NA- | p.(Pro1486Leu) | -NA- | p.(Glu257Lys) | p.(Asn18Ser) | Mutation 2 |
| | | | | | | Effect |
| CM004430 | -NA- | CM990054 | -NA- | CM127755 | This study | HGMD |
| 21825197 | -NA- | 9973280 | -NA- | 22842227; | This study | PubMed ID |
| | | | | 22842231 | | |
| D/P/P | -NA- | T/P/P | -NA- | D/P/P | D/P/P | PolyPhen/ |
| | | | | | | SIFT/Mutation |
| | | | | | | Taster² |
| Absent | -NA- | Absent | -NA- | A = 14/ | Absent | EVS |
| | | | | G = 12992 | | Frequency |
| Yes | Yes | Yes | Yes | Yes | Yes | Segregation |
| | | | | | | Validated |
| OGI-051- | OGI-109- | OGI-449- | OGI-286- | OGI-556- | OGI-519- | Patient ID |
| 126 | 279 | 951 | 615 | 1135 | 1068* | |
| RP | OCA | Posterior | MD | MD | MD | Clinical |
| | | Microphthalmos | | | | Diagnosis¹ |
| X | R | R | D | X | R | Inheritance |
| chrX: | chr15: | chr11: | chr6: | chrX: | chr14: | Chromosomal |
| 38178158 | 28116343 | 119212383 | 42672302 | 153420209 | 68195950 | Position |
| RPGR | OCA2 | MFRP | PRPH2 | OPN1LW | RDH12 | Gene |
| c.392_393insGAA | c.2201A > C | c.1615C > T | c.629G > A | c.739C > T | c.701G > A | Mutation 1 |
| p.(His131delinsGlnAsn) | p.(Leu734Arg) | p.(Arg539Cys) | p.(Pro210Leu) | p.(Arg247*) | p.(Arg234His) | Mutation 1 |
| | | | | | | Effect |
| This study | -NA- | This study | CM011806 | CM931121 | CM054833 | HGMD |
| This study | 23103111 | This study | 11139241 | 8213841 | 16269441 | PubMed ID |
| NA/NA/P | D/P/P | D/P/P | D/P/P | T/NA/P | T/B/Poly | SIFT/PolyPhen/ |
| | | | | | | Mutation |
| | | | | | | Taster |
| Absent | Absent | A = 1/ | Absent | Absent | Absent | EVS |
| | | G = 12987 | | | | Frequency |
| -NA- | chr15: | chr11: | -NA- | -NA- | chr14: | Chromosome |
| | 28267662 | 119213687 | | | 68196093 | Position |
| -NA- | c.631C > G | c.1150dupC | -NA- | -NA- | c.844T > G | Mutation 2 |
| -NA- | p.(Pro211Ala) | p.(His384Profs*8) | -NA- | -NA- | p.(Phe282Val) | Mutation 2 |
| | | | | | | Effect |
| -NA- | CM031308 | CI052547 | -NA- | -NA- | This study | HGMD |
| -NA- | 12713581 | 15976030 | -NA- | -NA- | This study | PubMed ID |
| -NA- | D/P/P | NA/NA/P | -NA- | NA | D/P/P | PolyPhen/ |
| | | | | | | SIFT/Mutation |
| | | | | | | Taster² |
| -NA- | Absent | Absent | -NA- | NA | Absent | EVS |
| | | | | | | Frequency |
| NA | Yes | Yes | NA | NA | Yes | Segregation |
| | | | | | | Validated |
| OGI-301- | OGI-301- | OGI-293- | OGI-278- | OGI-140- | OGI-134- | Patient ID |
| 704 | 703 | 636 | 603 | 381 | 315 | |
| RP | RP | RP | RP | RP | RP | Clinical |
| | | | | | | Diagnosis¹ |
| D | D# | D | R | R | X | Inheritance |
| chr6: | chr6: | chr3: | chr1: | chr4: | chrX: | Chromosomal |
| 42672300 | 42672300 | 129252535 | 215848679 | 187117196 | 38178080 | Position |
| PRPH2 | PRPH2 | RHO | USH2A | CYP4V2 | RPGR | Gene |
| c.631T > C | c.631T > C | c.1021G > A | c.12574G > | c.367A > G | c.469 + 2T > | Mutation 1 |
| | | | A | | A | |
| p.(Phe211Leu) | p.(Phe211Leu) | p.(Glu341Lys) | p.(Arg4192Cys) | p.(Met123Val) | -NA- | Mutation 1 |
| | | | | | | Effect |
| CM951119 | CM951119 | CM973327 | This study | CM041498 | CS1212410 | HGMD |
| 9673478 | 9673478 | 21094163 | This study | 15042513 | 23150612 | PubMed ID |
| D/P/P | D/P/P | T/PosD/P | D/P/Poly | T/B/P | | SIFT/PolyPhen/ |
| | | | | | | Mutation |
| | | | | | | Taster |
| Absent | Absent | A = 1/ | Absent | Absent | Absent | EVS |
| | | G = 13005 | | | | Frequency |
| -NA- | -NA- | -NA- | chr1: | chr4: | -NA- | Chromosome |
| | | | 215848679 | 187117196 | | Position |
| -NA- | -NA- | -NA- | c.12574G > | c.367A > G | -NA- | Mutation 2 |
| | | | A | | | |
| -NA- | -NA- | -NA- | p.(Arg4192Cys) | p.(Met123Val) | -NA- | Mutation 2 |
| | | | | | | Effect |
| -NA- | -NA- | -NA- | This study | CM041498 | -NA- | HGMD |
| -NA- | -NA- | -NA- | This study | 15042513 | -NA- | PubMed ID |
| -NA- | -NA- | -NA- | D/P/Poly | T/B/P | -NA- | PolyPhen/ |
| | | | | | | SIFT/Mutation |
| | | | | | | Taster² |
| -NA- | -NA- | -NA- | Absent | Absent | -NA- | EVS |
| | | | | | | Frequency |
| Yes | Yes | Yes | Yes | Yes | NA | Segregation |
| | | | | | | Validated |
| OGI-411- | OGI-406- | OGI-405- | OGI-388- | OGI-323- | OGI-311- | Patient ID |
| 879 | 874 | 871 | 841 | 766 | 746 | |
| RP | RP | RP | RP | RP | RP | Clinical |
| | | | | | | Diagnosis¹ |
| R | R | R | R | R | R | Inheritance |
| chr1: | chr1: | chr1: | chr1: | chr6: | chr3: | Chromosomal |
| 197390396 | 216498866 | 197396961 | 215972325 | 64694275 | 129251616 | Position |
| CRB1 | USH2A | CRB1 | USH2A | EYS | RHO | Gene |
| c.1438T > C | c.920_ | c.2506C > A | c.9882C > | c.7055 + 1G > | c.936 + 1G > | Mutation 1 |
| | 923dup | | G | T | T | |
| p.(Cys480Arg) | p.(His308Glnfs*15) | p.(Pro836Thr) | p.(Cys3294Trp) | -NA- | r. spl? | Mutation 1 |
| | | | | | | Effect |
| CM010800 | -NA- | CM043271 | This study | This study | CS920776 | HGMD |
| 11231775 | 15325563, | 20956273, | This study | This study | 21357407 | PubMed ID |
| | 10729113, | 15459956 | | | | |
| | 22135276, | | | | | |
| | 11311042 | | | | | |
| D/P/P | NA/NA/P | D/P/Poly | D/P/P | r.spl | NA/NA/NA | SIFT/PolyPhen/ |
| | | | | | | Mutation |
| | | | | | | Taster |
| Absent | A1 = 4/R = | A = 12/C = | Absent | Absent | Absent | EVS |
| | 12516 | 12994 | | | | Frequency |
| chr1: | chr1: | chr1: | chr1: | chr6: | chr3: | Chromosome |
| 197396961 | 216420460 | 197396961 | 216495263 | 64694275 | 129251616 | Position |
| c.2506C > A | c.2276G > T | c.2506C > A | c.1606T > C | c.7055 + | c.936 + | Mutation 2 |
| | | | | 1G > T | 1G > T | |
| p.(Pro836Thr) | p.(Cys759Phe) | p.(Pro836Thr) | p.(Cys536Arg) | -NA- | r. spl | Mutation 2 |
| | | | | | | Effect |
| CM043271 | CM001372 | CM043271 | CM001807 | This study | CS920776 | HGMD |
| 20956273, | 10775529, | 20956273, | 10909849, | This study | 21357407 | PubMed ID |
| 15459956 | 18281613, | 15459956 | 15043528 | | | |
| | [symbol] | | | | | |
| D/P/P | D/P/P | D/P/Poly | D/P/P | splicing | splicing | PolyPhen/ |
| | | | | defect | defect | SIFT/Mutation |
| | | | | | | Taster² |
| A = 12/ | A = 20/ | A = 12/ | Absent | Absent | Absent | EVS |
| C = 12994 | C = 12986 | C = 12994 | | | | Frequency |
| Yes | NA | Yes | Yes | Yes | Yes | Segregation |
| | | | | | | Validated |
| OGI-059- | OGI-OGI- | OGI-021- | OGI-006- | OGI-546- | OGI-390- | Patient ID |
| 141 | 075 | 053 | 012 | 1114 | 845 | |
| RP | RP | RP | RP | RP | RP | Clinical |
| | | | | | | Diagnosis¹ |
| D | R | R | X | R | D | Inheritance |
| chr2: | chr6: | chr1: | chrX: | chr1: | chr3: | Chromosomal |
| 96953706 | 35467809 | 216219858 | 46713066 | 215960057 | 129252547 | Position |
| SNRNP200 | TULP1 | USH2A | RP2 | USH2A | RHO | Gene |
| c.3260C > T | c.1444C > T | c.6240G > T | c.258T > G | c.10342G > A | c.1033G > A | Mutation 1 |
| p.(Ser1087Leu) | p.(Arg482Trp) | p.(Lys2080Asn) | p.(Cys86Trp) | p.(Glu3448Lys) | p.(Val345Met) | Mutation 1 |
| | | | | | | Effect |
| CM097780 | CM073391 | -NA- | -NA- | -NA- | CM910347 | HGMD |
| 19878916 | 17620573 | 20507924 | 10937588; | 24265693 | 1833777 | PubMed ID |
| | | | 21738648 | | | |
| D/NA/P | D/P/P | T/PosD/Poly | D/P/P | T/PosD/P | D/B/P | SIFT/PolyPhen/ |
| | | | | | | Mutation |
| | | | | | | Taster |
| Absent | Absent | A = 130/ | Absent | T = 1/ | Absent | EVS |
| | | C = 12876 | | C = 13005 | | Frequency |
| -NA- | chr6: | ch1: | -NA- | chr1: | -NA- | Chromosome |
| | 35473823 | 216246606 | | 216166497 | | Position |
| -NA- | c.956G > A | c.5609G > A | -NA- | c.6670G > T | -NA- | Mutation 2 |
| -NA- | p.(Gly319Asp) | p.(Arg1870Gln) | -NA- | p.(Gly2224Cys) | -NA- | Mutation 2 |
| | | | | | | Effect |
| -NA- | This study | This study | -NA- | This study | -NA- | HGMD |
| -NA- | This study | This study | -NA- | This study | -NA- | PubMed ID |
| -NA- | D/P/P | T/P/P | -NA- | D/P/P | -NA- | PolyPhen/ |
| | | | | | | SIFT/Mutation |
| | | | | | | Taster2 |
| -NA- | Absent | T = 3/ | -NA- | A = 4/ | -NA- | EVS |
| | | C = 13003 | | C = 13002 | | Frequency |
| NA | NA | Yes | Yes | Yes | NA | Segregation |
| | | | | | | Validated |
| OGI-274- | OGI-151-405 | OGI-149- | OGI-144- | OGI-098- | OGI-088- | Patient ID |
| 582 | | 401 | 390 | 246 | 220 | |
| RP | RP | RP | RP | RP | RP | Clinical |
| | | | | | | Diagnosis¹ |
| D# | R | R | R | R | D | Inheritance |
| chr7: | chr2: | chr1: | chr1: | chr8: | chr4: | Chromosomal |
| 128038580 | 62066572 | 197396584 | 215848678 | 96264450 | 16077349 | Position |
| IMPDH1 | FAM161A | CRB1 | USH2A | C8orf37 | PROM1 | Gene |
| c.962C > T | c.1567C > T | c.2129A > T | c.12575G > | c.436A > C | c.181A > G | Mutation 1 |
| | | | A | | | |
| p.(Ala321Val) | p.(Arg523*) | p.(Glu710Val) | p.(Arg4192His) | p.(Met146Leu) | p.(Ile61Val) | Mutation 1 |
| | | | | | | Effect |
| This Study | CM105642 | CM107849 | CM108280 | This Study | This Study | HGMD |
| This study | 20705279 | 20956273, | 21151602, | This study | This study | PubMed ID |
| | | 20591486 | 22135276 | | | |
| D/P/P | T/NA/P | D/P/P | T/B/Poly | T/PosD/Poly | T/NA/Poly | SIFT/PolyPhen/ |
| | | | | | | Mutation |
| | | | | | | Taster |
| Absent | [symbol] | T = 1/ | T = 2/ | G = 10/ | C = 1/ | EVS |
| | variant | A = 13005 | C = 13004 | T = 12996 | T = 12065 | Frequency |
| | reported at this | | | | | |
| | position | | | | | |
| | c.1567C > G at | | | | | |
| -NA- | chr2: | chr1: | chr1: | chr8: | -NA- | Chromosome |
| | 62066830 | 197396745 | 215848678 | 96264494 | | Position |
| -NA- | c.1309A > T | c.22900 > T | c.12575G > | c.392G > A | -NA- | Mutation 2 |
| | | | A | | | |
| -NA- | p.(Ar9437*) | p.(Arg764Cys) | p.(Arg4192His) | p.(Arg131His) | -NA- | Mutation 2 |
| | | | | | | Effect |
| -NA- | CM105648 | CM992151 | CM108280 | This study | -NA- | HGMD |
| -NA- | 20705278 | 20956273, | 21151602, | This study | -NA- | PubMed ID |
| | | 10508521 | 22115276 | | | |
| -NA- | T/NA/P | T/B/P | T/B/Poly | D/P/P | -NA- | PolyPhen/ |
| | | | | | | SIFT/Mutation |
| | | | | | | Taster² |
| -NA- | A = 5/ | T = 3/ | T = 2/ | T = 10/ | -NA- | EVS |
| | T = 11975 | C = 13003 | C = 13004 | C = 12996 | | Frequency |
| Yes | Yes | Yes | NA | Yes | Yes | Segregation |
| | | | | | | Validated |
| OGI-555- | OGI-309- | OGI-529- | OGI-570- | OGI-513- | OGI-513- | Patient ID |
| 1134 | 723 | 1084 | 1170 | 1054 | 1053 | |
| RP | RP | RP | RP | RP | RP | Clinical |
| | | | | | | Diagnosis¹ |
| R | R | R | D | R | R | Inheritance |
| chr6: | ch11: | chr5: | chr17: | ch1: | ch1: | Chromosomal |
| 64709008 | 66293652 | 149274769 | 1558827 | 197325970 | 197325970 | Position |
| EYS | BBS1 | PDE6A | PRPF6 | CRB1 | CRB1 | Gene |
| c.6794delC | c.1169T > G | c.1705C > A | c.5804G > A | c.998G > C | c.998G > C | Mutation 1 |
| p.(Pro2265Glnfs*46) | p.(Met390Arg) | pQ569K | p.(Arg1935His) | p.(Gly333Ala) | p.(Gly333Ala) | Mutation 1 |
| | | | | | | Effect |
| CD102743 | CM021489 | CM994743 | This study | CM082583 | CM082583 | HGMD |
| 20333770 | 12118255, | 10393062 | This study | 18682808 | 18682808 | PubMed ID |
| | 18032602 | | | | | |
| NA/NA/P | D/P/P | D/P/P | NA/P/P | D/P/P | D/P/P | SIFT/PolyPhen/ |
| | | | | | | Mutation |
| | | | | | | Taster |
| A1 = 10/ | G = 26/ | T = 2/ | Absent | Absent | Absent | EVS |
| R = 6664 | T = 12964 | G = 13004 | | | | Frequency |
| chr6: | ch11: | chr5: | -NA- | chr1: | chr1: | Chromosome |
| 65300430 | 66293652 | 149277996 | | 197396856 | 197396856 | Position |
| c.5330T > A | c.1169T > G | c.1336delA | -NA- | c.2401A > T | c.2401A > T | Mutation 2 |
| p.(Leu1777*) | p.(Met390Arg) | p.(Arg446Glyfs*8) | -NA- | p.(Lys801*) | p.(Lys801*) | Mutation 2 |
| | | | | | | Effect |
| This study | CM021489 | This study | -NA- | CM012914 | CM012914 | HGMD |
| This study | 12118255, | This study | -NA- | 20956273, | 20956273, | PubMed ID |
| | 18032602 | | | 11389483 | 11389483 | |
| NA/NA/P | D/P/P | NA/NA/P | NA | T/NA/P | T/NA/P | PolyPhen/ |
| | | | | | | SIFT/Mutation |
| | | | | | | Taster² |
| Absent | G = 26/ | Absent | NA | T = 1/ | T = 1/ | EVS |
| | T = 12964 | | | A = 13003 | A = 13003 | Frequency |
| Yes | Yes | NA | Yes | Yes | Yes | Segregation |
| | | | | | | Validated |
| OGI-261- | OGI-154- | OGI-289- | OGI-319- | OGI-303- | OGI-276- | Patient ID |
| 547 | 590 | 627 | 764 | 707 | 589 | |
| Star | Star | RS | RP | RP | RP | Clinical |
| | | | | | | Diagnosis¹ |
| R | R | X | X | X | R | Inheritance |
| chr1: | chr1: | chrX: | chrX: | chrX: | chr16: | Chromosomal |
| 94508969; | 94467475 | 18660162 | 38158220 | 46719451 | 57938764 | Position |
| chr1: | | | | | | |
| 94528806 | | | | | | |
| ABCA4 | ABCA4 | RS1 | RPGR | RP2 | CNGB1 | Gene |
| c.[3113G > | c.6221G > A | c.637C > T | c.1234C > T | c.797A > C | c.2508G > T | Mutation 1 |
| A; | | | | | | |
| 622A > G] | | | | | | |
| p.[(Ala1038Val; | p.(Gly2074Asp) | p.(Arg213Trp) | p.(Arg412*) | p.(Gln266Pro) | p.(Tyr836*) | Mutation 1 |
| Leu541Pro)] | | | | | | Effect |
| CM970006; | This Study | CM981774 | CM021145 | This study | This Study | HGMD |
| CM990022 | | | | | | |
| 16103129, | This study | 9618178, | 11992260 | This study | This study | PubMed ID |
| 9781034, | | 12417531 | | | | |
| 19074458 | | | | | | |
| T/P/P; | D/D/P | D/P/P | D/PosD/P | D/D/P | NA/NA/P | SIFT/PolyPhen/ |
| D/P/P | | | | | | Mutation |
| | | | | | | Taster |
| A = 22/ | T = 1/ | Absent | Absent | Absent | Absent | EVS |
| G = 12984; | C = 13005 | | | | | Frequency |
| G = 2/ | | | | | | |
| A = 13004 | | | | | | |
| chr1: | chr1: | -NA- | -NA- | -NA- | chr16: | Chromosome |
| 94512496 | 94543290 | | | | 57949173 | Position |
| c.2897C > T | c.1510A > C | -NA- | -NA- | -NA- | c.2284G > A | Mutation 2 |
| p.(Gly966Glu) | p.(Asn504His) | -NA- | -NA- | -NA- | p.(Arg762Cys) | Mutation 2 |
| | | | | | | Effect |
| This study | This study | -NA- | -NA- | -NA- | CM118405 | HGMD |
| This study | This study | -NA- | -NA- | -NA- | 21987686 | PubMed ID |
| D/P/P | T/B/P | -NA- | -NA- | -NA- | D/P/P | PolyPhen/SIFT/ |
| | | | | | | Mutation |
| | | | | | | Taster² |
| Absent | Absent | -NA- | Absent | Absent | Absent | EVS |
| | | | | | | Frequency |
| Yes | Yes | NA | Yes | Yes | Yes | Segregation |
| | | | | | | Validated |
| OGI-146- | OGI-435- | OGI-424- | OGI-312- | OGI-304- | OGI-288- | Patient ID |
| 393 | 928 | 903 | 735 | 709 | 602 | |
| Star | Star | Star | Star | Star | Star | Clinical |
| | | | | | | Diagnosis¹ |
| R | R | R | R | R | R | Inheritance |
| chr1: | chr1: | chr1: | chr1: | chr1: | chr1: | Chromosomal |
| 94467548 | 94510248 | 94473807 | 94490567 | 94463583; | 94473807; | Position |
| | | | | chr1: | chr1: | |
| | | | | 94496053 | 94496666 | |
| ABCA4 | ABCA4 | ABCA4 | ABCA4 | ABCA4 | ABCA4 | Gene |
| c.6148G > | c.2971G > | c.5882G > A | c.4577C > T | c.[6563T > | c.[5882G > | Mutation 1 |
| C | C | | | C; | A; | |
| | | | | 4283C > T] | 4139C > T] | |
| p.(Val2050Leu) | p.(Gly991Arg) | p.(Gly1961Glu) | p.(Thr1562Met) | p.[(Phe2188Ser; | p.[(Gly1961Glu; | Mutation 1 |
| | | | | Thr1428Met)] | Pro1380Leu)] | Effect |
| CM970020 | CM032807 | CM970016 | CM990057 | CM023878; | CM970016; | HGMD |
| | | | | Novel | CM990044 | |
| 11328725 | 14517951 | 11017087, | 9973280, | 12202497; | 11017087, | PubMed ID |
| | | 19074458 | 11017087 | 11818392 | 19074458; | |
| | | | | | 9973280, | |
| | | | | | 15579991 | |
| D/P/P | D/P/P | D/P/P | D/P/P | D/P/P; | D/P/P; | SIFT/PolyPhen/ |
| | | | | T/B/Poly | D/P/P | Mutation |
| | | | | | | Taster |
| G = 48/ | G = 28/ | T = 41/ | Absent | Absent; | T = 41/ | EVS |
| C = 12958 | C = 12978 | C = 12965 | | A = 2/ | C = 12965; | Frequency |
| | | | | G = 13004 | A = 2/ | |
| | | | | | G = 13004 | |
| chr1: | chr1: | ch1: | chr1: | chr1: | chr1: | Chromosome |
| 94517254 | 99454409 | 94476951 | 94508353 | 94578582 | 94520705 | Position |
| c.2588G > | c.1208A > T | c.5461- | c.3292C > T | c.101_ | c.2549A > G | Mutation 2 |
| C | | 10T > C | | 106delCTTTAT | | |
| p.(Gly863Ala) | p.(Asp403Val) | r.spl | p.(Arg1098Cys) | p.(Ser34_ | p.(Tyr850Cys) | Mutation 2 |
| | | | | Leu35del) | | Effect |
| -NA- | This study | CS057513 | CM003377 | This study | CM129869 | HGMD |
| 11017087, | This study | 15614537, | 19074458 | This study | 23096905 | PubMed ID |
| 9054934, | | 10958763 | | | | |
| [symbol] | | | | | | |
| D/P/P | D/P/P | splicing | D/P/P | NA/NA/P | D/P/P | PolyPhen/ |
| | | defect | | | | SIFT/Mutation |
| | | | | | | Taster² |
| G = 68/ | Absent | G = 3/ | Absent | Absent | C = 1/ | EVS |
| C = 1 [symbol] | | A = 13003 | | | T = 13005 | Frequency |
| Yes | NA | NA | Yes | Yes | Yes | Segregation |
| | | | | | | Validated |
| OGI-518- | OGI-317- | OGI-101- | OGI-549- | OGI-389- | OGI-022- | Patient ID |
| 1066 | 754 | 253 | 1123 | 844 | 055 | |
| U | U | Star | Star | Star | Star | Clinical |
| | | | | | | Diagnosis¹ |
| R | R | R | R | R | R | Inheritance |
| chr11: | chr1: | chr1: | ch1: | chr1: | chr1: | Chromosomal |
| 17547977 | 215812532; | 94476951 | 94473807 | 94471025 | 94476951 | Position |
| | chr1: | | | | | |
| | 216061803 | | | | | |
| USH1C | USH2A | ABCA4 | ABCA4 | ABCA4 | ABCA4 | Gene |
| c.590delG | c.[15017C > | c.5461- | c.5882G > A | c.6119G > A | c.5461- | Mutation 1 |
| | A; | 10T > C | | | 10T > C | |
| | c.81880 > T | | | | | |
| | [symbol] | | | | | |
| p.(Gly197A | p.[(Thr500 | r. spl | p.(Gly1961 | p.(Arg2040 | r. spl | Mutation 1 |
| lafs*21) | 6Lys; | | Glu) | Gln) | | Effect |
| | Pro2730Ser)] | | | | | |
| This study | This study | CS057513 | CM970016 | CM124700 | CS057513 | HGMD |
| This study | This study | 15614537, | 11017087, | 22449572 | 15614537, | PubMed ID |
| | | 10958763 | 19074458 | | 10958763 | |
| NA/NA/P | T/P/P; | splicing | D/P/P | D/P/P | splicing | SIFT/PolyPhen/ |
| | D/D/P | defect | | | defect | Mutation |
| | | | | | | Taster |
| Absent | Absent | G = 3/ | T = 41/ | T = 3/ | G = 3/ | EVS |
| | | A = 13003 | C = 12965 | C = 13003 | A = 13003 | Frequency |
| chr11: | chr1: | chr1: | chr1: | chr1: | chr1: | Chromosome |
| 17547977 | 216495251 | 94473807 | 94495177 | 94476951 | 94485137 | Position |
| c.590delG | c.1618C > T | c.5882G > A | c.4363T > C | c.5461- | c.5196 + | Mutation 2 |
| | | | | 10T > C | 1G > A | |
| p.(Gly197Alafs*21) | p.(Gln540*) | p.(Gly1961Glu) | p.(Cys1455Arg) | r. spl | r. spl | Mutation 2 |
| | | | | | | Effect |
| This study | This study | CM970016 | CM074657 | CS057513 | CS124701 | HGMD |
| This study | This study | 11017087, | 22449572, | 15614537, | 9666097 | PubMed ID |
| | | 19074458 | 17982420 | 10958763 | | |
| NA/NA/P | T/NA/P | D/P/P | D/P/P | splicing | splicing | PolyPhen/ |
| | | | | defect | defect | SIFT/Mutation |
| | | | | | | Taster² |
| Absent | Absent | T = 41/ | Absent | G = 3/ | Absent | EVS |
| | | C = 12965 | | A = 13003 | | Frequency |
| Yes | Yes | Yes | Yes | NA | Yes | Segregation |
| | | | | | | Validated |

| | | |
|---|---|---|
| OGI-277- | OGI-547- | Patient ID |
| 591 | 1117 | |
| U | U | Clinical |
| | | Diagnosis¹ |
| R | R | Inheritance |
| chr5: | chr7: | Chromosomal |
| 89923307 | 92130876 | Position |
| GPR98 | PEX1 | Gene |
| c.956dup | c.2528G > A | Mutation 1 |
| p.(Asn319Lysfs*6) | p.(Gly843Asp) | Mutation 1 |
| | | Effect |
| This Study | CM971144 | HGMD |
| This study | 9398847 | PubMed ID |
| NA/NA/P | D/P/P | SIFT/PolyPhen/ |
| | | Mutation |
| | | Taster |
| Absent | T = 8/ | EVS |
| | C = 12998 | Frequency |
| chr5: | chr7: | Chromosome |
| 90151630 | 92130876 | Position |
| c.17668_17669delAT | c.2528G > A | Mutation 2 |
| p.(Met5890Valfs*10) | p.(Gly843Asp) | Mutation 2 |
| | | Effect |
| CD112917 | CM971144 | HGMD |
| 21569298, | 9398847 | PubMed ID |
| 27147858 | | |
| NA/NA/P | D/P/P | PolyPhen/ |
| | | SIFT/Mutation |
| | | Taster² |
| A1 = 6/ | T = 8/ | EVS |
| R = 11726 | C = 12998 | Frequency |
| Yes | Yes | Segregation |
| | | Validated |

¹Best-Best Disease; CD-Cone Dystrophy; CRD-Cone-Rod Dystrophy; ChorD-Chorioretinal Dystrophy; Choroideremia-Choroideremia; Ciliopathy-Ciliopathy; CSNB-Congenital Stationary Night Blindness; LCA-Leber Congenital Amaurosis; OCA-Oculocutaneous Albinism; MD-Macular Dystrophy; Microphthalmos-Microphthalmos; RP-Retinitis Pigmentosa; RPunc-Retinitis Punctata; RS-juvenile retinoschisis; Star-Stargardt Disease; U-Usher Syndrome.
²SIFT: D = Damaging, T = Tolerated, NA-no prediction. PolyPhen: D = Probably Damaging, PosD = Possibly Damaging, B = Benign, NA = No prediction. Mutation Taster: P = Predicted to be Disease Causing, Poly = Polymorphism, NA = No prediction
*Non-classical genotype-phenotype correlation
# de novo mutation
NA, samples not available for segregation analyses [symbol]
indicates data missing or illegible when filed

TABLE 8
No diagnosis from GEDi testing.

| Subject ID | Clinical Diagnosis¹ | Clinical genetic testing |
|---|---|---|
| OGI-036-091 | CD | Yes |
| OGI-561-1151 | CD | No |
| OGI-283-610 | ChorD | No |
| OGI-292-633 | ChroD | No |
| OGI-275-585 | Ciliopathy | No |
| OGI-290-628 | Ciliopathy | No |
| OGI-298-653 | Ciliopathy | No |
| OGI-037-092 | Ciliopathy | No |
| OGI-410-878 | CRD | No |
| OGI-137-374 | CRD | No |
| OGI-266-572 | CRD | No |
| OGI-400-862 | CRD | No |
| OGI-068-168 | LCA | Yes |
| OGI-080-195 | LCA | No |
| OGI-082-201 | LCA | No |
| OGI-281-608 | LCA | No |
| OGI-299-655 | LCA | No |
| OGI-299-656 | LCA | No |
| OGI-081-197 | LCA | Yes |
| OGI-402-864 | LCA | No |
| OGI-421-895 | LCA | No |
| OGI-306-716 | MD | Yes |
| OGI-429-913 | MD | No |
| OGI-438-932 | MD | No |
| OGI-525-1079 | MD | No |
| OGI-318-755 | MD | No |
| OGI-458-975 | MD | No |
| OGI-395-885 | MD | No |
| OGI-393-853 | PPCRA | No |
| OGI-511-1051 | RD | No |
| OGI-495-1019 | RD | No |
| OGI-496-1020 | RD + brain malformation | No |
| OGI-090-223 | RP | Yes |
| OGI-086-213 | RP | Yes |
| OGI-132-354 | RP | No |
| OGI-282-609 | RP | No |
| OGI-284-611 | RP | No |
| OGI-302-706 | RP | No |
| OGI-313-747 | RP | No |
| OGI-051-126 | RP | Yes |
| OGI-295-640 | RP | No |
| OGI-143-388 | RP | Yes |
| OGI-015-082 | RP | Yes |
| OGI-001-001 | RP | Yes |
| OGI-004-009 | RP | Yes |
| OGI-012-035 | RP | Yes |
| OGI-014-038 | RP | Yes |
| OGI-016-043 | RP | Yes |
| OGI-279-604 | RP | No |
| OGI-412-881 | RP | No |
| OGI-419-891 | RP | No |
| OGI-425-904 | RP | No |
| OGI-315-751 | RP | No |
| OGI-316-752 | RP | No |
| OGI-401-863 | RP | No |
| OGI-105-226 | RP | No |
| OGI-436-929 | RP | No |
| OGI-437-931 | RP | No |
| OGI-291-632 | RP | No |
| OGI-267-573 | RP | No |
| OGI-414-883 | RP | No |
| OGI-320-759 | RP | No |
| OGI-397-857 | RP | No |
| OGI-404-870 | RP | No |
| OGI-457-968 | RP | No |
| OGI-500-1030 | RP | No |
| OGI-498-1026 | RP | No |
| OGI-499-1027 | RP | Yes |
| OGI-504-1041 | RP | No |
| OGI-505-1042 | RP | No |
| OGI-506-1043 | RP | No |
| OGI-508-1047 | RP | No |
| OGI-510-1050 | RP | No |
| OGI-507-1046 | RP | No |
| OGI-514-1057 | RP | No |
| OGI-040-100 | RP | Yes |
| OGI-521-1073 | RP | No |
| OGI-524-1078 | RP | No |
| OGI-527-1082 | RP | No |
| OGI-528-1083 | RP | No |
| OGI-018-081 | RP | Yes |
| OGI-536-1098 | RP | No |
| OGI-497-1021 | RP | No |
| OGI-325-772 | RP | No |
| OGI-152-407 | Star | Yes |
| OGI-091-226 | Star | Yes |
| OGI-044-109 | Star | Yes |
| OGI-271-579 | Star | No |
| OGI-287-617 | Star | No |

¹CD—Cone Dystrophy;
CRD—Cone-Rod Dystrophy;
ChorD—Chorioretinal Dystrophy;
Ciliopathy—ciliopathy;
J—Joubert syndrome;
LCA—Leber's Congenital Amaurosis;
MD—Macular Dystrophy;
PPCRA—pigmented paravenous chorioretinal atrophy,
RD—retinal dystrophy;
RP—Retinitis Pigmentosa;
Star—Stargardt Disease

### Example 9. Mutation Validation

[0091] In total, we identified 147 likely pathogenic mutations by GEDi capture and NGS sequencing, and all but four of these were validated by PCR and Sanger sequencing (Supplemental methods and Table 9). Review of the NGS data for the 4 putative mutations that were not validated by Sanger sequencing showed that 3 of the 4 mutations, corresponding to 2 probands (OGI-040-100 and OGI-271-579) were detected by less than 10 reads (Table 9). The 4^{th} putative mutation not detected by Sanger sequencing, had excellent DoC (Table 9); however, the heterozygous G base call was due to mis-alignment of some of the NGS sequence reads, resulting in a false positive variant call (FIG. 2B).

TABLE 9
GEDi mutations not validated by Sanger sequencing

| | | | | | Read | | | | |
|---|---|---|---|---|---|---|---|---|---|
| | | Chromo- | | | Depth | | Chromo- | | |
| Subject | Clinical | somal | | Muta- | (variant/ | Mutation 1 | somal | Mutation | Mutation |
| ID | Diagnosis | Position | Gene | tion 1 | stotal) | Effect | Position | 2 | 2 Effect |
| OGI- | RP | chr17: | A1PL1 | c.1061 | 6/13 | p.(Pro354Arg) | chr17: | c.1060C > | p.(Pro354Thr) |
| 040- | | 6328874 | | C > G | | | 6328875 | A | |
| 100 | | | | | | | | | |
| OGI- | RP | chr17: | FSCN2 | c.1028 | 14/32 | p.(Val343Gly) | -NA- | -NA- | -NA- |
| 267- | | 79503216 | | T > G | | | | | |
| 573 | | | | | | | | | |
| OGI- | Star | chr20: | PRPF6 | c.1094 | 4/14 | p.(Ala365Asp) | -NA- | -NA- | -NA- |
| 271- | | 62632500 | | C > A | | | | | |
| 579 | | | | | | | | | |

### Example 10. Missed Diagnoses

[0092] GEDi capture and sequencing did not initially identify a genetic cause of disease in 5 patients for whom genetic diagnoses were ultimately obtained (Table 10). These cases are instructive, and information from them has been used to iteratively improve the GEDi test. For example, in two cases, OGI-147-394 and OGI-387-839, GEDi sequencing identified a single potentially pathogenic variant in ABCA4 and USH2A, respectively, but the second mutant allele was not initially detected (Table 10). The second alleles were subsequently identified by Sanger sequencing, both being deep intronic mutations known to alter splicing^{31,33}. Probes for the relevant intronic region for USH2A have been added to subsequent versions of the GEDi capture set (Table 1b), and those corresponding to deep intronic ABCA4 mutations will be added to the next version of GEDi³³.

[0093] One subject with presumed X-linked inheritance of RP was not diagnosed using the GEDi capture and sequencing approach. Since the ORF15 region of RPGR, which is known to harbor many of the mutations that cause RP, is highly repetitive and thus cannot be captured using targeted enrichment methods, we employed PCR amplification of the ORF15 region followed by Sanger sequencing for this patient¹⁰. This approach identified a mutation in ORF15 of RPGR in OGI-089-222 (Table 10).

[0094] Probes for the NMNAT1 gene were not included in the original version of the GEDi capture set used for a portion of these studies, resulting in a missed diagnosis for subject OGI-007-017. Exome sequencing for this subject and family resulted in identification of NMNAT1 as an LCA disease gene and probes for this gene are now included in the GEDi capture set (Table 10)³. A similar approach was used for subject OGI-032-076, who was identified to have mutations in the PPT1 gene via exome sequencing. This male subject presented at age 8 with a history of decreased vision and photophobia since age 5, and was diagnosed with cone-rod degeneration based on exam and ERG findings. The subject met all developmental milestones at appropriate ages and there was no evidence of regression. GEDi capture and sequencing did not identify mutations in any of the known IRD disease genes. Research-based exome sequencing of the proband, his parents, and two unaffected brothers identified two rare, potentially pathogenic variants in the PPT1 gene, encoding palmitoyl-protein thioesterase-1, mutations in which cause neuronal ceroid lipofuscinosis-1 (CLN1:MIM 256730). One of these variants p.(Arg151Ter) is the most common nonsense mutation reported in PPT1, and is associated with severe disease in the homozygous state¹¹. The second variant, p.(Met1Leu), had not been previously reported. Measurements of the palmitoyl-protein thioesterase activity in white blood cells from the subject showed reduced enzyme activity, at 8.15 nM/punch*hr (normal range 29.34 to 180.64 nM/punch*hr)^{9,12}. Since the p.Arg151Ter allele is known not to produce a protein, this activity is attributed to the p.Met1Leu protein. Three years after presentation, this subject continues to do well neurologically, possibly consistent with this limited residual PPT1 enzyme activity, although his prognosis remains uncertain^{13,14} . Probes for PPT1 and other genes associated with neuronal ceroid lipofuscinosis are now part of the GEDi capture set (Table 1a).

TABLE 10
Subjects with genetic diagnoses initially missed by GEDi testing.
All the reported mutations were validated and showed familial segregation by Sanger
sequencing. Clinical diagnoses: CRD, Cone-Rod Dystrophy; LCA, Leber Congenital
Amaurosis; RP, Retinitis Pigmentosa; Star, Stargardt Disease; U, Usher syndrome.

| Subject | Clinical | Gene | RefSeq | | | PubMed |
|---|---|---|---|---|---|---|
| ID | Diagnosis | Symbol | Nucleotide ID | Mutation 1 | Mutation 1 Effect | ID |
| OGI- | CRD | PPT1 | NM_000310.3 | c.451C > T | p.(Arg151*) | 9425237 |
| 032- | | | | | | |
| 076 | | | | | | |
| OGI- | LCA | NMNAT1 | NM_022787.3 | c.196C > T | p.(Arg66Trp) | 22842227 |
| 007- | | | | | | |
| 017 | | | | | | |
| OGI- | RP | RPGR | NM_001034853.1 | c.2714_2715delAA | p.(Glu905Glyfs*173) | 14564670 |
| 089- | | | | | | |
| 222 | | | | | | |
| OGI- | Star | ABCA4 | NM_000350.2 | c.5461-10T > C | splicing defect | 10958763 |
| 147- | | | | | | |
| 394 | | | | | | |
| OGI- | U | USH2A | NM_206933.2 | c.2299delG | p.(Glu767Serfs*21) | 11402400 |
| 387- | | | | | | |
| 839 | | | | | | |
| Subject | Clinical | Gene | RefSeq | | | PubMed |
| ID | Diagnosis | Symbol | Nucleotide ID | Mutation 2 | Mutation 2 Effect | ID |
| OGI- | CRD | PPT1 | NM_000310.3 | c.1A > C | p.(Met1Leu) | NA |
| 032- | | | | | | |
| 076 | | | | | | |
| OGI- | LCA | NMNAT1 | NM_022787.3 | c.709C > T | p.(Arg237Cys) | 22842227 |
| 007- | | | | | | |
| 017 | | | | | | |
| OGI- | RP | RPGR | NM_001034853.1 | NA | NA | NA |
| 089- | | | | | | |
| 222 | | | | | | |
| OGI- | Star | ABCA4 | NM_000350.2 | c.4539 + 2028C > T | splicing defect | 23918662 |
| 147- | | | | | | |
| 394 | | | | | | |
| OGI- | U | USH2A | NM_206933.2 | c.7595-2144A > G | splicing defect | 22009552 |
| 387- | | | | | | |
| 839 | | | | | | |

### Example 11. Improved Diagnoses

[0095] Of note, seven of the subjects studied were found to have mutations in genes that are not primarily associated with their phenotypes (denoted with * in Table 7). Specific examples include cone dystrophy due to mutations in the ORF15 region of RPGR, NRL mutations in Chorio-retinal atrophy, and TMEM67 mutations in Senior-Loken syndrome. The following are some examples.

[0096] OGI-035-090. Subject OGI-035-090 is a male proband with a clinical diagnosis of cone dysfunction syndrome. Clinical history is significant for central vision loss and photophobia, with bull's eye patterns detected on fundus exam, and ERG analyses showing cone dysfunction with preserved rod function (FIGS. 5A-F). GEDi genetic diagnostic testing identified a mutation in the 3′ end of the ORF15 region of the RPGR gene; no other likely cause of disease was identified (Table 6). Although RPGR was originally identified as an RP disease gene, cases of cone dystrophy due to mutations in the ORF15 region of RPGR have been reported¹⁵⁻¹⁸.

[0097] OGI-019-047. OGI-019-047 is a female who presented at age 5 with peripheral field loss and nyctalopia. Fundus exam showed regions of chorioretinal atrophy near the vascular arcades and optic nerves (FIGS. 5A-F). A potential diagnosis of gyrate atrophy was suggested by these clinical findings, but plasma amino acid screening revealed normal ornithine levels, and sequencing of the OAT gene, as well as the CHM and CRB1 genes, was negative. GEDi sequencing identified a homozygous null mutation in NRL gene (Table 6). Segregation analysis confirmed biparental inheritance. Although mutations in NRL are predominantly associated with RP, null mutations at the same location in this gene have been reported as a cause of chorioretinal atrophy¹⁹.

[0098] OGI-314-749. This 31-year old subject has a history of renal disease diagnosed at age 12, and developed renal failure at age 14. He had onset of nyctalopia and decreased peripheral vision in his 20s, leading to the diagnosis of RP at age 25. He was followed regularly for both renal disease and retinal disease, but the potential diagnosis of Senior-Loken syndrome was not considered until he was evaluated at age 31 by a retinal degeneration specialist. The exam showed retinal degenerative changes consistent with RP (FIGS. 5A-F). GEDi genetic diagnostic testing identified mutations in TMEM67, consistent with a ciliopathy (Table 6). Mutations in TMEM67 have been reported to be associated with several cilia-associated disorders, including Meckel syndrome, Joubert syndrome, Bardet-Biedl syndrome and nephronophthisis (MIM: 609884)^{20-24.} Mutations in TMEM67 have not been reported previously in patients with Senior-Loken syndrome.

### REFERENCES:

[0099] 1. Calvo S E, Compton A G, Hershman S G, et al. Molecular diagnosis of infantile mitochondrial disease with targeted next-generation sequencing. Sci Transl Med. Jan. 25, 2012; 4(118):118ra110.
[0100] 2. Sommen M, Van Camp G. Genetic diagnostics of early childhood hearing loss: better testing with next-generation DNA sequencing. B-Ent. 2013; Suppl 21:51-56.
[0101] 3. Rehm H L. Disease-targeted sequencing: a cornerstone in the clinic. Nat Rev Genet. April 2013; 14(4):295-300.
[0102] 4. Pugh T J, Kelly M A, Gowrisankar S, et al. The landscape of genetic variation in dilated cardiomyopathy as surveyed by clinical DNA sequencing. Genetics In Medicine. Feb. 6, 2014.
[0103] 5. Cottrell C E, Al-Kateb H, Bredemeyer A J, et al. Validation of a next-generation sequencing assay for clinical molecular oncology. Journal Molecular Diagnostics. January 2014; 16(1):89-105.
[0104] 6. Levenson D. Whole-exome sequencing emerges as clinical diagnostic tool: Testing method proves useful for diagnosing wide range of genetic disorders. American Journal Medical Genetics. January 2014; 164(1):ix-x.
[0105] 7. Gargis A S, Kalman L, Berry M W, et al. Assuring the quality of next-generation sequencing in clinical laboratory practice. Nature Biotechnology. November 2012; 30(11):1033-1036.

[0106] 8. Rehm H L, Bale S J, Bayrak-Toydemir P, et al. ACMG clinical laboratory standards for next-generation sequencing. Genetics In Medicine. September 2013; 15(9):733-747.
[0107] 9. Yang Y, Muzny D M, Reid J G, et al. Clinical whole-exome sequencing for the diagnosis of mendelian disorders. New England Journal Medicine. Oct. 17, 2013; 369(16):1502-1511.
[0108] 10. Shearer A E, Black-Ziegelbein E A, Hildebrand M S, et al. Advancing genetic testing for deafness with genomic technology. Journal Medical Genetics. September 2013; 50(9):627-634.
[0109] 11. Buch H, Vinding T, La C M, Appleyard M, Jensen G B, Nielsen N V. Prevalence and causes of visual impairment and blindness among 9980 Scandinavian adults: the Copenhagen City Eye Study. Ophthalmology. 2004; 111(1):53-61.
[0110] 12. Congdon N, O'Colmain B, Klaver C C, et al. Causes and prevalence of visual impairment among adults in the United States. Archives Ophthalmology. April 2004; 122(4):477-485.
[0111] 13. Quigley H A, Broman A T. The number of people with glaucoma worldwide in 2010 and 2020. British Journal Ophthalmology. March 2006; 90(3):262-267.
[0112] 14. Fan B J, Wiggs J L. Glaucoma: genes, phenotypes, and new directions for therapy. Journal Clinical Investigation. September 2010; 120(9):3064-3072.
[0113] 15. Gemenetzi M, Yang Y, Lotery A J. Current concepts on primary open-angle glaucoma genetics: a contribution to disease pathophysiology and future treatment. Eye. March 2012; 26(3):355-369.
[0114] 16. Neuhann T, Rautenstrauss B. Genetic and phenotypic variability of optic neuropathies. Expert Review Neurotherapeutics. April 2013; 13(4):357-367.
[0115] 17. Maguire A M, Simonelli F, Pierce E A, et al. Safety and efficacy of gene transfer for Leber's congenital amaurosis. New England Journal of Medicine. May 22, 2008; 358(21):2240-2248.
[0116] 18. Bainbridge J W, Smith A J, Barker S S, et al. Effect of gene therapy on visual function in Leber's congenital amaurosis. New England Journal of Medicine. 2008; 358(21):2231-2239.
[0117] 19. Cideciyan A V, Aleman T S, Boye S L, et al. Human gene therapy for RPE65 isomerase deficiency activates the retinoid cycle of vision but with slow rod kinetics. Proceedings National Academy Sciences USA. Sep. 30, 2008; 105(39):15112-15117.
[0118] 20. MacLaren R E, Groppe M, Barnard A R, et al. Retinal gene therapy in patients with choroideremia: initial findings from a phase 1/2 clinical trial. Lancet. Mar. 29, 2014; 383(9923):1129-1137.
[0119] 21. Wiggs J L, Pierce E A. Genetic testing for inherited eye disease: who benefits? JAMA Ophthaltnol. October 2013; 131(10):1265-1266.
[0120] 22. Song J, Smaoui N, Ayyagari R, et al. High-throughput retina-array for screening 93 genes involved in inherited retinal dystrophy. Investigative Ophthalmology & Visual Science. 2011; 52(12):9053-9060.
[0121] 23. Audo I, Bujakowska K M, Leveillard T, et al. Development and application of a next-generation-sequencing (NGS) approach to detect known and novel gene defects underlying retinal diseases. Orphanet Journal Rare Diseases. 2012; 7:8.
[0122] 24. Neveling K, Collin R W, Gilissen C, et al. Next-generation genetic testing for retinitis pigmentosa. Human Mutation. June 2012; 33(6):963-972.
[0123] 25. Eisenberger T, Neuhaus C, Khan A O, et al. Increasing the Yield in Targeted Next-Generation Sequencing by Implicating CNV Analysis, Non-Coding Exons and the Overall Variant Load: The Example of Retinal Dystrophies. PLoS One. 2013; 8(11):e78496.
[0124] 26. Wang F, Wang H, Tuan H F, et al. Next generation sequencing-based molecular diagnosis of retinitis pigmentosa: identification of a novel genotype-phenotype correlation and clinical refinements. Human Genetics. March 2014; 133(3):331-345.
[0125] 27. Falk M J, Pierce E A, Consugar M, et al. Mitochondrial disease genetic diagnostics: optimized whole-exome analysis for all MitoCarta nuclear genes and the mitochondrial genome. Discov Med. December 2012; 14(79):389-399.
[0126] 28. Falk M J, Zhang Q, Nakamaru-Ogiso E, et al. NMNAT1 mutations cause Leber congenital amaurosis. Nature Genetics. Jul. 29, 2012; 44(9):1040-1045.
[0127] 29. den Hollander A I, Koenekoop R K, Yzer S, et al. Mutations in the CEP290 (NPHP6) gene are a frequent cause of Leber congenital amaurosis. American Journal of Human Genetics. September 2006; 79(3):556-561.
[0128] 30. Webb T R, Parfitt D A, Gardner J C, et al. Deep intronic mutation in OFD1, identified by targeted genomic next-generation sequencing, causes a severe form of X-linked retinitis pigmentosa (RP23). Human Molecular Genetics. Aug. 15, 2012; 21(16):3647-3654.
[0129] 31. Vache C, Besnard T, le Berre P, et al. Usher syndrome type 2 caused by activation of an USH2A pseudoexon: implications for diagnosis and therapy. Human Mutation. January 2012; 33(1):104-108.
[0130] 32. Viera A J, Garrett J M. Understanding interobserver agreement: the kappa statistic. Family Medicine. May 2005; 37(5):360-363.
[0131] 33. Braun T A, Mullins R F, Wagner A H, et al. Non-exomic and synonymous variants in ABCA4 are an important cause of Stargardt disease. Human Molecular Genetics. Dec. 20, 2013; 22(25):5136-5145.
[0132] 34. Redin C, Le Gras S, Mhamdi O, et al. Targeted high-throughput sequencing for diagnosis of genetically heterogeneous diseases: efficient mutation detection in Bardet-Biedl and Alstrom syndromes. Journal Medical Genetics. August 2012; 49(8):502-512.
[0133] 35. Flintoft L. Clinical genetics: exomes in the clinic. Nat Rev Genet. December 2013; 14(12):824.
[0134] 36. Delanty N, Goldstein D B. Diagnostic exome sequencing: a new paradigm in neurology. Neuron. Nov. 20, 2013; 80(4):841-843.
[0135] 37. Dorschner M O, Amendola L M, Turner E H, et al. Actionable, pathogenic incidental findings in 1,000 participants' exomes. American Journal Human Genetics. Oct. 3, 2013; 93(4):631-640.
[0136] 38. Platt J, Cox R, Enns G M. Points to Consider in the Clinical Use of NGS Panels for Mitochondrial Disease: An Analysis of Gene Inclusion and Consent Forms. Journal Genetic Counseling. Jan. 8, 2014.
[0137] 39. Berglund E C, Lindqvist C M, Hayat S, et al. Accurate detection of subclonal single nucleotide variants in whole genome amplified and pooled cancer samples using HaloPlex target enrichment. BMC Genomics. 2013; 14:856.
[0138] 40. Fromer M, Moran I L, Chambert K, et al. Discovery and statistical genotyping of copy-number variation from whole-exome sequencing depth. American Journal Human Genetics. Oct. 5, 2012; 91(4):597-607.

[0139] Table 11. Bait sequences, identified by SEQ ID NO:, their corresponding genomic coordinates, and the gene to which the bait is localized.

Lengthy table referenced here
US20180346981A1-20181206-T00001
Please refer to the end of the specification for access instructions.

### OTHER EMBODIMENTS

[0140] It is to be understood that while the invention has been described in conjunction with the detailed description thereof, the foregoing description is intended to illustrate and not limit the scope of the invention, which is defined by the scope of the appended claims. Other aspects, advantages, and modifications are within the scope of the following claims. For example, although the methods are described for use in detecting variations associated with genetic eye diseases, other genetic variations can also be detected, e.g., variations associated with cancer.

LENGTHY TABLES
The patent application contains a lengthy table section. A copy of the table is available in electronic form from the USPTO web site (http://seqdata.uspto.gov/?pageRequest=docDetail&DocID=US20180346981A1). An electronic copy of the table will also be available from the USPTO upon request and payment of the fee set forth in 37 CFR 1.19(b)(3).

1. A method of detecting a genetic variation in a genomic region associated with a genetic eye disease in a subject, the method comprising:
contacting a sample comprising fragmented genomic DNA (gDNA) from the subject with a plurality of bait ribonucleotides, wherein each bait binds to a fragment of gDNA comprising a genomic target sequence that is within a genomic region associated with a genetic eye disease; the plurality of baits comprises sufficient baits to sequence each target sequence is sequenced at least 10 times; and the plurality comprises baits that bind to mutations in at least 100 genes;
enriching the sample for the bait/gDNA complexes;
isolating the gDNA fragments;
determining the sequences of the isolated gDNA fragments using next generation sequencing,
wherein each selected mutation is sequenced at least 10 times; and
comparing the determined sequences to corresponding reference sequences, thereby detecting the presence of genetic variations in a genomic region associated with genetic eye disease in the subject.

2. The method of claim 1, wherein the plurality of bait oligonucleotides comprises at least 10,000 oligonucleotides.

3. The method of claim 1, wherein the mutations include one or more mutations listed in Tables 2, 3, 4, 9, or 10.

4. The method of claim 1, wherein the reference sequences include the normal sequence, and wherein differences between the subject's genomic sequences and normal reference sequences indicate the presence of mutations, and identity between the subject's genomic sequences and normal reference sequences indicate the absence of mutations.

5. The method of claim 1, wherein the reference sequences include the mutant sequences, preferably comprising a known mutation associated with eye disease, and wherein identity between the subject's genomic sequences and mutant reference sequences indicate the presence of mutations, and differences between the subject's genomic sequences and mutant reference sequences indicate the absence of mutations.

6. The method of claim 1, wherein sequence of each selected mutation at least 10 times is obtained by one or more of: (1) stochastically increasing the number of baits per target; (2) near-target capture, using bait sequences up to 75 bp away from the mutation of interest; and/or (3) tiling the baits such that numerous overlapping baits target the same region.

7. A kit for use in detecting a mutation in a genomic region associated with a genetic eye disease in a subject, the kit comprising:
a plurality of bait ribonucleotides, wherein each bait is complementary to a genomic target sequence that is within a genomic region associated with a genetic eye disease; the plurality of baits comprises sufficient baits to sequence each target sequence is sequenced at least 10 times; and the plurality comprises baits that bind to regions in at least 100 genes;
reagents for enriching the sample for the bait/gDNA complexes;
reagents for isolating the gDNA fragments; and
reagents for determining the sequences of the isolated gDNA fragments using next generation sequencing.

8. The kit of claim 7, wherein the plurality of bait oligonucleotides comprises at least 10,000 oligonucleotides.

9. The kit of claim 8, wherein the plurality of bait oligonucleotides comprises at least 10,000 oligonucleotides listed in Table 11.

10. The kit of claim 7, wherein the target regions include one or more genes or regions listed in Tables 2, 3, 4, 9, or 10.

11. The kit of claim 10, wherein the target regions include 50 or more genes or regions listed in Tables 2, 3, 4, 9, or 10.

12. The method of claim 2, wherein the plurality of bait oligonucleotides comprises at least 10,000 oligonucleotides listed in Table 11.

13. The method of claim 1, wherein the subject is a mammalian subject.

14. The method of claim 13, wherein the subject is a human.

The application's sequence listing, which the Patent Office published only in electronic form, follows.

SEQUENCE LISTING (19836 sequences)

SEQ ID NO: 1 - DNA, 119 bp, homo sapiens
ttggttcatgttctttattgaacaccttacatgggtatggacagggcctatgggtggggcaaggcagcatgacagcctcagtgaagtcatggcaagtagcatagccacccatgtcagag

SEQ ID NO: 2 - DNA, 119 bp, homo sapiens
gtggggcaaggcagcaatgacagcctcagtgaagtcatggcaagtagcatagccacccatgtcagaggtcgaacctgtgggggagaatcatcatcatccatgtggcctgggctccatcc

SEQ ID NO: 3 - DNA, 119 bp, homo sapiens
cacccatgtcagaggttcgaacctgtgggggagaatcatcatcatccatgtggcctgggctccatcctacaatccccatcaccacccaacagtctgtcccctaaggaagccggcccaag

SEQ ID NO: 4 - DNA, 119 bp, homo sapiens
cctgggctccatcctaacaatccccatcaccacccaacagtctgtcccctaaggaagccggcccaaggaaacctaggctctacccagcaaggtgaccatggtccactgcttagaggcac

SEQ ID NO: 5 - DNA, 119 bp, homo sapiens
gaagccggcccaaggacaacctaggctctacccagcaaggtgaccatggtccactgcttagaggcacaagtctcttccctggtacactgcactgaagggtatggggagtgtggtccttg

SEQ ID NO: 6 - DNA, 119 bp, homo sapiens
ctgcttagaggcacaaggtctcttccctggtacactgcactgaagggtatggggagtgtggtccttgcaggttggaagaaataaagggctctagctccctttagtctgcaggtgaccga

SEQ ID NO: 7 - DNA, 119 bp, homo sapiens
gagtgtggtccttgcaaggttggaagaaataaagggctctagctccctttagtctgcaggtgaccgatgcagacttgatgaagtcggttgtggtgctgtagccgcccatgtctcgagtc

SEQ ID NO: 8 - DNA, 119 bp, homo sapiens
cgtctcaaagactgcgtattctgcactatagctctcaccagggaccacaccagctcccccaaccaggccgcagccagattgtcaataatgttcccatagagattgggcatcacaagcac

SEQ ID NO: 9 - DNA, 119 bp, homo sapiens
atagctctcaccagggaccacaccagctcccccaaccaggccagcagccagattgtcaataatgttccctagagattgggcatcacaagcacatcaaactggtaaggattctgcaccag

SEQ ID NO: 10 - DNA, 119 bp, homo sapiens
atgatgttggccttgtggacagcagtgaccttgccccgccccttcttggtggcatagtcaaaggcgaacttgcaatccgctgagacttggctcgtgtgacaatcttcaaacactcaatc

SEQ ID NO: 11 - DNA, 119 bp, homo sapiens
ggcatagtcaaaggcgaactttgcaatccgctgagacttggctcgtgtgacaatcttcaaacactcaatacaccccttgcactctgggtaagaagaaagcagcagctaggtgacactgg

SEQ ID NO: 12 - DNA, 119 bp, homo sapiens
caatcttcaaacactcaatcacaccccttgcactctgggtaagaagaaagcagcagctaggtgacactggaagggaaacaaggagctccacctctctcccatcttcatccttgccctcc

SEQ ID NO: 13 - DNA, 119 bp, homo sapiens
cagcagctaggtgacactgggaagggaaacaaggagctccacctctctcccatcttcatccttgccctccccagtttctggggcctcacctcatgttccagagagctgtactccccttc

SEQ ID NO: 14 - DNA, 119 bp, homo sapiens
catcttcatccttgccctcccccagtttctggggcctcacctcatgttccagagagctgtactcccctttgtctgctctcgaatgatcaccaggtctagattgttgtgccgagtcatat

SEQ ID NO: 15 - DNA, 119 bp, homo sapiens
agagagctgtactccccttctgtctgctctcgaatgatcaccaggtctagattgttgtgccgagtcataacccaggaagtgacttcacatggactacgttggcaaataagtccaactta

SEQ ID NO: 16 - DNA, 119 bp, homo sapiens
gggtggatgaggaggctcgggcccttccacccacgcgtccattgggcggcgccgccatcactctcttctggctacaccgccttctcttcctccgcggaacccggatcccctcctccacc

SEQ ID NO: 17 - DNA, 119 bp, homo sapiens
tcactctcttctgggctacaccgccttctcttcctccgcggaacccggatcccctcctccaccaccctcccccgccccgtcacgatagcctctcattggacggaggcacggtcaatcct

SEQ ID NO: 18 - DNA, 119 bp, homo sapiens
tccaccaccctctccccgccccgtcacgatagcctctcattggacggaggcacggtcaatcctcctcgattagggagccgactggacgcgaggcctttgggccgtccccagcctcgtcg

SEQ ID NO: 19 - DNA, 119 bp, homo sapiens
aatcctcctcgagttagggagccgactggacgcgaggcctttgggccgtccccagcctcgtcggattggttcctgcgcgttggcgcaacggaagaggcggccggccgagggcgcgcctc

SEQ ID NO: 20 - DNA, 119 bp, homo sapiens
tcgtcggattggcttcctgcgcgttggcgcaacggaagaggcggccggccgagggcgcgcctctgctctgctggactgccgcggaggaggcgagaaggaatccgacgctggggggcttg

SEQ ID NO: 21 - DNA, 119 bp, homo sapiens
cgcctctgctctggctggactgccgcggaggaggcgagaaggaatccgacgctggggggcttgctcgggggcagcgactgctgctgcggatgggagggggccggctcggcgcgcccatg

SEQ ID NO: 22 - DNA, 119 bp, homo sapiens
ggcttgctcgggcggcagcgactgctgctgcggatgggagggggccggctcggcgcgcccatggagcgcacggcagggcttccgccacctccgtctcgtcggctggggagcaggcggcc

SEQ ID NO: 23 - DNA, 119 bp, homo sapiens
cccatggagcgccacggcagggcttccgccacctccgtctcgtcggctggggagcaggcggccggggacccgaagggcggcggcaggagccactgcggcgccgggcgagcagcgcgtcg

SEQ ID NO: 24 - DNA, 119 bp, homo sapiens
gcggccggggaccccgaagggcggcggcaggagccactgcggcgccgggcgagcagcgcgtcggtgccccggtcggggcctcggctgagggcacgaggcgggatcgactgggctcttac

SEQ ID NO: 25 - DNA, 119 bp, homo sapiens
gcgtcggtgcccgcggtcggggcctcggctgagggcacgaggcgggatcgactgggctcttacagcggcccacctcggtctcccgccagcgcgtcgaaagcctgaggaaaaagcggccg

SEQ ID NO: 26 - DNA, 119 bp, homo sapiens
tttttccatggtttggactggatatcggtggaactctggtcaagctggtatattttgaacccaaagacacactgctgaagaagaagaggaagaagtggaaagtcttaaaagcattcgga

SEQ ID NO: 27 - DNA, 119 bp, homo sapiens
acccaaagacatcactgctgaagaagaagaggaagaagtggaaagtcttaaaagcattcggaagtacctacctccaatgtggcttatgggtctacaggcattcgggacgtgcacctcga

SEQ ID NO: 28 - DNA, 119 bp, homo sapiens
cggaagtacctgacctccaatgtggcttatgggtctacaggcattcgggacgtgcacctcgagctgaagacctgactctgtgtggacgcaaaggcaatctgcactttatacgctttccc

SEQ ID NO: 29 - DNA, 119 bp, homo sapiens
tcgagctgaaggacctgactctgtgtggacgcaaaggcaatctgcactttatacgctttcccactcatgcatgcctgcttttattcaaatgggcagagataaaaacttctcgagtctcc

SEQ ID NO: 30 - DNA, 119 bp, homo sapiens
tcccactcatgacatgcctgcttttattcaaatgggcagagataaaaacttctcgagtctccacactgtttttgtgccactggaggtggagcgtacaaatttgagcaggattttctcac

SEQ ID NO: 31 - DNA, 119 bp, homo sapiens
ataggtgatcttcagctttgcaaactggatgaactagattgcttgatcaaaggaattttatacattgaccagtcggattcaatggacggtcacagtgctattactttgaaaaccctgct

SEQ ID NO: 32 - DNA, 119 bp, homo sapiens
gatcaaaggaattttatacattgactcagtcggattcaatggacggtcacagtgctattactttgaaaacctgctgattctgaaaagtgtcagaagttaccatttgatttgaaaaatcc

SEQ ID NO: 33 - DNA, 119 bp, homo sapiens
ggtcacagtgctattactttgaaaaccctgctgattctgaaaagtgtcagaagttaccatttgatttgaaaatccgtatcctctgcttctggtgaacattggctcaggggttagcatct

SEQ ID NO: 34 - DNA, 119 bp, homo sapiens
tgtcagaagttaccatttgatttgaaaaatccgtatcctctgcttctggtgaacattggctcaggggttgcatcttagcagtatattccaaagataattacaaacgggtcacaggtact

SEQ ID NO: 35 - DNA, 119 bp, homo sapiens
tcttggaggaggaactttttttggtctctgctgtcttcttactggctgtaccacttttgaagaagctctgaaatggcatctcgtggagatagcaccaaagtggataaactagtacgaga

SEQ ID NO: 36 - DNA, 119 bp, homo sapiens
tgaagaagctcttgaaatggcatctcgtggagatagcaccaaagtggataaactagtacgagatatttaggaggggactatgagaggtttggactgccaggctgggctgtggcttcaag

SEQ ID NO: 37 - DNA, 119 bp, homo sapiens
ctttggaaacatgatgagcaaggagaagcgagaggctgtcagtaaagaggacctggccagagcgactttatcaccatcaccaacaacattggctcaatagcaagaatgtgtgcccttaa

SEQ ID NO: 38 - DNA, 119 bp, homo sapiens
ggaaacatgatgagcaaggagaagcgagaggctgtcagtaaagaggacctggccagagcgactttgatcccatcaccaacaacattggctcaatagcaagaatgtgtgcccttaatgaa

SEQ ID NO: 39 - DNA, 119 bp, homo sapiens
aacattaaccaggtggtatttgttggaaatttcttgagaattaatacgatcgccatgcggcttttggcaatgctttggattattggtccaaggggcagttgaaagcacttttttcggaa

SEQ ID NO: 40 - DNA, 119 bp, homo sapiens
aaccaggtggtatttgttggaaatttcttgagaattaatacgatcgccatgcggcttttggcatatgcttggattattggtccaaggggcagttgaaagcacttttttcggaacacgag

SEQ ID NO: 41 - DNA, 119 bp, homo sapiens
ggttattttggagctgttggagcactccttgagctgttgaagatcccgtgatcattacctggggaggggtcctgaaaccttccacaatgggatctgtggactttcatttttttaagaga

SEQ ID NO: 42 - DNA, 119 bp, homo sapiens
ttacctggggaggggttcctgaaaccttccacaatgggatctgtggactttcatttttttaagagacttctcaatttcatgactgtactacctgaaacaaagtgagaaaggacaggtgt

SEQ ID NO: 43 - DNA, 119 bp, homo sapiens
ttttttaagagacttactcaatttcatgactgtactacctgaaacaaagtgagaaaggacaggtgtattttctaagtcatcaagataaatccttaagaattcagtctaaattagcaacc

SEQ ID NO: 44 - DNA, 119 bp, homo sapiens
aaggacaggtgtatttttctaagtcatcaagataaatccttaagaattcagtctaaattagcaaccaggaggaaaaatatattaaaaacaacaaaaaagtggcacatgtccaggcagtg

SEQ ID NO: 45 - DNA, 119 bp, homo sapiens
aaattagcaaccaggaaggaaaaatatattaaaaacaacaaaaaagtggcacatgtccaggcagtgtgagatttgctgtatataagttgcctgctttgtatttttgaaatctctgcatc

SEQ ID NO: 46 - DNA, 119 bp, homo sapiens
gtccaggcagtgtgaggatttgctgtatataagttgcctgctttgtatttttgaaatctctgcatcactattggaagtgcttctgaagagagctgctctgtgttcagttgactggtttt

SEQ ID NO: 47 - DNA, 119 bp, homo sapiens
aatctctgcatcactcattggaagtgcttctgaagagagctgctctgtgttcagttgactggttttgtgcctgtttgaacttgctgaatgtaaggcaggctactatgcgttataatcta

SEQ ID NO: 48 - DNA, 119 bp, homo sapiens
ttgactggttttgtgtcctgtttgaacttgctgaatgtaaggcaggctactatgcgttataatctaatccaatttgtcaatatggtcttggcaatcatctgtgcattactctggtttgc

SEQ ID NO: 49 - DNA, 119 bp, homo sapiens
cgttataatctaatcacaatttgtcaatatggtcttggcaatcatctgtgcattactctggtttgcattagcctgtgtgtgaacttactgtaaaacatgttttatttcaaggttctgca

SEQ ID NO: 50 - DNA, 119 bp, homo sapiens
actctggtttgcattaagcctgtgtgtgaacttactgtaaaacatgttttatttcaaggttctgcaaaataattgggcaggttaattgtgtacctgaaacttaacaagcagtttttgga

SEQ ID NO: 51 - DNA, 119 bp, homo sapiens
ttttctcaattgccaacagactagtttatttgtttctcttgtaatacgaacatgctattctcttagttttatcttcaataacatatgaaagatccaaaatcaaattggctgtctctaca

SEQ ID NO: 52 - DNA, 119 bp, homo sapiens
ctattctcttagtttttatcttcaataacatatgaaagatccaaaatcaaattggctgtctctacagcccctgtaggccactaagctttgcagtcaaacagtccaaggtcaggttgctg

SEQ ID NO: 53 - DNA, 119 bp, homo sapiens
gctgtctctacagccacctgtaggccactaagctttgcagtcaaacagtccaaggtcaggttgctggctagcccacagcttcatgtggaaggcagctttgtggcacaaatggacgacgt

SEQ ID NO: 54 - DNA, 119 bp, homo sapiens
gtcaggttgctggctgagcccacagcttcatgtggaaggcagctttgtggcacaaatggacgacgtgtgttcttaagaaagaccagttgagttcttcctggctattgtataatccacag

SEQ ID NO: 55 - DNA, 119 bp, homo sapiens
aatggacgacgtgtgcttcttaagaaagaccagttgagttcttcctggctattgtataatccacagccaactgtgaaagcaaatctggccagttagcaacacagggagaatctgcctga

SEQ ID NO: 56 - DNA, 119 bp, homo sapiens
tataatccacagccacactgtgaaagcaaatctggccagttagcaacacagggagaatctgcctgaactaccaaaggtgtccatacttcatgtcagtgagaatttcacctccatcatgt

SEQ ID NO: 57 - DNA, 119 bp, homo sapiens
gaatctgcctgaactgaccaaaggtgtccatacttcatgtcagtgagaatttcacctccatcatgttctaagagccaacaacagattctagggcactgcaaaatgcttcagcaattaat

SEQ ID NO: 58 - DNA, 119 bp, homo sapiens
cctccatcatgttctaaagagccaacaacagattctagggcactgcaaaatgcttcagcaattaattgagttctgtttgagtacattcatcatctttgagaatgctttctgggtcgttg

SEQ ID NO: 59 - DNA, 119 bp, homo sapiens
cttcagctcatcccaggcagtgtcatttctgttgcagagaagcaagctgcagattgttgcttcattaggataagatgaaaaaaatgtttggagccaaattttgcagtgcacacatcttt

SEQ ID NO: 60 - DNA, 119 bp, homo sapiens
ttgcttcattaggaataagatgaaaaaaatgtttggagccaaattttgcagtgcacacatctttcacactccataactattaggacatattgagcctagggatccaataggctgtgttc

SEQ ID NO: 61 - DNA, 119 bp, homo sapiens
ctgtcattttagtcaggggttccatcagagtcactccaattctgtctatggcaataatacgatgcatatgagaaactgcttcaaagatggatgtataactttttggcacaggacaagat

SEQ ID NO: 62 - DNA, 119 bp, homo sapiens
acgatgcatattgagaaactgcttcaaagatggatgtataactttttggcacaggacaagatctacgtgtcactgattagctgccttcctaggttaagcagctggtccaagactgcatt

SEQ ID NO: 63 - DNA, 119 bp, homo sapiens
agatctacgtggtcactgattagctgccttcctaggttaagcagctggtccaagactgcattttcaagaaaaccccataactgaccaccacagttccttctccagtgtcagaagtgtct

SEQ ID NO: 64 - DNA, 119 bp, homo sapiens
cattttcaagagaaaccccataactgaccaccacagttccttctccagtgtcagaagtgtctccggataagttgtacaaaagagtgccaccttgagggcagttgattttttgataggta

SEQ ID NO: 65 - DNA, 119 bp, homo sapiens
gtctccggataaagttgtacaaaagagtgccaccttgagggcagttgattttttgataggtaatagcctattaattgaacttctgacatttcaatgagtatcccaggtaatacagtgga

SEQ ID NO: 66 - DNA, 119 bp, homo sapiens
ggtaatagcctcattaattgaacttctgacatttcaatgagtatcccaggtaatacagtggaatctatactctttgaccttttaaaggtacaattaaactctttcctaaaatgatgtgg

SEQ ID NO: 67 - DNA, 119 bp, homo sapiens
tggaatctataactctttgaccttttaaaggtacaattaaactctttcctaaaatgatgtggccttcagattttctggaattgtaagcaaaaaggctctcaggatcaaagcactgacat

SEQ ID NO: 68 - DNA, 119 bp, homo sapiens
gtggccttcagcattttctggaattgtaagcaaaaaggctctcaggatcaaagcactgacatgctctgttcctttctggtgagcatacaggcaggtttacttgttaatatactacgcac

SEQ ID NO: 69 - DNA, 119 bp, homo sapiens
acatgctctgtttcctttctggtgagcatacaggcaggtttacttgttaatatactacgcaccaaacaaggaggatctgagtactactaaagtccactgggattcgacaaccacaggtc

SEQ ID NO: 70 - DNA, 119 bp, homo sapiens
gcaccaaacaaaggaggatctgagtactactaaagtccactgggattcgacaaccacaggtctcagactgagataactgatgcaaagactcaaaagatgtttatttaatctaatgacag

SEQ ID NO: 71 - DNA, 119 bp, homo sapiens
ggtctcagacttgagataactgatgcaaagactcaaaagatgtttatttaatctaatgacagtggtggggtcaagcctaatctctgaacattttcaatcaggttgcagcaaagaatagc

SEQ ID NO: 72 - DNA, 119 bp, homo sapiens
acagtggtgggtgtcaagcctaatctctgaacattttcaatcaggttgcagcaaagaatagctgtgaatagccacaatcactgaagcttgacacatgattctgtatggaggctgtcagg

SEQ ID NO: 73 - DNA, 119 bp, homo sapiens
tagctgtgaataagccacaatcactgaagcttgacacatgattctgtatggaggctgtcaggatctttaaatgggatgtgtgaccaaaaggtgactgagcagagctgaggactgtgagg

SEQ ID NO: 74 - DNA, 119 bp, homo sapiens
caggatctttaaaatgggatgtgtgaccaaaaggtgactgagcagagctgaggactgtgaggttgtacaacgtaacctccaaagccattgtgcagctgcttcagcctacctgaggggcc

SEQ ID NO: 75 - DNA, 119 bp, homo sapiens
gaggttgtacacacgtaacctccaaagccattgtgcagctgcttcagcctacctgaggggccatagcatatgttacaattcttttcaagacagaaagtgtggtcctgactctctcagtt

SEQ ID NO: 76 - DNA, 119 bp, homo sapiens
ggccatagcatgatgttacaattcttttcaagacagaaagtgtggtcctgactctctcagttgtcagtgttcactcttacacaatgatggcttcttagcttccaaacgagacatcttac

SEQ ID NO: 77 - DNA, 119 bp, homo sapiens
agttgtcagtggttcactcttacacaatgatggcttcttagcttccaaacgagacatcttacttcaggtgtaactagtgaagaccgtttttattttgtaaaccacatttttctatttat

SEQ ID NO: 78 - DNA, 119 bp, homo sapiens
ttacttcaggtggtaactagtgaagaccgtttttattttgtaaaccacatttttctatttattgcattacacgttttaacattaaaaattattctttaggaattaaagtatgaatatgc

SEQ ID NO: 79 - DNA, 119 bp, homo sapiens
ttattgcattatcacgttttaacattaaaaattattctttaggaattaaagtatgaatatgcagcattgggctataaaatcaaaaagttcaatgtttatgaagctaatcagcatagaat

SEQ ID NO: 80 - DNA, 119 bp, homo sapiens
atgcagcattgtggctataaaatcaaaaagttcaatgtttatgaagctaatcagcatagaatgatttaagacaaattagtaattccaaatatttattttacttcactcttcaatactct

SEQ ID NO: 81 - DNA, 119 bp, homo sapiens
gaatgatttaatgacaaattagtaattccaaatatttattttacttcactcttcaatactcttttgtttctttgagactgaaattttacagactgctttgcagacctctgcaaaaagta

SEQ ID NO: 82 - DNA, 119 bp, homo sapiens
ctcttttgtttgctttgagactgaaattttacagactgctttgcagacctctgcaaaaagtatgttccagatggacacctatgaaagatatcccagctacaagaagccagttctttcta

SEQ ID NO: 83 - DNA, 119 bp, homo sapiens
agtatgttccaagatggacacctatgaaagatatcccagctacaagaagccagttctttctaatccaacggtatttttcatctcttctttcgatatgaagctcagattcaaagctgctt

SEQ ID NO: 84 - DNA, 119 bp, homo sapiens
ctgaagattgcaagcctgctacttcccctggatttggctcttctgaagatttgaaagtcccagactatctgctcaggaatgtcgtcgtttttaggtatttggaaaacagggctgctttt

SEQ ID NO: 85 - DNA, 119 bp, homo sapiens
agtcccagactatcttgctcaggaatgtcgtcgtttttaggtatttggaaaacagggctgcttttgatttgtaccaccccaaatgtatgagcccaactaaagggaccataacaaccaaa

SEQ ID NO: 86 - DNA, 119 bp, homo sapiens
ggctgcttttgattctgtaccaccccaaatgtatgagcccaactaaagggaccataacaaccaaaacttgtagtctctccacaagttccgaaggctcatagtacttcagcatcagtgta

SEQ ID NO: 87 - DNA, 119 bp, homo sapiens
tccatctttagttacggcagggagtcaagatctagaaaaactagtcactgccacccacgataacagaagtagcagccacttgtcttctctgctatattcctagtgcgtagcagaaaagt

SEQ ID NO: 88 - DNA, 119 bp, homo sapiens
gagtcaagatctagaaaaactagtcactgccacccacgataacagaaggtagcagccacttgtcttctcgctatattcctagtgcgtagcagaaaagtagagaatcttgtcccctttgg

SEQ ID NO: 89 - DNA, 119 bp, homo sapiens
ggccattaatccagtggtgtttattcaagcagtattcacacttgctgttgaataacaagggaatcaaggtcccctagatggggctcccgcagttccagcttcacagcagccccaggtct

SEQ ID NO: 90 - DNA, 119 bp, homo sapiens
tgttgaataacaagggaatcaaggctcccctagatggggctcccgcagttccagcttcacagcagccccggtctttgagaactccagatgagttttgtggttgaaaagcctttcagttc

SEQ ID NO: 91 - DNA, 119 bp, homo sapiens
cagttccagcttcacagcagccccaggtctttgagaactccagatgagttttgtggttgaaaagcctttagttcttcctccatccctctgtcaggcagagcctattataccccgattac

SEQ ID NO: 92 - DNA, 119 bp, homo sapiens
gagttttgtggttgaaaagcctttcagttcttcctccatccctctgtcaggcagagcctattataccccattaccagaacagactcagcagggtggcagaagcacatggcaaagccggt

SEQ ID NO: 93 - DNA, 119 bp, homo sapiens
gtcaggcagagcctattataccccgattaccagaacagactcagcagggtggcagaagcacatggcaaaccggtagaactacgtaagctcagaagaggccacactgttccatgttttca

SEQ ID NO: 94 - DNA, 119 bp, homo sapiens
gccaagaacaacacatcaaagatgcatttgtatgttcatataacactaataggacaatacaaagtatctcacggtctcaatggtgaaccaacaagattactctgttttataagcctttt

SEQ ID NO: 95 - DNA, 119 bp, homo sapiens
tacaaagtatcttcacggtctcaatggtgaaccaacaagattactctgttttataagcctttttgatctgaacttcgtaatagcactttgatttcctcacttaaggcaggcagtgtact

SEQ ID NO: 96 - DNA, 119 bp, homo sapiens
cctttttgatcttgaacttcgtaatagcactttgatttcctcacttaaggcaggcagtgtactctatggaaatctaaacagtgatcttactggacattttatggttcaagtattcaact

SEQ ID NO: 97 - DNA, 119 bp, homo sapiens
tgtactctatggcaaatctaaacagtgatcttactggacattttatggttcaagtattcaactagcttatagaatactccctaaatgcagtagattaaaaaaaaaaatcaaatctacaa

SEQ ID NO: 98 - DNA, 119 bp, homo sapiens
tcaactagcttattagaatactccctaaatgcagtagattaaaaaaaaaaatcaaatctacaagtggttagtattatgtacgaatggtgaaaagaaatcagaatttacaaagtaagatt

SEQ ID NO: 99 - DNA, 119 bp, homo sapiens
ctacaagtggttcagtattatgtacgaatggtgaaaagaaatcagaatttacaaagtaagattggtgtgttccaagttcacacaattaatttgatatttttaatcatattcaaccactc

SEQ ID NO: 100 - DNA, 119 bp, homo sapiens
aagattggtgtgcttccaagttcacacaattaatttgatatttttaatcatattcaaccactcacatttggctatgttaagtcatagctcaacttgttcccttactgctctgcagcaga

SEQ ID NO: 101 - DNA, 119 bp, homo sapiens
ccactcacattttggctatgttaagtcatagctcaacttgttcccttactgctctgcagcagatcacctcctgtctcttttcaagtctaaagcagaaaaacaaaaaacaaacaaacaaa

SEQ ID NO: 102 - DNA, 119 bp, homo sapiens
agcagatcacctgcctgtctcttttcaagtctaaagcagaaaaacaaaaaacaaacaaacaaaaaaaccgttctaaactaatcctcaaactgcctcagtcagtccttaaaacgtgtttt

SEQ ID NO: 103 - DNA, 119 bp, homo sapiens
aacaaaaaaacctgttctaaactaatcctcaaactgcctcagtcagtccttaaaacgtgttttaagtgagctatagaaggtgttttaaacatctgacgtcgtacaaaaaaattccatca

SEQ ID NO: 104 - DNA, 119 bp, homo sapiens
tgttttaagtgatgctatagaaggtgttttaaacatctgacgtcgtacaaaaaaattccatcagtattcgggcacagaagcccatcctattgttttaaaataaactattttcaaacacc

SEQ ID NO: 105 - DNA, 119 bp, homo sapiens
ccatcagtattctgggcacagaagcccatcctattgttttaaaataaactattttcaaacaccttaatttggcttataggcaacaagtaatgagaagagttcaaaaaaataaagccata

SEQ ID NO: 106 - DNA, 119 bp, homo sapiens
aacaccttaattttggcttataggcaacaagtaatgagaagagttcaaaaaaataaagccatacgcttaaatgctatcaaaaaccttcaattctaaacacatacatataaataaaaagg

SEQ ID NO: 107 - DNA, 119 bp, homo sapiens
gccatacgcttacaatgctatcaaaaaccttcaattctaaacacatacatataaataaaaaggaatgatttttaaggctcttgattattaagttaataaatcaaatatacacagtgatt

SEQ ID NO: 108 - DNA, 119 bp, homo sapiens
aaaaggaatgatgttttaaggctcttgattattaagttaataaatcaaatatacacagtgattaataaaaagaattatttacataactatacaaagttctacttttgacatttttttct

SEQ ID NO: 109 - DNA, 119 bp, homo sapiens
gtgattaataaaaaagaattatttacataactatacaaagttctacttttgacatttttttctttaaatcttcattttaccagcaactgctgacatcaaagtctcccctcccccaacaa

SEQ ID NO: 110 - DNA, 119 bp, homo sapiens
gtcatttgtgatcgttgctgtggttctgagctgcaaaggcactttcaaatacagaactacttgtacgtctcataaaaccaatatacaaaaacaactcaagagtcaataaatataaataa

SEQ ID NO: 111 - DNA, 119 bp, homo sapiens
tacttgtacgtcatcataaaaccaatatacaaaaacaactcaagagtcaataaatataaataaaactatatctaagactgcatcaccattaggacatctggcagaagtgggagctcaaa

SEQ ID NO: 112 - DNA, 119 bp, homo sapiens
aaataaaactatgatctaagactgcatcaccattaggacatctggcagaagtgggagctcaaagaccaggggctgggcaggctcctgggagcctgatccgagaccgtgtcggctgcaag

SEQ ID NO: 113 - DNA, 119 bp, homo sapiens
ctcaaagaccagggggctgggcaggctcctgggagcctgatccgagaccgtgtcggctgcaaggggacaacaaccagggtactgttgactagctttttgcatagctgtgagatgcggca

SEQ ID NO: 114 - DNA, 119 bp, homo sapiens
tgcaaggggacacacaaccagggtactgttgactagctttttgcatagctgtgagatgcggcactcgattcccagccaaccacagaaactaccattgccagtgtaagccagcttgtcaa

SEQ ID NO: 115 - DNA, 119 bp, homo sapiens
gcggcactcgatttcccagccaaccacagaaactaccattgccagtgtaagccagcttgtcaaaacttaattaacacagggattctaagtcagcaacggcctcagactcgagtatgaca

SEQ ID NO: 116 - DNA, 119 bp, homo sapiens
tgtcaaaacttaaattaacacagggattctaagtcagcaacggcctcagactcgagtatgacacgacagttaaagaactacaagccctcagactctacctagcggcggcagtgcccgcg

SEQ ID NO: 117 - DNA, 119 bp, homo sapiens
atgacacgacagtttaaagaactacaagccctcagactctacctagcggcggcagtgcccgcggtctgcatacgatgtactccattcggtttaagctctgggcactttccaagtctctg

SEQ ID NO: 118 - DNA, 119 bp, homo sapiens
cccgcggtctgctatacgatgtactccattcggtttaagctctgggcactttccaagtctctgttgtccgtttgtttgtccagtttgggtgttttgtcggcgtgccgttggggggcttc

SEQ ID NO: 119 - DNA, 119 bp, homo sapiens
tctctgttgtcctgtttgtttgtccagtttgggtgttttgtcggcgtgccgttggggggcttctcttcttgtctaccagcgtgtacgccggctgcttggcaaaccgggctttctgctgg

SEQ ID NO: 120 - DNA, 119 bp, homo sapiens
ggcttctcttctctgtctaccagcgtgtacgccggctgcttggcaaaccgggctttctgctggtgtttgccatgtcgtcctcttctacttcagaattgtgtgtccttattttagacatt

SEQ ID NO: 121 - DNA, 119 bp, homo sapiens
tgctggtgtttgtccatgtcgtcctcttctacttcagaattgtgtgtccttattttagacattttggagtcttgttctcataatccttgatggggaccgtgttggccccatgtttctca

SEQ ID NO: 122 - DNA, 119 bp, homo sapiens
gacattttggagttcttgttctcataatccttgatggggaccgtgttggccccatgtttctcaatggggttttgatctggttcagctgctcccgcacgttgttggtggtgttgtcctca

SEQ ID NO: 123 - DNA, 119 bp, homo sapiens
ttctcaatggggtttttgatctggttcagctgctcccgcacgttgttggtggtgttgtcctcagaggctagtgtgtgtggctgcccggcttccgccgcttccgcaggcaccagtagaag

SEQ ID NO: 124 - DNA, 119 bp, homo sapiens
tcctcagaggctgagtgtgtgtggctgcccggcttccgccgcttccgcaggcaccagtagaaggccgtcccaagcaacagatccaagccacagttaagacagagctcagcaagggaaca

SEQ ID NO: 125 - DNA, 119 bp, homo sapiens
ctgttctgttcttcagaggccgcctctgaactcttacttctgcaacggcagcaatcagcgagctgtttcatcacgtttactaacaagatcgattattttgtcagtgatttccttgatcg

SEQ ID NO: 126 - DNA, 119 bp, homo sapiens
tcttacttctgcaacggcagcaatcagcgagctgtttccatcacgtttactaacaagatcgattatttttcagtgatttccttgatcgggttcccatcatcccgtatatcttcagcaga

SEQ ID NO: 127 - DNA, 119 bp, homo sapiens
aatggccacatgtatttcattgttcgctgaaggggaaggctcgcaagcgatgtagattgaatattcagcgaaacattcttcaaaatattcaaattcctcaattcactgcaaatgtgctc

SEQ ID NO: 128 - DNA, 119 bp, homo sapiens
tatttcattgttcgctgaaggggaaggctcgcaagcgatgtagattgaatattcagcggaaacattcttaaaatattcaaattcctcaattcactgcaaatgtgctccgtagtaagacc

SEQ ID NO: 129 - DNA, 119 bp, homo sapiens
tggtgacatcatctccttgttaaaggtaaatgtgatgttcgcacagttatcctggtaataggagtcagagtgcactttgtcttcaccggctggagactggaagaccgacactcgcccac

SEQ ID NO: 130 - DNA, 119 bp, homo sapiens
ataggagtcagaggtgcactttgtcttcaccggctggagactggaagaccgacactcgcccacaccagtcaggggtggacgaagcactggtcgtccaggatggggatgcagctctgccc

SEQ ID NO: 131 - DNA, 119 bp, homo sapiens
gcccacaccagtgcaggggtggacgaagcactggtcgtccaggatggggatgcagctctgcccgctgggcactcgctgtgccctttgtggagcaggcaaggtcgagggccacaccagac

SEQ ID NO: 132 - DNA, 119 bp, homo sapiens
tttcatggcagtatgttcccgtgaagcctttgttacagtcacaggtgaatttgcctcccgactgactctgcacttcccgtgaggaccacagacgttggaggaaatataccgcacccctt

SEQ ID NO: 133 - DNA, 119 bp, homo sapiens
tgaatttgcctcccgactgactcttgcacttcccgtgaggaccacagacgttggaggaaatataccgcacccttcaggtgtgtcgttggaagccatggccactgtgcagctgtcaatca

SEQ ID NO: 134 - DNA, 119 bp, homo sapiens
cttcacagggggtcgtgcggcagtggtctttcaggtgtgagcagttcttgccctcatagtcctcggggccttgcagaaatagtcactggcacggttgtagcactgggcaccgttctggc

SEQ ID NO: 135 - DNA, 119 bp, homo sapiens
caggtgtgagcagttcttgccctcatagtcctcggggcacttgcagaaatagtcactggcacggttgtacactgggcaccgttctggcagggattaggctcacaataatcgatgtccag

SEQ ID NO: 136 - DNA, 119 bp, homo sapiens
ctgacagaggtttccagagaaaccagtgggacacagacactggaatctgttgatttcattctgacagtgcccccattcaaacaggggttgctggcacattcatcgatgtctctctcaca

SEQ ID NO: 137 - DNA, 119 bp, homo sapiens
ttcattctgacagtgacccccattcaaacaggggttgctggcacattcatcgatgtctctctcacagtgtcgcctgcatagccaggtggacagatacagcgataaccattaaccaaatc

SEQ ID NO: 138 - DNA, 119 bp, homo sapiens
ctttgtcacagagctggccgccccagttggtctcacagaggcactgccagggctcattacagatgccgtgacgcatcccgggtgtgggatgcacttatcacagtacaggccttgccagc

SEQ ID NO: 139 - DNA, 119 bp, homo sapiens
agctggccgccccagttggtctcacagaggcactgccagggctcattacagatgccgtggacgcatcccggtgtgggatgcacttatcacagtacaggccttgccagccgtactggcac

SEQ ID NO: 140 - DNA, 119 bp, homo sapiens
ctctgttacattcggggcccatccagccttccatgcaagttttgttgccattctggtcacaggcatagttccaaagaagtcatctctggggcggcagaacttattgcagccaaagccat

SEQ ID NO: 141 - DNA, 119 bp, homo sapiens
tgccattctggtcacaggcatagtgtccaaagaagtcatctctggggcggcagaacttattgcagccaagccatagtagtagtcatcacaggtcacgcggatctgatactcaaagtggg

SEQ ID NO: 142 - DNA, 119 bp, homo sapiens
ggcggcagaacttattgcagccaaagccatagtagtagtcatcacaggtcacgcggatctgatactcaagtgggcaacgcccgtgttctgcttcagcgtctgccactgccggctggggt

SEQ ID NO: 143 - DNA, 119 bp, homo sapiens
aggtcacgcggatctgatactcaaagtgggcaacgcccgtgttctgcttcagcgtctgccactgccggcggggttgatcatgcccgagtgagaagccttttcaataatactgtcaggtt

SEQ ID NO: 144 - DNA, 119 bp, homo sapiens
cggccaggcgaaactgaaaggcagcacgatgcggttgcggtcgttgccgcggctggccttgaggttgaagtgttgcccccgatgacaggcgtggaccctgagccgaagctgcagggccc

SEQ ID NO: 145 - DNA, 119 bp, homo sapiens
ccgcggctggccttgaggttgaaggtgttgcccccgatgacaggcgtggaccctgagccgaagctgcaggccccccggccgtgacgcgggactgatactccttgaggcacactttgaag

SEQ ID NO: 146 - DNA, 119 bp, homo sapiens
tggaccctgagccgaagctgcagggccccccggccgtgacgcgggactgatactccttgaggcacacttgaagtatgtgtcacactcgtcgcgggtgcacttgcggtctcccgggttcc

SEQ ID NO: 147 - DNA, 119 bp, homo sapiens
ctgatactccttgaggcacactttgaagtatgtgtcacactcgtcgcgggtgcacttgcggtctcccggttccgggcgccgccgcagcagttcccgttctgcagctccccgttcacgtt

SEQ ID NO: 148 - DNA, 119 bp, homo sapiens
cgggtgcacttgcggtctcccgggttccgggcgccgccgcagcagttcccgttctgcagctccccgttccgttctgcatggacaggatctccaactcgaactgacccgaggccccacac

SEQ ID NO: 149 - DNA, 119 bp, homo sapiens
gagaagggctcctaccttggctcgcagggcacagagcagggcgagcaggaggcttagggggcgcccggacggccgcgcgtccgtggggaacgcatcgctgcgccgcgcgccgcgggcac

SEQ ID NO: 150 - DNA, 119 bp, homo sapiens
gtcccggctctaatatactccgccgattggagcatgcacgactggaaaacaacaccacttttcaaaagcctttcaagagcggcccgttccagaaggcaaagagcccggcctccttttat

SEQ ID NO: 151 - DNA, 119 bp, homo sapiens
tttcaaaagccctttcaagagcggcccgttccagaaggcaaagagcccggcctccttttattattctgacgcttctttgagacgctccccctcctcttccacctcccggctttctttcc

SEQ ID NO: 152 - DNA, 119 bp, homo sapiens
attattctgatcgcttctttgagacgctccccctcctcttccacctcccggctttctttccttctctcggctccccttcttttattattatgattatgcgcagccttttattccctttt

SEQ ID NO: 153 - DNA, 119 bp, homo sapiens
ccttctctcgcgctccccttcttttattattatgattatgcgcagccttttattcccttttagatcagcgcatggaaaaaggggggagggaggggagaaaaaaaaaaaccagcctagct

SEQ ID NO: 154 - DNA, 119 bp, homo sapiens
ttagatcagctgcatggaaaaaggggggagggaggggagaaaaaaaaaaaccagcctagctcgcgggccgccgcaggtaacacaatgacgcgtgcccgcccggctctcggagaaggacc

SEQ ID NO: 155 - DNA, 119 bp, homo sapiens
ctcgcgggccggccgcaggtaacacaatgacgcgtgcccgcccggctctcggagaaggacccggagagccgtctggcagcagcggccggggctggccacctctacccagcacgccgggc

SEQ ID NO: 156 - DNA, 119 bp, homo sapiens
gggcggggcgtgtgcggactgagcgctctgcttccggggcgcgggtgacgcgacgacggcgacactttgtacggagtgcatcggacgtcgaagcctagagtctctgcgtctttccctct

SEQ ID NO: 157 - DNA, 119 bp, homo sapiens
cgacactttgctacggagtgcatcggacgtcgaagcctagagtctctgcgtctttccctcttccgctgctcattcctttccttcctagccttggtcgtcgccgccaccatgaacaagaa

SEQ ID NO: 158 - DNA, 119 bp, homo sapiens
cttccgctgcctcattcctttccttcctagccttggtcgtcgccgccaccatgaacaagaagaagaaacgttcctagggatgcccgcgcccctcggctacgtgccggggctgggccggg

SEQ ID NO: 159 - DNA, 119 bp, homo sapiens
cgccactggcttcaccacgcggtcagacattgggcccgcccgtgatgcaaatgaccctgtggatgatcgcatgcacccccaggcaagagaaccgttggggaccagatgaagaaaaatca

SEQ ID NO: 160 - DNA, 119 bp, homo sapiens
aatgaccctgtggatgatcgccatgcacccccaggcaagagaaccgttggggaccagatgaagaaaaataggctgctgacgatgacgacgaggatctaaatgacaccaattacgatgag

SEQ ID NO: 161 - DNA, 119 bp, homo sapiens
aggaagttggcagaagtcacagaagaagagtggctgagcatccccgaggttggcgatgccagaaataaagtcagcggaacccacgctatgagaagctgacccctgttcctgacagtttc

SEQ ID NO: 162 - DNA, 119 bp, homo sapiens
gccagaaataaacgtcagcggaacccacgctatgagaagctgacccctgttcctgacagtttctttgccaacatttacagaccggagagaaccatacctcagtggatccccgacaaact

SEQ ID NO: 163 - DNA, 119 bp, homo sapiens
caatttggaggtcttaacacaccctatccaggtggactaaacactccatacccaggtggaatgacgccagactgatgacacctggcacaggtgagctggacatgaggaagattggccaa

SEQ ID NO: 164 - DNA, 119 bp, homo sapiens
ctaaacactccatacccaggtggaatgacgccaggactgatgacacctggcacaggtgagctggacatgggaagattggccaagcgaggaacactctgatggacatgaggctgagccag

SEQ ID NO: 165 - DNA, 119 bp, homo sapiens
tgatatcaagaaggcgcgactgctcctcaagtctgttcgggagacgaaccctcatcacccgccagcctgattgcatcagcccgcctggaagaagtcactgggaagctacaagtagctcg

SEQ ID NO: 166 - DNA, 119 bp, homo sapiens
cgggagacgaaccctcatcacccgccagcctggattgcatcagcccgcctggaagaagtcactgggaagtacaagtagctcggaaccttatcatgaaggggacggagatgtgccccaag

SEQ ID NO: 167 - DNA, 119 bp, homo sapiens
agtgaagatgtctggctggaagcagccaggttgcagcctggggacacagccaaggccgtggtagcccaactgtccgtcatctcccacagtctgtcaggatttacatcagagccgcagag

SEQ ID NO: 168 - DNA, 119 bp, homo sapiens
acacagccaaggccgtggtagcccaagctgtccgtcatctcccacagtctgtcaggatttacatcagagcgcagagctggaaacggacattcgtgcaaagaagcgggttcttcggaaag

SEQ ID NO: 169 - DNA, 119 bp, homo sapiens
ctctggcttgctctggcaaggctggagacctatgaaaatgcccgcaaggtcttgaacaaggcgcgggagacattcctacagaccgacatatctggatcacggctgctaagctggaggaa

SEQ ID NO: 170 - DNA, 119 bp, homo sapiens
tcttgaacaaggcgcgggagaacattcctacagaccgacatatctggatcacggctgctaagctggaggagccaatgggaacacgcagatggtggagaagatcatcgaccgagccatca

SEQ ID NO: 171 - DNA, 119 bp, homo sapiens
cacggctgctaagctggaggaagccaatgggaacacgcagatggtggagaagatcatcgaccgagccatacctcgctgcgggccaacggtgtggagatcaaccgtgagcagtggatcca

SEQ ID NO: 172 - DNA, 119 bp, homo sapiens
gatgccgaggaatgtgacagggctgggagtgtggccacctgccaggccgtcatgcgtgccgtgattgggttgggattgaggaggaagatcggaagcatacctggatggaggatgctgac

SEQ ID NO: 173 - DNA, 119 bp, homo sapiens
gccgaggaatgtgacagggctgggagtgtggccacctgccaggccgtcatgcgtgccgtgattgggattggattgaggaggaagatcggaagcatacctggatggaggatgctgacagt

SEQ ID NO: 174 - DNA, 119 bp, homo sapiens
ggagtccctggaagcactcctgcagagggctgtggcccactgccccaaagcagaggtgctgtggctcatggcgccaagtccaagtggctggcaggggatgtgcctgcagcaaggagcat

SEQ ID NO: 175 - DNA, 119 bp, homo sapiens
ctgcagagggctgtggcccactgccccaaagcagaggtgctgtggctcatgggcgccaagtccaagtggtggcaggggatgtgcctgcagcaaggagcatcctggccctggccttccag

SEQ ID NO: 176 - DNA, 119 bp, homo sapiens
gtgttcatgaagtctgtgaagctggagtgggtgcaagacaacatcagggcagcccaagatctgtgcgagaggccctgcggcactatgaggacttccccaagctgtggatgatgaagggg

SEQ ID NO: 177 - DNA, 119 bp, homo sapiens
gatctgtgcgaggaggccctgcggcactatgaggacttccccaagctgtggatgatgaaggggcagatcaggagcagaaggagatgatggagaaggcgcgggaagcctataaccagggg

SEQ ID NO: 178 - DNA, 119 bp, homo sapiens
ttgaagaagtgtccccactccacacccctgtggcttttgctctctcggctggaggagaagattgggcagttactcgagcacgggccattttggaaaagtctcgtctgaagaacccaaag

SEQ ID NO: 179 - DNA, 119 bp, homo sapiens
ccactccacacccctgtggcttttgctctctcggctggaggagaagattgggcagcttactcgagcacggccattttggaaaagtctcgtctgaagaacccaaagaaccctgggctgtg

SEQ ID NO: 180 - DNA, 119 bp, homo sapiens
gctgttttggagtcagcggaagatcaccaaggccagggagtggttccaccgcactgtgaagattgactcgacctgggggatgcctgggccttcttctacaagtttgagctgcagcatgg

SEQ ID NO: 181 - DNA, 119 bp, homo sapiens
tggagtcagcggaagatcaccaaggccagggagtggttccaccgcactgtgaagattgactcggacctggggatgcctgggccttcttctacaagtttgagctgcagcatggcactgag

SEQ ID NO: 182 - DNA, 119 bp, homo sapiens
gagcagcaggaggaggtgaggaagcgctgtgagagtgcagagcctcggcatggggagctgtggtgcgcctgtccaaggacatcgccaactggcagaagaagatcggggacatccttagg

SEQ ID NO: 183 - DNA, 119 bp, homo sapiens
ggcatggggagctgtggtgcgccgtgtccaaggacatcgccaactggcagaagaagatcggggacatcctaggctggtggccggccgcatcaagaacaccttctgattgagcggttgcc

SEQ ID NO: 184 - DNA, 119 bp, homo sapiens
gcagaagaagatcggggacatccttaggctggtggccggccgcatcaagaacaccttctgattgagcggtgccatggccggtctccgtggggcagggttgggccgcatgtggaagggct

SEQ ID NO: 185 - DNA, 119 bp, homo sapiens
aagaacaccttctgattgagcggttgccatggccggtctccgtggggcagggttgggccgcatgtggaaggctctgagctgtgtcctccttcattaaaagtttttatgtctcgtgtcag

SEQ ID NO: 186 - DNA, 119 bp, homo sapiens
ttgtccgagcaggaatatccactttatttggactccatgacaccgttcctatgcccttgactagatgtgatgtattatacattgttctagatttgggggaaaaaaatctcttatgacat

SEQ ID NO: 187 - DNA, 119 bp, homo sapiens
ccttgactagatgtgaatgtattatacattgttctagatttgggggaaaaaaatctcttatgacataaattggtagggaatgggtttatcagaaaggggatacaaaacataccctaagc

SEQ ID NO: 188 - DNA, 119 bp, homo sapiens
ctcttatgacataaaattggtagggaatgggtttatcagaaaggggatacaaaacataccctaagctccaatcattcacttcttcttgggtaaagagctaactgaatgaaagaaattga

SEQ ID NO: 189 - DNA, 119 bp, homo sapiens
cataccctaagctccaaatcattcacttcttcttgggtaaagagctaactgaatgaaagaaattgatttacacttaaattagacaccaaccacctttattggctgccaccctaaattag

SEQ ID NO: 190 - DNA, 119 bp, homo sapiens
gaaagaaattgatttaacacttaaattagacaccaaccacctttattggctgccaccctaaattagtttccttaaaacagtaatatttcacttttactgttttttttttccattaaagc

SEQ ID NO: 191 - DNA, 119 bp, homo sapiens
accctaaattagttttccttaaaacagtaatatttcacttttactgttttttttttccattaaagcaacccattgtgctgcaaaactaactctatgcaattaagtacctgatacatgtt

SEQ ID NO: 192 - DNA, 119 bp, homo sapiens
ttccattaaagcaacaccattgtgctgcaaaactaactctatgcaattaagtacctgatacatgttttcgcttttaacaagtgatagaaaaggttacatcatctcattaagaaaacatt

SEQ ID NO: 193 - DNA, 119 bp, homo sapiens
ctgatacatgttttctgcttttaacaagtgatagaaaaggttacatcatctcattaagaaaacattttcttagacatttcgtttggttttggttttctgttgaaagagttatagcagat

SEQ ID NO: 194 - DNA, 119 bp, homo sapiens
taagaaaacattttccttagacatttcgtttggttttggttttctgttgaaagagttatagcagatggcatttcaaagattggttctttctcctttcacaagtcgagctcgaaacatcc

SEQ ID NO: 195 - DNA, 119 bp, homo sapiens
cttcaagttcacgctattttcagctccaaagaatttatgtgctattcctacaacttccttctcgatgtttcttgactggtgcccttcacgtcaatgtagtggcaatcggcactggcgaa

SEQ ID NO: 196 - DNA, 119 bp, homo sapiens
attttcagctccaaagaatttatgtgctattcctacaacttccttctcgatgttttcttgactggtgccttcacgtcaatgtagtggcaatcggcactggcgaaatggcaggaaattgc

SEQ ID NO: 197 - DNA, 119 bp, homo sapiens
cttccggaatccctgggttttattctgaccagatccgtggatgagcaaaggatggaagaaaacagtgtccccttctccatcaccaggtgcacccgggccttgttttcctcgtagtcctg

SEQ ID NO: 198 - DNA, 119 bp, homo sapiens
agatccgtggatgagcaaaggatggaagaaaacagtgtcgcccttctccatcaccaggtgcacccgggcttgttttcctcgtagtcctggatcccgtggaacattttgttaactccccc

SEQ ID NO: 199 - DNA, 119 bp, homo sapiens
ctcccacttggggtaatcgtggggcttcagggagcccttgtgtgtgcctgggagcacaaccagacagccttgttccggctgatgtgctccatcgccgtccaggcgcaaacgatgagatc

SEQ ID NO: 200 - DNA, 119 bp, homo sapiens
gagcccttgtgtgtgcctgggagcacaaccagacagccgttgttccggctgatgtgctccatcgccgtcaggcgcaaacgatgagatcgctgggcctgaaggggaaatagtgcaggtcc

SEQ ID NO: 201 - DNA, 119 bp, homo sapiens
gacagccgttgttccggctgatgtgctccatcgccgtccaggcgcaaacgatgagatcgctgggcctgaggggaaatagtgcaggtcctggtgcagggggtgacgggacgtcttcttgc

SEQ ID NO: 202 - DNA, 119 bp, homo sapiens
ctcggggagagtgcagtatctgaagagctccttatcttcctggaaatcctggaccttcgtgatcatctttcacttggagcatattcggatttcgaaatggtcacatctctcattactgt

SEQ ID NO: 203 - DNA, 119 bp, homo sapiens
tggaccttcgtgatcatcttctcacttggagcatattcggatttcgaaatggtcacatctctcattactttaatcctaatggtttcacctcctttctgcagattttttcaaactcattc

SEQ ID NO: 204 - DNA, 119 bp, homo sapiens
ccgctgtccttccccaaatagtgtctttatataactcagtggcaatgccgtagtccagcagggaggccgcctgggcagcgcctgcctggccagctcctgcccgggagggcaccgtcctc

SEQ ID NO: 205 - DNA, 119 bp, homo sapiens
agtccagcagggaggccgccctgggcagcgcctgcctggccagctcctgcccgggagggcaccgtcctccccctccggagaggtcccggtcactgcctgcctgggccggttccaggcag

SEQ ID NO: 206 - DNA, 119 bp, homo sapiens
cgggagggcaccgtcctctcccctccggagaggtcccggtcactgcctgcctgggccggttccaggcagcctgcgcgcctgtgcaccgtgcgcctgtgattggacatctctgggtctct

SEQ ID NO: 207 - DNA, 119 bp, homo sapiens
tgggccggttccaggcagccctgcgcgcctgtgcaccgtgcgcctgtgattggacatctctgggtctctgacagctgccggggtcacgcgccgccggtgaaacgacgtctccacaaaga

SEQ ID NO: 208 - DNA, 119 bp, homo sapiens
ggacatctctgggtctctggacagctgccggggtcacgcgccgccggtgaaacgacgtctccacaaagaaggagcagaggcccccagggatcccggagggcagggcaacgcggcaattg

SEQ ID NO: 209 - DNA, 119 bp, homo sapiens
gacagccccggccgaggggcggccgaggtggcccagaacaatctgcagacgggcggcggcgcgaagctgtccatggctgcggcgcggggaacccccacccctcccggcctctgccccat

SEQ ID NO: 210 - DNA, 119 bp, homo sapiens
tgcagacgggcggcggcgcgaagctgctccatggctgcggcgcggggaacccccacccctcccggcctcgccccatttagcccagcgggcggctccgcctccaggcgccgccccggact

SEQ ID NO: 211 - DNA, 119 bp, homo sapiens
accactagtgatcactaaattgtggttaatggctcgggtatataatttattttatcttctttattttgtttttggaataatgatagctgcatctgaaaataatgatatatgcacattaa

SEQ ID NO: 212 - DNA, 119 bp, homo sapiens
cctccagctgtaacctaaccagagctcagcaggcccctttgctgctcctgggaacctcaggccgggccactgcaggagtgcccttggtgtgtgtcccagaggttctgtctgccctgggg

SEQ ID NO: 213 - DNA, 119 bp, homo sapiens
acctcaggccgggccacctgcaggagtgcccttggtgtgtgtcccagaggttctgtctgccctggggcttgcctatggggcccttccctacaggtggtcctgcaggcctgggctccgct

SEQ ID NO: 214 - DNA, 119 bp, homo sapiens
tgtctgccctggggctctgcctatggggcccttccctacaggtggtcctgcaggcctgggctccgcttcccctcagctggttgtgctggagcatctccttggccctggcgagagcctct

SEQ ID NO: 215 - DNA, 119 bp, homo sapiens
gcctgggctccgcttcaccctcagctggttgtgctggagcatctccttggccctggcgagagcctcttcgcagggacaaccacatggggtgtcacccccaccccttcccaggagctgcc

SEQ ID NO: 216 - DNA, 119 bp, homo sapiens
tggcgagagcctcttctgcagggacaaccacatggggtgtcacccccaccccttcccaggagctgccatcgaggcccccacagaacgggccgtggggatagtgaggtagaggttggtgt

SEQ ID NO: 217 - DNA, 119 bp, homo sapiens
tcccaggagctgccatccgaggcccccacagaacgggccgtggggatagtgaggtagaggttggtgtcaccacgtggtaggtctgtggtggctggcagcccccactggtcacctcccca

SEQ ID NO: 218 - DNA, 119 bp, homo sapiens
gtagaggttggtgtcatccacgtggtaggtctgtggtggctggcagcccccactggtcacctccccaataccagggcccggcccagcctcttcatgatataggtgaactcctccgcggt

SEQ ID NO: 219 - DNA, 119 bp, homo sapiens
tggtcacctccccaatgaccagggcccggcccagcctcttcatgatataggtgaactcctccgcggtgcggccgtcacactgctggtcagaatgaccatgctcttcttggagccatagc

SEQ ID NO: 220 - DNA, 119 bp, homo sapiens
ctacaacctgggcgtgtgtccagagttcactgacagagtcatcaggccggctgtagatcttgtccagcaaactggagggccttcatcaaagaagtaggagcacaagatgggaatggagg

SEQ ID NO: 221 - DNA, 119 bp, homo sapiens
agttcactgacagagtcatcaggccggctgtagatcttgtccagcagaactggagggccttcatcaaagagtaggagcacaagatgggaatggaggatgtggggccaccgatgttgaac

SEQ ID NO: 222 - DNA, 119 bp, homo sapiens
ctcatgtcgatgatcatggcatccgtgtgcatgatcttcttccagatgtgctccaccagcagcctggagcctgggtgagcagctcaccgtccccaaacatgtcaaacctcaagtagcca

SEQ ID NO: 223 - DNA, 119 bp, homo sapiens
cttcttccagatgtgctccaccagcagcctggagacctgggtgagcagctcaccgtccccaaacatgtcaacctcaagtagccaatgttgtcctcaagcacgttagtgtggaaggaaaa

SEQ ID NO: 224 - DNA, 119 bp, homo sapiens
cctgggtgagcagctcaccgtccccaaacatgtcaaacctcaagtagccaatgttgtcctcaagcacgtagtgtggaaggaaaacttgatcagctcttcaaatacttcaggggaaggga

SEQ ID NO: 225 - DNA, 119 bp, homo sapiens
ctgcatgggcacaattccaggaatgcggtccttggcattctcagggatatgggctgccttcaggtgtggtctccggagagcatctgcaggtcagcccccaggatctcggctagggccac

SEQ ID NO: 226 - DNA, 119 bp, homo sapiens
tcaggtgtgggtctccggagagcatctgcaggtcagcccccaggatctcggctagggccacttctgaggcaccctggagtagcggctctgcagaccgctcagtttggtggccatcttgg

SEQ ID NO: 227 - DNA, 119 bp, homo sapiens
acttctgaggtcaccctggagtagcggctctgcagaccgctcagtttggtggccatcttggcccccagccggcagaggcatagttatcagccaccagcttcccggccgtctgcagcacc

SEQ ID NO: 228 - DNA, 119 bp, homo sapiens
ggcccccagctcggcagaggcatagttatcagccaccagcttcccggccgtctgcagcaccgtgggcacttggcacgcagagccactatgtcctgggctatggaaagggcttcgctcat

SEQ ID NO: 229 - DNA, 119 bp, homo sapiens
ccgtgggcaccttggcacgcagagccactatgtcctgggctatggaaagggcttcgctcatgggcacaggatgtcgggctccacaccagccaggtcccaggccttgcctgtggtggcac

SEQ ID NO: 230 - DNA, 119 bp, homo sapiens
atgggcacagtgatgtcgggctccacaccagccaggtcccaggccttgcctgtggtggcactcatggcctctgggtgggcatggatgcatataaggggctgctgcccacctggtagatg

SEQ ID NO: 231 - DNA, 119 bp, homo sapiens
actcatggccatctgggtgggcatggatgcatataaggggctgctgcccacctggtagatgcccacagaagtgcgcctccggccgtgggctccccaatgaccgtggcccgctgcaggtc

SEQ ID NO: 232 - DNA, 119 bp, homo sapiens
tgcccacagagagtgcgcctccggccgtgggctccccaatgaccgtggcccgctgcaggtcctgcatgggtgtgcaaaggcctcggccgcagagccactggtgtggctcatcaggatgt

SEQ ID NO: 233 - DNA, 119 bp, homo sapiens
tcctgcatggtgtgtgcaaaggcctcggccgcagagccactggtgtggctcatcaggatgtagaggtcctgtgtgagccgtagcgctggccggcgacctggggcaaggtccacacctcc

SEQ ID NO: 234 - DNA, 119 bp, homo sapiens
gtagaggtccttgtgtgagccgtagcgctggccggcgacctggggcaaggtccacacctccgtgactttgaggtggccctgtcaaagacagaatacaggtgctggcggggctctgcctc

SEQ ID NO: 235 - DNA, 119 bp, homo sapiens
ccgtgacttttgaggtggccctgtcaaagacagaatacaggtgctggcggggctctgcctcaaagaagtggagcagagcagcgggatggccgtggagtagctgccagggttgtagcgca

SEQ ID NO: 236 - DNA, 119 bp, homo sapiens
tcaaagaagtaggagcagagcagcgggatggccgtggagtagctgccagggttgtagcgcaggtcgatcccagcgcagccgtgtccaccagctgttgccataccagccgcaccagctgt

SEQ ID NO: 237 - DNA, 119 bp, homo sapiens
caggtcgatcaccagcgcagccgtgtccaccagctgttgccataccagccgcaccagctgtggccccacgccttcactgtctccagttcagccatggcgtcaaaacgcaggtagcccag

SEQ ID NO: 238 - DNA, 119 bp, homo sapiens
gtggccccacggccttcactgtctccagttcagccatggcgtcaaaacgcaggtagcccagctggccggcagcacctctgtcttgaacagggcctcaataaggtaggtgagctcctctg

SEQ ID NO: 239 - DNA, 119 bp, homo sapiens
agctggccgggcagcacctctgtcttgaacagggcctcaataaggtaggtgagctcctctggagaggggcagcagggggtggtgggggtgcttcctctaccaccagctcgccagggctg

SEQ ID NO: 240 - DNA, 119 bp, homo sapiens
tggagaggggacagcagggggtggtgggggtgcttcctctaccaccagctcgccagggctgtggaacacagcaagcggtggtccccagacacctcctggaggtctgctgtgagctgaga

SEQ ID NO: 241 - DNA, 119 bp, homo sapiens
tgtggaacactagcaagcggtggtccccagacacctcctggaggtctgctgtgagctgagaggccagagctccaagtccacagctgtgcggtaggcgccctgggccagcttggcccgca

SEQ ID NO: 242 - DNA, 119 bp, homo sapiens
gaggccagagactccaagtccacagctgtgcggtaggcgccctgggccagcttggcccgcaggagggcatggtctgccccacgacctctggccgagcatagtgggcctccagcaggtgc

SEQ ID NO: 243 - DNA, 119 bp, homo sapiens
caggagggcactggtctgccccacgacctctggccgagcatagtgggcctccagcaggtgccctgtgcctccaccaaggcccccaggctttggtggaactccagcacttcctgggcttt

SEQ ID NO: 244 - DNA, 119 bp, homo sapiens
gccctgtgccctccaccaaggcccccaggctttggtggaactccagcacttcctgggctttgtccagggctcctcggccagcacgatggcatcgggcaccactccaccacccagccagg

SEQ ID NO: 245 - DNA, 119 bp, homo sapiens
ttgtccagggcctcctcggccagcacgatggcatcgggcaccactccaccacccagccaggcctcgccggattgtcgatgaaggtgaggaccggcacggtgagcgcgaggctgccttcg

SEQ ID NO: 246 - DNA, 119 bp, homo sapiens
ggcctcgccgtgattgtcgatgaaggtgaggaccggcacggtgagcgcgaggctgccttcgggtgtgtcagcagcggcaccgtgcgggtgtgcagcaggttgcccgcggtgatctcacc

SEQ ID NO: 247 - DNA, 119 bp, homo sapiens
cgggtgtgtccagcagcggcaccgtgcgggtgtgcagcaggttgcccgcggtgatctcacctaccagtgggcccagcccagcgactgcataaggaaggcgaactcctccgcggccgtgg

SEQ ID NO: 248 - DNA, 119 bp, homo sapiens
cctaccagtgtggcccagcccagcgactgcataaggaaggcgaactcctccgcggccgtggcggtgcggggctggtgagcagatacaccccacgttgggtgctgtagcgtgggcccggg

SEQ ID NO: 249 - DNA, 119 bp, homo sapiens
ggcggtgcggtggctggtgagcagatacaccccacgttgggtgctgtagcgtgggcccgggagctccattggctgaagtgctcctgcgtgatgttggtgcggcgatcataggtggtgaa

SEQ ID NO: 250 - DNA, 119 bp, homo sapiens
ggagctccatgtggctgaagtgctcctgcgtgatgttggtgcggcgatcataggtggtgaagaggtgcaggggccggcctcagggccctggaagtaggacaggagcaggggcacagcag

SEQ ID NO: 251 - DNA, 119 bp, homo sapiens
aagaggtgcacggggccggcctcagggccctggaagtaggacaggagcaggggcacagcagaggatggcctccagggttgtggcgcaggtccatgatgaggtgctccgtgtcctgtagc

SEQ ID NO: 252 - DNA, 119 bp, homo sapiens
agaggatggccctccagggttgtggcgcaggtccatgatgaggtgctccgtgtcctgtagcggctcccaacctggcgcaggacatatggggccaacacacccaggacggaggcgtcagc

SEQ ID NO: 253 - DNA, 119 bp, homo sapiens
gcggctcccacacctggcgcaggacatatggggccaacacacccaggacggaggcgtcagcaaaactatgaagcgcaggtagcccacattgcctggcagcaccgacacctggaacacag

SEQ ID NO: 254 - DNA, 119 bp, homo sapiens
gcaaaactatcgaagcgcaggtagcccacattgcctggcagcaccgacacctggaacacagagtccaccgtgcttgccggatagcctcgtcctcaggcaactctggggccacccctggt

SEQ ID NO: 255 - DNA, 119 bp, homo sapiens
agagtccaccagtgcttgccggatagcctcgtcctcaggcaactctggggccacccctggtgagtcttcgctgcagcgtcgggcgcgggccaagaaggagtttctgtgggcccgatggc

SEQ ID NO: 256 - DNA, 119 bp, homo sapiens
gtgagtcttcggctgcagcgtcgggcgcgggccaagaaggagtttctgtgggcccgatggctcgcaccagagcctgggatcctcagacgcagcctgcaggccggcattgagcttggtga

SEQ ID NO: 257 - DNA, 119 bp, homo sapiens
gctcgcaccaggagcctgggatcctcagacgcagcctgcaggccggcattgagcttggtgaccagatctcctcggagaccaccgtggagaagtccatgctggccaagtgctgcagcagg

SEQ ID NO: 258 - DNA, 119 bp, homo sapiens
gaccagatcttcctcggagaccaccgtggagaagtccatgctggccaagtgctgcagcagggtgggcaccggtccaccagcgtgtagtagtccttcaggacctcctggaggcagtggac

SEQ ID NO: 259 - DNA, 119 bp, homo sapiens
gggtgggcacacggtccaccagcgtgtagtagtccttcaggacctcctggaggcagtggactacccctgaagggcgctgcgcagagtgaggatggccagggctttctccagggcctgct

SEQ ID NO: 260 - DNA, 119 bp, homo sapiens
actacccctggaagggcgctgcgcagagtgaggatggccagggctttctccagggcctgctcggccggatccccacacagggcagcaccccgctgccctcccacgtctggctgcctcca

SEQ ID NO: 261 - DNA, 119 bp, homo sapiens
ctcggccggagtccccacacagggcagcaccccgctgccctcccacgtctggctgcctccaccaaggggcccagggacctggacacgggcaccgtgaagaagaagtcagactcgcctat

SEQ ID NO: 262 - DNA, 119 bp, homo sapiens
caccaaggggccccagggacctggacacgggcaccgtgaagaagaagtcagactcgcctatcctcagctccggaggtccagggcccctcccccagtccgctcgcccaccacgatggccc

SEQ ID NO: 263 - DNA, 119 bp, homo sapiens
atcctcagcttccggaggtccagggcccctcccccagtccgctcgcccaccacgatggccctgcgcatcgcttaaggatgtgcgcgatgtcctcggccacgcccctggtctggctgctg

SEQ ID NO: 264 - DNA, 119 bp, homo sapiens
cctgcgcatctgcttaaggatgtgcgcgatgtcctcggccacgcccctggtctggctgctggtgaggacaccacatccttgtcggcaccgtacctttctcccaggacctggggcaaggt

SEQ ID NO: 265 - DNA, 119 bp, homo sapiens
tggtgaggaccaccacatccttgtcggcaccgtacctttctcccaggacctggggcaaggtccagatctcgtggtggtgttggaggggcggttgtagatagtgtccacgtgcaggatgg

SEQ ID NO: 266 - DNA, 119 bp, homo sapiens
gtccagatctccgtggtggtgttggaggggcggttgtagatagtgtccacgtgcaggatggtgttccctggtgcaggtaggagatgatgtagggaatgccagagacctggcctcctgtg

SEQ ID NO: 267 - DNA, 119 bp, homo sapiens
ggtgttccctgggtgcaggtaggagatgatgtagggaatgccagagacctggcctcctgtgcagtgccgagatccagcactaaggcggaggtgcccatgagattcccccacacgtgggc

SEQ ID NO: 268 - DNA, 119 bp, homo sapiens
tgcagtgccggagatccagcactaaggcggaggtgcccatgagattcccccacacgtgggccaccaggactcccccatcatgctcagcacctcctggcccgggacgctgtccacccgca

SEQ ID NO: 269 - DNA, 119 bp, homo sapiens
gccaccaggaactcccccatcatgctcagcacctcctggcccgggacgctgtccacccgcaggtagccccattaccctccagaacctcatggcggaggcccctttgcagccaggcaagc

SEQ ID NO: 270 - DNA, 119 bp, homo sapiens
caggtagcccacattaccctccagaacctcatggcggaggcccctttgcagccaggcaagcagttcctctctgagaggctggtgagtgctgggacttgtgggggaggctcgggggtgct

SEQ ID NO: 271 - DNA, 119 bp, homo sapiens
gcagttcctcttctgagaggctggtgagtgctgggacttgtgggggaggctcgggggtgctgggctcatggagatgaccaggcgaggatcgttcagggagctctgcaccccggctgtca

SEQ ID NO: 272 - DNA, 119 bp, homo sapiens
ctgggctcataggagatgaccaggcgaggatcgttcagggagctctgcaccccggctgtcagcacactgccagcgtctgcgggtctgagatgctcagaatctcatggctcttgatggcc

SEQ ID NO: 273 - DNA, 119 bp, homo sapiens
cagcacactggccagcgtctgcgggtctgagatgctcagaatctcatggctcttgatggcctgctggatgcttcctgcatgcccagcaggttctccgggaagcagtagttatccaagag

SEQ ID NO: 274 - DNA, 119 bp, homo sapiens
cctgctggatggcttcctgcatgcccagcaggttctccgggaagcagtagttatccaagaggaccttggcatgtccagcaccaggcttggctggaacaggtgtgtggggccagccaggc

SEQ ID NO: 275 - DNA, 119 bp, homo sapiens
aggaccttggccatgtccagcaccaggcttggctggaacaggtgtgtggggccagccaggccacagagcgcacggacatgagcagaacccattctctcatcatggggacccagggggag

SEQ ID NO: 276 - DNA, 119 bp, homo sapiens
gccacagagcagcacggacatgagcagaacccattctctcatcatggggacccagggggaggcctggctctgcacaaaagctccctggactgtgtgcaaggccgtggccctgctctgtg

SEQ ID NO: 277 - DNA, 119 bp, homo sapiens
tgtgattctctaaatgcatggagaatacacaccaaacctagggctgtacttagctgtggaacaggtgcagatggtgtgggggtggggaggcagactattgcttgaacatttttaatggt

SEQ ID NO: 278 - DNA, 119 bp, homo sapiens
aacaggtgcaagatggtgtgggggtggggaggcagactattgcttgaacatttttaatggtgatagtataacatttaattttttgacaaaattttaaaatcctttatttgtgctgataa

SEQ ID NO: 279 - DNA, 119 bp, homo sapiens
gtgatagtattaacatttaattttttgacaaaattttaaaatcctttatttgtgctgataaagcatgttaatacattaaatctatttacactgtacaaagcttttaaagttctaaaaat

SEQ ID NO: 280 - DNA, 119 bp, homo sapiens
aaagcatgttaaatacattaaatctatttacactgtacaaagcttttaaagttctaaaaatcagattttatctaaatgaataaatttctctgtattgttaaaaccattctacttaactg

SEQ ID NO: 281 - DNA, 119 bp, homo sapiens
atcagatttttatctaaatgaataaatttctctgtattgttaaaaccattctacttaactgcattgttcccaagtccctccagccaggaggcacggtaacaatgtgtcagatctccaca

SEQ ID NO: 282 - DNA, 119 bp, homo sapiens
tgcattgttctccaagtccctccagccaggaggcacggtaacaatgtgtcagatctccacactgagacacaccttcccaagatcatggtacatcagcagcagaactgagacaaaaactg

SEQ ID NO: 283 - DNA, 119 bp, homo sapiens
cactgagacaccaccttcccaagatcatggtacatcagcagcagaactgagacaaaaactggaacaaggccaccttgctcctactgcattatagcttttgatagtatttgctacttgaa

SEQ ID NO: 284 - DNA, 119 bp, homo sapiens
tggaacaaggaccaccttgctcctactgcattatagcttttgatagtatttgctacttgaagaggaggcataccttgtctagctcaatacagtttatgtttcagacactataagtatga

SEQ ID NO: 285 - DNA, 119 bp, homo sapiens
aagaggaggctataccttgtctagctcaatacagtttatgtttcagacactataagtatgatacccaaagcttcatgagtgaacaaggtcagcagatcaccctgagaacaaggaagaca

SEQ ID NO: 286 - DNA, 119 bp, homo sapiens
gatacccaaatgcttcatgagtgaacaaggtcagcagatcaccctgagaacaaggaagacacaatttcctataggctaatgattataaaaatagaaattaagagctccccagaaacaaa

SEQ ID NO: 287 - DNA, 119 bp, homo sapiens
cacaatttccttataggctaatgattataaaaatagaaattaagagctccccagaaacaaaccacttagcaaaaaggaaggagttttgactttcttctaagccaagtactcaagtttaa

SEQ ID NO: 288 - DNA, 119 bp, homo sapiens
aaccacttagtcaaaaaggaaggagttttgactttcttctaagccaagtactcaagtttaagacttattgcctatttaaaaattctttctatgacttctaaacaatgatggcaaagtga

SEQ ID NO: 289 - DNA, 119 bp, homo sapiens
aagacttattggcctatttaaaaattctttctatgacttctaaacaatgatggcaaagtgacaaaaatatgtaatcatcttcttccctcattatatataaaccaaactaaaaacaaaag

SEQ ID NO: 290 - DNA, 119 bp, homo sapiens
gacaaaaataatgtaatcatcttcttccctcattatatataaaccaaactaaaaacaaaagaaatgaacagctataatccaaaaaaaactagaaaatcctgacaggaatcatatagaac

SEQ ID NO: 291 - DNA, 119 bp, homo sapiens
agaaatgaacaagctataatccaaaaaaaactagaaaatcctgacaggaatcatatagaacatctctaaaaaaggattcttggcttaagcaaaatattagagcagagaaagcaaaactc

SEQ ID NO: 292 - DNA, 119 bp, homo sapiens
acatctctaagaaaaggattcttggcttaagcaaaatattagagcagagaaagcaaaactcatgtcctccatgcagtccggcaaggcccccctgcccagaaccctcctctctgagtcac

SEQ ID NO: 293 - DNA, 119 bp, homo sapiens
ccgcagaaacaagaaagcccgtcgcaaggaatgcaaaggcaggcgcaagacgaaggcaactggagagaaacagcctgccagcctgcagacaagagaggcctggagtggtgtcacttcat

SEQ ID NO: 294 - DNA, 119 bp, homo sapiens
aactggagagaagacagcctgccagcctgcagacaagagaggcctggagtggtgtcacttcatggtaacacggctgggtctgctgtgggctgcagtgatgtttgtgtgcatgcatgtgt

SEQ ID NO: 295 - DNA, 119 bp, homo sapiens
cttcatggtaacaacggctgggtctgctgtgggctgcagtgatgtttgtgtgcatgcatgtgtgtggttttatgtacctacttttggctttaatttgattttttttaatgataacacat

SEQ ID NO: 296 - DNA, 119 bp, homo sapiens
atgtgtgtggtttttatgtacctacttttggctttaatttgattttttttaatgataacacattttgtgctgtaggagagaaaaagatgccctctgcttaaaggaaagccagggtaaac

SEQ ID NO: 297 - DNA, 119 bp, homo sapiens
acacattttgtgactgtaggagagaaaaagatgccctctgcttaaaggaaagccagggtaaactgaatacctacagctttccacaaatacatgtcttatcatttattaccatactattt

SEQ ID NO: 298 - DNA, 119 bp, homo sapiens
gtaaactgaataccctacagctttccacaaatacatgtcttatcatttattaccatactatttcatgcttactaataaaaatactcaccaatttaccagtaccttgaaaagaggatctt

SEQ ID NO: 299 - DNA, 119 bp, homo sapiens
ctatttcatgctttactaataaaaatactcaccaatttaccagtaccttgaaaagaggatctttccaagaaattaatataattatcaaacaacaaataacaaacctgacctttgtgggt

SEQ ID NO: 300 - DNA, 119 bp, homo sapiens
gatctttccaagaaaattaatataattatcaaacaacaaataacaaacctgacctttgtgggtggcaaaggtaaatataaatgtttaaagtttaagcatcaaaataatgctgttatcag

SEQ ID NO: 301 - DNA, 119 bp, homo sapiens
gtgggtggcaaatggtaaatataaatgtttaaagtttaagcatcaaaataatgctgttatcagatattgtgaacttattgaacaggtctgactgaatgtaagacctgtttttagcacca

SEQ ID NO: 302 - DNA, 119 bp, homo sapiens
tatcagatattgatgaacttattgaacaggtctgactgaatgtaagacctgtttttagcaccaataaaaaaaatattgagatttctgttctgcaaacttctaactgtgctccctgacag

SEQ ID NO: 303 - DNA, 119 bp, homo sapiens
gcaccaataaaaaaaaatattgagatttctgttctgcaaacttctaactgtgctccctgacagcatctttgggtaaaggaacaaatgtgctccaaggagtaactgttaggtacctgatt

SEQ ID NO: 304 - DNA, 119 bp, homo sapiens
tgacagcatcttttgggtaaaggaacaaatgtgctccaaggagtaactgttaggtacctgatttacaattaattagattgccaaaaaaaaaaaaatcaatccaagtattttctccttta

SEQ ID NO: 305 - DNA, 119 bp, homo sapiens
ctgatttacaatataattagattgccaaaaaaaaaaaaatcaatccaagtattttctcctttagctagcttattaaaacttttaactttcagagaagagtttcttcttccttaaagttt

SEQ ID NO: 306 - DNA, 119 bp, homo sapiens
cctttagctagcattattaaaacttttaactttcagagaagagtttcttcttccttaaagttttaattcgaggtagacatcatgcaaacaaacatcaagtgcagccaacttccattgac

SEQ ID NO: 307 - DNA, 119 bp, homo sapiens
cagaaatgcccgttagaaaaagggacttgaaagtttaggaagcaatgttgtttagcagtattctggcttagtttccaaattccttcaccaccagaagttctatggaaagtgcacagatt

SEQ ID NO: 308 - DNA, 119 bp, homo sapiens
tattctggcttgagtttccaaattccttcaccaccagaagttctatggaaagtgcacagatttctcaatgttctcggaagacacaagactgtgatgcagataacttggattcaaactcc

SEQ ID NO: 309 - DNA, 119 bp, homo sapiens
gatttctcaatagttctcggaagacacaagactgtgatgcagataacttggattcaaactcctgcagtactccctggtgctggcctggccatcagtgtgggcctggaaagcgatgaagt

SEQ ID NO: 310 - DNA, 119 bp, homo sapiens
ctcctgcagtatctccctggtgctggcctggccatcagtgtgggcctggaaagcgatgaagtttctcattccaccagaaggtcatcgtgttctgtggtgggcagcagggcagaagcttc

SEQ ID NO: 311 - DNA, 119 bp, homo sapiens
aagtttctcatctccaccagaaggtcatcgtgttctgtggtgggcagcagggcagaagcttcctgcagggcccgctttcactttctaaacgctctggcagaatcaggtggtttctagct

SEQ ID NO: 312 - DNA, 119 bp, homo sapiens
cttcctgcaggtgcccgctttcactttctaaacgctctggcagaatcaggtggtttctagctctcatttagccaagagtgaggaggaagcgaggggcccggatgaagagtctgcatctt

SEQ ID NO: 313 - DNA, 119 bp, homo sapiens
agctctcattttagccaagagtgaggaggaagcgaggggcccggatgaagagtctgcatcttctgctctccactaaaatgctcagggacattatcttttccctcctttttcatgatgcc

SEQ ID NO: 314 - DNA, 119 bp, homo sapiens
ttttttcctgctggtgcaccagaaatccccctgtggccagtccaggtgggaacaccagacactgctcccgacaccgctgacgagagagcctcagtgctttcagggcatcctgggccact

SEQ ID NO: 315 - DNA, 119 bp, homo sapiens
caggtgggaacaccagacactgctcccagacaccgctgacgagagagcctcagtgctttcagggcatccgggccactcggttggcttctgcctccaccagtacataatctgggctggct

SEQ ID NO: 316 - DNA, 119 bp, homo sapiens
gagagcctcagtgctttcagggcatcctgggccactcggttggcttctgcctccaccagtacataatctggctggctccatccatgatggcatcgtgcttcatgacactgtgcacgcca

SEQ ID NO: 317 - DNA, 119 bp, homo sapiens
ctgattttttgaaaagcttttccaaaacataatcgtcattgctctgttccttggcctcactcttgttttactgtcttgcttctggtaacgccttttcttcaccaggtgtggaattcgag

SEQ ID NO: 318 - DNA, 119 bp, homo sapiens
actcttgttttcactgtcttgcttctggtaacgccttttcttcaccaggtgtggaattcgagttccttcaacttggcgtctctgcaatgcttagagttcttaggcttttgctttggtct

SEQ ID NO: 319 - DNA, 119 bp, homo sapiens
cgagttccttcaaacttggcgtctctgcaatgcttagagttcttaggcttttgctttggtctcagatgttctccagggtctcttcttctgccacactatgatgttttgtttttgacttg

SEQ ID NO: 320 - DNA, 119 bp, homo sapiens
gtctcagatgtttctccagggtctcttcttctgccacactatgatgttttgtttttgacttgtgcttataaaattattttccatttgtttattctcccaaaaagcttctgtttgagcct

SEQ ID NO: 321 - DNA, 119 bp, homo sapiens
cttgtgcttataaaaattattttccatttgtttattctcccaaaaagcttctgtttgagcctggctgggctttctcttttgtaagaaagacctaacttttcatcaatgctttcatcacc

SEQ ID NO: 322 - DNA, 119 bp, homo sapiens
gcctggctgggtctttctcttttgtaagaaagacctaacttttcatcaatgctttcatcaccagatggctagaagttttgcctgttcctgaagaatttgaacattccccatttccacta

SEQ ID NO: 323 - DNA, 119 bp, homo sapiens
caccagatggcatagaagttttgcctgttcctgaagaatttgaacattccccatttccactaatcactgcaactcttctggtccagatactgcatttgtctcttctccaagcctatcat

SEQ ID NO: 324 - DNA, 119 bp, homo sapiens
actaatcactgacaactcttctggtccagatactgcatttgtctcttctccaagcctatcattgctagtacattactactcatgtgagggtcatctttcaaaggatcacttcgattaga

SEQ ID NO: 325 - DNA, 119 bp, homo sapiens
tcattgctagttacattactactcatgtgagggtcatctttcaaaggatcacttcgattagaagttactcatttacttcagctcctttagcctcagatttctcttcagatgatgtggca

SEQ ID NO: 326 - DNA, 119 bp, homo sapiens
tagaagttactgcatttacttcagctcctttagcctcagatttctcttcagatgatgtggcatcatttaagatatgttagaagcagggaacttcttgcgttttggaacatcatggtctg

SEQ ID NO: 327 - DNA, 119 bp, homo sapiens
ggcatcatttacagatatgttagaagcagggaacttcttgcgttttggaacatcatggtctgctccaaagctggttgaatccttctttttagatggcatttgggtgtctgaacatctga

SEQ ID NO: 328 - DNA, 119 bp, homo sapiens
ctgcaaaaattgcacttgtttcagtgctctgggatgcatcaggactagtcagagtaaatagctcatagaatcattggatttgaaaaaccgcctttgttttgggtcttttagcactctat

SEQ ID NO: 329 - DNA, 119 bp, homo sapiens
ctctgggatgcatcaggactagtcagagtaaatagctcatagagatcattggatttgaaaaaccgccttgttttgggtcttttagcactctatttgtcaaaaactgcttgaagatttgt

SEQ ID NO: 330 - DNA, 119 bp, homo sapiens
ctgccttgactgagaaaacagcaatactcgctgaccctgcttgtgccatattttcaacaaagactcaacacaatcattttcccagaacgtttccagtacccaaactgatcttcttctag

SEQ ID NO: 331 - DNA, 119 bp, homo sapiens
tattttcaacaaagactcaacaacaatcattttcccagaacgtttccagtacccaaactgatcttcttcagttcatcatcaggaagacctttgagattcttgggacctccagaaaagag

SEQ ID NO: 332 - DNA, 119 bp, homo sapiens
gtacccaaactgatcttcttctagttcatcatcaggaagacctttgagattcttgggacctccagaaaaagatcagggtggttgcaaatttttcttagggctataagtccggagaaaat

SEQ ID NO: 333 - DNA, 119 bp, homo sapiens
ctgtactggggaagcatttgaatatccccccatggtgatggggacggagaactgctccataaacacaggaacgtgcctaactttcccgggaagatgaagtcaaagagcgaccacagctc

SEQ ID NO: 334 - DNA, 119 bp, homo sapiens
cataaacacaggcaacgtgcctaactttcccgggaagatgaagtcaaagagcgaccacagctctcggagttattttgcatcggtgagccagacagaatgatccgatgaggggtgcgaaa

SEQ ID NO: 335 - DNA, 119 bp, homo sapiens
ctgtttgcaagcaagggtgacagcagcatttggatttcgaattttgtgtccttcgtccaagatcacatatgccagtcatacctgctaatgtcatcctgcatcaatcgaatgtaggagta

SEQ ID NO: 336 - DNA, 119 bp, homo sapiens
ttcgtccaagatcacatagtgccagtcatacctgctaatgtcatcctgcatcaatcgaatgtaggagtagatgtgatcaaaattccatgacaatgagcaacatctcgaattagtttctc

SEQ ID NO: 337 - DNA, 119 bp, homo sapiens
ctttttgtgggtataggaaccggtttcatgtagaattgccactctgaacggaggccaccacgtgtgaaatccttcacccactgatgcatcactgttgttggacagacaattacagttgg

SEQ ID NO: 338 - DNA, 119 bp, homo sapiens
gaaccggtttcatgtagaattgccactctgaacggaggccaccacgtgtgaaattccttcacccactgagcatcactgttgttggacagacaattacagttggacccaacccctcaaac

SEQ ID NO: 339 - DNA, 119 bp, homo sapiens
ctgtaatttgaaccacgagtcctgatcttgctgtagctcagacctgccaagaaggcaattatctggatgtcttgcccaatcccatttcatctcccagaattcctcctgcctgctggcag

SEQ ID NO: 340 - DNA, 119 bp, homo sapiens
agacctgccaagaaggcaattatctggatggtcttgcccaatcccatttcatctcccagaattcctcctcctgctggcagtgcaattcccacagccacctaacacctgtctgctggtac

SEQ ID NO: 341 - DNA, 119 bp, homo sapiens
ttaaaaagctttttgaacagaaaacctggcactttaaaaccttcgtcaaattcagcatcactttcctcaaatcgtcctccagcttcagacgtttctctttgtcctgcagtctcagttta

SEQ ID NO: 342 - DNA, 119 bp, homo sapiens
tttttgaacagaaaacctggcactttaaaaccttcgtcaaattcagcatcactttcctcagaatcgtccccagcttcagacgtttctctttgtcctgcagtctcagtttattccatctc

SEQ ID NO: 343 - DNA, 119 bp, homo sapiens
cttaaccgctgcttataataatcttcatctccatcatctcggtatcttcccactttccgacctcctcctctccttctcctacagaagcagcttcagcttcttccccagaacttgggaaa

SEQ ID NO: 344 - DNA, 119 bp, homo sapiens
cccactttccgacctcctcctcctccttctcctacagaagcagcttcagcttcttccccagaacttgggaaaagtcatcatcaatctcctgcactggcactttcttctgccgtttcccg

SEQ ID NO: 345 - DNA, 119 bp, homo sapiens
gcttcttccccagaacttgggaaaaagtcatcatcaatctcctgcactggcactttcttctgccgtttccgcccttgggcagaggcttcagctcatagtcagtaccatctccagacagg

SEQ ID NO: 346 - DNA, 119 bp, homo sapiens
tgtggggaaatactcagactcttcaccctcagagtctccctctgcctctggcctcatgtctgactcccaggtctccttgcctttggcaatcccactttcccctggaactgcaaagccct

SEQ ID NO: 347 - DNA, 119 bp, homo sapiens
ctgactcccaaggtctccttgcctttggcaatcccactttcccctggaactgcaaagccctcttctggatttcttgatgtgctttttcaaacgctcctcttttttggacagaactctgg

SEQ ID NO: 348 - DNA, 119 bp, homo sapiens
ctcttctggagtttcttgatgtgctttttcaaacgctcctcttttttggacagaactctggctttcttgttggtttgtttttattttgcactggggctggaggcgtgactggggctgga

SEQ ID NO: 349 - DNA, 119 bp, homo sapiens
ggctttcttgtttggtttgtttttattttgcactggggctggaggcgtgactggggctggagcttttctgctgctcttttattacaaccttgcttcttcctttcaaaagacagttttgc

SEQ ID NO: 350 - DNA, 119 bp, homo sapiens
gagcttttctagctgctcttttattacaaccttgcttcttcctttcaaaagacagttttgcttgatctgcaaatacttttcgaagcctgatgcttcattaagcatgatttttctgggct

SEQ ID NO: 351 - DNA, 119 bp, homo sapiens
gcttgatctgccaaatacttttcgaagcctgatgcttcattaagcatgatttttctgggctttttctccgtttctgagggatctgggtaccaaaaggtgtcatctggccagtgcggatg

SEQ ID NO: 352 - DNA, 119 bp, homo sapiens
ctttttctcctgtttctgagggatctgggtaccaaaaggtgtcatctggccagtgcggatgagctcttccaggcagtctcctggacaggcatgagcatgctgccaagactggatggccc

SEQ ID NO: 353 - DNA, 119 bp, homo sapiens
gtgaggtcatccaggaccgaccgatactccttctccacgtcaacgagctgggaggcacggctggcctcaggatggcattgtccacctgctgaagcactccctgttccagcacgtcctgg

SEQ ID NO: 354 - DNA, 119 bp, homo sapiens
aggcacggctggcctcatggatggcattgtccacctgctgaagcactccctgttccagcacgtcctggtatagacgtccacacccaaaccctgcagctcaagggcctgggcgctaggct

SEQ ID NO: 355 - DNA, 119 bp, homo sapiens
ttccagcacgtcctggtcatagacgtccacacccaaaccctgcagctcaagggcctgggcgctaggctcactgcctggatctgatgtcggtcgatgtgcagcagggctggccctctcct

SEQ ID NO: 356 - DNA, 119 bp, homo sapiens
gcctgggcgctaggctctactgcctggatctgatgtcggtcgatgtgcagcagggctggccctctcctcgagctgctgatgcgcaccccacagcagaggtggacagcccgtcacccaca

SEQ ID NO: 357 - DNA, 119 bp, homo sapiens
gggctggccctctcctcggagctgctgatgcgcaccccacagcagaggtggacagcccgtcacccacagacgaaaggagaggtactcctccacctccccatcaccaccactttcttgct

SEQ ID NO: 358 - DNA, 119 bp, homo sapiens
cagcccgtcacccacagaacgaaaggagaggtactcctccacctccccatcaccaccactttcttgcttattgccatttcttcattattactgacaggttgactctgtaaacagtcttg

SEQ ID NO: 359 - DNA, 119 bp, homo sapiens
ccaccactttcttgcttgattgccatttcttcattattactgacaggttgactctgtaaacagtcttgccctgagtttgacttgagtgggggattccctcatttggcattctctacaga

SEQ ID NO: 360 - DNA, 119 bp, homo sapiens
ccagggccgcgcgagcgcccacaaggaaacagagacgctaccgccgccagccgccttggaacccagctcacgggccgtggcgcctgcgccctcagctcaaccatagacaccgcccccaa

SEQ ID NO: 361 - DNA, 119 bp, homo sapiens
acaaggaaacagagacgctaccgccgccagccgccttggaacccagctcgacgggccgtggcgcctgcgcctcagctcaaccatagacaccgcccccaacagcgactccgacttctgct

SEQ ID NO: 362 - DNA, 119 bp, homo sapiens
ttcaaatgaaaatttatttttgaaacattgtgtagtgaataacaatgcattttaacttaaaacttctaatcagattcttatacagtaacataatatttgttaaggaagaacaggtattt

SEQ ID NO: 363 - DNA, 119 bp, homo sapiens
ttaaaacttctaattcagattcttatacagtaacataatatttgttaaggaagaacaggtatttggataagaaattgggaaagcagtgaaggtgttgatagatttttcaaactatagac

SEQ ID NO: 364 - DNA, 119 bp, homo sapiens
aggtatttggataaagaaattgggaaagcagtgaaggtgttgatagatttttcaaactatagacaatgtcgaatcttccatacatgtgcttaactgaccataaatttaaagtagattgc

SEQ ID NO: 365 - DNA, 119 bp, homo sapiens
ctatagacaatgttcgaatcttccatacatgtgcttaactgaccataaatttaaagtagattgcaatgaaaaaataccagtctataactaaagcttcttatgataaagatcaaaattaa

SEQ ID NO: 366 - DNA, 119 bp, homo sapiens
tagattgcaatgaaaaaaataccagtctataactaaagcttcttatgataaagatcaaaattaactattaaaaccaataaaaaaaatagaacaaaaatttcacataccatttgggaata

SEQ ID NO: 367 - DNA, 119 bp, homo sapiens
aaaattaactattgaaaaccaataaaaaaaatagaacaaaaatttcacataccatttgggaatagaaagaactatctataaaatgtgtaagtcctcaacattattttgaacctatcctt

SEQ ID NO: 368 - DNA, 119 bp, homo sapiens
tgggaatagaaagaaactatctataaaatgtgtaagtcctcaacattattttgaacctatccttcagcctatcgctgtgtaatttgcaggcaccaataggcatctgccctgagaataga

SEQ ID NO: 369 - DNA, 119 bp, homo sapiens
ctatccttcagccttatcgctgtgtaatttgcaggcaccaataggcatctgccctgagaatagattattgcactttttgcctattttgctaattaaattcaagtggtatataaatccca

SEQ ID NO: 370 - DNA, 119 bp, homo sapiens
agaatagattattagcactttttgcctattttgctaattaaattcaagtggtatataaatcccacttaagtataaagtgcagaaggtgaagcagagaaagagaaaaatcaaagctcatg

SEQ ID NO: 371 - DNA, 119 bp, homo sapiens
aaatcccacttaaggtataaagtgcagaaggtgaagcagagaaagagaaaaatcaaagctcatgaaataaagacagaaaatgtcttccctcgagagtcaatattcaattacttctggct

SEQ ID NO: 372 - DNA, 119 bp, homo sapiens
ggtaactactgaatcacctttggaacaaccacttaagtaaataatagtctttaacatccctgtgaacaagtggtaaaataacatgaatgacatatcacatataaaattcaaggcaaact

SEQ ID NO: 373 - DNA, 119 bp, homo sapiens
ctgtgaacaatgtggtaaaataacatgaatgacatatcacatataaaattcaaggcaaactttcttctgattttaaaaagatggttttggccaacctacggttgcaattctatgacaac

SEQ ID NO: 374 - DNA, 119 bp, homo sapiens
ctttcttctgtattttaaaaagatggttttggccaacctacggttgcaattctatgacaactctcagagctgtaattaatgagaaagacaaattgagagagggagattaacacctgtga

SEQ ID NO: 375 - DNA, 119 bp, homo sapiens
actctcagagtctgtaattaatgagaaagacaaattgagagagggagattaacacctgtgattcgatggcattaagtcacaaatgtcctatgtcactctgaccatattttctcattctt

SEQ ID NO: 376 - DNA, 119 bp, homo sapiens
gattcgatggtcattaagtcacaaatgtcctatgtcactctgaccatattttctcattcttcctctgcttcccttaatgcccacaagaccttctaaaatcaacgggttgcaatattagt

SEQ ID NO: 377 - DNA, 119 bp, homo sapiens
ttcctctgctttcccttaatgcccacaagaccttctaaaatcaacgggttgcaatattagtcattacatattctgttctcacctcgattagccaagacctgctgtttcttctgcctgat

SEQ ID NO: 378 - DNA, 119 bp, homo sapiens
gtcattacatcattctgttctcacctcgattagccaagacctgctgtttcttctgcctgattgaagctatgctgattgagaacaacaagaaaaccttcctacaccttcctaggaaaaat

SEQ ID NO: 379 - DNA, 119 bp, homo sapiens
attgaagctagtgctgattgagaacaacaagaaaaccttcctacaccttcctaggaaaaataacaaccatttctttataaatatttacattgaaacgttatttatatgaagtattctta

SEQ ID NO: 380 - DNA, 119 bp, homo sapiens
ataacaaccaatttctttataaatatttacattgaaacgttatttatatgaagtattcttaagattaaaatacctgggtatttcctctgggttccacagttttaatcctgagtcaggga

SEQ ID NO: 381 - DNA, 119 bp, homo sapiens
taagattaaacatacctgggtatttcctctgggttccacagttttaatcctgagtcagggatttatagatagtgaaagttctatgaaagtaactatttaattgatccagatttatttag

SEQ ID NO: 382 - DNA, 119 bp, homo sapiens
gatttatagactagtgaaagttctatgaaagtaactatttaattgatccagatttatttagttagtaatattttgctgctctacgttacccaaaaatatactgaccaaatatttggttt

SEQ ID NO: 383 - DNA, 119 bp, homo sapiens
agttagtaataattttgctgctctacgttacccaaaaatatactgaccaaatatttggtttggttgctcgtgtaaattctgcttctctttatactatctccattaagtaacagatgatt

SEQ ID NO: 384 - DNA, 119 bp, homo sapiens
ttggttgctctgtgtaaattctgcttctctttatactatctccattaagtaacagatgattgacctcatattgtttttactgaaatgatcaagtttaaattactgaaatgtgtctgcta

SEQ ID NO: 385 - DNA, 119 bp, homo sapiens
ttgacctcatgattgtttttactgaaatgatcaagtttaaattactgaaatgtgtctgctaagtggctttaaaattttgcatattttctcataaaaaatgtagtttaaaatacagtgac

SEQ ID NO: 386 - DNA, 119 bp, homo sapiens
taagtggcttgtaaaattttgcatattttctcataaaaaatgtagtttaaaatacagtgacatctcatagtcaggccactagacttctgccaacatcatatttccaaatctactggtaa

SEQ ID NO: 387 - DNA, 119 bp, homo sapiens
acatctcatatgtcaggccactagacttctgccaacatcatatttccaaatctactggtaaccaaagaagcgtctaagagtcgcaaaacatttggttgaatccgtgtacctaattccca

SEQ ID NO: 388 - DNA, 119 bp, homo sapiens
aaccaaagaaagcgtctaagagtcgcaaaacatttggttgaatccgtgtacctaattcccatcttaagctcatgatttttcaacattaagaaaacaaacaaaaaacacaaactttccca

SEQ ID NO: 389 - DNA, 119 bp, homo sapiens
catcttaagcttcatgatttttcaacattaagaaaacaaacaaaaaacacaaactttcccatcaggatatagaagctataaactgaaagaaaaaaatgtgagaaaggcacaacaacaga

SEQ ID NO: 390 - DNA, 119 bp, homo sapiens
catcaggatactagaagctataaactgaaagaaaaaaatgtgagaaaggcacaacaacagaataagttaatgtcacagccagaaatcaaaggacaaaaacgcagccatgaagctgtata

SEQ ID NO: 391 - DNA, 119 bp, homo sapiens
gaataagttaaatgtcacagccagaaatcaaaggacaaaaacgcagccatgaagctgtatatagagagatatcaagggatgctgactgagatgatctgggggtatcaagataatattaa

SEQ ID NO: 392 - DNA, 119 bp, homo sapiens
tatagagagaatatcaagggatgctgactgagatgatctgggggtatcaagataatattaaattatattgatgacctctgattgaattagtagggaaatatatgcttaatctaattcct

SEQ ID NO: 393 - DNA, 119 bp, homo sapiens
aaattatattcgatgacctctgattgaattagtagggaaatatatgcttaatctaattcctatacaaagatcctatactaaaaaccattgctttggtgcctgaaggaataagccccgga

SEQ ID NO: 394 - DNA, 119 bp, homo sapiens
tttggcaagggtatggaatgcattaattctcaataaaataaggtagatgagatgttactgtatttgatccaaatattttcttggaaatctgaagtaaaaacatactactcttacaagtc

SEQ ID NO: 395 - DNA, 119 bp, homo sapiens
actgtatttgatctcaaatattttcttggaaatctgaagtaaaaacatactactcttacaagtcggcaatttatgtcagtacaattcattcactttggaaatgaggaaatagcataata

SEQ ID NO: 396 - DNA, 119 bp, homo sapiens
tacaagtcggcaagtttatgtcagtacaattcattcactttggaaatgaggaaatagcataataataaaaatttttaagacgcgaaacatgtaagaggggaataaataatagtgcatta

SEQ ID NO: 397 - DNA, 119 bp, homo sapiens
gcataataataaacaatttttaagacgcgaaacatgtaagaggggaataaataatagtgcattattcagccttcaaccatatattaagcatgcatgaggaaatttcattaaaacctgaa

SEQ ID NO: 398 - DNA, 119 bp, homo sapiens
gtgcattattcagtccttcaaccatatattaagcatgcatgaggaaatttcattaaaacctgaacttggcaatactgtgcaaaatttgaagtgagctacatctatatcatactaagtaa

SEQ ID NO: 399 - DNA, 119 bp, homo sapiens
aacctgaacttggtcaatactgtgcaaaatttgaagtgagctacatctatatcatactaagtaatattcatagaattctgaattctcttaatctatattgtttcattctttttacatca

SEQ ID NO: 400 - DNA, 119 bp, homo sapiens
ctaagtaatattcaatagaattctgaattctcttaatctatattgtttcattctttttacatcatctggaaataagcaacacacaaggcaagttttttaaaggatattctgttttcatt

SEQ ID NO: 401 - DNA, 119 bp, homo sapiens
ttacatcatctggaaaataagcaacacacaaggcaagttttttaaaggatattctgttttcatttctactatgatgaaacactgtgctttgttcaatggtaaaaaatcaagaccatgtt

SEQ ID NO: 402 - DNA, 119 bp, homo sapiens
ttttcatttctacttatgatgaaacactgtgctttgttcaatggtaaaaaatcaagaccatgttctttgttttaaaaaatgcccaggcaatgatttcctggttctggattttaggcaca

SEQ ID NO: 403 - DNA, 119 bp, homo sapiens
accatgttctttgattttaaaaaatgcccaggcaatgatttcctggttctggattttaggcacataaattgtgcattaaaatattctataaataacctgaaaatggaagaagttaaaca

SEQ ID NO: 404 - DNA, 119 bp, homo sapiens
taggcacataaatatgtgcattaaaatattctataaataacctgaaaatggaagaagttaaacacaacattgaagttatgaattcatagcctttataagctttatatattatatacatt

SEQ ID NO: 405 - DNA, 119 bp, homo sapiens
gttaaacacaacatttgaagttatgaattcatagcctttataagctttatatattatatacatttcaacctgccaaattcctttactctgatatgctgggtttacaaactattaaagtc

SEQ ID NO: 406 - DNA, 119 bp, homo sapiens
tatacatttcaaccctgccaaattcctttactctgatatgctgggtttacaaactattaaagtctagtgcattaatgtgagacttccctaacctcaccatgtcttccattatgaaattg

SEQ ID NO: 407 - DNA, 119 bp, homo sapiens
ttaaagtctagtgacattaatgtgagacttccctaacctcaccatgtcttccattatgaaattgtcgtttagatgcattactgcttactcgaacctttctcacttccctaaaagctttt

SEQ ID NO: 408 - DNA, 119 bp, homo sapiens
tgaaattgtcgttctagatgcattactgcttactcgaacctttctcacttccctaaaagcttttgctaaggtgagatttccatgttgctccaaacaattatttaacctcaagtgattaa

SEQ ID NO: 409 - DNA, 119 bp, homo sapiens
aagcttttgctaagggtgagatttccatgttgctccaaacaattatttaacctcaagtgattaaactaactaaagtatctaccatatttgatatgagatgaagggacaagagaatattg

SEQ ID NO: 410 - DNA, 119 bp, homo sapiens
gtgattaaactaaactaaagtatctaccatatttgatatgagatgaagggacaagagaatattgtaaatatattgataaaaagacatacgacttcaagtggtttcctaaagggtcaaga

SEQ ID NO: 411 - DNA, 119 bp, homo sapiens
gaatattgtaaataatattgataaaaagacatacgacttcaagtggtttcctaaagggtcaagatataatgtatttatggtaaaatgtgaaaacctttatacaggacaataaagaaaga

SEQ ID NO: 412 - DNA, 119 bp, homo sapiens
caggtgattccctcatttactttactttgcaattctagctttcattttaaaaattagggcagtatagacgcagctgtataaactcattgcctgtaaatatcctcttacttcttttttgc

SEQ ID NO: 413 - DNA, 119 bp, homo sapiens
gcagtatagacagcagctgtataaactcattgcctgtaaatatcctcttacttcttttttgcccttttgctatggaaaataaaattacatgtactaaaaatgttttgtggagctagaaa

SEQ ID NO: 414 - DNA, 119 bp, homo sapiens
ttgcccttttggctatggaaaataaaattacatgtactaaaaatgttttgtggagctagaaataaagcaaatctatgttaatcaataaaatataaatgattatttagtaattatttctt

SEQ ID NO: 415 - DNA, 119 bp, homo sapiens
gaaataaagcataatctatgttaatcaataaaatataaatgattatttagtaattatttcttgtttattaaatgaacaaaaattcaagacccaacaaaacagctaaatgtttaaacgat

SEQ ID NO: 416 - DNA, 119 bp, homo sapiens
tcttgtttattaaaatgaacaaaaattcaagacccaacaaaacagctaaatgtttaaacgataggttattagtgaaagtatgtccaaaaggattttctgggaaaaacgattaattgata

SEQ ID NO: 417 - DNA, 119 bp, homo sapiens
cgataggttatttagtgaaagtatgtccaaaaggattttctgggaaaaacgattaattgataacaatgtagtgcaaatctgtctcttaaaattttaaagcatattgttcaaagttttag

SEQ ID NO: 418 - DNA, 119 bp, homo sapiens
gataacaatgtgagtgcaaatctgtctcttaaaattttaaagcatattgttcaaagttttagcttgtgtcatgatataaattccatacattgttttctcagtgacaataaaaagcacag

SEQ ID NO: 419 - DNA, 119 bp, homo sapiens
ggtcacagttttgtcattggtatatggaggttgttccaggggcccatccaaagctcttcatcatcagacgtgtgtggtcactatgaaattccaaagcctccttgatgttcttactgtca

SEQ ID NO: 420 - DNA, 119 bp, homo sapiens
tcttcatcatcagactgtgtgtggtcactatgaaattccaaagcctccttgatgttcttactgtcaatctggactcctgttcaactgtgcttttcagcctgttccttagtggcttcacc

SEQ ID NO: 421 - DNA, 119 bp, homo sapiens
ttcttactgtcaatcatggactcctgttcaactgtgcttttcagcctgttccttagtggcttcaccgcttattgtcagtccccacagggcaaggggcaaatgtaaccagagttggtctt

SEQ ID NO: 422 - DNA, 119 bp, homo sapiens
agtggcttcaccgctgtattgtcagtccccacagggcaaggggcaaatgtaaccagagttggtcttgcatcattttttcagtagaaaatggcccctttgataatgtgttcagaggtaca

SEQ ID NO: 423 - DNA, 119 bp, homo sapiens
agagttggtcttgcattcattttttcagtagaaaatggcccctttgataatgtgttcagaggtacattccctcatgtgtcactgccaacttgtctagtttcttaaagggccctcccagt

SEQ ID NO: 424 - DNA, 119 bp, homo sapiens
ttcagaggtacattctcctcatgtgtcactgccaacttgtctagtttcttaaagggccctcccagtcgacaggggaagcaacttttaagttgtccgtgaggcaggcacggcgggttctc

SEQ ID NO: 425 - DNA, 119 bp, homo sapiens
ggccctcccagtcgaacaggggaagcaacttttaagttgtccgtgaggcaggcacggcgggttctcacccagaaccattctgtgcaatatatatattgccgttgatattactgtggata

SEQ ID NO: 426 - DNA, 119 bp, homo sapiens
cggcgggttctcaccacagaaccattctgtgcaatatatatattgccgttgatattactgtggatactagatggtgaagacggtttctctgacattcaggagcactgtcttctccagtt

SEQ ID NO: 427 - DNA, 119 bp, homo sapiens
ttactgtggatactaggatggtgaagacggtttctctgacattcaggagcactgtcttctccagttgagtggtttcatactctcgatcaacaactaacttgatcattctttttcttgcc

SEQ ID NO: 428 - DNA, 119 bp, homo sapiens
tcaaagtgctgtgttgtaaccttcagagtttgctcctggcgacttcttttggtttgcattcttgcttcttcatacgctggtacctgatagccccatggacctccagactgactttcgct

SEQ ID NO: 429 - DNA, 119 bp, homo sapiens
ttttggtttgcattcttgcttctgtcatacgctggtacctgatagccccatggacctccagactgacttcgctactactgctactactacctgattctgattcctcctcactttccaca

SEQ ID NO: 430 - DNA, 119 bp, homo sapiens
cccatggacctccagactgactttcgctactactgctactactacctgattctgattcctcctcactttcacacctccttccaccgaagctgattctgcactgccctcttcagggatat

SEQ ID NO: 431 - DNA, 119 bp, homo sapiens
tgattctgattcctcctcactttccacacctccttccaccgaagctgattctgcactgccctcttcaggatatcttgagcttcagggtctgtactttcttccacaggggctggtccact

SEQ ID NO: 432 - DNA, 119 bp, homo sapiens
tcctacccttgacttccttgacctcctcaaccatgggccttcttcttgcaagcacaatgtttttccttgtttttctccttctgactctgtggattccgattcttctgattcaggggtgg

SEQ ID NO: 433 - DNA, 119 bp, homo sapiens
gtttttccttgctttttctccttctgactctgtggattccgattcttctgattcaggggtggaactctctcctcctcagagggtgtctctgactcagattcctcttctgtagtctcaga

SEQ ID NO: 434 - DNA, 119 bp, homo sapiens
gtggaactctcctcctcctcagagggtgtctctgactcagattcctcttctgtagtctcagactcactgactcagactcttcttcactgtattcagtatagtcgctggaggattcctcc

SEQ ID NO: 435 - DNA, 119 bp, homo sapiens
cagactcactgaactcagactcttcttcactgtattcagtatagtcgctggaggattcctcctctgatttacagtgctttctgttgcttcctcttggtccagagtgagtttcaaataat

SEQ ID NO: 436 - DNA, 119 bp, homo sapiens
ctcctctgattctacagtgctttctgttgcttcctcttggtccagagtgagtttcaaataatctttatctcttcctcaaggcgtctctgccactcttcaccctcaaggtcaacgattcc

SEQ ID NO: 437 - DNA, 119 bp, homo sapiens
taatctttatcttcttcctcaaggcgtctctgccactcttcaccctcaaggtcaacgattcctcttttacagctaatcctctaactttcttaaaaatcatggggaatattctggctctc

SEQ ID NO: 438 - DNA, 119 bp, homo sapiens
ttcctcttttatcagctaatcctctaactttcttaaaaatcatggggaatattctggctctcttccatgtgtgtatgtaggctcagctgctggtggtttttcgatagttacaactactt

SEQ ID NO: 439 - DNA, 119 bp, homo sapiens
tctcttccatgttgtgtatgtaggctcagctgctggtggtttttcgatagttacaactacttcttcctctcactaggctctctaatttcaacctttggttttttaattttctttggctc

SEQ ID NO: 440 - DNA, 119 bp, homo sapiens
caacgactcaagatttattttcattataaagaagggaagggaaagcacaatgagaaataaagagaataaacagcaactgaaaaagtataagatttatcaaatccataagcatactacta

SEQ ID NO: 441 - DNA, 119 bp, homo sapiens
aagagaataagacagcaactgaaaaagtataagatttatcaaatccataagcatactactaaatccatagcatactactaagataaaagcaagtcagagtaaaagatgttcttatcaga

SEQ ID NO: 442 - DNA, 119 bp, homo sapiens
taaatccataagcatactactaagataaaagcaagtcagagtaaaagatgttcttatcagaaaacagatactacatgttatagcacctgagatttattttgaaataccttatgtctgtc

SEQ ID NO: 443 - DNA, 119 bp, homo sapiens
gaaaacagatgactacatgttatagcacctgagatttattttgaaataccttatgtctgtcatctcctaaatctaggtacattatattttacttcggtagtatttcttcttaccaaata

SEQ ID NO: 444 - DNA, 119 bp, homo sapiens
tcatctcctacaatctaggtacattatattttacttcggtagtatttcttcttaccaaatacataggctcaagaaaaaacagaacctatcaatcatatcagttttaacttatttgtaac

SEQ ID NO: 445 - DNA, 119 bp, homo sapiens
tacataggcttcaagaaaaaacagaacctatcaatcatatcagttttaacttatttgtaacagtctgctttttcttggaacattcatataaaactacgatcaaaaactaaatgtaaatg

SEQ ID NO: 446 - DNA, 119 bp, homo sapiens
acagtctgcttttttcttggaacattcatataaaactacgatcaaaaactaaatgtaaatgttactgcaccacatgatagacatgcctttggtttaagttgggtatctaattttcatgc

SEQ ID NO: 447 - DNA, 119 bp, homo sapiens
tgttactgcatccacatgatagacatgcctttggtttaagttgggtatctaattttcatgcccacatatcccactaaaaaagagattaaaattacttacttttcaaataaatgtagaac

SEQ ID NO: 448 - DNA, 119 bp, homo sapiens
gcccacatattcccactaaaaaagagattaaaattacttacttttcaaataaatgtagaacaaattatgtactttgtagtttttaaaaagtaaggtaaatctattatatgagtgagtta

SEQ ID NO: 449 - DNA, 119 bp, homo sapiens
acaaattatgctactttgtagtttttaaaaagtaaggtaaatctattatatgagtgagttagtagtgataggttaatatctttttaaattaaaaacgagaaaaaaaactgcatttcatt

SEQ ID NO: 450 - DNA, 119 bp, homo sapiens
tagtagtgatgaggttaatatctttttaaattaaaaacgagaaaaaaaactgcatttcattgaatttgggtaaaataatagagtcttctttgacgttcaaatttgatgttcaacttgaa

SEQ ID NO: 451 - DNA, 119 bp, homo sapiens
ttgaatttggggtaaaataatagagtcttctttgacgttcaaatttgatgttcaacttgaagactatgacaacaagaggtttgcccgactaaaataagaaaagcaacattacagtgaag

SEQ ID NO: 452 - DNA, 119 bp, homo sapiens
aagactatgatcaacaagaggtttgcccgactaaaataagaaaagcaacattacagtgaagtagattgatgtgagattgtttttcagttccctcgacaatattgttcaaactccccttg

SEQ ID NO: 453 - DNA, 119 bp, homo sapiens
agtagattgactgtgagattgtttttcagttccctcgacaatattgttcaaactccccttgttttgttcgatgtgatttccatatttgttacttctgaagggcacatagtttgaagttc

SEQ ID NO: 454 - DNA, 119 bp, homo sapiens
tgttttgttcagatgtgatttccatatttgttacttctgaagggcacatagtttgaagttctgaaacattgtgcgtagatagtttttttctatttgactgtacatgttagctactgatt

SEQ ID NO: 455 - DNA, 119 bp, homo sapiens
tctgaaacatttgtgcgtagatagtttttttctatttgactgtacatgttagctactgatttttcaagtctgctaagtttttaacgtgtctgaggatgccttttggttctctctgaggg

SEQ ID NO: 456 - DNA, 119 bp, homo sapiens
tttttcaagttctgctaagtttttaacgtgtctgaggatgccttttggttctctctgagggtctgttttcacactgtcgttgttgatagctgtgtcatagaggacttaattttctcggc

SEQ ID NO: 457 - DNA, 119 bp, homo sapiens
ggtctgttttacacactgtcgttgttgatagctgtgtcatagaggacttaattttctcggcaggcatcagttggtcgtgcatttaacacctgttatacagacacactctgtggacagaa

SEQ ID NO: 458 - DNA, 119 bp, homo sapiens
caggcagaaggagagatgtttggtggatgggcaaaattttcaaaaatatttctttcggtttcaataggtacatacaaataggtgtctctctcctagagagtgaagaatgtaaaacacaa

SEQ ID NO: 459 - DNA, 119 bp, homo sapiens
gtttcaataggtaacatacaaataggtgtctctctcctagagagtgaagaatgtaaaacacaaggccttaaggagaaagttccaaggaacactcagcaggagaactgatgacattaggt

SEQ ID NO: 460 - DNA, 119 bp, homo sapiens
acacaaggccttgaaggagaaagttccaaggaacactcagcaggagaactgatgacattaggttctgattgagttccacagttcttgaaacagttggcaaagtggagaatgagaagtga

SEQ ID NO: 461 - DNA, 119 bp, homo sapiens
ttaggttctgatttgagttccacagttcttgaaacagttggcaaagtggagaatgagaagtgaggcctggaaagcaaaatgaagagtctgaagagagagatttcaactgttctgttcct

SEQ ID NO: 462 - DNA, 119 bp, homo sapiens
aagtgaggcctgggaaagcaaaatgaagagtctgaagagagagatttcaactgttctgttccttctatctcagtgtttcaccttgccttatttcctctttctctgtcaaatttgcctct

SEQ ID NO: 463 - DNA, 119 bp, homo sapiens
gttccttctatcatcagtgtttcaccttgccttatttcctctttctctgtcaaatttgcctcttcagtttaagcaatggattgctgctacctcttttgtttgtacagattccagtgttt

SEQ ID NO: 464 - DNA, 119 bp, homo sapiens
gcctcttcagttgtaagcaatggattgctgctacctcttttgtttgtacagattccagtgttttcatttcagctttctgcctggtgccttgccactgctgcagatctatgatctctggt

SEQ ID NO: 465 - DNA, 119 bp, homo sapiens
gtgttttcattttcagctttctgcctggtgccttgccactgctgcagatctatgatctctggtctatttgaactttcctcatcagcctcctgggtaagctgactgactgactccacagc

SEQ ID NO: 466 - DNA, 119 bp, homo sapiens
tctggtctatttggaactttcctcatcagcctcctgggtaagctgactgactgactccacagcctctgatcttttctcttgggcccctcagagacttactcttggcttgtattttgggt

SEQ ID NO: 467 - DNA, 119 bp, homo sapiens
cacagcctctgaatcttttctcttgggcccctcagagacttactcttggcttgtattttgggtgaaaatggtctacaaaatctgttctctgtgaaatgtctgaatttgttgatacttga

SEQ ID NO: 468 - DNA, 119 bp, homo sapiens
ttgggtgaaaatgggtctacaaaatctgttctctgtgaaatgtctgaatttgttgatacttgacttatgtttccttataaaggggattatgggcacttaagtcatcctcatcagataga

SEQ ID NO: 469 - DNA, 119 bp, homo sapiens
acttgacttatgttttccttataaaggggattatgggcacttaagtcatcctcatcagatagaaatgtgattttcttgcagacttcagtttgttgctcttaagtgatccgtctacatga

SEQ ID NO: 470 - DNA, 119 bp, homo sapiens
gatagaaatgtgaattttcttgcagacttcagtttgttgctcttaagtgatccgtctacatgagctgactgtgagcctcaatagtattggaagaaaagggcatcacaacttgttgatgt

SEQ ID NO: 471 - DNA, 119 bp, homo sapiens
acatgagctgacttgtgagcctcaatagtattggaagaaaagggcatcacaacttgttgatgtttcctgcttctgagactgagttatttcccctgctttgttgaaaatggtagagaagg

SEQ ID NO: 472 - DNA, 119 bp, homo sapiens
ggcggcggcggcgggggcgctgccactggtgcaggagccggcactgctggtttagccgcgggtaatgcgcctgaattcgtgcagtctttgtacactcagcttgacgtcttggataaagt

SEQ ID NO: 473 - DNA, 119 bp, homo sapiens
tgtctgtagctgaccaaaaccaccaagatggcaggaatgcagcagaggatgatgatgaaggccagagccacaaggccccttctgtgtatcctagactttctcctctctttttaatgctg

SEQ ID NO: 474 - DNA, 119 bp, homo sapiens
tgatgatgaaggccagagccaacaaggccccttctgtgtatcctagactttctcctctctttttaatgcggtcactgcctctggagtccggatctccagaatgcgtcctccttccccat

SEQ ID NO: 475 - DNA, 119 bp, homo sapiens
ttctcctctctttttaatgctggtcactgcctctggagtccggatctccagaatgcgtcctccttcccctaatacggctgaaagtctttattgatatcaagtagtttgccatccaaaaa

SEQ ID NO: 476 - DNA, 119 bp, homo sapiens
ttaaaaagctcatttctatcgatggctctgttggtttgggggtcaattgcatagacagtcaagtcacattggtgtaatcttctagggaaaaggcatctccatgccggcgagctccaatg

SEQ ID NO: 477 - DNA, 119 bp, homo sapiens
gtcaagtcacatttggtgtaatcttctagggaaaaggcatctccatgccggcgagctccaatggactccctacgaccttggcaccaggaatttgttcctgaacatagcgatccaagatc

SEQ ID NO: 478 - DNA, 119 bp, homo sapiens
gagtacatcggctttgccgctcagtcccttcccatagtcgtcagttgcaataacttgaaacttgaagtagatctcctcatattatggaagagcatagcagttttgataagccctgtata

SEQ ID NO: 479 - DNA, 119 bp, homo sapiens
aataacttgaaacttgaagtaggatctcctcatattatggaagagcatagcagttttgataagccctgttatgtttccactacaaatccttcttttccctctttaattggtggtattat

SEQ ID NO: 480 - DNA, 119 bp, homo sapiens
agcagttttgataagccctgtatatgtttccactacaaatccttcttttccctctttaattggtggtatatgagtctgtaggccatgacactataattgccagtatctttatcagtagc

SEQ ID NO: 481 - DNA, 119 bp, homo sapiens
cttcactctgagtacagaagtaaacattcttgcatcttcagatacacctccgatgtagaattttttctgaacactgggggatgattattttcatcctgaatctcaatgtatactttagc

SEQ ID NO: 482 - DNA, 119 bp, homo sapiens
tgagtacagaagtaaacattcttgcatcttcagatacacctccgatgtagaattttttctgaaacactggggatgattattttcatcctgaatctcaatgtatactttagctgtattgc

SEQ ID NO: 483 - DNA, 119 bp, homo sapiens
tttttgaaggaactcggagattggcaaggaccacttccagggaatcagcttggactcgaagtacatagctgtcctggtctcataatccagaggtccattcacatagataacacctgtga

SEQ ID NO: 484 - DNA, 119 bp, homo sapiens
tggcaaggaccacttccagggaatcagcttggactcgaagtacatagcttgtcctggtctcataatccaaggtccattcacatagataacacctgtgatgttattaattccaaatgtat

SEQ ID NO: 485 - DNA, 119 bp, homo sapiens
cttaaaaattgttgtaggttcttcattaagattgactcgtgttattactcttccagaatcttcttccactcaaaaatactggcagggtaaggaaactgtacatcatctactctatacct

SEQ ID NO: 486 - DNA, 119 bp, homo sapiens
ttcattaagattgactcgtgttattactcttccagaatcttcttccacttcaaaaatactggcagggtaggaaactgtacatcatctactctatacctcacacgacttgcaggtaatcc

SEQ ID NO: 487 - DNA, 119 bp, homo sapiens
ctttacaatcactgtgacagtagcaataccaggtggcattgttccataaatatcaaaggcctctaccagaaagtgatacttgcttcttggtctggaaatgcctcataatctaaactcct

SEQ ID NO: 488 - DNA, 119 bp, homo sapiens
tcaaaggcctctaccagaaaagtgatacttgcttcttggtctggaaatgcctcataatctaaactccttaaagcgatagttctcctgtaaatggatgtagtgcaaaaaagtgcttcact

SEQ ID NO: 489 - DNA, 119 bp, homo sapiens
cataatctaaactccttaaaagcgatagttctcctgtaaatggatgtagtgcaaaaaagtgcttcactttgggcttcttatccggtaagacacatttgctccaaggtcgacatctttgg

SEQ ID NO: 490 - DNA, 119 bp, homo sapiens
ctctatttgaaggatggtagtcccagctggcaaattctcttcaacaaggacagtgtatgttgaattggtaacacaggactgttatcatcaatgtccaaaaccttgatggccaaggttag

SEQ ID NO: 491 - DNA, 119 bp, homo sapiens
aggacagtgtatgttgaattggtgaacacaggactgttatcatcaatgtccaaaaccttgatggccaagttagagttgaatgacgagggtgtactgctccatctgttgccacaacaaca

SEQ ID NO: 492 - DNA, 119 bp, homo sapiens
tgtccaaaaccttgatggccaaggttagagttgaatgacgagggtgtactgctccatctgttgccacaaaacaagttcatagtagtccctgacttctctgttaagcttcactgctgtgt

SEQ ID NO: 493 - DNA, 119 bp, homo sapiens
tactgctccatctgttgccacaacaacaagttcatagtagtccctgacttctctgttaagcttcactgcgtgtaaatgctcccattggatgtgatacgaaaaagattattaaagttacc

SEQ ID NO: 494 - DNA, 119 bp, homo sapiens
acttctctgttaagcttcactgctgtgtaaatgctcccattggatgtgatacgaaaaagattattaaagtacccaaactgtagtgcacttgaccatttattccagcatcagggtctgtt

SEQ ID NO: 495 - DNA, 119 bp, homo sapiens
ttttacttgacccacaaaggcattggcttcttcttccaccacagataaatttcttggcagataaggatcaacactggagcattgtcattgacatctgtcaccactatgtttactgtggc

SEQ ID NO: 496 - DNA, 119 bp, homo sapiens
acccacaaaggcattggcttcttcttccaccacagataaatttcttggcagataaggatcaaacactgggcattgtcattgacatctgtcaccactatgtttactgtggcagttgaggt

SEQ ID NO: 497 - DNA, 119 bp, homo sapiens
ctgtagatttaataaaacagcaccaaccctcatggcttcactaatttcaaggctatacatcagctgtggaagcgaggagggctttgattatttggtggaagcacttcaatatacacagt

SEQ ID NO: 498 - DNA, 119 bp, homo sapiens
aaaacagcaccaaccctcatggcttcactaatttcaaggctatacatcagctgtgggaagcgaggagggtttgattatttggtggaagcacttcaatatacacagtgcagatggagttc

SEQ ID NO: 499 - DNA, 119 bp, homo sapiens
cttcgctctgcaggaggagcattatccgctgcttggaccgtgagtgcgtaagtccgcccgactatcattccacccctggagcgatggtgataagccctgttgttttattgatgatgaag

SEQ ID NO: 500 - DNA, 119 bp, homo sapiens
ccgtgagtgcgtaagtccgcccgactatcatttccacccctggagcgatggtgataagccctgttgtttattgatgatgaagtctccctgagccccaacaaggatttcatatgtgatct

SEQ ID NO: 501 - DNA, 119 bp, homo sapiens
ccctggagcgatggtgataagccctgttgttttattgatgatgaagtctccctgagccccaacaaggattcatatgtgatctccccatttgacccttcgtctgcgtcgactgcagtgag

SEQ ID NO: 502 - DNA, 119 bp, homo sapiens
ctgtatgacactgtccccaggtctcatgtctgtataaacatacacatcataggatatttcagggaaggtggcgtgttatcatttgcatccatcacttgaatattgacgatgactggctc

SEQ ID NO: 503 - DNA, 119 bp, homo sapiens
tgtataaacatacacatcataggatatttcagggaaggttggcgtgttatcatttgcatccatcacttgatattgacgatgactggctcactttcttgtacaccatcaaatgctgttat

SEQ ID NO: 504 - DNA, 119 bp, homo sapiens
cgaaaaggtgtaagtttgctgttcttccctgtccactggttgaagtaaggtgaggtagcgagtaataccgtctgtgtgacggtgaagactgaggtgtagtcattcagaaaaaggtgaag

SEQ ID NO: 505 - DNA, 119 bp, homo sapiens
ttgctgttcttccctgtccactggttgaagtaaggtgaggtagcgagtaataccagtctgtgtgacggtaagactgaggtgtagtcattcagaaaaaggtgaagctctgggtcttttgt

SEQ ID NO: 506 - DNA, 119 bp, homo sapiens
atcttctatgtccttgtccagagctactattcttaaaggtgaagtcaaattgagactgtccgaaatggtgctcccactggggcagattccaggatatagccttgataactgggcattgt

SEQ ID NO: 507 - DNA, 119 bp, homo sapiens
gtcaaattgagactgtccgaaatggttgctcccactggggcagattccaggatatagccttgataactggcattgtaaaatatggactttgattgttttcatccagtatttcaatgtgt

SEQ ID NO: 508 - DNA, 119 bp, homo sapiens
attccaggatatagccttgataactgggcattgtaaaatatggactttgattgttttcatccagtatttaatgtgtagaccggcaaaggcaggaagaggatgaccattgtcttgttcag

SEQ ID NO: 509 - DNA, 119 bp, homo sapiens
cggagttctcaactcaggtatggcagcttgataagtgagtggacggcaatcacgagtgtttggcacaagacacaaggaagaaacattggacccaagtcatctccatccagaacatccac

SEQ ID NO: 510 - DNA, 119 bp, homo sapiens
acgagtgtttggcacaaggacacaaggaagaaacattggacccaagtcatctccatccagaacatccacgtgagagtggtggtggtggttcgcctctcattcagattttgggcacggtc

SEQ ID NO: 511 - DNA, 119 bp, homo sapiens
ctcattcactgtggcatagtagctttcatgcttgaaagtgggtgagttgtcattcctgtctctcaccacattcgcacttcatggtagataatagtgcccacttttttgttgatgcactg

SEQ ID NO: 512 - DNA, 119 bp, homo sapiens
agtgggtgagttgtcattcctgtctctcaccactattcgcacttcatggtagataatagtgcccactttttgttgatgcactggacctgcaccacaatggagtgtatgttcatcggtgg

SEQ ID NO: 513 - DNA, 119 bp, homo sapiens
atctctatccagaactcttccggtgctgttcaggaaaagcatttgcttaacaggatccatcaacacccataatccacattatcctttaaagaaagttctatggtggggtctggtcctcc

SEQ ID NO: 514 - DNA, 119 bp, homo sapiens
tttgcttaacaggatccatcaacacccagtaatccacattatcctttaaagaaagttctatggtggggttggtcctccagcagtccctttgatcagcatgttgtccaccagaattgtac

SEQ ID NO: 515 - DNA, 119 bp, homo sapiens
ttgcggtttaaagtttcatctttagtccatgtaagattatgcagcaagttttcttgccaaggctgcctctgcacatccctttaaaaagaaccagtgctcataatctagttccaagacga

SEQ ID NO: 516 - DNA, 119 bp, homo sapiens
tttcttgccaaggctgcctcttgcacatccctttaaaaagaaccagtgctcataatctagttccaagacattcattcacatgttccacctcttgtttctgtgaggcattgatatccact

SEQ ID NO: 517 - DNA, 119 bp, homo sapiens
tcataatctagttccaagacgattcattcacatgttccacctcttgtttctgtgaggcattgatatccatctcatatcatcaagaaaatgttactaggaaaatttttagaaaagcaaaa

SEQ ID NO: 518 - DNA, 119 bp, homo sapiens
ctgtgaggcattgatatccactctcatatcatcaagaaaatgttactaggaaaatttttagaaaagcaaacagttcaacatgttaactcagaaagcataccatcattctccacgttctg

SEQ ID NO: 519 - DNA, 119 bp, homo sapiens
gaaaatttttagaaaagcaaaacagttcaacatgttaactcagaaagcataccatcattctccacgttcgagatgtatgccacctgccttagttaccacaagcaactaacactaagctg

SEQ ID NO: 520 - DNA, 119 bp, homo sapiens
taccatcattctccacgttctgagatgtatgccacctgccttagttaccacaagcaactaacactaagcgctagcaggaatctgtctgccctctatctgtcgctattagctcagcacgt

SEQ ID NO: 521 - DNA, 119 bp, homo sapiens
gcggcggcggcggctcgggagagagggacgcgggctgcaggcgcgatgcttggctagaggacgcgtccgcggcggccggacgctgaggtggtcggggctagtcagcccggcctgggcat

SEQ ID NO: 522 - DNA, 119 bp, homo sapiens
tgcaggcgcgatgcttggctagaggacgcgtccgacggcggccggacgctgaggtggtcggggctagtcgcccggcctgggcatggagcgcggggtggcagagcctctggacgtttggg

SEQ ID NO: 523 - DNA, 119 bp, homo sapiens
cggcggccggacgctgaggtggtcggggctagtcagcccggcctgggcatggagcgcggggtggcagagctctggacgtttggggcgcgcccagtccgagcccccggcgcgcctgaagt

SEQ ID NO: 524 - DNA, 119 bp, homo sapiens
ccgcggagacccaggagctgccggcacgccgcggatgagccttcgcgccggcgggaagacgcggcggtgccagggccagagcaggcggcccgcgggggccgatccggcggagagcagag

SEQ ID NO: 525 - DNA, 119 bp, homo sapiens
gcgccggcgggaagacgcggcggtggccagggccagagcaggcggcccgcgggggccgatccggcggaggcagagcccgaggcgaggcgaggcgcggcgccgctgcacacacgcacacg

SEQ ID NO: 526 - DNA, 119 bp, homo sapiens
gttcttctgtgacccagttgctggcccaagacatggacaatgaccccctggtgtttggcgtgtctggggggaggcctctcgcttctttgcagtggagcctgacactggcgtggtgtggc

SEQ ID NO: 527 - DNA, 119 bp, homo sapiens
gcccaagacatggacaatgaccccctggtgtttggcgtgtctggggaggaggcctctcgcttctttgcatggagcctgacactggcgtggtgtggctccggcagccactggacagagag

SEQ ID NO: 528 - DNA, 119 bp, homo sapiens
aatacaccagtggggacgcccatcttcatcgtgaatgccacagaccccgacttgggggcagggggcagctcctctactccttccagcccccctcccaattcttcgccattgacagcgcc

SEQ ID NO: 529 - DNA, 119 bp, homo sapiens
ccacagaccccgacttgggggcagggggcagcgtcctctactccttccagcccccctcccaattcttcgcattgacagcgcccgcggtatcgtcacagtgatccgggagctggactacg

SEQ ID NO: 530 - DNA, 119 bp, homo sapiens
ctactccttccagcccccctcccaattcttcgccattgacagcgcccgcggtatcgtcacagtgatccggagctggactacgagaccacacaggcctaccagctcacggtcaacgccac

SEQ ID NO: 531 - DNA, 119 bp, homo sapiens
gatcaagacaagaccaggcctctgtccaccctggccaacttggccatcatcatcacagatgtccaggactggaccccatcttcatcaacctgccttacagcaccaacatctacgagcat

SEQ ID NO: 532 - DNA, 119 bp, homo sapiens
aagaccaggcctctgtccaccctggccaacttggccatcatcatcacagatgtccaggacatggacccctcttcatcaacctgccttacagcaccaacatctacgagcattctcctccg

SEQ ID NO: 533 - DNA, 119 bp, homo sapiens
ggcacggagctgaacgatgaccgcaccccatctgacgctacagtcaccacgaccttcaatatcctggttttgacatcaatgacaatgccccggagttcaacagctccgagtacagcgtg

SEQ ID NO: 534 - DNA, 119 bp, homo sapiens
caatatcctggttattgacatcaatgacaatgccccggagttcaacagctccgagtacagcgtggccatactgagctggcacaggtcggctttgcccttccactcttcatccaggtggt

SEQ ID NO: 535 - DNA, 119 bp, homo sapiens
acagcgtggccatcactgagctggcacaggtcggctttgcccttccactcttcatccaggtggtggacaggatgaggtgagtccctggacacatggcccatgcagacccaccacccatc

SEQ ID NO: 536 - DNA, 119 bp, homo sapiens
caggtggtggacaaggatgaggtgagtccctggacacatggcccatgcagacccaccacccatccagaccaccaccctgcctgggctgttcaggtcctcagctataaaatagaaacaaa

SEQ ID NO: 537 - DNA, 119 bp, homo sapiens
cacccatccagacccaccaccctgcctgggctgttcaggtcctcagctataaaatagaaacaaacattgggcaccccactcctggtaggttctgaggataaataaggctgaaaaaaaaa

SEQ ID NO: 538 - DNA, 119 bp, homo sapiens
acccagggcctgaacagcatgtttgaggtgtacttggtggggaacaactcccaccacttcatcatctcccgacctccgtccaggggaaggcggacattcgtattcgggtggccatccca

SEQ ID NO: 539 - DNA, 119 bp, homo sapiens
gtggggaacaactcccaccacttcatcatctccccgacctccgtccaggggaaggcggacattcgtattgggtggccatcccactggactacgagaccgtggaccgctacgactttgat

SEQ ID NO: 540 - DNA, 119 bp, homo sapiens
ctctttgccaatgagagtgtgcctgaccatgtgggctatgccaaggtgaagatcactctcatcaatgaaatgacaaccggcccatcttcagccagccactgtacaacatcagcctgtac

SEQ ID NO: 541 - DNA, 119 bp, homo sapiens
ctctcatcaatgaaaatgacaaccggcccatcttcagccagccactgtacaacatcagcctgtacgagacgtcaccgtggggacctctgtgctgacagtcctggtgagtccccgcttca

SEQ ID NO: 542 - DNA, 119 bp, homo sapiens
cagcctgtacgagaacgtcaccgtggggacctctgtgctgacagtcctggtgagtccccgcttcactgcgggccactgagctctccagggccgactgtggtgaggcacccagagggatt

SEQ ID NO: 543 - DNA, 119 bp, homo sapiens
ccccgcttcactgcagggccactgagctctccagggccgactgtggtgaggcacccagagggattttgtcaagggacctcagcaatcagggaaggaggcacccccaaatccctgagctg

SEQ ID NO: 544 - DNA, 119 bp, homo sapiens
cagagggattttgtccaagggacctcagcaatcagggaaggaggcacccccaaatccctgagctgtgttgttggtgtattaaataaagtttttggactcttcaggaaggggctcccttg

SEQ ID NO: 545 - DNA, 119 bp, homo sapiens
ccctgagctgtgtttgttggtgtattaaataaagtttttggactcttcaggaaggggctcccttgacctggttgcaatatggaaaaggagccaacctgaggggtgacgagactgagctg

SEQ ID NO: 546 - DNA, 119 bp, homo sapiens
ggctcccttgacctaggttgcaatatggaaaaggagccaacctgaggggtgacgagactgagctgaggaactggttttctgcctttccccgagagagactcagtgagggtgggctggga

SEQ ID NO: 547 - DNA, 119 bp, homo sapiens
gactgagctgaggacactggttttctgcctttccccgagagagactcagtgagggtgggctgggagcccggaagccccctcaaatgggtgggaaggtgccagccatccttgagaagggc

SEQ ID NO: 548 - DNA, 119 bp, homo sapiens
tgggctgggagccctggaagccccctcaaatgggtgggaaggtgccagccatccttgagaagggcaacctctccatgtgagcacaggcaccagagaggggcaggcgcctggagggtacc

SEQ ID NO: 549 - DNA, 119 bp, homo sapiens
tgagaagggcaaccctctccatgtgagcacaggcaccagagaggggcaggcgcctggagggtaccggggacccccagctgcccatggctggacttgccctttgacaaggggccctccca

SEQ ID NO: 550 - DNA, 119 bp, homo sapiens
gttctcgctggacaaggacacgggactcatcatgctgattgccaggctggactatgagctcatccagcgttcaccctgacgatcattgcccgggacgggggcggcgaggagaccacagg

SEQ ID NO: 551 - DNA, 119 bp, homo sapiens
tcatccagcgcttcaccctgacgatcattgcccgggacgggggcggcgaggagaccacaggccgggtcagatcaatgtgttggatgtcaacgacaacgtgcccaccttccagaaggatg

SEQ ID NO: 552 - DNA, 119 bp, homo sapiens
ggccgggtcaggatcaatgtgttggatgtcaacgacaacgtgcccaccttccagaaggatgcctacgtggtgctctgcgggagaacgagccttctgtcacacagctggtgcggctccgg

SEQ ID NO: 553 - DNA, 119 bp, homo sapiens
tgatcagcgtcagtcgccccctggattatgaacagatatccaatgggctgatttatctgacggtcatggcatggatgctggcaacccccctctcaacagcaccgtccctgtcaccatcg

SEQ ID NO: 554 - DNA, 119 bp, homo sapiens
gtcagtcgccccctggattatgaacagatatccaatgggctgatttatctgacggtcatggccatggatctggcaacccccctctcaacagcaccgtccctgtcaccatcgaggtgttt

SEQ ID NO: 555 - DNA, 119 bp, homo sapiens
gtggtggctgttgacccagacctgggggagaatggcaccctggtgtacagcatccagccacccaacaagtctacagcctcaacagcaccacgggcaagatccgcaccacccacgccatg

SEQ ID NO: 556 - DNA, 119 bp, homo sapiens
caccctggtgtacagcatccagccacccaacaagttctacagcctcaacagcaccacgggcaagatccgaccacccacgccatgctggaccgggagaaccccgacccccatgaggccga

SEQ ID NO: 557 - DNA, 119 bp, homo sapiens
tctacagcctcaacagcaccacgggcaagatccgcaccacccacgccatgctggaccgggagaaccccgcccccatgaggccgagctgatgcgcaaaatcgtcgtctctgttactgact

SEQ ID NO: 558 - DNA, 119 bp, homo sapiens
gtggcaggccccctctgaaagccaccagcagtgccacagtgtttgtgaacctcttggatctcaatgacatgaccccacctttcagaacctgccttttgtggccgaggtgcttgaaggca

SEQ ID NO: 559 - DNA, 119 bp, homo sapiens
agcagtgccacagtgtttgtgaacctcttggatctcaatgacaatgaccccacctttcagaacctgcctttgtggccgaggtgcttgaaggcatcccggcgggggtctccatctaccaa

SEQ ID NO: 560 - DNA, 119 bp, homo sapiens
gtggtggccatcgacctcgatgagggcctgaacggcctggtgtcctaccgcatgccggtgggcatgcccgcatggacttcctcatcaacagcagcagcggcgtggtggtcaccaccacc

SEQ ID NO: 561 - DNA, 119 bp, homo sapiens
catgccggtgggcatgccccgcatggacttcctcatcaacagcagcagcggcgtggtggtcaccaccacgagctggaccgcgagcgcatcgcggagtaccagctgcgggtggtggccag

SEQ ID NO: 562 - DNA, 119 bp, homo sapiens
gcgtggtggtcaccaccaccgagctggaccgcgagcgcatcgcggagtaccagctgcgggtggtggccatgatgcaggcacgcccaccaagagctccaccagcacgctcaccatccatg

SEQ ID NO: 563 - DNA, 119 bp, homo sapiens
tgctggatgtgaacgacgagacgcccaccttcttcccggccgtgtacaatgtgtctgtgtccgaggacggccacgcgagttccgggtggtctggctgaactgcacggacaacgacgtgg

SEQ ID NO: 564 - DNA, 119 bp, homo sapiens
ctgtgtccgaggacgtgccacgcgagttccgggtggtctggctgaactgcacggacaacgacgtgggcccaatgcagagctcagctacttcatcacaggtgctgccccggcctccgccc

SEQ ID NO: 565 - DNA, 119 bp, homo sapiens
acaacgacgtgggcctcaatgcagagctcagctacttcatcacaggtgctgccccggcctccgcccaccgtgcaggcctcctggggccctgcctccacccctcccagatggacagccag

SEQ ID NO: 566 - DNA, 119 bp, homo sapiens
cggcctccgcccacctgtgcaggcctcctggggccctgcctccacccctcccagatggacagccagactggtgggggcaggtgagggtggaaaagaggtcagggctctactgttgggct

SEQ ID NO: 567 - DNA, 119 bp, homo sapiens
atggacagccagactaggtgggggcaggtgagggtggaaaagaggtcagggctctactgttgggctttacctctggtggtgcctcccgaggatttgctcctggctcttcccaagggctt

SEQ ID NO: 568 - DNA, 119 bp, homo sapiens
tactgttgggctttagcctctggtggtgcctcccgaggatttgctcctggctcttcccaagggctttgcgctggatcactctggactggctccctggggacctcctgaacctgttggtt

SEQ ID NO: 569 - DNA, 119 bp, homo sapiens
tcccaagggctttgcagctggatcactctggactggctccctggggacctcctgaacctgttggttgcaggacggggagcatctaccaaggttcattctagagggaggtaaggccccat

SEQ ID NO: 570 - DNA, 119 bp, homo sapiens
aacctgttggttgcagggacggggagcatctaccaaggttcattctagagggaggtaaggccccatgatcctagggaggagccctgagccccactccccgccccaagtctgggtgacag

SEQ ID NO: 571 - DNA, 119 bp, homo sapiens
gtaaggccccatgattcctagggaggagccctgagccccactccccgccccaagtctgggtgacagagcgtgacttggaggaatgtggcctcatccttccttggggacctgttgagaat

SEQ ID NO: 572 - DNA, 119 bp, homo sapiens
tctgggtgacagagcagtgacttggaggaatgtggcctcatccttccttggggacctgttgagaattccacctgtttagaggcagatggttttgatctccctaaatgaaatggttttag

SEQ ID NO: 573 - DNA, 119 bp, homo sapiens
acaacggccctgtagggaagcgacacacgggcacagccaccgtgttcgtcactgtcctggatgtgaatgcaaccggcccatctttctgcagagcagctatgaggccagcgtccctgagg

SEQ ID NO: 574 - DNA, 119 bp, homo sapiens
ggcacagccaccgtgttcgtcactgtcctggatgtgaatgacaaccggcccatctttctgcagagcagcatgaggccagcgtccctgaggacatccctgaaggccacagcatcttgcag

SEQ ID NO: 575 - DNA, 119 bp, homo sapiens
gtaaccatggcaacaacttccggatccatgtcagcaatgggctcctgatgcgagggccccggcccctggccgggagcggaactcatcccacgtgctgatagtggaggcctacaaccacg

SEQ ID NO: 576 - DNA, 119 bp, homo sapiens
gtcagcaatgggctcctgatgcgagggccccggcccctggaccgggagcggaactcatcccacgtgctgtagtggaggcctacaaccacgacctgggccccatgcggagctccgtcagg

SEQ ID NO: 577 - DNA, 119 bp, homo sapiens
gtgattgtgtacgtggaggacatcaacgatgaggcccccgtgttcacacagcagcagtacagccgtctgggcttcgagagaccgcaggcattggaacgtcagtcatcgtggtccaagcc

SEQ ID NO: 578 - DNA, 119 bp, homo sapiens
aggacatcaacgatgaggcccccgtgttcacacagcagcagtacagccgtctggggcttcgagagaccgaggcattggaacgtcagtcatcgtggtccaagccacagaccgagactctg

SEQ ID NO: 579 - DNA, 119 bp, homo sapiens
gggatggtggcctggtgaactaccgcatcctgtcgggcgcagaggggaagtttgagattgacgagagcaagggcttatcatcaccgtgaattacctggactacgagaccaagaccagct

SEQ ID NO: 580 - DNA, 119 bp, homo sapiens
ttgagattgacgagagcacagggcttatcatcaccgtgaattacctggactacgagaccaagaccagctcatgatgaatgtgtcggccactgaccaggccccgcccttcaaccagggct

SEQ ID NO: 581 - DNA, 119 bp, homo sapiens
acgagaccaagaccagctacatgatgaatgtgtcggccactgaccaggccccgcccttcaaccagggctctgcagcgtctacatcactctgctcaacgagctggacgaggccgtgcagt

SEQ ID NO: 582 - DNA, 119 bp, homo sapiens
cgcccttcaaccagggcttctgcagcgtctacatcactctgctcaacgagctggacgaggccgtgcagtctccaatgcctcatacgaggctgccatcctggagaatctggcactgggta

SEQ ID NO: 583 - DNA, 119 bp, homo sapiens
tggacgaggccgtgcagttctccaatgcctcatacgaggctgccatcctggagaatctggcactgggtatgagattgtgcgggtccaggcctactccatcgacaacctcaaccaaatca

SEQ ID NO: 584 - DNA, 119 bp, homo sapiens
agaatctggcactgggtactgagattgtgcgggtccaggcctactccatcgacaacctcaaccaaatcagtaccgcttcaacgcctacaccagcacccaggccaaagccctcttcaaga

SEQ ID NO: 585 - DNA, 119 bp, homo sapiens
acaacctcaaccaaatcacgtaccgcttcaacgcctacaccagcacccaggccaaagccctcttcaagaagacgccatcacggtgaggggctgggggcagggagcaccatttcttccaa

SEQ ID NO: 586 - DNA, 119 bp, homo sapiens
caggtctacatcactgtgctggacgagaatgacaacagcccccggtttgacttcacctccgactcggcgtcagcatacccgaggactgccctgtgggccagcgagtggctactgtcaag

SEQ ID NO: 587 - DNA, 119 bp, homo sapiens
aacagcccccggtttgacttcacctccgactcggcggtcagcatacccgaggactgccctgtgggccaggagtggctactgtcaaggcctgggaccctgatgctggcagcaatgggcag

SEQ ID NO: 588 - DNA, 119 bp, homo sapiens
gtggtcttctccctggcctctggcaacatcgcgggggcctttgagatcgtcaccaccaatgactccattgcgaagtgtttgtggccaggcccctggacagagaagagctggatcactac

SEQ ID NO: 589 - DNA, 119 bp, homo sapiens
tccctggcctctggcaacatcgcgggggcctttgagatcgtcaccaccaatgactccattggcgaagtgttgtggccaggcccctggacagagaagagctggatcactacatcctccag

SEQ ID NO: 590 - DNA, 119 bp, homo sapiens
gttgtggcttctgaccgaggcacccctccacggaagaaggaccacatcctgcaggtgaccatcctggactcaatgacaaccctccagtcatcgagagcccctttggatacaatgtcagt

SEQ ID NO: 591 - DNA, 119 bp, homo sapiens
tctgaccgaggcacccctccacggaagaaggaccacatcctgcaggtgaccatcctggacatcaatgacaccctccagtcatcgagagcccctttggatacaatgtcagtgtgaatgag

SEQ ID NO: 592 - DNA, 119 bp, homo sapiens
aacgtgggtggaggtactgctgtggtccaggtgagagccactgaccgtgacatcgggatcaacagtgtttgtcctactacatcaccgagggcaacaaggacatggccttccgcatggac

SEQ ID NO: 593 - DNA, 119 bp, homo sapiens
gggatcaacagtgttctgtcctactacatcaccgagggcaacaaggacatggccttccgcatggaccgctcagcggtgagatcgccacacggcctgccccgcctgaccgcgagcgccag

SEQ ID NO: 594 - DNA, 119 bp, homo sapiens
ttccgcatggaccgcatcagcggtgagatcgccacacggcctgccccgcctgaccgcgagcgccagagctctaccacctggtggccactgtggaggacgagggcaccccaaccctgtcg

SEQ ID NO: 595 - DNA, 119 bp, homo sapiens
gccaccacgcacgtgtacgtgaccattgtggatgagaatgataacgcgcccatgttccagcagccccacatgaggtgctgctggatgagggcccagacacgctcaacaccagcctcatc

SEQ ID NO: 596 - DNA, 119 bp, homo sapiens
atgttccagcagccccactatgaggtgctgctggatgagggcccagacacgctcaacaccagcctcatcccatccaggcactggacctggatgagggtcccaacggcacagtcacctat

SEQ ID NO: 597 - DNA, 119 bp, homo sapiens
ctcaacaccagcctcatcaccatccaggcactggacctggatgagggtcccaacggcacagtcacctatccatcgtcgcaggcaacatcgtcaacaccttccgcatcgacagacacatg

SEQ ID NO: 598 - DNA, 119 bp, homo sapiens
gtgcttgtgaatgtgaatgacatcaacgacaatgtgcctaccttcccccgggactatgagggaccatttaagtcactgagggccagccggggcccagagtgtggaccttcctggcccat

SEQ ID NO: 599 - DNA, 119 bp, homo sapiens
aatgtgcctaccttcccccgggactatgagggaccatttgaagtcactgagggccagccggggcccagatgtggaccttcctggcccatgaccgagactcaggacccaacgggcaggtg

SEQ ID NO: 600 - DNA, 119 bp, homo sapiens
ggaccatttgaagtcactgagggccagccggggcccagagtgtggaccttcctggcccatgaccgagaccaggacccaacgggcaggtggagtacagcatcatggatggagaccctctg

SEQ ID NO: 601 - DNA, 119 bp, homo sapiens
gggagtttgtgatctctcctgtggagggggtgctaagggtccggaaggacgtggagctggaccgggagacatcgccttctacaacctgaccatctgtgcccgtgaccgggggatgcccc

SEQ ID NO: 602 - DNA, 119 bp, homo sapiens
tctcctgtggagggggtgctaagggtccggaaggacgtggagctggaccgggagaccatcgccttctacacctgaccatctgtgcccgtgaccgggggatgcccccactcagctccaca

SEQ ID NO: 603 - DNA, 119 bp, homo sapiens
atgctggtggggatccgggtgctggacatcaacgacaacgaccctgtgctgctgaacctgcccatgaactcaccatcagcgagaacagccctgtctccagctttgtcgcccatgtcctg

SEQ ID NO: 604 - DNA, 119 bp, homo sapiens
gtgctgctgaacctgcccatgaacatcaccatcagcgagaacagccctgtctccagctttgtcgcccattcctggccagtgacgctgacagtggctgcaatgcacgcctcaccttcaac

SEQ ID NO: 605 - DNA, 119 bp, homo sapiens
cctgtctccagctttgtcgcccatgtcctggccagtgacgctgacagtggctgcaatgcacgcctcacctcaacatcactgcgggcaaccgcgagcgggccttcttcatcaatgccacg

SEQ ID NO: 606 - DNA, 119 bp, homo sapiens
gcacccctctcacggtgctcaatgggcccatcctggccctggatgcagaccaagacatctacgccgtgggacctaccagctgctgggtgcccagagtggcctctttgacatcaacagca

SEQ ID NO: 607 - DNA, 119 bp, homo sapiens
ctctcacggtgctcaatgggcccatcctggccctggatgcagaccaagacatctacgccgtggtgacctccagctgctgggtgcccagagtggcctctttgacatcaacagcagcaccg

SEQ ID NO: 608 - DNA, 119 bp, homo sapiens
gtgtggtgaccgtgaggtcaggtgtcatcattgaccgggaggcattctcgccacccatcctggagctgcgctgctggctgaggacatcgggctgctcaacagcacggcccacctgctca

SEQ ID NO: 609 - DNA, 119 bp, homo sapiens
cattctcgccacccatcctggagctgctgctgctggctgaggacatcgggctgctcaacagcacggccccctgctcatcaccatcctggatgacaatgacaaccggcccacctttagcc

SEQ ID NO: 610 - DNA, 119 bp, homo sapiens
acatcgggctgctcaacagcacggcccacctgctcatcaccatcctggatgacaatgacaaccggcccactttagccctgccaccctcactgtccatctgctagagaactgcccgcctg

SEQ ID NO: 611 - DNA, 119 bp, homo sapiens
gattctcagtccttcaagtcacagccacagatgaggacagtggcctcaatggggagctggtctaccgaaagaagctggggctcaggaccgcttcctcattcatctggtcaccggggtca

SEQ ID NO: 612 - DNA, 119 bp, homo sapiens
ctggtctaccgaatagaagctggggctcaggaccgcttcctcattcatctggtcaccggggtcatccgtttggtaatgccaccatcgacagagaggagcaggagtcctacaggctaacg

SEQ ID NO: 613 - DNA, 119 bp, homo sapiens
cggggtcatccgtgttggtaatgccaccatcgacagagaggagcaggagtcctacaggctaacggtggtgccaccgaccggggcaccgttcctctctcgggcacagccattgtcaccat

SEQ ID NO: 614 - DNA, 119 bp, homo sapiens
ggctaacggtggtggccaccgaccggggcaccgttcctctctcgggcacagccattgtcaccattctgacgatgacatcaatgactcccgccccgagttcctcaaccccatccagacag

SEQ ID NO: 615 - DNA, 119 bp, homo sapiens
gtcaccattctgatcgatgacatcaatgactcccgccccgagttcctcaaccccatccagacagtgagctgctggagtcggctgagccaggcactgtcattgccaatatcacggccatt

SEQ ID NO: 616 - DNA, 119 bp, homo sapiens
ccagacagtgagcgtgctggagtcggctgagccaggcactgtcattgccaatatcacggccattgaccagacctcaacccaaagctagagtaccacattgtcggcattgtggccaagga

SEQ ID NO: 617 - DNA, 119 bp, homo sapiens
cggccattgaccacgacctcaacccaaagctagagtaccacattgtcggcattgtggccaaggacgacatgatcgcctggtgcccaaccaggaggacgcctttgctgtgaatatcaaca

SEQ ID NO: 618 - DNA, 119 bp, homo sapiens
gctgcaccctgaactaactgatgttaaccctcttctctcttcctcatggctggcaggcccacaggtttggctctgtttctctgtcacttcccacctcatctcttctctgcctcacccca

SEQ ID NO: 619 - DNA, 119 bp, homo sapiens
ggctggcaggcccacaggtttgagctctgtttctctgtcacttcccacctcatctcttctctgcctcacccattgccttcctccatgcccaccacacccccaccacccttcctgtcctg

SEQ ID NO: 620 - DNA, 119 bp, homo sapiens
cctcatctcttctctgcctcaccccattgccttcctccatgcccaccacacccccaccacccttcctgtctgtggggcctgggccaaggccgtggcccagcctttgcagactgaatgca

SEQ ID NO: 621 - DNA, 119 bp, homo sapiens
acacccccaccacccttcctgtcctgtggggcctgggccaaggccgtggcccagcctttgcagactgaagcagccgccctctccccatcctcgctccccagcctgggggacagggagcg

SEQ ID NO: 622 - DNA, 119 bp, homo sapiens
ccaagctgactgtcaacgtcctggacgtcaatgacaatacgccccagttcaagccctttgggatcacctctacatggagcggatcctggagggggccacccctgggaccacactcattg

SEQ ID NO: 623 - DNA, 119 bp, homo sapiens
gccctttgggatcacctactacatggagcggatcctggagggggccacccctgggaccacactcattgcgtggcagccgtggaccctgacaagggccttaatgggctggtcacctacac

SEQ ID NO: 624 - DNA, 119 bp, homo sapiens
gggaccacactcattgctgtggcagccgtggaccctgacaagggccttaatgggctggtcacctacacctgctggacctggtgcccccagggtatgtccagctggaggactcctcggca

SEQ ID NO: 625 - DNA, 119 bp, homo sapiens
ggaaggtcattgccaaccggacagtggactacgaggaggtgcactggctcaactttaccgtgagggcctagacaacgggtccccgccccgggcagctgagatccctgtctacctggaaa

SEQ ID NO: 626 - DNA, 119 bp, homo sapiens
aactttaccgtgagggcctcagacaacgggtccccgccccgggcagctgagatccctgtctacctggaatcgtggacatcaatgacaacaaccccatctttgaccagccctcctaccag

SEQ ID NO: 627 - DNA, 119 bp, homo sapiens
gaggctgtctttgaggatgtgcctgtgggcacaatcatcctgacagtcactgccactgatgctgactcagcaactttgcactcattgagtacagccttggagatggagagagcaagttt

SEQ ID NO: 628 - DNA, 119 bp, homo sapiens
gtgcctgtgggcacaatcatcctgacagtcactgccactgatgctgactcaggcaactttgcactcattagtacagccttggagatggagagagcaagtttgccatcaaccccaccacg

SEQ ID NO: 629 - DNA, 119 bp, homo sapiens
gtggtgatccaagtgctggatgtcaatgactgccggccacagttctccaagccccagttcagcacaagctgtatgagaatgagccggcgggcacctcggtcatcaccatgatggccact

SEQ ID NO: 630 - DNA, 119 bp, homo sapiens
tcagcacaagcgtgtatgagaatgagccggcgggcacctcggtcatcaccatgatggccactgaccaggtgaaggtcccaatggagagttgacctactcacttgagggccctggcgtgg

SEQ ID NO: 631 - DNA, 119 bp, homo sapiens
aggccttccatgtggacatggactcgggcttggtgaccacacagcggccactgcagtcctacgagaagtcagtctgaccgtggtggccacagatggtggagagcccccactctggggca

SEQ ID NO: 632 - DNA, 119 bp, homo sapiens
gccactgcagtcctacgagaagttcagtctgaccgtggtggccacagatggtggagagcccccactctgggcaccaccatgctcctggtggaggtcatcgacgtcaatgacaaccgccc

SEQ ID NO: 633 - DNA, 119 bp, homo sapiens
gatggtggagagcccccactctggggcaccaccatgctcctggtggaggtcatcgacgtcaatgacaacgccctgtctttgtgcgcccacccaacggcaccatcctccacatcagagag

SEQ ID NO: 634 - DNA, 119 bp, homo sapiens
gagatcccgctgcgctccaacgtgtacgaggtctacgccacggacaaggatgagggcctcaacggggcgtgcgctacagcttcctgaagactgcgggcaaccgggactgggagttcttc

SEQ ID NO: 635 - DNA, 119 bp, homo sapiens
gccacggacaaggatgagggcctcaacggggcggtgcgctacagcttcctgaagactgcgggcaaccggactgggagttcttcatcatcgacccaatcagcggcctcatccagactgct

SEQ ID NO: 636 - DNA, 119 bp, homo sapiens
cgctacagcttcctgaagactgcgggcaaccgggactgggagttcttcatcatcgacccaatcagcggctcatccagactgctcagcgcctggaccgcgagtcgcaggcggtgtacagc

SEQ ID NO: 637 - DNA, 119 bp, homo sapiens
aaaggcagcccccagtaccagctgctgacagtgcctgagcactcaccacgcggcaccctcgtgggcaactgacaggcgcagtggatgcagatgagggccccaacgcgatcgtgtactac

SEQ ID NO: 638 - DNA, 119 bp, homo sapiens
cccagtaccagctgctgacagtgcctgagcactcaccacgcggcaccctcgtgggcaacgtgacaggcgagtggatgcagatgagggccccaacgcgatcgtgtactacttcatcgcag

SEQ ID NO: 639 - DNA, 119 bp, homo sapiens
ccggcaacgaagagaagaacttccatctgcagcccgatgggtgtctgctggtgctgcgggacctggaccggagcgagaagccatcttctccttcatcgtcaaggcctccagcaatcgca

SEQ ID NO: 640 - DNA, 119 bp, homo sapiens
ctgctggtgctgcgggacctggaccgggagcgagaagccatcttctccttcatcgtcaaggcctccagcatcgcagctggacacctccccgtggaccctccccaaccctcgacctggtt

SEQ ID NO: 641 - DNA, 119 bp, homo sapiens
ctccttcatcgtcaaggcctccagcaatcgcagctggacacctccccgtggaccctccccaaccctcgactggttgctgacctcacactgcaggaggtgcgcgttgtgctagaggacat

SEQ ID NO: 642 - DNA, 119 bp, homo sapiens
cccgtggaccctccccaaccctcgacctggttgctgacctcacactgcaggaggtgcgcgttgtgctagggacatcaacgaccagccaccacgcttcaccaaggctgagtacactgcag

SEQ ID NO: 643 - DNA, 119 bp, homo sapiens
gggtggccaccgacgccaaggtgggctcagagttgatccaggtgctggccctggatgcagacattggcacaacagccttgtcttctacagcattctggccatccactacttccgggccc

SEQ ID NO: 644 - DNA, 119 bp, homo sapiens
tgctggccctggatgcagacattggcaacaacagccttgtcttctacagcattctggccatccactactccgggcccttgccaacgactctgaagatgtgggccaggtcttcaccatgg

SEQ ID NO: 645 - DNA, 119 bp, homo sapiens
ggagcatggacggcattctgcgcaccttcgacctcttcatggcctacagccccggctacttcgtggtggcattgtggcccgagacctggcaggccacaacgacacggccatcatcggca

SEQ ID NO: 646 - DNA, 119 bp, homo sapiens
acagccccggctacttcgtggtggacattgtggcccgagacctggcaggccacaacgacacggccatcacggcatctacatcctgagggacgaccagcgcgtcaagatcgtcattaacg

SEQ ID NO: 647 - DNA, 119 bp, homo sapiens
caggccacaacgacacggccatcatcggcatctacatcctgagggacgaccagcgcgtcaagatcgtcataacgagatccccgaccgtgtgcgcggcttcgaggaggagttcatccacc

SEQ ID NO: 648 - DNA, 119 bp, homo sapiens
acgaccagcgcgtcaagatcgtcattaacgagatccccgaccgtgtgcgcggcttcgaggaggagttcaccacctgctctccaacatcactggggccattgtcaatactgacaatgtgc

SEQ ID NO: 649 - DNA, 119 bp, homo sapiens
cctcaccccccaacaccacccctacccctggctatgcccctcccctccatgccccaacccttctccctgagggaatcgtggcttcatcgacatcatggacatgcctaacaccaacaagt

SEQ ID NO: 650 - DNA, 119 bp, homo sapiens
catgccccaacccttctccctgcagggaatcgtggcttcatcgacatcatggacatgcctaacaccaacagtactcctttgatgggtgagtggggtactggccctgcccggtcccctgc

SEQ ID NO: 651 - DNA, 119 bp, homo sapiens
catggacatgcctaacaccaacaagtactcctttgatgggtgagtggggtactggccctgcccggtccctgcggggagtcctgccaggacccagctggggagagctgcagtctcccagc

SEQ ID NO: 652 - DNA, 119 bp, homo sapiens
ggtactggccctgcccggtcccctgcggggagtcctgccaggacccagctggggagagctgcagtctccagcgctggggctgccgaaacccaggctgtgggcgccccctggtgggcggg

SEQ ID NO: 653 - DNA, 119 bp, homo sapiens
agaaaccacgtggctgacaggggctctccaccccagtgggcctcaagttccaggggatgcagactttggcagtgggtgcagggtgaagcctctgcaccaaaggcaatccagactgacat

SEQ ID NO: 654 - DNA, 119 bp, homo sapiens
agtgggcctcaagttccaggggatgcagactttgggcagtgggtgcagggtgaagcctctgcaccaaagcaatccagactgacatgcggtcctggttccagcaggatcctatggtggga

SEQ ID NO: 655 - DNA, 119 bp, homo sapiens
ggcagtgggtgcagggtgaagcctctgcaccaaaggcaatccagactgacatgcggtcctggttccagcggatcctatggtgggagcatgcaccacaggcaccagggcctcacacccca

SEQ ID NO: 656 - DNA, 119 bp, homo sapiens
agccaaccctgtgtggctggatcccttctgtcggaacctggagctggccgcccaggcggagcatgaggagacctaccggagaacctgagtgagatcgccgacctgtggaacagccccac

SEQ ID NO: 657 - DNA, 119 bp, homo sapiens
gtgtggctggatcccttctgtcggaacctggagctggccgcccaggcggagcatgaggatgacctaccgagaacctgagtgagatcgccgacctgtggaacagccccacgcgcacccat

SEQ ID NO: 658 - DNA, 119 bp, homo sapiens
ggaacttttgggcgtgagccagcagctgtcaagcctgatgatgaccgatacctgcgggctgccatccagagtatgacaacattgccaagctgggccagatcattcgtgaggggccaatc

SEQ ID NO: 659 - DNA, 119 bp, homo sapiens
acttttgggcgtgagccagcagctgtcaagcctgatgatgaccgatacctgcgggctgccatccaggagatgacaacattgccaagctgggccagatcattcgtgaggggccaatcaag

SEQ ID NO: 660 - DNA, 119 bp, homo sapiens
ctgatacagactgagctggacgaggagccaggagaccacagcccagggcagggtagcctgcgcttccgcacaagccaccagtggagctcaaggggcccgatgggatccatgtggtgcac

SEQ ID NO: 661 - DNA, 119 bp, homo sapiens
tgcgcttccgccacaagccaccagtggagctcaaggggcccgatgggatccatgtggtgcacggcagcagggcacgctgctggccaccgacctcaacagcctgcccgaggaagaccaga

SEQ ID NO: 662 - DNA, 119 bp, homo sapiens
gcacggcagcacgggcacgctgctggccaccgacctcaacagcctgcccgaggaagaccagaagggcctggccgctcgctggagacgctgaccgctgccgaggccactgccttcgagcg

SEQ ID NO: 663 - DNA, 119 bp, homo sapiens
cagaagggcctgggccgctcgctggagacgctgaccgctgccgaggccactgccttcgagcgcaacgccgcacagaatccgccaaatccacacccctgcacaaacttcgcgacgtgatc

SEQ ID NO: 664 - DNA, 119 bp, homo sapiens
agcgcaacgcccgcacagaatccgccaaatccacacccctgcacaaacttcgcgacgtgatcatggagaccccctggagatcacagagctgtgactagacagggaagccttgtgggtgt

SEQ ID NO: 665 - DNA, 119 bp, homo sapiens
gatcatggagacccccctggagatcacagagctgtgactagacagggaagccttgtgggtgtgagcagccccatccaccgtcccctcccagggagcaagggcagggacagggccggtcg

SEQ ID NO: 666 - DNA, 119 bp, homo sapiens
gtgtgagcagcacccatccaccgtcccctcccagggagcaagggcagggacagggccggtcgggggggacctccaaggccaggccttggggacaaccttggcttggccctggcagcccg

SEQ ID NO: 667 - DNA, 119 bp, homo sapiens
gtcgggggggaccctccaaggccaggccttggggacaaccttggcttggccctggcagcccgcatcagcgctcagatcccacttttgccagacgctcattcagcatctgacctctacct

SEQ ID NO: 668 - DNA, 119 bp, homo sapiens
cccgcatcagctgctcagatcccacttttgccagacgctcattcagcatctgacctctaccttcataagtctgttatttttataagaaaaccaaacaaaaatgttaagcatctaaggac

SEQ ID NO: 669 - DNA, 119 bp, homo sapiens
accttcataagatctgttatttttataagaaaaccaaacaaaaatgttaagcatctaaggacaaggtaagagggtcactggggcccaagagtctggggaccagcttggctcaggctgag

SEQ ID NO: 670 - DNA, 119 bp, homo sapiens
ggacaaggtaaggagggtcactggggcccaagagtctggggaccagcttggctcaggctgagctgaaagggccaaacaggccctcctccctcccagctccaccccgcaagcaccatccc

SEQ ID NO: 671 - DNA, 119 bp, homo sapiens
tgagctgaaagaggccaaacaggccctcctccctcccagctccaccccgcaagcaccatcccctccggcaagcaggcgcaagggaggcccagcgcggacatcccctgctggccggacac

SEQ ID NO: 672 - DNA, 119 bp, homo sapiens
tcccctccggctaagcaggcgcaagggaggcccagcgcggacatcccctgctggccggacacccgactcagtccaagtctcgctacatttccgccacatccctctctgctggacgtcca

SEQ ID NO: 673 - DNA, 119 bp, homo sapiens
acacccgactccagtccaagtctcgctacatttccgccacatccctctctgctggacgtccaggtggagtggcatccccacgtggacaagaaagtcaatgtcaatgaacaagcattctc

SEQ ID NO: 674 - DNA, 119 bp, homo sapiens
tccaggtggaggtggcatccccacgtggacaagaaagtcaatgtcaatgaacaagcattctctccatttactggcttcccaaatgtgtgcccagcttataaacagaagtgactgatgtt

SEQ ID NO: 675 - DNA, 119 bp, homo sapiens
tctctccatttcactggcttcccaaatgtgtgcccagcttataaacagaagtgactgatgttccctccgttttgaatgtggagtgtttgtgtgtgttccttttttaaattaagttattc

SEQ ID NO: 676 - DNA, 119 bp, homo sapiens
gctacccccattgtggtctctgccctccccgcgggcccagggcatgctccgtgcccctgcgcccggtctggcggcggcaggcgacactccgcgccggcggagacatgaggcgctgccgg

SEQ ID NO: 677 - DNA, 119 bp, homo sapiens
ggcatgctccgtgcccctgcgcccggtctcggcggcggcaggcgacactccgcgccggcggagacatgagcgctgccggtgggccgccctggccctggggctgctgcgcctctgcttgg

SEQ ID NO: 678 - DNA, 119 bp, homo sapiens
gctctcacgtatacaccctgaatgggacagaccctgagggagaccccatctcctaccacatcagctttgccccagcactagaagcgtcttttctgttgaccccacttttggaaacatca

SEQ ID NO: 679 - DNA, 119 bp, homo sapiens
acagaccctgagggagaccccatctcctaccacatcagctttgaccccagcactagaagcgtcttttctttgaccccacttttggaaacatcaccctggttgaagagctggacagagag

SEQ ID NO: 680 - DNA, 119 bp, homo sapiens
gatggcggtgggaggcttcatggggctgatgtggtgttctcagccaccaccacggtcacggtcaatgtgaggatgttcaggacatggcccctgtcttcgtgggcacaccctactatggc

SEQ ID NO: 681 - DNA, 119 bp, homo sapiens
gctgatgtggtgttctcagccaccaccacggtcacggtcaatgtggaggatgttcaggacatggccccttcttcgtgggcacaccctactatggctatgtgtacgaggacacccttccg

SEQ ID NO: 682 - DNA, 119 bp, homo sapiens
gtgactgaaatgagccctgcggggagcccagctgcccaggccaccgtcccagtcaccatcaggattgtgacctcaacaaccacccgccaacattctatggagagagcggaccccaaaac

SEQ ID NO: 683 - DNA, 119 bp, homo sapiens
accgtcccagtcaccatcaggattgtggacctcaacaaccacccgccaacattctatggagagagcggacccaaaacaggtttgagctgtccatgaatgagcacccaccccagggagag

SEQ ID NO: 684 - DNA, 119 bp, homo sapiens
ccgccaacattctatggagagagcggaccccaaaacaggtttgagctgtccatgaatgagcacccacccagggagagatcctgcggggcctcaagatcaccgtcaatgactccgaccag

SEQ ID NO: 685 - DNA, 119 bp, homo sapiens
ggagccaatgccaaattcaacttgcagctggtgggacccaggggcatcttccgagtggttccacagacatcctgaatgaagcccaagtcacaatcattgtggagaactcagctgccatt

SEQ ID NO: 686 - DNA, 119 bp, homo sapiens
ggacccaggggcatcttccgagtggttccacagacagtcctgaatgaagcccaagtcacaatcattgtgagaactcagctgccattgactttgaaaagtccaaagtattaaccttcaag

SEQ ID NO: 687 - DNA, 119 bp, homo sapiens
ctcctggctgttgaagtgaacaccccagagaagttcagttccacagcggatgttgtgatccagctcctgacaccaatgacaatgtccccaagttcgactccctctactacgttgccagg

SEQ ID NO: 688 - DNA, 119 bp, homo sapiens
gcggatgttgtgatccagctcctggacaccaatgacaatgtccccaagttcgactccctctactacgttccaggattcctgagaacgccccagggggctccagcgtggtggctgtcaca

SEQ ID NO: 689 - DNA, 119 bp, homo sapiens
cttcctgatccacccatccactgggcttatctacacccagccctgggctagcctggacgctgaggccacgccaggtacaacttctatgtgaaggcagaggacatggaaggcaagtacag

SEQ ID NO: 690 - DNA, 119 bp, homo sapiens
ggacgctgaggccactgccaggtacaacttctatgtgaaggcagaggacatggaaggcaagtacagcgtgctgaggtgtttatcacactgctggatgtcaatgaccacccccctcagtt

SEQ ID NO: 691 - DNA, 119 bp, homo sapiens
aggcaagtacagcgtagctgaggtgtttatcacactgctggatgtcaatgaccacccccctcagtttggaagagcgttcagaagaagacgatggtgctagggaccccagtgaaaattga

SEQ ID NO: 692 - DNA, 119 bp, homo sapiens
gccatagacgaggatgcagaggaacccaacaacctggtggactattccatcacccatgcagagcccgccacgtgttcgacatcaattcccacacgggggagatctggctcaagaattcc

SEQ ID NO: 693 - DNA, 119 bp, homo sapiens
ccatcacccatgcagagcccgccaacgtgttcgacatcaattcccacacgggggagatctggctcaagattccatccgctccctggatgccctgcacaacatcacacctggaagggact

SEQ ID NO: 694 - DNA, 119 bp, homo sapiens
cacgggggagatctggctcaagaattccatccgctccctggatgccctgcacaacatcacacctggaaggactgcctatggtccctagaggtgcaggccaaggaccggggctccccatc

SEQ ID NO: 695 - DNA, 119 bp, homo sapiens
ctgcacaacatcacacctggaagggactgcctatggtccctagaggtgcaggccaaggaccggggctcccatccttcagcaccacagccttactcaagattgacatcacagatgctgag

SEQ ID NO: 696 - DNA, 119 bp, homo sapiens
accctctcccggagccccatggctgccttcctgatacagaccaaggacaaccccatgaaggccgtgggttgctggccggcaccatggccaccgtcgtggccatcactgtcctcatctcc

SEQ ID NO: 697 - DNA, 119 bp, homo sapiens
ggccgtgggtgtgctggccggcaccatggccaccgtcgtggccatcactgtcctcatctccaccgccacttctggcgcaacaagaagtctaacaaggtcctgccaatgcggcgggtgct

SEQ ID NO: 698 - DNA, 119 bp, homo sapiens
ccaccgccaccttctggcgcaacaagaagtctaacaaggtcctgccaatgcggcgggtgctccgcaagcgcccagccctgcgccccgcaccatccgcattgagtggctcaagtccaaga

SEQ ID NO: 699 - DNA, 119 bp, homo sapiens
ctccgcaagcggcccagccctgcgccccgcaccatccgcattgagtggctcaagtccaagagcaccaaaccgctaccaagttcatgctcaaagagaaacctcccaatgagaactgtaac

SEQ ID NO: 700 - DNA, 119 bp, homo sapiens
gagcaccaaagccgctaccaagttcatgctcaaagagaaacctcccaatgagaactgtaacaacaacagccagaaagctctctgctcccgagagctccggctctccctccaccacccag

SEQ ID NO: 701 - DNA, 119 bp, homo sapiens
acaacaacagcccagaaagctctctgctcccgagagctccggctctccctccaccacccagcgtggcgccagcactggcgcagcccagtggaccgtgcctactgtctctggctctctca

SEQ ID NO: 702 - DNA, 119 bp, homo sapiens
agcgtggcgcccagcactggcgcagcccagtggaccgtgcctactgtctctggctctctcactccgcagcgacccaacccccgccaaaacccaaaactatgggaagccccgtccagtca

SEQ ID NO: 703 - DNA, 119 bp, homo sapiens
cactccgcagccgacccaacccccgccaaaacccaaaactatgggaagccccgtccagtcaactctgattctgagctcaagcaaaagtttgagaagaagagtgtgcacaacaaggctta

SEQ ID NO: 704 - DNA, 119 bp, homo sapiens
caactctgatctctgagctcaagcaaaagtttgagaagaagagtgtgcacaacaaggcttacttctagttatgccctatgaccccccatctttcctccgcccctgacccccaccaccct

SEQ ID NO: 705 - DNA, 119 bp, homo sapiens
tacttctagtgtatgccctatgaccccccatctttcctccgcccctgacccccaccaccctgctgctcgactatgctccccttcctctgctccttaaggtcactgacccctgttttgca

SEQ ID NO: 706 - DNA, 119 bp, homo sapiens
ctgctgctcggactatgctccccttcctctgctccttaaggtcactgacccctgttttgcacaatggtaaatccccactgtcctcatctctaccgccaccttctggcgcaacaagaagt

SEQ ID NO: 707 - DNA, 119 bp, homo sapiens
cacaatggtataatccccactgtcctcatctctaccgccaccttctggcgcaacaagaagttgcgctctacagggctctagtcagggccttgggcaagacattgggctctaggatgcaa

SEQ ID NO: 708 - DNA, 119 bp, homo sapiens
gttgcgctctgacagggctctagtcagggccttgggcaagacattgggctctaggatgcaattggcaaaacgtccccgttactcaaatccttggcactactacaatgccctccattctt

SEQ ID NO: 709 - DNA, 119 bp, homo sapiens
aattggcaaatacgtccccgttactcaaatccttggcactactacaatgccctccattcttcagggctggaattgacgagaagccagctcacccatcccagacctcacagtccctcagg

SEQ ID NO: 710 - DNA, 119 bp, homo sapiens
ttcagggctgagaattgacgagaagccagctcacccatcccagacctcacagtccctcaggttctactggatctcatcatcatccttagtcaagcagcagggccctggccacgtggagc

SEQ ID NO: 711 - DNA, 119 bp, homo sapiens
ggttctactgggatctcatcatcatccttagtcaagcagcagggccctggccacgtggagcaacactgatagaatctggatcctgacgcctgcagctgagagcaggagcaggaaaagga

SEQ ID NO: 712 - DNA, 119 bp, homo sapiens
gcaacactgactagaatctggatcctgacgcctgcagctgagagcaggagcaggaaaaggaggctcagcctgtctcaggctggaggtcagcgaacctcgtgggctgtaggaaagcaaat

SEQ ID NO: 713 - DNA, 119 bp, homo sapiens
gaggctcagcactgtctcaggctggaggtcagcgaacctcgtgggctgtaggaaagcaaatgtaggtaagggagagcaaggatgcacagaaaacacactgactgtgggactgtgccagg

SEQ ID NO: 714 - DNA, 119 bp, homo sapiens
atgtaggtaaggggagagcaaggatgcacagaaaacacactgactgtgggactgtgccaggatgcatttgaaagatagagcattctgtctgggcagagactgtggaccctggtatgccc

SEQ ID NO: 715 - DNA, 119 bp, homo sapiens
ggatgcatttggaaagatagagcattctgtctgggcagagactgtggaccctggtatgcccacgtgggaagaggacacagaggtggaagattgatcttgccaagagtgagggcagatgt

SEQ ID NO: 716 - DNA, 119 bp, homo sapiens
ccacgtgggacagaggacacagaggtggaagattgatcttgccaagagtgagggcagatgtctccagccggactgccctgagccgcaaaatgtcaaagctggagctatagaggtagccc

SEQ ID NO: 717 - DNA, 119 bp, homo sapiens
gtctccagccaggactgccctgagccgcaaaatgtcaaagctggagctatagaggtagccctaaaggcactagaagagcatcagggctgctctctgaggagctgccccaccagccatcc

SEQ ID NO: 718 - DNA, 119 bp, homo sapiens
ctgcagcccagttctgtgggtgcagctcttccagaaagtattaggagcctcacatctactctgccaagcccccagcaggcactgtgctgggcttaggggctaccactggatgatggcat

SEQ ID NO: 719 - DNA, 119 bp, homo sapiens
gagcctcacatctactctgccaagcgccccagcaggcactgtgctgggcttaggggctaccactggatgtggcattgccgtgactcacacacctctacttctgttcttccctcactcca

SEQ ID NO: 720 - DNA, 119 bp, homo sapiens
tgggcttaggggctaccactggatgatggcattgccgtgactcacacacctctacttctgttcttccctactccatccccgctaccgtcctggccagctaccgtcagagagaaccagag

SEQ ID NO: 721 - DNA, 119 bp, homo sapiens
atcttgtctagccagggcagcccttatcagcttgtgacaaccttccccaggacagaagtcatacaaggctctggggttaatacaaataggttgtgccctgctttaaggaacctgctatc

SEQ ID NO: 722 - DNA, 119 bp, homo sapiens
catacaaggcctctggggttaatacaaataggttgtgccctgctttaaggaacctgctatcaggaaatcacatgtgtgcacagagagagaaaagtagaacagttctttgcatttggctc

SEQ ID NO: 723 - DNA, 119 bp, homo sapiens
tcaggaaatctacatgtgtgcacagagagagaaaagtagaacagttctttgcatttggctctacttactacaacccctctagaatacattggtgatttcatttaaagagattgtatgca

SEQ ID NO: 724 - DNA, 119 bp, homo sapiens
tctacttactaacaacccctctagaatacattggtgatttcatttaaagagattgtatgcatttgtggcttcctgatttctgagtctgtgtttggaggtgttactgagatgtgccagtg

SEQ ID NO: 725 - DNA, 119 bp, homo sapiens
catttgtggctttcctgatttctgagtctgtgtttggaggtgttactgagatgtgccagtgtgcagaatcttgctggggtttctacagtccccaacgtgaacagtattaagcaagaggt

SEQ ID NO: 726 - DNA, 119 bp, homo sapiens
tgtgcagaatccttgctggggtttctacagtccccaacgtgaacagtattaagcaagaggtggactcgacaatccaggagcccagactgagcaaataagtactttccagcctgtgtttc

SEQ ID NO: 727 - DNA, 119 bp, homo sapiens
gtggactcgagcaatccaggagcccagactgagcaaataagtactttccagcctgtgtttcaggagaggctgtgctggatcatgcttgccctccacagggaatacagcatccttacagc

SEQ ID NO: 728 - DNA, 119 bp, homo sapiens
tcaggagaggactgtgctggatcatgcttgccctccacagggaatacagcatccttacagcttgcatgcatcaacctcttttgtaaatggaaaataaagtctgttacccaaaggccatg

SEQ ID NO: 729 - DNA, 119 bp, homo sapiens
gcttgcatgcaatcaacctcttttgtaaatggaaaataaagtctgttacccaaaggccatgctgatccctgctccctgctttcatttatgtttgctgacctgtggagaccagtctttct

SEQ ID NO: 730 - DNA, 119 bp, homo sapiens
tgctgatcccctgctccctgctttcatttatgtttgctgacctgtggagaccagtctttctgacacacatgaagctcaacttgcctcctggctgcttcagcaggtggatccattcttcg

SEQ ID NO: 731 - DNA, 119 bp, homo sapiens
ctgacacacagtgaagctcaacttgcctcctggctgcttcagcaggtggatccattcttcgacccccagtgtgactctaaagaaggctgaaaatttttgtccaaattgccatgcagata

SEQ ID NO: 732 - DNA, 119 bp, homo sapiens
cgacccccagatgtgactctaaagaaggctgaaaatttttgtccaaattgccatgcagatatcttgaacgcaggacatttgcaggccttgtctactggacttttctcccaaacaggaca

SEQ ID NO: 733 - DNA, 119 bp, homo sapiens
tatcttgaacagcaggacatttgcaggccttgtctactggacttttctcccaaacaggacaagcccaggagggctgcatggagaggaatggaacctggagctagaattaattgcccact

SEQ ID NO: 734 - DNA, 119 bp, homo sapiens
caagcccaggcagggctgcatggagaggaatggaacctggagctagaattaattgcccactctcccacctaccagtgcagcccggcaagggcaggaattgggaggcctagggtgggcat

SEQ ID NO: 735 - DNA, 119 bp, homo sapiens
ctctcccaccctaccagtgcagcccggcaagggcaggaattgggaggcctagggtgggcatgaaagcttggaagcactgtcgtctctcagacaggcgtcctaaagacctctaggctgga

SEQ ID NO: 736 - DNA, 119 bp, homo sapiens
atgaaagcttgggaagcactgtcgtctctcagacaggcgtcctaaagacctctaggctggaagcttgggttgcaagtggatccgggaccgagggtggtctcttggacaaccccaggaac

SEQ ID NO: 737 - DNA, 119 bp, homo sapiens
gaagcttgggcttgcaagtggatccgggaccgagggtggtctcttggacaaccccaggaacttggaccaggcagagccaatcttgcaaactggccatggatggggaagtgcccggtagc

SEQ ID NO: 738 - DNA, 119 bp, homo sapiens
acttggaccaaggcagagccaatcttgcaaactggccatggatggggaagtgcccggtagccagcatgaccacactaggaaagaggaggagggtgcagccaaacttaaggcaccggcaa

SEQ ID NO: 739 - DNA, 119 bp, homo sapiens
gccagcatgagccacactaggaaagaggaggagggtgcagccaaacttaaggcaccggcaagtgttgtcgcactggaggagaccccgccagtggggtgaggccagccaagtccctgtgt

SEQ ID NO: 740 - DNA, 119 bp, homo sapiens
aagtgttgtcagcactggaggagaccccgccagtggggtgaggccagccaagtccctgtgttacgaatgtgggccaaggggctgtctgctaggtcccagtaggacaggcagagctccag

SEQ ID NO: 741 - DNA, 119 bp, homo sapiens
gttacgaatggtgggccaaggggctgtctgctaggtcccagtaggacaggcagagctccaggctggcacatggtaggcctccagggaaagagctgggaggcaggaatggcacactgggc

SEQ ID NO: 742 - DNA, 119 bp, homo sapiens
aggctggcaccatggtaggcctccagggaaagagctgggaggcaggaatggcacactgggcaggcttgccattcctggccctgagaatggagctgtagcctcatggacaataaatggat

SEQ ID NO: 743 - DNA, 119 bp, homo sapiens
ccagggtctgttcttgcatccccactgcgaaattgccttattcaatctgagtaatgtgaatctgtactcagagtttttcaaggggcagcccaagcatcttaaaaagtatcagattctca

SEQ ID NO: 744 - DNA, 119 bp, homo sapiens
atgtgaatctgtactctagagtttttcaaggggcagcccaagcatcttaaaaagtatcagattctcagaatcctccctagaccattttccctctccctaaatttctatgtttacagaag

SEQ ID NO: 745 - DNA, 119 bp, homo sapiens
gtatcagattctcagaaatcctccctagaccattttccctctccctaaatttctatgtttacagaagcactgaatacttccctacccaccaacatgctcctggctctcccctgcactgc

SEQ ID NO: 746 - DNA, 119 bp, homo sapiens
tatgtttacagaagcaactgaatacttccctacccaccaacatgctcctggctctcccctgcactgcttctgctcttccacagcccttctctcatcctgacccctctgtctcatgtgca

SEQ ID NO: 747 - DNA, 119 bp, homo sapiens
ctcccctgcactgcttgctgctcttccacagcccttctctcatcctgacccctctgtctcatgtgcaccccaagcttcttttgcttggcttgaaggtctgaacatccactctcaccttc

SEQ ID NO: 748 - DNA, 119 bp, homo sapiens
ctgtctcatgtgcaccaccaagcttcttttgcttggcttgaaggtctgaacatccactctcaccttcatgtagcccaggctatttcatgatggtgacaccctcaagatccgtagaccac

SEQ ID NO: 749 - DNA, 119 bp, homo sapiens
ctctctccggtctcagcctcaataccctgaccatcttctctttctgcaagaccccggagctgcggactcctgccacctactggtgctgagcttggctcttgcggacagtgggatcagcc

SEQ ID NO: 750 - DNA, 119 bp, homo sapiens
ctctttctgcaagaccccggagctgcggactccctgccacctactggtgctgagcttggctcttgcggaagtgggatcagcctgaatgccctcgttgcagccacatccagccttctccg

SEQ ID NO: 751 - DNA, 119 bp, homo sapiens
tgtctcccacaggcgctggccctacggctcggacggctgccaggctcacggcttccagggctttgtgacgcgttggccagcatctgcagcagtgcagccatcgcatgggggcgttatca

SEQ ID NO: 752 - DNA, 119 bp, homo sapiens
gctggccctacggctcggacggctgccaggctcacggcttccagggctttgtgacagcgttggccagcactgcagcagtgcagccatcgcatgggggcgttatcaccactactgcaccc

SEQ ID NO: 753 - DNA, 119 bp, homo sapiens
gtagccagctggcctggaactcagccgtctctctggtgctcttcgtgtggctgtcttctgccttctgggagctctgccccttctgggttggggtcactacgactatgagccactgggga

SEQ ID NO: 754 - DNA, 119 bp, homo sapiens
ggtgctcttcgtgtggctgtcttctgccttctgggcagctctgccccttctgggttggggtcactacgatatgagccactggggacatgctgcaccctggactactccaagggggacag

SEQ ID NO: 755 - DNA, 119 bp, homo sapiens
gtgcccgccctcattgccaaaatggtgcccacgatcaatgccatcaactatgccctgggcaatgagatgtctgcaggggaatctggcagtgcctctcaccgcagaagagggagaaggac

SEQ ID NO: 756 - DNA, 119 bp, homo sapiens
atgccctgggcaatgagatggtctgcaggggaatctggcagtgcctctcaccgcagaagagggagaaggccgaaccaagtgagcctgccaccctggagtgagccccaggccaggaggct

SEQ ID NO: 757 - DNA, 119 bp, homo sapiens
accgcagaagagggagaaggaccgaaccaagtgagcctgccaccctggagtgagccccaggccaggaggtgttccaggagtcctgcccagcagcctcagtggccaagcccagacactca

SEQ ID NO: 758 - DNA, 119 bp, homo sapiens
gtgagccccaggccaggaggctgttccaggagtcctgcccagcagcctcagtggccaagcccagacactacccaccttccccagtggccccgtggatcctggtcctaggctggacacag

SEQ ID NO: 759 - DNA, 119 bp, homo sapiens
agtggccaagcccagacactcacccaccttccccagtggccccgtggatcctggtcctaggctggacacggattcagaaagacaccaggctgcacagaaagagccagatggacctgagt

SEQ ID NO: 760 - DNA, 119 bp, homo sapiens
cctggtcctaggctggacacaggattcagaaagacaccaggctgcacagaaagagccagatggacctgatgtcggtcacagccccctacactcaaggctgagaggcctcaggaaagtca

SEQ ID NO: 761 - DNA, 119 bp, homo sapiens
tcacaggacacgggtgactatagtttaatgaatcagagtctggaatcttaagccccagaaactttcaggaaggcaagcagattcactgacccccacgtgtatctttatgtgtaatgaag

SEQ ID NO: 762 - DNA, 119 bp, homo sapiens
ccccagaaactttcaggaaaggcaagcagattcactgacccccacgtgtatctttatgtgtaatgaaggtttatgggaactgagggaagatggggagagaagggcaaattaaactccta

SEQ ID NO: 763 - DNA, 119 bp, homo sapiens
tttatgtgtaatgaaggttttatgggaactgagggaagatggggagagaagggcaaattaaactcctaaataaatagagctgaagactgagagctaatcagaagttctcagatgaaact

SEQ ID NO: 764 - DNA, 119 bp, homo sapiens
gcaaattaaactcctaagataaatagagctgaagactgagagctaatcagaagttctcagatgaaactaattcttgatattgctacaaaaggtttctttctgatctgccatcgcagtaa

SEQ ID NO: 765 - DNA, 119 bp, homo sapiens
cgttgtggacgatcagcctgtactgcctggccaggcacagctcctcctgccgctgccttacaatcttctcgcttctgggggcaggccgttggggtcccgggaaaacacgaaggagtagc

SEQ ID NO: 766 - DNA, 119 bp, homo sapiens
ctgccgctgccttacaatcttctgcgcttctgggggcaggccgttggggtcccgggaaaacacgaaggatagctgtcagcacaggtgccatcgaggttcaggaggcggcaggagtactg

SEQ ID NO: 767 - DNA, 119 bp, homo sapiens
gggtcccgggaaaacacgaaggagtagctgtcagcacaggtgccatcgaggttcaggaggcggcaggagactgcacggcatacgtgtcgtagtctgtgtcgacgatccagtggtcatca

SEQ ID NO: 768 - DNA, 119 bp, homo sapiens
ttcaaaagacggactcggcccttggctgtggcgctcatctggccggtctcgtccacggagaactccgcgcgatgttgtcctgcagaaagaggccctcggggtccttcttggccatggcg

SEQ ID NO: 769 - DNA, 119 bp, homo sapiens
gcccttggctgtggcgctcatctggccggtctcgtccacggagaactccgcgacgatgttgtcctgcagaagaggccctcggggtccttcttggccatggcgtaccaggtcccagagaa

SEQ ID NO: 770 - DNA, 119 bp, homo sapiens
gcgagccttgtcgaagttctccttgactcggaagctgctcactcggcagtcgcgctccgcgcggccgctcccagcgccgccaacagcaagagcgcccacacccacttcatcttgcccag

SEQ ID NO: 771 - DNA, 119 bp, homo sapiens
gtcgaagttctccttgactcggaagctgctcactcggcagtcgcgctccgcgcggccgctgcccagcgcgccaacagcaagagcgcccacacccacttcatcttgcccaggaatccgcc

SEQ ID NO: 772 - DNA, 119 bp, homo sapiens
ccacattgggggacagggccgggcctgggctcggttcccaggtttgagctctgcagcctctctcctggatgagggggctgaagtcagaccaaaggaagaactcagaaatgtcttgttta

SEQ ID NO: 773 - DNA, 119 bp, homo sapiens
tctcctggagtgagggggctgaagtcagaccaaaggaagaactcagaaatgtcttgtttatttgtgttttgaccaagcagcctctcccttcacccaggtttatggcctcgttttcactt

SEQ ID NO: 774 - DNA, 119 bp, homo sapiens
tttgtgtttgtgaccaagcagcctctcccttcacccaggtttatggcctcgttttcacttgtatattttcacactgtaaatttcttgtacaaacccaaagaaaaaattaaaaaaaattt

SEQ ID NO: 775 - DNA, 119 bp, homo sapiens
gtgaatgtgctggataaagagtacaggaacttgtttgacccccccccccccaccatttgctggctattccctccccctcatagagctctcttggggagaaaaggtgatggaggaaggac

SEQ ID NO: 776 - DNA, 119 bp, homo sapiens
ctggctattctcctccccctcatagagctctcttggggagaaaaggtgatggaggaaggacaaatccagagaatgtctgaggtcttagtggaccccaacgtgaaatgatctctcaggat

SEQ ID NO: 777 - DNA, 119 bp, homo sapiens
acaaatccagtagaatgtctgaggtcttagtggaccccaacgtgaaatgatctctcaggatttcagggatagaaaagcctttcatccgtttccttgcacagaatgctgcttggggttga

SEQ ID NO: 778 - DNA, 119 bp, homo sapiens
atttcagggactagaaaagcctttcatccgtttccttgcacagaatgctgcttggggttgaggaatggagcattgaccccttcagggccctgtctgagagtctgtgtccctggaggctt

SEQ ID NO: 779 - DNA, 119 bp, homo sapiens
gaggaatggatgcattgaccccttcagggccctgtctgagagtctgtgtccctggaggcttgggcgactataagggacagcatgtgagaaagtgcccaccaatcccaagctccagacct

SEQ ID NO: 780 - DNA, 119 bp, homo sapiens
ttgggcgactcataagggacagcatgtgagaaagtgcccaccaatcccaagctccagaccttggctttccaccccctatcctggcttgggaggttggggagcagtgagtgcaggtgaca

SEQ ID NO: 781 - DNA, 119 bp, homo sapiens
cttggctttctcaccccctatcctggcttgggaggttggggagcagtgagtgcaggtgacacaggctgccactagcaccttgtccttggacactaaggcagagccttaatgacagctga

SEQ ID NO: 782 - DNA, 119 bp, homo sapiens
cacaggctgcccactagcaccttgtccttggacactaaggcagagccttaatgacagctgaggagggaaaaagtggaaagatgtgagccaccagtgtggcactgggaggaggcagggtg

SEQ ID NO: 783 - DNA, 119 bp, homo sapiens
gaggagggaagaaagtggaaagatgtgagccaccagtgtggcactgggaggaggcagggtgggcaggagtggagagtcctgaagaagttggtaggagaggtcctggggataacgggatg

SEQ ID NO: 784 - DNA, 119 bp, homo sapiens
tgggcaggagctggagagtcctgaagaagttggtaggagaggtcctggggataacgggatgctggagtcgtgggtgaatctgaggttagggggagggtcatgggatgcgtggggagggt

SEQ ID NO: 785 - DNA, 119 bp, homo sapiens
tgctggagtcagtgggtgaatctgaggttagggggagggtcatgggatgcgtggggagggtgcgggcttgaatcaggagtctggagggctggggagggggctgggctgggagttggctg

SEQ ID NO: 786 - DNA, 119 bp, homo sapiens
gtgcgggcttagaatcaggagtctggagggctggggagggggctgggctgggagttggctggaggagccggcatcagtgggaggagtctggggattggtgggaggttctgggagccagt

SEQ ID NO: 787 - DNA, 119 bp, homo sapiens
tggaggagcctggcatcagtgggaggagtctggggattggtgggaggttctgggagccagtgggcaggactggagcagcatcaaggggttggtgggcaggcaagtggtcagcaggaagg

SEQ ID NO: 788 - DNA, 119 bp, homo sapiens
gtgggcaggaactggagcagcatcaaggggttggtgggcaggcaagtggtcagcaggaaggcccccatcgtaagggctgatgagtcagagggtgagggccgtgggctgggcccggggac

SEQ ID NO: 789 - DNA, 119 bp, homo sapiens
ggcccccatcagtaagggctgatgagtcagagggtgagggccgtgggctgggcccggggaccctgaccaaagctccatgggctcccgggccttgtttcgataagcccgacggatggtgt

SEQ ID NO: 790 - DNA, 119 bp, homo sapiens
accctgaccacaagctccatgggctcccgggccttgtttcgataagcccgacggatggtgtctactgcagctggtgggtcacctgctctagattctctccgtccactgccacaagctcg

SEQ ID NO: 791 - DNA, 119 bp, homo sapiens
ctaaggactgcttcatcttggacagtgtcactgtcttcagctcgccactggggttcttcatggctgcctcttggccgtcccctcagttccactctccgagggcccttgcttggccccca

SEQ ID NO: 792 - DNA, 119 bp, homo sapiens
ctggggttcttcatggctgcctccttggccgtcccctcagttccactctccgagggcccttgcttggccccaccttggctgcctccccatccagaggtcgtggcagagggggtctggcc

SEQ ID NO: 793 - DNA, 119 bp, homo sapiens
ctccgagggcccttgcttggcccccaccttggctgcctccccatccagaggtcgtggcagagggggtctgccttccgaggcttgtggtagcgcccattggtcatgctgggggcaggggt

SEQ ID NO: 794 - DNA, 119 bp, homo sapiens
gaggtcgtggcagagggggtctggccttccgaggcttgtggtagcgcccattggtcatgctgggggcagggtaggcaccggggatggggagcgtctacctggagacttgccttgacccc

SEQ ID NO: 795 - DNA, 119 bp, homo sapiens
ctgagcccggccccggatctggctctgcggagggtgctctcggctcaggggttctgtcagcagccagttggccgcaggggccggggagccacggggggtagctggggagggggtgtgca

SEQ ID NO: 796 - DNA, 119 bp, homo sapiens
ggggttctgtcagcagccagttaggccgcaggggccggggagccacggggggtagctggggagggggtggcaggcaattcggaggggggtgaaggcatctactggcacgtcttgtagag

SEQ ID NO: 797 - DNA, 119 bp, homo sapiens
gggggtagctggggagggggtgtgcaggcaattcggaggggggtgaaggcatctactggcacgtcttgtgaggggggatccctttatgggggtggcgaggggcagaggcacttggggag

SEQ ID NO: 798 - DNA, 119 bp, homo sapiens
ggcatctactggcacgtcttgtagaggggggatccctttatgggggtggcgaggggcagaggcacttgggagaccttgagggcccccagccgctccctcagctccccattatcttcctc

SEQ ID NO: 799 - DNA, 119 bp, homo sapiens
ggcgaggggcagaggcacttggggagaccttgagggcccccagccgctccctcagctccccattatcttctcttccgggaagccgttcaccggcagcaggtagaagcctccgcggctgt

SEQ ID NO: 800 - DNA, 119 bp, homo sapiens
ccgggagcagtggcgggtgacagccagcacctcgtcatcagtcagcagcctctgggccaggtcctgaataggggccgccggctctcccaggcctgaacctgctcatccacattaggcag

SEQ ID NO: 801 - DNA, 119 bp, homo sapiens
ccaggtcctgaatgaggggccgccggctctcccaggcctgaacctgctcatccacattaggcagctggcggagggactcccagacctggcagacagcagggcccggcccctctcctggt

SEQ ID NO: 802 - DNA, 119 bp, homo sapiens
ctttctctatgtccaggcgagggtaagttttggccaggctcccgctgtccagtgtccaggcctctctgccccgtcccgcgctagcctcccctgccgccctcccttgaagaagaggttca

SEQ ID NO: 803 - DNA, 119 bp, homo sapiens
tcccgctgtccagtgtccaggcctctctgcgcccgtcccgcgctagcctcccctgccgccctcccttgagaagaggttcatcagcgtcttggagcgctgcagggcacccttctccccag

SEQ ID NO: 804 - DNA, 119 bp, homo sapiens
gcgctagcctcccctgccgccctcccttgaagaagaggttcatcagcgtcttggagcgctgcagggcaccttctccccaggggaccccgacttctccttcttccgctgctgcttctcct

SEQ ID NO: 805 - DNA, 119 bp, homo sapiens
cccacaaggtcagatagctctgggagcgcgtgatggggggccggggtcggctgagggccagcagcaaagcgtcttgggagactcagagagcgcagagtcaaggcggcggccgggatggg

SEQ ID NO: 806 - DNA, 119 bp, homo sapiens
ggccagcagcaaagccgtcttgggagactcagagagcgcagagtcaaggcggcggccgggatgggggcctccgagcggatggcggtgtccctgaggatgactgtgggccgcacgctgca

SEQ ID NO: 807 - DNA, 119 bp, homo sapiens
ccgggatgggggccgtccgagcggatggcggtgtccctgaggatgactgtgggccgcacgctgcaccagtctccacccggcctcccgcatcgggctccgtctgcatggctgtgtccgcc

SEQ ID NO: 808 - DNA, 119 bp, homo sapiens
gcacgctgcaccaggtctccacccggcctcccgcatcgggctccgtctgcatggctgtgtccgcccgccccagcctgggccgcggctgccgggctcctcctgcccgaggcagatgtcca

SEQ ID NO: 809 - DNA, 119 bp, homo sapiens
tgtgtccgcccgcccccagcctgggccgcggctgccgggctcctcctgcccgaggcagatgtccatgcgtccgacggcagggagcccgagctgtagggggcgctggaggcgcacgaaga

SEQ ID NO: 810 - DNA, 119 bp, homo sapiens
cagatgtccatgcggtccgacggcagggagcccgagctgtagggggcgctggaggcgcacgaagagacgtggagctgctctcagaggccggggacagctgctgcagcaccccgttgctc

SEQ ID NO: 811 - DNA, 119 bp, homo sapiens
cttgatggtcagcatgatgtgcgtttggcccttcagcacctccacggcctggctgtggctgatgtcgtcaacctgacaccgttggctgccaggacctggtcccccaccttgatgccatt

SEQ ID NO: 812 - DNA, 119 bp, homo sapiens
cccttcagcacctccacggcctggctgtggctgatgtcgtcaaacctgacaccgttggctgccaggaccggtcccccaccttgatgccattctcctcggccagcccaccatggtccact

SEQ ID NO: 813 - DNA, 119 bp, homo sapiens
ttggacacatagatgcccaggccaaactccttgcccccacggatgttgaagcccaggcagaagtcgtcgaggttgtgtataggtggacgatgcgccggacaccatcttctgagctggtg

SEQ ID NO: 814 - DNA, 119 bp, homo sapiens
cagaagtcgtcggaggttgtgtataggtggacgatgcgccggacaccatcttctgagctggtgtcggaggtgttgaaccgcacttctccactaccaggcgccgattcaccacatccacc

SEQ ID NO: 815 - DNA, 119 bp, homo sapiens
cacgtggtcttctccttggagaacttgatgcccggcacacggcccatgcgccgaaccatcatgtgcaggggctgctgctggtcagcacctttacggcgctacccatggtggtgctctcc

SEQ ID NO: 816 - DNA, 119 bp, homo sapiens
ccatcatgtgcaggcggctgctgctggtcagcacctttacggcgctacccatggtggtgctctccaggccagcccattcacctccgtgatcttgtcccccacgcacaggccagcccgct

SEQ ID NO: 817 - DNA, 119 bp, homo sapiens
ctgcactgctgccttcctccactttgctgacgaagatgcccaggccatgctctgagcccccgcgcacgcgaagcccagcctccctgctggactcttctccacccggactgaatggatga

SEQ ID NO: 818 - DNA, 119 bp, homo sapiens
ctttgctgacgaagatgcccaggccatgctctgagcccccgcgcacgctgaagcccagcctccctgctgactcttctccacccggactgaatggatgatgtcactttcatcactgttgg

SEQ ID NO: 819 - DNA, 119 bp, homo sapiens
cttcgatgggggagttgatgaggatgacgcgtcccatgggcgatgaggctcggattccgcgggggggccgttcagcagccgttgttgcttccttagcaggtatcgcgttgcggtggagc

SEQ ID NO: 820 - DNA, 119 bp, homo sapiens
ttccgcgggggggcccgttcagcagccgttgttgcttccttagcaggtatcgcgttgcggtggagcctggtcgctgcctaggtggcctcgggaggagagggagctcagagagccggagc

SEQ ID NO: 821 - DNA, 119 bp, homo sapiens
ttgcggtggagcctgagtcgctgcctaggtggcctcgggaggagagggagctcagagagccggagctcagtctcctaggcccagtgggtcgaagcccactgcgaaaccctgcgccatgg

SEQ ID NO: 822 - DNA, 119 bp, homo sapiens
gagagccggagctcaggtctcctaggcccagtgggtcgaagcccactgcgaaaccctgcgccatggcggtgggctagggcggcaccctacaggtccagaaggaatctgctagctctgga

SEQ ID NO: 823 - DNA, 119 bp, homo sapiens
cctgcgccatggcggctgggctagggcggcaccctacaggtccagaaggaatctgctagctctggagagccagccctgcgtgcttcgagctccatgagcctctgtgcggggctggggtc

SEQ ID NO: 824 - DNA, 119 bp, homo sapiens
gctagctctggagaggccagccctgcgtgcttcgagctccatgagcctctgtgcggggctggggtctcataacgtgaaggccctcgcttgcgatgcctctcagaagtgtgagctccagg

SEQ ID NO: 825 - DNA, 119 bp, homo sapiens
gagatggcagctggcttggcaaggggacagcacctttgtcaccacattatgtccctgtaccctacatgcgcgcctatacccaggaccgatggtaactgaggcggaggggaaaggagggc

SEQ ID NO: 826 - DNA, 119 bp, homo sapiens
cctgtaccctacatgctgcgcctatacccaggaccgatggtaactgaggcggaggggaaaggagggcctagatggcaagtctgtcctcctcggtggttcctgtgtccttcatttccact

SEQ ID NO: 827 - DNA, 119 bp, homo sapiens
ggggaaaggagggcctgagatggcaagtctgtcctcctcggtggttcctgtgtccttcatttccactctcgagagtctgtgctggaccctggagttggtggagaaggagccagtgacaa

SEQ ID NO: 828 - DNA, 119 bp, homo sapiens
ccttcatttccactctgcgagagtctgtgctggaccctggagttggtggagaaggagccagtgacaagcgaggagcaaactgtctttatcacactccatgatcccagctgctaaaatcc

SEQ ID NO: 829 - DNA, 119 bp, homo sapiens
ggagccagtgacaagcagaggagcaaactgtctttatcacactccatgatcccagctgctaaaatccacctgagctctgcttaccagccttcttctctcctgctggaacccagaggagg

SEQ ID NO: 830 - DNA, 119 bp, homo sapiens
tgcaacctggaatttccccacctgggcggactcatcacgtcatcaccaattggatgcatcttctgctcttgcagctggtgaaatctttctcaacccttgagatgcagcccaatcttctc

SEQ ID NO: 831 - DNA, 119 bp, homo sapiens
accaattggatgcatcttctgctctgtgcagctggtgaaatctttctcaacccttgagatgcagcccaacttctcctaacatctggattcctctctgtcactgcattccctcctgtcat

SEQ ID NO: 832 - DNA, 119 bp, homo sapiens
tctcaacccttgagatgcagcccaatcttctcctaacatctggattcctctctgtcactgcattccctctgtcatcctgcctttgttttcttgccctcctttctctcccgggtgatagg

SEQ ID NO: 833 - DNA, 119 bp, homo sapiens
ccgctgcgaggccaatgggctgggccgcgcggccgcgcgcactcgcacccgctgcccccgaggccctccgcactctccccggcgccgctctccggccctcgccctgtccgccgccaccg

SEQ ID NO: 834 - DNA, 119 bp, homo sapiens
agagtcgccatgcagatcccgcgcgccgctcttctcccgctgctgctgctgctgctggcggcgcccgcccggcgcagctgtcccgggccggccgctcggcgcctttggccgccgggtgc

SEQ ID NO: 835 - DNA, 119 bp, homo sapiens
ctgctggcggcgcccgcctcggcgcagctgtcccgggccggccgctcggcgcctttggccgccgggtgccagaccgctgcgagccggcgcgctgcccgccgcagccggagcactgcgag

SEQ ID NO: 836 - DNA, 119 bp, homo sapiens
cctttggccgccgggtgcccagaccgctgcgagccggcgcgctgcccgccgcagccggagcactgcgaggcggccgggcccgggacgcgtgcggctgctgcgaggtgtgcggcgcgccc

SEQ ID NO: 837 - DNA, 119 bp, homo sapiens
cagccggagcactgcgagggcggccgggcccgggacgcgtgcggctgctgcgaggtgtgcggcgcgcccagggcgccgcgtgcggcctgcaggagggcccgtgcggcgaggggctgcag

SEQ ID NO: 838 - DNA, 119 bp, homo sapiens
gaggtgtgcggcgcgcccgagggcgccgcgtgcggcctgcaggagggcccgtgcggcgaggggctgcaggcgtggtgcccttcggggtgccagcctcggccacggtgcggcggcgcgcg

SEQ ID NO: 839 - DNA, 119 bp, homo sapiens
tgcggcgaggggctgcagtgcgtggtgcccttcggggtgccagcctcggccacggtgcggcggcgcgcgaggccggcctctgtgtgtgcgccagcagcgagccggtgtgcggcagcgac

SEQ ID NO: 840 - DNA, 119 bp, homo sapiens
acggtgcggcggcgcgcgcaggccggcctctgtgtgtgcgccagcagcgagccggtgtgcggcagcgacccaacacctacgccaacctgtgccagctgcgcgccgccagccgccgctcc

SEQ ID NO: 841 - DNA, 119 bp, homo sapiens
ccggtgtgcggcagcgacgccaacacctacgccaacctgtgccagctgcgcgccgccagccgccgctccagaggctgcaccggccgccggtcatcgtcctgcagcgcggagcctgcggc

SEQ ID NO: 842 - DNA, 119 bp, homo sapiens
gcttccgttttctaaacgagaggtgccggtggctagtgggtctgggtttattgtgtcggaagatggactatcgtgacaaatgcccacgtggtgaccaacaagcaccgggtcaaagttga

SEQ ID NO: 843 - DNA, 119 bp, homo sapiens
tgggtttattgtgtcggaagatggactgatcgtgacaaatgcccacgtggtgaccaacaagcaccgggtaaagttgagctgaagaacggtgccacttacgaagccaaaatcaaggatgt

SEQ ID NO: 844 - DNA, 119 bp, homo sapiens
ccacgtggtgaccaacaagcaccgggtcaaagttgagctgaagaacggtgccacttacgaagccaaaataaggatgtggatgagaaagcagacatcgcactcatcaaaattgaccacca

SEQ ID NO: 845 - DNA, 119 bp, homo sapiens
ggcaagctgcctgtcctgctgcttggccgctcctcagagctgcggccgggagagttcgtggtcgccatcgaagcccgttttcccttcaaaacacagtcaccaccgggatcgtgagcacc

SEQ ID NO: 846 - DNA, 119 bp, homo sapiens
agctgcggccgggagagttcgtggtcgccatcggaagcccgttttcccttcaaaacacagtcaccaccggatcgtgagcaccacccagcgaggcggcaaagagctggggctccgcaact

SEQ ID NO: 847 - DNA, 119 bp, homo sapiens
cccgttttcccttcaaaacacagtcaccaccgggatcgtgagcaccacccagcgaggcggcaaagagctgggctccgcaactcagacatggactacatccagaccgacgccatcatcaa

SEQ ID NO: 848 - DNA, 119 bp, homo sapiens
tggtggtctcaaggaaaacgacgtcataatcagcatcaatggacagtccgtggtctccgccaatgatgtagcgacgtcattaaaagggaaagcaccctgaacatggtggtccgcagggg

SEQ ID NO: 849 - DNA, 119 bp, homo sapiens
ccaatgatgtcagcgacgtcattaaaagggaaagcaccctgaacatggtggtccgcaggggtaatgaagtatcatgatcacagtgattcccgaagaaattgacccataggcagaggcat

SEQ ID NO: 850 - DNA, 119 bp, homo sapiens
ggtaatgaagatatcatgatcacagtgattcccgaagaaattgacccataggcagaggcatgagctggattcatgtttccctcaaagactctcccgtggatgacggatgaggactctgg

SEQ ID NO: 851 - DNA, 119 bp, homo sapiens
atgagctggacttcatgtttccctcaaagactctcccgtggatgacggatgaggactctgggctgctggataggacactcaagacttttgactgccattttgtttgttcagtggagact

SEQ ID NO: 852 - DNA, 119 bp, homo sapiens
gggctgctggaataggacactcaagacttttgactgccattttgtttgttcagtggagactccctggccacagaatccttcttgatagtttgcaggcaaaacaaatgtaatgttgcaga

SEQ ID NO: 853 - DNA, 119 bp, homo sapiens
ctccctggccaacagaatccttcttgatagtttgcaggcaaaacaaatgtaatgttgcagatccgcaggagaagctctgcccttctgtatcctatgtatgcagtgtgctttttcttgcc

SEQ ID NO: 854 - DNA, 119 bp, homo sapiens
gatccgcaggcagaagctctgcccttctgtatcctatgtatgcagtgtgctttttcttgccagcttgggcattcttgcttagacagtcagcatttgtctcctcctttaactgagtcatc

SEQ ID NO: 855 - DNA, 119 bp, homo sapiens
ccagcttgggccattcttgcttagacagtcagcatttgtctcctcctttaactgagtcatcatcttagtcaactaatgcagtcgatacaatgcgtagatagaagaagccccacgggagc

SEQ ID NO: 856 - DNA, 119 bp, homo sapiens
tcatcttagtccaactaatgcagtcgatacaatgcgtagatagaagaagccccacgggagccaggatggactggtcgtgtttgtgcttttctccaagtcagcacccaaaggtcaatgca

SEQ ID NO: 857 - DNA, 119 bp, homo sapiens
gccaggatgggactggtcgtgtttgtgcttttctccaagtcagcacccaaaggtcaatgcacagagacccgggtgggtgagcgctggcttctcaaacggccgaagttgcctcttttagg

SEQ ID NO: 858 - DNA, 119 bp, homo sapiens
cacagagaccccgggtgggtgagcgctggcttctcaaacggccgaagttgcctcttttaggaatctcttggaattgggagcacgatgactctgagtttgagctattaaagtacttctta

SEQ ID NO: 859 - DNA, 119 bp, homo sapiens
gacatttgaaatataagctttattttaaatttaaagaagtattgaaaataaacattttttacaaattatatcaagcactcaaaacaatttaggaatgttaaacactaattcttaattca

SEQ ID NO: 860 - DNA, 119 bp, homo sapiens
ttttacaaattataatcaagcactcaaaacaatttaggaatgttaaacactaattcttaattcaaaatatgacatccatagaatacaaccctggtgttggccaatatgaagtttactta

SEQ ID NO: 861 - DNA, 119 bp, homo sapiens
ttaattcaaaataatgacatccatagaatacaaccctggtgttggccaatatgaagtttacttaatattgtattttatatacacttaaccattaatccttcctaaaattcaataacaat

SEQ ID NO: 862 - DNA, 119 bp, homo sapiens
tttacttaatattagtattttatatacacttaaccattaatccttcctaaaattcaataacaatgatttactttataagatgaagccttttatgcaatacccagagataactttttcaa

SEQ ID NO: 863 - DNA, 119 bp, homo sapiens
ataacaatgatttcactttataagatgaagccttttatgcaatacccagagataactttttcaaatatgaacacttataccagtgaggaaattataaaaacatatatcaattatactga

SEQ ID NO: 864 - DNA, 119 bp, homo sapiens
tttttcaaatatgaaacacttataccagtgaggaaattataaaaacatatatcaattatactgaaggactgatttagaggctgtctgtatatagatgcatttcaccttaggaagtacac

SEQ ID NO: 865 - DNA, 119 bp, homo sapiens
tatactgaaggacttgatttagaggctgtctgtatatagatgcatttcaccttaggaagtacacatgcaatcaaaacacttcaactgaatatagatgccattacattatttagttacgt

SEQ ID NO: 866 - DNA, 119 bp, homo sapiens
aagtacacatgcacatcaaaacacttcaactgaatatagatgccattacattatttagttacgttacaagcaaacggcaggttcataaacgttgttctattatgtatcaactgaaaaaa

SEQ ID NO: 867 - DNA, 119 bp, homo sapiens
agttacgttacaaagcaaacggcaggttcataaacgttgttctattatgtatcaactgaaaaaaatatatcaaaaaaaaagtttttgaagactcatgggagtggaatgtgcccacatta

SEQ ID NO: 868 - DNA, 119 bp, homo sapiens
tgaaaaaaatatattcaaaaaaaaagtttttgaagactcatgggagtggaatgtgcccacattaggaataagcttttacaggaccacctgtctccagctggctcccagggaccactgaa

SEQ ID NO: 869 - DNA, 119 bp, homo sapiens
ccacattaggaataaagcttttacaggaccacctgtctccagctggctcccagggaccactgaaaacagtggctaccctcagaaagacaagatggtcttgttaataatttcaatggact

SEQ ID NO: 870 - DNA, 119 bp, homo sapiens
ccactgaaaacagctggctaccctcagaaagacaagatggtcttgttaataatttcaatggactctcgagctcatcctccttgatcaccagcggaggcgcaaacctgataatgtcgcca

SEQ ID NO: 871 - DNA, 119 bp, homo sapiens
aatggactctcgaagctcatcctccttgatcaccagcggaggcgcaaacctgataatgtcgccatgggtggcttggccagaagtccattatctcgaagtcgtagacacaccttccaagc

SEQ ID NO: 872 - DNA, 119 bp, homo sapiens
ctttggtttctttaatgacaatagcgtttaataatccttttcctcttacggcagttacaacatcagaagtagcttcatgagttcatttctcaagataatgcccaatttgtctgcatttt

SEQ ID NO: 873 - DNA, 119 bp, homo sapiens
gtttaataatccttttcctcttacggcagttacaacatcagaaggtagcttcatgagttcatttctcaaataatgcccaatttgtctgcattttcagcaaggttttcttcttctaaaac

SEQ ID NO: 874 - DNA, 119 bp, homo sapiens
agggtataagcccccagaaagggcctttccaaggaggactatatcaggtctgacattttcataatcaacgccagccatctaccagttctggccaatcctgtctgtatttcatcagcaat

SEQ ID NO: 875 - DNA, 119 bp, homo sapiens
gcccccagaaagggcctttccaaggaggactatatcaggtctgacattttcataatcaacagccagccactaccagttctggccaatcctgtctgtatttcatcagcaataaagagaac

SEQ ID NO: 876 - DNA, 119 bp, homo sapiens
ctggtgcctggtgcagagctctcgcactcccattaggtaacctggatccggaacaacaacgcctgcttcccctgaattggttctaccatgaacgcagccacatttggatcctgaagagc

SEQ ID NO: 877 - DNA, 119 bp, homo sapiens
gtgcctggtgcagagctctcgcactcccattaggtaacctggatccggaacaacaacgcctgcttcacctgaattggttctaccatgaacgcagccacatttggatcctgaagagcacg

SEQ ID NO: 878 - DNA, 119 bp, homo sapiens
ctccagtgcgggcagatcattatagggaatgatgtcgaatcccggcataaatggtccaaaaccatcgtactggttgggtctgtggaactggagatagcagacaacgtcctaccccagaa

SEQ ID NO: 879 - DNA, 119 bp, homo sapiens
cgggcagatcattatagggaatgatgtcgaatcccggcataaatggtccaaaaccatcgtaactggttggtctgtggaactggagatagcagacaacgtcctaccccagaagttcccag

SEQ ID NO: 880 - DNA, 119 bp, homo sapiens
ctgtattcataggaagaactttgtggtagttgaaaagtttagtaatatactcctcatattcaccaagtagttattatagaaagctctagatgttaaggtcaatttgtccacttgactct

SEQ ID NO: 881 - DNA, 119 bp, homo sapiens
ctcatattcaccaagtacgttattatagaaagctctagatgttaaggtcaatttgtccacttgactcttagagcattcacaatcttggggtgacaatgcccttggttgacagcactgta

SEQ ID NO: 882 - DNA, 119 bp, homo sapiens
ttgtccacttgactcttcagagcattcacaatcttggggtgacaatgcccttggttgacagcactgtaaaactcaggaagtcaaaatattttctgccttctacatcccataagtaaata

SEQ ID NO: 883 - DNA, 119 bp, homo sapiens
cttttcctctctccagggctacaggtaaaggatggtagttgtgtgcaccatacttatattccctttcaaaatgtcatcagaggttggagggccttggactgtttttttagttgcaacag

SEQ ID NO: 884 - DNA, 119 bp, homo sapiens
tatattccctttcaaaaatgtcatcagaggttggagggccttggactgtttttttagttgcaacagatgagcagaagccactgaagaatgaactccgcgactaagtacagcaaacctct

SEQ ID NO: 885 - DNA, 119 bp, homo sapiens
tagttgcaacagatgtagcagaagccactgaagaatgaactccgcgactaagtacagcaaacctctgcaatgtgctagtttggaaaacattgtgtccttcaagtagaaaaaccacagat

SEQ ID NO: 886 - DNA, 119 bp, homo sapiens
tccaggcacaggccatgcagtgacgcccccccacccctccacctttgcccggagcgcgggcagcagcccgcgcgccagccggccccggggcaggagcggtgctaggcaggggtggggtg

SEQ ID NO: 887 - DNA, 119 bp, homo sapiens
ggcagcagcccagcgcgccagccggccccggggcaggagcggtgctaggcaggggtggggtggccgggccagggaccgggagccggggagggagccgggcaccgagcagagggcggggg

SEQ ID NO: 888 - DNA, 119 bp, homo sapiens
ggtggccgggcccagggaccgggagccggggagggagccgggcaccgagcagagggcgggggaagcggcccgaagtttgcctcggactcgccgggcgctgcggtggctccctgggccga

SEQ ID NO: 889 - DNA, 119 bp, homo sapiens
gactgttgctgccgctgccgccgccgcttcattgcacattcaagtggaaaattttcaggagtcagcagaacattgtgtccaaaaaagactgagtcgcagttaccaccaaacccaggagg

SEQ ID NO: 890 - DNA, 119 bp, homo sapiens
gcacattcaagtggaaaattttcaggagtcagcagaaacattgtgtccaaaaaagactgagtcgcagttccaccaaacccaggaggagactctccctggaaaacttcccttccctttcg

SEQ ID NO: 891 - DNA, 119 bp, homo sapiens
gtttattttcttgaaaaggctccaggcttcggcttggaaaatcccaccgccaaaattgagcccagcagcggagcggcagtgagagccctgccgaaaacatggaaaggatgagtgactct

SEQ ID NO: 892 - DNA, 119 bp, homo sapiens
accgccaaaattgagcccagcagctggagcggcagtgagagccctgccgaaaacatggaaaggatgagtactctgcagataagccaattgacaatgatgcagaaggggtctggagcccc

SEQ ID NO: 893 - DNA, 119 bp, homo sapiens
gccgaaaacatggaaaggatgagtgactctgcagataagccaattgacaatgatgcagaaggggtctgggccccgacatcgagcaaagctttcaggaggccctggctatctatccacca

SEQ ID NO: 894 - DNA, 119 bp, homo sapiens
gacaatgatgcagaaggggtctggagccccgacatcgagcaaagctttcaggaggccctggctatctatcaccatgtgggaggaggaaaatcatcttatcagacgaaggcaaaatgtat

SEQ ID NO: 895 - DNA, 119 bp, homo sapiens
gatcagactgcaaaggataaggccctgcagcacatggcggccatgtcctcagcccagatcgtctcggccctgccattcataacaagctggggctgcctgggattccacgcccgaccttc

SEQ ID NO: 896 - DNA, 119 bp, homo sapiens
gataaggccctgcagcacatggcggccatgtcctcagcccagatcgtctcggccactgccattcataacagctggggctgcctgggattccacgcccgaccttcccaggggcgccgggg

SEQ ID NO: 897 - DNA, 119 bp, homo sapiens
ggtttgagcctgcatcggccccagctccctcagtccctgcctggcaaggtcgctccattggcacaaccagcttcgcctggtggaattttcagcttttctcgagcagcagcgagacccag

SEQ ID NO: 898 - DNA, 119 bp, homo sapiens
gagcctgcatcggccccagctccctcagtccctgcctggcaaggtcgctccattggcacaaccaagcttgcctggtggaattttcagcttttctcgagcagcagcgagacccagactcg

SEQ ID NO: 899 - DNA, 119 bp, homo sapiens
tacaacaaacacctcttcgtgcacattgggcatgccaaccattcttacagtgacccattgcttgaatcatggacattcgtcagatttatgacaaatttcctgaaaagaaaggtggctta

SEQ ID NO: 900 - DNA, 119 bp, homo sapiens
ccattgcttgaatcagtggacattcgtcagatttatgacaaatttcctgaaaagaaaggtggcttaaagaactgtttggaaagggccctcaaaatgccttcttcctcgtaaaattctgg

SEQ ID NO: 901 - DNA, 119 bp, homo sapiens
gctgatttaaactgcaatattcaagatgatgctggggctttttatggtgtaaccagtcagtacgagagtctgaaaatatgacagtcacctgttccaccaaagtttgctcctttgggaag

SEQ ID NO: 902 - DNA, 119 bp, homo sapiens
caagatgatgctggggctttttatggtgtaaccagtcagtacgagagttctgaaaatatgacagtcaccgttccaccaaagtttgctcctttgggaagcaagtagtagaaaaagtagag

SEQ ID NO: 903 - DNA, 119 bp, homo sapiens
acggagtatgcaaggtttgagaatggccgatttgtataccgaataaaccgctccccaatgtgtgaatattgatcaacttcatccacaagctcaaacacttaccagagaaatatatgatg

SEQ ID NO: 904 - DNA, 119 bp, homo sapiens
gtataccgaataaaccgctccccaatgtgtgaatatatgatcaacttcatccacaagctcaaacacttacagagaaatatatgatgaacagtgttttggaaaacttcacaattttattg

SEQ ID NO: 905 - DNA, 119 bp, homo sapiens
gtggtaacaaacagggatacacaagaaactctactctgcatggcctgtgtgtttgaagtttcaaatagtaacacggagcacaacatcatatttacaggcttgtaaaggactgaacatgg

SEQ ID NO: 906 - DNA, 119 bp, homo sapiens
tggtaacaaacagggatacacaagaaactctactctgcatggcctgtgtgtttgaagtttcaaatagtgacacggagcacaacatcatatttacaggcttgtaaaggactgaacatggt

SEQ ID NO: 907 - DNA, 119 bp, homo sapiens
ctctctctccattatcgaacgactgactgtaaacctcaccacacagggtggtgccctggccccgaggtcccccgacttttctaaatcttgtttgagtgaagtcattttttcatgtgttc

SEQ ID NO: 908 - DNA, 119 bp, homo sapiens
tggccccgaggtcaccccgacttttctaaatcttgtttgagtgaagtcattttttcatgtgttcatacttcattgtagctgtgaagttctggtacagttgtaaaaagagaaattgagtt

SEQ ID NO: 909 - DNA, 119 bp, homo sapiens
atgtgttcatactatcattgtagctgtgaagttctggtacagttgtaaaaagagaaattgagttgtttcctatgttcttcagatgtgcagcccacaattcctcgggaaaggtgaacctg

SEQ ID NO: 910 - DNA, 119 bp, homo sapiens
attgagttgtttctctatgttcttcagatgtgcagcccacaattcctcgggaaaggtgaacctgaacaaccaagtctctctctgcagagccctgtttctaattgtggtagaaaatattg

SEQ ID NO: 911 - DNA, 119 bp, homo sapiens
tgaacctgaacaacccaagtctctctctgcagagccctgtttctaattgtggtagaaaatattgagacaagcatttgccatgggacatttacagcctttatacaaatgtatttagttct

SEQ ID NO: 912 - DNA, 119 bp, homo sapiens
aaatattgagacagagcatttgccatgggacatttacagcctttatacaaatgtatttagttctctttttccaacataaaattcttgttttaagatacaagtaaaattaatctttaaat

SEQ ID NO: 913 - DNA, 119 bp, homo sapiens
ttagttctcttttttccaacataaaattcttgttttaagatacaagtaaaattaatctttaaatataaagtaaattagtacacaaaactaagaatctttagacttatctttgtaactaa

SEQ ID NO: 914 - DNA, 119 bp, homo sapiens
ctttaaatataaatgtaaattagtacacaaaactaagaatctttagacttatctttgtaactaattaggtggaagttatgaaagaatgtaattcactaaattattttttaaatgaaacc

SEQ ID NO: 915 - DNA, 119 bp, homo sapiens
gtaactaattagggtggaagttatgaaagaatgtaattcactaaattattttttaaatgaaaccttttttttctttttgaaaccaaatgttaaactatagccttaagaaatgcttggta

SEQ ID NO: 916 - DNA, 119 bp, homo sapiens
atgaaacctttttttttctttttgaaaccaaatgttaaactatagccttaagaaatgcttggtagaagttcctaatgagacaaatttgtacttttatcctcaaggttaacactaatctc

SEQ ID NO: 917 - DNA, 119 bp, homo sapiens
gcttggtagaagtgtcctaatgagacaaatttgtacttttatcctcaaggttaacactaatctcctaatcattaaactcttgaacaggtattacaaaggaagaaaacttcaccccttat

SEQ ID NO: 918 - DNA, 119 bp, homo sapiens
gtattgtactaatgtgatgatggattatttaatgaaaaagaaaaaatggctctttttgcaataagtagaacatactgaaaaaatctaaacttacaatgtttatagtcttgtgtgtgcag

SEQ ID NO: 919 - DNA, 119 bp, homo sapiens
ttgcaataagtagatacatactgaaaaaatctaaacttacaatgtttatagtcttgtgtgtgcagttatttttatatggacgaccaaattttttattaagatgagtaaatatttgaacc

SEQ ID NO: 920 - DNA, 119 bp, homo sapiens
gtgtgtgcagttatattttatatggacgaccaaattttttattaagatgagtaaatatttgaaccactgattttaataacaaaattttaaaattggcatgaatacggaatactgcactg

SEQ ID NO: 921 - DNA, 119 bp, homo sapiens
tatttgaaccactgaattttaataacaaaattttaaaattggcatgaatacggaatactgcactgtgagtgcaaagtatacagaatctgtggctgggagaaaatttcatcaaatagaca

SEQ ID NO: 922 - DNA, 119 bp, homo sapiens
tactgcactgtgagatgcaaagtatacagaatctgtggctgggagaaaatttcatcaaatagacaagtaaaggctcatcagttttagcatctctgctccccagaaaattgtaagcatcc

SEQ ID NO: 923 - DNA, 119 bp, homo sapiens
caaatagacaagtaaaaggctcatcagttttagcatctctgctccccagaaaattgtaagcatcctcacagcctgtggatacattctttatttctagtgacccaatatgcatattaacc

SEQ ID NO: 924 - DNA, 119 bp, homo sapiens
gtaagcatcctcaccagcctgtggatacattctttatttctagtgacccaatatgcatattaacctgcttaactagggctatatgtgtaggtatgtgtatacatatacacaaatgcaca

SEQ ID NO: 925 - DNA, 119 bp, homo sapiens
atgtgtctgtagacttagatacatcctcttgaagcacatccatttctttagcgtctctcagtaagttacgtacttgtttgacttaggtttaagaggcccagctacctatctctgacctt

SEQ ID NO: 926 - DNA, 119 bp, homo sapiens
ctttagcgtctctcagtaagttacagtacttgtttgacttaggtttaagaggcccagctacctatctctaccttttcaaataggctcatttgggagattcttttgccaggagagattca

SEQ ID NO: 927 - DNA, 119 bp, homo sapiens
taagaggcccagctacctatctctgaccttttcaaataggctcatttgggagattcttttgccaggagaattcaactttccaatctaagtattccagagcattgcccaggcagagttgg

SEQ ID NO: 928 - DNA, 119 bp, homo sapiens
ttgggagattcttttgccaggagagattcaactttccaatctaagtattccagagcattgcccaggcaggttggtttgatgtggccagatgttttgagttatttcccttaagtgtttca

SEQ ID NO: 929 - DNA, 119 bp, homo sapiens
tccaccaagctagaaaataaaaaacttagttctaccacatccaattaacttacacacccccttccctgttcaacacctgctttgaccctgcttttctattattacatcagtcagcatct

SEQ ID NO: 930 - DNA, 119 bp, homo sapiens
ccttccctgtctcaacacctgctttgaccctgcttttctattattacatcagtcagcatcttgtggtcctaacatgaggatgtggctggctcgtgggaaacagcaaaacactaagcctg

SEQ ID NO: 931 - DNA, 119 bp, homo sapiens
cttgtggtccctaacatgaggatgtggctggctcgtgggaaacagcaaaacactaagcctgacctctccaaattgggaagaccagaggagaaagtgcaaaactgtccccatttggaatg

SEQ ID NO: 932 - DNA, 119 bp, homo sapiens
tgacctctcccaaattgggaagaccagaggagaaagtgcaaaactgtccccatttggaatgcccattcctctagaaaccagttggacagtgctcctctgcccttcataaacagactact

SEQ ID NO: 933 - DNA, 119 bp, homo sapiens
tgcccattccttctagaaaccagttggacagtgctcctctgcccttcataaacagactactgttgggtcctgattccaggctggcctgtgaaggattgccccaggtgtcccctttcacg

SEQ ID NO: 934 - DNA, 119 bp, homo sapiens
ctgttgggtccctgattccaggctggcctgtgaaggattgccccaggtgtcccctttcacggttgtcactttacagtgacttctgttgaacacccctcttagggatgtttcttttgctc

SEQ ID NO: 935 - DNA, 119 bp, homo sapiens
cggttgtcacatttacagtgacttctgttgaacacccctcttagggatgtttcttttgctcttatttccgcatctttccttaagggaagccccatcctctcccaggaccaggagtttat

SEQ ID NO: 936 - DNA, 119 bp, homo sapiens
tcttatttcctgcatctttccttaagggaagccccatcctctcccaggaccaggagtttatgaccaggcagcacaaatggctaaaagccaagctgtcctagaacttcagtgggagagct

SEQ ID NO: 937 - DNA, 119 bp, homo sapiens
atgaccaggcgagcacaaatggctaaaagccaagctgtcctagaacttcagtgggagagctgtctggttatattctacccaggaatggtacttttcagtgcagccaggagggctcttgg

SEQ ID NO: 938 - DNA, 119 bp, homo sapiens
ctgtctggttcatattctacccaggaatggtacttttcagtgcagccaggagggctcttgggatttccttccaaagcacaaaaatactgggacccaagaagaacagctagaggacaact

SEQ ID NO: 939 - DNA, 119 bp, homo sapiens
gggatttcctttccaaagcacaaaaatactgggacccaagaagaacagctagaggacaactctgttggccagagacggggacagcccagtctgctgacctcacagggtcagctgggccc

SEQ ID NO: 940 - DNA, 119 bp, homo sapiens
ctctgttggcacagagacggggacagcccagtctgctgacctcacagggtcagctgggcccccctggtgttcaccacctgcatcctcttgctcagaatgcctttgcagttgagttttct

SEQ ID NO: 941 - DNA, 119 bp, homo sapiens
ccccctggtgcttcaccacctgcatcctcttgctcagaatgcctttgcagttgagttttctgggtttcttgattgaccttgaggtttactccttgctcttacaacatttctaaggattt

SEQ ID NO: 942 - DNA, 119 bp, homo sapiens
ctgggtttctatgattgaccttgaggtttactccttgctcttacaacatttctaaggatttttaaaagttacttcttgtcttgttcttctaaagctttctccaggacagatattttccc

SEQ ID NO: 943 - DNA, 119 bp, homo sapiens
ttttaaaagtttacttcttgtcttgttcttctaaagctttctccaggacagatattttccctgtcttaacactggtccagtcatcccagtgggcttctctttgtctctcccagattaga

SEQ ID NO: 944 - DNA, 119 bp, homo sapiens
cctgtcttaaccactggtccagtcatcccagtgggcttctctttgtctctcccagattagacctttggggagattggcatcacaacatctaatctgagtctgtcttttgtccttcattc

SEQ ID NO: 945 - DNA, 119 bp, homo sapiens
gacctttgggtgagattggcatcacaacatctaatctgagtctgtcttttgtccttcattctgtatggcgtctccctttgttataaaagctttctaaagcatactaaagaagccttccc

SEQ ID NO: 946 - DNA, 119 bp, homo sapiens
tctgtatggcagtctccctttgttataaaagctttctaaagcatactaaagaagccttcccagagcccctcttgcttctcttccaggtgctctatcccctcgagaccctctggtgccag

SEQ ID NO: 947 - DNA, 119 bp, homo sapiens
ccagagccccgtcttgcttctcttccaggtgctctatcccctcgagaccctctggtgccaggcttgcttacggccatcttgtgttgtcactgcagagtttggaggccagttttccacag

SEQ ID NO: 948 - DNA, 119 bp, homo sapiens
aggcttgcttcacggccatcttgtgttgtcactgcagagtttggaggccagttttccacagcctaaacaggaggagctgcagaatggggctctggtctctgggcattcatttccctcat

SEQ ID NO: 949 - DNA, 119 bp, homo sapiens
agcctaaacagggaggagctgcagaatggggctctggtctctgggcattcatttccctcatagaggctggaataaaacaaggacttattcacacatgttctagaaccccagaatggccc

SEQ ID NO: 950 - DNA, 119 bp, homo sapiens
tctgttgcccaagatgttacaggtcacaatgaccacatttgaaattgttttccctttcattttaccctggaaagcatctctcctagagccttgcaagaggcaggtgacattgtgtccat

SEQ ID NO: 951 - DNA, 119 bp, homo sapiens
tttcattttaccctgtgaaagcatctctcctagagccttgcaagaggcaggtgacattgtgtccatattcttcctgtttcagaacttctgtttcacaacaatttctctctcgctacaag

SEQ ID NO: 952 - DNA, 119 bp, homo sapiens
gccttacaagcaatgctgttctgtaaatttattgaaacctctggaacatttcacctttagagatggaggtggaaggattggtaccagaagagggctaagatacgttttctgtcttgagc

SEQ ID NO: 953 - DNA, 119 bp, homo sapiens
gcaatgctgttctgtaaatttattgaaacctctggaacatttcacctttagagatggaggatggaaggatggtaccagaagagggctaagatacgttttctgtcttgagctgaaagcac

SEQ ID NO: 954 - DNA, 119 bp, homo sapiens
ctgggggaggctgctgttcttaggtgctctaagcttaatccctcagaatgtgtggacaggtcagcttagagagatggggagattcaggatccccctgtgccagagcacagcctcaccgg

SEQ ID NO: 955 - DNA, 119 bp, homo sapiens
gtcagcttagaagagatggggagattcaggatccccctgtgccagagcacagcctcaccggatgctgctcccacactgaagtgtcctgtccgaccattgctatctgaggcatccacaag

SEQ ID NO: 956 - DNA, 119 bp, homo sapiens
ggatgctgcttcccacactgaagtgtcctgtccgaccattgctatctgaggcatccacaagcaggtaggaagctggcgagccattttacttcctgaggacaattccccagccacaggct

SEQ ID NO: 957 - DNA, 119 bp, homo sapiens
agcaggtaggaaagctggcgagccattttacttcctgaggacaattccccagccacaggctctgagtcaatttctatttggtaagcatcctagcagcaaagtcctgcactcagaccagc

SEQ ID NO: 958 - DNA, 119 bp, homo sapiens
ctctgagtcaaatttctatttggtaagcatcctagcagcaaagtcctgcactcagaccagccaaaaaacgcccccattccaagtacttggtgtcaaaagtccccgaacgacttttaaac

SEQ ID NO: 959 - DNA, 119 bp, homo sapiens
gccaaaaaacagcccccattccaagtacttggtgtcaaaagtccccgaacgacttttaaacccaagtctcttaaggtttcagtactgtggtggctttagcagttgtttttgtgcaacta

SEQ ID NO: 960 - DNA, 119 bp, homo sapiens
acccaagtcttcttaaggtttcagtactgtggtggctttagcagttgtttttgtgcaactataaattattaaatcatctgagatgacagtcaattttacaaaccaggtacatattaatt

SEQ ID NO: 961 - DNA, 119 bp, homo sapiens
tataaattatttaaatcatctgagatgacagtcaattttacaaaccaggtacatattaatttgtataatttgtatatgctctggtacactacctgaactaacgaagggtagaactaatt

SEQ ID NO: 962 - DNA, 119 bp, homo sapiens
tttgtataattttgtatatgctctggtacactacctgaactaacgaagggtagaactaattctgtttgtagtgttcacacctgtaacattaggaggatatgtctgcattgcttatttct

SEQ ID NO: 963 - DNA, 119 bp, homo sapiens
ttctgtttgtcagtgttcacacctgtaacattaggaggatatgtctgcattgcttatttctttatgttgtgtttctgtggcaaagccctgcacatggcatttctgaaaagccttaaatc

SEQ ID NO: 964 - DNA, 119 bp, homo sapiens
ctttatgttggtgtttctgtggcaaagccctgcacatggcatttctgaaaagccttaaatctttaagatttgcatgtagggtatgcagtgcaaaaggctgcctcagaactgtgagccct

SEQ ID NO: 965 - DNA, 119 bp, homo sapiens
tctttaagatgttgcatgtagggtatgcagtgcaaaaggctgcctcagaactgtgagcccttttgtaagtggaagcatttctcttactactgttacttttgtaggaagttttcaattca

SEQ ID NO: 966 - DNA, 119 bp, homo sapiens
cttttgtaagctggaagcatttctcttactactgttacttttgtaggaagttttcaattcagagctgccaagtgttcccgtaagcagtgccttagtaataccttagtcatgccgccagc

SEQ ID NO: 967 - DNA, 119 bp, homo sapiens
cagagctgccaaagtgttcccgtaagcagtgccttagtaataccttagtcatgccgccagccttttcttcaccaattcctaatgttcatttacgaattggcccaatattggaaacaaaa

SEQ ID NO: 968 - DNA, 119 bp, homo sapiens
gccttttcttacaccaattcctaatgttcatttacgaattggcccaatattggaaacaaaacaagcaaaattgtcttcatttttgttttgtaagcccattttttctccagttctatagg

SEQ ID NO: 969 - DNA, 119 bp, homo sapiens
aacaagcaaaaattgtcttcatttttgttttgtaagcccattttttctccagttctataggaaactgacgcttggtgtaaaatccgaaactggacacaagtcagttctttcaccacact

SEQ ID NO: 970 - DNA, 119 bp, homo sapiens
ggaaactgactgcttggtgtaaaatccgaaactggacacaagtcagttctttcaccacactcaaatgtaataccaaaacaaaaggttgcaacttcatagtttactatgaaaagcaaatt

SEQ ID NO: 971 - DNA, 119 bp, homo sapiens
ctcaaatgtatataccaaaacaaaaggttgcaacttcatagtttactatgaaaagcaaattgtacttttaatgttgccttttaaattcatgaccaaatacttagctatttgtgaatctt

SEQ ID NO: 972 - DNA, 119 bp, homo sapiens
ttgtactttttaatgttgccttttaaattcatgaccaaatacttagctatttgtgaatcttctgcactcagcatgaaagtgcctttggtttgagattccagcttagaaaagtgctgcca

SEQ ID NO: 973 - DNA, 119 bp, homo sapiens
ttctgcactctagcatgaaagtgcctttggtttgagattccagcttagaaaagtgctgccataataacgtaatttgtagagagaccaaaaatattttgagatcaccgtaatgcctttgg

SEQ ID NO: 974 - DNA, 119 bp, homo sapiens
cataataacgataatttgtagagagaccaaaaatattttgagatcaccgtaatgcctttggtttaccggatgagtaaccaaccacaggcctctgttcacaagagcacgacgtggtcccc

SEQ ID NO: 975 - DNA, 119 bp, homo sapiens
ggtttaccgggatgagtaaccaaccacaggcctctgttcacaagagcacgacgtggtccccgcctgctgtagtctgtctgccactgggggcctcccaacatccatagcacacttcagcg

SEQ ID NO: 976 - DNA, 119 bp, homo sapiens
ccgcctgctgctagtctgtctgccactgggggcctcccaacatccatagcacacttcagcggaaggacccagaaactgttgtgtttgtgtgtgctgatgacctagtgtgtcatttcacc

SEQ ID NO: 977 - DNA, 119 bp, homo sapiens
cggaaggaccccagaaactgttgtgtttgtgtgtgctgatgacctagtgtgtcatttcacctcgtcaccagccctgcgtccggatgaggggacttctgcacaaatgacagaatctcggc

SEQ ID NO: 978 - DNA, 119 bp, homo sapiens
cctcgtcacccagccctgcgtccggatgaggggacttctgcacaaatgacagaatctcggctggtggacgatactacagctttctcctcctccttgtgttcgtgttcagtctctgtgga

SEQ ID NO: 979 - DNA, 119 bp, homo sapiens
gctggtggacagatactacagctttctcctcctccttgtgttcgtgttcagtctctgtggagactttctttccattcaaatgacagtgcgcacttatctggtttacacaatgataccat

SEQ ID NO: 980 - DNA, 119 bp, homo sapiens
gagactttcttttccattcaaatgacagtgcgcacttatctggtttacacaatgataccattttgaaagtggaagcctcaaactgagacgacagtgcagaacaaaacaaaagtgagtta

SEQ ID NO: 981 - DNA, 119 bp, homo sapiens
attttgaaagttggaagcctcaaactgagacgacagtgcagaacaaaacaaaagtgagttagggtcgttaaattgaagtgttcttcttagggcaaacatgttgactccgagtattgtgt

SEQ ID NO: 982 - DNA, 119 bp, homo sapiens
tagggtcgttaaaattgaagtgttcttcttagggcaaacatgttgactccgagtattgtgtatgaatgtctacgagaaacttccaaagagcaccattcacaatttggcattttcaaaga

SEQ ID NO: 983 - DNA, 119 bp, homo sapiens
gtatgaatgtgctacgagaaacttccaaagagcaccattcacaatttggcattttcaaagaatgttccaccctcaaaggggcaactctttaaagtccttgttggcttttatccaaacct

SEQ ID NO: 984 - DNA, 119 bp, homo sapiens
gaatgttccagccctcaaaggggcaactctttaaagtccttgttggcttttatccaaaccttgtagaaatgggaaagctgatagaggtaaggaagacgagtgaaaaggacaagaaggcc

SEQ ID NO: 985 - DNA, 119 bp, homo sapiens
cttgtagaaattgggaaagctgatagaggtaaggaagacgagtgaaaaggacaagaaggccaaacaccaccaaaaagaaactaggaaaaaaagattttctttgctaatatagatgtaaa

SEQ ID NO: 986 - DNA, 119 bp, homo sapiens
ccaaacaccagccaaaaagaaactaggaaaaaaagattttctttgctaatatagatgtaaaaataacatagacatctttgaaaattagcctctaaactcttaatacatacgttctgtgt

SEQ ID NO: 987 - DNA, 119 bp, homo sapiens
aaaataacatcagacatctttgaaaattagcctctaaactcttaatacatacgttctgtgtgtctctactggcgtctttaagaatatcctctctgggctctgaaattttaggagtgatt

SEQ ID NO: 988 - DNA, 119 bp, homo sapiens
gtgtctctacctggcgtctttaagaatatcctctctgggctctgaaattttaggagtgattcttatccatccaagttgtaagtatttgtagaaatttgtgcaaacaaacaaaaactatc

SEQ ID NO: 989 - DNA, 119 bp, homo sapiens
ttcttatccactccaagttgtaagtatttgtagaaatttgtgcaaacaaacaaaaactatcaaatgaaagaaaatgtactcaacctaacttatagttagcagctggaattctcaactct

SEQ ID NO: 990 - DNA, 119 bp, homo sapiens
tcaaatgaaaagaaaatgtactcaacctaacttatagttagcagctggaattctcaactcttccctgccgcactataccacagtgtggaagaaattagtcaaatgcttgttttcctgct

SEQ ID NO: 991 - DNA, 119 bp, homo sapiens
cttccctgccagcactataccacagtgtggaagaaattagtcaaatgcttgttttcctgcttctcttttaactgttactgtgctttgtttgaaagtagttttctctctcaaagccgttg

SEQ ID NO: 992 - DNA, 119 bp, homo sapiens
cttctcttttcaactgttactgtgctttgtttgaaagtagttttctctctcaaagccgttgcttatatcttaagaatgaaggtttgtgtttaaaatttattgcattgcaaagggtagtt

SEQ ID NO: 993 - DNA, 119 bp, homo sapiens
tgcttatatcgttaagaatgaaggtttgtgtttaaaatttattgcattgcaaagggtagtttcactgaatcatgcaccattaaataagatgaaatatttgtatttattgtcctacttcc

SEQ ID NO: 994 - DNA, 119 bp, homo sapiens
tttcactgaagtcatgcaccattaaataagatgaaatatttgtatttattgtcctacttcctaagccgtacttcttttcctctgtgaatttgcattgagtcactcatgctacactacat

SEQ ID NO: 995 - DNA, 119 bp, homo sapiens
cctaagccgtaacttcttttcctctgtgaatttgcattgagtcactcatgctacactacatcgctttagatttgagatggcatttatgtttcctctcgtttatcatgaaatggggtcag

SEQ ID NO: 996 - DNA, 119 bp, homo sapiens
atcgctttagtatttgagatggcatttatgtttcctctcgtttatcatgaaatggggtcagattccatcgattccacctctgtcaggtggactcttgtctgccttccatgatgagattt

SEQ ID NO: 997 - DNA, 119 bp, homo sapiens
agattccatcagattccacctctgtcaggtggactcttgtctgccttccatgatgagattttttttctcttcccctttctttaagagaggctgacagatctaggtgtcaatcaattgga

SEQ ID NO: 998 - DNA, 119 bp, homo sapiens
tttttttctccttcccctttctttaagagaggctgacagatctaggtgtcaatcaattggaaaccagtcctgattttttttcattagttattttctatcattagtttcactgtgtaaat

SEQ ID NO: 999 - DNA, 119 bp, homo sapiens
gaaaccagtctctgattttttttcattagttattttctatcattagtttcactgtgtaaattagatatcactgcacttctttaaaaaaaaatacatctccctattacctccttgaaaga

SEQ ID NO: 1000 - DNA, 119 bp, homo sapiens
attagatatcaactgcacttctttaaaaaaaaatacatctccctattacctccttgaaagatttacttcgtaggcctttttcaataggctcatgactgcagacaaggaaaaaaaaagta

SEQ ID NO: 1001 - DNA, 119 bp, homo sapiens
gatttacttctgtaggcctttttcaataggctcatgactgcagacaaggaaaaaaaaagtaaaaacaaaacagtatgtgcctgaaaatgacaaaaaaaaaatttgtaacatttaaaaaa

SEQ ID NO: 1002 - DNA, 119 bp, homo sapiens
taaaaacaaaaacagtatgtgcctgaaaatgacaaaaaaaaaatttgtaacatttaaaaaagaaacctgatagcctttaattctttaataatacacttaaattttatgtaaatcggttt

SEQ ID NO: 1003 - DNA, 119 bp, homo sapiens
aagaaacctgaatagcctttaattctttaataatacacttaaattttatgtaaatcggttttcgccacggtgtttgttcacattctaaatgacttaatgggattctcacggtctgtgtc

SEQ ID NO: 1004 - DNA, 119 bp, homo sapiens
tttcgccacgtgtgtttgttcacattctaaatgacttaatgggattctcacggtctgtgtctttgtgtccgtgtataaaatgggcttgtgatgtaagcgtttcatctggtcagtggttc

SEQ ID NO: 1005 - DNA, 119 bp, homo sapiens
tctttgtgtcacgtgtataaaatgggcttgtgatgtaagcgtttcatctggtcagtggttcctttgatatgtactgctgctgggagtgggctgtggaacctgccttcgggtaactgggt

SEQ ID NO: 1006 - DNA, 119 bp, homo sapiens
tcctttgatattgtactgctgctgggagtgggctgtggaacctgccttcgggtaactgggttcctcttggtagattggagagatgggggtgggcgtgggcaaattctcacacatgtttt

SEQ ID NO: 1007 - DNA, 119 bp, homo sapiens
gttcctcttgggtagattggagagatgggggtgggcgtgggcaaattctcacacatgttttcttaaccttttgcagaaactttcaaaaggcatttgattaaacctcttggcagtacagt

SEQ ID NO: 1008 - DNA, 119 bp, homo sapiens
ttcttaacctatttgcagaaactttcaaaaggcatttgattaaacctcttggcagtacagtattcttgttttgttaacgtctgtgtttaggtactggtacctttttgttttaaaatgtt

SEQ ID NO: 1009 - DNA, 119 bp, homo sapiens
gtattcttgtatttgttaacgtctgtgtttaggtactggtacctttttgttttaaaatgttctaagtgtggctttaaagtgaatttatctttagtatgatagttatatgaaaattatag

SEQ ID NO: 1010 - DNA, 119 bp, homo sapiens
ttctaagtgttggctttaaagtgaatttatctttagtatgatagttatatgaaaattataggatttgtggcagagaatttttttataaagtgctttgtaaaaaaaaaaaaatgtattct

SEQ ID NO: 1011 - DNA, 119 bp, homo sapiens
aggatttgtgtgcagagaatttttttataaagtgctttgtaaaaaaaaaaaaatgtattctagcttttgggtacatatgtgtgataactttaatacccatgacagttaagtgcaattat

SEQ ID NO: 1012 - DNA, 119 bp, homo sapiens
ctagcttttgcggtacatatgtgtgataactttaatacccatgacagttaagtgcaattatttcatcacctaaaaatgctatttttgtgtcagttcctgcaggtgttttcatgtctttg

SEQ ID NO: 1013 - DNA, 119 bp, homo sapiens
atttcatcactctaaaaatgctatttttgtgtcagttcctgcaggtgttttcatgtctttgcaaagtgaacattttgatgccttcttgataaagtggtagacattttgtagctttctag

SEQ ID NO: 1014 - DNA, 119 bp, homo sapiens
taagctggaaaataaatctattttattaatgagctcagagtaaggtttggagtgacaatcctggcagcattagagcagagggcagaggagagggatggagagagagagactccagtggg

SEQ ID NO: 1015 - DNA, 119 bp, homo sapiens
gtgacaatcctggcagcaattagagcagagggcagaggagagggatggagagagagagactccagtgggtcttattagggttcaaggaaggagtcccccagagctgggagagaccaaat

SEQ ID NO: 1016 - DNA, 119 bp, homo sapiens
gagagagactccagtggggtcttattagggttcaaggaaggagtcccccagagctgggagagaccaaatcactgggccagaggaaaggaatgagagtctggatccttgagatcttctcc

SEQ ID NO: 1017 - DNA, 119 bp, homo sapiens
agctgggagagaccaaattcactgggccagaggaaaggaatgagagtctggatccttgagatcttctccaaatggctggctgctccctttcctccacgttggccttcagaagagtggcc

SEQ ID NO: 1018 - DNA, 119 bp, homo sapiens
atccttgagatcttctcccaaatggctggctgctccctttcctccacgttggccttcagaagagtggccgagctgttccttatctggccctggttcagggccaaagggagtttgagatt

SEQ ID NO: 1019 - DNA, 119 bp, homo sapiens
gccttcagaagagtggcccgagctgttccttatctggccctggttcagggccaaagggagtttgagattctgggtgatagattcaggtcccaaggatgccatctggtgtgtgtagtgtg

SEQ ID NO: 1020 - DNA, 119 bp, homo sapiens
caaagggagtttgagattcctgggtgatagattcaggtcccaaggatgccatctggtgtgtgtagtgtgcctctctcaaggctgatccgaggctttgtgttcacgaggtggggccggag

SEQ ID NO: 1021 - DNA, 119 bp, homo sapiens
tctggtgtgtgtagtgtggcctctctcaaggctgatccgaggctttgtgttcacgaggtggggccggagtcactgtttcctaacggtgaatttggtttccccttttggacttcagaaga

SEQ ID NO: 1022 - DNA, 119 bp, homo sapiens
ctttggggtgggtgggaagctctgttcagggacaggggagttagtgggcttcccactgtggttctttgctcccagtcctccactggattgcctgtgtccccagtgcggaagggatggtt

SEQ ID NO: 1023 - DNA, 119 bp, homo sapiens
cccactgtggttctttgcctcccagtcctccactggattgcctgtgtccccagtgcggaagggatggttctcagtgcttcttccagcgccgagggcagtgggcgggtgggagtgaggtc

SEQ ID NO: 1024 - DNA, 119 bp, homo sapiens
agtgcggaagggatggttgctcagtgcttcttccagcgccgagggcagtgggcgggtgggagtgaggtctgggtgggaacggatggcgggggagggatgggaatggggggtggagtgcg

SEQ ID NO: 1025 - DNA, 119 bp, homo sapiens
gcgggtgggagtgaggtcttgggtgggaacggatggcgggggagggatgggaatggggggtggagtgcgtgcacccatggagaggatgaggcgctcacatggccagataagggaaggac

SEQ ID NO: 1026 - DNA, 119 bp, homo sapiens
aatggggggtggagtgcgctgcacccatggagaggatgaggcgctcacatggccagataagggaaggacgggggcgccgggaccttgtggggtgggttggagggtggagggtggggcat

SEQ ID NO: 1027 - DNA, 119 bp, homo sapiens
gccagataagggaaggacagggggcgccgggaccttgtggggtgggttggagggtggagggtggggcatacaggcaaggcagagggagtcttggggggatagtagaacatgtccaaagg

SEQ ID NO: 1028 - DNA, 119 bp, homo sapiens
gggtggagggtggggcatcacaggcaaggcagagggagtcttggggggatagtagaacatgtccaaaggatgtcgtccaggtcagtggtgtgcaggtgcagtccgcctgcgaagcgtct

SEQ ID NO: 1029 - DNA, 119 bp, homo sapiens
gtagaacatgtccaaagggatgtcgtccaggtcagtggtgtgcaggtgcagtccgcctgcgaagcgtctaagggtggggccaggggagacacagaaggcgggggaggcgggggccctgt

SEQ ID NO: 1030 - DNA, 119 bp, homo sapiens
ctcctgggccagccggttgatctttagctgcttttccttctccagcatttcctctttctctttgtaaagttttgctcaaactccagttctttcttattctttctcaagtcctgcaggct

SEQ ID NO: 1031 - DNA, 119 bp, homo sapiens
ttccttctccagcatttcctctttctctttgtaaagcttttgctcaaactccagttctttcttattcttctcaagtcctgcaggctgccatacttggctttcttcttatcttttccttt

SEQ ID NO: 1032 - DNA, 119 bp, homo sapiens
actttggcttgcgaaggggtactgggtgtacctcagcagtgatggttttaggcaagagtagctgttccttgagccccagtcttcttcccattgcttcttaaacttctcttcctcctcta

SEQ ID NO: 1033 - DNA, 119 bp, homo sapiens
ggcttgcgaaggggtactgggtgtacctcagcagtgatggttttaggcaagagtagctgttcctttgagcccagtcttcttcccattgcttcttaaacttctcttcctcctctacaatc

SEQ ID NO: 1034 - DNA, 119 bp, homo sapiens
tgccgctccatctcctgctgctcctggaggatcttgttggactccatcgccagccgcttctgcatgagagctcctgccgctgcagctcacgctgccgcgcctctgccagccgctcccgg

SEQ ID NO: 1035 - DNA, 119 bp, homo sapiens
ctggaggatcttgttggactccatcgccagccgcttctgcatgagaagctcctgccgctgcagctcacgtgccgcgcctctgccagccgctcccggtctgtcatgaacagctcccggcc

SEQ ID NO: 1036 - DNA, 119 bp, homo sapiens
ctggagcccgacgctgtctgcctgaccgcctttgatgaggtgggagatgaagagcccacagccaaactcaggccaccacgcacactcaggccgaggccttcggggtgcagacggtccag

SEQ ID NO: 1037 - DNA, 119 bp, homo sapiens
gcctgaccgcctttgatgaggtgggagatgaagagcccacagccaaactccaggccaccacgcacactcggccgaggccttcggggtgcagacggtccagacgcacctccttcagcttc

SEQ ID NO: 1038 - DNA, 119 bp, homo sapiens
ctggagcgccggggggtcagctgatcatattccacctggtgcttcagtgggatcagcggccgaatggcacaaacagaggcagacggctgggttcattgatgaccagcttcaggtctccc

SEQ ID NO: 1039 - DNA, 119 bp, homo sapiens
tcatattccacctggtgcttcagtgggatcagcggccgaatggcatcaaacagaggcagacggctgggtcattgatgaccagcttcaggtctcccacgagcacggccacgtccatggtc

SEQ ID NO: 1040 - DNA, 119 bp, homo sapiens
cttatgccggaattctcgggccacttttcggtccatggctgggccaggtccagctgcgtcgttgcacgaccgttccttcgggtgcccggctgccaggagctggaaagagccgcgaccgc

SEQ ID NO: 1041 - DNA, 119 bp, homo sapiens
tttcggtccatggctgggccaggtccagctgcgtcgttgcacgacccgttccttcgggtgcccggctgcaggagctggaaagagccgcgaccgcgaccgggccagccgccctcggagct

SEQ ID NO: 1042 - DNA, 119 bp, homo sapiens
taagggagaaaagccttttactctcaaccgaggatgcagggcttaaagtgccacttgcgtgggagccagctcactgttcaccaggctctgtcacagggaggctggcaacgccatggcct

SEQ ID NO: 1043 - DNA, 119 bp, homo sapiens
gtgggagccaggctcactgttcaccaggctctgtcacagggaggctggcaacgccatggcctggggctgcagagccacagggccctgcggagaaggggcagacggagggccccagccag

SEQ ID NO: 1044 - DNA, 119 bp, homo sapiens
gcctggggctgccagagccacagggccctgcggagaaggggcagacggagggccccagccagaagacacctgggcagcgttcagccatcacccgggttcaggcttcctgtcctcaccag

SEQ ID NO: 1045 - DNA, 119 bp, homo sapiens
ccagaagacacgctgggcagcgttcagccatcacccgggttcaggcttcctgtcctcaccaggggccaggagagagcagcagtgttcgctcctatggctgccgaggcgagcagcttccc

SEQ ID NO: 1046 - DNA, 119 bp, homo sapiens
ccaggggccagcgagagagcagcagtgttcgctcctatggctgccgaggcgagcagcttcccgggctcctgaggtgaagtcaccgctttctgtgggagaggagcctggatcccactcct

SEQ ID NO: 1047 - DNA, 119 bp, homo sapiens
tcccgggctccatgaggtgaagtcaccgctttctgtgggagaggagcctggatcccactcctagtgaagcttcttggcccagcagtgacaaggtgcgggctgcagtggcatcgtcacag

SEQ ID NO: 1048 - DNA, 119 bp, homo sapiens
tcctagtgaaggcttcttggcccagcagtgacaaggtgcgggctgcagtggcatcgtcacaggagagcgagtcaagggtgtcctgggaggaacgctggtggcgaccagggctgtgtgtg

SEQ ID NO: 1049 - DNA, 119 bp, homo sapiens
acaggagagcgcagtcaagggtgtcctgggaggaacgctggtggcgaccagggctgtgtgtggggcctgccggtaggcacggagaggccgcacgctgggacgctgccggagtcagtttt

SEQ ID NO: 1050 - DNA, 119 bp, homo sapiens
tgtggggcctggccggtaggcacggagaggccgcacgctgggacgctgccggagtcagttttattagggagaggggctccctgccccacccctccccacaccctccttccgggaggtct

SEQ ID NO: 1051 - DNA, 119 bp, homo sapiens
ttttattagggaagaggggctccctgccccacccctccccacaccctccttccgggaggtctgtcagcccaactgtagaagtagattttctgccaggtgggcaagtaatccatgagcgg

SEQ ID NO: 1052 - DNA, 119 bp, homo sapiens
agtgcagcagcggccgggcaatgtacaaaaactctgcgatggtctcctgcagccccaggggggtgggggcgcactcagctcctcgtgatgctgctgctgccgtccctcccgctgctggg

SEQ ID NO: 1053 - DNA, 119 bp, homo sapiens
ctgcgatggtctcctgcagccccaggggggtgggggtcgcactcagctcctcgtgatgctgctgctgcctccctcccgctgctggggagctccccagtgcctggagtgcagggacggcg

SEQ ID NO: 1054 - DNA, 119 bp, homo sapiens
ttggccagctggacgagggcgatgacaagccagcggcccacttcaccccacaccttggcagctcccatcccatgaacacctccacgcactccagcacgctcagccatgtcagcagcttc

SEQ ID NO: 1055 - DNA, 119 bp, homo sapiens
gagggcgatgacaagccagcggcccacttcaccccacaccttggcagctcccatctccatgaacacctcacgcactccagcacgctcagccatgtcagcagcttctgctgggacagcga

SEQ ID NO: 1056 - DNA, 119 bp, homo sapiens
ctgccagcaggtaactgaagccccgcactgctgtctccagctgggccgtggcggccgggtgacgagtcagtactcctggtagcggaggcccaggagccgcagcttctccatcctgccct

SEQ ID NO: 1057 - DNA, 119 bp, homo sapiens
gcggccgggtgacgagtcacgtactcctggtagcggaggcccaggagccgcagcttctccatcctgccccggcaccgacagacccacagaaggaccgtacgacaggctgcggcgccctg

SEQ ID NO: 1058 - DNA, 119 bp, homo sapiens
cagcttctccatcctgccctcggcaccgacagacccacagaaggaccgtacgacaggctgcggcgccctcttcctgcgccctccttcctgcttccggtcttaggcccgcctcttggttg

SEQ ID NO: 1059 - DNA, 119 bp, homo sapiens
cgacaggctgcggcgccctgcttcctgcgccctccttcctgcttccggtcttaggcccgcctcttggttcttaacttccgcgggccagaaggctgaggacttgaagaaccggtgaacca

SEQ ID NO: 1060 - DNA, 119 bp, homo sapiens
ttaggcccgcctcttggttgcttaacttccgcgggccagaaggctgaggacttgaagaaccggtgaacccccttcaccccatctcttgaaccgcttcccactcgggtagcccttagcaa

SEQ ID NO: 1061 - DNA, 119 bp, homo sapiens
cttgaagaaccggtgaaccacccttcaccccatctcttgaaccgcttcccactcgggtagcccttagcactgagggcccaaacccggccccctactccctcaagtcattggttagcacg

SEQ ID NO: 1062 - DNA, 119 bp, homo sapiens
actcgggtagcccttagcaactgagggcccaaacccggccccctactccctcaagtcattggttagcacctctccgcccctgacccgcccagcgccgtcagcacccagctcttccgttt

SEQ ID NO: 1063 - DNA, 119 bp, homo sapiens
cacagggctgtcaaagaccccagggcctagtcagaggctcctccttcctggagagttcctggcacagaattgaagctcagcacagccccctaacccccaactctctctgcaaggcctca

SEQ ID NO: 1064 - DNA, 119 bp, homo sapiens
agagttcctggcacagaagttgaagctcagcacagccccctaacccccaactctctctgcaaggcctcagggtcagaacactggtggagcagatcctttagcctctggattttagggcc

SEQ ID NO: 1065 - DNA, 119 bp, homo sapiens
tctctctgcaaggcctcaggggtcagaacactggtggagcagatcctttagcctctggattttagggcctggtagagggggtgttgccctaaattccagccctggtctcagcccaacac

SEQ ID NO: 1066 - DNA, 119 bp, homo sapiens
cctctggattttagggccatggtagagggggtgttgccctaaattccagccctggtctcagcccaacacctccaagaagaaattagaggggccatggccaggctgtgctagccgttgct

SEQ ID NO: 1067 - DNA, 119 bp, homo sapiens
ctggtctcagcccaacaccctccaagaagaaattagaggggccatggccaggctgtgctagccgttgctctgagcagattacaagaagggactaagacaaggactcctttgtggaggtc

SEQ ID NO: 1068 - DNA, 119 bp, homo sapiens
gctgtgctagccgttgcttctgagcagattacaagaagggactaagacaaggactcctttgtggaggtctggcttagggagtcaagtgacggcggctcagcactcacgtgggcagtgcc

SEQ ID NO: 1069 - DNA, 119 bp, homo sapiens
gactcctttgtggaggtcctggcttagggagtcaagtgacggcggctcagcactcacgtgggcagtgccgcctctaagagtgggcaggggcactggccacagagtcccagggagtccca

SEQ ID NO: 1070 - DNA, 119 bp, homo sapiens
actcacgtgggcagtgccagcctctaagagtgggcaggggcactggccacagagtcccagggagtcccacagcctagtcgccagaccttctgtgggatcatcggacccacctggaaccc

SEQ ID NO: 1071 - DNA, 119 bp, homo sapiens
gacccaagcccacctgctgcagcccactgcctggccatgaccatcacttacacaagccaagtggctaatcccgcttaggctccttctcccgcctgctgctgtgctggcggggcagcatc

SEQ ID NO: 1072 - DNA, 119 bp, homo sapiens
ccatgaccatcacttacacaagccaagtggctaatgcccgcttaggctccttctcccgcctgctgctgtctggcggggcagcatctacaagctgctatatggcgagttcttaatcttcc

SEQ ID NO: 1073 - DNA, 119 bp, homo sapiens
tgcccgcttaggctccttctcccgcctgctgctgtgctggcggggcagcatctacaagctgctatatgggagttcttaatcttcctgctctgctactacatcatccgctttatttatag

SEQ ID NO: 1074 - DNA, 119 bp, homo sapiens
gcttctacgtgacgctggtcgtgacccgctggtggaaccagtacgagaacctgccgtggcccgaccgcccatgagcctggtgtcgggcttcgtcgaaggcaaggacgagcaaggccggc

SEQ ID NO: 1075 - DNA, 119 bp, homo sapiens
ggcccgaccgcctcatgagcctggtgtcgggcttcgtcgaaggcaaggacgagcaaggccggctgctgcgcgcacgctcatccgctacgccaacctgggcaacgtgctcatcctgcgca

SEQ ID NO: 1076 - DNA, 119 bp, homo sapiens
gccggctgctgcggcgcacgctcatccgctacgccaacctgggcaacgtgctcatcctgcgcagcgtcacaccgcagtctacaagcgcttccccagcgcccagcacctggtgcaagcag

SEQ ID NO: 1077 - DNA, 119 bp, homo sapiens
gctttatgactccggcagaacacaagcagttggagaaactgagcctaccacacaacatgttctgggtgcctgggtgtggtttgccaacctgtcaatgaaggcgtggcttggaggtcgaa

SEQ ID NO: 1078 - DNA, 119 bp, homo sapiens
aaactgagcctaccacacaacatgttctgggtgccctgggtgtggtttgccaacctgtcaatgaaggcgggcttggaggtcgaatccgggaccctatcctgctccagagcctgctgaac

SEQ ID NO: 1079 - DNA, 119 bp, homo sapiens
gtggtgactgtggcggtgtacagcttcttcctgacttgtctagttgggcggcagtttctgaacccagccaggcctaccctggccatgagctggacctcgttgtgcccgtcttcacgttc

SEQ ID NO: 1080 - DNA, 119 bp, homo sapiens
acttgtctagttgggcggcagtttctgaacccagccaaggcctaccctggccatgagctggacctcgtttgcccgtcttcacgttcctgcagttcttcttctatgttggctggctgaag

SEQ ID NO: 1081 - DNA, 119 bp, homo sapiens
gtgtccctgttggctgtggatgagatgcaccaggacctgcctcggatggagccggacatgtactggaatagcccgagccacagcccccctacacagctgcttccgcccagttccgtcga

SEQ ID NO: 1082 - DNA, 119 bp, homo sapiens
ggacctgcctcggatggagccggacatgtactggaataagcccgagccacagcccccctacacagctgctccgcccagttccgtcgagcctcctttatgggctccaccttcaacatcag

SEQ ID NO: 1083 - DNA, 119 bp, homo sapiens
cctgaacaaagaggagatggagttccagcccaatcaggaggacgaggaggatgctcacgctggcatcatggccgcttcctaggcctgcagtcccatgatcaccatcctcccagggcaaa

SEQ ID NO: 1084 - DNA, 119 bp, homo sapiens
gctggcatcattggccgcttcctaggcctgcagtcccatgatcaccatcctcccagggcaaactcaaggccaaactactgtggcccaagagggaatcccttctccacgagggcctgccc

SEQ ID NO: 1085 - DNA, 119 bp, homo sapiens
caaactcaaggaccaaactactgtggcccaagagggaatcccttctccacgagggcctgcccaaaaacccaaggcagccaaacagaacgttaggggccaggaagacaacaaggcctgga

SEQ ID NO: 1086 - DNA, 119 bp, homo sapiens
gcccaaaaaccacaaggcagccaaacagaacgttaggggccaggaagacaacaaggcctggaagcttaagctgtggacgccttcaagtctgccccactgtatcagaggccaggctacta

SEQ ID NO: 1087 - DNA, 119 bp, homo sapiens
tggaagcttaaggctgtggacgccttcaagtctgccccactgtatcagaggccaggctactacagtgcccacagacgcccctcagccccactcccatgttcttccccctagaaccatca

SEQ ID NO: 1088 - DNA, 119 bp, homo sapiens
actacagtgccccacagacgcccctcagccccactcccatgttcttccccctagaaccatcagcgccgtaaagcttcacagtgtcacaggcatagacaccaaagacaaaagcttaaaga

SEQ ID NO: 1089 - DNA, 119 bp, homo sapiens
atcagcgccgtcaaagcttcacagtgtcacaggcatagacaccaaagacaaaagcttaaagactgtgagtctggggccaagaaaagttttgaattgctctcagagagcgatggggcctt

SEQ ID NO: 1090 - DNA, 119 bp, homo sapiens
aagactgtgagttctggggccaagaaaagttttgaattgctctcagagagcgatggggccttgatggagacccagaagtatctcaagtgaggaggaaaactgtggagtttaacctgacg

SEQ ID NO: 1091 - DNA, 119 bp, homo sapiens
ccttgatggagcacccagaagtatctcaagtgaggaggaaaactgtggagtttaacctgacggatatgcagagatccccgaaaatcacctcaaagaacctttggaacaatcaccaacca

SEQ ID NO: 1092 - DNA, 119 bp, homo sapiens
gacggatatgccagagatccccgaaaatcacctcaaagaacctttggaacaatcaccaaccaacatacaactacactcaaagatcacatggatccttattgggccttggaaaacaggtc

SEQ ID NO: 1093 - DNA, 119 bp, homo sapiens
accaacatacacactacactcaaagatcacatggatccttattgggccttggaaaacaggtctgtcctcacctgaaccaggggcactgcattgccctgtgccccaccccagcttccctt

SEQ ID NO: 1094 - DNA, 119 bp, homo sapiens
ggtctgtcctccacctgaaccaggggcactgcattgccctgtgccccaccccagcttcccttgctctgacctacccttcctccacaatttcctagggttccatcactgccagagcacac

SEQ ID NO: 1095 - DNA, 119 bp, homo sapiens
ccttgctctgagcctacccttcctccacaatttcctagggttccatcactgccagagcacactggacctcgcccagcactggcttggggtatatacttggccaccttcacagggatcct

SEQ ID NO: 1096 - DNA, 119 bp, homo sapiens
acactggacctacgcccagcactggcttggggtatatacttggccaccttcacagggatcctagggaaggttcgggaccttttctcacttcaccctggtatcacccggaagacttcttg

SEQ ID NO: 1097 - DNA, 119 bp, homo sapiens
tcctagggaagtgttcgggaccttttctcacttcaccctggtatcacccggaagacttcttgggaccagtgaaggaagatgaggttgtgctgaccagaatgctgctggagaactgcccc

SEQ ID NO: 1098 - DNA, 119 bp, homo sapiens
cttgggaccaggtgaaggaagatgaggttgtgctgaccagaatgctgctggagaactgccccagggctgcaggccaggcttagctgagcagatgttatcactggccccaacttactttg

SEQ ID NO: 1099 - DNA, 119 bp, homo sapiens
ccccagggctgacaggccaggcttagctgagcagatgttatcactggccccaacttactttgagcaaggtggctgacccaaaaccatgaggtggcagtcagctggatgacagatgaaca

SEQ ID NO: 1100 - DNA, 119 bp, homo sapiens
tttgagcaagggtggctgacccaaaaccatgaggtggcagtcagctggatgacagatgaacacttccccataactatttagggtagtacccaagcactacaggaaagggtggcaggaac

SEQ ID NO: 1101 - DNA, 119 bp, homo sapiens
aacacttcccccataactatttagggtagtacccaagcactacaggaaagggtggcaggaactgcctcatcctaggaactggtagatggtgaggttgagggtgtccagcgcccttaggt

SEQ ID NO: 1102 - DNA, 119 bp, homo sapiens
gaactgcctcactcctaggaactggtagatggtgaggttgagggtgtccagcgcccttaggtcattttccactgcctgggaacctcaccaaaatacttcttgcttccttggggtcagcc

SEQ ID NO: 1103 - DNA, 119 bp, homo sapiens
aggtcattttctcactgcctgggaacctcaccaaaatacttcttgcttccttggggtcagcccaaagcttcacaaaatcagatatttccctttattccagatttcctggacactttcac

SEQ ID NO: 1104 - DNA, 119 bp, homo sapiens
agcccaaagctgtcacaaaatcagatatttccctttattccagatttcctggacactttcacccaattaaaacaccccacttcagccccaatcacgtgggaggaagtgtaacttccctt

SEQ ID NO: 1105 - DNA, 119 bp, homo sapiens
ggatgaagcacattcctaacctgcttcctaatggggatgcttcgccagccaggtcctcacctgtgtgtaaccagcaggacactgatccagtcacagccatacagctgtccacactgaag

SEQ ID NO: 1106 - DNA, 119 bp, homo sapiens
ctgtgtgtacaccagcaggacactgatccagtcacagccatacagctgtccacactgaagaacatgtccacaacagcctgaatcaaatggttagcttaatagataaaaatcccagacta

SEQ ID NO: 1107 - DNA, 119 bp, homo sapiens
aacatgtcctacaacagcctgaatcaaatggttagcttaatagataaaaatcccagactacttcagccttaatgccttttattcataaaaactgtgaaagctagactgaaccattggaa

SEQ ID NO: 1108 - DNA, 119 bp, homo sapiens
cttcagcctttaatgccttttattcataaaaactgtgaaagctagactgaaccattggaaacatttaaccagactctggattcagagtcgggaacccttagttctatctgaatccaaga

SEQ ID NO: 1109 - DNA, 119 bp, homo sapiens
acatttaactcagactctggattcagagtcgggaacccttagttctatctgaatccaagacagccacacttagtatactgcccaaactaatgagtttaataaatacaaatactcgtttc

SEQ ID NO: 1110 - DNA, 119 bp, homo sapiens
ttggtaacccctccctgtccgggcctcgccgctcagtacgggggcggggctagccggctgaccccctggctactcccggcctccggctccaggcccttcccggatccccgcccccggat

SEQ ID NO: 1111 - DNA, 119 bp, homo sapiens
tgaccccctggcctactcccggcctccggctccaggcccttcccggatccccgcccccggattcccagggacggggaagggagcgcccgccccgatatctccgccccccagcccctaac

SEQ ID NO: 1112 - DNA, 119 bp, homo sapiens
ggattcccaggggacggggaagggagcgcccgccccgatatctccgccccccagcccctaacccctcaggttgagcggaccaaccccaccacttccgcgaggggcaggggcggggtcac

SEQ ID NO: 1113 - DNA, 119 bp, homo sapiens
taacccctcagggttgagcggaccaaccccaccacttccgcgaggggcaggggcggggtcacaaaacggccctcggcctaggggcggagtttctcgtaaggggcaaggccaaggcatct

SEQ ID NO: 1114 - DNA, 119 bp, homo sapiens
tcacaaaacgggccctcggcctaggggcggagtttctcgtaaggggcaaggccaaggcatcttgtattgggctgacaggggggcgggttattagggctgaggatgggaggatgctcagg

SEQ ID NO: 1115 - DNA, 119 bp, homo sapiens
atcttgtattggggctgacaggggggcgggttattagggctgaggatgggaggatgctcagggtattgggtcagggtggcattagcccagctcaagccgggccgggctgactcagcatc

SEQ ID NO: 1116 - DNA, 119 bp, homo sapiens
cagggtattggggtcagggtggcattagcccagctcaagccgggccgggctgactcagcatcctgccccgccagcttccatccctgacacctctgcattcccttgggcagagatgggag

SEQ ID NO: 1117 - DNA, 119 bp, homo sapiens
catcctgccccagccagcttccatccctgacacctctgcattcccttgggcagagatgggagatggcgcggtgttgcccctggtgctgcccctgcagccccgcatccgcctggcacaag

SEQ ID NO: 1118 - DNA, 119 bp, homo sapiens
ggagatggcgccggtgttgcccctggtgctgcccctgcagccccgcatccgcctggcacaagggctctgctcctctcctggctgctggcgctggctggtggcgtcatcctcctctgtag

SEQ ID NO: 1119 - DNA, 119 bp, homo sapiens
caagggctctggctcctctcctggctgctggcgctggctggtggcgtcatcctcctctgtagtgggcactcctggtccagctaaggcaccttggcaccttcctggctccctcctgtcag

SEQ ID NO: 1120 - DNA, 119 bp, homo sapiens
gtagtgggcacctcctggtccagctaaggcaccttggcaccttcctggctccctcctgtcagttccctgcctgccccaggctgccctggcagcgggcgcggtggctctgggcacaggac

SEQ ID NO: 1121 - DNA, 119 bp, homo sapiens
tcagttccctgtcctgccccaggctgccctggcagcgggcgcggtggctctgggcacaggactagtggggtaggagccagccgggcaagtctgaatgcagctctataccctccctggcg

SEQ ID NO: 1122 - DNA, 119 bp, homo sapiens
ggactagtgggtgtaggagccagccgggcaagtctgaatgcagctctataccctccctggcgaggggtctgggcccgctgctggtggctggcacggctggtgggggggggctcctggtc

SEQ ID NO: 1123 - DNA, 119 bp, homo sapiens
ggcgaggggtcctgggcccgctgctggtggctggcacggctggtgggggggggctcctggtcgtcggcccgggctagccctggctttgcctgggagtctggatgaggcgctggaggagg

SEQ ID NO: 1124 - DNA, 119 bp, homo sapiens
ggtcgtcggcctcgggctagccctggctttgcctgggagtctggatgaggcgctggaggagggcctggtactgccttggctcactacaaggacacagaggtgcctgggcactgtcaggc

SEQ ID NO: 1125 - DNA, 119 bp, homo sapiens
gagggcctggtgactgccttggctcactacaaggacacagaggtgcctgggcactgtcaggccaaaaggtggtggatgagctgcaactgaggtaccactgctgcgggcgccacgggtac

SEQ ID NO: 1126 - DNA, 119 bp, homo sapiens
aggccaaaaggctggtggatgagctgcaactgaggtaccactgctgcgggcgccacgggtacaaggattgtttggggtccagtgggtcagcagccgttacctggatcccggtgaccggg

SEQ ID NO: 1127 - DNA, 119 bp, homo sapiens
ccggatccagagcaatgtagaaggcctatacctgactgatggggtccctttctcctgttgcaacccccatcaccccggccttgcctgcaaaaccgtctttcagactcctacgcccaccc

SEQ ID NO: 1128 - DNA, 119 bp, homo sapiens
ggtccctttctcctgttgcaacccccactcaccccggccttgcctgcaaaaccgtctttcagactcctagcccaccccctgttcgatccccgacaacccaaccaaaacctctgggccca

SEQ ID NO: 1129 - DNA, 119 bp, homo sapiens
cctgcaaaaccgtctttcagactcctacgcccaccccctgttcgatccccgacaacccaaccaaaaccttgggcccaagggtgccatgaggtgctgctggagcacttgcaggacttggc

SEQ ID NO: 1130 - DNA, 119 bp, homo sapiens
cgatccccgacaacccaaccaaaacctctgggcccaagggtgccatgaggtgctgctggagcacttgcagacttggcaggcacactgggtagcatgctggctgtcaccttcctactgca

SEQ ID NO: 1131 - DNA, 119 bp, homo sapiens
gctctggtgctccttggcctgcggtacctgcaaacagcactggaggggcttggaggggtcattgatgcggaggagagacccagggctatctctttcccagtgggctgaaagatatgctg

SEQ ID NO: 1132 - DNA, 119 bp, homo sapiens
ggggtcattgatgcgggaggagagacccagggctatctctttcccagtgggctgaaagatatgctgaaacagcatggctacagggaggggttgcctgcaggccagcacctgaggaggcc

SEQ ID NO: 1133 - DNA, 119 bp, homo sapiens
aaagatatgctgaaaacagcatggctacagggaggggttgcctgcaggccagcacctgaggaggccccacaggagaagcacctcccaaggaggatctatctgaggcctagaggcctgga

SEQ ID NO: 1134 - DNA, 119 bp, homo sapiens
cctgaggaggccccaccaggagaagcacctcccaaggaggatctatctgaggcctagaggcctggagctggggtgaggaagagggagggatggacaagtctgaaaacctcacaactcct

SEQ ID NO: 1135 - DNA, 119 bp, homo sapiens
tagaggcctggagcttggggtgaggaagagggagggatggacaagtctgaaaacctcacaactccttacaaggctccaggttggggggatcgtaggattagaggggctaaggatagtca

SEQ ID NO: 1136 - DNA, 119 bp, homo sapiens
ctcacaactccttaccaaggctccaggttggggggatcgtaggattagaggggctaaggatagtcagcggctggactggggtaagaaagaaaaccagatgtcctagggcctagcccttg

SEQ ID NO: 1137 - DNA, 119 bp, homo sapiens
taaggatagtcagcgagctggactggggtaagaaagaaaaccagatgtcctagggcctagcccttgtagcagaaccaccagggaacagcaaagaacagagtgatgggaaagtgacatga

SEQ ID NO: 1138 - DNA, 119 bp, homo sapiens
gcctagcccttgtagtcagaaccaccagggaacagcaaagaacagagtgatgggaaagtgacatgagaagcctggaggctgattctgatatagactcaataaagtttttggatggaagc

SEQ ID NO: 1139 - DNA, 119 bp, homo sapiens
ctggtggtaggggaccttggccctggtgggcagcagccccgcctgaaggtgctcaaaggaccactggtgtgaccgaaagcccgctacctgctctgccagctgctgctgccaccttcctc

SEQ ID NO: 1140 - DNA, 119 bp, homo sapiens
ctcaaaggaccactggtgatgaccgaaagcccgctacctgctctgccagctgctgctgccaccttcctctggagcaacatgagccccggaccccagctctggcacttgcttcaggccct

SEQ ID NO: 1141 - DNA, 119 bp, homo sapiens
gctgctgccaccttcctcatggagcaacatgagccccggaccccagctctggcacttgcttcaggccctgtgtctatgtgtataagaatctcagaccctacttcaagttcagcctgccc

SEQ ID NO: 1142 - DNA, 119 bp, homo sapiens
gcacttgcttcaggcccttgtgtctatgtgtataagaatctcagaccctacttcaagttcagcctgcccaattgcctccaaatcctctggaacaagacctttggaaccaggccaaagag

SEQ ID NO: 1143 - DNA, 119 bp, homo sapiens
acagtcatcaccaccatgaccaccttgaagaagaacctggctgacgaggatgctgtgtcttgcctggtgtgggcaccgagaacaaggagctcctggtgcttgaccccgaggccttcacc

SEQ ID NO: 1144 - DNA, 119 bp, homo sapiens
accatgaccaccttgaagaagaacctggctgacgaggatgctgtgtcttgcctggtgctgggcaccgagacaaggagctcctggtgcttgaccccgaggccttcaccattttagccaag

SEQ ID NO: 1145 - DNA, 119 bp, homo sapiens
gggaagaagctgtggacagtgcagatgcccgcagccatcctgaccatgaacctcctggagcagcattccggggcctgcaggccgtcatggctgggctggccaatggagaggtccgcatt

SEQ ID NO: 1146 - DNA, 119 bp, homo sapiens
ctgaccatgaacctcctggagcagcattcccggggcctgcaggccgtcatggctgggctggccaatggaaggtccgcatttatcgtgacaaggccctgctcaatgtcatccacaccccg

SEQ ID NO: 1147 - DNA, 119 bp, homo sapiens
gtggtggcctgatcatcaagatcctgaagcgtacagcagtgtttgtagagggaggaagtgaggtgggtccccaccagcccaggccatgaaactcaatgtgccccgaaagacccggcttt

SEQ ID NO: 1148 - DNA, 119 bp, homo sapiens
tgtttgtagagggaggaagtgaggtgggtcccccaccagcccaggccatgaaactcaatgtgccccgaagacccggctttacgtggatcagacactgcgagagcgggaggctggcaccg

SEQ ID NO: 1149 - DNA, 119 bp, homo sapiens
ccatgcaccgggccttccagacagacctatacctgctgcgcctacgtgctgcccgcgcctacctgcaggcctcgagtccagcctgagccccctgtccacgacagcccgagagccactca

SEQ ID NO: 1150 - DNA, 119 bp, homo sapiens
ttccagacagacctatacctgctgcgcctacgtgctgcccgcgcctacctgcaggccctcgagtccagctgagccccctgtccacgacagcccgagagccactcaagctgcacgccgtg

SEQ ID NO: 1151 - DNA, 119 bp, homo sapiens
gttcagggccttggccccacctttaagctcacacttcacctgcagaacacctcaacaacccgtcctgtctggggctgctggtctgcttcctgtacaacgaggcgctctattccctgccc

SEQ ID NO: 1152 - DNA, 119 bp, homo sapiens
cccacctttaagctcacacttcacctgcagaacacctcaacaacccgtcctgtcctggggctgctggtcgcttcctgtacaacgaggcgctctattccctgccccgggccttcttcaag

SEQ ID NO: 1153 - DNA, 119 bp, homo sapiens
gtgctggtgcttcgagaaggccaaagtgcacccctgctgagtgcccacgtcaacatgcctgggagcgagggctggcggccgcctgagacctgagctgctgtgaaagcccctgcacaatc

SEQ ID NO: 1154 - DNA, 119 bp, homo sapiens
tgggagcgaggggctggcggccgcctgagacctgagctgctgtgaaagcccctgcacaatcagccaggggaactgggcgggtttagtggccccaggcccactcctcatgcagcagtgtg

SEQ ID NO: 1155 - DNA, 119 bp, homo sapiens
tcagccagggagaactgggcgggtttagtggccccaggcccactcctcatgcagcagtgtgctggggcgcagctcgtctcccctctcttaagcacccgcttcctcaccacccccactgt

SEQ ID NO: 1156 - DNA, 119 bp, homo sapiens
tgctggggcgacagctcgtctcccctctcttaagcacccgcttcctcaccacccccactgttgggcctaagtagcaggttagtgagtacctagggcggctcaactcctcccacagcacc

SEQ ID NO: 1157 - DNA, 119 bp, homo sapiens
gttgggcctatagtagcaggttagtgagtacctagggcggctcaactcctcccacagcaccaacccagctggtcccactgaagtcctactacgccctcccctccccagccttttccaga

SEQ ID NO: 1158 - DNA, 119 bp, homo sapiens
ccaacccagcatggtcccactgaagtcctactacgccctcccctccccagccttttccagaaaccatacgggctcagatcagagctccgaagcggtcaaagtgagctgagcaggacagg

SEQ ID NO: 1159 - DNA, 119 bp, homo sapiens
gaaaccatactgggctcagatcagagctccgaagcggtcaaagtgagctgagcaggacaggcccagccttctccactgccacgtccctcatgcacatcactcatctcctgctgcaggcc

SEQ ID NO: 1160 - DNA, 119 bp, homo sapiens
ggcccagcctttctccactgccacgtccctcatgcacatcactcatctcctgctgcaggccaaggccaaattgggctagtcctggccagggaaatcagaagctcttcttgggtgagatt

SEQ ID NO: 1161 - DNA, 119 bp, homo sapiens
ccaaggccaaaattgggctagtcctggccagggaaatcagaagctcttcttgggtgagattgagcctccgttgctccctggagttccggaggctgggctgcagcccactcagcttgcgg

SEQ ID NO: 1162 - DNA, 119 bp, homo sapiens
ttgagcctcctgttgctccctggagttccggaggctgggctgcagcccactcagcttgcgggcaaaatagtgctctcctctctccttgtcagctgagcaaacccagggaatagccctcc

SEQ ID NO: 1163 - DNA, 119 bp, homo sapiens
gggcaaaatacgtgctctcctctctccttgtcagctgagcaaacccagggaatagccctcctctccccagaaacttctctgaaatcttagacttagccagtcttaggcctacgatgcca

SEQ ID NO: 1164 - DNA, 119 bp, homo sapiens
cctctccccaggaaacttctctgaaatcttagacttagccagtcttaggcctacgatgccacacaaaggtgttcagggagaagggggtgcaggaggcagagggtgccccgcagggagct

SEQ ID NO: 1165 - DNA, 119 bp, homo sapiens
cacacaaaggttgttcagggagaagggggtgcaggaggcagagggtgccccgcagggagctggtggctcagccccactagagctcctaaagatcacacagcagctgctcctgacaggga

SEQ ID NO: 1166 - DNA, 119 bp, homo sapiens
ctggtggctccagccccactagagctcctaaagatcacacagcagctgctcctgacagggatgctcatgccagaaagcaagcccaggagaggaaggcagagtgtgacagagcagagcca

SEQ ID NO: 1167 - DNA, 119 bp, homo sapiens
gatgctcatgcccagaaagcaagcccaggagaggaaggcagagtgtgacagagcagagccagggccagggcaccaggagaggcgtttctggggctccagagaagtgccacgggaggcag

SEQ ID NO: 1168 - DNA, 119 bp, homo sapiens
cagggccaggcgcaccaggagaggcgtttctggggctccagagaagtgccacgggaggcagaagtccagactgcccatatagatgcccttctacatcctggagcccaaatcagtcatgt

SEQ ID NO: 1169 - DNA, 119 bp, homo sapiens
agaagtccagaactgcccatatagatgcccttctacatcctggagcccaaatcagtcatgtgggtgggagttcccagggcagtggtcacatcgtgagaattagcaggaaaggcggggcc

SEQ ID NO: 1170 - DNA, 119 bp, homo sapiens
gtgggtgggaagttcccagggcagtggtcacatcgtgagaattagcaggaaaggcggggcctttcttgtatagctatttctgaggatgaaatgggagacatatgcccagcacctgatgt

SEQ ID NO: 1171 - DNA, 119 bp, homo sapiens
cctttcttgtcatagctatttctgaggatgaaatgggagacatatgcccagcacctgatgtaagtttattaatgtaatattatgtacctaccactaagaaatacatgaaccgtgccatg

SEQ ID NO: 1172 - DNA, 119 bp, homo sapiens
gtaagtttatataatgtaatattatgtacctaccactaagaaatacatgaaccgtgccatgaggacagtagtgttcataaagcaacatgaagcaagaaacagtgcagggtgcccagtgc

SEQ ID NO: 1173 - DNA, 119 bp, homo sapiens
tgaggacagtaagtgttcataaagcaacatgaagcaagaaacagtgcagggtgcccagtgcacacactaagagaaattgtgaacattaaggacaaggagaattggtgtctttctaaaac

SEQ ID NO: 1174 - DNA, 119 bp, homo sapiens
gcacacactagagagaaattgtgaacattaaggacaaggagaattggtgtctttctaaaacatacttattaaaaacacatacccacttactaatgtggaattacacagtttgtaacaag

SEQ ID NO: 1175 - DNA, 119 bp, homo sapiens
acatacttatttaaaaacacatacccacttactaatgtggaattacacagtttgtaacaagaaaacagttctcccattctctagtactgctcccctacccagcagtcacttccagttca

SEQ ID NO: 1176 - DNA, 119 bp, homo sapiens
cataagcagctttatgggtcctgaaagccaagggtgcccaggggtgtggtgtctctgagccctgttatcctcccccatgaccacagagcaggcaagggggcagcagggcccaaatctgg

SEQ ID NO: 1177 - DNA, 119 bp, homo sapiens
tctgagccctgttatccctcccccatgaccacagagcaggcaagggggcagcagggcccaaatctggccttggccgtcagaagccccctgcgggggttgtgactcccaagagtgatgca

SEQ ID NO: 1178 - DNA, 119 bp, homo sapiens
gggcccaaatctggccattggccgtcagaagccccctgcgggggttgtgactcccaagagtgatgcagagagcccccgttgaccaggaagaggagcaagaaggagagggggctccgagg

SEQ ID NO: 1179 - DNA, 119 bp, homo sapiens
ccaagagtgatgcagaggagcccccgttgaccaggaagaggagcaagaaggagagggggctccgagggttcgaaagcgcactggcagctctggggagcagacaggccccgaggccccgg

SEQ ID NO: 1180 - DNA, 119 bp, homo sapiens
agggggctccgagggtctcgaaagcgcactggcagctctggggagcagacaggccccgaggccccgggggcagcaataaccctcccagcactggagaggggccggcgggcgcaccccct

SEQ ID NO: 1181 - DNA, 119 bp, homo sapiens
ccccgaggccccggggagcagcaataaccctcccagcactggagaggggccggcgggcgcaccccctgctcccctgggccggcctcttctcgccagtcccaccgacatcgtcctgactc

SEQ ID NO: 1182 - DNA, 119 bp, homo sapiens
cgggcgcaccccctgcatcccctgggccggcctcttctcgccagtcccaccgacatcgtcctgactcccgcacgacgctgctcagaggacatacgggcccctgctcaatcgagtcttcg

SEQ ID NO: 1183 - DNA, 119 bp, homo sapiens
agcttcaggccgccttcgaggagtttgacactgaccgtgacggctacatcagccaccgggagctgggtgctgcatgcggaccctgggctacatgcccaccgagatggagctcctggagg

SEQ ID NO: 1184 - DNA, 119 bp, homo sapiens
ttgacactgaccgtgacggctacatcagccaccgggagctgggtgactgcatgcggaccctgggctacagcccaccgagatggagctcctggaggtctcgcagcacatcaagatgcgca

SEQ ID NO: 1185 - DNA, 119 bp, homo sapiens
tttgacagggacagggatggacgaattacggtggcggagctgcgggaggcggtaccggctctgctcgggagccgctggcgggtcctgagctggacgagatgctccgagaagtggacctc

SEQ ID NO: 1186 - DNA, 119 bp, homo sapiens
cggtggcggagctgcgggaggcggtaccggctctgctcggggagccgctggcgggtcctgagctggacggatgctccgagaagtggacctcaatggggatggcaccgtagactttgacg

SEQ ID NO: 1187 - DNA, 119 bp, homo sapiens
agtttgtgatgatgctctcccgccactgaggctccaggagggaatatctgttgcccctgcggccccagaaccagccagacccaggctgcaggcctcccccaggagcctccaggatggag

SEQ ID NO: 1188 - DNA, 119 bp, homo sapiens
ggccccagacaccagccagacccaggctgcaggcctcccccaggagcctccaggatggagatggagaccagcagcccccagactacttctatccctgaaaacacctggcctcaatgttg

SEQ ID NO: 1189 - DNA, 119 bp, homo sapiens
atggagacccagcagcccccagactacttctatccctgaaaacacctggcctcaatgttggcttgttatttacctgcccaccctcatccttacctcctcctactcaagctgcctggaga

SEQ ID NO: 1190 - DNA, 119 bp, homo sapiens
gcttgttatgttacctgcccaccctcatccttacctcctcctactcaagctgcctggagaagacctgcttcagctgcccaccgttcctcagtgtgagcaagatttgggtctctccagac

SEQ ID NO: 1191 - DNA, 119 bp, homo sapiens
ggtttcagatctggatggaggcttggccgcctggactcctacaaccatgagtgacagaagaaccatatggtctggggagcaagaaacaaaccccccggatatattccagggtctccaaa

SEQ ID NO: 1192 - DNA, 119 bp, homo sapiens
acagaagaaccatatgagtctggggagcaagaaacaaaccccccggatatattccagggtctccaaaggtaagatattaatctgtctgcactgaccagtcatagaaagtggcaaggata

SEQ ID NO: 1193 - DNA, 119 bp, homo sapiens
ccagggtctccaaaggctaagatattaatctgtctgcactgaccagtcatagaaagtggcaaggatacaatgttcagggcccagagtggaaacagctgccctaaagagcctggaactcc

SEQ ID NO: 1194 - DNA, 119 bp, homo sapiens
aagtggcaaggatacagatgttcagggcccagagtggaaacagctgccctaaagagcctggaactccaggcctgcccttcaagcaggcgtgtagtctctctccagggtgtgaaaaactg

SEQ ID NO: 1195 - DNA, 119 bp, homo sapiens
gagcctggaactccagggcctgcccttcaagcaggcgtgtagtctctctccagggtgtgaaaaactggaaaaaaccctgccgctcccaaaggggaacttgtgataaaaattacagatta

SEQ ID NO: 1196 - DNA, 119 bp, homo sapiens
ccatactgattataaaagtaaagaaaccaccatgaaggagacgagacagagacaaaaacaagaggactgcatctcagtgtacataatacagccgcctaagagaccacaagatacatgca

SEQ ID NO: 1197 - DNA, 119 bp, homo sapiens
aagaggactggcatctcagtgtacataatacagccgcctaagagaccacaagatacatgcaaataaaagcggctaaaaggggaagagagatcaacatgcagtaacaggatagtatgaag

SEQ ID NO: 1198 - DNA, 119 bp, homo sapiens
cctcgccgctcctgctatttgccaaccgccgggacgtacggctggtggacgccggcggagtcaagctgggtccaccatcgtggtcagcggcctggaggatgcggccgcagtggacttcc

SEQ ID NO: 1199 - DNA, 119 bp, homo sapiens
cggagtcaagctggagtccaccatcgtggtcagcggcctggaggatgcggccgcagtggacttccagtttccaagggagccgtgtactggacagacgtgagcgaggaggccatcaagca

SEQ ID NO: 1200 - DNA, 119 bp, homo sapiens
gtggacttccagttttccaagggagccgtgtactggacagacgtgagcgaggaggccatcaagcagaccacctgaaccagacgggggccgccgtgcagaacgtggtcatctccggcctg

SEQ ID NO: 1201 - DNA, 119 bp, homo sapiens
ccatcaagcagacctacctgaaccagacgggggccgccgtgcagaacgtggtcatctccggcctggtcttcccgacggcctcgcctgcgactgggtgggcaagaagctgtactggacgg

SEQ ID NO: 1202 - DNA, 119 bp, homo sapiens
ctccggcctggtctctcccgacggcctcgcctgcgactgggtgggcaagaagctgtactggacggactcgagaccaaccgcatcgaggtggccaacctcaatggcacatcccggaaggt

SEQ ID NO: 1203 - DNA, 119 bp, homo sapiens
tactggacggactcagagaccaaccgcatcgaggtggccaacctcaatggcacatcccggaaggtgctctctggcaggaccttgaccagccgagggccatcgccttggaccccgctcac

SEQ ID NO: 1204 - DNA, 119 bp, homo sapiens
gtacatgtactggacagactggggtgagacgccccggattgagcgggcagggatggatggcagcacccgaagatcattgtggactcggacatttactggcccaatggactgaccatcga

SEQ ID NO: 1205 - DNA, 119 bp, homo sapiens
tgagcgggcagggatggatggcagcacccggaagatcattgtggactcggacatttactggcccaatggctgaccatcgacctggaggagcagaagctctactgggctgacgccaagct

SEQ ID NO: 1206 - DNA, 119 bp, homo sapiens
tgtggactcggacatttactggcccaatggactgaccatcgacctggaggagcagaagctctactgggcgacgccaagctcagcttcatccaccgtgccaacctggacggctcgttccg

SEQ ID NO: 1207 - DNA, 119 bp, homo sapiens
gcagaaggtggtggagggcagcctgacgcaccccttcgccctgacgctctccggggacactctgtactgacagactggcagacccgctccatccatgcctgcaacaagcgcactggggg

SEQ ID NO: 1208 - DNA, 119 bp, homo sapiens
ccctgacgctctccggggacactctgtactggacagactggcagacccgctccatccatgcctgcaacagcgcactggggggaagaggaaggagatcctgagtgccctctactcaccca

SEQ ID NO: 1209 - DNA, 119 bp, homo sapiens
tggcagacccgctccatccatgcctgcaacaagcgcactggggggaagaggaaggagatcctgagtgcctctactcacccatggacatccaggtgctgagccaggagcggcagcctttc

SEQ ID NO: 1210 - DNA, 119 bp, homo sapiens
tccacactcgctgtgaggaggacaatggcggctgctcccacctgtgcctgctgtccccaagcgagccttctacacatgcgcctgccccacgggtgtgcagctgcaggacaacggcagga

SEQ ID NO: 1211 - DNA, 119 bp, homo sapiens
gtgaggaggacaatggcggctgctcccacctgtgcctgctgtccccaagcgagcctttctacacatgcgctgccccacgggtgtgcagctgcaggacaacggcaggacgtgtaaggcag

SEQ ID NO: 1212 - DNA, 119 bp, homo sapiens
gagccgaggaggtgctgctgctggcccggcggacggacctacggaggatctcgctggacacgccggactcaccgacatcgtgctgcaggtggacgacatccggcacgccattgccatcg

SEQ ID NO: 1213 - DNA, 119 bp, homo sapiens
ggacacgccggacttcaccgacatcgtgctgcaggtggacgacatccggcacgccattgccatcgactagacccgctagagggctatgtctactggacagatgacgaggtgcgggccat

SEQ ID NO: 1214 - DNA, 119 bp, homo sapiens
attgccatcgactacgacccgctagagggctatgtctactggacagatgacgaggtgcgggccatccgcgggcgtacctggacgggtctggggcgcagacgctggtcaacaccgagatc

SEQ ID NO: 1215 - DNA, 119 bp, homo sapiens
tgcgggccatccgcagggcgtacctggacgggtctggggcgcagacgctggtcaacaccgagatcaacgccccgatggcatcgcggtcgactgggtggcccgaaacctctactggaccg

SEQ ID NO: 1216 - DNA, 119 bp, homo sapiens
caccgagatcaacgaccccgatggcatcgcggtcgactgggtggcccgaaacctctactggaccgacacggcacggaccgcatcgaggtgacgcgcctcaacggcacctcccgcaagat

SEQ ID NO: 1217 - DNA, 119 bp, homo sapiens
tactggaccgacacgggcacggaccgcatcgaggtgacgcgcctcaacggcacctcccgcaagatcctgtgtcggaggacctggacgagccccgagccatcgcactgcaccccgtgatg

SEQ ID NO: 1218 - DNA, 119 bp, homo sapiens
cctcatgtactggacagactggggagagaaccctaaaatcgagtgtgccaacttggatgggcaggagcgcgtgtgctggtcaatgcctccctcgggtggcccaacggcctggccctgga

SEQ ID NO: 1219 - DNA, 119 bp, homo sapiens
ttggatgggcaggagcggcgtgtgctggtcaatgcctccctcgggtggcccaacggcctggccctggactgcaggaggggaagctctactggggagacgccaagacagacaagatcgag

SEQ ID NO: 1220 - DNA, 119 bp, homo sapiens
gtgatcaatgttgatgggacgaagaggcggaccctcctggaggacaagctcccgcacatttttgggttccgctgctgggggacttcatctactggactgactggcagcgccgcagcatc

SEQ ID NO: 1221 - DNA, 119 bp, homo sapiens
ctcccgcacatttttgggttcacgctgctgggggacttcatctactggactgactggcagcgccgcagctcgagcgggtgcacaaggtcaaggccagccgggacgtcatcattgaccag

SEQ ID NO: 1222 - DNA, 119 bp, homo sapiens
actgactggcagcgccgcagcatcgagcgggtgcacaaggtcaaggccagccgggacgtcatcattgacagctgcccgacctgatggggctcaaagctgtgaatgtggccaaggtcgtc

SEQ ID NO: 1223 - DNA, 119 bp, homo sapiens
gaaccaacccgtgtgcggacaggaacggggggtgcagccacctgtgcttcttcacaccccacgcaacccgtgtggctgccccatcggcctggagctgctgagtgacatgaagacctgca

SEQ ID NO: 1224 - DNA, 119 bp, homo sapiens
ccccacgcaacccggtgtggctgccccatcggcctggagctgctgagtgacatgaagacctgcatcgtgctgaggccttcttggtcttcaccagcagagccgccatccacaggatctcc

SEQ ID NO: 1225 - DNA, 119 bp, homo sapiens
gacctgcatcgtgcctgaggccttcttggtcttcaccagcagagccgccatccacaggatctccctcgaaccaataacaacgacgtggccatcccgctcacgggcgtcaaggaggcctc

SEQ ID NO: 1226 - DNA, 119 bp, homo sapiens
ggatctccctcgagaccaataacaacgacgtggccatcccgctcacgggcgtcaaggaggcctcagcccggactttgatgtgtccaacaaccacatctactggacagacgtcagcctga

SEQ ID NO: 1227 - DNA, 119 bp, homo sapiens
accatcagccgcgccttcatgaacgggagctcggtggagcacgtggtggagtttggccttgactaccccagggcatggccgttgactggatgggcaagaacctctactgggccgacact

SEQ ID NO: 1228 - DNA, 119 bp, homo sapiens
tggccttgactaccccgagggcatggccgttgactggatgggcaagaacctctactgggccgacactggaccaacagaatcgaagtggcgcggctggacgggcagttccggcaagtcct

SEQ ID NO: 1229 - DNA, 119 bp, homo sapiens
actgggccgacactgggaccaacagaatcgaagtggcgcggctggacgggcagttccggcaagtcctcggtggagggacttggacaacccgaggtcgctggccctggatcccaccaagg

SEQ ID NO: 1230 - DNA, 119 bp, homo sapiens
ctacatctactggaccgagtggggcggcaagccgaggatcgtgcgggccttcatggacgggaccaactgatgacgctggtggacaaggtgggccgggccaacgacctcaccattgacta

SEQ ID NO: 1231 - DNA, 119 bp, homo sapiens
cgaggatcgtgcgggccttcatggacgggaccaactgcatgacgctggtggacaaggtgggccgggccacgacctcaccattgactacgctgaccagcgcctctactggaccgacctgg

SEQ ID NO: 1232 - DNA, 119 bp, homo sapiens
aactgcatgacgctggtggacaaggtgggccgggccaacgacctcaccattgactacgctgaccagcgctctactggaccgacctggacaccaacatgatcgagtcgtccaacatgctg

SEQ ID NO: 1233 - DNA, 119 bp, homo sapiens
gtcaggagcgggtcgtgattgccgacgatctcccgcacccgttcggtctgacgcagtacagcgattatactactggacagactggaatctgcacagcattgagcgggccgacaagacta

SEQ ID NO: 1234 - DNA, 119 bp, homo sapiens
cgcagtacagcgattatatctactggacagactggaatctgcacagcattgagcgggccgacaagactacggccggaaccgcaccctcatccagggccacctggacttcgtgatggaca

SEQ ID NO: 1235 - DNA, 119 bp, homo sapiens
agcgggccgacaagactagcggccggaaccgcaccctcatccagggccacctggacttcgtgatggacacctggtgttccactcctcccgccaggatggcctcaatgactgtatgcaca

SEQ ID NO: 1236 - DNA, 119 bp, homo sapiens
tggacttcgtgatggacatcctggtgttccactcctcccgccaggatggcctcaatgactgtatgcacacaacgggcagtgtgggcagctgtgccttgccatccccggcggccaccgct

SEQ ID NO: 1237 - DNA, 119 bp, homo sapiens
tcaatgactgtatgcacaacaacgggcagtgtgggcagctgtgccttgccatccccggcggccaccgctcggctgcgcctcacactacaccctggaccccagcagccgcaactgcagcc

SEQ ID NO: 1238 - DNA, 119 bp, homo sapiens
cgcccaccaccttcttgctgttcagccagaaatctgccatcagtcggatgatcccggacgaccagcacacccggatctcatcctgcccctgcatggactgaggaacgtcaaagccatcg

SEQ ID NO: 1239 - DNA, 119 bp, homo sapiens
cagtcggatgatcccggacgaccagcacagcccggatctcatcctgcccctgcatggactgaggaacgtaaagccatcgactatgacccactggacaagttcatctactgggtggatgg

SEQ ID NO: 1240 - DNA, 119 bp, homo sapiens
atcctgcccctgcatggactgaggaacgtcaaagccatcgactatgacccactggacaagttcatctacgggtggatgggcgccagaacatcaagcgagccaaggacgacgggacccag

SEQ ID NO: 1241 - DNA, 119 bp, homo sapiens
ccctttgttttgacctctctgagccaaggccaaaacccagacaggcagccccacgacctcagcatcgactctacagccggacactgttctggacgtgcgaggccaccaataccatcaac

SEQ ID NO: 1242 - DNA, 119 bp, homo sapiens
gcagccccacgacctcagcatcgacatctacagccggacactgttctggacgtgcgaggccaccaatacatcaacgtccacaggctgagcggggaagccatgggggtggtgctgcgtgg

SEQ ID NO: 1243 - DNA, 119 bp, homo sapiens
tctggacgtgcgaggccaccaataccatcaacgtccacaggctgagcggggaagccatgggggtggtgcgcgtggggaccgcgacaagcccagggccatcgtcgtcaacgcggagcgag

SEQ ID NO: 1244 - DNA, 119 bp, homo sapiens
gtacctgtacttcaccaacatgcaggaccgggcagccaagatcgaacgcgcagccctggacggcaccgacgcgaggtcctcttcaccaccggcctcatccgccctgtggccctggtggt

SEQ ID NO: 1245 - DNA, 119 bp, homo sapiens
ccaagatcgaacgcgcagccctggacggcaccgagcgcgaggtcctcttcaccaccggcctcatccgcctgtggccctggtggtggacaacacactgggcaagctgttctgggtggacg

SEQ ID NO: 1246 - DNA, 119 bp, homo sapiens
cgcgaggtcctcttcaccaccggcctcatccgccctgtggccctggtggtggacaacacactgggcaagtgttctgggtggacgcggacctgaagcgcattgagagctgtgacctgtca

SEQ ID NO: 1247 - DNA, 119 bp, homo sapiens
gggccaaccgcctgaccctggaggacgccaacatcgtgcagcctctgggcctgaccatccttggcaagctctctactggatcgaccgccagcagcagatgatcgagcgtgtggagaaga

SEQ ID NO: 1248 - DNA, 119 bp, homo sapiens
tgggcctgaccatccttggcaagcatctctactggatcgaccgccagcagcagatgatcgagcgtgtgggaagaccaccggggacaagcggactcgcatccagggccgtgtcgcccacc

SEQ ID NO: 1249 - DNA, 119 bp, homo sapiens
agcagcagatgatcgagcgtgtggagaagaccaccggggacaagcggactcgcatccagggccgtgtcgccacctcactggcatccatgcagtggaggaagtcagcctggaggagttct

SEQ ID NO: 1250 - DNA, 119 bp, homo sapiens
cagcccacccatgtgcccgtgacaatggtggctgctcccacatctgtattgccaagggtgatgggacacacggtgctcatgcccagtccacctcgtgctcctgcagaacctgctgacct

SEQ ID NO: 1251 - DNA, 119 bp, homo sapiens
acccatgtgcccgtgacaatggtggctgctcccacatctgtattgccaagggtgatgggacaccacggtctcatgcccagtccacctcgtgctcctgcagaacctgctgacctgtggag

SEQ ID NO: 1252 - DNA, 119 bp, homo sapiens
agccgcccacctgctccccggaccagtttgcatgtgccacaggggagatcgactgtatccccggggcctgcgctgtgacggctttcccgagtgcgatgaccagagcgacgaggagggct

SEQ ID NO: 1253 - DNA, 119 bp, homo sapiens
ccccggggcctggcgctgtgacggctttcccgagtgcgatgaccagagcgacgaggagggctgccccgttgctccgccgcccagttcccctgcgcgcggggtcagtgtgtggacctgcg

SEQ ID NO: 1254 - DNA, 119 bp, homo sapiens
ggctgccccgtgtgctccgccgcccagttcccctgcgcgcggggtcagtgtgtggacctgcgcctgcgcgcgacggcgaggcagactgtcaggaccgctcagacgaggcggactgtgac

SEQ ID NO: 1255 - DNA, 119 bp, homo sapiens
aaatcaccaagccgccctcagacgacagcccggcccacagcagtgccatcgggcccgtcattggcatcacctctctctcttcgtcatgggtggtgtctattttgtgtgccagcgcgtgg

SEQ ID NO: 1256 - DNA, 119 bp, homo sapiens
cattggcatcatcctctctctcttcgtcatgggtggtgtctattttgtgtgccagcgcgtggtgtgccacgctatgcgggggccaacgggcccttcccgcacgagtatgtcagcgggac

SEQ ID NO: 1257 - DNA, 119 bp, homo sapiens
gtggtgtgccagcgctatgcgggggccaacgggcccttcccgcacgagtatgtcagcgggaccccgcactgcccctcaatttcatagccccgggcggttcccagcatggccccttcaca

SEQ ID NO: 1258 - DNA, 119 bp, homo sapiens
gcatcgcatgcggaaagtccatgatgagctccgtgagcctgatggggggccggggcggggtgcccctctcgaccggaaccacgtcacaggggcctcgtccagcagctcgtccagcacga

SEQ ID NO: 1259 - DNA, 119 bp, homo sapiens
atgatgagctccgtgagcctgatggggggccggggcggggtgcccctctacgaccggaaccacgtcacagggcctcgtccagcagctcgtccagcacgaaggccacgctgtacccgccg

SEQ ID NO: 1260 - DNA, 119 bp, homo sapiens
gccctacatcattcgaggaatggcgcccccgacgacgccctgcagcaccgacgtgtgtgacagcgactaagcgccagccgctggaaggccagcaagtactacctggatttgaactcgga

SEQ ID NO: 1261 - DNA, 119 bp, homo sapiens
acgtgtgtgacagcgactacagcgccagccgctggaaggccagcaagtactacctggatttgaactcggctcagacccctatccacccccacccacgccccacagccagtacctgtcgg

SEQ ID NO: 1262 - DNA, 119 bp, homo sapiens
tacctggatttgaactcggactcagacccctatccacccccacccacgccccacagccagtacctgtcgcggaggacagctgcccgccctcgcccgccaccgagaggagctacttccat

SEQ ID NO: 1263 - DNA, 119 bp, homo sapiens
ccacagccagtacctgtcggcggaggacagctgcccgccctcgcccgccaccgagaggagctacttccactcttcccgccccctccgtccccctgcacggactcatcctgacctcggcc

SEQ ID NO: 1264 - DNA, 119 bp, homo sapiens
ccgagaggagctacttccatctcttcccgccccctccgtccccctgcacggactcatcctgacctcggcgggccactctggcttctctgtgcccctgtaaatagttttaaatatgaaca

SEQ ID NO: 1265 - DNA, 119 bp, homo sapiens
ttaaaaaataaatataattgggattttaaaaacatgagaaatgtgaactgtgatggggtgggcagggctggagaactttgtacagtggagaaatatttataaacttaattttgtaaaac

SEQ ID NO: 1266 - DNA, 119 bp, homo sapiens
ggcagggctgggagaactttgtacagtggagaaatatttataaacttaattttgtaaaacagaactgccttctttcgtgccctgtgtgcatttgagttgtgtgtccccgtggagggaat

SEQ ID NO: 1267 - DNA, 119 bp, homo sapiens
agaactgccattctttcgtgccctgtgtgcatttgagttgtgtgtccccgtggagggaatgccgaccccggaccaccatgagagtcctcctgcacccgggcgtccctctgtccggctcc

SEQ ID NO: 1268 - DNA, 119 bp, homo sapiens
gctctgggcaggagagagagggagagacaagagacacacacagagagacggcgaggaagggaaagacccgagggacgcctagaacgagacttggagccagacagaggaagaggggacgt

SEQ ID NO: 1269 - DNA, 119 bp, homo sapiens
aggaagggaaagacccagagggacgcctagaacgagacttggagccagacagaggaagaggggacgtgttttgcagactggctgggcccgtgacccagcttcctgagtcctccgtgcag

SEQ ID NO: 1270 - DNA, 119 bp, homo sapiens
ggaagaggggacgtgtgtttgcagactggctgggcccgtgacccagcttcctgagtcctccgtgcaggtgcagctgtaccaggctggcaggtcactgagagtgggcagctgggccccag

SEQ ID NO: 1271 - DNA, 119 bp, homo sapiens
gaacactggatctctccgcagaacgcaacgcacatcaagcctatgcaccccacgtcggtccacggcgtgaggacatgatccgcctgggggacctcaacgaggcgggcatcttgcgcaac

SEQ ID NO: 1272 - DNA, 119 bp, homo sapiens
atcaagcctatgcaccccacgtcggtccacggcgtggaggacatgatccgcctgggggacctcaacgagcgggcatcttgcgcaacctgcttatccgctaccgggaccacctcatctac

SEQ ID NO: 1273 - DNA, 119 bp, homo sapiens
acgtatacgggctccatcctggtggctgtgaacccctaccagctgctctccatctactcgccagagcactccgccagtataccaacaagaagattggggagatgcccccccacatcttt

SEQ ID NO: 1274 - DNA, 119 bp, homo sapiens
cccctaccagctgctctccatctactcgccagagcacatccgccagtataccaacaagaagattggggaatgcccccccacatctttgccattgctgacaactgctacttcaacatgaa

SEQ ID NO: 1275 - DNA, 119 bp, homo sapiens
agcacatccgccagtataccaacaagaagattggggagatgcccccccacatctttgccattgctgacactgctacttcaacatgaaacgcaacagccgagaccagtgctgcatcatca

SEQ ID NO: 1276 - DNA, 119 bp, homo sapiens
catttgggaatgccaagaccatccgcaatgacaactcaagccgtttcggaaagtacatcgacatccactcaacaagcggggcgccatcgagggcgcgaagattgagcagtacctgctgg

SEQ ID NO: 1277 - DNA, 119 bp, homo sapiens
cgcaatgacaactcaagccgtttcggaaagtacatcgacatccacttcaacaagcggggcgccatcgaggcgcgaagattgagcagtacctgctggaaaagtcacgtgtctgtcgccag

SEQ ID NO: 1278 - DNA, 119 bp, homo sapiens
ggtaactgcataacctgtgagggccgggtggacagccaggagtacgccaacatccgctccgccatgaagtgctcatgttcactgacaccgagaactgggagatctcgaagctcctggct

SEQ ID NO: 1279 - DNA, 119 bp, homo sapiens
gccaggagtacgccaacatccgctccgccatgaaggtgctcatgttcactgacaccgagaactgggagactcgaagctcctggctgccatcctgcacctgggcaacctgcagtatgagg

SEQ ID NO: 1280 - DNA, 119 bp, homo sapiens
gggatctacgggcggctgttcgtgtggattgtggacaagatcaacgcagcaatttacaagcctccctccaggatgtgaagaactctcgcaggtccatcggcctcctggacatctttggg

SEQ ID NO: 1281 - DNA, 119 bp, homo sapiens
gtggattgtggacaagatcaacgcagcaatttacaagcctccctcccaggatgtgaagaactctcgcagtccatcggcctcctggacatctttgggtttgagaactttgctgtgaacag

SEQ ID NO: 1282 - DNA, 119 bp, homo sapiens
ctttgagcagctctgcatcaacttcgccaatgagcacctgcagcagttctttgtgcggcacgtgttcaactggagcaggaggaatatgacctggagagcattgactggctgcacatcga

SEQ ID NO: 1283 - DNA, 119 bp, homo sapiens
gttctttgtgcggcacgtgttcaagctggagcaggaggaatatgacctggagagcattgactggctgcaatcgagttcactgacaaccaggatgccctggacatgattgccaacaagcc

SEQ ID NO: 1284 - DNA, 119 bp, homo sapiens
cctggagagcattgactggctgcacatcgagttcactgacaaccaggatgccctggacatgattgccaaaagcccatgaacatcatctccctcatcgatgaggagagcaagttccccaa

SEQ ID NO: 1285 - DNA, 119 bp, homo sapiens
ggcacagacaccaccatgttacacaagctgaactcccagcacaagctcaacgccaactacatcccccccagaacaaccatgagacccagtttggcatcaaccattttgcaggcatcgtc

SEQ ID NO: 1286 - DNA, 119 bp, homo sapiens
tgttacacaagctgaactcccagcacaagctcaacgccaactacatcccccccaagaacaaccatgagaccagtttggcatcaaccattttgcaggcatcgtctactatgagacccaag

SEQ ID NO: 1287 - DNA, 119 bp, homo sapiens
ggcgccgagaccaggaagcgctcgcccacacttagcagccagttcaagcggtcactggagctgctgatggcacgctgggtgcctgccagcccttctttgtgcgatgcatcaagcccaat

SEQ ID NO: 1288 - DNA, 119 bp, homo sapiens
cgctcgcccacacttagcagccagttcaagcggtcactggagctgctgatgcgcacgctgggtgcctgcagcccttctttgtgcgatgcatcaagcccaatgagttcaagaagcccatg

SEQ ID NO: 1289 - DNA, 119 bp, homo sapiens
ctgttcgaccggcacctgtgcgtgcgccagctgcggtactcaggaatgatggagaccatccgaatccgcgagctggctaccccatccgctacagcttcgtagagtttgtggagcggtac

SEQ ID NO: 1290 - DNA, 119 bp, homo sapiens
tcaggaatgatggagaccatccgaatccgccgagctggctaccccatccgctacagcttcgtagagttttggagcggtaccgtgtgctgctgccaggtgtgaagccggcctacaagcag

SEQ ID NO: 1291 - DNA, 119 bp, homo sapiens
atgcgtctgggcttcctgcggctgcaggccctgcaccgctcccggaagctgcaccagcagtaccgcctgcccgccagcgcatcatccagttccaggcccgctgccgcgcctatctggtg

SEQ ID NO: 1292 - DNA, 119 bp, homo sapiens
tgcaccagcagtaccgcctggcccgccagcgcatcatccagttccaggcccgctgccgcgcctatctgggcgcaaggccttccgccaccgcctctgggctgtgctcaccgtgcaggcct

SEQ ID NO: 1293 - DNA, 119 bp, homo sapiens
ccgctgccgcgcctatctggtgcgcaaggccttccgccaccgcctctgggctgtgctcaccgtgcaggctatgcccggggcatgatcgcccgcaggctgcaccaacgcctcagggctga

SEQ ID NO: 1294 - DNA, 119 bp, homo sapiens
gagcgcctggcccagctggctcgtgaggacgctgagcgggagctgaaggagaaggaggccgctcggcggagaaggagctcctggagcagatggaaagggcccgccatgagcctgtcaat

SEQ ID NO: 1295 - DNA, 119 bp, homo sapiens
aaggagaaggaggccgctcggcggaagaaggagctcctggagcagatggaaagggcccgccatgagccttcaatcactcagacatggtggacaagatgtttggcttcctggggacttca

SEQ ID NO: 1296 - DNA, 119 bp, homo sapiens
atggaaagggcccgccatgagcctgtcaatcactcagacatggtggacaagatgtttggcttcctggggcttcaggtggcctgccaggccaggagggccaggcacctagtggctttgag

SEQ ID NO: 1297 - DNA, 119 bp, homo sapiens
gacctggagcgagggcggagggagatggtggaggaggacctggatgcagccctgcccctgcctgacgagatgaggaggacctctctgagtataaatttgccaagttcgcggccacctac

SEQ ID NO: 1298 - DNA, 119 bp, homo sapiens
gatgcagccctgcccctgcctgacgaggatgaggaggacctctctgagtataaatttgccaagttcgcgccacctacttccaggggacaaccacgcactcctacacccggcggccactc

SEQ ID NO: 1299 - DNA, 119 bp, homo sapiens
tctgagtataaatttgccaagttcgcggccacctacttccaggggacaaccacgcactcctacacccggggccactcaaacagccactgctctaccatgacgacgagggtgaccagctg

SEQ ID NO: 1300 - DNA, 119 bp, homo sapiens
gcagccctggcggtctggatcaccatcctccgcttcatgggggacctccctgagcccaagtaccacacaccatgagtgatggcagtgagaagatccctgtgatgaccaagatttatgag

SEQ ID NO: 1301 - DNA, 119 bp, homo sapiens
aagtaccacacagccatgagtgatggcagtgagaagatccctgtgatgaccaagatttatgagaccctggcaagaagacgtacaagagggagctgcaggccctgcagggcgagggcgag

SEQ ID NO: 1302 - DNA, 119 bp, homo sapiens
gtgaccaagaggctgcatgacggggagtccacagtgcagggcaacagcatgctggaggaccggcccaccccaacctggagaagctgcacttcatcatcggcaatggcatcctgcggcca

SEQ ID NO: 1303 - DNA, 119 bp, homo sapiens
ggcaacagcatgctggaggaccggcccacctccaacctggagaagctgcacttcatcatcggcaatggctcctgcggccagcactccggtcagtgccgggaggcggggacaccagggcc

SEQ ID NO: 1304 - DNA, 119 bp, homo sapiens
gagaagctgcacttcatcatcggcaatggcatcctgcggccagcactccggtcagtgccgggaggcgggacaccagggcctgaaagtcttttggtggctgagtggtgcctctgtcaacc

SEQ ID NO: 1305 - DNA, 119 bp, homo sapiens
ggacgagatctactgccagatcagcaagcagctgacccacaacccctccaagagcagctatgcccggggtggattctcgtgtctctctgcgtgggctgtttcgccccctccgagaagtt

SEQ ID NO: 1306 - DNA, 119 bp, homo sapiens
atctactgccagatcagcaagcagctgacccacaacccctccaagagcagctatgcccggggctggatttcgtgtctctctgcgtgggctgtttcgccccctccgagaagtttgtcaag

SEQ ID NO: 1307 - DNA, 119 bp, homo sapiens
gccaccaagtccaagaagccaatcatgttgcccgtgacattcatggatgggaccaccaagaccctgctgcggactcggcaaccacggccaaggagctctgcaacgcgctggccgacaag

SEQ ID NO: 1308 - DNA, 119 bp, homo sapiens
accaagaccctgctgacggactcggcaaccacggccaaggagctctgcaacgcgctggccgacaagatcctctcaaggaccggttcgggttctccctctacattgccctgtttgacaag

SEQ ID NO: 1309 - DNA, 119 bp, homo sapiens
gtgtcctccctgggcagcggcagtgaccacgtcatggacgccatctcccagtgcgagcagtacgccaagagcagggcgcccaggagcgcaacgccccctggaggctcttcttccgcaaa

SEQ ID NO: 1310 - DNA, 119 bp, homo sapiens
gagcagtacgccaaggagcagggcgcccaggagcgcaacgccccctggaggctcttcttccgcaaagagtcttcacgccctggcacagcccctccgaggacaacgtggccaccaacctc

SEQ ID NO: 1311 - DNA, 119 bp, homo sapiens
ttcttccgcaaagaggtcttcacgccctggcacagcccctccgaggacaacgtggccaccaacctcatcaccagcaggtggtgcgaggagtcaagtttggggagtacaggtgtgagaag

SEQ ID NO: 1312 - DNA, 119 bp, homo sapiens
gaggacgacctggctgagctggcctcccagcagtactttgtagactatggctctgagatgatcctggaggcctcctgaacctcgtgcccacctacatccccgaccgcgagatcacgccc

SEQ ID NO: 1313 - DNA, 119 bp, homo sapiens
tctgagatgatcctggagcgcctcctgaacctcgtgcccacctacatccccgaccgcgagatcacgccctgaagacgctggagaagtgggcccagctggccatcgccgcccacaagaag

SEQ ID NO: 1314 - DNA, 119 bp, homo sapiens
gccccagtctccccaagaacgacgtcatcgtggccgtcaactggacgggtgtgtactttgtggatgagcggagcaggtacttctggagctgtccttcccagagatcatggccgtgtcca

SEQ ID NO: 1315 - DNA, 119 bp, homo sapiens
tctccccaagaacgacgtcatcgtggccgtcaactggacgggtgtgtactttgtggatgagcaggagcagtacttctggagctgtccttcccagagatcatggccgtgtccagcagcag

SEQ ID NO: 1316 - DNA, 119 bp, homo sapiens
ggagtgccgtgtctggctctcactgggctgctctgatcttggctgtgctgcgcctcactcaggctgggcggactgaccccggcggggccctgttctccgtgttggtcctgcaggggagc

SEQ ID NO: 1317 - DNA, 119 bp, homo sapiens
tcactcaggctgggcaggactgaccccggcggggccctgttctccgtgttggtcctgcaggggagcgaaacgacggcccccagcttcacgctggccaccatcaagggggacgaatacac

SEQ ID NO: 1318 - DNA, 119 bp, homo sapiens
ctgcaggggagcgaaaacgacggcccccagcttcacgctggccaccatcaagggggacgaatacaccttacctccagcaatgctgaggacattcgtgacctggtggtcaccttcctaga

SEQ ID NO: 1319 - DNA, 119 bp, homo sapiens
ggacgaatacaccttcacctccagcaatgctgaggacattcgtgacctggtggtcaccttcctagagggctccggaagagatctaagtatgttgtggccctgcaggataaccccaaccc

SEQ ID NO: 1320 - DNA, 119 bp, homo sapiens
caggcgaggagtcaggcttcctcagctttgccaagggagacctcatcatcctggaccatgacacgggcggcaggtcatgaactcgggctgggccaacggcatcaatgagaggaccaagc

SEQ ID NO: 1321 - DNA, 119 bp, homo sapiens
ggagacctcatcatcctggaccatgacacgggcgagcaggtcatgaactcgggctgggccaacggcatcatgagaggaccaagcagcgtggggacttccccaccgacagtgtgtacgtc

SEQ ID NO: 1322 - DNA, 119 bp, homo sapiens
gcaggtcatgaactcgggctgggccaacggcatcaatgagaggaccaagcagcgtggggacttccccacgacagtgtgtacgtcatgcccactgtcaccatgccaccgcgggagattgt

SEQ ID NO: 1323 - DNA, 119 bp, homo sapiens
gccctggtcaccatgactcccgatcagaggcaggacgttgtccggctcttgcagctgcgaacggcggagccgaggtgcgtgccaagccctacacgctggaggagttttcctatgactac

SEQ ID NO: 1324 - DNA, 119 bp, homo sapiens
ggtcaccatgactcccgatcagaggcaggacgttgtccggctcttgcagctgcgaacggcggagcccgagtgcgtgccaagccctacacgctggaggagttttcctatgactacttcag

SEQ ID NO: 1325 - DNA, 119 bp, homo sapiens
gcccccacccaagcacacgctgagccgtgtcatggtgtccaaggcccgaggcaaggaccggctgtggagcacacgcgggaaccgctcaagcaggcgctgctcaagaagctcctgggcag

SEQ ID NO: 1326 - DNA, 119 bp, homo sapiens
ccaaggcccgaggcaaggaccggctgtggagccacacgcgggaaccgctcaagcaggcgctgctcaagagctcctgggcagtgaggagctctcgcaggaggcctgcctggccttcattg

SEQ ID NO: 1327 - DNA, 119 bp, homo sapiens
ctgtgctcaagtacatgggcgactacccgtccaagaggacacgctccgtcaacgagctcaccgaccagactttgagggtcccctgaaagccgagcccctgaaggacgaggcatatgtgc

SEQ ID NO: 1328 - DNA, 119 bp, homo sapiens
gaggacacgctccgtcaacgagctcaccgaccagatctttgagggtcccctgaaagccgagcccctgaagacgaggcatatgtgcagatcctgaagcagctgaccgacaaccacatcag

SEQ ID NO: 1329 - DNA, 119 bp, homo sapiens
gtacagcgaggagcggggttgggagctgctctggctgtgcacgggccttttcccacccagcaacatcctctgccccacgtgcagcgcttcctgcagtcccgaaagcactgcccactcgc

SEQ ID NO: 1330 - DNA, 119 bp, homo sapiens
gtgcacgggccttttcccacccagcaacatcctcctgccccacgtgcagcgcttcctgcagtcccgaaacactgcccactcgccatcgactgcctgcaacggctccagaaagccctgag

SEQ ID NO: 1331 - DNA, 119 bp, homo sapiens
gagttgcccaagtatctccgaggctaccacaagtgcacgcgggaggaggtgctgcagctgggggcgctgtctacagggtcaagttcgaggaggacaagtcctacttccccagcatcccc

SEQ ID NO: 1332 - DNA, 119 bp, homo sapiens
tgcacgcgggaggaggtgctgcagctgggggcgctgatctacagggtcaagttcgaggaggacaagtccacttccccagcatccccaagctgctgcgggagctggtgccccaggacctt

SEQ ID NO: 1333 - DNA, 119 bp, homo sapiens
ctgatctacagggtcaagttcgaggaggacaagtcctacttccccagcatccccaagctgctgcgggagtggtgccccaggaccttatccggcaggtctcacctgatgactggaagcgg

SEQ ID NO: 1334 - DNA, 119 bp, homo sapiens
ggctacaagatggatgacctcctgacttcctacattagccagatgctcacagccatgagcaaacagcgggctccaggagcggcaagtgaacagtcacggggaggtgctggttccatgcc

SEQ ID NO: 1335 - DNA, 119 bp, homo sapiens
agcaaacagcggggctccaggagcggcaagtgaacagtcacggggaggtgctggttccatgcctgctctgaggcagcagtgggttcaggcccatcagctacccctgcagctggggaaga

SEQ ID NO: 1336 - DNA, 119 bp, homo sapiens
catgcctgctctcgaggcagcagtgggttcaggcccatcagctacccctgcagctggggaagacttatgcatcccggcagcgaggctgggctggccagccaccactgactataccaact

SEQ ID NO: 1337 - DNA, 119 bp, homo sapiens
ggaagacttatgccatcccggcagcgaggctgggctggccagccaccactgactataccaactgggccttgatgttcttccagtgaggcatctctctgggatgcagaacttccctccat

SEQ ID NO: 1338 - DNA, 119 bp, homo sapiens
ccaactgggcctctgatgttcttccagtgaggcatctctctgggatgcagaacttccctccatccaccctctggcacctgggttggtctaatcctagtttgctgtggccttcccggttg

SEQ ID NO: 1339 - DNA, 119 bp, homo sapiens
ctccatccacccctctggcacctgggttggtctaatcctagtttgctgtggccttcccggttgtgagagctgtgatccttagatgtgtctcctgtttcagaccagccccaccatgcaac

SEQ ID NO: 1340 - DNA, 119 bp, homo sapiens
cggttgtgagagcctgtgatccttagatgtgtctcctgtttcagaccagccccaccatgcaacttccttgactttctgtgtaccactgggatagaggaatcaagaggacaatctagctc

SEQ ID NO: 1341 - DNA, 119 bp, homo sapiens
tgcaacttcctttgactttctgtgtaccactgggatagaggaatcaagaggacaatctagctctccatatttgaacaaccaaatgtgcattgaatactctgaaaccgaagggactggat

SEQ ID NO: 1342 - DNA, 119 bp, homo sapiens
tagctctccatactttgaacaaccaaatgtgcattgaatactctgaaaccgaagggactggatctgcagtgggatgagggagacagaccacttttctatattgcagtgtgaatgctggg

SEQ ID NO: 1343 - DNA, 119 bp, homo sapiens
ctggatctgcaggtgggatgagggagacagaccacttttctatattgcagtgtgaatgctgggcccctgtcaagtctaccctgatcacctcagggcataaagcatgtttcattctctgg

SEQ ID NO: 1344 - DNA, 119 bp, homo sapiens
aacctccgtcccgcagtccaattagcagccgcgacccggcgcccgcccacgccgcgtcacgagtcagccaagatggctgcgcccaggtaatttgagcaaaggccacagtgaactccggc

SEQ ID NO: 1345 - DNA, 119 bp, homo sapiens
ccgcgtcacgagtcagccaaagatggctgcgcccaggtaatttgagcaaaggccacagtgaactccggctggctgaggaaggaggaggcacccacaggctgctgggaggagagcataag

SEQ ID NO: 1346 - DNA, 119 bp, homo sapiens
gaatctacttgaaaatggatcggtttatgttggattaaatgctgctctttgtggcctcatagcaaacagctttttcgacgcatcttgaatgtgacaaaggctcgcatagctgctggctt

SEQ ID NO: 1347 - DNA, 119 bp, homo sapiens
aatgctgctctttgtggcctcatagcaaacagtctttttcgacgcatcttgaatgtgacaaaggctcgctagctgctggcttaccaatggcagggataccttttcttacaacagactta

SEQ ID NO: 1348 - DNA, 119 bp, homo sapiens
ttcgacgcatcttgaatgtgacaaaggctcgcatagctgctggcttaccaatggcagggataccttttctacaacagacttaacttacagatgttttgtaagttttcctttgaatacag

SEQ ID NO: 1349 - DNA, 119 bp, homo sapiens
gtatcaatcagctctgttaccacacaaagggaacatcttaagttactggattagaacttctaagcctgttttagaaagatgttatttcctattttgctccagactatgttttcagcata

SEQ ID NO: 1350 - DNA, 119 bp, homo sapiens
tctaagcctgtctttagaaagatgttatttcctattttgctccagactatgttttcagcataccttgggctgaacaatataaactacttataaaggcccttcagttatctgaacctggc

SEQ ID NO: 1351 - DNA, 119 bp, homo sapiens
cataccttgggtctgaacaatataaactacttataaaggcccttcagttatctgaacctggcaaagaaatcactgattttaaacaaatatgtaaacaaaaataaaatggtaaaaacagt

SEQ ID NO: 1352 - DNA, 119 bp, homo sapiens
aacctaacaaacaaaactttattttcctttaatacaaaattaaatagcaaggggttttctttgtacagtataaattagaaatttacagtacagacatcgatgcagacatacttttgtac

SEQ ID NO: 1353 - DNA, 119 bp, homo sapiens
tttctttgtacagtgataaattagaaatttacagtacagacatcgatgcagacatacttttgtacatcctaaaagcagggtccatttcctttgaaatttagcaattcattcagggcatg

SEQ ID NO: 1354 - DNA, 119 bp, homo sapiens
acttttgtacatccttaaaagcagggtccatttcctttgaaatttagcaattcattcagggcatgtgtacaggaagtttgcctggtacctctttgtcaaacatctgaaagtcccccaga

SEQ ID NO: 1355 - DNA, 119 bp, homo sapiens
tcagggcatgtgtagcaggaagtttgcctggtacctctttgtcaaacatctgaaagtcccccagattggttcaaggttcctggagctgtggggtggcatgaggacccaagaaaggccac

SEQ ID NO: 1356 - DNA, 119 bp, homo sapiens
gtcccccagattggcttcaaggttcctggagctgtggggtggcatgaggacccaagaaaggccacagagatccagcccgactgctgcacagagcaggggaagtcacattttatcttttt

SEQ ID NO: 1357 - DNA, 119 bp, homo sapiens
gaaaggccacagagcatccagcccgactgctgcacagagcaggggaagtcacattttatctttttttcaattacatccgatatttcatctacctttcttacaaagagctcaaggggcca

SEQ ID NO: 1358 - DNA, 119 bp, homo sapiens
aaattcagaaacacctccatgcctcactgggagagatctagaaagcagcttacccctcccaaagcccacgccaagtcagggccccagcctattagtacaatttgaaaactttcacaacc

SEQ ID NO: 1359 - DNA, 119 bp, homo sapiens
cccaaagcccacagccaagtcagggccccagcctattagtacaatttgaaaactttcacaacctcggaggaagatggacccaacctttgtggcgcagagtggctcttgcccctcttttc

SEQ ID NO: 1360 - DNA, 119 bp, homo sapiens
acaacctcggagagaagatggacccaacctttgtggcgcagagtggctcttgcccctcttttcagaagcttctaggatgacagtggtcatgtactgaatattgtaggagagcaaggagg

SEQ ID NO: 1361 - DNA, 119 bp, homo sapiens
cttttcagaagccttctaggatgacagtggtcatgtactgaatattgtaggagagcaaggaggtttaaagctttgaggacatggctcatataggaccccaaaaaggtcctctacaaatt

SEQ ID NO: 1362 - DNA, 119 bp, homo sapiens
aggaggtttaaaagctttgaggacatggctcatataggaccccaaaaaggtcctctacaaattgcctgggaaattctgggaattggctgatgcaaagaagaagagaaaaaaggtacatc

SEQ ID NO: 1363 - DNA, 119 bp, homo sapiens
caaattgcctggggaaattctgggaattggctgatgcaaagaagaagagaaaaaaggtacatcagaaacgaaacatgctactatcagggcaactgagcttgccaaggggaagaggcatg

SEQ ID NO: 1364 - DNA, 119 bp, homo sapiens
tacatcagaaacagaaacatgctactatcagggcaactgagcttgccaaggggaagaggcatgtcggggatctgtaagtcatttgtctcctggtactgtcaagtgtgtaatcaccgcac

SEQ ID NO: 1365 - DNA, 119 bp, homo sapiens
ggcatgtcgggggatctgtaagtcatttgtctcctggtactgtcaagtgtgtaatcaccgcacaagtgctggcaagagacagcaacagaaagctctatgtaggctagagtgaaatgaaa

SEQ ID NO: 1366 - DNA, 119 bp, homo sapiens
ccgcacaagtgcatggcaagagacagcaacagaaagctctatgtaggctagagtgaaatgaaatctatttgtggggctccagtatctgatccttggtaggagcaaaatgctctctaagg

SEQ ID NO: 1367 - DNA, 119 bp, homo sapiens
atgaaatctattatgtggggctccagtatctgatccttggtaggagcaaaatgctctctaaggagtttcaagatctatgatctaaccctggaggaaaagtgataacccaggtcatttgc

SEQ ID NO: 1368 - DNA, 119 bp, homo sapiens
ctaaggagtttccaagatctatgatctaaccctggaggaaaagtgataacccaggtcatttgccagacaaatacaaacccagaagggaactctaaactcaaataaaataaaggaaccaa

SEQ ID NO: 1369 - DNA, 119 bp, homo sapiens
atttgccagacataatacaaacccagaagggaactctaaactcaaataaaataaaggaaccaataggatttcagagtccagtgactcgacatgattgactggaatagcaactctctcca

SEQ ID NO: 1370 - DNA, 119 bp, homo sapiens
aaccaataggattttcagagtccagtgactcgacatgattgactggaatagcaactctctccagtgtccccatcacagaacaaaatacaagacgtaaactgattttaagaggttccttc

SEQ ID NO: 1371 - DNA, 119 bp, homo sapiens
ggttccttccaaagtctgtgctcaatggctcccttccctaactgcagctgtggtcacctcaccagaaataaatactgcaccgacctggtgaaatccctgagtctattcctctagggctg

SEQ ID NO: 1372 - DNA, 119 bp, homo sapiens
tcaccagaaatcaaatactgcaccgacctggtgaaatccctgagtctattcctctagggctgagactgtgagctcatctttgtgtcctcaggtcccatcttggttctcaatacaataag

SEQ ID NO: 1373 - DNA, 119 bp, homo sapiens
gctgagactgttgagctcatctttgtgtcctcaggtcccatcttggttctcaatacaataagcatttaatcagtgaccatgaggatgaggggagccagagagtatagagctaaaaggtg

SEQ ID NO: 1374 - DNA, 119 bp, homo sapiens
taagcatttaattcagtgaccatgaggatgaggggagccagagagtatagagctaaaaggtgctgaacaaatctcaattcagtatctagacacacaagcttcccggaacctgagtttgg

SEQ ID NO: 1375 - DNA, 119 bp, homo sapiens
ggtgctgaacagaatctcaattcagtatctagacacacaagcttcccggaacctgagtttggagagtgcggtgagacagtgacctgggagaggaaaatcagaaagcatctctgaaatta

SEQ ID NO: 1376 - DNA, 119 bp, homo sapiens
ttggagagtgcaggtgagacagtgacctgggagaggaaaatcagaaagcatctctgaaattaaaaaaattcaccccttctccagtttcaggcccaagtaagttgccagttcagcaacag

SEQ ID NO: 1377 - DNA, 119 bp, homo sapiens
attaaaaaaatgtcaccccttctccagtttcaggcccaagtaagttgccagttcagcaacagtctcagaatcaggaaatgggtctccataaaggaaagaggatatgaatcaaccaagta

SEQ ID NO: 1378 - DNA, 119 bp, homo sapiens
acagtctcagagatcaggaaatgggtctccataaaggaaagaggatatgaatcaaccaagtagctcaagagatggttctggccagcaccactctacccccatgttcccttgccctgagg

SEQ ID NO: 1379 - DNA, 119 bp, homo sapiens
agtagctcaagcagatggttctggccagcaccactctacccccatgttcccttgccctgaggtttggccatatgaagcaggagaaaggaatctaccagaaaggaggttggacagaggtg

SEQ ID NO: 1380 - DNA, 119 bp, homo sapiens
gaggtttggcctatatgaagcaggagaaaggaatctaccagaaaggaggttggacagaggtgccattgcccatgtttaatctctggaggccaagggatttctgaggaagctacaatcat

SEQ ID NO: 1381 - DNA, 119 bp, homo sapiens
ggtgccattgcaccatgtttaatctctggaggccaagggatttctgaggaagctacaatcatacccattactgtaggtttcagagaaagaaaaacaaccctcaccttttctctagcaag

SEQ ID NO: 1382 - DNA, 119 bp, homo sapiens
tcatacccatttactgtaggtttcagagaaagaaaaacaaccctcaccttttctctagcaagatgctgtctcaaatatacctatacaagtcacatggaataccccaagccctgaattgc

SEQ ID NO: 1383 - DNA, 119 bp, homo sapiens
caagatgctgtcctcaaatatacctatacaagtcacatggaataccccaagccctgaattgccggcaaaccaaagcagatgtgtgggcccatgtccttgtggcctactctcatagtctt

SEQ ID NO: 1384 - DNA, 119 bp, homo sapiens
ttgccggcaaagccaaagcagatgtgtgggcccatgtccttgtggcctactctcatagtcttcctaaggatttctccagagactgtcacgaagcagagctgatgctttctgttaaaacc

SEQ ID NO: 1385 - DNA, 119 bp, homo sapiens
tcttcctaagggatttctccagagactgtcacgaagcagagctgatgctttctgttaaaaccacctgtactgacttggaaggaatcctgggaaagggatgagagatgtgttaaaagtag

SEQ ID NO: 1386 - DNA, 119 bp, homo sapiens
aaccacctgtaactgacttggaaggaatcctgggaaagggatgagagatgtgttaaaagtagagagaccaggctgggtgtggtggctcacacaggaagagatttatggaatggagacag

SEQ ID NO: 1387 - DNA, 119 bp, homo sapiens
gtagagagacccaggctgggtgtggtggctcacacaggaagagatttatggaatggagacagtgaaacaatgggaattccagaggtccctgctcctttcccagaggaacagtaaagttc

SEQ ID NO: 1388 - DNA, 119 bp, homo sapiens
acagtgaaacagatgggaattccagaggtccctgctcctttcccagaggaacagtaaagttcagcagactgggtgcgtccccatcctagatcagttagaagaacagagattatctattt

SEQ ID NO: 1389 - DNA, 119 bp, homo sapiens
gttcagcagacctgggtgcgtccccatcctagatcagttagaagaacagagattatctatttcagggcttactacagtcggcactcaataaataaaataactgatttttttaacaaata

SEQ ID NO: 1390 - DNA, 119 bp, homo sapiens
atttcagggctttactacagtcggcactcaataaataaaataactgatttttttaacaaataccgatttagaagtgatggagttgattgaaggtcactggtaactgacccctcagccac

SEQ ID NO: 1391 - DNA, 119 bp, homo sapiens
aataccgatttaagaagtgatggagttgattgaaggtcactggtaactgacccctcagccacaaagttctttcctgaaaccataaacactctccattgtctggaatgtgaaaggagagg

SEQ ID NO: 1392 - DNA, 119 bp, homo sapiens
ccacaaagttcttttcctgaaaccataaacactctccattgtctggaatgtgaaaggagaggcctataacctgtagcattgctaaggctactaatccaaatggccacttctgatcaaat

SEQ ID NO: 1393 - DNA, 119 bp, homo sapiens
gaggcctataaccctgtagcattgctaaggctactaatccaaatggccacttctgatcaaatacactttccctgaaaaggcaagagatttgtggaaaaggcatgtcaaaacccaaagca

SEQ ID NO: 1394 - DNA, 119 bp, homo sapiens
aaatacactttgccctgaaaaggcaagagatttgtggaaaaggcatgtcaaaacccaaagcattgtcaaacactagctccagaactcaaaactcagaaatcaggtgcccagattcaccc

SEQ ID NO: 1395 - DNA, 119 bp, homo sapiens
agcattgtcaaaacactagctccagaactcaaaactcagaaatcaggtgcccagattcacccaagtgctttttattgttattatttagtcattgacaagtatcgatcacctactccatg

SEQ ID NO: 1396 - DNA, 119 bp, homo sapiens
acccaagtgctcttttattgttattatttagtcattgacaagtatcgatcacctactccatgcctggcttctgctagatgctgccttggtcacacaatcactgacacattatgaagaaa

SEQ ID NO: 1397 - DNA, 119 bp, homo sapiens
catgcctggctttctgctagatgctgccttggtcacacaatcactgacacattatgaagaaaactgcatacaaacctctatactctaacagcaagaccagtcccctaccgcctggtctt

SEQ ID NO: 1398 - DNA, 119 bp, homo sapiens
gaaaactgcattacaaacctctatactctaacagcaagaccagtcccctaccgcctggtcttccttccctgcctgggccagagtccctgcacaactcccaagacaccagagcagagcgt

SEQ ID NO: 1399 - DNA, 119 bp, homo sapiens
tcttccttcccctgcctgggccagagtccctgcacaactcccaagacaccagagcagagcgtgagtaaggcaggctctgcccctgggtgcgtgctccagggccgtggacagttatggga

SEQ ID NO: 1400 - DNA, 119 bp, homo sapiens
gcgtgagtaagggcaggctctgcccctgggtgcgtgctccagggccgtggacagttatgggaactgtctcaagcagcacagggagttcacattttacatttcataggcaatggagtatc

SEQ ID NO: 1401 - DNA, 119 bp, homo sapiens
gggaactgtctacaagcagcacagggagttcacattttacatttcataggcaatggagtatcagatggattaaaatggttcttctggggatcaattctcatgctcctggagcctgacct

SEQ ID NO: 1402 - DNA, 119 bp, homo sapiens
tatcagatggagttaaaatggttcttctggggatcaattctcatgctcctggagcctgacctagagtctgccaaggtactcagactgggcacagcagcaggggccacctgtgcccactt

SEQ ID NO: 1403 - DNA, 119 bp, homo sapiens
acctagagtctagccaaggtactcagactgggcacagcagcaggggccacctgtgcccacttaacttcatctcaaaagccaagactttgccttccaaaacatacaatcgactttacatg

SEQ ID NO: 1404 - DNA, 119 bp, homo sapiens
acttaacttcagtctcaaaagccaagactttgccttccaaaacatacaatcgactttacatgcatcttgtgtcagagagctcaagaaccacacaaaaacaaaaaggaaagaagaaaggg

SEQ ID NO: 1405 - DNA, 119 bp, homo sapiens
catgcatcttgatgtcagagagctcaagaaccacacaaaaacaaaaaggaaagaagaaagggaaatgtcaactatgggcataaggctcaaaccaaatttttaaaaaagaggaaatgctt

SEQ ID NO: 1406 - DNA, 119 bp, homo sapiens
agggaaatgtcaaactatgggcataaggctcaaaccaaatttttaaaaaagaggaaatgcttacttccaaatttgaccacctttttggaattttgagtccctggaaatgtttttccaca

SEQ ID NO: 1407 - DNA, 119 bp, homo sapiens
gcttcccttcctatttttttaaggcatgaattaataaataaatgtcattgcaaagcagttgctgaagcaacaggtatgagttacaaggagagcaacctgtgacatagtcaatttgtccc

SEQ ID NO: 1408 - DNA, 119 bp, homo sapiens
gcagttgctgaagcagacaggtatgagttacaaggagagcaacctgtgacatagtcaatttgtccccaaatctcatgattagaacgcctaaggcaaggtaagagaaaggccagttacag

SEQ ID NO: 1409 - DNA, 119 bp, homo sapiens
tcaatttgtccccaagatctcatgattagaacgcctaaggcaaggtaagagaaaggccagttacagtttaagagaagtgcaattttcgagaggctgctgggggtacccccttgtgaaga

SEQ ID NO: 1410 - DNA, 119 bp, homo sapiens
ggccagttacagttttaagagaagtgcaattttcgagaggctgctgggggtacccccttgtgaagaacgatgcataaattttaaaagctttggatacctctgctaaaggcaattaagac

SEQ ID NO: 1411 - DNA, 119 bp, homo sapiens
cccttgtgaagaacgtatgcataaattttaaaagctttggatacctctgctaaaggcaattaagacctggctattagagtttgcagttcatttcatatggtctacactttattccctac

SEQ ID NO: 1412 - DNA, 119 bp, homo sapiens
ggcaattaagacctgggctattagagtttgcagttcatttcatatggtctacactttattccctactaacaatcaggcttctggctggcattctggagattcattaagcaccatataaa

SEQ ID NO: 1413 - DNA, 119 bp, homo sapiens
tttattccctactaaccaatcaggcttctggctggcattctggagattcattaagcaccatataaatacccaggccacactgcctccagtgaaatcttacaaggagcctttgccaatta

SEQ ID NO: 1414 - DNA, 119 bp, homo sapiens
gcaccatataaatactccaggccacactgcctccagtgaaatcttacaaggagcctttgccaattactagaaacaattacgcaccaagtagttggattagctgtcctcagttcccttta

SEQ ID NO: 1415 - DNA, 119 bp, homo sapiens
ctttgccaattactaggaaacaattacgcaccaagtagttggattagctgtcctcagttccctttataaactgaaaaagtctccattgtcctaagtagaccagattctgataacattct

SEQ ID NO: 1416 - DNA, 119 bp, homo sapiens
ggcactatcattctgagaatgcaagttgaagttgaccatagttttaaagtcagttgagtatactatgtctggtccaacaatgtgcttttaattgtaattgacacacaaaaattacacag

SEQ ID NO: 1417 - DNA, 119 bp, homo sapiens
atactatgtcatggtccaacaatgtgcttttaattgtaattgacacacaaaaattacacagctaatctggtgaatgcaaagttgccaagaaacttaacatttcagctcttccagactgg

SEQ ID NO: 1418 - DNA, 119 bp, homo sapiens
agctaatctgtgtgaatgcaaagttgccaagaaacttaacatttcagctcttccagactggcgtctgcaagatgcaatcacacaagtaaaatatattaagtccccactgctcaatgcaa

SEQ ID NO: 1419 - DNA, 119 bp, homo sapiens
ggcgtctgcatagatgcaatcacacaagtaaaatatattaagtccccactgctcaatgcaataggtctcggggtccgtcaggtaagtcaacttagtaaatctcattttcctctgaatta

SEQ ID NO: 1420 - DNA, 119 bp, homo sapiens
aataggtctctggggtccgtcaggtaagtcaacttagtaaatctcattttcctctgaattaagtgattgcagaaagtgaatcacccttccttttcccctctttaagcatgctgcagtac

SEQ ID NO: 1421 - DNA, 119 bp, homo sapiens
taagtgattgtcagaaagtgaatcacccttccttttcccctctttaagcatgctgcagtacaaaaattcataaaaataccttttttgagtcattaacataaaatgaagaaaacagcagc

SEQ ID NO: 1422 - DNA, 119 bp, homo sapiens
acaaaaattctataaaaataccttttttgagtcattaacataaaatgaagaaaacagcagcagccaagagagagatgttgaaatttaagagaggaagacagagaagaaaaatccactgg

SEQ ID NO: 1423 - DNA, 119 bp, homo sapiens
gcagccaagaagagagatgttgaaatttaagagaggaagacagagaagaaaaatccactggataccttagtgtgtgagtacagtacttttgtttgttcaaataactgttttatgacaaa

SEQ ID NO: 1424 - DNA, 119 bp, homo sapiens
ggataccttatgtgtgtgagtacagtacttttgtttgttcaaataactgttttatgacaaaggcactgaagattctaacaccacttcttgggagtgcagtccacaaagttctaaacagc

SEQ ID NO: 1425 - DNA, 119 bp, homo sapiens
aaggcactgaaagattctaacaccacttcttgggagtgcagtccacaaagttctaaacagcagacagcgaccacagaagatgtttatgttacatcagccaaactataaaactcttgtaa

SEQ ID NO: 1426 - DNA, 119 bp, homo sapiens
gcagacagcgcaccacagaagatgtttatgttacatcagccaaactataaaactcttgtaacacttttcgaacccagcgtttccagtgtttatagattgctttgctatctgaaagaccc

SEQ ID NO: 1427 - DNA, 119 bp, homo sapiens
aacacttttctgaacccagcgtttccagtgtttatagattgctttgctatctgaaagacccagttagtattaaaatggtaaagggttaaaaaagttaatatttctccctgctagttacc

SEQ ID NO: 1428 - DNA, 119 bp, homo sapiens
ccagttagtatttaaaatggtaaagggttaaaaaagttaatatttctccctgctagttaccaactcacactcaaatcccaccctgcaggggaaaacagtatcgccctggacttcctgga

SEQ ID NO: 1429 - DNA, 119 bp, homo sapiens
ccaactcacagctcaaatcccaccctgcaggggaaaacagtatcgccctggacttcctggaatctaggcggacctccacgctccaagctgcaacctgctaaagtgatcaacgttttgat

SEQ ID NO: 1430 - DNA, 119 bp, homo sapiens
gaatctaggcaggacctccacgctccaagctgcaacctgctaaagtgatcaacgttttgatttttcacactttgaaagcctctaactggcttttccattttggatcattccaaagtctg

SEQ ID NO: 1431 - DNA, 119 bp, homo sapiens
atttttcacagctttgaaagcctctaactggcttttccattttggatcattccaaagtctgcagcaaaacattggttttttgatgctggggtcggggtgggaggcagtgggttgacggg

SEQ ID NO: 1432 - DNA, 119 bp, homo sapiens
tgcagcaaaatcattggttttttgatgctggggtcggggtgggaggcagtgggttgacgggggtcacttattgttgctagtttgttcaaactgagattcactgcataaaacttttagta

SEQ ID NO: 1433 - DNA, 119 bp, homo sapiens
ggggtcacttaattgttgctagtttgttcaaactgagattcactgcataaaacttttagtagaatttccccaaaatgctggcattccccccttcaaaatgaagaaagcatggaggctga

SEQ ID NO: 1434 - DNA, 119 bp, homo sapiens
tagaatttcctccaaaatgctggcattccccccttcaaaatgaagaaagcatggaggctgactagcctttaccacagtctcactgccttttccaggcttcacccaaccatttcctctct

SEQ ID NO: 1435 - DNA, 119 bp, homo sapiens
gactagccttataccacagtctcactgccttttccaggcttcacccaaccatttcctctcttctctctcttacctttccagaattcaccaatctgttggaacacttctgccacgtgtga

SEQ ID NO: 1436 - DNA, 119 bp, homo sapiens
cttctctctctttacctttccagaattcaccaatctgttggaacacttctgccacgtgtgaagagttttgcagaccaaatccacatgcctgaagtgatgcccaccaacaaagacataaa

SEQ ID NO: 1437 - DNA, 119 bp, homo sapiens
gaagagttttggcagaccaaatccacatgcctgaagtgatgcccaccaacaaagacataaaaattttcacatttcaacagccatgttggaatcatctgcagaataccgaaaaagtgccc

SEQ ID NO: 1438 - DNA, 119 bp, homo sapiens
aaaattttcaacatttcaacagccatgttggaatcatctgcagaataccgaaaaagtgcccagttggagtttcataaaaataacaggcaatcacacacgttgcaggaactgtgtacagt

SEQ ID NO: 1439 - DNA, 119 bp, homo sapiens
ccagttggagatttcataaaaataacaggcaatcacacacgttgcaggaactgtgtacagtactgagaaaccccaatcttgaccatcagtctttctaacttgtctgtctttgtcccatc

SEQ ID NO: 1440 - DNA, 119 bp, homo sapiens
gtactgagaacaccccaatcttgaccatcagtctttctaacttgtctgtctttgtcccatccttttgaaatttgaccgaattttgaacaaggccaccaaacctgcagcaatgaacaaag

SEQ ID NO: 1441 - DNA, 119 bp, homo sapiens
tccttttgaagatttgaccgaattttgaacaaggccaccaaacctgcagcaatgaacaaagttccaatgccaaataagtaaagaggggagccaccacgaacccggtgagggcatcgaga

SEQ ID NO: 1442 - DNA, 119 bp, homo sapiens
agttccaatgaccaaataagtaaagaggggagccaccacgaacccggtgagggcatcgagattttggttccaacatagcacaagccagtcagttcatctgcatccaccagtctcataat

SEQ ID NO: 1443 - DNA, 119 bp, homo sapiens
gattttggtttccaacatagcacaagccagtcagttcatctgcatccaccagtctcataatcaagatgaaatggttttcactgcggggatggcccaggctgcaatgtggaaataagagc

SEQ ID NO: 1444 - DNA, 119 bp, homo sapiens
atcaagatgacaatggttttcactgcggggatggcccaggctgcaatgtggaaataagagctgtgcattcaatggcttcatgaccccatttgagtcctgctgccaaaaaccaagtgagt

SEQ ID NO: 1445 - DNA, 119 bp, homo sapiens
gctgtgcatttcaatggcttcatgaccccatttgagtcctgctgccaaaaaccaagtgagtgtcagaatacccaccaaatggagctggccattccaaaaaagtacatcagcaagaaaat

SEQ ID NO: 1446 - DNA, 119 bp, homo sapiens
gtgtcagaataacccaccaaatggagctggccattccaaaaaagtacatcagcaagaaaattattgcactcctgtgttcttaagtccttcttggatgagaacaggttctgctgcctctt

SEQ ID NO: 1447 - DNA, 119 bp, homo sapiens
attattgcacatcctgtgttcttaagtccttcttggatgagaacaggttctgctgcctcttcaaaatcaaggatatcctttcccggcctacagtcagcctgacaatataagcaatgcta

SEQ ID NO: 1448 - DNA, 119 bp, homo sapiens
ttcaaaatcacaggatatcctttcccggcctacagtcagcctgacaatataagcaatgctataaatatttagcacatactgagaaatatgatggggcgctcagggtaggaaaacctaga

SEQ ID NO: 1449 - DNA, 119 bp, homo sapiens
tataaatattatagcacatactgagaaatatgatggggcgctcagggtaggaaaacctagaagaatcgacaggaaggtcagtactgtgaaggcagtggagatgaaacacaggctggccc

SEQ ID NO: 1450 - DNA, 119 bp, homo sapiens
gaagaatcgatcaggaaggtcagtactgtgaaggcagtggagatgaaacacaggctggcccacacagcctccagatatcagtgaactccttggctgagcggctgtataagccagcatca

SEQ ID NO: 1451 - DNA, 119 bp, homo sapiens
ccacacagccatccagatatcagtgaactccttggctgagcggctgtataagccagcatcatagccacattgagcacacagttcaggctccttttcacccagatgtactgatcagaatt

SEQ ID NO: 1452 - DNA, 119 bp, homo sapiens
catagccacacttgagcacacagttcaggctccttttcacccagatgtactgatcagaattggttcccaagagtgacactcttccccaggctggatgggggttttgtgaggtaagggca

SEQ ID NO: 1453 - DNA, 119 bp, homo sapiens
ttggttcccacagagtgacactcttccccaggctggatgggggttttgtgaggtaagggcacctcttcacacctggcccttccatgcacatgtggttgtggtcgttctgtggtgggaat

SEQ ID NO: 1454 - DNA, 119 bp, homo sapiens
cacctcttcatcacctggcccttccatgcacatgtggttgtggtcgttctgtggtgggaatttgctgcattcagactctctggccaggcaaatccaaattccttcaggacgggttcaca

SEQ ID NO: 1455 - DNA, 119 bp, homo sapiens
atttgctgcagttcagactctctggccaggcaaatccaaattccttcaggacgggttcacagcgtctctgactgaaagacacatgccgccgcatgggccaatggggatgttgatcttct

SEQ ID NO: 1456 - DNA, 119 bp, homo sapiens
ctgcagctggctggagcagccgtactggatgagcggtgtgaaagttgtcagctgcagctcggcgtccgttgcagctcgtgcccaaccaggttgggcatcttggtcacgttgtagccgag

SEQ ID NO: 1457 - DNA, 119 bp, homo sapiens
tcggcgtccgtctgcagctcgtgcccaaccaggttgggcatcttggtcacgttgtagccgaggttctggacatggagatgcggatggggtcgcagcgccgctcttcctcgtccccgaag

SEQ ID NO: 1458 - DNA, 119 bp, homo sapiens
cgaggttctggcacatggagatgcggatggggtcgcagcgccgctcttcctcgtccccgaagccccgcgcggccccaggagcagcagcaactgcaggagcaaccccagactgagaccga

SEQ ID NO: 1459 - DNA, 119 bp, homo sapiens
aggccatggccagcatcgggggtagcagcggcagcggctggggctgctctggcagacacccccagtttgacgggggcgccggctgcccgcgctgctcccagctcccgggacgggagtgt

SEQ ID NO: 1460 - DNA, 119 bp, homo sapiens
ggcagacacccccagtttgcacgggggcgccggctgcccgcgctgctcccagctcccgggacgggagtggatgcggcgacgagggggcagcggccggctctccagcagctgcgcgcgac

SEQ ID NO: 1461 - DNA, 119 bp, homo sapiens
agctcccgggacgggagtgtgatgcggcgacgagggggcagcggccggctctccagcagctgcgcgcgatgtgtgggattttagacgtcccgggccgaggccgagggacaggctgcgag

SEQ ID NO: 1462 - DNA, 119 bp, homo sapiens
ctccagcagctgcgcgcgactgtgtgggattttagacgtcccgggccgaggccgagggacaggctgcgaggtcatggctgcaggcggcgagcccacaagccggcgccggccgcgtccgt

SEQ ID NO: 1463 - DNA, 119 bp, homo sapiens
gccgagggacaggctgcgagggtcatggctgcaggcggcgagcccacaagccggcgccggccgcgtccgtcggcgtctccgcgaggccagccagcagccagcgctgcgcagctctcacc

SEQ ID NO: 1464 - DNA, 119 bp, homo sapiens
atcactgtagtagtagctggaaagagaaatctgtgactccaattagccagttcctgcagaccttgtgagactagaggaagaatgctcctggctgttttgtactgcctgctgtggagttt

SEQ ID NO: 1465 - DNA, 119 bp, homo sapiens
gcagaccttgtgaggactagaggaagaatgctcctggctgttttgtactgcctgctgtggagtttccagcctccgctggccatttccctagagcctgtgtctcctctaagaacctgatg

SEQ ID NO: 1466 - DNA, 119 bp, homo sapiens
tgtggagtttccagacctccgctggccatttccctagagcctgtgtctcctctaagaacctgatggagaggaatgctgtccaccgtggagcggggacaggagtccctgtggccagcttt

SEQ ID NO: 1467 - DNA, 119 bp, homo sapiens
gaacctgatggagaaggaatgctgtccaccgtggagcggggacaggagtccctgtggccagctttcaggagaggttcctgtcagaatatccttctgtccaatgcaccacttgggcctca

SEQ ID NO: 1468 - DNA, 119 bp, homo sapiens
ggccagctttcaggcagaggttcctgtcagaatatccttctgtccaatgcaccacttgggcctcaatttccttcacaggggtggatgaccgggagtcgtggccttccgtcttttataat

SEQ ID NO: 1469 - DNA, 119 bp, homo sapiens
ttgggcctcaatttcccttcacaggggtggatgaccgggagtcgtggccttccgtcttttataataggactgccagtgctctggcaacttcatgggattcaactgtggaaactgcaagt

SEQ ID NO: 1470 - DNA, 119 bp, homo sapiens
cttttataataggacctgccagtgctctggcaacttcatgggattcaactgtggaaactgcaagtttggttttggggaccaaactgcacagagagacgactcttggtgagaagaaacat

SEQ ID NO: 1471 - DNA, 119 bp, homo sapiens
aactgcaagtttggcttttggggaccaaactgcacagagagacgactcttggtgagaagaaacatcttcatttgagtgccccagagaaggacaaattttttgcctacctcactttagca

SEQ ID NO: 1472 - DNA, 119 bp, homo sapiens
gaagaaacatcttcgatttgagtgccccagagaaggacaaattttttgcctacctcactttagcaaagctaccatcagctcagactatgtcatccccatagggacctatggccaaatga

SEQ ID NO: 1473 - DNA, 119 bp, homo sapiens
cactttagcaaagcataccatcagctcagactatgtcatccccatagggacctatggccaaatgaaaaaggatcaacacccatgtttaacgacatcaatatttatgacctctttgtctg

SEQ ID NO: 1474 - DNA, 119 bp, homo sapiens
ggccaaatgaaaaatggatcaacacccatgtttaacgacatcaatatttatgacctctttgtctggatgattattatgtgtcaatggatgcactgcttgggggatctgaaatctggaga

SEQ ID NO: 1475 - DNA, 119 bp, homo sapiens
tctttgtctggatgcattattatgtgtcaatggatgcactgcttgggggatctgaaatctggagagacatgattttgcccatgaagcaccagcttttctgccttggcatagactcttct

SEQ ID NO: 1476 - DNA, 119 bp, homo sapiens
aatctggagagacattgattttgcccatgaagcaccagcttttctgccttggcatagactcttcttgttcggtgggaacaagaaatccagaagctgacaggagatgaaaacttcactat

SEQ ID NO: 1477 - DNA, 119 bp, homo sapiens
agactcttcttgttgcggtgggaacaagaaatccagaagctgacaggagatgaaaacttcactattccaattgggactggcgggatgcagaaaagtgtgacatttgcacagatgagtac

SEQ ID NO: 1478 - DNA, 119 bp, homo sapiens
acttcactattccatattgggactggcgggatgcagaaaagtgtgacatttgcacagatgagtacatggaggtcagcaccccacaaatcctaacttactcagcccagcatcattcttct

SEQ ID NO: 1479 - DNA, 119 bp, homo sapiens
attgtctgtagccgattggaggagtacaacagccatcagtctttatgcaatggaacgcccgagggaccttacggcgtaatcctggaaaccatgacaaatccagaaccccaaggctcccc

SEQ ID NO: 1480 - DNA, 119 bp, homo sapiens
aatggaacgcccgagggacctttacggcgtaatcctggaaaccatgacaaatccagaaccccaaggctccctcttcagctgatgtagaattttgcctgagtttgacccaatatgaatct

SEQ ID NO: 1481 - DNA, 119 bp, homo sapiens
aaatccagaaccccaaggctcccctcttcagctgatgtagaattttgcctgagtttgacccaatatgaactggttccatggataaagctgccaatttcagctttagaaatacactggaa

SEQ ID NO: 1482 - DNA, 119 bp, homo sapiens
gatttgctagtccacttactgggatagcggatgcctctcaaagcagcatgcacaatgccttgcacatcttatgaatggaacaatgtcccaggtacagggatctgccaacgatcctatct

SEQ ID NO: 1483 - DNA, 119 bp, homo sapiens
ggatgcctctcaaagcagcatgcacaatgccttgcacatctatatgaatggaacaatgtcccaggtacaggatctgccaacgatcctatcttccttcttcaccatgcatttgttgacag

SEQ ID NO: 1484 - DNA, 119 bp, homo sapiens
tatttttgagcagtggctccgaaggcaccgtcctcttcaagaagtttatccagaagccaatgcacccatggacataaccgggaatcctacatggttccttttataccactgtacagaaa

SEQ ID NO: 1485 - DNA, 119 bp, homo sapiens
cctcttcaagaagtttatccagaagccaatgcacccattggacataaccgggaatcctacatggttcctttataccactgtacagaaatggtgatttctttatttcatccaaagatctg

SEQ ID NO: 1486 - DNA, 119 bp, homo sapiens
cacccattggacataaccgggaatcctacatggttccttttataccactgtacagaaatggtgatttcttatttcatccaaagatctgggctatgactatagctatctacaagattcag

SEQ ID NO: 1487 - DNA, 119 bp, homo sapiens
acccagactcttttcaagactacattaagtcctatttggaacaagcgagtcggatctggtcatggctcctggggcggcgatggtaggggccgtcctcactgccctgctggcagggcttg

SEQ ID NO: 1488 - DNA, 119 bp, homo sapiens
ctggtcatggctccttggggcggcgatggtaggggccgtcctcactgccctgctggcagggcttgtgagttgctgtgtcgtcacaagagaaagcagcttcctgaagaaaagcagccact

SEQ ID NO: 1489 - DNA, 119 bp, homo sapiens
gcagggcttgtgagcttgctgtgtcgtcacaagagaaagcagcttcctgaagaaaagcagccactcctctggagaaagaggattaccacagcttgtatcagagccatttataaaaggct

SEQ ID NO: 1490 - DNA, 119 bp, homo sapiens
agcagccactcctcatggagaaagaggattaccacagcttgtatcagagccatttataaaaggcttaggaatagagtagggccaaaaagcctgacctcactctaactcaaagtaatgtc

SEQ ID NO: 1491 - DNA, 119 bp, homo sapiens
ataaaaggcttaggcaatagagtagggccaaaaagcctgacctcactctaactcaaagtaatgtccaggtcccagagaatatctgctggtatttttctgtaaagaccatttgcaaaatt

SEQ ID NO: 1492 - DNA, 119 bp, homo sapiens
aagtaatgtccaggttcccagagaatatctgctggtatttttctgtaaagaccatttgcaaaattgtaactaatacaaagtgtagccttcttccaactcaggtagaacacacctgtctt

SEQ ID NO: 1493 - DNA, 119 bp, homo sapiens
ttgcaaaattgtaacctaatacaaagtgtagccttcttccaactcaggtagaacacacctgtctttgtctgctgttttcactcagcccttttaacattttcccctaagcccatatgtct

SEQ ID NO: 1494 - DNA, 119 bp, homo sapiens
cacctgtctttgtcttgctgttttcactcagcccttttaacattttcccctaagcccatatgtctaaggaaggatgctatttggtaatgaggaactgttatttgtatgtgaattaaagt

SEQ ID NO: 1495 - DNA, 119 bp, homo sapiens
ccatatgtctaaggaaaggatgctatttggtaatgaggaactgttatttgtatgtgaattaaagtgctctattttaaaaaattgaaataattttgatttttgccttctgattatttaaa

SEQ ID NO: 1496 - DNA, 119 bp, homo sapiens
gaattaaagtgctcttattttaaaaaattgaaataattttgatttttgccttctgattatttaaagatcatatatgttttattggccccttctttattttaataaaacagtgagaaatc

SEQ ID NO: 1497 - DNA, 119 bp, homo sapiens
ccaggacatcacaggtgacatttactatttcaacttcgccaacgggcagtctatgtgggaccatccatggacgaacactatcggagcttggtgatccaagagcgggcaaagctgtcaac

SEQ ID NO: 1498 - DNA, 119 bp, homo sapiens
ggtgacatttactatttcaacttcgccaacgggcagtctatgtgggaccatccatgtgacgaacactatggagcttggtgatccaagagcgggcaaagctgtcaacttctggggccatt

SEQ ID NO: 1499 - DNA, 119 bp, homo sapiens
gccttgggttcctcattagccccagttcatgttcctcttgggggcctggctcctttacgaggtcttgtgataccccaccctctgctcttcgtggatctcaaagcgtgagcctggggagc

SEQ ID NO: 1500 - DNA, 119 bp, homo sapiens
gggggcctggctcctttacgaggtcttgtggataccccaccctctgctcttcgtggatctcaaagcgtggcctggggagctcagtggagtctggacgtcagcttggagaactcatgctg

SEQ ID NO: 1501 - DNA, 119 bp, homo sapiens
ccttcacagggtctcaagacctctgcttatacaaagggtctcttgggctccatatatgaggacaagactctctcagcctcttgggtttaggagaagaaaccaatgaggaggatgaggag

SEQ ID NO: 1502 - DNA, 119 bp, homo sapiens
aagacctctgcttatacaaagggtctcttgggctccatatatgaggacaagactgctctcagcctcttggtttaggagaagaaaccaatgaggaggatgaggaggaaagtgacaaccag

SEQ ID NO: 1503 - DNA, 119 bp, homo sapiens
gagtctctgagaacaagccagccagaggagaagaaggatgtttctctggattcagatgctgccggtcccctactccctgcaagccctccagcccaggtgcagacagcagtctgagcagt

SEQ ID NO: 1504 - DNA, 119 bp, homo sapiens
agatgctgccggtccccctactccctgcaagccctccagcccaggtgcagacagcagtctgagcagtgcgttggcaaagggcgacagggaagtggagcaagacctggtcttccagaaaa

SEQ ID NO: 1505 - DNA, 119 bp, homo sapiens
gcagtctgagcagtgctgttggcaaagggcgacagggaagtggagcaagacctggtcttccagaaaaagggaaaatgagaagagtgaacctaagatttgcaggaatctggtgaccccca

SEQ ID NO: 1506 - DNA, 119 bp, homo sapiens
ggtcttccagaaaaagaggaaaatgagaagagtgaacctaagatttgcaggaatctggtgacccccaagcagaccctacaggcagtgagcctgccaaagcctctgaaaaggaagcacca

SEQ ID NO: 1507 - DNA, 119 bp, homo sapiens
tctggtgacccccaaggcagaccctacaggcagtgagcctgccaaagcctctgaaaaggaagcaccagagacacagtagatgcaggagaggagggttccaggagggaagaggcagccaa

SEQ ID NO: 1508 - DNA, 119 bp, homo sapiens
aaaaggaagcaccagaggacacagtagatgcaggagaggagggttccaggagggaagaggcagccaagggccaaagaagaaggcttctgctctggaagagggcagttcagacgccagcc

SEQ ID NO: 1509 - DNA, 119 bp, homo sapiens
gttatctcctccacttccacacgaggagcgggcccagagtccccctcgcagcctggccactgaagaagacctccccagggccccgaggggcagcccgagtggaaggaggcagaggagct

SEQ ID NO: 1510 - DNA, 119 bp, homo sapiens
cagcctggccactgaagaagagcctccccagggccccgaggggcagcccgagtggaaggaggcagaggacttggggaggactctgcagccagcctcagcctgcagctgtccctccagag

SEQ ID NO: 1511 - DNA, 119 bp, homo sapiens
ggagcaggccccaagcccacctgctgcctgtgagaagggcaaggagcagcattcccaggccgaggagctggccctgggcaggaagaggcagaggatcctgaggagaaggtggcggtcag

SEQ ID NO: 1512 - DNA, 119 bp, homo sapiens
ctgtgagaagggcaaggagcagcattcccaggccgaggagctgggccctgggcaggaagaggcagaggacctgaggagaaggtggcggtcagccccaccccgccagtctctccagaggt

SEQ ID NO: 1513 - DNA, 119 bp, homo sapiens
gcgatccacagagcctgtggctcccccagagcagctctcagaggctgcactaaaggccatggaagaggcgtggcccaagtactcgagcaagaccagaggcacctgctggaatccaagca

SEQ ID NO: 1514 - DNA, 119 bp, homo sapiens
tgcactaaaggccatggaagaggcagtggcccaagtactcgagcaagaccagaggcacctgctggaatcaagcaagagaagatgcagcaactgcgggagaagctgtgccaagaggagga

SEQ ID NO: 1515 - DNA, 119 bp, homo sapiens
agaccagaggcacctgctggaatccaagcaagagaagatgcagcaactgcgggagaagctgtgccaagagaggaagaggagatcctccggcttcaccagcagaaagagcaatctctcag

SEQ ID NO: 1516 - DNA, 119 bp, homo sapiens
ttccttgagggagcggctgcagaaagccattgaggaggaggaggcccggatgagagaggaggaaagccaaggctatcctggctccgagctcaggtccagtccagcacacaagcagatga

SEQ ID NO: 1517 - DNA, 119 bp, homo sapiens
gcggctgcagaaagccattgaggaggaggaggcccggatgagagaggaggaaagccagaggctatcctgctccgagctcaggtccagtccagcacacaagcagatgaggaccaaatcag

SEQ ID NO: 1518 - DNA, 119 bp, homo sapiens
ggctgagcaagaggcttccctgcagaaactgagagaagagttggagtctcaacagaaggctgagagggcagcttggaacagaaaaataggcaaatgctggagcagctcaaggaagagat

SEQ ID NO: 1519 - DNA, 119 bp, homo sapiens
tcaacagaaggctgagagggccagcttggaacagaaaaataggcaaatgctggagcagctcaaggaagaatagaggcttcggagaagagcgagcaggctgccctgaatgctgcaaagga

SEQ ID NO: 1520 - DNA, 119 bp, homo sapiens
gctggagcagctcaaggaagagatagaggcttcggagaagagcgagcaggctgccctgaatgctgcaaagagaaggctctgcagcagctgagggagcagctggaaggggagaggaaaga

SEQ ID NO: 1521 - DNA, 119 bp, homo sapiens
gtggtctccagcctccagaagaagatacaggaagctcaacagaaagaggaggcccagctgcagaagtgcttgggcaagtggagcacagagttcaccagaagtcttatcacgtggctggg

SEQ ID NO: 1522 - DNA, 119 bp, homo sapiens
ctccagaagaagatacaggaagctcaacagaaagaggaggcccagctgcagaagtgccttgggcaagtgagcacagagttcaccagaagtcttatcacgtggctgggtatgagcacgag

SEQ ID NO: 1523 - DNA, 119 bp, homo sapiens
ctcagcagtctcctgcgagagaagcgccaggaagtggaaggggagcatgagaggaggttggacaagatgaggaggagcaccagcaagtgatggctaaggccagagagcagtatgaagct

SEQ ID NO: 1524 - DNA, 119 bp, homo sapiens
agcagtctcctgcgagagaagcgccaggaagtggaaggggagcatgagaggaggttggacaagatgaagaggagcaccagcaagtgatggctaaggccagagagcagtatgaagctgag

SEQ ID NO: 1525 - DNA, 119 bp, homo sapiens
gagaggaagcagcgggctgagcttctggggcacctgaccggagagctggagcgcctgcagagggcccataacgagaactggagactgtgaggcaggagcaacacaagcgtcttgaggac

SEQ ID NO: 1526 - DNA, 119 bp, homo sapiens
ctggggcacctgaccggagagctggagcgcctgcagagggcccatgaacgagaactggagactgtgaggaggagcaacacaagcgtcttgaggacttgcggcgccggcacagggagcag

SEQ ID NO: 1527 - DNA, 119 bp, homo sapiens
gaagccacagccacccatcagcagctggaggaggcacagaaggagcacacccacctgttgcagtcaaacagcagctccgagaaattcttgatgagctgcaggcccgcaagctgaagctg

SEQ ID NO: 1528 - DNA, 119 bp, homo sapiens
gttgcagtcaaaccagcagctccgagaaattcttgatgagctgcaggcccgcaagctgaagctggagtccaagtggatctgctgcaggctcagagccagcaactgcagaaacacttcag

SEQ ID NO: 1529 - DNA, 119 bp, homo sapiens
cagcctggaggctgaagctcaaaagaagcagcacctgttgagagaagtgacagttgaggaaaataatgctccccacattttgagccagatctccatattgaggacctgaggaaatccct

SEQ ID NO: 1530 - DNA, 119 bp, homo sapiens
gaggctgaagctcaaaagaagcagcacctgttgagagaagtgacagttgaggaaaataatgcttccccaattttgagccagatctccatattgaggacctgaggaaatcccttggaaca

SEQ ID NO: 1531 - DNA, 119 bp, homo sapiens
cctgtcctcccacaatgtctggcacctcctctctgctgagggggtagccctccgtagtgccaaggagttcttgtgcagcagacacgctccatgcggaggcggcagacagctctgaaagc

SEQ ID NO: 1532 - DNA, 119 bp, homo sapiens
ccgtagtgccaaggagttccttgtgcagcagacacgctccatgcggaggcggcagacagctctgaaagcgcccagcagcattggcgccatgagctggccagtgcgcaggaggtggccaa

SEQ ID NO: 1533 - DNA, 119 bp, homo sapiens
gcagacagctctgaaagctgcccagcagcattggcgccatgagctggccagtgcgcaggaggtggccaagacccaccaggcatcaaggccctggaagatatgcgcaagaacctggagaa

SEQ ID NO: 1534 - DNA, 119 bp, homo sapiens
gcctcagatgagggcactctgggaggatcccccaccaagaaggcagtaaccttcgacctcagtgacatgacagcctgagcagtgaaagttctgaatctttttccccgcctcaccgtgag

SEQ ID NO: 1535 - DNA, 119 bp, homo sapiens
tgggaggatcccccaccaagaaggcagtaaccttcgacctcagtgacatggacagcctgagcagtgaaattctgaatctttttccccgcctcaccgtgagtggtggcggcagcagagga

SEQ ID NO: 1536 - DNA, 119 bp, homo sapiens
tcgactcaaccccgagtctcacctcccgcaagatccacgggcttagccactccctccggcagatcagcaccagctgagcagtgtcctcagcatcctggacagcctcaaccctcagtcgc

SEQ ID NO: 1537 - DNA, 119 bp, homo sapiens
ggcagatcagcagccagctgagcagtgtcctcagcatcctggacagcctcaaccctcagtcgccgccgcgctcctcgcctccatgccagcccagctccctccccgggaccctaagagca

SEQ ID NO: 1538 - DNA, 119 bp, homo sapiens
agtcgccgccgccgctcctcgcctccatgccagcccagctccctccccgggaccctaagagcacccccaccccacctactatggctccctggccaggttctcagccttatcatctgcta

SEQ ID NO: 1539 - DNA, 119 bp, homo sapiens
agagcacccccacccccacctactatggctccctggccaggttctcagccttatcatctgctacacccagtccacccaatgggcctgggattcagggcaggggcccaggctcccctcct

SEQ ID NO: 1540 - DNA, 119 bp, homo sapiens
ctgctacacccacgtccacccaatgggcctgggattcagggcaggggcccaggctcccctcctctgtggtcaaacggtggacgacttcctgttggagaagtggcgcaagtattttccat

SEQ ID NO: 1541 - DNA, 119 bp, homo sapiens
tgagcagctccggctcctacagcactcccattcgcaagtccctgaggcgggcagcaccacctttcagggataattgaggccaaccggaggtggctggaacgtgtcaagaatgaccccag

SEQ ID NO: 1542 - DNA, 119 bp, homo sapiens
gcagctccggctcctacagcactcccattcgcaagtccctgaggcgggcagcaccacctttcagggcatattgaggccaaccggaggtggctggaacgtgtcaagaatgaccccaggtt

SEQ ID NO: 1543 - DNA, 119 bp, homo sapiens
acctctcttctcgtcaacacccaagccaaaagctactttgagcctcctgcagctgggccttgatgagcaaacagagtgaaggtgtatcgcttctgaggccctgagcaggggcttggggc

SEQ ID NO: 1544 - DNA, 119 bp, homo sapiens
ttgatgagcacaacagagtgaaggtgtatcgcttctgaggccctgagcaggggcttggggcagcccagctctcctccacccagaccaagtgcctgaggagctgcctgccttcttccatc

SEQ ID NO: 1545 - DNA, 119 bp, homo sapiens
gcagcccagcctctcctccacccagaccaagtgcctgaggagctgcctgccttcttccatctgagaaagaccctccttccccctttgacttgcaggagccaccagggaccagggggttg

SEQ ID NO: 1546 - DNA, 119 bp, homo sapiens
tctgagaaagcaccctccttccccctttgacttgcaggagccaccagggaccagggggttgagtggaacgtaaagccacacattctgtgactatataacctatctcaggctaaaatgtg

SEQ ID NO: 1547 - DNA, 119 bp, homo sapiens
tgagtggaacagtaaagccacacattctgtgactatataacctatctcaggctaaaatgtgtggactcgacgagctcttgtcattgacatggcaagctgatggcgtgcggtggctgcgg

SEQ ID NO: 1548 - DNA, 119 bp, homo sapiens
tgtggactcgtacgagctcttgtcattgacatggcaagctgatggcgtgcggtggctgcggggtatcaggccgggagccctttgggaggaagggaggcgttagaggagctgccttcgga

SEQ ID NO: 1549 - DNA, 119 bp, homo sapiens
ggggtatcagggccgggagccctttgggaggaagggaggcgttagaggagctgccttcggaggctcaggagtccctttggagctggttgtttccttggccctgcagcgcactgctcggg

SEQ ID NO: 1550 - DNA, 119 bp, homo sapiens
gaggctcagggagtccctttggagctggttgtttccttggccctgcagcgcactgctcggggctcccaagaggttgtgtgtatggttcttaattcatcaggacaaagacccccagcatg

SEQ ID NO: 1551 - DNA, 119 bp, homo sapiens
gggctcccaaggaggttgtgtgtatggttcttaattcatcaggacaaagacccccagcatgtgtgtacctgggacccgatttctctgggcccacatctatctccaatacctcagcctca

SEQ ID NO: 1552 - DNA, 119 bp, homo sapiens
tgtgtgtaccctgggacccgatttctctgggcccacatctatctccaatacctcagcctcagatcagacctttcttttttgtctttcttctcttaatttttaaatgcctcttttcttga

SEQ ID NO: 1553 - DNA, 119 bp, homo sapiens
cagatcagaccctttcttttttgtctttcttctcttaatttttaaatgcctcttttcttgagcattccactctctttttgaccctctcaggactgggcttagctgtccagagccctgcc

SEQ ID NO: 1554 - DNA, 119 bp, homo sapiens
gagcattccatctctctttttgaccctctcaggactgggcttagctgtccagagccctgccggagggtgtgggggctgtccctctgcaggcactgtgttttcctcaggggctgtcctca

SEQ ID NO: 1555 - DNA, 119 bp, homo sapiens
ccggagggtgctgggggctgtccctctgcaggcactgtgttttcctcaggggctgtcctcagaacaccctcctgctccctggggctcctcagggagccatttcagctggagtctcaggt

SEQ ID NO: 1556 - DNA, 119 bp, homo sapiens
cagaacacccctcctgctccctggggctcctcagggagccatttcagctggagtctcaggtctcaaaaaaacttctccaggaggccaaaaaaagactgggttggcttctggtcctcatg

SEQ ID NO: 1557 - DNA, 119 bp, homo sapiens
gtctcaaaaacaacttctccaggaggccaaaaaaagactgggttggcttctggtcctcatgatggctttatcctcctgggacactttgggtatattcatgggcattgtttccatctgtc

SEQ ID NO: 1558 - DNA, 119 bp, homo sapiens
tgatggcttttatcctcctgggacactttgggtatattcatgggcattgtttccatctgtcttttctactgtgccacccctgccctgattccacggctgcctcaggcaggcaggcaagg

SEQ ID NO: 1559 - DNA, 119 bp, homo sapiens
tcttttctacctgtgccacccctgccctgattccacggctgcctcaggcaggcaggcaaggagctaggcggtgcccggccctggcagcaaggggtctttgtgcagttggagatgctgcc

SEQ ID NO: 1560 - DNA, 119 bp, homo sapiens
ggagctaggccggtgcccggccctggcagcaaggggtctttgtgcagttggagatgctgccgttgtggcgagcgtcctgcagccccgcttccatcagcaggctctggggtgggggcttt

SEQ ID NO: 1561 - DNA, 119 bp, homo sapiens
ccgttgtggcagagcgtcctgcagccccgcttccatcagcaggctctggggtgggggctttgcaggggagctctctgatgtttgttccgttgtttaaataaaatgcacttatttttgtt

SEQ ID NO: 1562 - DNA, 119 bp, homo sapiens
gagggttcttaggtttattgagtgatctctgagaaaagggccggccccaggagcaggagggggtggggagatccagagaagcagaggaccaggaagagagcaccccaccgtgggctcct

SEQ ID NO: 1563 - DNA, 119 bp, homo sapiens
gagggggtggggaggatccagagaagcagaggaccaggaagagagcaccccaccgtgggctcctggaccgagcaactgggggacttacacttgccagcacagcacactcctctggtctt

SEQ ID NO: 1564 - DNA, 119 bp, homo sapiens
gggctcctggaccagagcaactgggggacttacacttgccagcacagcacactcctctggtcttgggcaaaatccagccactgccccatgctgccagacctgatcgcagacagccactg

SEQ ID NO: 1565 - DNA, 119 bp, homo sapiens
ctggtcttgggcagaaatccagccactgccccatgctgccagacctgatcgcagacagccactgttcccttccttgccagcagcaggacggagagtgctctaccccacctccctagtca

SEQ ID NO: 1566 - DNA, 119 bp, homo sapiens
agccactgttcccattccttgccagcagcaggacggagagtgctctaccccacctccctagtcattcacatattccaggggggccagccctcctggatgacctggttgtcagcctcaca

SEQ ID NO: 1567 - DNA, 119 bp, homo sapiens
cctagtcattcacaatattccaggggggccagccctcctggatgacctggttgtcagcctcacaccctcttctaggagtgagagcatgagctcactttgcagtgggcactaagcaaaga

SEQ ID NO: 1568 - DNA, 119 bp, homo sapiens
gcctcacaccctccttctaggagtgagagcatgagctcactttgcagtgggcactaagcaaagactgggagctgtgccagtcggagtacaccagaaatccggagaaggtgctgtctgtc

SEQ ID NO: 1569 - DNA, 119 bp, homo sapiens
agcaaagactggggagctgtgccagtcggagtacaccagaaatccggagaaggtgctgtctgtcttgatctggcatagatgccaatgtagtcacccacacccacctgcacccacacttg

SEQ ID NO: 1570 - DNA, 119 bp, homo sapiens
tgtctgtcttgatgctggcatagatgccaatgtagtcacccacacccacctgcacccacacttggtcctaggctccagcctcaccatggccccccccgagagcgaggctggcttgggcc

SEQ ID NO: 1571 - DNA, 119 bp, homo sapiens
cacacttggtcctcaggctccagcctcaccatggccccccccgagagcgaggctggcttgggccacccccgaaaaactggaagaaagaggcaatggattcgccattcttcaccagatca

SEQ ID NO: 1572 - DNA, 119 bp, homo sapiens
cttgggccaccccccgaaaaactggaagaaagaggcaatggattcgccattcttcaccagatcaaactgaggctggcccggtagacggtggcatggacggcgaagtagtagaccccagg

SEQ ID NO: 1573 - DNA, 119 bp, homo sapiens
ccagatcaaactgcaggctggcccggtagacggtggcatggacggcgaagtagtagaccccaggcacctgcaggtgaacttgccggtgacggcgtcgtaatgtccctgctcgttcacca

SEQ ID NO: 1574 - DNA, 119 bp, homo sapiens
accccaggcacctggcaggtgaacttgccggtgacggcgtcgtaatgtccctgctcgttcaccagcacgggtcgaagggcaagggtgcgtcagacggcggaggcacccggctctcggag

SEQ ID NO: 1575 - DNA, 119 bp, homo sapiens
gttcaccagcacgcggtcgaagggcaagggtgcgtcagacggcggaggcacccggctctcggagcgcttgcgctgaaggcggatcgcggaggcaccgagcactccccggcaggcccggt

SEQ ID NO: 1576 - DNA, 119 bp, homo sapiens
tctcggagcgcttggcgctgaaggcggatcgcggaggcaccgagcactccccggcaggcccggtgggcccgcgggtcccgcctctcctcgcggcccggggtcccctcgaggtcccggca

SEQ ID NO: 1577 - DNA, 119 bp, homo sapiens
cggcaagccctggctgccatggtggcccggcgtgcctggaaggccggggtgccccgggcagaggctgggatcttgttgtcgtccagtgggggcgagccggccgccaggcccaggagcag

SEQ ID NO: 1578 - DNA, 119 bp, homo sapiens
tgcctggaaggccggggtgccccgggcagaggctggggatcttgttgtcgtccagtgggggcgagccggcgccaggcccaggagcagcaggacgaggagtggcctcatagcgctggcac

SEQ ID NO: 1579 - DNA, 119 bp, homo sapiens
ctggggatcttgttgtcgtccagtgggggcgagccggccgccaggcccaggagcagcaggacgaggagtgcctcatagcgctggcaccgggagcccggacgccggggtcctctcgcagt

SEQ ID NO: 1580 - DNA, 119 bp, homo sapiens
ccgatggcctccttcggggcgctcgctactccggaccctccagttggtggtgctccagcccccgcgctttccccggccaggcgccccctgccctgccgtcaccccagtcctggttcgct

SEQ ID NO: 1581 - DNA, 119 bp, homo sapiens
ccagcccccgcgcttctccccggccaggcgccccctgccctgccgtcaccccagtcctggttcgctcccgccggctccgctttcctcctcccagactccaagaggaaaccagttgttca

SEQ ID NO: 1582 - DNA, 119 bp, homo sapiens
tcctggttcgctccctgccggctccgctttcctcctcccagactccaagaggaaaccagttgttcagggccaagagctcccggaccgggaaatagctgggaaataactcgtggtgtcgc

SEQ ID NO: 1583 - DNA, 119 bp, homo sapiens
accagttgttcaggggccaagagctcccggaccgggaaatagctgggaaataactcgtggtgtcgcccgcggccggccaaagtttagggggagaaaggagggggagagagacttgagct

SEQ ID NO: 1584 - DNA, 119 bp, homo sapiens
tcgtggtgtcgcccggcggccggccaaagtttagggggagaaaggagggggagagagacttgagctgggacagagaggcagaacttcgagagacggacacacagggcacctcctgttcc

SEQ ID NO: 1585 - DNA, 119 bp, homo sapiens
gagacttgagctgggcacagagaggcagaacttcgagagacggacacacagggcacctcctgttcccaggccagaggagaggcagggcagtggcagagaccaaggaccagaccccattt

SEQ ID NO: 1586 - DNA, 119 bp, homo sapiens
acctcctgttcccagggccagaggagaggcagggcagtggcagagaccaaggaccagaccccatttcaggagaaatacgcagagagatgagggtggagagttctagaggcagacagcca

SEQ ID NO: 1587 - DNA, 119 bp, homo sapiens
aaggtcagaaggcaggcgatggagaagctgaaaaagcagatggaaaggggaagaggcctggatgggaagggtctcgattgtccggtggcacagtgtggggccagtcagcagcctgggac

SEQ ID NO: 1588 - DNA, 119 bp, homo sapiens
gaggcctggatgggaagtggtctcgattgtccggtggcacagtgtggggccagtcagcagcctgggaccgtaaagggacaggaaggagcagggagggtggtagggtcccatgagcccca

SEQ ID NO: 1589 - DNA, 119 bp, homo sapiens
gtcagcagcctgggaccggtaaagggacaggaaggagcagggagggtggtagggtcccatgagccccagtgaggacttctcttccccctccctgggagccccagagaaggatgggtaga

SEQ ID NO: 1590 - DNA, 119 bp, homo sapiens
ggtcccatgagccccagctgaggacttctcttccccctccctgggagccccagagaaggatgggtagagccctgctgatgctccttcctttgttcccctgcgtgccagccctgaccggc

SEQ ID NO: 1591 - DNA, 119 bp, homo sapiens
gagaaggatgggtagagaccctgctgatgctccttcctttgttcccctgcgtgccagccctgaccggcaaagaggacgggcaggaagagggcaggggccggcttcagggtcagggctgg

SEQ ID NO: 1592 - DNA, 119 bp, homo sapiens
gccagccctgaccggcaaaagaggacgggcaggaagagggcaggggccggcttcagggtcagggctgggacaagcttccaggtcagctgcctctggcagcctgttgcagttgaagggcc

SEQ ID NO: 1593 - DNA, 119 bp, homo sapiens
tcagggtcagggctgggcacaagcttccaggtcagctgcctctggcagcctgttgcagttgaagggccaggggtgcccagtagtgccaggccagactggcactggtgctccgcttcctg

SEQ ID NO: 1594 - DNA, 119 bp, homo sapiens
ttgcagttgaagggccagggggtgcccagtagtgccaggccagactggcactggtgctccgcttcctggagacagagcggcaagggggcagaacactgcctagtggggtgcaacggggc

SEQ ID NO: 1595 - DNA, 119 bp, homo sapiens
ggtgctccgcttcctggcagacagagcggcaagggggcagaacactgcctagtggggtgcaacggggcaaagcagcccacacaggagcctccggaaatgctggtagcagggcaggcttg

SEQ ID NO: 1596 - DNA, 119 bp, homo sapiens
cttgtaaccgctgaggacctctaccacctcctcctgggtgatcatgcccacccagatgttagggaaggcgtggtgttgtagctcagaccgaggcacatctccacctggacaggctcaca

SEQ ID NO: 1597 - DNA, 119 bp, homo sapiens
cgctgaggacctctaccacctcctcctgggtgatcatgcccacccagatgttagggaaggctgtggtgtgtagctcagaccgaggcacatctccacctggacaggctcacaggccagct

SEQ ID NO: 1598 - DNA, 119 bp, homo sapiens
ctgggggtgggaacaaggggccgctgcagttgtcatcgctgccatcggtgcagtctctccacatgtcaccatccactgcacacccttacaccctcctgcctggcaggagagctcactgg

SEQ ID NO: 1599 - DNA, 119 bp, homo sapiens
acaaggggccgctgcagttgtcatcgctgccatcggtgcagtctctccacatgtcacacatccactgcaacccttacaccctcctgcctggcaggagagctcactgggcccacaggggt

SEQ ID NO: 1600 - DNA, 119 bp, homo sapiens
tctccgtggcattgaaggccaggtaggtggctgagaagcctccactgctgatgccatgatctgtcctaacagcacagccagctcatggtgcgaggagacgaggtgggggggtggctctg

SEQ ID NO: 1601 - DNA, 119 bp, homo sapiens
ttgaaggccaggtaggtggctgagaagcctccactgctgatgccatgatctgtcctaaacagcacagccgctcatggtgcgaggagacgaggtgggggggtggctctgctccacagaac

SEQ ID NO: 1602 - DNA, 119 bp, homo sapiens
ctgcccaggaggctgaaggcccctgagctgctggtctcatacacctccacgtagtcaaacttgcactcgcctgagcctccaggctgaagttgtggaactgtagttctatgctgtgtccg

SEQ ID NO: 1603 - DNA, 119 bp, homo sapiens
gctggtctcatacacctccacgtagtcaaacttgcactcgtcctgagcctccaggctgaagttgtggaatgtagttctatgctgtgtccggcaggcaccgagatatgccaggtgcagag

SEQ ID NO: 1604 - DNA, 119 bp, homo sapiens
ccgagaacttggcactgcaattggtctcatcactgccgtcagcacagttggcaaaaccatcacacactggtcaggtagcaggcagatgagctggtcacagcggaactcatcatgggcac

SEQ ID NO: 1605 - DNA, 119 bp, homo sapiens
acttggcactgcaattggtctcatcactgccgtcagcacagttggcaaaaccatcacacactgagtcagtagcaggcagatgagctggtcacagcggaactcatcatgggcacagctcc

SEQ ID NO: 1606 - DNA, 119 bp, homo sapiens
cgcgcccaggggccatagcctggtaccaggcatggaaaccaaatccttccacactgctgtcagagacgagaccaccaggaggtggctggcattggtgttgagcgtggggggaggcaccc

SEQ ID NO: 1607 - DNA, 119 bp, homo sapiens
gccatagcctggtaccaggcatggaaaccaaatccttccacactgctgtcagagacgaagaccaccaggggtggctggcattggtgttgagcgtggggggaggcacccttccacaaacc

SEQ ID NO: 1608 - DNA, 119 bp, homo sapiens
ctgaggagggggccttcaggctcaggggagagttccaagcgatcaaaaaggcaagaggccacactctcttgctgagggcttcgatcttgagctgtattgcatggtctgtggccacctgg

SEQ ID NO: 1609 - DNA, 119 bp, homo sapiens
aaggcaagaggccacactctctatgctgagggcttcgatcttgagctgtattgcatggtctgtggccactggatatgccacacgcagtgggtgttgggggggtaagggtctgggtagtt

SEQ ID NO: 1610 - DNA, 119 bp, homo sapiens
gtattgcatggtctgtggccacctggatatgccacacgcagtgggtgttgggggggtaagggtctgggtgttagggctgctgaagaagccccttgggccagagaggaggcctccacagg

SEQ ID NO: 1611 - DNA, 119 bp, homo sapiens
gggcccttctcccggaagatctgcccccagtactcactggactgtggggaggggctcacgcctgactccgctgccctttaggggtcccagctgcctgagaggtggtgatggtgggggtg

SEQ ID NO: 1612 - DNA, 119 bp, homo sapiens
cttgctcgattctgttgcctccatgcagaggatgacatctgagaagtccttcatggcacaaggctctgctggctttctggagtccctgtgacagcccaagacccccaagggcccactcg

SEQ ID NO: 1613 - DNA, 119 bp, homo sapiens
ccttcatggcacaaggctctgcatggctttctggagtccctgtgacagcccaagacccccaagggcccatcgctgaccacaaactccctgtcagaggggcagcctctactacccgaggg

SEQ ID NO: 1614 - DNA, 119 bp, homo sapiens
gcccaagacccccaagggcccactcgctgaccacaaactccctgtcagaggggcagcctctactacccggggaaaaggctgccaggctagaccagttcttgggctgtccttggtagagt

SEQ ID NO: 1615 - DNA, 119 bp, homo sapiens
caaccaccccatgtgtctctagaaccccagtgtagcgagctggagagaggactgtcctgagggcagcagcctggttgcagctggcgtgggggtctcagaatggagccctcagccctgag

SEQ ID NO: 1616 - DNA, 119 bp, homo sapiens
ggactgtcctgagggcagcaggcctggttgcagctggcgtgggggtctcagaatggagccctcagccctaggaaagctggctcggagcaggaggagggctttgaggggctgcccagaag

SEQ ID NO: 1617 - DNA, 119 bp, homo sapiens
cagaatggagccctcagccctgaggaaagctggctcggagcaggaggagggctttgaggggctgcccagagggtcactgacctggggatggtctccaatctccggcgcagcaacagcag

SEQ ID NO: 1618 - DNA, 119 bp, homo sapiens
gggctttgaggggctgcccagaagggtcactgacctggggatggtctccaatctccggcgcagcaacagagcctcttcaagagctggaggctacagtgccccttcggcaacaatgacaa

SEQ ID NO: 1619 - DNA, 119 bp, homo sapiens
gaaggtggtgtgtcagtgtggctacacgcatgagcagcacttggaggaggctaccaagccccacaccttcagggcacacagtgggacccaaagaaacatgtccaggagatgccaaccga

SEQ ID NO: 1620 - DNA, 119 bp, homo sapiens
gctaccaagccccacaccttccagggcacacagtgggacccaaagaaacatgtccaggagatgccaaccatgcctttggcgacatcgtcttcacgggcctgagccagaaggtgaaaaag

SEQ ID NO: 1621 - DNA, 119 bp, homo sapiens
tacgtccgagtctcccaggacacgccctccagcgtgatctaccacctcatgacccagcactgggggctgacgtccccaatctcttgatctcggtgaccgggggggccaagaacttcaac

SEQ ID NO: 1622 - DNA, 119 bp, homo sapiens
agcgtgatctaccacctcatgacccagcactgggggctggacgtccccaatctcttgatctcggtgaccggggggccaagaacttcaacatgaagccgcggctgaagagcattttccgc

SEQ ID NO: 1623 - DNA, 119 bp, homo sapiens
tgggggctggacgtccccaatctcttgatctcggtgaccgggggggccaagaacttcaacatgaagccgggctgaagagcattttccgcagaggcctggtcaaggtggctcagaccaca

SEQ ID NO: 1624 - DNA, 119 bp, homo sapiens
gggcctggatcatcacaggggggtcccacaccggcgtcatgaagcaggtaggcgaggcggtgcgggactcagcctgagcagcagctacaaggaaggcgagctcatcaccatcggagtcg

SEQ ID NO: 1625 - DNA, 119 bp, homo sapiens
gtaggcgaggcggtgcgggacttcagcctgagcagcagctacaaggaaggcgagctcatcaccatcggatcgccacctggggcactgtccaccgccgcgagggcctgatccatcccacg

SEQ ID NO: 1626 - DNA, 119 bp, homo sapiens
ggcagcttccccgccgagtacatactggatgaggatggccaagggaacctgacctgcctagacagcaacactctcacttcatcctcgtggacgacgggacccacggccagtacggggtg

SEQ ID NO: 1627 - DNA, 119 bp, homo sapiens
gaggatggccaagggaacctgacctgcctagacagcaaccactctcacttcatcctcgtggacgacgggcccacggccagtacggggtggagattcctctgaggaccaggctggagaag

SEQ ID NO: 1628 - DNA, 119 bp, homo sapiens
gacagcaaccactctcacttcatcctcgtggacgacgggacccacggccagtacggggtggagattccttgaggaccaggctggagaagttcatatcggagcagaccaaggaaagagga

SEQ ID NO: 1629 - DNA, 119 bp, homo sapiens
accatcgacaacgccaccaccaacggcaccccctgtgtggttgtggagggctcgggccgcgtggccgactcattgcccaggtggccaacctgcctgtctcggacatcactatctccctg

SEQ ID NO: 1630 - DNA, 119 bp, homo sapiens
ttgtggagggctcgggccgcgtggccgacgtcattgcccaggtggccaacctgcctgtctcggacatcatatctccctgatccagcagaaactgagcgtgttcttccaggagatgtttg

SEQ ID NO: 1631 - DNA, 119 bp, homo sapiens
ggtggccaacctgcctgtctcggacatcactatctccctgatccagcagaaactgagcgtgttcttccagagatgtttgagaccttcacggaaagcaggattgtcgagtggaccaaaaa

SEQ ID NO: 1632 - DNA, 119 bp, homo sapiens
ccttcagatctgcaccccacgatgacagctgcactcatctccaacaagcctgagtttgtgaagctcttctggagaacggggtgcagctgaaggagtttgtcacctgggacaccttgctc

SEQ ID NO: 1633 - DNA, 119 bp, homo sapiens
aacaagcctgagtttgtgaagctcttcctggagaacggggtgcagctgaaggagtttgtcacctgggacccttgctctacctgtacgagaacctggacccctcctgcctgttccacagc

SEQ ID NO: 1634 - DNA, 119 bp, homo sapiens
cagctgaaggagtttgtcacctgggacaccttgctctacctgtacgagaacctggacccctcctgcctgtccacagcaagctgcagaaggtgctggtggaggatcccgagcgcccggct

SEQ ID NO: 1635 - DNA, 119 bp, homo sapiens
tgcagatgcaccacgtggcccaggtgctgcgggagctgctgggggacttcacgcagccgctttatccccgccccggcacaacgaccggctgcggctcctgctgcccgttccccacgtca

SEQ ID NO: 1636 - DNA, 119 bp, homo sapiens
caccacgtggcccaggtgctgcgggagctgctgggggacttcacgcagccgctttatccccggccccggacaacgaccggctgcggctcctgctgcccgttccccacgtcaagctcaac

SEQ ID NO: 1637 - DNA, 119 bp, homo sapiens
gtgcagggagtgagcctccggtccctctacaagcgttcctcaggccatgtgaccttcaccatggacccctccgtgaccttctcatttgggccattgtccagaaccgtcgggagctggca

SEQ ID NO: 1638 - DNA, 119 bp, homo sapiens
cggtccctctacaagcgttcctcaggccatgtgaccttcaccatggaccccatccgtgaccttctcattgggccattgtccagaaccgtcgggagctggcaggaatcatctgggctcag

SEQ ID NO: 1639 - DNA, 119 bp, homo sapiens
agccaggactgcatcgcagcggccttggcctgcagcaagatcctgaaggaactgtccaaggaggaggagacacggacagctcggaggagatgctggcgctggcggaggagtatgagcac

SEQ ID NO: 1640 - DNA, 119 bp, homo sapiens
gcatcgcagcggccttggcctgcagcaagatcctgaaggaactgtccaaggaggaggaggacacggacactcggaggagatgctggcgctggcggaggagtatgagcacagagccatcg

SEQ ID NO: 1641 - DNA, 119 bp, homo sapiens
gggtcttcaccgagtgctaccggaaggacgaagagagagcccagaaactgctcacccgcgtgtccgaggctgggggaagaccacctgcctgcagctcgccctggaggccaaggacatga

SEQ ID NO: 1642 - DNA, 119 bp, homo sapiens
gacgaagagagagcccagaaactgctcacccgcgtgtccgaggcctgggggaagaccacctgcctgcagtcgccctggaggccaaggacatgaagtttgtgtctcacgggggcatccag

SEQ ID NO: 1643 - DNA, 119 bp, homo sapiens
ggagaagaggctgcaggatgtgggcacccccgcggcccgcgcccgtgccttcttcaccgcacccgtggtgtcttccacctgaacatcctctcctacttcgccttcctctgcctgttcgc

SEQ ID NO: 1644 - DNA, 119 bp, homo sapiens
cttcttcaccgcacccgtggtggtcttccacctgaacatcctctcctacttcgccttcctctgcctgttgcctacgtgctcatggtggacttccagcctgtgccctcctggtgcgagtg

SEQ ID NO: 1645 - DNA, 119 bp, homo sapiens
cttcgccttcctctgcctgttcgcctacgtgctcatggtggacttccagcctgtgccctcctggtgcgatgtgccatctacctctggctcttctccttggtgtgcgaggagatgcggca

SEQ ID NO: 1646 - DNA, 119 bp, homo sapiens
gctcatcccggcgacgctgtaccccgggcgcgtcatcctctctctggacttcatcctgttctgcctccgctcatgcacatttttaccatcagtaagacgctggggcccaagatcatcat

SEQ ID NO: 1647 - DNA, 119 bp, homo sapiens
acgctgtaccccgggcgcgtcatcctctctctggacttcatcctgttctgcctccggctcatgcacattttaccatcagtaagacgctggggcccaagatcatcattgtgaagcggatg

SEQ ID NO: 1648 - DNA, 119 bp, homo sapiens
atgaaggacgtcttcttcttcctcttcctgctggctgtgtgggtggtgtccttcggggtggccaagcagccatcctcatccacaacgagcgccgggtggactggctgttccgaggggcc

SEQ ID NO: 1649 - DNA, 119 bp, homo sapiens
tcggggtggccaagcaggccatcctcatccacaacgagcgccgggtggactggctgttccgaggggccgctaccactcctacctcaccatcttcgggcagatcccgggctacatcgacg

SEQ ID NO: 1650 - DNA, 119 bp, homo sapiens
gtgtgaacttcaacccggagcactgcagccccaatggcaccgacccctacaagcctaagtgccccgagacgacgcgacgcagcagaggccggccttccctgagtggctgacggtcctcc

SEQ ID NO: 1651 - DNA, 119 bp, homo sapiens
aatggcaccgacccctacaagcctaagtgccccgagagcgacgcgacgcagcagaggccggccttccctagtggctgacggtcctcctactctgcctctacctgctcttcaccaacatc

SEQ ID NO: 1652 - DNA, 119 bp, homo sapiens
cgagagcgacgcgacgcagcagaggccggccttccctgagtggctgacggtcctcctactctgcctctactgctcttcaccaacatcctgctgctcaacctcctcatcgccatgttcaa

SEQ ID NO: 1653 - DNA, 119 bp, homo sapiens
tgttgctttctcctccctgacagctacaccttccagcaggtgcaggagcacacggaccagatttggaagtccagcgccatgacctgatcgaggagtaccacggccgccccgccgcgccg

SEQ ID NO: 1654 - DNA, 119 bp, homo sapiens
ccccgccgcgccgccccccttcatcctcctcagccacctgcagctcttcatcaagagggtggtcctgaaactccggccaagaggcacaagcagctcagtatgccagccccagtgcctct

SEQ ID NO: 1655 - DNA, 119 bp, homo sapiens
agaacaagctggagaagaacgaggaggcggccctgctatcctgggagatctacctgaaggagaactaccccagaaccgacagttccagcaaaagcagcggcccgagcagaagatcgagg

SEQ ID NO: 1656 - DNA, 119 bp, homo sapiens
gaagaacgaggaggcggccctgctatcctgggagatctacctgaaggagaactacctccagaaccgacattccagcaaaagcagcggcccgagcagaagatcgaggacatcagcaataa

SEQ ID NO: 1657 - DNA, 119 bp, homo sapiens
cctcccagaaggccgcggaggagccggatgctgagccgggaggcaggaagaagacggaggagccgggcgcagctaccacgtgaatgcccggcacctcctctaccccaactgccctgtca

SEQ ID NO: 1658 - DNA, 119 bp, homo sapiens
ggaggcaggaagaagacggaggagccgggcgacagctaccacgtgaatgcccggcacctcctctaccccactgccctgtcacgcgcttccccgtgcccaacgagaaggtgccctgggag

SEQ ID NO: 1659 - DNA, 119 bp, homo sapiens
aacctgcacgcctgcgactcgggggcctccatccgatggcaggtggtggacaggcgcatcccactctatcgaaccacaagaccctcctccagaaggcagccgctgagttcggggctcac

SEQ ID NO: 1660 - DNA, 119 bp, homo sapiens
atcccactctatgcgaaccacaagaccctcctccagaaggcagccgctgagttcggggctcactactgatgtgccctcaggctgggcggctccagtccatagacgttccccccagaaac

SEQ ID NO: 1661 - DNA, 119 bp, homo sapiens
gctcactactgactgtgccctcaggctgggcggctccagtccatagacgttccccccagaaaccagggctctctctcctgagcctggccaggactcaggctgttcctgggccctgcaca

SEQ ID NO: 1662 - DNA, 119 bp, homo sapiens
agaaaccagggcttctctctcctgagcctggccaggactcaggctgttcctgggccctgcacatgatgggtttggtggacccagtgcccctcacggctgccgcaagtctgctgcagatg

SEQ ID NO: 1663 - DNA, 119 bp, homo sapiens
tgcacatgatggggtttggtggacccagtgcccctcacggctgccgcaagtctgctgcagatgacctcagaactggaaggggtcaaggtgacccgggaggagagctcaagacagggcac

SEQ ID NO: 1664 - DNA, 119 bp, homo sapiens
cagatgacctcatgaactggaaggggtcaaggtgacccgggaggagagctcaagacagggcacaggctatcagagctgaggggcccctgggacccttggccatcaggcgaggggctggg

SEQ ID NO: 1665 - DNA, 119 bp, homo sapiens
gggcacaggctactcagagctgaggggcccctgggacccttggccatcaggcgaggggctgggcctgtgagctgggcccttggccagagtccactcccttcctggctgtgtcaccccga

SEQ ID NO: 1666 - DNA, 119 bp, homo sapiens
gctgggcctgtgcagctgggcccttggccagagtccactcccttcctggctgtgtcaccccgagcagctatccaccatggaggtcattggcctgaggcaagttccccggagagtcgggg

SEQ ID NO: 1667 - DNA, 119 bp, homo sapiens
ccccgagcagctcatccaccatggaggtcattggcctgaggcaagttccccggagagtcggggtccccttggccccctcaggcctatgtctgtgaggaaggggccctgccactctcccc

SEQ ID NO: 1668 - DNA, 119 bp, homo sapiens
tcggggtcccctgtggccccctcaggcctatgtctgtgaggaaggggccctgccactctccccaagaggcctccatgtttcgaggtgcctcaacatggagccttgcctggcctgggcta

SEQ ID NO: 1669 - DNA, 119 bp, homo sapiens
ctccccaagagggcctccatgtttcgaggtgcctcaacatggagccttgcctggcctgggctaggggcatgtctgaactcctgactgtcaggataaactccgtgggggtacaggagccc

SEQ ID NO: 1670 - DNA, 119 bp, homo sapiens
gggctaggggcactgtctgaactcctgactgtcaggataaactccgtgggggtacaggagcccagacaagcccaggcctgtcaagagacgcagagggcccctgccagggttggccccag

SEQ ID NO: 1671 - DNA, 119 bp, homo sapiens
gagcccagacaaagcccaggcctgtcaagagacgcagagggcccctgccagggttggccccagggacccgggacgaggctgcagaagctctccctccctactccctgggagccacgtgc

SEQ ID NO: 1672 - DNA, 119 bp, homo sapiens
ccccagggaccctgggacgaggctgcagaagctctccctccctactccctgggagccacgtgctggccagtggccagggacggcatgagcaggaggcggggacgtgggggccttctggt

SEQ ID NO: 1673 - DNA, 119 bp, homo sapiens
acgtgctggccatgtggccagggacggcatgagcaggaggcggggacgtgggggccttctggtttggtgcaacagctcacaggagcgtgaaccatgagggccctcaggaggggaacgtg

SEQ ID NO: 1674 - DNA, 119 bp, homo sapiens
tctggtttggtgtcaacagctcacaggagcgtgaaccatgagggccctcaggaggggaacgtggtaaaaccaagacattaaatctgccatctcaggcctggctggctcttctgtgcttt

SEQ ID NO: 1675 - DNA, 119 bp, homo sapiens
aacgtggtaaaacccaagacattaaatctgccatctcaggcctggctggctcttctgtgctttccacaataaagttcctgacacgtccagggccaggggctgtgtgacggctgcctgaa

SEQ ID NO: 1676 - DNA, 119 bp, homo sapiens
tgctttccacaaataaagttcctgacacgtccagggccaggggctgtgtgacggctgcctgaagttctctcgatcccccggtgagcttcctgcagcctgtggatgtcctgcagcccctc

SEQ ID NO: 1677 - DNA, 119 bp, homo sapiens
cctgaagttctcctcgatcccccggtgagcttcctgcagcctgtggatgtcctgcagcccctcagccctcccccaagtttctcctctgacccatcagctccctgtcttcattttcctaa

SEQ ID NO: 1678 - DNA, 119 bp, homo sapiens
cccctcagccctacccccaagtttctcctctgacccatcagctccctgtcttcattttcctaaacctggctccagcatcgtccccaagcccaccaggccaggatgcaggcatccacatg

SEQ ID NO: 1679 - DNA, 119 bp, homo sapiens
tcctaaacctgggctccagcatcgtccccaagcccaccaggccaggatgcaggcatccacatgccctccccttggcttcccctgcgtggtggtgccaatgtgccctggcacccctgcag

SEQ ID NO: 1680 - DNA, 119 bp, homo sapiens
cacatgccctcctccttggcttcccctgcgtggtggtgccaatgtgccctggcacccctgcagaggctcggatggagcctggggctgcctggccactgagcactggccgaggtgatgcc

SEQ ID NO: 1681 - DNA, 119 bp, homo sapiens
ctgcagaggctccggatggagcctggggctgcctggccactgagcactggccgaggtgatgcccaccctccctggacaggcctctgtcttccacctgacccaaagctctctagccaccc

SEQ ID NO: 1682 - DNA, 119 bp, homo sapiens
gttggcatttggcctactctagaggcaagttagggctatttgctggtaggaaacttgaacagctttgaattgaactttgaagtgtggaggctgagggtgatggaggagcggggggaagc

SEQ ID NO: 1683 - DNA, 119 bp, homo sapiens
acagctttgaacttgaactttgaagtgtggaggctgagggtgatggaggagcggggggaagcgccccaaagccctgcatgctgtccatacccatcactggggtttgttaaatggaaaga

SEQ ID NO: 1684 - DNA, 119 bp, homo sapiens
aagcgccccaaaagccctgcatgctgtccatacccatcactggggtttgttaaatggaaagatttgaggcggcctctcccacatttctccatggctttgcccttaatgttgctctcact

SEQ ID NO: 1685 - DNA, 119 bp, homo sapiens
aagatttgaggccggcctctcccacatttctccatggctttgcccttaatgttgctctcactgtggagatgttgtctcctgggatccaggtcttggggtttggtcgggggaggaagctg

SEQ ID NO: 1686 - DNA, 119 bp, homo sapiens
cactgtggagactgttgtctcctgggatccaggtcttggggtttggtcgggggaggaagctgcggggcctgggaccctgggggagatgtgtgtgcgctgggggtgagttcccagataga

SEQ ID NO: 1687 - DNA, 119 bp, homo sapiens
gctgcggggccttgggaccctgggggagatgtgtgtgcgctgggggtgagttcccagatagagcttccccccagtggaccctgcttagcaagttggaatgttcccacaagttccaaccc

SEQ ID NO: 1688 - DNA, 119 bp, homo sapiens
tagagcttccctcccagtggaccctgcttagcaagttggaatgttcccacaagttccaaccctaaggattcactccagggacagagtcaagtagattcttttgtaaatcattggccaga

SEQ ID NO: 1689 - DNA, 119 bp, homo sapiens
accctaaggatttcactccagggacagagtcaagtagattcttttgtaaatcattggccagaaaagagccaaccactgctctttttcactattttacagctatttttgccgtcccctga

SEQ ID NO: 1690 - DNA, 119 bp, homo sapiens
cagaaaagagcacaaccactgctctttttcactattttacagctatttttgccgtcccctgaatgtacacaatttccatgcagcaattggatgtctcagcctattggcttttcatagat

SEQ ID NO: 1691 - DNA, 119 bp, homo sapiens
ctgaatgtacatcaatttccatgcagcaattggatgtctcagcctattggcttttcatagatgcaaacttcctttagggctttgtaaagaagttttgggaagttcttcaatagcagcag

SEQ ID NO: 1692 - DNA, 119 bp, homo sapiens
agatgcaaactttcctttagggctttgtaaagaagttttgggaagttcttcaatagcagcagtttggggcatcacgtgtagccctgtcgatatttcctgaatggatttcattcctttct

SEQ ID NO: 1693 - DNA, 119 bp, homo sapiens
gcagtttggggacatcacgtgtagccctgtcgatatttcctgaatggatttcattcctttctcagtcttaccattcccttacccaacccccaccccaacacagtcaaaaccttttcgag

SEQ ID NO: 1694 - DNA, 119 bp, homo sapiens
ttctcagtcttgaccattcccttacccaacccccaccccaacacagtcaaaaccttttcgagcagcagcaggaaggtgagtggcctcccaccatgagcctcactttggggaatctatgc

SEQ ID NO: 1695 - DNA, 119 bp, homo sapiens
cgagcagcagctaggaaggtgagtggcctcccaccatgagcctcactttggggaatctatgctttagttgggcatattcttgccttagcctcatctctgcatttggcctcattctgctg

SEQ ID NO: 1696 - DNA, 119 bp, homo sapiens
atgctttagttggggcatattcttgccttagcctcatctctgcatttggcctcattctgctgctgcttccagtacccagaagtccttgggttctaccagagaccactccgacagaaagg

SEQ ID NO: 1697 - DNA, 119 bp, homo sapiens
gctgctgcttctcagtacccagaagtccttgggttctaccagagaccactccgacagaaagggtcagaacaactgaccctttcttggctgggtctggactctggagtacaggaagaact

SEQ ID NO: 1698 - DNA, 119 bp, homo sapiens
aagggtcagaaacaactgaccctttcttggctgggtctggactctggagtacaggaagaactaaattatttgtcttggtccaagctgagctcacgctggcttcccgaagaggagacagg

SEQ ID NO: 1699 - DNA, 119 bp, homo sapiens
aactaaattattttgtcttggtccaagctgagctcacgctggcttcccgaagaggagacaggaaggttagtcagaagtatgctcatgttgagacctagggcagatggtaccgggcacca

SEQ ID NO: 1700 - DNA, 119 bp, homo sapiens
caggaaggttaggtcagaagtatgctcatgttgagacctagggcagatggtaccgggcaccatgaagcacttgaaagtggtgccaggtgattggtttcctgttccatccagcattctcc

SEQ ID NO: 1701 - DNA, 119 bp, homo sapiens
accatgaagcatcttgaaagtggtgccaggtgattggtttcctgttccatccagcattctccggagccagggccaccagcccaggattgagaggagcgttggcctgggggcgacccaac

SEQ ID NO: 1702 - DNA, 119 bp, homo sapiens
ctccggagccaggggccaccagcccaggattgagaggagcgttggcctgggggcgacccaactgcagttgctgcatcccatgtcagtgctgactttttgggatggctctggaaggatca

SEQ ID NO: 1703 - DNA, 119 bp, homo sapiens
caactgcagttagctgcatcccatgtcagtgctgactttttgggatggctctggaaggatcaccttgccaaacacaggtcaggctgggtggtgtcaccgcaggagttggggcagtagcc

SEQ ID NO: 1704 - DNA, 119 bp, homo sapiens
atcaccttgccaaaacacaggtcaggctgggtggtgtcaccgcaggagttggggcagtagcccccaggccacacaggcagcaggagtaggggcggcgaggctgaggtgtccgaggcgcc

SEQ ID NO: 1705 - DNA, 119 bp, homo sapiens
ctggtccttctgcccagcggaggttgaagacgaagctgccagcaggatgctctgaggcctggcggtacccagcgggaagcggtccagggtgaacacgctggcctcgtcctcaggtgtca

SEQ ID NO: 1706 - DNA, 119 bp, homo sapiens
tctgcccagcggaggttgaagacgaagctgccagcaggatgctctgaggcctggcggtaccacagcgggagcggtccagggtgaacacgctggcctcgtcctcaggtgtcaggaacttc

SEQ ID NO: 1707 - DNA, 119 bp, homo sapiens
cttgctgtccatgtaggcctctgtccagatgatgtcgtggtcgtggttgatgaccatggggcggctgagacgtgcaggtattccatcacgttctcctgggtgtccgccagcgttgagat

SEQ ID NO: 1708 - DNA, 119 bp, homo sapiens
aggcctctgtccagatgatgtcgtggtcgtggttgatgaccatggggcggctgagcacgtgcaggtattcatcacgttctcctgggtgtccgccagcgttgagatctgcgtgtagtagc

SEQ ID NO: 1709 - DNA, 119 bp, homo sapiens
cgctatgatattaatgaagtcattctcccccagggtgtccaagatggtggtgatggtgtgcttggcaatgtcatcctcagccccttcatactgccgctcacgtccaccaaaatcactat

SEQ ID NO: 1710 - DNA, 119 bp, homo sapiens
agggtgtccaagatggtggtgatggtgtgcttggcaatagtcatcctcagccccttcatactgccgctccgtccaccaaaatcactatgtccttgggagaagtagcagcttgaatgtac

SEQ ID NO: 1711 - DNA, 119 bp, homo sapiens
ctggatagatcctgaagaatccagttgcactgccaaaatattgccaggtcaacgttgggtctctctggagttctccacgaagacagcattcaaggcttcagacatgtagactccattta

SEQ ID NO: 1712 - DNA, 119 bp, homo sapiens
tgaagaatccagttgcactgccaaaatattgccaggtcaacgttgggtctctctggaagttctccacgagacagcattcaaggcttcagacatgtagactccatttaaaatatctgggt

SEQ ID NO: 1713 - DNA, 119 bp, homo sapiens
ctttgttgtacacgttggtgggcagctgcacgctgctgatggaggtgttcaccggcaggttgctgaagtagcattggactccaggaggaactcggcgcccagctccacgaagttgccct

SEQ ID NO: 1714 - DNA, 119 bp, homo sapiens
ggtgttcaccggcaggttgctgaagtgagcattggactccaggaggaactcggcgcccagctccacgaattgcccttctcgtccctctcgttgatcaggaccgagttgtaatagtcgaa

SEQ ID NO: 1715 - DNA, 119 bp, homo sapiens
gtttccagaggaatcttggcctgtccccacgcaggggacagggaggtgcctagaagcagcagccacagggggccgaggtcttctgcacaaaggcccaggccacgggcattggctggagg

SEQ ID NO: 1716 - DNA, 119 bp, homo sapiens
cagcagccacaggagggccgaggtcttctgcacaaaggcccaggccacgggcattggctggaggggaatcagcggctgctggagctggggtttgcgaggaagttgggagttgcaggcat

SEQ ID NO: 1717 - DNA, 119 bp, homo sapiens
gctggaggggaatccagcggctgctggagctggggtttgcgaggaagttgggagttgcaggcatggtggcctggggttggggaggggaaggagggcagagcagccacagaccatgagct

SEQ ID NO: 1718 - DNA, 119 bp, homo sapiens
gcaggcatggtgggcctggggttggggaggggaaggagggcagagcagccacagaccatgagctctgtcgccttcctcccagaccccaggacgccccaggcctttgtcttccgtgcctt

SEQ ID NO: 1719 - DNA, 119 bp, homo sapiens
catgagctctgtctgccttcctcccagaccccaggacgccccaggcctttgtcttccgtgccttggcgacctggggtctccagcctctcagtcctgggtggggagggcttctctctgcc

SEQ ID NO: 1720 - DNA, 119 bp, homo sapiens
cgtgccttggcgagcctggggtctccagcctctcagtcctgggtggggagggcttctctctgccccacactgcagctcacagaagagtcgccccacctagcaagcaggcctcggagaca

SEQ ID NO: 1721 - DNA, 119 bp, homo sapiens
tctctgccccacagctgcagctcacagaagagtcgccccacctagcaagcaggcctcggagacagggacgggggagaggctgtggcaacatgaaaccctttaatccgctggcctctcct

SEQ ID NO: 1722 - DNA, 119 bp, homo sapiens
gacgctaccccgctaggggttatttggaagcggggcaggcctaggaggctgaagaaggcttcggactggctccccagcccctggtgttagggcttttctctttcttgggcttgggaaca

SEQ ID NO: 1723 - DNA, 119 bp, homo sapiens
cccgctaggggttatttggaagcggggcaggcctaggaggctgaagaaggcttcggactggactccccacccctggtgttagggcttttctctttcttgggcttgggaacattagccag

SEQ ID NO: 1724 - DNA, 119 bp, homo sapiens
atctcgcgtcttcggctttcccccagagcctgggaagcccttcttagctccactcttctttgagctttcgtcaaacaaatcctagggcccgtggccttttcgagcgctcctaaaggcga

SEQ ID NO: 1725 - DNA, 119 bp, homo sapiens
cagagcctgggaagcccttcttagctccactcttctttgagctttccgtcaaacaaatcctagggcccgggccttttcgagcgctcctaaaggcgactctccaagacccgctctctaag

SEQ ID NO: 1726 - DNA, 119 bp, homo sapiens
ctcttctcccctcccccaagccagcacctggtgccccggcgggtcgtgcggcgcggcgctccgcggtgacgcctgaccccgagggggcccggggccgcgtccctgggccctccccaccc

SEQ ID NO: 1727 - DNA, 119 bp, homo sapiens
cagcacctggtgccccggcgggtcgtgcggcgcggcgctccgcggtgagcgcctgaccccgagggggccggggccgcgtccctgggccctccccacccttgcggtggcctcgcgggtcc

SEQ ID NO: 1728 - DNA, 119 bp, homo sapiens
ctccggtgacttaaggggagggaatgctcctctgccgtgctcaccgcgtgctggggctgcgcggggctagtatggtcgggctgttttcccactgtcccttcttcgggcagtgtcgccgt

SEQ ID NO: 1729 - DNA, 119 bp, homo sapiens
cgtgctggggctgcgcggggctaggtatggtcgggctgttttcccactgtcccttcttcgggcagtgtcccgtccagcctggttgttgaagcgtccccgtggtcccccggggtccaggc

SEQ ID NO: 1730 - DNA, 119 bp, homo sapiens
ctgtcccttcttcgggcagtgtcgccgtccagcctggttgttgaagcgtccccgtggtcccccggggtcaggcccctttgtggaggcagctgctggcccccagcccatgggaccgtagt

SEQ ID NO: 1731 - DNA, 119 bp, homo sapiens
cgtccccgtggtcccccggggtccaggcccctttgtggaggcagctgctggcccccagcccatgggacctagtcgcggaggcctctgcagaggcgcaggctggaagcggtggcctttga

SEQ ID NO: 1732 - DNA, 119 bp, homo sapiens
gctggcccccagcccatgggaccgtagtcgcggaggcctctgcagaggcgcaggctggaagcggtggccttgaggggggcggcaggagagagtaccgacctccctcgaactcctggcag

SEQ ID NO: 1733 - DNA, 119 bp, homo sapiens
agagctggcggtcaccatggcaatgcgggagctggtggaggccgaatgcgggggtgccaacccgctcataagctcgccgggcacttcacccaggacaaggcccttcggcaggagggatt

SEQ ID NO: 1734 - DNA, 119 bp, homo sapiens
aatgcgggggtgccaacccgctcatgaagctcgccgggcacttcacccaggacaaggcccttcggcagggggattgaggcctggcccctggccccccggagccccggcctctgaggcag

SEQ ID NO: 1735 - DNA, 119 bp, homo sapiens
acccaggacaaggcccttcggcaggagggattgaggcctggcccctggccccccggagccccggcctctaggcagtgagtgttcttgaggtggaaagcccaggtgcagcctctgaggca

SEQ ID NO: 1736 - DNA, 119 bp, homo sapiens
ttggtggctgaattcctgcaggaccagaatgcaccccttgtgtcccgtgcccctcagaccttcaagatgatgacctcctggctgagatgcagcagattgagcagtcaaacttccgccag

SEQ ID NO: 1737 - DNA, 119 bp, homo sapiens
tcctgcaggaccagaatgcaccccttgtgtcccgtgcccctcagaccttcaagatggatgacctcctggtgagatgcagcagattgagcagtcaaacttccgccaggctccccagagag

SEQ ID NO: 1738 - DNA, 119 bp, homo sapiens
cccctggtgtggcagacttggccttgtctgagaactgggcccaggagtttcttgcagctggagatgctgggatgtaactcaggattataatgagactgactggtcccaagaattcatct

SEQ ID NO: 1739 - DNA, 119 bp, homo sapiens
cagacttggccttgtctgagaactgggcccaggagtttcttgcagctggagatgctgtggatgtaactcggattataatgagactgactggtcccaagaattcatctctgaagttacag

SEQ ID NO: 1740 - DNA, 119 bp, homo sapiens
gggtaccagtttgaggaggagaaccccttgcgtgatcaccctcagccttttgaagaagggctgcggcgcttcaggagggggacctgccaaatgctgtgctgctttttgaggcagctgtg

SEQ ID NO: 1741 - DNA, 119 bp, homo sapiens
cccttgcgtgatcaccctcagccttttgaagaagggctgcggcgccttcaggagggggacctgccaaatctgtgctgctttttgaggcagctgtgcagcaggatcctaagcacatggaa

SEQ ID NO: 1742 - DNA, 119 bp, homo sapiens
gtgtctggagctaaagccagataaccagacagcactgatggcgctggctgtgagcttcaccaacgagtcctgcagcgacaggcctgtgaaaccctacgagactggctgcggtacacacc

SEQ ID NO: 1743 - DNA, 119 bp, homo sapiens
gctgtgagcttcaccaacgagtccctgcagcgacaggcctgtgaaaccctacgagactggctgcggtaccaccagcctatgcccatctggtgacacctgctgaagaaggggctggtggg

SEQ ID NO: 1744 - DNA, 119 bp, homo sapiens
ccctacgagactggctgcggtacacaccagcctatgcccatctggtgacacctgctgaagaaggggctgtggggcaggactgggccccagcaagcgtatcctgggatctctcttgtctg

SEQ ID NO: 1745 - DNA, 119 bp, homo sapiens
ctccctgtttcttgaagtgaaagagctcttcctggcagctgtgcggctggaccctacctccattgacccgatgtgcagtgtggcttgggagtccttttcaacctgagtggggagtatga

SEQ ID NO: 1746 - DNA, 119 bp, homo sapiens
ctggaccctacctccattgaccctgatgtgcagtgtggcttgggagtccttttcaacctgagtggggagatgacaaggccgtggactgcttcacagctgccctcagcgttcgtcccaat

SEQ ID NO: 1747 - DNA, 119 bp, homo sapiens
gactatttgctgtggaataagctaggcgccaccctggccaatggaaaccagagtgaagaagcagtagctcgtaccgccgggccctcgagctccagcctggctatatccggtcccgctat

SEQ ID NO: 1748 - DNA, 119 bp, homo sapiens
caatggaaaccagagtgaagaagcagtagctgcgtaccgccgggccctcgagctccagcctggctatatcggtcccgctataacctgggcatcagctgcatcaacctcggggctcaccg

SEQ ID NO: 1749 - DNA, 119 bp, homo sapiens
ggaggctgtggagcactttctggaggccctgaacatgcagaggaaaagccggggcccccggggtgaaggggtgccatgtcggagaacatctggagcaccctgcgtttggcattgtctat

SEQ ID NO: 1750 - DNA, 119 bp, homo sapiens
cggggtgaaggaggtgccatgtcggagaacatctggagcaccctgcgtttggcattgtctatgttaggcagagcgatgcctatggggcagccgacgcgcgggatctgtccaccctccta

SEQ ID NO: 1751 - DNA, 119 bp, homo sapiens
ctatgttaggccagagcgatgcctatggggcagccgacgcgcgggatctgtccaccctcctaactatgttggcctgccccagtgacagtgggacgggctgccctgtgagtgtccacctg

SEQ ID NO: 1752 - DNA, 119 bp, homo sapiens
cctaactatgtttggcctgccccagtgacagtgggacgggctgccctgtgagtgtccacctggagggatcccgctttggatgtgattccctctccccaaatgggcctaccaagggggcg

SEQ ID NO: 1753 - DNA, 119 bp, homo sapiens
cctggagggatccccgctttggatgtgattccctctccccaaatgggcctaccaagggggcgggctgataccataagcggtacggcctttcaggagctgcctcaacgtaggggtgggta

SEQ ID NO: 1754 - DNA, 119 bp, homo sapiens
ggcgggctgatgaccataagcggtacggcctttcaggagctgcctcaacgtaggggtgggtagtctgtgtctagttcctacataattgtaggaaaatgagctgtgtcatctctgagtcc

SEQ ID NO: 1755 - DNA, 119 bp, homo sapiens
ggtagtctgtgttctagttcctacataattgtaggaaaatgagctgtgtcatctctgagtcccttggtattcaagggctgtacatccagctacagatctctctgctcatcatgcccttt

SEQ ID NO: 1756 - DNA, 119 bp, homo sapiens
gtcccttggtaattcaagggctgtacatccagctacagatctctctgctcatcatgccctttcttggtgtgctttttgggtaggaccccacgatttagggtaactgttatcatcagctg

SEQ ID NO: 1757 - DNA, 119 bp, homo sapiens
ctttcttggtgctgctttttgggtaggaccccacgatttagggtaactgttatcatcagctgccatttcgatagggtctaccacatctgtaatgtctgtcctttcccccacttttactg

SEQ ID NO: 1758 - DNA, 119 bp, homo sapiens
gctgccatttctgatagggtctaccacatctgtaatgtctgtcctttcccccacttttactgggaattgtagtccagcttccttgggcagtgtaagtaggaggttcatctgctgtgcgc

SEQ ID NO: 1759 - DNA, 119 bp, homo sapiens
actgggaattgatagtccagcttccttgggcagtgtaagtaggaggttcatctgctgtgcgcctctaattctgtctggatgggatgtgttaggagttggcctgttgggttgaattgttg

SEQ ID NO: 1760 - DNA, 119 bp, homo sapiens
gcgcctctaatgtctgtctggatgggatgtgttaggagttggcctgttgggttgaattgttgatttggcgagcagagctgagttttggtaggagtgctcatggttctgtcattcttgga

SEQ ID NO: 1761 - DNA, 119 bp, homo sapiens
gttgatttggctgagcagagctgagttttggtaggagtgctcatggttctgtcattcttggacctctccggctgagctctgattccctgtgagcacgatgctgatgcaatagtcctgtg

SEQ ID NO: 1762 - DNA, 119 bp, homo sapiens
tggacctctcctggctgagctctgattccctgtgagcacgatgctgatgcaatagtcctgtgtcatcacgcagcggtcctcaggagctgccagggccaattgctacagagtgtctgggt

SEQ ID NO: 1763 - DNA, 119 bp, homo sapiens
tgtgtcatcactgcagcggtcctcaggagctgccagggccaattgctacagagtgtctgggtgtgtggctaggaggaaggtttgcttgtgaaatgaggctgggtgggagcggggaggga

SEQ ID NO: 1764 - DNA, 119 bp, homo sapiens
gggtgtgtggcataggaggaaggtttgcttgtgaaatgaggctgggtgggagcggggagggactagatcgaagagatcaagggctctattcaggaacgttggtgggaggacagagcaag

SEQ ID NO: 1765 - DNA, 119 bp, homo sapiens
gggactagatcagaagagatcaagggctctattcaggaacgttggtgggaggacagagcaagtgggaaggggtatggtgagtgcggcaatccctcatcctcttagaagcacctgtgaat

SEQ ID NO: 1766 - DNA, 119 bp, homo sapiens
caagtgggaagggggtatggtgagtgcggcaatccctcatcctcttagaagcacctgtgaatgggaattagccaactgttatagaaaattggttcagaaagtgcaatcttgccagattt

SEQ ID NO: 1767 - DNA, 119 bp, homo sapiens
gaatgggaattgagccaactgttatagaaaattggttcagaaagtgcaatcttgccagatttctagcaataggttcagtgttaccataagcctttgctgtacttcttgaaatgtttcta

SEQ ID NO: 1768 - DNA, 119 bp, homo sapiens
atttctagcaaataggttcagtgttaccataagcctttgctgtacttcttgaaatgtttctaggggagacattggaaaatccccttcccccatctagatcgaaggaagatgagggagca

SEQ ID NO: 1769 - DNA, 119 bp, homo sapiens
tctaggggagagcattggaaaatccccttcccccatctagatcgaaggaagatgagggagcagcttggatcttctcagttgtcccctgcatggggagatacactaacccccagaaatga

SEQ ID NO: 1770 - DNA, 119 bp, homo sapiens
agcagcttggattcttctcagttgtcccctgcatggggagatacactaacccccagaaatgactgctaacctcttgccttgtctttagtagctaatgatcagagagattttttttttaa

SEQ ID NO: 1771 - DNA, 119 bp, homo sapiens
atgactgctaagcctcttgccttgtctttagtagctaatgatcagagagattttttttttaaactaccaggtcccaggattccatcctgaaatttatttttctttgtatgaatatgtgt

SEQ ID NO: 1772 - DNA, 119 bp, homo sapiens
ttaaactaccatggtcccaggattccatcctgaaatttatttttctttgtatgaatatgtgtaaatgattaaaaataaaactgtaaaatatttgtacgaagaataaatggaactgatgt

SEQ ID NO: 1773 - DNA, 119 bp, homo sapiens
aaatatacagcctctgcagacactgcttctgaatgaacgggctggagtttccttgggatcctgaactcaattggattctctacctaccatcttggacaattcatgtaggaaaacaaatc

SEQ ID NO: 1774 - DNA, 119 bp, homo sapiens
ttgggatcctgaactcatattggattctctacctaccatcttggacaattcatgtaggaaaacaaatcccatttgttcaaacaatagatgaaaattattaaagttttgacacatattaa

SEQ ID NO: 1775 - DNA, 119 bp, homo sapiens
tgtactttccaataatcttttcatttttaatatcaattgatgttttaaaaaatacagaggtgtttgacaagaatagcaccattgtgtaggacacacacagttcctgcgcccggcacctg

SEQ ID NO: 1776 - DNA, 119 bp, homo sapiens
ggtgtttgacacagaatagcaccattgtgtaggacacacacagttcctgcgcccggcacctgaagggagtcttctggcctgggctgggggcagtcactcagggggcatttgactcacac

SEQ ID NO: 1777 - DNA, 119 bp, homo sapiens
cctgaagggaggtcttctggcctgggctgggggcagtcactcagggggcatttgactcacaccagttagttcctgcctctgccttgacccgaaggtcttacaggaagacaataaataaa

SEQ ID NO: 1778 - DNA, 119 bp, homo sapiens
acaccagttagtttcctgcctctgccttgacccgaaggtcttacaggaagacaataaataaatagaacacgagattttattttgcagtctgcccagttcaggtctcttagaaagagagg

SEQ ID NO: 1779 - DNA, 119 bp, homo sapiens
taaatagaacaccgagattttattttgcagtctgcccagttcaggtctcttagaaagagaggggagaaagtccgaactgtgagagggtgggatgaatggacatcaggtcaggtcagcca

SEQ ID NO: 1780 - DNA, 119 bp, homo sapiens
gaggggagaaaagtccgaactgtgagagggtgggatgaatggacatcaggtcaggtcagccattcagtgagagtcctagagtgactgagattggaaagtacttgggtcctttgggtttg

SEQ ID NO: 1781 - DNA, 119 bp, homo sapiens
gccattcagtgcagagtcctagagtgactgagattggaaagtacttgggtcctttgggtttgcaacggatgtgttgtttctgggttcaggtttttacaagaagcagaccggccctatgt

SEQ ID NO: 1782 - DNA, 119 bp, homo sapiens
tttgcaacggattgtgttgtttctgggttcaggtttttacaagaagcagaccggccctatgtccacaccaattcctgctcgggccctcctatgtccatgggtgcaatgtcaatgatggg

SEQ ID NO: 1783 - DNA, 119 bp, homo sapiens
atgtccacaccgaattcctgctcgggccctcctatgtccatgggtgcaatgtcaatgatggggaggcgtaggtcttctgtgaccggtactcgataacagtcttgccccacttaccggta

SEQ ID NO: 1784 - DNA, 119 bp, homo sapiens
cgtgcagccatccttcagggcagtgtacgtgaacctgctattgccctctgcccggatctccacgtcattgagccctggatgagcagggccttcttgaggttgccagctgcttcgtccag

SEQ ID NO: 1785 - DNA, 119 bp, homo sapiens
tgccctctgcccggatctccacgtcattggagccctggatgagcagggccttcttgaggttgccagctgttcgtccagataggcaatgctgttcttgcagtggtaggtgatgttctggg

SEQ ID NO: 1786 - DNA, 119 bp, homo sapiens
agcagggccttcttgaggttgccagctgcttcgtccagataggcaatgctgttcttgcagtggtaggtgtgttctgggagccttccgtggacagcaggcgtaggaaggtcatctggacg

SEQ ID NO: 1787 - DNA, 119 bp, homo sapiens
ggcaatgctgttcttgcagtggtaggtgatgttctgggagccttccgtggacagcaggcgtaggaaggtatctggacgttggcagtgttgggagccagattgtcatctccatagctgaa

SEQ ID NO: 1788 - DNA, 119 bp, homo sapiens
atggaagccaccattgatggtttctccaaaccagatgtgtttcttctccttgctcttgctgctccaccattcttcttgggaacgtttgctggattggggtagacgcaagtctcgccagt

SEQ ID NO: 1789 - DNA, 119 bp, homo sapiens
atgtgtttcttctccttgctcttgctgctccaccagttcttcttgggaacgtttgctggattggggtagcgcaagtctcgccagtctccatgttgcagaaaaccttcatggcgtccaag

SEQ ID NO: 1790 - DNA, 119 bp, homo sapiens
agttcttcttgggaacgtttgctggattggggtagacgcaagtctcgccagtctccatgttgcagaaaacttcatggcgtccaaggtgcagccttggttggggtcaatccagtagtctc

SEQ ID NO: 1791 - DNA, 119 bp, homo sapiens
cactcttccactcagggtggcagagtttcaggtctctgcaggtgcgagcagggttcttgcgggagccctggggctgcggatgctctcaatctggttgttgagggacttgagtgtggcat

SEQ ID NO: 1792 - DNA, 119 bp, homo sapiens
ttgcgggagccctcggggctgcggatgctctcaatctggttgttgagggacttgagtgtggcatccacccggcgtcatgctgtctcaggccaccggctgcctggtcggcccgcatgtac

SEQ ID NO: 1793 - DNA, 119 bp, homo sapiens
tgtggcatccacctcggcgtcatgctgtctcaggccaccggctgcctggtcggcccgcatgtactgcaggggtcggggcccttctctctcgggcctaagccagcaaaggcggacatgtc

SEQ ID NO: 1794 - DNA, 119 bp, homo sapiens
gcatgtactgcagggggtcggggcccttctctctcgggcctaagccagcaaaggcggacatgtcgatgcagggccagggggacctggaggaccagggggtccaggatttccaggaggac

SEQ ID NO: 1795 - DNA, 119 bp, homo sapiens
agagggaccgtcatctccaggctctcccttctcgccagggggtccagcaggaccttggaggccgggttcccagctcggccaggggggccgctgtctcctcgagcacctttgggaccatc

SEQ ID NO: 1796 - DNA, 119 bp, homo sapiens
tccagcaggaccttggaggccgggttcaccagctcggccaggggggccgctgtctcctcgagcacctttggaccatcttttccagaaggaccagggggaccagggggtccagggttgcc

SEQ ID NO: 1797 - DNA, 119 bp, homo sapiens
cactggcagtggcgaggtcagttgggcagatggggcagcactctccgaaggggatctcagggctgaggcgtctttcacgtcttcacagattatgtcgtcgcagaggacagtcccagtgt

SEQ ID NO: 1798 - DNA, 119 bp, homo sapiens
tccgaaggggatctcagggctgaggcagtctttcacgtcttcacagattatgtcgtcgcagaggacagtccagtgtcacagacacagatccggcagggctccggcttccacacatcctt

SEQ ID NO: 1799 - DNA, 119 bp, homo sapiens
cagattatgtcgtcgcagaggacagtcccagtgtcacagacacagatccggcagggctccggcttccaccatccttatcattatacctctgcccatcctgcacacagctgccagcctcc

SEQ ID NO: 1800 - DNA, 119 bp, homo sapiens
ggacatcctggccctgacaccgaaggacagcggcgacgagcagcgtcagcagcaccagcgtctggggagcccgaggcgaatcatggctcaccgcggggcctggctgagccgggcccggg

SEQ ID NO: 1801 - DNA, 119 bp, homo sapiens
gcagcaccagcgtctggggagccccgaggcgaatcatggctcaccgcggggcctggctgagccgggcccggcggagcgcagcgaaacggcaggagcacggcgcgggtccgggtctctac

SEQ ID NO: 1802 - DNA, 119 bp, homo sapiens
gggcctggctgagccgggcccgggcggagcgcagcgaaacggcaggagcacggcgcgggtccgggtctcaccgcgccctcatgcaggaggcccttggagcaggagggggaagcgggaga

SEQ ID NO: 1803 - DNA, 119 bp, homo sapiens
cacggcgcgggtccgggtctctaccgcgccctcatgcaggaggcccttggagcaggagggggaagcggggacccggcagcccagcagcgctctgcgtcttctccccgccgcggcgcccg

SEQ ID NO: 1804 - DNA, 119 bp, homo sapiens
aatacgcctggcatccaagtccacccactccggactttggccttagcagtagttagtgtgggaggctggaagactgggagcagtctcttaaacaaaagcaaaagaataagcttcgggcg

SEQ ID NO: 1805 - DNA, 119 bp, homo sapiens
ggactttggccttagcagtagttagtgtgggaggctgggaagactgggagcagtctcttaaacaaaagcaaagaataagcttcgggcgctgtagtacctgccagctttcgccacaggag

SEQ ID NO: 1806 - DNA, 119 bp, homo sapiens
cctaggctgccacctgtaggtcacttgggctccagctatgtggctgcctcttctgctgggtgccttacttgggcagtgctgtggttgctcagggaccggcagagcctgcccgccagcaa

SEQ ID NO: 1807 - DNA, 119 bp, homo sapiens
tgggtgccttactctgggcagtgctgtggttgctcagggaccggcagagcctgcccgccagcaatgccttgtcttcatcaccggctgtgactcaggctttgggcgccttctggcactgc

SEQ ID NO: 1808 - DNA, 119 bp, homo sapiens
gccagcaatgcctttgtcttcatcaccggctgtgactcaggctttgggcgccttctggcactgcagctgaccagagaggcttccgagtcctggccagctgcctgaccccctccggggcc

SEQ ID NO: 1809 - DNA, 119 bp, homo sapiens
ggcactgcagctggaccagagaggcttccgagtcctggccagctgcctgaccccctccggggccgaggactgcagcgggtggcctcctcccgcctccacaccaccctgttggatatcac

SEQ ID NO: 1810 - DNA, 119 bp, homo sapiens
ccggggccgaggacctgcagcgggtggcctcctcccgcctccacaccaccctgttggatatcactgatcccagagcgtccagcaggcagccaagtgggtggagatgcacgttaaggaag

SEQ ID NO: 1811 - DNA, 119 bp, homo sapiens
ggctttttggtctggtgaataatgctggtgtggctggtatcatcggacccacaccatggctgacccgggcgatttccagcgggtgctgaatgtgaacacaatgggtcccatcggggtca

SEQ ID NO: 1812 - DNA, 119 bp, homo sapiens
acccacaccatggctgacccgggacgatttccagcgggtgctgaatgtgaacacaatgggtcccatcgggtcacccttgccctgctgcctctgctgcagcaagcccggggccgggtgat

SEQ ID NO: 1813 - DNA, 119 bp, homo sapiens
gtgaacacaatgggtcccatcggggtcacccttgccctgctgcctctgctgcagcaagcccggggccggtgatcaacatcaccagcgtcctgggtcgcctggcagccaatggtgggggc

SEQ ID NO: 1814 - DNA, 119 bp, homo sapiens
tgctgcagcaagcccggggccgggtgatcaacatcaccagcgtcctgggtcgcctggcagccaatggtggggctactgtgtctccaaatttggcctggaggccttctctgacagcctga

SEQ ID NO: 1815 - DNA, 119 bp, homo sapiens
gcgggatgtagctcattttgggatacgagtctccatcgtggagcctggcttcttccgaacccctgtgacaacctggagagtctggagaaaaccctgcaggcctgctgggcacggctgcc

SEQ ID NO: 1816 - DNA, 119 bp, homo sapiens
ctggcttcttccgaacccctgtgaccaacctggagagtctggagaaaaccctgcaggcctgctgggcacgctgcctcctgccacacaggcccactatgggggggccttcctcaccaagt

SEQ ID NO: 1817 - DNA, 119 bp, homo sapiens
acctgaaaatgcaacagcgcatcatgaacctgatctgtgacccggacctaaccaaggtgagccgatgccggagcatgccctgactgctcgacacccccgaacccgctacagcccaggtt

SEQ ID NO: 1818 - DNA, 119 bp, homo sapiens
accaaggtgagccgatgcctggagcatgccctgactgctcgacacccccgaacccgctacagcccaggtgggatgccaagctgctctggctgcctgcctcctacctgccagccagcctg

SEQ ID NO: 1819 - DNA, 119 bp, homo sapiens
aacccgctacagcccaggttgggatgccaagctgctctggctgcctgcctcctacctgccagccagcctgtggatgctgtgctcacctgggtccttcccaagcctgcccaagcagtcta

SEQ ID NO: 1820 - DNA, 119 bp, homo sapiens
cctacctgccagccagcctggtggatgctgtgctcacctgggtccttcccaagcctgcccaagcagtctctgaatccagccttccagcaagagattgtttttcaaggacaaggactttg

SEQ ID NO: 1821 - DNA, 119 bp, homo sapiens
aagcctgcccaagcagtctactgaatccagccttccagcaagagattgtttttcaaggacaaggactttatttatttctgcccccaccctggtactgcctggtgcctgccacaaaataa

SEQ ID NO: 1822 - DNA, 119 bp, homo sapiens
tttcaaggacaaggactttgatttatttctgcccccaccctggtactgcctggtgcctgccacaaaatagcactaacaaaagtgtattgtttaaaaaataaaaagaaggtgggcagaaa

SEQ ID NO: 1823 - DNA, 119 bp, homo sapiens
tggtgcctgccacaaaataagcactaacaaaagtgtattgtttaaaaaataaaaagaaggtgggcagaatgtgcccagtggaaggctgaccccatttaagtgccaactactccaaaccg

SEQ ID NO: 1824 - DNA, 119 bp, homo sapiens
taaatgcttacagtaatggaggagtgttttaaacaaccacaaaaaaagcaaagtgaccaaatgacctgaaggcaattaaaaaaaaaatgaaaaaaattatgcagcagttttaaagttca

SEQ ID NO: 1825 - DNA, 119 bp, homo sapiens
atgacctgaaaggcaattaaaaaaaaaatgaaaaaaattatgcagcagttttaaagttcattcatccataattcagcaaaagagctaatttattctctccatattcacagaaacaaaat

SEQ ID NO: 1826 - DNA, 119 bp, homo sapiens
ttcatccatgaattcagcaaaagagctaatttattctctccatattcacagaaacaaaataatgcatcaatagcataaatgtttaaaaaatcagaattacatttaatataaaaaatttt

SEQ ID NO: 1827 - DNA, 119 bp, homo sapiens
cattagtcaacacttattcaactataattaaagttttttttcttcagtcaatcccaagtaagaatctgtgaataagtaaactggaaacatgtatttaaaggaatgaattaaagataaca

SEQ ID NO: 1828 - DNA, 119 bp, homo sapiens
aagtaagaatctgttgaataagtaaactggaaacatgtatttaaaggaatgaattaaagataacactgtttgttcaacaagcacttctgaatacttggagtaaatacagcactgttttg

SEQ ID NO: 1829 - DNA, 119 bp, homo sapiens
aaagataacactgttttgttcaacaagcacttctgaatacttggagtaaatacagcactgttttgggtatacagagaactgataaaggtagaaaacactgtccttgtccatgataagat

SEQ ID NO: 1830 - DNA, 119 bp, homo sapiens
cactgttttgggtattacagagaactgataaaggtagaaaacactgtccttgtccatgataagatgcatatattatttacattgacaagtttttaaaatatgaacatttgtaaatgaaa

SEQ ID NO: 1831 - DNA, 119 bp, homo sapiens
tgtcaaattatttgttactgtggaactctggctatgcaccagatacaagaaaaaccagtaaatacatgaatatccttacaagctcttggggtcaggagaaaatcaaagtattaattgca

SEQ ID NO: 1832 - DNA, 119 bp, homo sapiens
aaatacatgacatatccttacaagctcttggggtcaggagaaaatcaaagtattaattgcatatccttttagtattaaccttttactacagaaatgaaagagttaacaatgcacagtta

SEQ ID NO: 1833 - DNA, 119 bp, homo sapiens
catatcctttctagtattaaccttttactacagaaatgaaagagttaacaatgcacagttatatttcagtaacatatattcaaaggtatatcaaaggtgaaaatctatccaagttttcc

SEQ ID NO: 1834 - DNA, 119 bp, homo sapiens
tatatttcaggtaacatatattcaaaggtatatcaaaggtgaaaatctatccaagttttccaaatgaagggcagtaaaccaatgaccacataaaagtaaaaattaattttatgcttttt

SEQ ID NO: 1835 - DNA, 119 bp, homo sapiens
ccaaatgaagtggcagtaaaccaatgaccacataaaagtaaaaattaattttatgctttttgaaaaaaatttgagccttttactcactgctaatttaattttatgctttttgaaaaaaa

SEQ ID NO: 1836 - DNA, 119 bp, homo sapiens
ttgaaaaaaaatttgagccttttactcactgctaatttaattttatgctttttgaaaaaaataatttgaccttttactcagctttacaaagtatgagtagggaaaattaatgcaaataa

SEQ ID NO: 1837 - DNA, 119 bp, homo sapiens
aataatttgagccttttactcagctttacaaagtatgagtagggaaaattaatgcaaataatgtattcatattaaaaacaattagaataagcccacccaaatcagagattaaatgattc

SEQ ID NO: 1838 - DNA, 119 bp, homo sapiens
aatgtattcaatattaaaaacaattagaataagcccacccaaatcagagattaaatgattctatgaactaacatgtaacgatgaaggagggctggagtgaaaaagatacaggagagtaa

SEQ ID NO: 1839 - DNA, 119 bp, homo sapiens
tctatgaactaaacatgtaacgatgaaggagggctggagtgaaaaagatacaggagagtaaaaaggagcataaagaaaaaccctcccctaaacacataggctaacacagagctgagaca

SEQ ID NO: 1840 - DNA, 119 bp, homo sapiens
aaaaaggagctataaagaaaaaccctcccctaaacacataggctaacacagagctgagacacagaggcaaaaatagggaaaaaacagacacacttagccaaatcttggcttcccctcta

SEQ ID NO: 1841 - DNA, 119 bp, homo sapiens
cacagaggcataaaatagggaaaaaacagacacacttagccaaatcttggcttcccctctagatttgttcataaagtaatttaatatttgtatctggtctggtgaccttagtgtgcttc

SEQ ID NO: 1842 - DNA, 119 bp, homo sapiens
tagatttgttccataaagtaatttaatatttgtatctggtctggtgaccttagtgtgcttcttctaaagcttttaaagttacgctattttcctaagtagactgaactgactttagaacc

SEQ ID NO: 1843 - DNA, 119 bp, homo sapiens
tcttctaaagacttttaaagttacgctattttcctaagtagactgaactgactttagaaccagtggtcaatgactgctttacttggcttgagttagatgaaaagtttggttaattaaaa

SEQ ID NO: 1844 - DNA, 119 bp, homo sapiens
ccagtggtcacatgactgctttacttggcttgagttagatgaaaagtttggttaattaaaaacttctgagttatagttcatcttctgaatcttgattgtgaactttctgagggtgtctc

SEQ ID NO: 1845 - DNA, 119 bp, homo sapiens
aaacttctgatgttatagttcatcttctgaatcttgattgtgaactttctgagggtgtctcttaacagtattaccatgtcaatggttaatatttttgtcaaacactgaagaactgaagt

SEQ ID NO: 1846 - DNA, 119 bp, homo sapiens
tcttaacagtgattaccatgtcaatggttaatatttttgtcaaacactgaagaactgaagttagtagctgtatttacccattactgattccaaacctgtctgactgcttaccaagggtt

SEQ ID NO: 1847 - DNA, 119 bp, homo sapiens
gttagtagctggtatttacccattactgattccaaacctgtctgactgcttaccaagggttgattggttgcagtgcatggacagctcttatatatgtatgtggaaagctgtactttcct

SEQ ID NO: 1848 - DNA, 119 bp, homo sapiens
ttgattggtttgcagtgcatggacagctcttatatatgtatgtggaaagctgtactttcctgttttagattataaaggactttgggaatgcctaaaagtgcattagctattatcatact

SEQ ID NO: 1849 - DNA, 119 bp, homo sapiens
ctgttttagatttataaaggactttgggaatgcctaaaagtgcattagctattatcatactaaccatggttcttctgattgatggcattttttggcataattgagaagatagtaatgta

SEQ ID NO: 1850 - DNA, 119 bp, homo sapiens
ctaaccatggtttcttctgattgatggcattttttggcataattgagaagatagtaatgtaacaagatccaaaattaccacctactggcaaaacacaaccagctggcatagatgaggaa

SEQ ID NO: 1851 - DNA, 119 bp, homo sapiens
taacaagatctcaaaattaccacctactggcaaaacacaaccagctggcatagatgaggaaaggtaacttgggaagtacccatattcggtaacttacagctcactggtaacatgcttcc

SEQ ID NO: 1852 - DNA, 119 bp, homo sapiens
aaaggtaactctgggaagtacccatattcggtaacttacagctcactggtaacatgcttccctttctagaatatttgtgacctgtaaattttcgtaagaaatttctattctatttcccc

SEQ ID NO: 1853 - DNA, 119 bp, homo sapiens
ccctttctagtaatatttgtgacctgtaaattttcgtaagaaatttctattctatttccccttgttgaaaagcagtggaattgttcttgagtaatggttcataataatcagttagcctg

SEQ ID NO: 1854 - DNA, 119 bp, homo sapiens
ccttgttgaataagcagtggaattgttcttgagtaatggttcataataatcagttagcctgtttctttcaaagacaaacatgtcagcgtttcaactgtttggaatgtatctgttggtgt

SEQ ID NO: 1855 - DNA, 119 bp, homo sapiens
tgtttctttccaaagacaaacatgtcagcgtttcaactgtttggaatgtatctgttggtgtcagtgtggggttgaatacggaatatatgtttctaattctacatctggaattaccaaat

SEQ ID NO: 1856 - DNA, 119 bp, homo sapiens
gtcagtgtgggggttgaatacggaatatatgtttctaattctacatctggaattaccaaattagaatgtcttttaaatatgtttgagttttttccaatgcatctttgttctctgcaact

SEQ ID NO: 1857 - DNA, 119 bp, homo sapiens
attagaatgtacttttaaatatgtttgagttttttccaatgcatctttgttctctgcaactgtgtcctgtaaggcctttgtattgagccattaccaggatctggtgcttgataactttc

SEQ ID NO: 1858 - DNA, 119 bp, homo sapiens
ctgtgtcctgataaggcctttgtattgagccattaccaggatctggtgcttgataactttctccactgtcttataaataaaaagacttgaagtgccattttggtcattggtttgtgtca

SEQ ID NO: 1859 - DNA, 119 bp, homo sapiens
tctccactgttcttataaataaaaagacttgaagtgccattttggtcattggtttgtgtcatgtaatttgatcaaggtctttaaataattgccgaagcattttaagtgctccatgtaaa

SEQ ID NO: 1860 - DNA, 119 bp, homo sapiens
catgtaatttagatcaaggtctttaaataattgccgaagcattttaagtgctccatgtaaagcatcctctgttgttcaatgagaccatgcactggtccacaaagaactatagagtgtgg

SEQ ID NO: 1861 - DNA, 119 bp, homo sapiens
aagcatcctcatgttgttcaatgagaccatgcactggtccacaaagaactatagagtgtggtataaatgacatgtgcttatcaagcctagatgaacatatcttttggatctaaggataa

SEQ ID NO: 1862 - DNA, 119 bp, homo sapiens
ggtataaatgcacatgtgcttatcaagcctagatgaacatatcttttggatctaaggataagaggtttaaaaatttcaccaaagcagtgttaggtatttcacactgcgaaaaggcctgt

SEQ ID NO: 1863 - DNA, 119 bp, homo sapiens
aagaggtttacaaaatttcaccaaagcagtgttaggtatttcacactgcgaaaaggcctgtggtggtacaatggagaaagaccaatgatcctccggataagagaaacttcttctgatga

SEQ ID NO: 1864 - DNA, 119 bp, homo sapiens
gtggtggtacaaatggagaaagaccaatgatcctccggataagagaaacttcttctgatgataaacactaaccactgatatgccattcacccctgcataataactaactaaatctggtt

SEQ ID NO: 1865 - DNA, 119 bp, homo sapiens
gataaacactcaaccactgatatgccattcacccctgcataataactaactaaatctggttgtttcacatagatatgagcaattttacattctgactatgtagatgtttcattattgct

SEQ ID NO: 1866 - DNA, 119 bp, homo sapiens
ttgtttcacactagatatgagcaattttacattctgactatgtagatgtttcattattgcttttgtctttccataatccaaaattgagatgtctgaaactgtgcttctgaatttagaat

SEQ ID NO: 1867 - DNA, 119 bp, homo sapiens
cttttgtcttttccataatccaaaattgagatgtctgaaactgtgcttctgaatttagaataaactctgtccagaagtggaaaaaagaggctgaatggtttctgttactatcaccattc

SEQ ID NO: 1868 - DNA, 119 bp, homo sapiens
ataaactctgatccagaagtggaaaaaagaggctgaatggtttctgttactatcaccattcgcatgtcacatctgctgggcggtacacagaaaaatctttctgaagcacaagaccagct

SEQ ID NO: 1869 - DNA, 119 bp, homo sapiens
tcgcatgtcaccatctgctgggcggtacacagaaaaatctttctgaagcacaagaccagctatgatcctgaatctgaaacaggaaggccagtgacaccaacattcaactctacaaaatg

SEQ ID NO: 1870 - DNA, 119 bp, homo sapiens
ctatgatcctggaatctgaaacaggaaggccagtgacaccaacattcaactctacaaaatggtcatccataactcaaatacaccaatcccacttttacaagtcatacacttgaaaaagt

SEQ ID NO: 1871 - DNA, 119 bp, homo sapiens
tggtcatccactaactcaaatacaccaatcccacttttacaagtcatacacttgaaaaagtagtcacactcaactgtgaaataaatttatgattatttcttcccactcttccacaaaag

SEQ ID NO: 1872 - DNA, 119 bp, homo sapiens
gtagtcacacatcaactgtgaaataaatttatgattatttcttcccactcttccacaaaagtatgcttcaagagcaactctaaagagctcctacacaatgttctctctttagcagacga

SEQ ID NO: 1873 - DNA, 119 bp, homo sapiens
agtatgcttctaagagcaactctaaagagctcctacacaatgttctctctttagcagacgaaaagatagcaaaaagtgtctacttaggtactggtccataataccgtctaatatttgtg

SEQ ID NO: 1874 - DNA, 119 bp, homo sapiens
gaaaagatagacaaaaagtgtctacttaggtactggtccataataccgtctaatatttgtgtctgaaacttaggagagcctgggaaataaatttccaccgagaacaatttttccaatgc

SEQ ID NO: 1875 - DNA, 119 bp, homo sapiens
tgtctgaaacgttaggagagcctgggaaataaatttccaccgagaacaatttttccaatgccttccatggtttgaatgttttcacacatcaaaggatccttttctctgtctgtgattgc

SEQ ID NO: 1876 - DNA, 119 bp, homo sapiens
gccttccatgggtttgaatgttttcacacatcaaaggatccttttctctgtctgtgattgcatgaagtctctaagcaaatggcaaagaaagataataaatgtttttgcaccatctcctg

SEQ ID NO: 1877 - DNA, 119 bp, homo sapiens
ctggctatgggatgctctaagtgtagcgcctccaggaggcggcctccattccggctgagaagcacctcgcagtgggcttcgtacacaaaacttgccgtccctcgggccccacgcagcag

SEQ ID NO: 1878 - DNA, 119 bp, homo sapiens
gctgagaagcacctcgccagtgggcttcgtacacaaaacttgccgtccctcgggccccacgcagcagctacgatggcttccagcacctcggccacctgcaacgccgccttcacagaccc

SEQ ID NO: 1879 - DNA, 119 bp, homo sapiens
gccccacgcagcagctcacgatggcttccagcacctcggccacctgcaacgccgccttcacagaccctgagcggccatagaacttaacatatctgggccgcttcccctttttgaccagc

SEQ ID NO: 1880 - DNA, 119 bp, homo sapiens
gccttcacagaccctgcagcggccatagaacttaacatatctgggccgcttcccctttttgaccagcttcagaacacccgggccgaccgaaaacaggggtgggaacggccggaaacgga

SEQ ID NO: 1881 - DNA, 119 bp, homo sapiens
gaattccaatctaagtataaaggtacaaggtagtgagaaggaaatactacagttcggagaactgcttattccaagtatatttaacttataaagttaataaatagttaaatgaaacaaag

SEQ ID NO: 1882 - DNA, 119 bp, homo sapiens
cagttcggagaactgcttatttccaagtatatttaacttataaagttaataaatagttaaatgaaacaagtttataggtgacctttagtaaatggggaaattaacaggactttcttctt

SEQ ID NO: 1883 - DNA, 119 bp, homo sapiens
taaatagttaaatgaaacaaagtttataggtgacctttagtaaatggggaaattaacaggactttcttctcatcttcaaactcttcagaagcagcaacagggctagttaattcaactcc

SEQ ID NO: 1884 - DNA, 119 bp, homo sapiens
aaattaacaggactttcttcttcatcttcaaactcttcagaagcagcaacagggctagttaattcaactccaattgttctgaaagtttttttaccttctcttctaagagaatattcttc

SEQ ID NO: 1885 - DNA, 119 bp, homo sapiens
cagggctagttaattcaactcccaattgttctgaaagtttttttaccttctcttctaagagaatattctcttcacttcttccttgtaattatacttaagatcttcaatttcttcaaaaa

SEQ ID NO: 1886 - DNA, 119 bp, homo sapiens
ctcttctaagagaatattcttcttcacttcttccttgtaattatacttaagatcttcaatttcttcaaaaatgaaggatcaaaattttccagttcttttttcagcttctttatttcctc

SEQ ID NO: 1887 - DNA, 119 bp, homo sapiens
ctgttgttcaaggtcttcattgtatttgttaactttttgttctctctctgttgcttcttttacaagctgttaaggtcagtaatgctttgattttttttggcaatatcagtttccaattc

SEQ ID NO: 1888 - DNA, 119 bp, homo sapiens
tatttgttaactttttgttctctctctgttgcttcttttacaagctgtttaaggtcagtaatgctttgatttttttggcaatatcagtttccaattcttttaacttggtttcatacatt

SEQ ID NO: 1889 - DNA, 119 bp, homo sapiens
cttgtaaccacaatggatttccagctcttactgtcagcaccttcaagctgtggacctctgctttctgcaactgcaatctcttaccagtctcttctagttgaactgtcatcttctcattt

SEQ ID NO: 1890 - DNA, 119 bp, homo sapiens
acctctgctttctgcaaactgcaatctcttaccagtctcttctagttgaactgtcatcttctcatttaaatctctaaattattctttgctatccgtaatttctctgcagcatcagtttc

SEQ ID NO: 1891 - DNA, 119 bp, homo sapiens
ttttttaagttctttacgaagcctttcattttcagcaataattttttctgtgcctttggtcttggattctagtgcatgctcaactgatgcccaagatgagctttaagtttttctaattc

SEQ ID NO: 1892 - DNA, 119 bp, homo sapiens
tttaagttctttacgaagcctttcattttcagcaataattttttctgtgcctttggtcttggattcatatgcatgctcaactgatgcccaagatgagctttaagtttttctaattcagc

SEQ ID NO: 1893 - DNA, 119 bp, homo sapiens
cttcaatttttcattttcctgctcaatattagccattttttcactagtcaatattcctgatgcttttttaactgttcattttctctctggactttttcaactacttttttcattaaacc

SEQ ID NO: 1894 - DNA, 119 bp, homo sapiens
agtcaatattcctgatgcttttttcaactgttcattttctctctggactttttcaactacttttttcataaaccaatggttttttccagttctgggattgtctttccacttctaccaga

SEQ ID NO: 1895 - DNA, 119 bp, homo sapiens
ctttaatcttggcaaatctttatttgcttgttcaagctgaaatttcagttcaatattttcagatgacaattcaagttttccttctgaagctcctgttctctctgacaatgatcatctga

SEQ ID NO: 1896 - DNA, 119 bp, homo sapiens
atctttatttgcttgttcaagctgaaatttcagttcaatattttcagatgacaacttcaagttttcctttgaagctcctgttctctctgacaatgatcatctgactctattcctgaaat

SEQ ID NO: 1897 - DNA, 119 bp, homo sapiens
tgaaggcttagaatatgtatcctttgaaaactgtttttctaaagcatgaagtttttcttggaggtatctttttgtaaatgtaaatcttctacaacagaatctcgaggaagagcttggtg

SEQ ID NO: 1898 - DNA, 119 bp, homo sapiens
ggcttagaatatgtatcctttgaaaactgtttttctaaagcatgaagtttttcttggaggtatctatttgtaaatgtaaatcttctacaacagaatctcgaggaagagcttggtgggcc

SEQ ID NO: 1899 - DNA, 119 bp, homo sapiens
ctcatatacaatatatcattttctaagtcaagatttctcttttttaattcttccaattctttttctgacccaaagctcgtattcccaaaacctgatcaacagtcatgccagttgttttt

SEQ ID NO: 1900 - DNA, 119 bp, homo sapiens
ctcttttttaattcttccaattctttttctgactccaaagctcgtattcccaaaacctgatcaacagtctgccagttgtttttagtttcctctgcaaagtaagtttctctttatcggct

SEQ ID NO: 1901 - DNA, 119 bp, homo sapiens
ttggcaaaaagatccttcaaagtattcaactgctttgttaaagtaaagacttccccctctttctcttttacttgtttcgaattccttctattttggcttgccactttttaccttcttcc

SEQ ID NO: 1902 - DNA, 119 bp, homo sapiens
caactgctttgttaaagtaaagacttccccctctttctcttttaacttgtttcgaattccttctattttgcttgccactttttaccttcttcccacctaattaattcttctttagcatt

SEQ ID NO: 1903 - DNA, 119 bp, homo sapiens
cttttctttcataggttttaggtctacttcctccacctttccctctaattggttctctagttttttaacttcctttggagttcttcaattagactttgtttattatctgtcaggggttt

SEQ ID NO: 1904 - DNA, 119 bp, homo sapiens
ttctttcataggttttaggtctacttcctccacctttccctctaattggttctctagttttttaactttctttggagttcttcaattagactttgtttattatctgtcaggggtttgcc

SEQ ID NO: 1905 - DNA, 119 bp, homo sapiens
ctgtaatccactggttagtcttttaatttgccttttcagttcatcattctcttgatcaatttcctcttttctctaagtattttattataggctttttgtttcttttgcagttcattatt

SEQ ID NO: 1906 - DNA, 119 bp, homo sapiens
ttgatcaatttcctctttctctctaagtattttattataggctttttgtttcttttgcagttcattattaagtcattcaaattatcagttagtgagttttctctgtttttacttgtttt

SEQ ID NO: 1907 - DNA, 119 bp, homo sapiens
cttttgcagttcattatttaagtcattcaaattatcagttagtgagttttctctgtttttacttgttttagtgcttctttcaattttaaaagattttcatttaaatcttcaacttgtgt

SEQ ID NO: 1908 - DNA, 119 bp, homo sapiens
ctttagctctctagtatgtcgatcaacgatttgttgaacattgagatgggcctctttttgagaagttgcgaaataatacgttcttcagcagctgctgtcatttctgcccggagttctaa

SEQ ID NO: 1909 - DNA, 119 bp, homo sapiens
tcgatcaacgatttgttgaacattgagatgggcctctttttgagaagttgcagaaataatacgttcttcgcagctgctgtcatttctgcccggagttctaaaagtgcccgactaagtgc

SEQ ID NO: 1910 - DNA, 119 bp, homo sapiens
tttctgttgtttctccttcaaggctaattggctctttagccgttctactagatttctcattgtagttgtggagctcttgaatttgcttctttttgagcctgaagttcagattttaaaca

SEQ ID NO: 1911 - DNA, 119 bp, homo sapiens
ctagatttctcattgtagttgttggagctcttgaatttgcttctttttgagcctgaagttcagattttaacactgtgactccttttgtgactggtccagaagatactttaaatcctcta

SEQ ID NO: 1912 - DNA, 119 bp, homo sapiens
tgagcctgaagttcagattttaaacactgtgactccttttgtgactggtccagaagatactttaaatccctacttccgcttttacttttttcacttcatcttcatggttttcttgaagc

SEQ ID NO: 1913 - DNA, 119 bp, homo sapiens
tgtaatttgatattttcaaattcttttacttttaattcagtgatttctctttgtctctccaaatcttgtatactttctttagtttgaccaagagtgaggaaagagagtcatcttgttct

SEQ ID NO: 1914 - DNA, 119 bp, homo sapiens
tgatttctctttgtctctccaaatcttgtgatactttctttagtttgaccaagagtgaggaaagagagtatcttgttctgctactgtctgttccatctcagccagacgaataaaatgct

SEQ ID NO: 1915 - DNA, 119 bp, homo sapiens
tagtttgaccaagagtgaggaaagagagtcatcttgttctgctactgtctgttccatctcagccagacgataaaatgcttgttggtaggaactggagtgggagactgtttcattaaatc

SEQ ID NO: 1916 - DNA, 119 bp, homo sapiens
ctctctggctttttctagaagacgttgatacttctttaatacttcttctttttgatttaaccttgcttgatgtttgcaatggtttgatgagcaattttcaatgtgtggtgagattttgg

SEQ ID NO: 1917 - DNA, 119 bp, homo sapiens
ttttgatttaaccttgcttgcatgtttgcaatggtttgatgagcaattttcaatgtgtggtgagattttgttccatctcttttctgcctagctcagctatgagcttttctctttctgca

SEQ ID NO: 1918 - DNA, 119 bp, homo sapiens
tcaatgtgtggtgagattttggttccatctcttttctgcctagctcagctatgagcttttctctttctgagtggcaggcaatcgaagcctcagttcattgattactttgtctcttgaca

SEQ ID NO: 1919 - DNA, 119 bp, homo sapiens
tatgagcttttctctttctgcagtggcaggcaatcgaagcctcagttcattgattactttgtctcttgaagtatattttgttctgctaaccttaaagcagattctttctcttttagttt

SEQ ID NO: 1920 - DNA, 119 bp, homo sapiens
ctcttctagtgatttgcaagttgcccgtgtttctagaattattcgaatgttctccttaattttccttaggcgatctcaagttgatttggaaggggcaaactagggtcagggattgatcc

SEQ ID NO: 1921 - DNA, 119 bp, homo sapiens
gcaagttgcccgtgtttctagaattattcgaatgttctccttaattttccttagagcgatctcaagttgtttggaaggggcaaactagggtcagggattgatcctgtagcttcttcaaa

SEQ ID NO: 1922 - DNA, 119 bp, homo sapiens
cttgttctgttgcacaatttcttcttcaagactgctgattgtacgttcatattcagaaattatgttattaaatattttatttcttctttatccttgactaattcccgatttagtttaag

SEQ ID NO: 1923 - DNA, 119 bp, homo sapiens
ttcatattcagaaattatgttattcaaatattttatttcttctttatccttgactaattcccgatttagttaagttcttgaagacgaagttcttctattttcatatgccagttgattac

SEQ ID NO: 1924 - DNA, 119 bp, homo sapiens
cttttgggctcctttggtatcctttaaagtgcttattaactcttccaggccctttaattttaattccattccaatgttttgttctccatatttctatgttcttgttgagaatttttcat

SEQ ID NO: 1925 - DNA, 119 bp, homo sapiens
attttaattccatctccaatgttttgttctccatatttctatgttcttgttgagaatttttcatttcttcattatcttaagtttgtcattttgtagttgaatcattgttttggagaact

SEQ ID NO: 1926 - DNA, 119 bp, homo sapiens
tttttcatttcttgcattatcttaagtttgtcattttgtagttgaatcattgttttggagaacttttccgttgtgccaagggtaaagctccactaaactgtcgtcgtagagactgaatt

SEQ ID NO: 1927 - DNA, 119 bp, homo sapiens
ggagaacttttcctgttgtgccaagggtaaagctccactaaactgtcgtcgtagagactgaattgtttgcgcagatgttttgctctgtttcttccctccaaacgagcataatagagagc

SEQ ID NO: 1928 - DNA, 119 bp, homo sapiens
actgaattgtttggcgcagatgttttgctctgtttcttccctccaaacgagcataatagagagcctgtttttttcatcaagtttctgctctaagcgcaagttgtaggcctccatcttct

SEQ ID NO: 1929 - DNA, 119 bp, homo sapiens
tagagagcctgttctttttcatcaagtttctgctctaagcgcaagttgtaggcctccatcttctgcagttagatgtaattgactccaacttaccaagagcagtagcctcactcagttga

SEQ ID NO: 1930 - DNA, 119 bp, homo sapiens
catcttctgcagtttagatgtaattgactccaacttaccaagagcagtagcctcactcagttgaagagaacattatgttggtgcaacttggcaatgagcgacttttcatcagactgtgc

SEQ ID NO: 1931 - DNA, 119 bp, homo sapiens
tttgacacttcaacttttagttccatttcattcttctctaattctagaatccgttgcctatcagcatcattactgccttgctcacactatcagctaattcatctcttaacatctgttcc

SEQ ID NO: 1932 - DNA, 119 bp, homo sapiens
cttctctaattctagaatccgttgcctatcagcatcacttactgccttgctcacactatcagctaattctctcttaacatctgttccaccttctgtgcatccaaattgattttggtaag

SEQ ID NO: 1933 - DNA, 119 bp, homo sapiens
ctcagcaaatttggtttccaattcaaaattacgttcctccatttgctttaacgaagtccgtaagtgttctacattttttgacaatgttcagcccgctgcctttcatttaattccttcat

SEQ ID NO: 1934 - DNA, 119 bp, homo sapiens
tgctttaacgaagtccgtaagtgttcatacattttttgacaatgttcagcccgctgcctttcatttaatccttcatttccagcatagttattttttttgaaatggaaacaatgtcactg

SEQ ID NO: 1935 - DNA, 119 bp, homo sapiens
gttcagcccgctgcctttcatttaattccttcatttccagcatagttattttttttgaaatggaaacaagtcactgttggttattgatttctttgccttatccatgctagattcattac

SEQ ID NO: 1936 - DNA, 119 bp, homo sapiens
ctccaggtgttccaagttacttgttctttgaacaagcatattatctttttgcaagatgtccctgtacttgcagtcagttcattgtactgtttattagccagttctagttcagacaaaga

SEQ ID NO: 1937 - DNA, 119 bp, homo sapiens
gatgtccctgtacttagcagtcagttcattgtactgtttattagccagttctagttcagacaaagaaacctattatctacaactttttggagagctgcaatcttgaaaatggccatttc

SEQ ID NO: 1938 - DNA, 119 bp, homo sapiens
cttaaatctttgcaaacacccaattttttcacaaacttcagcctccattgacaacaattcattcttttgttctcattttcttttctaagttgtcgctccaattctactaaggttgtata

SEQ ID NO: 1939 - DNA, 119 bp, homo sapiens
aattcattcttttgcttctcattttcttttctaagttgtcgctccaattctactaaggttgtatattgcttataagtgatttttcattcacttgcaaaacagtaattttcctactattt

SEQ ID NO: 1940 - DNA, 119 bp, homo sapiens
aggttgtatattgccttataagtgatttttcattcacttgcaaaacagtaattttcctactattttctgaagtatttttttcatttcatccgaatccatctgaagagcattgagcaaat

SEQ ID NO: 1941 - DNA, 119 bp, homo sapiens
ctgtaacaaatgtattaaatattcattctgagaattaatgatactggcactagatggtgctatcccatcggtaagtcaattcctttaaaaacaacatttgatccttctgattgtcgtaa

SEQ ID NO: 1942 - DNA, 119 bp, homo sapiens
agaattaatgatactggcactagatggtgctatcccatcaggtaagtcaattcctttaaaaacaacattgatccttctgattgtcgtaaaagactagtttctttttcaagatggtctat

SEQ ID NO: 1943 - DNA, 119 bp, homo sapiens
ctttaaattagcttttgccaactgctgtgaataatttatagcctctttccgagattccctgagctcctgcttaattcttcatttcttccggtaagctgatcaacttgggctttcaaatg

SEQ ID NO: 1944 - DNA, 119 bp, homo sapiens
tttccgagattccctgagctcctgtcttaattcttcatttcttccggtaagctgatcaacttgggctttaaatgcagactcgcatcaaagattccttctgcattctttgattctatagc

SEQ ID NO: 1945 - DNA, 119 bp, homo sapiens
attaactagtctttcaaggctagggataattagagatgtttctcctcctttaacatcaggatctttctgatttccttaattgcttgcaatatttctttcataccttcttcaagttgctt

SEQ ID NO: 1946 - DNA, 119 bp, homo sapiens
ggataattagagatgtttctcctcctttaacatcaggatctttctgcatttccttaattgcttgcaatattctttcataccttcttcaagttgcttattttcttcaactaattctttta

SEQ ID NO: 1947 - DNA, 119 bp, homo sapiens
ccacacgctctctaagtgcctcattttcatcaaggaaatcactgatcttcaattcaagtttattgatttctttgttaatatttcaatctctcgatctcttattttaatttggtttttac

SEQ ID NO: 1948 - DNA, 119 bp, homo sapiens
gatcttcaattcaagtttattgatttcctttgttaatatttcaatctctcgatctcttattttaatttgtttttacaattctttatttcaacgacagcatcttctaaaccatatactcc

SEQ ID NO: 1949 - DNA, 119 bp, homo sapiens
cgattcataatcttttaacctcttcagagcctcaactaattctttatccttttccctagcatcagcctcgccagttcagctgttctctcagcctctttagttttctcttttaaaatgtc

SEQ ID NO: 1950 - DNA, 119 bp, homo sapiens
tttccctagcatcagcctcagccagttcagctgttctctcagcctctttagttttctcttttaaaatgttaacgttgactgaattttcatatgagtctgttgagaaagggttgaagcac

SEQ ID NO: 1951 - DNA, 119 bp, homo sapiens
ctttgtttctttggagctcatttttcaaatcttcaataatacaagtattcttttccatttcttttgtatttgttctacttgttcggtgagcatcttaatttgactgtctcgttcctgta

SEQ ID NO: 1952 - DNA, 119 bp, homo sapiens
gtttctttggagctcatttttcaaatcttcaataatacaagtattcttttccatttcttttgtatattgtctacttgttcggtgagcatcttaatttgactgtctcgttcctgtatacc

SEQ ID NO: 1953 - DNA, 119 bp, homo sapiens
ctgctgtagagccataacattacttttatcagcatcaagctgagcattcttaagtttctcccttaggtttgtaacatttgctgatactcaataatttcatcatctttagaagacaaaat

SEQ ID NO: 1954 - DNA, 119 bp, homo sapiens
ctgtagagccataacattacttttatcagcatcaagctgagcattcttaagtttctcccttaggttatgaacatttgctgatactcaataatttcatcatctttagaagacaaaattag

SEQ ID NO: 1955 - DNA, 119 bp, homo sapiens
ttgaagttgataatgatcgttttctttttttaactgatctattacattatctgtctgatgcacaatagcttcattctattatattcatcagtcatcttctccatttcctgtacagactc

SEQ ID NO: 1956 - DNA, 119 bp, homo sapiens
aactgatctattacattatctgtctgatgcacaatagctttcattctattatattcatcagtcatcttcccatttcctgtacagactcttctaaattttttctcatttcttgattctga

SEQ ID NO: 1957 - DNA, 119 bp, homo sapiens
caatagctttcattctattatattcatcagtcatcttctccatttcctgtacagactcttctaaatttttctcatttcttgattctgaacttcaattttctcattagcttctgttaaag

SEQ ID NO: 1958 - DNA, 119 bp, homo sapiens
ctgaatttcatcaagatattggataagctcatagttttttttagacaactgtgatcggtagtcactgtctcccctcttcttgataaaagtgtttctttctgtgaatctatttgtttctg

SEQ ID NO: 1959 - DNA, 119 bp, homo sapiens
gttttttttagacaactgtgatcggtagtcactgtcttcccctcttcttgataaaagtgtttctttctggaatctatttgtttctggtagtcaataatatcctgacaaagttgttcatt

SEQ ID NO: 1960 - DNA, 119 bp, homo sapiens
ttgctcattaactttcttctctttctccaactccttttccatgtcctccaattctctatctttttgttcaattgtttttcaagttggcaaatttcattacgtaaaaaccgagtatctcg

SEQ ID NO: 1961 - DNA, 119 bp, homo sapiens
ctccaactccttttccatgtcctccaattctctatctttttgttctaattgtttttcaagttggcaaattcattacgtaaaaaccgagtatctcgtccacctgcagactgctgagccat

SEQ ID NO: 1962 - DNA, 119 bp, homo sapiens
cttggataaggaaatcaataaattatctgccagttcttcttgacggggcaggtcatctgggtcaactttattatttctttccagtttatattaggtggcatcttgaattctttcactgt

SEQ ID NO: 1963 - DNA, 119 bp, homo sapiens
ggaaatcaataaattatctgccagttcttcttgacggggcaggtcatctgggtcaactttcattatttcttccagtttatattaggtggcatcttgaattctttcactgtgctccacct

SEQ ID NO: 1964 - DNA, 119 bp, homo sapiens
ctagaccaagcctggcaaccagcggaggcctctcactaccgcaaccaccaagctggacccggccgcgggcctgacagatccctatcgcggttccacgcggactctgggtccagccaaat

SEQ ID NO: 1965 - DNA, 119 bp, homo sapiens
aagctggacccggccgcgggccctgacagatccctatcgcggttccacgcggactctgggtccagccaatggtcccgagcaagccaaagcggcagcggctgctaggcgacaccatcccc

SEQ ID NO: 1966 - DNA, 119 bp, homo sapiens
cggactctgggtccagccaaatggtcccgagcaagccaaagcggcagcggctgctaggcgacaccatcccaactccgccaaggccagaataagatcccggatgccaggagagcctacag

SEQ ID NO: 1967 - DNA, 119 bp, homo sapiens
gctgctaggcgacaccatccccaactccgccaaggccagaataagatcccggatgccaggagagcctacgttcacgaccgtgggtgatgctttacgtttagattctccgccggagtccc

SEQ ID NO: 1968 - DNA, 119 bp, homo sapiens
cggatgccaggagagcctacagttcacgaccgtgggtgatgctttacgtttagattctccgccggagtccagagctcggtgttcaggatgatgagaaggcgtggaacgaggacttcaaa

SEQ ID NO: 1969 - DNA, 119 bp, homo sapiens
ggccacaggccaagggcagcagtcaggcctgctctgtctgtgaacgctcccggcttggcctcggctgatggccctcacgcctgaagcgggcaggaagctccgggatggatttcgggtct

SEQ ID NO: 1970 - DNA, 119 bp, homo sapiens
gcctcggctgatgggccctcacgcctgaagcgggcaggaagctccgggatggatttcgggtctttggagccgtggtggccaactctgccttcatcgccgcccgaggcagctttgacggc

SEQ ID NO: 1971 - DNA, 119 bp, homo sapiens
gggtctttggagaccgtggtggccaactctgccttcatcgccgcccgaggcagctttgacggcagcagccccaaccctcccgggacaagaagtacctggccaagctcaagctgcccccg

SEQ ID NO: 1972 - DNA, 119 bp, homo sapiens
gacggcagcagctcccaaccctcccgggacaagaagtacctggccaagctcaagctgcccccgctgtccagtgtgagtccctccgcgacagcctcagcctggagtttgagagtgtgtgc

SEQ ID NO: 1973 - DNA, 119 bp, homo sapiens
cccccgctgtccaagtgtgagtccctccgcgacagcctcagcctggagtttgagagtgtgtgcttggagagcccatcggcaagaagctctttcagcagttcctacaatcggcagagaag

SEQ ID NO: 1974 - DNA, 119 bp, homo sapiens
gtgtgcttggagcagcccatcggcaagaagctctttcagcagttcctacaatcggcagagaagcacctgcggccctggagctctggaaagacatcgaggactatgacacggcagacaat

SEQ ID NO: 1975 - DNA, 119 bp, homo sapiens
gagaagcacctgccggccctggagctctggaaagacatcgaggactatgacacggcagacaatgacctcagccacagaaggcccagaccatcctggcccagtacctggacccccaggcc

SEQ ID NO: 1976 - DNA, 119 bp, homo sapiens
gacaatgacctccagccacagaaggcccagaccatcctggcccagtacctggacccccaggccaaactctctgcagcttcctggatgaggggatagtggcgaagtttaaggaggggcct

SEQ ID NO: 1977 - DNA, 119 bp, homo sapiens
caggccaaactcttctgcagcttcctggatgaggggatagtggcgaagtttaaggaggggcctgtggagtccaggacgggctcttccagcccctgctgcaggccaccctggcacacctg

SEQ ID NO: 1978 - DNA, 119 bp, homo sapiens
gggcctgtggagatccaggacgggctcttccagcccctgctgcaggccaccctggcacacctgggccaacccccttccaggagtacctgggcagcctgtacttcctgaggttcctgcag

SEQ ID NO: 1979 - DNA, 119 bp, homo sapiens
cacctgggccaagcccccttccaggagtacctgggcagcctgtacttcctgaggttcctgcagtggaagggctggaagcccagcccatgggggaggactggttcctggacttcagggtc

SEQ ID NO: 1980 - DNA, 119 bp, homo sapiens
ctgcagtggaagtggctggaagcccagcccatgggggaggactggttcctggacttcagggtcctagggaagggggcttcggggaggtgtcggcctgccagatgaaggcgaccggcaag

SEQ ID NO: 1981 - DNA, 119 bp, homo sapiens
agggtcctagggaaagggggcttcggggaggtgtcggcctgccagatgaaggcgaccggcaagctgtatcctgcaagaagctgaacaagaagcggctgaagaagaggaagggctaccag

SEQ ID NO: 1982 - DNA, 119 bp, homo sapiens
ggtgctatggtggagaagaagattctgatgaaagtacacagcaggttcatcgtgtctctggcctatgcgttgaaaccaaagccgacctctgtctggtgatgaccatcatgaacggaggt

SEQ ID NO: 1983 - DNA, 119 bp, homo sapiens
ggtggagaagaagattctgatgaaagtacacagcaggttcatcgtgtctctggcctatgcgtttgaaacaaagccgacctctgtctggtgatgaccatcatgaacggaggtgacatcag

SEQ ID NO: 1984 - DNA, 119 bp, homo sapiens
gtaccacatctacaacgtgaatgaggagaaccctggcttcccggagccgcgcgccctcttctacacggccagatcatctgcggcctggagcacctgcaccagaggcggatcgtctaccg

SEQ ID NO: 1985 - DNA, 119 bp, homo sapiens
tcccggagccgcgcgccctcttctacacggcgcagatcatctgcggcctggagcacctgcaccagaggcgatcgtctaccgcgacctcaagcccgagaacgtgctgctggacaatgacg

SEQ ID NO: 1986 - DNA, 119 bp, homo sapiens
gtttcatggcccccgagctcctgcagggcgaggagtacgacttctccgtggactactttgccctgggggcaccctgtatgagatgattgcggccagaggacccttccgagcccgtggag

SEQ ID NO: 1987 - DNA, 119 bp, homo sapiens
atggcccccgagctcctgcagggcgaggagtacgacttctccgtggactactttgccctgggggtcacctgtatgagatgattgcggccagaggacccttccgagcccgtggagagaag

SEQ ID NO: 1988 - DNA, 119 bp, homo sapiens
gtggagaacaaggagctgaagcaccggatcatctcagagcccgtgaagtaccctgataagttcagccagccagcaaggacttctgcgaggcgctgctggagaaggacccggagaagcgc

SEQ ID NO: 1989 - DNA, 119 bp, homo sapiens
cgtgaagtaccctgataagttcagccaggccagcaaggacttctgcgaggcgctgctggagaaggacccgagaagcgcctggggttcagagatgagacctgcgacaagctccgtgccca

SEQ ID NO: 1990 - DNA, 119 bp, homo sapiens
tctgcgaggcgctgctggagaaggacccggagaagcgcctggggttcagagatgagacctgcgacaagcccgtgcccaccccctcttcaaggaccttaactggaggcagctggaggctg

SEQ ID NO: 1991 - DNA, 119 bp, homo sapiens
ggatgctgatgccccctttcatcccagactccaaaactgtctacgcaaaggatattcaggacgtgggtgcttttccaccgtcaaaggtgtggcctttgacaaaacagacacagaattct

SEQ ID NO: 1992 - DNA, 119 bp, homo sapiens
gacgtgggtgccttttccaccgtcaaaggtgtggcctttgacaaaacagacacagaattctttcaggaattgccactggcaactgccccatcccctggcaggaggagatgatcgagacg

SEQ ID NO: 1993 - DNA, 119 bp, homo sapiens
ctttcaggaatttgccactggcaactgccccatcccctggcaggaggagatgatcgagacgggcatcttggcgagctgaacgtgtggcgctcggacggtcagatgccggacgacatgaa

SEQ ID NO: 1994 - DNA, 119 bp, homo sapiens
cgggcatctttggcgagctgaacgtgtggcgctcggacggtcagatgccggacgacatgaagggcatctcgggggctccagctcctcgtccaagtcagggatgtgtctggtttcctagg

SEQ ID NO: 1995 - DNA, 119 bp, homo sapiens
aagggcatctccgggggctccagctcctcgtccaagtcagggatgtgtctggtttcctaggtgacgcccagagtccacgtggaggaaaaggacccatacggctcgatgggggccgcctg

SEQ ID NO: 1996 - DNA, 119 bp, homo sapiens
ggtgacgccccagagtccacgtggaggaaaaggacccatacggctcgatgggggccgcctgcctccgtgtgccagcctggggtctgctagcaaggggacacgtggttccctccacccag

SEQ ID NO: 1997 - DNA, 119 bp, homo sapiens
tgcctccgtggtgccagcctggggtctgctagcaaggggacacgtggttccctccacccaggtccccatacgccatctccttgcggcccaaggaggagaaagcccacatcggcctgagc

SEQ ID NO: 1998 - DNA, 119 bp, homo sapiens
aggtccccatcacgccatctccttgcggcccaaggaggagaaagcccacatcggcctgagccgccagaccacatgctggtgccgtgagcccccgactgcatatttcacgtcttttgctc

SEQ ID NO: 1999 - DNA, 119 bp, homo sapiens
gccgccagacgcacatgctggtgccgtgagcccccgactgcatatttcacgtcttttgctccatctcacgagaagacataagatgctctccagagggagtaagccaaaaatctacaaac

SEQ ID NO: 2000 - DNA, 119 bp, homo sapiens
cagaaaatcaccctgtgcattcatggatgtccacgggggcaagggctttgtgttgcttaacccagcatctgaaccgtgtttgttgaatgaatacagaaccccgtttgctctgggagagc

SEQ ID NO: 2001 - DNA, 119 bp, homo sapiens
caagggctttgtgttgcttaacccagcatcctgaaccgtgtttgttgaatgaatacagaaccccgtttgtctgggagagcacagaaaacagtcttctatcatatatcatagccagctgc

SEQ ID NO: 2002 - DNA, 119 bp, homo sapiens
gtttgttgaatgaatacagaaccccgtttgctctgggagagcacagaaaacagtcttctatcatatatctagccagctgcaaacagcagatggcttcccatatcccagagagtaagaac

SEQ ID NO: 2003 - DNA, 119 bp, homo sapiens
tttgggtctttctcctctgtgcctgctctctccagagaaactggaggggtagcagttagcattcccccgtggttccaccaagcacagtcaaggtctctaggacatggccacccctcacc

SEQ ID NO: 2004 - DNA, 119 bp, homo sapiens
agttagcattcccccgctggttccaccaagcacagtcaaggtctctaggacatggccacccctcacctgggaagcggtcctgctggggtgggtgggtgttagttggttctggtttgggt

SEQ ID NO: 2005 - DNA, 119 bp, homo sapiens
ggccacccctcacctgtggaagcggtcctgctggggtgggtgggtgttagttggttctggtttgggtcaagacacccagtggcccaggtgggcgtggggccagggcgcagacgagaagg

SEQ ID NO: 2006 - DNA, 119 bp, homo sapiens
gttctggtttgggtcagagacacccagtggcccaggtgggcgtggggccagggcgcagacgagaaggggacgagggctccgctccgaggacccagcggcaagcaccggtcccgggcgcg

SEQ ID NO: 2007 - DNA, 119 bp, homo sapiens
cgcagacgagaaggggcacgagggctccgctccgaggacccagcggcaagcaccggtcccgggcgcgcccagcccacccactcgcgtgcccacggcggcattattccctataaggatct

SEQ ID NO: 2008 - DNA, 119 bp, homo sapiens
cggtcccgggcgcgccccagcccacccactcgcgtgcccacggcggcattattccctataaggatctgacgatccgggggcggccccgccccgttaccccttgcccccggccccgcccc

SEQ ID NO: 2009 - DNA, 119 bp, homo sapiens
ccctataaggatctgaacgatccgggggcggccccgccccgttaccccttgcccccggccccgcccccttttggagggccgatgaggtaatgcggctctgccattggtctgagggggcg

SEQ ID NO: 2010 - DNA, 119 bp, homo sapiens
cccggccccgccccctttttggagggccgatgaggtaatgcggctctgccattggtctgagggggcgggcccaacagcccgaggcggggtccccgggggcccagcgctatatcactcgg

SEQ ID NO: 2011 - DNA, 119 bp, homo sapiens
ggtctgagggggcgggccccaacagcccgaggcggggtccccgggggcccagcgctatatcactcggcccccaggcagcggcgcagagcgggcagcaggcaggcggcgggcgctcagac

SEQ ID NO: 2012 - DNA, 119 bp, homo sapiens
gggaggccgcccgccgagtcctgcgccagcgccgaggcagcctcgctgcgccccatcccgtcccgccggcactcggagggcagcgcgccggaggccaaggttgccccgcacggcccggc

SEQ ID NO: 2013 - DNA, 119 bp, homo sapiens
atcccgtcccgccgggcactcggagggcagcgcgccggaggccaaggttgccccgcacggcccggcggggagcgagctcgggctgcagcagccccgccggcggcgcgcacggcaacttt

SEQ ID NO: 2014 - DNA, 119 bp, homo sapiens
gcacggcccggcgggcgagcgagctcgggctgcagcagccccgccggcggcgcgcacggcaactttggaaggcgagcagcagccccggcagcggcggcagcagcggcaatgaccccttg

SEQ ID NO: 2015 - DNA, 119 bp, homo sapiens
cacggcaactttggagaggcgagcagcagccccggcagcggcggcagcagcggcaatgaccccttggctgggctcatcgtgctcctgggcagctggagcctgggggactggggcgccga

SEQ ID NO: 2016 - DNA, 119 bp, homo sapiens
aatgaccccttggctcgggctcatcgtgctcctgggcagctggagcctgggggactggggcgccgaggctgcacatgctcgcccagccacccccaggacgccttctgcaactccgacat

SEQ ID NO: 2017 - DNA, 119 bp, homo sapiens
atcaagtcctgctactacctgccttgctttgtgacttccaagaacgagtgtctctggaccgacatgctcccaatttcggttaccctggctaccagtccaaacactacgcctgcatccgg

SEQ ID NO: 2018 - DNA, 119 bp, homo sapiens
cgacatgctctccaatttcggttaccctggctaccagtccaaacactacgcctgcatccggcagaagggggctactgcagctggtaccgaggatgggcccccccggataaaagcatcat

SEQ ID NO: 2019 - DNA, 119 bp, homo sapiens
ggcagaagggcggctactgcagctggtaccgaggatgggcccccccggataaaagcatcatcaatgccaagacccctgagcgccagaccctgccccacctcacttccctcccttcccgc

SEQ ID NO: 2020 - DNA, 119 bp, homo sapiens
atcaatgccacagacccctgagcgccagaccctgccccacctcacttccctcccttcccgctgagcttccttggacactaactcttcccagatgatgacaatgaaattagtgcctgttt

SEQ ID NO: 2021 - DNA, 119 bp, homo sapiens
gctgagcttcccttggacactaactcttcccagatgatgacaatgaaattagtgcctgttttcttgcaatttagcacttggaacatttaaagaaaggtctatgctgtcatatggggttt

SEQ ID NO: 2022 - DNA, 119 bp, homo sapiens
tttcttgcaaatttagcacttggaacatttaaagaaaggtctatgctgtcatatggggtttattgggaatatcctcctggccccaccctgccccttctttttggttttgacatcattca

SEQ ID NO: 2023 - DNA, 119 bp, homo sapiens
ttattgggaactatcctcctggccccaccctgccccttctttttggttttgacatcattcatttccaccgggaatttctggtgccatgccagaaagaatgaggaacctgtattcctctt

SEQ ID NO: 2024 - DNA, 119 bp, homo sapiens
catttccacctgggaatttctggtgccatgccagaaagaatgaggaacctgtattcctcttcttcgtgaaatataatctctatttttttaggaaaacaaaaatgaaaaactactccatt

SEQ ID NO: 2025 - DNA, 119 bp, homo sapiens
ttcttcgtgataatataatctctatttttttaggaaaacaaaaatgaaaaactactccatttgaggatttaattcccacccctcttgcttcttccccacctcaccatctcccagaccct

SEQ ID NO: 2026 - DNA, 119 bp, homo sapiens
tttgaggattgtaattcccacccctcttgcttcttccccacctcaccatctcccagaccctcttcccttgcccttctcctccaatacataaaggacacagacaaggaacttgctgaaag

SEQ ID NO: 2027 - DNA, 119 bp, homo sapiens
ctcttccctttgcccttctcctccaatacataaaggacacagacaaggaacttgctgaaaggccaaccattcaggatcagtcaaaggcagcaagcagatagactcaaggtgtgtgaaag

SEQ ID NO: 2028 - DNA, 119 bp, homo sapiens
aggccaaccatttcaggatcagtcaaaggcagcaagcagatagactcaaggtgtgtgaaagatgttataaccaggagctgccactgcatgtcccaaccagactgtgtctgtctgtgtct

SEQ ID NO: 2029 - DNA, 119 bp, homo sapiens
agatgttatacaccaggagctgccactgcatgtcccaaccagactgtgtctgtctgtgtctgcatgtaaagtgagggagggaaggaaggaactacaagagagtcggagatgatgcagca

SEQ ID NO: 2030 - DNA, 119 bp, homo sapiens
ctgcatgtaagagtgagggagggaaggaaggaactacaagagagtcggagatgatgcagcacacacacattccccagcccagtgatgcttgtgttgaccagatgttcctgagtctggag

SEQ ID NO: 2031 - DNA, 119 bp, homo sapiens
cacacacacaattccccagcccagtgatgcttgtgttgaccagatgttcctgagtctggagcaagcaccaggccagaataacagagctttcttagttggtgaagacttaaacatctgcc

SEQ ID NO: 2032 - DNA, 119 bp, homo sapiens
agcaagcacccaggccagaataacagagctttcttagttggtgaagacttaaacatctgcctgaggtcagaggcaatttgcctgccttgtacaaaagctcaggtgaaagactgagatga

SEQ ID NO: 2033 - DNA, 119 bp, homo sapiens
cctgaggtcaggaggcaatttgcctgccttgtacaaaagctcaggtgaaagactgagatgaatgtctttctctccctgcctcccaccagacttcctcctggaaaacgctttggtagatt

SEQ ID NO: 2034 - DNA, 119 bp, homo sapiens
gaatgtctttcctctccctgcctcccaccagacttcctcctggaaaacgctttggtagatttggccagggctttcttttatgtaaattggataaatacacacaccatacactatccaca

SEQ ID NO: 2035 - DNA, 119 bp, homo sapiens
tttggccaggagctttcttttatgtaaattggataaatacacacaccatacactatccacagatatagcaagtagatttgggtagaggatactatttccagaatagtgtttagctcacc

SEQ ID NO: 2036 - DNA, 119 bp, homo sapiens
cagatatagccaagtagatttgggtagaggatactatttccagaatagtgtttagctcacctagggggaatgtttgtatacacatttgcatatacccacatggggacataagctaattt

SEQ ID NO: 2037 - DNA, 119 bp, homo sapiens
cctagggggatatgtttgtatacacatttgcatatacccacatggggacataagctaatttttttacagacacagaattctgttcaatgctgttaaatatgccaatagtttaatctctt

SEQ ID NO: 2038 - DNA, 119 bp, homo sapiens
ttttttacaggacacagaattctgttcaatgctgttaaatatgccaatagtttaatctcttctattttgtgtcgttgcttgtttgaagaaaatcatgacattccaagttgacatttttt

SEQ ID NO: 2039 - DNA, 119 bp, homo sapiens
ttctattttgttgtcgttgcttgtttgaagaaaatcatgacattccaagttgacatttttttttcatttaattaaaatttgaaattctgaacaccgtcagcaccctctcttccctatca

SEQ ID NO: 2040 - DNA, 119 bp, homo sapiens
tttttcattttaattaaaatttgaaattctgaacaccgtcagcaccctctcttccctatcatgggtcattgacccctgtccgtctccttgtccctgcttcatgtttgggggcctttctt

SEQ ID NO: 2041 - DNA, 119 bp, homo sapiens
catgggtcatctgacccctgtccgtctccttgtccctgcttcatgtttgggggcctttctttaactgcctcctggcttagctcagatggcagatgagagtgtagtcaagggcctgggca

SEQ ID NO: 2042 - DNA, 119 bp, homo sapiens
tttaactgccttcctggcttagctcagatggcagatgagagtgtagtcaagggcctgggcacaggaggggagctgcagagtgtcctgcctgccttggctggagggacacctctcctggg

SEQ ID NO: 2043 - DNA, 119 bp, homo sapiens
cacaggagggagagctgcagagtgtcctgcctgccttggctggagggacacctctcctgggtgtggagaagcttggttccctttccctagctccctggtgggtgaatgccacctcctga

SEQ ID NO: 2044 - DNA, 119 bp, homo sapiens
ggtgtggagacagcttggttccctttccctagctccctggtgggtgaatgccacctcctgagatcctcactcttggaattaaaattgttggtcactggggaaagcctgagtttgcaacc

SEQ ID NO: 2045 - DNA, 119 bp, homo sapiens
gttttagtgtcaaaagtgagatgctgagagtaggtgataatgtatattttacagagtgggggttggcagatggtgacattgaacatgattgctctctgtctcttttttcagcttatggg

SEQ ID NO: 2046 - DNA, 119 bp, homo sapiens
ggggttggcaggatggtgacattgaacatgattgctctctgtctcttttttcagcttatgggtatttatttctattagtatttgtatcttcagttcattccactttaggaaacagagct

SEQ ID NO: 2047 - DNA, 119 bp, homo sapiens
tgggtatttatcttctattagtatttgtatcttcagttcattccactttaggaaacagagctgccaattaaacagaagaagaaaaaaaaaaaaagcagcagacaacacactgtagagtc

SEQ ID NO: 2048 - DNA, 119 bp, homo sapiens
agctgccaattgaaacagaagaagaaaaaaaaaaaaagcagcagacaacacactgtagagtcttgcacaacacaagtgcccaggcaaggtgcttggcagaaccgcagagtgggaagaga

SEQ ID NO: 2049 - DNA, 119 bp, homo sapiens
agtcttgcacacacacaagtgcccaggcaaggtgcttggcagaaccgcagagtgggaagagagtaccggatcgggtttccttgggatcaatttcattaccgtgtacctttcccattgtg

SEQ ID NO: 2050 - DNA, 119 bp, homo sapiens
gagagtaccggcatcgggtttccttgggatcaatttcattaccgtgtacctttcccattgtggtcatgcatttggcagggggagaatgggaggcttggccttctttgtgaggcagtgtg

SEQ ID NO: 2051 - DNA, 119 bp, homo sapiens
tgtggtcatgccatttggcagggggagaatgggaggcttggccttctttgtgaggcagtgtgagcagaactgatgccagcatgtcactggttttgaagggatgagcccagacttgatgt

SEQ ID NO: 2052 - DNA, 119 bp, homo sapiens
tgtgagcagaagctgatgccagcatgtcactggttttgaagggatgagcccagacttgatgttttgggatgtccttattttaacctcaaggtctcgcatggtggggcccctgaccaacc

SEQ ID NO: 2053 - DNA, 119 bp, homo sapiens
atgttttgggattgtccttattttaacctcaaggtctcgcatggtggggcccctgaccaacctacacaattccctcccacaagtggacatcagtgtcttctctgtgaggcatctggcca

SEQ ID NO: 2054 - DNA, 119 bp, homo sapiens
aacctacacaagttccctcccacaagtggacatcagtgtcttctctgtgaggcatctggccattcgcacccctggtgtggtcagcctctctcacacaaggaggaacttgggtgaaggct

SEQ ID NO: 2055 - DNA, 119 bp, homo sapiens
gccattcgcactccctggtgtggtcagcctctctcacacaaggaggaacttgggtgaaggctgagtgtgggcacctgaagtttccctgcggagtcgataaattagcagaaccacatccc

SEQ ID NO: 2056 - DNA, 119 bp, homo sapiens
ggctgagtgtgaggcacctgaagtttccctgcggagtcgataaattagcagaaccacatccccatctgtaggccttggtgaggaggccctgggcaaagaagggtctttcgcaaagcgat

SEQ ID NO: 2057 - DNA, 119 bp, homo sapiens
tccccatctgttaggccttggtgaggaggccctgggcaaagaagggtctttcgcaaagcgatgtcagaggcggttttgagctttctataagctatagctttgtttatttcacccgttca

SEQ ID NO: 2058 - DNA, 119 bp, homo sapiens
cgatgtcagagggcggttttgagctttctataagctatagctttgtttatttcacccgttcacttactgataatttaaaatcatttatgtagctgagacacttctgtatttcaatcata

SEQ ID NO: 2059 - DNA, 119 bp, homo sapiens
ttcacttactgtataatttaaaatcatttatgtagctgagacacttctgtatttcaatcatatcatgaaattttattttgctaaatcttgtgtcatgtgtaggctgtaatatgtgtaca

SEQ ID NO: 2060 - DNA, 119 bp, homo sapiens
catatcatgaacattttattttgctaaatcttgtgtcatgtgtaggctgtaatatgtgtacattgtgttaagagaaaaatgaaacccacatgccgccattttcctgaatcaaattctgc

SEQ ID NO: 2061 - DNA, 119 bp, homo sapiens
tacattgtgtttaagagaaaaatgaaacccacatgccgccattttcctgaatcaaattctgcagtggaaggagaggaaaatacttctaggcaagcagctagactggtgaattgggggaa

SEQ ID NO: 2062 - DNA, 119 bp, homo sapiens
ctgcagtggaatggagaggaaaatacttctaggcaagcagctagactggtgaattgggggaaatagaagaactagtaactgagactcctccagcctcctccctattggaatcccaatgg

SEQ ID NO: 2063 - DNA, 119 bp, homo sapiens
ggaaatagaaggaactagtaactgagactcctccagcctcctccctattggaatcccaatggctcctgggtaggaaaaaagtttaaactacattcatgttcttgttctgtgtcactcgg

SEQ ID NO: 2064 - DNA, 119 bp, homo sapiens
atggctcctggagtaggaaaaaagtttaaactacattcatgttcttgttctgtgtcactcggccctgggagtctaccatttacttcaccccaagtcctgctgcccatccagttgggaag

SEQ ID NO: 2065 - DNA, 119 bp, homo sapiens
tcggccctgggtagtctaccatttacttcaccccaagtcctgctgcccatccagttgggaagccatgatttcctaagaatccagggccatgggagatacaattccaagttctcgcttcc

SEQ ID NO: 2066 - DNA, 119 bp, homo sapiens
gaagccatgattttcctaagaatccagggccatgggagatacaattccaagttctcgcttcctcctttggcatctcttctgcctcccaatcaaggaagctccatgctcaggctctcagc

SEQ ID NO: 2067 - DNA, 119 bp, homo sapiens
ttcctcctttgggcatctcttctgcctcccaatcaaggaagctccatgctcaggctctcagctctcgggcagtgctctgctctgtccagggtaggtaatactgggagactcctgtcttt

SEQ ID NO: 2068 - DNA, 119 bp, homo sapiens
cagctctcgggccagtgctctgctctgtccagggtaggtaatactgggagactcctgtcttttaccctccctcgttccagacctgcctcatggtggcaacatggttcttgaacaattaa

SEQ ID NO: 2069 - DNA, 119 bp, homo sapiens
cttttaccctcccctcgttccagacctgcctcatggtggcaacatggttcttgaacaattaaagaaacaatgactttttggaatagccctgtctagggcaaactgtggcccccaggaga

SEQ ID NO: 2070 - DNA, 119 bp, homo sapiens
ttaaagaaacaaatgactttttggaatagccctgtctagggcaaactgtggcccccaggagacactaccttccatgccccagacctctgtcttgcatgtgacaattgacaatctggact

SEQ ID NO: 2071 - DNA, 119 bp, homo sapiens
gagacactacccttccatgccccagacctctgtcttgcatgtgacaattgacaatctggactaccccaaatggcacccaagtgtttggcttctggctacctaaggttaacatgtcacta

SEQ ID NO: 2072 - DNA, 119 bp, homo sapiens
gactaccccaagatggcacccaagtgtttggcttctggctacctaaggttaacatgtcactagagtattttatgagagacaaacattataaaaatctgatggcaaaagcaaaacaaaat

SEQ ID NO: 2073 - DNA, 119 bp, homo sapiens
actagagtatttttatgagagacaaacattataaaaatctgatggcaaaagcaaaacaaaatggaaagtggggaggtggatgtgacaacaacttccaaattggctctttggaggcgaga

SEQ ID NO: 2074 - DNA, 119 bp, homo sapiens
aaatggaaagtaggggaggtggatgtgacaacaacttccaaattggctctttggaggcgagaggaagggagaacttggagaatagtttttgctttgggggtagaggcttcttagattct

SEQ ID NO: 2075 - DNA, 119 bp, homo sapiens
gagaggaaggggagaacttggagaatagtttttgctttgggggtagaggcttcttagattctcccagcaccgcctttccctttagccagtctgctgtcctgaaacccagaagtgatgga

SEQ ID NO: 2076 - DNA, 119 bp, homo sapiens
ttctcccagcatccgcctttccctttagccagtctgctgtcctgaaacccagaagtgatggagagaaacaacaagagatctcgaaccctgtctagaaggaatgtatttgttgctaaatt

SEQ ID NO: 2077 - DNA, 119 bp, homo sapiens
tggagagaaaccaacaagagatctcgaaccctgtctagaaggaatgtatttgttgctaaatttcgtagcctgtttacagttttcctccatgttatttatgaattttatattccgtgaat

SEQ ID NO: 2078 - DNA, 119 bp, homo sapiens
aatttcgtagcactgtttacagttttcctccatgttatttatgaattttatattccgtgaatgtatatttcttgtaatgttgcataatgttcactttttatagtgtgtcctttattcta

SEQ ID NO: 2079 - DNA, 119 bp, homo sapiens
tctgaggttagggtcattgtctctttattgacctaatccacatatctaacaaagagagcgacaaagcaaagcctatcagtgccaccgcagacgctgtgatcaccacgacgacaacggtc

SEQ ID NO: 2080 - DNA, 119 bp, homo sapiens
ctaacaaagagagcgacaaagcaacagcctatcagtgccaccgcagacgctgtgatcaccacgacgacacggtcccggctgtgttgaccagaaagcccaggccacctccgaccaggatc

SEQ ID NO: 2081 - DNA, 119 bp, homo sapiens
gacgctgtgatcaccacgacgacaacggtcccggctgtgttgaccagaaagcccaggccacctccgaccggatctgagccagctgcaccatgcatgtgagggtggcgcagtccatgccc

SEQ ID NO: 2082 - DNA, 119 bp, homo sapiens
agaaagcccaggccacctccgaccaggatctgagccagctgcaccatgcatgtgagggtggcgcagtcctgcccttccctctcacgctgttgtctgggtcccctcctggggcctgctgc

SEQ ID NO: 2083 - DNA, 119 bp, homo sapiens
gagggagatagtaaatggtaaagggagcacacagtgtgcacttttgtgtatcattgtgaatatattatccacctaaaaatgaactcattctaagtgctaactaataaacaagtaaataa

SEQ ID NO: 2084 - DNA, 119 bp, homo sapiens
taacactctccttgtagggacagttttttatgatgactctcccattagcagcaacatcccaccttggtgcaatgtttgccaggggatgaggaaagccacacctcttttttgaaaggttt

SEQ ID NO: 2085 - DNA, 119 bp, homo sapiens
catcccaccttggtgacaatgtttgccaggggatgaggaaagccacacctcttttttgaaaggtttttatcctggtgcacctctgccctgctgccagatcaaatgatgaaaaacatggc

SEQ ID NO: 2086 - DNA, 119 bp, homo sapiens
tttgaaaggtttttactcctggtgcacctctgccctgctgccagatcaaatgatgaaaaacatggccagattatagtctgatggttatatgttcagtgtttttgcagtttcatgctgag

SEQ ID NO: 2087 - DNA, 119 bp, homo sapiens
gaaaaacatggccagaattatagtctgatggttatatgttcagtgtttttgcagtttcatgctgagctgattaaacttggagttatctctgtagcttttatatcattgctccagttaag

SEQ ID NO: 2088 - DNA, 119 bp, homo sapiens
tttcatgctgagctggattaaacttggagttatctctgtagcttttatatcattgctccagttaaggaatataagcctattttcacaggaagaaagttgcaaattttgataagaagagg

SEQ ID NO: 2089 - DNA, 119 bp, homo sapiens
gctccagttaaggaactataagcctattttcacaggaagaaagttgcaaattttgataagaagaggtggaattttagagtggaaacaccaactctgttataagcactgcataggcgctt

SEQ ID NO: 2090 - DNA, 119 bp, homo sapiens
gataagaagaggtggtaattttagagtggaaacaccaactctgttataagcactgcataggcgcttgttactagttgcgttccaaggtttaaatggcacaggtcccgctcagggcagca

SEQ ID NO: 2091 - DNA, 119 bp, homo sapiens
gcataggcgcttgttcactagttgcgttccaaggtttaaatggcacaggtcccgctcagggcagcaaagggggattaccacccatgattccagctttccttctcacacatggggtctga

SEQ ID NO: 2092 - DNA, 119 bp, homo sapiens
ctcagggcagcaaagtggggattaccacccatgattccagctttccttctcacacatggggtctgacttctaaaatctggactccattgcctaggactttcctaccctcagcaaataat

SEQ ID NO: 2093 - DNA, 119 bp, homo sapiens
catggggtctgacttactaaaatctggactccattgcctaggactttcctaccctcagcaaataatgccagaaattccactatgtacctctgaaagttggggatagggagacccttatt

SEQ ID NO: 2094 - DNA, 119 bp, homo sapiens
tcagcaaataatgccaagaaattccactatgtacctctgaaagttggggatagggagacccttattgtcgtatctagaaatgctgcaggtggcaccagggagacctatgaggtggttac

SEQ ID NO: 2095 - DNA, 119 bp, homo sapiens
tgagcatgcctgtaccagatcatggttgcagttggttgggcatttgactgttgctgtttcaagaaccctattttccagctctgctctacacattgctaccaaatcctccccagccttca

SEQ ID NO: 2096 - DNA, 119 bp, homo sapiens
tgctgtttcaagaacccttattttccagctctgctctacacattgctaccaaatcctccccagccttcaatgagtctggatgttacccaaggcagaggttcaatgacagcacacctcct

SEQ ID NO: 2097 - DNA, 119 bp, homo sapiens
aatcctccccagccttcagatgagtctggatgttacccaaggcagaggttcaatgacagcacacctcctttcttcctcgcggtggtactcagtaatgaggttaaagggcacagtgtaca

SEQ ID NO: 2098 - DNA, 119 bp, homo sapiens
aatgacagcacacctccttttcttcctcgcggtggtactcagtaatgaggttaaagggcacagtgtacaggtgctggacattacaccaaacaggctgcacaggaccagggtggagtaga

SEQ ID NO: 2099 - DNA, 119 bp, homo sapiens
taaagggcacagtgtacagggtgctggacattacaccaaacaggctgcacaggaccagggtggagtagaattcgggaagagcccaataaatcccgtccccaggccaaacagcaaatatc

SEQ ID NO: 2100 - DNA, 119 bp, homo sapiens
ggaccagggtggagtagacattcgggaagagcccaataaatcccgtccccaggccaaacagcaaatatccgtgaagtaaagaccctttaatccaatgtaggataccaaaactttctgaa

SEQ ID NO: 2101 - DNA, 119 bp, homo sapiens
aagaataaagtgaggaaaacacggagttgatgcacaagccccaacatccaacctcgactcctctttcgtgatgagaaactctgtggagttgtgtgcactatagggatccccgcggtaca

SEQ ID NO: 2102 - DNA, 119 bp, homo sapiens
ataaagtgaggaaaacacggagttgatgcacaagccccaacatccaacctcgactcctctttcgtagatagaaactctgtggagttgtgtgcactatagggatccccgcggtacacaat

SEQ ID NO: 2103 - DNA, 119 bp, homo sapiens
ctggcccatgaaatctgtgaagaacagcatgttggacaggaaggctgtccatccaatgaggtggctgatcaaaggtagcggtagtgaggaggcatgttcaccagtgctctcagcagtga

SEQ ID NO: 2104 - DNA, 119 bp, homo sapiens
cagcatgttggacaggaaggctgtccatccaatgaggtggctgatgcaaaggtagcggtagtgaggaggatgttcaccagtgctctcagcagtgactttaatgtcattgccctgcgagt

SEQ ID NO: 2105 - DNA, 119 bp, homo sapiens
ctgttcagcatgatttttgttttttgctccctgcattgccagctctggatttacgtaaccatttttaacttctcgatagaaccatactcgtacattccatctgatgacaatggagggtc

SEQ ID NO: 2106 - DNA, 119 bp, homo sapiens
tacgtaaccatttttaactttctcgatagaaccatactcgtacattccatctgatgacaatggagggtctgaggggtttgctgtgggggaatgccctttgcaacctctgtaagtggggc

SEQ ID NO: 2107 - DNA, 119 bp, homo sapiens
tgatgacaatggagggtcctgaggggtttgctgtgggggaatgccctttgcaacctctgtaagtggggctcagagatactgcacagatgaacagtaaaacacaaagtgagcaccaatgc

SEQ ID NO: 2108 - DNA, 119 bp, homo sapiens
aacctctgtaagtggggcttcagagatactgcacagatgaacagtaaaacacaaagtgagcaccaatgcgagaagaagaacatgacctggaattctgtacccaacagtcttcccagctc

SEQ ID NO: 2109 - DNA, 119 bp, homo sapiens
caaagtgagcaccaatgcagagaagaagaacatgacctggaattctgtacccaacagtcttcccagctcagatgggcccagtctatagcacccaaaaggtaacccagggcacctccaaa

SEQ ID NO: 2110 - DNA, 119 bp, homo sapiens
ctgtgaagagggcatggtagtggaggcccttctccttgtcctgatgggagcagacatcaaataagtaggtttgatgggcccatcaatgaagtcggcagcaaaatcaaagagaacgacac

SEQ ID NO: 2111 - DNA, 119 bp, homo sapiens
caaataagtaggctttgatgggcccatcaatgaagtcggcagcaaaatcaaagagaacgacacctatcaggtgacacttatggcccaaaccagcttcctccttgggttagcaatcaaag

SEQ ID NO: 2112 - DNA, 119 bp, homo sapiens
ctgctacaacagtagccccattgaggtacagagccatgcccacgagcatcatgactcccagggtgaggagtagggtctccggcggccccacctggaccggcagtggtcgctggccgatc

SEQ ID NO: 2113 - DNA, 119 bp, homo sapiens
agggtgaggatgtagggtctccggcggccccacctggaccggcagtggtcgctggccgatccgaccacggctgcagcaggaatcccaggatggggctgaggaaccacacaatgctgtac

SEQ ID NO: 2114 - DNA, 119 bp, homo sapiens
tccgaccacgggctgcagcaggaatcccaggatggggctgaggaaccacacaatgctgtacaggctgctggcagacctacgctgagcaggactggggtcacatacgctgcctccaccgc

SEQ ID NO: 2115 - DNA, 119 bp, homo sapiens
acaggctgctgggcagacctacgctgagcaggactggggtcacatacgctgcctccaccgcgtagcagactctcttccgaacatggccatgctgtgcatgatgagtctgctggtgggtc

SEQ ID NO: 2116 - DNA, 119 bp, homo sapiens
gcgtagcagaactctcttccgaacatggccatgctgtgcatgatgagtctgctggtgggtcttttaggcgctccacagagtcaaaggggccatcatcagctagggatttatagatgtgg

SEQ ID NO: 2117 - DNA, 119 bp, homo sapiens
tcttttaggcggctccacagagtcaaaggggccatcatcagctagggatttatagatgtggcggccagctgcccactgttgctacccatggccactgggagaggaaccttcctgcgagc

SEQ ID NO: 2118 - DNA, 119 bp, homo sapiens
ggcggccagcctgcccactgttgctacccatggccactgggagaggaaccttcctgcgagcccaccacccctgcgtggtcctagggtctgtgtttcaaactggatttgacgtggagcct

SEQ ID NO: 2119 - DNA, 119 bp, homo sapiens
ggggtttgccctgggccgctgccggtcaggtcggccgcccctgacagctccgggagcctcaagcgcgacgcggcgccctcacctcgggacatccacacaccgaccgctcctgctccaga

SEQ ID NO: 2120 - DNA, 119 bp, homo sapiens
gccgcccctgacagctccgggagcctcaagcgcgacagcggcgccctcacctcgggacatccacacaccaccgctcctgctccagaggcaacaacccagcgcgcctagcctggcgccgt

SEQ ID NO: 2121 - DNA, 119 bp, homo sapiens
gacagcggcgccctcacctcgggacatccacacaccgaccgctcctgctccagaggcaacaacccagcggcctagcctggcgccgtgcagcgaagcccaagagctggcctcgccacgaa

SEQ ID NO: 2122 - DNA, 119 bp, homo sapiens
gttgaaccagccaaattttcgagacagctcacggcttagaggaaggttcatctaaataaaggccggctaagtgacattgcagggattaaatccttctttggctgcctgtgtgaccagaa

SEQ ID NO: 2123 - DNA, 119 bp, homo sapiens
aaaggccggctaaagtgacattgcagggattaaatccttctttggctgcctgtgtgaccagaaggcttattgcaagtttcttctttcctggggtccagattattaggtctccagcgccc

SEQ ID NO: 2124 - DNA, 119 bp, homo sapiens
ccagaaggcttatttgcaagtttcttctttcctggggtccagattattaggtctccagcgccctgcagctgacagaaagagaagcatgaaatgaaggtcagagatgagatcccgcagca

SEQ ID NO: 2125 - DNA, 119 bp, homo sapiens
gcgccctgcagcttgacagaaagagaagcatgaaatgaaggtcagagatgagatcccgcagcagggacggggggcctcccaggggcatttacgcaccagagtgcaagattctctggcca

SEQ ID NO: 2126 - DNA, 119 bp, homo sapiens
gcagcagggacgtgggggcctcccaggggcatttacgcaccagagtgcaagattctctggccatcaaggaaatagcaaacagaagcctttgtcctggggcacagccacctaccacaaag

SEQ ID NO: 2127 - DNA, 119 bp, homo sapiens
tggccatcaagggaaatagcaaacagaagcctttgtcctggggcacagccacctaccacaaagcatcagctccacgtctggccagaaagttcctggagtcccatcaggccagtgggtat

SEQ ID NO: 2128 - DNA, 119 bp, homo sapiens
acaaagcatcagactccacgtctggccagaaagttcctggagtcccatcaggccagtgggtatgtaacagtgcctaattgtacagctagagcctgcaagttcaacgtgagggaaggtgg

SEQ ID NO: 2129 - DNA, 119 bp, homo sapiens
gggtatgtaacatgtgcctaattgtacagctagagcctgcaagttcaacgtgagggaaggtgggaaatgcttgagtgaggcgagcagctcctggctgggctgggcagactcagctacca

SEQ ID NO: 2130 - DNA, 119 bp, homo sapiens
aggtgggaaatgtcttgagtgaggcgagcagctcctggctgggctgggcagactcagctaccacgttcatgccttcctctcactaaagccgagagggaggctgctcagctctcaggaaa

SEQ ID NO: 2131 - DNA, 119 bp, homo sapiens
ctaccacgttcactgccttcctctcactaaagccgagagggaggctgctcagctctcaggaaaactctttgaaccctgggcacctgctgtcctcagttggcatctcccaccctctgagc

SEQ ID NO: 2132 - DNA, 119 bp, homo sapiens
aggaaaactcttttgaaccctgggcacctgctgtcctcagttggcatctcccaccctctgagcctcttcgctcctgcacaacctgcctcttcgctgagatggagacgtgagcccccgtg

SEQ ID NO: 2133 - DNA, 119 bp, homo sapiens
ctgagcctcttctgctcctgcacaacctgcctcttcgctgagatggagacgtgagcccccgtggacgatactgcagtgtatatgaatggaggtggcctggtgaacccccactatgcccg

SEQ ID NO: 2134 - DNA, 119 bp, homo sapiens
cccgtggacgatgactgcagtgtatatgaatggaggtggcctggtgaacccccactatgcccggtgggacggcgcgacagtgtagaaagtggctgtcagaccgagagtagcaaggaggg

SEQ ID NO: 2135 - DNA, 119 bp, homo sapiens
tgcccggtgggatcggcgcgacagtgtagaaagtggctgtcagaccgagagtagcaaggagggtgaggaggacagccccgccagctgacgcccttcgagaaactgacacaggacatgtc

SEQ ID NO: 2136 - DNA, 119 bp, homo sapiens
ggagggtgaggagggacagccccgccagctgacgcccttcgagaaactgacacaggacatgtcccaggagagaaggtggtgagggagatcacgctggggaaacggataggcttctaccg

SEQ ID NO: 2137 - DNA, 119 bp, homo sapiens
catgtcccaggatgagaaggtggtgagggagatcacgctggggaaacggataggcttctaccgaattcgggggaaatcggaagtggaaacttctcccaagtgaagcttgggattcactc

SEQ ID NO: 2138 - DNA, 119 bp, homo sapiens
aaaaggtggccattaagatcctggacaagaccaagttagaccagaaaacccagaggctactatcccgagaatctccagcatggaaaagctgcaccatcccaacatcatccgcctttacg

SEQ ID NO: 2139 - DNA, 119 bp, homo sapiens
ccagaggctactatcccgagaaatctccagcatggaaaagctgcaccatcccaacatcatccgcctttagaagtggtggagaccctatccaagctgcacttggtgatggagtatgcagg

SEQ ID NO: 2140 - DNA, 119 bp, homo sapiens
cccaacatcatccgcctttacgaagtggtggagaccctatccaagctgcacttggtgatggagtatgcaggggtggggagctcttcggaaaaattagcactgaggggaagctctctgaa

SEQ ID NO: 2141 - DNA, 119 bp, homo sapiens
acttggtgatggagtatgcagggggtggggagctcttcggaaaaattagcactgaggggaagctctctgaccagaaagcaagctcatcttctcccagattgtgtctgccgtgaagcaca

SEQ ID NO: 2142 - DNA, 119 bp, homo sapiens
catgaaaaccaaattattcatagagatctgaaagcagaaaatgtattctataccagtaatacttgtgtgaggtgggcgattttggattcagcacagtaagcaaaaaaggtgaaatgctg

SEQ ID NO: 2143 - DNA, 119 bp, homo sapiens
aatacttgtgtgaaggtgggcgattttggattcagcacagtaagcaaaaaaggtgaaatgctgaacacttctgtgggtctcctccctacgctgcgcctgaactcttccgggacgagcac

SEQ ID NO: 2144 - DNA, 119 bp, homo sapiens
atgctgaacactttctgtgggtctcctccctacgctgcgcctgaactcttccgggacgagcactacatcgcatttacgtggatatctgggccttgggggtgcttttgtacttcatggtg

SEQ ID NO: 2145 - DNA, 119 bp, homo sapiens
gagcactacatcggcatttacgtggatatctgggccttgggggtgcttttgtacttcatggtgactggcccatgccatttcgggcagaaaccgtggccaaactaaaaaagagcatcctc

SEQ ID NO: 2146 - DNA, 119 bp, homo sapiens
atggtgactggcaccatgccatttcgggcagaaaccgtggccaaactaaaaaagagcatcctcgagggccatacagtgtaccgccgcacgtgtcagagccctgccaccgactcatccga

SEQ ID NO: 2147 - DNA, 119 bp, homo sapiens
atcctcgagggcacatacagtgtaccgccgcacgtgtcagagccctgccaccgactcatccgaggagtcttcagcagatccccacggagaggtacggaatcgactgcatcatgaatgat

SEQ ID NO: 2148 - DNA, 119 bp, homo sapiens
atccgaggagtccttcagcagatccccacggagaggtacggaatcgactgcatcatgaatgatgaatggtgcaaggggtgccataccctacacctttggaacctttccaactggatccc

SEQ ID NO: 2149 - DNA, 119 bp, homo sapiens
aatgatgaatggatgcaaggggtgccataccctacacctttggaacctttccaactggatcccaaacattgtcggaaaccagcactctcaaggaagaagaaaatgaggtcaaaagcact

SEQ ID NO: 2150 - DNA, 119 bp, homo sapiens
gatcccaaacatttgtcggaaaccagcactctcaaggaagaagaaaatgaggtcaaaagcactttagaaatttgggcattacagaagagcatattcgaaataaccaagggagagatgct

SEQ ID NO: 2151 - DNA, 119 bp, homo sapiens
agcactttagaacatttgggcattacagaagagcatattcgaaataaccaagggagagatgctcgcagccaatcacaggggtctatagaattattttacatagagtccaaaggaagaag

SEQ ID NO: 2152 - DNA, 119 bp, homo sapiens
gatgctcgcagctcaatcacaggggtctatagaattattttacatagagtccaaaggaagaaggctttgaaagtgtcccagtcatgatgctaccagaccctaaagaaagagacctcaaa

SEQ ID NO: 2153 - DNA, 119 bp, homo sapiens
aagaaggctttggaaagtgtcccagtcatgatgctaccagaccctaaagaaagagacctcaaaaaagggcccgtgtctacagagggataagacacacatccaaattttgctcgatttta

SEQ ID NO: 2154 - DNA, 119 bp, homo sapiens
ctcaaaaaagggtcccgtgtctacagagggataagacacacatccaaattttgctcgattttataaattcactagactgcttgtaactaaccaagatgattgttgctgcttctaaattt

SEQ ID NO: 2155 - DNA, 119 bp, homo sapiens
attttataaattgcactagactgcttgtaactaaccaagatgattgttgctgcttctaaatttttttcaggacaacttgagtggagacatttttgtaatttttaaataaacttaaattt

SEQ ID NO: 2156 - DNA, 119 bp, homo sapiens
ggctctgacggtacagtgatataatgatgatgggtgtcacaacccgcatttgaacttgcaggcgagctgcccgagcctttctggggaagaactccaggcgtgcggacgcaacagccgag

SEQ ID NO: 2157 - DNA, 119 bp, homo sapiens
gaacttgcaggcgagctgccccgagcctttctggggaagaactccaggcgtgcggacgcaacagccgagacattaggtgttgtggacaggagctgggaccaagatcttcggccagcccc

SEQ ID NO: 2158 - DNA, 119 bp, homo sapiens
gcggacgcaacagccgagaacattaggtgttgtggacaggagctgggaccaagatcttcggccagcccccatcctcccgcatcttccagcaccgtcccgcaccctccgcatccttcccc

SEQ ID NO: 2159 - DNA, 119 bp, homo sapiens
agatcttcggccagccccgcatcctcccgcatcttccagcaccgtcccgcaccctccgcatccttccccggccaccacgcttcctatgtgacccgcctgggcaacgccgaacccagtcg

SEQ ID NO: 2160 - DNA, 119 bp, homo sapiens
ccctccgcatccttccccgggccaccacgcttcctatgtgacccgcctgggcaacgccgaacccagtcggcagcgctgcagtgaattttccccccaaactgcaataagccgccttccaa

SEQ ID NO: 2161 - DNA, 119 bp, homo sapiens
tcaaagtgggaaaaagcccaccggtgaggggctccctctctggaaaagtcagcctaccttgtcatttttaacgatgcctactttgccacccagttacaacaccagtgaatttctccgca

SEQ ID NO: 2162 - DNA, 119 bp, homo sapiens
gcctaccttgtcatttttcaacgatgcctactttgccacccagttacaacaccagtgaatttctccgcacaaatggtctaagattgaagtggacaaaaatggaaaagatttgaaagaga

SEQ ID NO: 2163 - DNA, 119 bp, homo sapiens
ccagtgaatttctccgcatcaaatggtctaagattgaagtggacaaaaatggaaaagatttgaaagagatactgtccttgtggcccaaaatggaaatatcaagattggtcaggactaca

SEQ ID NO: 2164 - DNA, 119 bp, homo sapiens
gaaaagatttgaaagagactactgtccttgtggcccaaaatggaaatatcaagattggtcaggactacaagggagagtgtctgtgcccacacatcccgaggctgtgggcgatgcctccc

SEQ ID NO: 2165 - DNA, 119 bp, homo sapiens
agattggtcaggactacaaagggagagtgtctgtgcccacacatcccgaggctgtgggcgatgcctccccactgtggtcaagctgctggcaagtgatgcgggtctttaccgctgtgacg

SEQ ID NO: 2166 - DNA, 119 bp, homo sapiens
ctgtgggcgatgcctccctcactgtggtcaagctgctggcaagtgatgcgggtctttaccgctgtgacgcatgtacgggattgaagacacacaagacacggtgtcactgactgtggatg

SEQ ID NO: 2167 - DNA, 119 bp, homo sapiens
gggttgtgtttcactacagggcggcaaccagcaggtacacactgaattttgaggctgctcagaaggctttttggacgttggggcagtcatagcaactccagagcagctctttgctgcct

SEQ ID NO: 2168 - DNA, 119 bp, homo sapiens
tgctcagaaggcttgtttggacgttggggcagtcatagcaactccagagcagctctttgctgcctatgagatggatttgagcagtgtgacgcaggctggctggctgatcagactgtcag

SEQ ID NO: 2169 - DNA, 119 bp, homo sapiens
atatcccatccgggctcccagagtaggctgttatggagataagatgggaaaggcaggagtcaggacttaggattccgttctccccaggaaacttacgatgtgtattgttatgtggatca

SEQ ID NO: 2170 - DNA, 119 bp, homo sapiens
tccgggctcccagagtaggctgttatggagataagatgggaaaggcaggagtcaggacttatggattccttctccccaggaaacttacgatgtgtattgttatgtggatcatctggatg

SEQ ID NO: 2171 - DNA, 119 bp, homo sapiens
gtgatgtgttccacctcactgtccccagtaaattcaccttcgaggaggctgcaaaagagtgtgaaaaccggatgccaggctggcaacagtgggggaactccaggcggcatggaggaacg

SEQ ID NO: 2172 - DNA, 119 bp, homo sapiens
gtgtgaaaaccaggatgccaggctggcaacagtgggggaactccaggcggcatggaggaacggctttgacagtgcgattacgggtggctgtcggatgccagcgtgcgccaccctgtgac

SEQ ID NO: 2173 - DNA, 119 bp, homo sapiens
aacggctttgaccagtgcgattacgggtggctgtcggatgccagcgtgcgccaccctgtgactgtggccgggcccagtgtggaggtggtctacttggggtgagaaccctgtatcgtttt

SEQ ID NO: 2174 - DNA, 119 bp, homo sapiens
tgactgtggccagggcccagtgtggaggtggtctacttggggtgagaaccctgtatcgttttgagaaccgacaggcttccctccccctgatagcagatttgatgcctactgctttaaac

SEQ ID NO: 2175 - DNA, 119 bp, homo sapiens
ctaaagaggctacaaccatcgatttgagtatcctcgcagaaactgcatcacccagtttatccaaagaacacaaatggtttctgatagaactacaccaatcatccctttagttgatgaat

SEQ ID NO: 2176 - DNA, 119 bp, homo sapiens
tccaaagaaccacaaatggtttctgatagaactacaccaatcatccctttagttgatgaattacctgtcttccaacagagttccctcccgtgggaaatattgtcagttttgaacagaaa

SEQ ID NO: 2177 - DNA, 119 bp, homo sapiens
attacctgtcattccaacagagttccctcccgtgggaaatattgtcagttttgaacagaaagccacagtcaacctcaggctatcacagatagtttagccaccaaattacccacacctac

SEQ ID NO: 2178 - DNA, 119 bp, homo sapiens
aagccacagtccaacctcaggctatcacagatagtttagccaccaaattacccacacctactggcagtacaagaagccctgggatatggatgactactcaccttctgcttcaggacctc

SEQ ID NO: 2179 - DNA, 119 bp, homo sapiens
actggcagtaccaagaagccctgggatatggatgactactcaccttctgcttcaggacctcttggaaagtagacatatcagaaattaaggaagaagtgctccagagtacaactggcgtc

SEQ ID NO: 2180 - DNA, 119 bp, homo sapiens
tcttggaaagctagacatatcagaaattaaggaagaagtgctccagagtacaactggcgtctctcattagctacggattcatgggatggtgtcgtggaagataaacaaacacaagaatc

SEQ ID NO: 2181 - DNA, 119 bp, homo sapiens
tctctcattatgctacggattcatgggatggtgtcgtggaagataaacaaacacaagaatcggttacacgattgaacaaatagaagtgggtcctttggtaacatctatggaaatcttaa

SEQ ID NO: 2182 - DNA, 119 bp, homo sapiens
tcggttacacagattgaacaaatagaagtgggtcctttggtaacatctatggaaatcttaaagcacattcttccaaggaattccctgtaactgaaacaccattggtaactgcaagaatg

SEQ ID NO: 2183 - DNA, 119 bp, homo sapiens
aaagcacattccttccaaggaattccctgtaactgaaacaccattggtaactgcaagaatgatcctggatccaaaactgaaaagaaaatggtaagcactgtttctgaattggtaaccac

SEQ ID NO: 2184 - DNA, 119 bp, homo sapiens
tgatcctggaatccaaaactgaaaagaaaatggtaagcactgtttctgaattggtaaccacaggtcacttggattcaccttgggagaagaggatgatgaagacagaacacttacagttg

SEQ ID NO: 2185 - DNA, 119 bp, homo sapiens
acaggtcactatggattcaccttgggagaagaggatgatgaagacagaacacttacagttggatctgatagagcaccttgatctttgaccaaattcctgaagtcattacggtgtcaaag

SEQ ID NO: 2186 - DNA, 119 bp, homo sapiens
tggatctgatgagagcaccttgatctttgaccaaattcctgaagtcattacggtgtcaaagacttcagagacaccatccacactcatttagaagacttggagtcagtctcagcatccac

SEQ ID NO: 2187 - DNA, 119 bp, homo sapiens
agacttcagaagacaccatccacactcatttagaagacttggagtcagtctcagcatccacaactgtttccctttaattatgcctgataataatggatcatccatggatgactgggaag

SEQ ID NO: 2188 - DNA, 119 bp, homo sapiens
acaactgtttcccctttaattatgcctgataataatggatcatccatggatgactgggaagagagacaactagtggtaggataacggaagagtttcttggcaaatatctgtctactaca

SEQ ID NO: 2189 - DNA, 119 bp, homo sapiens
agagagacaaactagtggtaggataacggaagagtttcttggcaaatatctgtctactacaccttttcctcacagcatcgtacagaaatagaattgtttccttattctggtgataaaat

SEQ ID NO: 2190 - DNA, 119 bp, homo sapiens
caccttttccatcacagcatcgtacagaaatagaattgtttccttattctggtgataaaatattagtaggggaatttccacagttatttatccttctctacaaacagaaatgacacata

SEQ ID NO: 2191 - DNA, 119 bp, homo sapiens
atattagtagagggaatttccacagttatttatccttctctacaaacagaaatgacacatagaagagaagaacagaaacactaataccagagatgagaacagatacttatacagatgaa

SEQ ID NO: 2192 - DNA, 119 bp, homo sapiens
tagaagagaaagaacagaaacactaataccagagatgagaacagatacttatacagatgaaatacaagagagatcactaaaagtccatttatgggaaaaacagaagaagaagtcttctc

SEQ ID NO: 2193 - DNA, 119 bp, homo sapiens
aaatacaagaagagatcactaaaagtccatttatgggaaaaacagaagaagaagtcttctctgggatgaactctctacatctctctcagagccaattcatgttacagagtcttctgtgg

SEQ ID NO: 2194 - DNA, 119 bp, homo sapiens
tctgggatgaaactctctacatctctctcagagccaattcatgttacagagtcttctgtggaaatgaccagtcttttgatttcccaacattgataacaaagttaagtgcagagccaaca

SEQ ID NO: 2195 - DNA, 119 bp, homo sapiens
ggaaatgaccaagtcttttgatttcccaacattgataacaaagttaagtgcagagccaacagaagtaaggatatggaggaagactttacagcaactccaggtactacaaaatatgatga

SEQ ID NO: 2196 - DNA, 119 bp, homo sapiens
cagaagtaagagatatggaggaagactttacagcaactccaggtactacaaaatatgatgaaaatattaaacagtgcttttggcccatggtactttaagtgttgaagcagccactgtat

SEQ ID NO: 2197 - DNA, 119 bp, homo sapiens
gaaaatattacaacagtgcttttggcccatggtactttaagtgttgaagcagccactgtatcaaaatggcatgggatgaagataatacaacatccaagcctttagagtctacagaacct

SEQ ID NO: 2198 - DNA, 119 bp, homo sapiens
atcaaaatggtcatgggatgaagataatacaacatccaagcctttagagtctacagaaccttcagcctctcaaaattgccccctgccttactcacaactgtggggatgaatggaaagga

SEQ ID NO: 2199 - DNA, 119 bp, homo sapiens
cttcagcctcttcaaaattgccccctgccttactcacaactgtggggatgaatggaaaggataaagacacccaagtttcactgaagatggagcagatgaatttactcttattccagata

SEQ ID NO: 2200 - DNA, 119 bp, homo sapiens
gataaagacatcccaagtttcactgaagatggagcagatgaatttactcttattccagatagtactcaaagcagttagaggaggttactgatgaagacatagcagcccatggaaaattc

SEQ ID NO: 2201 - DNA, 119 bp, homo sapiens
tagtactcaaaagcagttagaggaggttactgatgaagacatagcagcccatggaaaattcacaattagtttcagccaactacatcaactggtattgcagaaaagtcaactttgagaga

SEQ ID NO: 2202 - DNA, 119 bp, homo sapiens
tcacaattagatttcagccaactacatcaactggtattgcagaaaagtcaactttgagagattctacaatgaagaaaaagttccacctatcacaagcactgaaggccaagtttatgcaa

SEQ ID NO: 2203 - DNA, 119 bp, homo sapiens
gattctacaactgaagaaaaagttccacctatcacaagcactgaaggccaagtttatgcaaccatggaagaagtgctttgggtgaagtagaagatgtggacctctctaagccagtatct

SEQ ID NO: 2204 - DNA, 119 bp, homo sapiens
aaccatggaaggaagtgctttgggtgaagtagaagatgtggacctctctaagccagtatctactgttcccaatttgcacacacttcagaggtggaaggattagcatttgttagttatag

SEQ ID NO: 2205 - DNA, 119 bp, homo sapiens
ctactgttccccaatttgcacacacttcagaggtggaaggattagcatttgttagttatagtagcacccagagcctactacttatgtagactcttcccataccattcctctttctgtaa

SEQ ID NO: 2206 - DNA, 119 bp, homo sapiens
agtagcacccaagagcctactacttatgtagactcttcccataccattcctctttctgtaattcccaagcagactggggagtgttagtaccttctgttccatcagaagatgaagttcta

SEQ ID NO: 2207 - DNA, 119 bp, homo sapiens
aattcccaagacagactggggagtgttagtaccttctgttccatcagaagatgaagttctaggtgaacctctcaagacatacttgtcattgatcagactcgccttgaagcgactatttc

SEQ ID NO: 2208 - DNA, 119 bp, homo sapiens
taggtgaaccctctcaagacatacttgtcattgatcagactcgccttgaagcgactatttctccagaaatatgagaacaacaaaaatcacagagggaacaactcaggaagaattccctt

SEQ ID NO: 2209 - DNA, 119 bp, homo sapiens
tctccagaaactatgagaacaacaaaaatcacagagggaacaactcaggaagaattcccttggaaagaaagactgcagagaaaccagttcctgctctcagttctacagcttggactccc

SEQ ID NO: 2210 - DNA, 119 bp, homo sapiens
ttggaaagaacagactgcagagaaaccagttcctgctctcagttctacagcttggactcccaaggaggcgtaacaccactggatgaacaagagggcgatggatcagcatatacagtctc

SEQ ID NO: 2211 - DNA, 119 bp, homo sapiens
ccaaggaggcagtaacaccactggatgaacaagagggcgatggatcagcatatacagtctctgaagatgattgttgacaggttctgagagggtcccagttttagaaacaactccagttg

SEQ ID NO: 2212 - DNA, 119 bp, homo sapiens
tctgaagatgaattgttgacaggttctgagagggtcccagttttagaaacaactccagttggaaaaattatcacagtgtgtcttatccaccaggtgctgtaactgagcacaaagtgaaa

SEQ ID NO: 2213 - DNA, 119 bp, homo sapiens
tggaaaaattgatcacagtgtgtcttatccaccaggtgctgtaactgagcacaaagtgaaaacagatgagtggtaacactaacaccacgcattgggccaaaagtatctttaagtccagg

SEQ ID NO: 2214 - DNA, 119 bp, homo sapiens
aaacagatgaagtggtaacactaacaccacgcattgggccaaaagtatctttaagtccagggcctgaacaaaatatgaaacagaaggtagtagtacaacaggatttacatcatctttga

SEQ ID NO: 2215 - DNA, 119 bp, homo sapiens
gggcctgaacaaaaatatgaaacagaaggtagtagtacaacaggatttacatcatctttgagtccttttgtacccacattacccagcttatggaagaaaccactactgagaaaacatcc

SEQ ID NO: 2216 - DNA, 119 bp, homo sapiens
gagtccttttagtacccacattacccagcttatggaagaaaccactactgagaaaacatccctagaggaattgatttaggctcaggattatttgaaaagcccaaagccacagaactcat

SEQ ID NO: 2217 - DNA, 119 bp, homo sapiens
ccctagaggatattgatttaggctcaggattatttgaaaagcccaaagccacagaactcatagaattttaacaatcaaagtcacagttccaagtgatattaccactgccttcagttcag

SEQ ID NO: 2218 - DNA, 119 bp, homo sapiens
atagaattttcaacaatcaaagtcacagttccaagtgatattaccactgccttcagttcagtagacagattcacacaacttcagcattcaagccatcttccgcgatcactaagaaacca

SEQ ID NO: 2219 - DNA, 119 bp, homo sapiens
agtagacagacttcacacaacttcagcattcaagccatcttccgcgatcactaagaaaccacctctcatgacagggaacctggtgaagaaacaaccagtgacatggtaatcattggaga

SEQ ID NO: 2220 - DNA, 119 bp, homo sapiens
cacctctcatcgacagggaacctggtgaagaaacaaccagtgacatggtaatcattggagaatcaacattcatgttcctcccactacccttgaagatattgtagccaaggaaacagaaa

SEQ ID NO: 2221 - DNA, 119 bp, homo sapiens
gaatcaacatctcatgttcctcccactacccttgaagatattgtagccaaggaaacagaaaccgatattatagagagtatttcacgacttcaagtcctcctgctacacagccaacaaga

SEQ ID NO: 2222 - DNA, 119 bp, homo sapiens
aaccgatattgatagagagtatttcacgacttcaagtcctcctgctacacagccaacaagaccacccacgtggaagacaaagaggcctttggacctcaggcgctttctacgccacagcc

SEQ ID NO: 2223 - DNA, 119 bp, homo sapiens
gaccacccactgtggaagacaaagaggcctttggacctcaggcgctttctacgccacagcccccagcaacacaaaatttcaccctgacattaatgtttatattattgaggtcagagaaa

SEQ ID NO: 2224 - DNA, 119 bp, homo sapiens
gtcgaatgagtgatttgagtgtaattggtcatccaatagattcagaatctaaagaagatgaaccttgtatgaagaaacagatccagtgcatgatctaatggctgaaattttacctgaat

SEQ ID NO: 2225 - DNA, 119 bp, homo sapiens
atagattcagaatctaaagaagatgaaccttgtagtgaagaaacagatccagtgcatgatctaatggctaaattttacctgaattccctgacataattgaaatagacctataccacagt

SEQ ID NO: 2226 - DNA, 119 bp, homo sapiens
gtgtgcaaatgctactgatgtgacaaccaccccatctgtgcagtacataaatgggaagcatctcgttacactgtgcccaaggacccagaagctgcagaagctaggcgtggccagtttga

SEQ ID NO: 2227 - DNA, 119 bp, homo sapiens
atctcgttaccactgtgcccaaggacccagaagctgcagaagctaggcgtggccagtttgaaagtgttgaccttctcagaatttctcggacagctctgaaagtgatactcatccatttg

SEQ ID NO: 2228 - DNA, 119 bp, homo sapiens
gaaagtgttgcaccttctcagaatttctcggacagctctgaaagtgatactcatccatttgtaatagccaaacggaattgtctactgctgtgcaacctaatgaatctacagaaacaact

SEQ ID NO: 2229 - DNA, 119 bp, homo sapiens
tgtaatagccaaaacggaattgtctactgctgtgcaacctaatgaatctacagaaacaactgagtctctgaagttacatggaagcctgagacttaccctgaaacatcagaacatttttc

SEQ ID NO: 2230 - DNA, 119 bp, homo sapiens
ctgagtctcttgaagttacatggaagcctgagacttaccctgaaacatcagaacatttttcaggtggtggcctgatgttttccccacagtcccattccatgaggaatttgaaagtggaa

SEQ ID NO: 2231 - DNA, 119 bp, homo sapiens
tcaggtggtgagcctgatgttttccccacagtcccattccatgaggaatttgaaagtggaacagccaaaaaggggcagaatcagtcacagagagagatactgaagttggtcatcaggca

SEQ ID NO: 2232 - DNA, 119 bp, homo sapiens
aacagccaaaaaaggggcagaatcagtcacagagagagatactgaagttggtcatcaggcacatgaacaactgaacctgtatctctgtttcctgaagagtcttcaggagagattgccat

SEQ ID NO: 2233 - DNA, 119 bp, homo sapiens
cacatgaacatactgaacctgtatctctgtttcctgaagagtcttcaggagagattgccattgaccaagatctcagaaaatagcctttgcaagggctacagaagtaacatttggtgaag

SEQ ID NO: 2234 - DNA, 119 bp, homo sapiens
attgaccaagaatctcagaaaatagcctttgcaagggctacagaagtaacatttggtgaagaggtagaaaaagtacttctgtcacatacactcccactatagttccaagttctgcatca

SEQ ID NO: 2235 - DNA, 119 bp, homo sapiens
agaggtagaaaaaagtacttctgtcacatacactcccactatagttccaagttctgcatcagcatatgttcagaggaagaagcagttaccctaataggaaatccttggccagatgacct

SEQ ID NO: 2236 - DNA, 119 bp, homo sapiens
cagcatatgtttcagaggaagaagcagttaccctaataggaaatccttggccagatgacctgttgtctacaaagaaagctgggtagaagcaactcctagacaagttgtagagctctcag

SEQ ID NO: 2237 - DNA, 119 bp, homo sapiens
ctgttgtctaccaaagaaagctgggtagaagcaactcctagacaagttgtagagctctcagggagttctcgattccaattacagaaggctctggagaagcagaagaagatgaagataca

SEQ ID NO: 2238 - DNA, 119 bp, homo sapiens
agggagttcttcgattccaattacagaaggctctggagaagcagaagaagatgaagatacaatgttcacatggtaactgatttatcacagagaaatactactgatacactcattacttt

SEQ ID NO: 2239 - DNA, 119 bp, homo sapiens
caatgttcaccatggtaactgatttatcacagagaaatactactgatacactcattactttagacactacaggataatcacagaaagcttttttgaggttcctgcaaccaccatttatc

SEQ ID NO: 2240 - DNA, 119 bp, homo sapiens
ttagacactagcaggataatcacagaaagcttttttgaggttcctgcaaccaccatttatccagtttctaacaaccttctgcaaaagtggtgcctaccaagtttgtaagtgaaacagac

SEQ ID NO: 2241 - DNA, 119 bp, homo sapiens
tccagtttctgaacaaccttctgcaaaagtggtgcctaccaagtttgtaagtgaaacagacacttctgatggatttccagtaccactgttgaggaaaagaaaaggaaggaggaggaggg

SEQ ID NO: 2242 - DNA, 119 bp, homo sapiens
acacttctgagtggatttccagtaccactgttgaggaaaagaaaaggaaggaggaggagggaactacagtacggcttctacatttgaggtatattcatctacacagagatcggatcaat

SEQ ID NO: 2243 - DNA, 119 bp, homo sapiens
ggaactacaggtacggcttctacatttgaggtatattcatctacacagagatcggatcaattaattttacctttgaattagaaagtccaaatgtagctacatctagtgattcaggtacc

SEQ ID NO: 2244 - DNA, 119 bp, homo sapiens
attaattttaccctttgaattagaaagtccaaatgtagctacatctagtgattcaggtaccaggaaaagtttatgtccttgacaacaccaacacagtctgaaagggaaatgacagattc

SEQ ID NO: 2245 - DNA, 119 bp, homo sapiens
ccaggaaaagttttatgtccttgacaacaccaacacagtctgaaagggaaatgacagattctactcctgctttacagaaacaaatacattagaaaatttgggggcacagaccactgagc

SEQ ID NO: 2246 - DNA, 119 bp, homo sapiens
tctactcctgtctttacagaaacaaatacattagaaaatttgggggcacagaccactgagcacagcagttccatcaacctggggttcaggaagggctgaccactctcccacgtagtcct

SEQ ID NO: 2247 - DNA, 119 bp, homo sapiens
gcacagcagtatccatcaacctggggttcaggaagggctgaccactctcccacgtagtcctgcctctgttttatggagcagggctctggagaagctgctgccgacccagaaaccaccac

SEQ ID NO: 2248 - DNA, 119 bp, homo sapiens
ctgcctctgtctttatggagcagggctctggagaagctgctgccgacccagaaaccaccactgtttcttattttcattaaacgtagagtatgcaattcaagccgaaaaggaagtagctg

SEQ ID NO: 2249 - DNA, 119 bp, homo sapiens
actgtttcttcattttcattaaacgtagagtatgcaattcaagccgaaaaggaagtagctggcactttgctccgcatgtggaaactacattctccactgagccaacaggactggttttg

SEQ ID NO: 2250 - DNA, 119 bp, homo sapiens
tggcactttgtctccgcatgtggaaactacattctccactgagccaacaggactggttttgagtacagtatggacagagtagttgctgaaaatataacccaaacatccagggaaatagt

SEQ ID NO: 2251 - DNA, 119 bp, homo sapiens
tgagtacagtaatggacagagtagttgctgaaaatataacccaaacatccagggaaatagtgatttcaggcgattaggagaaccaaattatggggcagaaataaggggcttttccacag

SEQ ID NO: 2252 - DNA, 119 bp, homo sapiens
gtgatttcagagcgattaggagaaccaaattatggggcagaaataaggggcttttccacaggttttccttggaggaagatttcagtggtgactttagagaatactcaacagtgtctcat

SEQ ID NO: 2253 - DNA, 119 bp, homo sapiens
aggttttcctttggaggaagatttcagtggtgactttagagaatactcaacagtgtctcatcccatagcaaagaagaaacggtaatgatggaaggctctggagatgcagcatttaggga

SEQ ID NO: 2254 - DNA, 119 bp, homo sapiens
atcccatagcaaaagaagaaacggtaatgatggaaggctctggagatgcagcatttagggacacccagattcaccatctacagtacctacttcagttcacatcagtcacatatctgact

SEQ ID NO: 2255 - DNA, 119 bp, homo sapiens
gacacccagacttcaccatctacagtacctacttcagttcacatcagtcacatatctgactcagaaggaccagtagcaccatggtcagcacttcagccttcccctgggaagagtttaca

SEQ ID NO: 2256 - DNA, 119 bp, homo sapiens
ctcagaaggacccagtagcaccatggtcagcacttcagccttcccctgggaagagtttacatcctcagcgagggctcaggtgagcaactggtcacagtcagcagctctgttgttccagt

SEQ ID NO: 2257 - DNA, 119 bp, homo sapiens
catcctcagctgagggctcaggtgagcaactggtcacagtcagcagctctgttgttccagtgcttcccatgctgtgcaaaagttttctggtacagcttcctccattatcgacgaaggat

SEQ ID NO: 2258 - DNA, 119 bp, homo sapiens
gtgcttcccagtgctgtgcaaaagttttctggtacagcttcctccattatcgacgaaggattgggagaatgggtactgtcaatgaaattgatagaagatccaccattttaccaacagca

SEQ ID NO: 2259 - DNA, 119 bp, homo sapiens
attgggagaagtgggtactgtcaatgaaattgatagaagatccaccattttaccaacagcagaagtggaggtacgaaagctccagtagagaaggaggaagtaaaggtcagtggcacagt

SEQ ID NO: 2260 - DNA, 119 bp, homo sapiens
cagaagtggaaggtacgaaagctccagtagagaaggaggaagtaaaggtcagtggcacagtttcaacaactttccccaaactatagagccagccaaattatggtctaggcaagaagtca

SEQ ID NO: 2261 - DNA, 119 bp, homo sapiens
gtttcaacaaactttccccaaactatagagccagccaaattatggtctaggcaagaagtcaaccctgtagacaagaaattgaaagtgaaacaacatcagaggaacaaattcaagaagaa

SEQ ID NO: 2262 - DNA, 119 bp, homo sapiens
caaccctgtaagacaagaaattgaaagtgaaacaacatcagaggaacaaattcaagaagaaaagtcattgaatcccctcaaaactctcctgcaacagaacaaacaatctttgattcaca

SEQ ID NO: 2263 - DNA, 119 bp, homo sapiens
aaaagtcatttgaatcccctcaaaactctcctgcaacagaacaaacaatctttgattcacagacatttatgaaactgaactcaaaaccacagattattctgtactaacaacaaagaaaa

SEQ ID NO: 2264 - DNA, 119 bp, homo sapiens
cagacatttactgaaactgaactcaaaaccacagattattctgtactaacaacaaagaaaacttacagtatgataaagaaatgaaggaggaagacacttctttagttaacatgtctact

SEQ ID NO: 2265 - DNA, 119 bp, homo sapiens
aacttacagtgatgataaagaaatgaaggaggaagacacttctttagttaacatgtctactccagatccgatgcaaatggcttggaatcttacacaactctccctgaagctactgaaaa

SEQ ID NO: 2266 - DNA, 119 bp, homo sapiens
ctccagatccagatgcaaatggcttggaatcttacacaactctccctgaagctactgaaaagtcacatttttcttagctactgcattagtaactgaatctataccagctgaacatgtag

SEQ ID NO: 2267 - DNA, 119 bp, homo sapiens
aagtcacattttttcttagctactgcattagtaactgaatctataccagctgaacatgtagtcacagatcaccaatcaaaaaggaagaaagtacaaaacattttccgaaaggcatgaga

SEQ ID NO: 2268 - DNA, 119 bp, homo sapiens
agtcacagattcaccaatcaaaaaggaagaaagtacaaaacattttccgaaaggcatgagaccaacaatcaagagtcagatactgagctcttattctctggactgggatcaggagaaga

SEQ ID NO: 2269 - DNA, 119 bp, homo sapiens
gaccaacaattcaagagtcagatactgagctcttattctctggactgggatcaggagaagaagttttactactctaccaacagagtcagtgaattttactgaagtggaacaaatcaata

SEQ ID NO: 2270 - DNA, 119 bp, homo sapiens
gaagttttacctactctaccaacagagtcagtgaattttactgaagtggaacaaatcaataacacattaatccccacacttctcaagtggaaagtacctcaagtgacaaaattgaagac

SEQ ID NO: 2271 - DNA, 119 bp, homo sapiens
taacacattatatccccacacttctcaagtggaaagtacctcaagtgacaaaattgaagactttaacagatggaaaatgtggcaaaagaagttggaccactcgtatctcaaacagacat

SEQ ID NO: 2272 - DNA, 119 bp, homo sapiens
actttaacagaatggaaaatgtggcaaaagaagttggaccactcgtatctcaaacagacatctttgaagtagtgggtcagtaaccagcacaacattaatagaaattttaagtgacactg

SEQ ID NO: 2273 - DNA, 119 bp, homo sapiens
atctttgaaggtagtgggtcagtaaccagcacaacattaatagaaattttaagtgacactggagcagaagacccacggtggcacctctccctttctccacggacatcggacatcctcaa

SEQ ID NO: 2274 - DNA, 119 bp, homo sapiens
tggagcagaaggacccacggtggcacctctccctttctccacggacatcggacatcctcaaaatcagacgtcaggtgggcagaagaaatccagactagtagaccacaaaccataactga

SEQ ID NO: 2275 - DNA, 119 bp, homo sapiens
aaaatcagactgtcaggtgggcagaagaaatccagactagtagaccacaaaccataactgaacaagacttaacaagaattcttcaacagcagaaattaacgaaacaacaacctcatcta

SEQ ID NO: 2276 - DNA, 119 bp, homo sapiens
gaacaagactctaacaagaattcttcaacagcagaaattaacgaaacaacaacctcatctactgatttttggctagagcttatggttttgaaatggccaaagaatttgttacatcagca

SEQ ID NO: 2277 - DNA, 119 bp, homo sapiens
tactgattttctggctagagcttatggttttgaaatggccaaagaatttgttacatcagcaccaaaacctctgacttgtattatgaaccttctggagaaggatctggagaagtggatat

SEQ ID NO: 2278 - DNA, 119 bp, homo sapiens
caccaaaaccatctgacttgtattatgaaccttctggagaaggatctggagaagtggatattgttgattatttcacacttctgcaactactcaggcaaccagacaagaaagcagcacca

SEQ ID NO: 2279 - DNA, 119 bp, homo sapiens
attgttgattcatttcacacttctgcaactactcaggcaaccagacaagaaagcagcaccacatttgttctgatgggtccctggaaaaacatcctgaggtgccaagcgctaaagctgtt

SEQ ID NO: 2280 - DNA, 119 bp, homo sapiens
cacatttgtttctgatgggtccctggaaaaacatcctgaggtgccaagcgctaaagctgttactgctgaggattcccaacagtttcagtgatgctgcctcttcattcagagcagaacaa

SEQ ID NO: 2281 - DNA, 119 bp, homo sapiens
ttactgctgatggattcccaacagtttcagtgatgctgcctcttcattcagagcagaacaaaagctccctgatccaactagcacactgtcaaatacagtgtcatatgagaggtccacag

SEQ ID NO: 2282 - DNA, 119 bp, homo sapiens
aaaagctcccctgatccaactagcacactgtcaaatacagtgtcatatgagaggtccacagacggtagttccaagaccgtttcagggaattcgaggattccaccttaaaacctaacaga

SEQ ID NO: 2283 - DNA, 119 bp, homo sapiens
agacggtagtttccaagaccgtttcagggaattcgaggattccaccttaaaacctaacagaaaaaaaccactgaaaatattatcatagacctggacaaagaggacaaggatttaatatt

SEQ ID NO: 2284 - DNA, 119 bp, homo sapiens
gaaaaaaacccactgaaaatattatcatagacctggacaaagaggacaaggatttaatattgacaattaagagagtaccatccttgaaattctacctgagctgacatcggataaaaata

SEQ ID NO: 2285 - DNA, 119 bp, homo sapiens
ttgacaattacagagagtaccatccttgaaattctacctgagctgacatcggataaaaatactatcataatattgatcatactaaacctgtgtatgaagacattcttggaatgcaaaca

SEQ ID NO: 2286 - DNA, 119 bp, homo sapiens
tactatcatagatattgatcatactaaacctgtgtatgaagacattcttggaatgcaaacagatatagaacagaggtaccatcagaaccacatgacagtaatgatgaaagtaatgatga

SEQ ID NO: 2287 - DNA, 119 bp, homo sapiens
cagatatagatacagaggtaccatcagaaccacatgacagtaatgatgaaagtaatgatgacagcactcagttcaagagatctatgaggcagctgtcaacctttctttaactgaggaaa

SEQ ID NO: 2288 - DNA, 119 bp, homo sapiens
gacagcactcaagttcaagagatctatgaggcagctgtcaacctttctttaactgaggaaacatttgaggctctgctgatgttctggctagctacactcaggcaacacatgatgaatca

SEQ ID NO: 2289 - DNA, 119 bp, homo sapiens
aacatttgagggctctgctgatgttctggctagctacactcaggcaacacatgatgaatcaatgacttagaagatagaagccaactagatcacatgggctttcacttcacaactgggat

SEQ ID NO: 2290 - DNA, 119 bp, homo sapiens
caatgacttatgaagatagaagccaactagatcacatgggctttcacttcacaactgggatccctgctctagcacagaaacagaattagacgttttacttcccacggcaacatccctgc

SEQ ID NO: 2291 - DNA, 119 bp, homo sapiens
atccctgctcctagcacagaaacagaattagacgttttacttcccacggcaacatccctgccaattcctgtaagtctgccacagttattccagagattgaaggaataaaagctgaagca

SEQ ID NO: 2292 - DNA, 119 bp, homo sapiens
gccaattcctcgtaagtctgccacagttattccagagattgaaggaataaaagctgaagcaaaagccctgatgacatgtttgaatcaagcactttgtctgatggtcaagctattgcaga

SEQ ID NO: 2293 - DNA, 119 bp, homo sapiens
caaaagccctggatgacatgtttgaatcaagcactttgtctgatggtcaagctattgcagaccaaagtgaataataccaacattgggccaatttgaaaggactcaggaggagtatgaag

SEQ ID NO: 2294 - DNA, 119 bp, homo sapiens
gaccaaagtgaaataataccaacattgggccaatttgaaaggactcaggaggagtatgaagacaaaaaaatgctggtccttcttttcagccagaattctcttcaggagctgaggaggca

SEQ ID NO: 2295 - DNA, 119 bp, homo sapiens
agacaaaaaacatgctggtccttcttttcagccagaattctcttcaggagctgaggaggcattagtagacatactccctatctaagtattgctactacccaccttatggatcagagtgt

SEQ ID NO: 2296 - DNA, 119 bp, homo sapiens
cattagtagaccatactccctatctaagtattgctactacccaccttatggatcagagtgtaacagagggcctgatgtgatggaaggatccaatcccccatattacactgatacaacat

SEQ ID NO: 2297 - DNA, 119 bp, homo sapiens
gtaacagaggtgcctgatgtgatggaaggatccaatcccccatattacactgatacaacattagcagttcaacatttgcgaagttgtcttctcagacaccatcatctcccctcactatc

SEQ ID NO: 2298 - DNA, 119 bp, homo sapiens
attagcagtttcaacatttgcgaagttgtcttctcagacaccatcatctcccctcactatctactcaggagtgaagcctctggacacacagagatcccccagcccagtgctctgccagg

SEQ ID NO: 2299 - DNA, 119 bp, homo sapiens
tctactcaggcagtgaagcctctggacacacagagatcccccagcccagtgctctgccaggaatagacgcggctcatctgtaatgtccccacaggattcttttaaggaaattcatgtaa

SEQ ID NO: 2300 - DNA, 119 bp, homo sapiens
ggaatagacgtcggctcatctgtaatgtccccacaggattcttttaaggaaattcatgtaaatattgaacgactttcaaaccatcaagtgaggaataccttcacataactgagcctccc

SEQ ID NO: 2301 - DNA, 119 bp, homo sapiens
aaatattgaagcgactttcaaaccatcaagtgaggaataccttcacataactgagcctccctctttatccctgacacaaaattagaaccttcagaagatgatggtaaacctgagttatt

SEQ ID NO: 2302 - DNA, 119 bp, homo sapiens
cctctttatctcctgacacaaaattagaaccttcagaagatgatggtaaacctgagttattagaagaaaggaagcttctcccacagaacttattgctgtggaaggaactgagattctcc

SEQ ID NO: 2303 - DNA, 119 bp, homo sapiens
ttagaagaaatggaagcttctcccacagaacttattgctgtggaaggaactgagattctccaagatttcaaaacaaaaccgatggtcaagtttctggagaagcaatcaagatgtttccc

SEQ ID NO: 2304 - DNA, 119 bp, homo sapiens
ccaagatttccaaaacaaaaccgatggtcaagtttctggagaagcaatcaagatgtttcccaccattaaacacctgaggctggaactgttattacaactgccgatgaaattgaattaga

SEQ ID NO: 2305 - DNA, 119 bp, homo sapiens
ccaccattaaaacacctgaggctggaactgttattacaactgccgatgaaattgaattagaaggtgctaacagtggccacactctacttctgcttctgccacctatggggtcgaggcag

SEQ ID NO: 2306 - DNA, 119 bp, homo sapiens
gaaggtgctacacagtggccacactctacttctgcttctgccacctatggggtcgaggcaggtgtggtgcttggctaagtccacagacttctgagaggcccacgctttcttcttctcca

SEQ ID NO: 2307 - DNA, 119 bp, homo sapiens
aggtgtggtgccttggctaagtccacagacttctgagaggcccacgctttcttcttctccagaaataaacctgaaactcaagcagctttaatcagagggcaggattccacgatagcagc

SEQ ID NO: 2308 - DNA, 119 bp, homo sapiens
cagaaataaaccctgaaactcaagcagctttaatcagagggcaggattccacgatagcagcatcagaacgcaagtggcagcgagaattcttgattccaatgatcaggcaacagtaaacc

SEQ ID NO: 2309 - DNA, 119 bp, homo sapiens
gcatcagaacagcaagtggcagcgagaattcttgattccaatgatcaggcaacagtaaaccctgtggaattaatactgaggttgcaacaccaccattttcccttctggagacttctaat

SEQ ID NO: 2310 - DNA, 119 bp, homo sapiens
ccctgtggaatttaatactgaggttgcaacaccaccattttcccttctggagacttctaatgaaacagattcctgattggcattaatgaagagtcagtggaaggcacggcaatctattt

SEQ ID NO: 2311 - DNA, 119 bp, homo sapiens
ataccgagacatgtgactatggctggcacaaattccaagggcagtgctacaaatactttgcccatcgaccacatgggatgcagctgaacgggaatgccgtctgcagggtgcccatctca

SEQ ID NO: 2312 - DNA, 119 bp, homo sapiens
ggcagtgctacaaatactttgcccatcgacgcacatgggatgcagctgaacgggaatgccgtctgcaggtgcccatctcacaagcatcctgtctcacgaagaacaaatgtttgttaatc

SEQ ID NO: 2313 - DNA, 119 bp, homo sapiens
caatacgagaattggagacccaaccagccagacagcttcttttctgctggagaagactgtgttgtaatctttggcatgagaatggccagtggaatgatgttccctgcaattaccatctc

SEQ ID NO: 2314 - DNA, 119 bp, homo sapiens
agccagacagcttcttttctgctggagaagactgtgttgtaatcatttggcatgagaatggccagtggatgatgttccctgcaattaccatctcacctatacgtgcaagaaaggaacag

SEQ ID NO: 2315 - DNA, 119 bp, homo sapiens
tcgcttgcggccagccccctgttgtagaaaatgccaagacctttggaaagatgaaacctcgttatgaaacaactccctgattagataccactgcaaagatggtttcattcaacgtcacc

SEQ ID NO: 2316 - DNA, 119 bp, homo sapiens
tgccaagacctttggaaagatgaaacctcgttatgaaatcaactccctgattagataccactgcaaagaggtttcattcaacgtcaccttccaactatccggtgcttaggaaatggaag

SEQ ID NO: 2317 - DNA, 119 bp, homo sapiens
tatgaaatcaactccctgattagataccactgcaaagatggtttcattcaacgtcaccttccaactatcggtgcttaggaaatggaagatgggctatacctaaaattacctgcatgaac

SEQ ID NO: 2318 - DNA, 119 bp, homo sapiens
catctgcataccaaaggacttattctatgaaatactttaaaaattcctcatcagcaaaggacaattcaaaaatacatccaaacatgatcatcgttggagccggaggtggcaggagtcga

SEQ ID NO: 2319 - DNA, 119 bp, homo sapiens
gacaattcaataaatacatccaaacatgatcatcgttggagccggaggtggcaggagtcgaggcgctgaccctaaaatggcgaacatgtgttttcatcatttcagccaaagtcctaact

SEQ ID NO: 2320 - DNA, 119 bp, homo sapiens
gaggcgctgatccctaaaatggcgaacatgtgttttcatcatttcagccaaagtcctaacttcctgtgctttcctatcacctcgagaagtaattatcagttggtttggatttttggacc

SEQ ID NO: 2321 - DNA, 119 bp, homo sapiens
cttcctgtgcctttcctatcacctcgagaagtaattatcagttggtttggatttttggaccaccgttcatcattttgggttgccgtgctcccaaaacattttaaatgaaagtattggca

SEQ ID NO: 2322 - DNA, 119 bp, homo sapiens
ccaccgttcagtcattttgggttgccgtgctcccaaaacattttaaatgaaagtattggcattcaaaaaacagcagacaaaatgaaagaaaatgagagcagaaagtaagcatttccagc

SEQ ID NO: 2323 - DNA, 119 bp, homo sapiens
cattcaaaaagacagcagacaaaatgaaagaaaatgagagcagaaagtaagcatttccagcctatctaattctttagttttctatttgcctccagtgcagtccatttcctaatgtatac

SEQ ID NO: 2324 - DNA, 119 bp, homo sapiens
gcctatctaatttctttagttttctatttgcctccagtgcagtccatttcctaatgtataccagcctacgtactatttaaaatgctcaatttcagcaccgatggccatgtaaataagat

SEQ ID NO: 2325 - DNA, 119 bp, homo sapiens
accagcctactgtactatttaaaatgctcaatttcagcaccgatggccatgtaaataagatgatttaatttgattttaatcctgtatataaaataaaaagtcacaatgagtttgggcat

SEQ ID NO: 2326 - DNA, 119 bp, homo sapiens
atgatttaatgttgattttaatcctgtatataaaataaaaagtcacaatgagtttgggcatatttaatgtgattatggagccttagaggtctttaatcattggttcggctgcttttatg

SEQ ID NO: 2327 - DNA, 119 bp, homo sapiens
atatttaatgatgattatggagccttagaggtctttaatcattggttcggctgcttttatgtagtttagctggaaatggtttcacttgctctttgactgtcagcaagactgaagatggc

SEQ ID NO: 2328 - DNA, 119 bp, homo sapiens
tgtagtttaggctggaaatggtttcacttgctctttgactgtcagcaagactgaagatggcttttcctgacagctagaaaacacaaaatcttgtaggtcattgcacctatctcagccat

SEQ ID NO: 2329 - DNA, 119 bp, homo sapiens
gcttttcctggacagctagaaaacacaaaatcttgtaggtcattgcacctatctcagccataggtgcagttgcttctacatgatgctaaaggctgcgaatgggatcctgatggaactaa

SEQ ID NO: 2330 - DNA, 119 bp, homo sapiens
ataggtgcagtttgcttctacatgatgctaaaggctgcgaatgggatcctgatggaactaaggactccatgtcgaactcttctttgctgcattcctttttcttcacttacaagaaaggc

SEQ ID NO: 2331 - DNA, 119 bp, homo sapiens
aaggactccaatgtcgaactcttctttgctgcattcctttttcttcacttacaagaaaggcctgaatggggacttttctgtaaccaggaacattttttaggggtcaaagtgctaataat

SEQ ID NO: 2332 - DNA, 119 bp, homo sapiens
gcctgaatggaggacttttctgtaaccaggaacattttttaggggtcaaagtgctaataattaactcaacaggtctactttttaatggctttcataacactaactcataaggttaccga

SEQ ID NO: 2333 - DNA, 119 bp, homo sapiens
attaactcaaccaggtctactttttaatggctttcataacactaactcataaggttaccgatcaatgcattcatacggatatagacctagggctctggagggtgggggattgttaaaac

SEQ ID NO: 2334 - DNA, 119 bp, homo sapiens
ttttgtatatataaccattttaatcttttataaagttttgaatgttcatgtatgaatgctgcagctgtgagcatacataaataaatgaagtaagccatactgatttaatttattggatg

SEQ ID NO: 2335 - DNA, 119 bp, homo sapiens
tgcagctgtgaagcatacataaataaatgaagtaagccatactgatttaatttattggatgttattttcctaagacctgaaaatgaacatagtatgctagttatttttcagtgttagcc

SEQ ID NO: 2336 - DNA, 119 bp, homo sapiens
tgttattttccctaagacctgaaaatgaacatagtatgctagttatttttcagtgttagccttttacttcctcacacaatttggaatcatataatataggtactttgtccctgattaaa

SEQ ID NO: 2337 - DNA, 119 bp, homo sapiens
ccttttactttcctcacacaatttggaatcatataatataggtactttgtccctgattaaataatgtgaggatagaatgcatcaagtgtttattatgaaaagagtggaaaagtatatag

SEQ ID NO: 2338 - DNA, 119 bp, homo sapiens
aataatgtgacggatagaatgcatcaagtgtttattatgaaaagagtggaaaagtatatagcttttagcaaaggtgtttgcccattctaagaaatgagcgaatatatagaaatagtgtg

SEQ ID NO: 2339 - DNA, 119 bp, homo sapiens
agcttttagcaaaaggtgtttgcccattctaagaaatgagcgaatatatagaaatagtgtgggcatttctcctgttaggtggagtgtatgtgttgacatttctccccatctcttcccac

SEQ ID NO: 2340 - DNA, 119 bp, homo sapiens
tgggcatttcttcctgttaggtggagtgtatgtgttgacatttctccccatctcttcccactctgtttttccccattatttgaataaagtgactgctgaagatgactttgaatccttat

SEQ ID NO: 2341 - DNA, 119 bp, homo sapiens
actctgttttctccccattatttgaataaagtgactgctgaagatgactttgaatccttatccacttaattaatgtttaaagaaaaacctgtaatggaaagtaagactccttccctaat

SEQ ID NO: 2342 - DNA, 119 bp, homo sapiens
atccacttaatttaatgtttaaagaaaaacctgtaatggaaagtaagactccttccctaatttcagtttgagcaacttgaagaagagtagacaaaaaataaaatgcacatagaaaaaga

SEQ ID NO: 2343 - DNA, 119 bp, homo sapiens
atttcagtttagagcaacttgaagaagagtagacaaaaaataaaatgcacatagaaaaagagaaaaaggcacaaagggattggcccaatattgattctttttttataaaacctcctttg

SEQ ID NO: 2344 - DNA, 119 bp, homo sapiens
gagaaaaagggcacaaagggattggcccaatattgattctttttttataaaacctcctttggcttagaagaatgactctagctacaataatacacagtatgtttaagcaggttcccttg

SEQ ID NO: 2345 - DNA, 119 bp, homo sapiens
tggcttagaaggaatgactctagctacaataatacacagtatgtttaagcaggttcccttggttgttgcttaaatgtaatccacctttaggtattttagagcacagaacaacactgtgt

SEQ ID NO: 2346 - DNA, 119 bp, homo sapiens
tggttgttgcattaaatgtaatccacctttaggtattttagagcacagaacaacactgtgttgatctagaggtttctatttttcctttctctttacaatgcacataatactttcctgta

SEQ ID NO: 2347 - DNA, 119 bp, homo sapiens
gttgatctagtaggtttctatttttcctttctctttacaatgcacataatactttcctgtatttatatctaacgtgtatagtgtaaaatgtgaatgactttttttgtgaatgaaaatct

SEQ ID NO: 2348 - DNA, 119 bp, homo sapiens
tatttatatcataacgtgtatagtgtaaaatgtgaatgactttttttgtgaatgaaaatctaaaatcttgtaactttttatatctgcttttgtttcaccaaagaaacctaaaatccttc

SEQ ID NO: 2349 - DNA, 119 bp, homo sapiens
ggatgccctctgcatctttattagtaaatcttctttcagctttactcatcctatttgtgtttggagaaaagaaataagatttactggacaaactgaatttgttgttaatgaaacaagta

SEQ ID NO: 2350 - DNA, 119 bp, homo sapiens
ctttcagctttactcatcctatttgtgtttggagaaacagaaataagatttactggacaaactgaatttttgttaatgaaacaagtacaacagttattcgtcttatcattgaaaggata

SEQ ID NO: 2351 - DNA, 119 bp, homo sapiens
agaaacagaaataagatttactggacaaactgaatttgttgttaatgaaacaagtacaacagttattcgcttatcattgaaaggataggagagccagcaaatgttactgcaattgtatc

SEQ ID NO: 2352 - DNA, 119 bp, homo sapiens
ctgtatggagaggacgctggtgacttttttgacacatatgctgcagcttttatacctgccggagaaacaacagaacagtgtacatagcagtatgtgatgatgacttaccagagcctgac

SEQ ID NO: 2353 - DNA, 119 bp, homo sapiens
gacacatatgctgcagcttttatacctgccggagaaacaaacagaacagtgtacatagcagtatgtgatatgacttaccagagcctgacgaaacttttatttttcacttaacattacag

SEQ ID NO: 2354 - DNA, 119 bp, homo sapiens
gtaccagaaaatgatgaaatatttttaattcaactgaaaagtgtagaaggaggagctgagattaacaccctaggaattccattgagatcatcattaagaaaaatgatagtcccgtgaga

SEQ ID NO: 2355 - DNA, 119 bp, homo sapiens
ctgagattaacacctctaggaattccattgagatcatcattaagaaaaatgatagtcccgtgagattcctcagagtatttatttggttcctgaggaagaccacatactcataattccag

SEQ ID NO: 2356 - DNA, 119 bp, homo sapiens
tcccgtgagattccttcagagtatttatttggttcctgaggaagaccacatactcataattccagtagtcgtggaaaggacaacaatggaaatctgattggatctgatgaatatgaggt

SEQ ID NO: 2357 - DNA, 119 bp, homo sapiens
ataattccagtagttcgtggaaaggacaacaatggaaatctgattggatctgatgaatatgaggtttcatcagttatgctgtcacaactgggaattccacagcacatgcccagcaaaat

SEQ ID NO: 2358 - DNA, 119 bp, homo sapiens
aatatgaggtttcaatcagttatgctgtcacaactgggaattccacagcacatgcccagcaaaatctggcttcattgatcttcagccaaacacaactgttgtttttccaccttttattc

SEQ ID NO: 2359 - DNA, 119 bp, homo sapiens
ccagcaaaatctggacttcattgatcttcagccaaacacaactgttgtttttccaccttttattcatgatctcacttgaaatttcaaatagttgatgacaccataccggagattgctga

SEQ ID NO: 2360 - DNA, 119 bp, homo sapiens
ccttttattcatgaatctcacttgaaatttcaaatagttgatgacaccataccggagattgctgaatcgttcacattatgttactaaaagataccttacagggagatgctgtgctaata

SEQ ID NO: 2361 - DNA, 119 bp, homo sapiens
agattgctgaatcgtttcacattatgttactaaaagataccttacagggagatgctgtgctaataagccttctgttgtacaagtcaccattaagccaaatgataaaccttatggagtcc

SEQ ID NO: 2362 - DNA, 119 bp, homo sapiens
tgtgctaataagcccttctgttgtacaagtcaccattaagccaaatgataaaccttatggagtcctttcttcaacagtgttttgtttgaaaggacagttataattgatgaagatagaat

SEQ ID NO: 2363 - DNA, 119 bp, homo sapiens
atatgaagaaatcacagtggttagaaatggaggaacccatgggaatgtctctgcgaattgggtgttgaccggaacagcactgatccctcaccagtaacagcagatatcagaccgagctc

SEQ ID NO: 2364 - DNA, 119 bp, homo sapiens
ctgcgaattgggtgttgacacggaacagcactgatccctcaccagtaacagcagatatcagaccgagcttggagttctccattttgcacaagggcagatgttggcaacaattcctctta

SEQ ID NO: 2365 - DNA, 119 bp, homo sapiens
gcagatatcagaccgagctctggagttctccattttgcacaagggcagatgttggcaacaattcctcttctgtggttgatgatgatcttccagaagaggcagaagcttatctacttcaa

SEQ ID NO: 2366 - DNA, 119 bp, homo sapiens
gttggcaacaattcctcttactgtggttgatgatgatcttccagaagaggcagaagcttatctacttcaattctgcctcatacaatacgaggaggtgcagaagtgagcgagccagcgga

SEQ ID NO: 2367 - DNA, 119 bp, homo sapiens
cttttgttctacattcaggatagtgatgatgtctatggcctaataacattttttcctatggaaaaccagagattgaaagcagcccaggtgaacgatacttatccttgagttttacaaga

SEQ ID NO: 2368 - DNA, 119 bp, homo sapiens
tttttcctatggaaaaccagaagattgaaagcagcccaggtgaacgatacttatccttgagttttacaaactaggagggactaaaggagatgtgaggttgctttattctgtactttaca

SEQ ID NO: 2369 - DNA, 119 bp, homo sapiens
cttatccttgagttttacaagactaggagggactaaaggagatgtgaggttgctttattctgtactttaattcctgctggagctgtggaccccttgcaagcaaaagaaggcatcttaaa

SEQ ID NO: 2370 - DNA, 119 bp, homo sapiens
ttgctttattctgtactttacattcctgctggagctgtggaccccttgcaagcaaaagaaggcatcttaatatatcaaggagaaatgacctcatttttccagagcaaaaaactcaagtc

SEQ ID NO: 2371 - DNA, 119 bp, homo sapiens
ttggaaactgtggagttgttaaacataattcctctaatcccacccataagccctagatttggggaaatcgcaatatttctttactggttactccagccattgcaaatggagaaattggc

SEQ ID NO: 2372 - DNA, 119 bp, homo sapiens
tttggggaaatctgcaatatttctttactggttactccagccattgcaaatggagaaattggctttctcgcaatcttccaattattttgcatgaaccagaagattttgctgctgaagtg

SEQ ID NO: 2373 - DNA, 119 bp, homo sapiens
gtatacattcccttacatcgggatggaactgatggccaggctactgtctactggagtttgaagccctctgctttaattcaaaagcagtgaccccggatgatataggcccctttaatggc

SEQ ID NO: 2374 - DNA, 119 bp, homo sapiens
ggagtttgaagccctctggctttaattcaaaagcagtgaccccggatgatataggcccctttaatggcttgttttgtttttatctgggcaaagtgacacaacaatcaacattactatca

SEQ ID NO: 2375 - DNA, 119 bp, homo sapiens
aggcccctttaatggctctgttttgtttttatctgggcaaagtgacacaacaatcaacattactatcaaggtgatgacataccggaaatgaatgaaactgtaacactttctctagacag

SEQ ID NO: 2376 - DNA, 119 bp, homo sapiens
ggttaacgtggaaaaccaagtgctgaaatctggatatactagccgtgacctaattattttggaaaatgagaccctgggggagtttttgaattttctcctgcttccagaggaccctatgt

SEQ ID NO: 2377 - DNA, 119 bp, homo sapiens
gtggaaaaccaagtgctgaaatctggatatactagccgtgacctaattattttggaaaatgatgaccctggggagtttttgaattttctcctgcttccagaggaccctatgttataaaa

SEQ ID NO: 2378 - DNA, 119 bp, homo sapiens
gaaggagaatctgtagagctccacatcatccgatcaagggggtcccttgttaagcagtttctacactacgagtagagccaagagatagcaatgaattctatggaaacacgggagtacta

SEQ ID NO: 2379 - DNA, 119 bp, homo sapiens
tcaagggggtcccttgttaagcagtttctacactaccgagtagagccaagagatagcaatgaattctatgaaacacgggagtactagaatttaaacctggagaaagggagatagtgatc

SEQ ID NO: 2380 - DNA, 119 bp, homo sapiens
taccgagtagagccaagagatagcaatgaattctatggaaacacgggagtactagaatttaaacctggaaaagggagatagtgatcaccttgctagcaagattggatgggataccagag

SEQ ID NO: 2381 - DNA, 119 bp, homo sapiens
ttggatgaacactactgggtggtcctcagcagccacggagaacgggaaagcaagttgggaagtgccaccttgtcaatataacgattctgaaaaatgatgatcctcatggcattatagaa

SEQ ID NO: 2382 - DNA, 119 bp, homo sapiens
agccacggagaacgggaaagcaagttgggaagtgccaccattgtcaatataacgattctgaaaaatgatatcctcatggcattatagaatttgtttctgatggtctaattgtgatgata

SEQ ID NO: 2383 - DNA, 119 bp, homo sapiens
agtgccaccattgtcaatataacgattctgaaaaatgatgatcctcatggcattatagaatttgtttctatggtctaattgtgatgataaatgaaagcaaaggagatgctatctatagt

SEQ ID NO: 2384 - DNA, 119 bp, homo sapiens
ctgtttatgatgtagtaagaaatcgaggcaactttggtgatgttagtgtatcatgggtggttagtccagctttacacaagatgtatttcctgtacaagggactgttgtctttggagatc

SEQ ID NO: 2385 - DNA, 119 bp, homo sapiens
agtgtatcatgggtggttagtccagactttacacaagatgtatttcctgtacaagggactgttgtctttgagatcaggaattttcaaaaaatatcaccatttactcccttccagatgag

SEQ ID NO: 2386 - DNA, 119 bp, homo sapiens
attccagaagaaatggaagaatttaccgttatcctactgaatggcactggaggagctaaagtgggaaatgaacaactgcaactctgaggattagaagaaatgatgaccccatttatttt

SEQ ID NO: 2387 - DNA, 119 bp, homo sapiens
cagaagaaatggaagaatttaccgttatcctactgaatggcactggaggagctaaagtgggaaatagaaaactgcaactctgaggattagaagaaatgatgaccccatttattttgcag

SEQ ID NO: 2388 - DNA, 119 bp, homo sapiens
aacctcgtgtagtgagggttcaggaaggtgagactgccaactttacagttctcagaaatggatctgttgtgtgacttgcatggtccagtatgctaccaaggatgggaaggctactgcaa

SEQ ID NO: 2389 - DNA, 119 bp, homo sapiens
tctcagaaatggatctgttgatgtgacttgcatggtccagtatgctaccaaggatgggaaggctactgcagagagagagatttcattcctgttgaaaaaggagaaacgctcatttttga

SEQ ID NO: 2390 - DNA, 119 bp, homo sapiens
aaggatgggaaggctactgcaagagagagagatttcattcctgttgaaaaaggagaaacgctcatttttaggttggaagtagacagcagagcatatccatatttgttaatgaagatggt

SEQ ID NO: 2391 - DNA, 119 bp, homo sapiens
aaggagaaacgctcatttttgaggttggaagtagacagcagagcatatccatatttgttaatgaagatgtatcccggaaacagatgagcccttttatataatcctcttgaattcaacag

SEQ ID NO: 2392 - DNA, 119 bp, homo sapiens
gtgatacagtagtatatcaatatggagtagctacagtaataattgaagctaatgatgacccaaatggcatttttctctggagcccatagacaaagcagtggaagaaggaaagactaatg

SEQ ID NO: 2393 - DNA, 119 bp, homo sapiens
agtagtatatcaatatggagtagctacagtaataattgaagctaatgatgacccaaatggcattttttcctggagcccatagacaaagcagtggaagaaggaaagactaatgcattttg

SEQ ID NO: 2394 - DNA, 119 bp, homo sapiens
gattttgaggcaccgaggatactttggtagtgtttctgtatcttggcagctctttcagaatgattctgcttgcagcctgggcaggagttctatgaaacttcaggaactgttaacttcat

SEQ ID NO: 2395 - DNA, 119 bp, homo sapiens
ctctttcagaatgattctgctttgcagcctgggcaggagttctatgaaacttcaggaactgttaacttctggatggagaagaagcaaaaccaatcattctccatgcttttccagataaa

SEQ ID NO: 2396 - DNA, 119 bp, homo sapiens
cttcaggaactgttaacttcatggatggagaagaagcaaaaccaatcattctccatgcttttccagataaattcctgaattcaatgaattttatttcctaaaacttgtaaacatttcag

SEQ ID NO: 2397 - DNA, 119 bp, homo sapiens
gtggatccccaggtcctgggggccagctagcagaaaccaacctccaggtgacagtaatggttccattcatgatgatccctttggagtttttatcttggatccagagtgtttagagagag

SEQ ID NO: 2398 - DNA, 119 bp, homo sapiens
atggttccattcaatgatgatccctttggagtttttatcttggatccagagtgtttagagagagaagtgcagaagatgtcctgtctgaagatgatatgtcttatattaccaacttcacc

SEQ ID NO: 2399 - DNA, 119 bp, homo sapiens
agagagagaagtggcagaagatgtcctgtctgaagatgatatgtcttatattaccaacttcaccattttaggcagcagggtgtgtttggtgatgtacaactgggctgggaaatactgtc

SEQ ID NO: 2400 - DNA, 119 bp, homo sapiens
acttcaccattttgaggcagcagggtgtgtttggtgatgtacaactgggctgggaaatactgtccagtggttccctgctggtttgccaccaatgatagattttttactggttggaattt

SEQ ID NO: 2401 - DNA, 119 bp, homo sapiens
atactgtccagtgagttccctgctggtttgccaccaatgatagattttttactggttggaattttccccccaccgtgcatttacaacagcacatgcggcgtcaccacagtggaacggat

SEQ ID NO: 2402 - DNA, 119 bp, homo sapiens
tggaattttccccaccaccgtgcatttacaacagcacatgcggcgtcaccacagtggaacggatgcttttactttaccggactagagggtgcatttgggactgttaatccaaaatacca

SEQ ID NO: 2403 - DNA, 119 bp, homo sapiens
gaacggatgctttgtactttaccggactagagggtgcatttgggactgttaatccaaaataccatccctcaggaataatacaattgccaactttacattctcagcttgggtaatgccca

SEQ ID NO: 2404 - DNA, 119 bp, homo sapiens
aaataccatccctccaggaataatacaattgccaactttacattctcagcttgggtaatgcccaatgccatacgaatggattcattatagcgaaggatgacggtaatggaagcatctac

SEQ ID NO: 2405 - DNA, 119 bp, homo sapiens
aatgcccaatgccaatacgaatggattcattatagcgaaggatgacggtaatggaagcatctactacgggtaaaaatacaaacaaacgaatcccatgtgacactttcccttcattataa

SEQ ID NO: 2406 - DNA, 119 bp, homo sapiens
gcatctactacggggtaaaaatacaaacaaacgaatcccatgtgacactttcccttcattataaaacctgggttccaatgctacatacattgccaagacaacagtcatgaaatatttag

SEQ ID NO: 2407 - DNA, 119 bp, homo sapiens
cattataaaaccttgggttccaatgctacatacattgccaagacaacagtcatgaaatatttagaagaagtgtttggcttcatctactaattatcctggaggatggtataatcgaattc

SEQ ID NO: 2408 - DNA, 119 bp, homo sapiens
atatttagaagaaagtgtttggcttcatctactaattatcctggaggatggtataatcgaattctacctgatggaaatgcaatgcccaggggaatcaagagtctgaaaggagaagccat

SEQ ID NO: 2409 - DNA, 119 bp, homo sapiens
gtcctgggatactgagaattggagcagggataaatggcaatgacagatttacaggtctgatgcaggatggaggtcctatgagcggaaactgacgcttgaagaaatttatgaacttcatg

SEQ ID NO: 2410 - DNA, 119 bp, homo sapiens
acaggtctgatgcaggatgtgaggtcctatgagcggaaactgacgcttgaagaaatttatgaacttcatccatgcccgcaaaaagtgatttacacccaatttctggatatctggagttc

SEQ ID NO: 2411 - DNA, 119 bp, homo sapiens
agaaatttatgaacttcatgccatgcccgcaaaaagtgatttacacccaatttctggatatctggagttagacagggagaaactaacaaatcattcattatttctgcaagagatgacaa

SEQ ID NO: 2412 - DNA, 119 bp, homo sapiens
tttctggatatctggagttcagacagggagaaactaacaaatcattcattatttctgcaagagatgacatgacgaggaaggagaagaattattcattcttaaactagtttctgtatatg

SEQ ID NO: 2413 - DNA, 119 bp, homo sapiens
atttctgcaagagatgacaatgacgaggaaggagaagaattattcattcttaaactagtttctgtatatgaggagctcgtatttcggaagaaaatactactgcaagattaacaatacaa

SEQ ID NO: 2414 - DNA, 119 bp, homo sapiens
taaactagtttctgtatatggaggagctcgtatttcggaagaaaatactactgcaagattaacaatacaaaaagtgacaatgcaaatggcttgtttggtttcacaggagcttgtatacc

SEQ ID NO: 2415 - DNA, 119 bp, homo sapiens
attgcagaggagggatcaaccatttcttgtgtggttgagagaaccagaggagctctggattatgtgcatttttttacaccatttcacagattgaaactgatggcattaattaccttgtt

SEQ ID NO: 2416 - DNA, 119 bp, homo sapiens
gattatgtgcatgttttttacaccatttcacagattgaaactgatggcattaattaccttgttgatgacttgctaatgccagtggaactattacattccttccttggcagagatcagag

SEQ ID NO: 2417 - DNA, 119 bp, homo sapiens
gttctgaatatatatgttcttgatgatgatattcctgaacttaatgagtatttccgtgtgacattggttctgcaattcctggagatgggaagctaggctcaactcctaccagtggtgca

SEQ ID NO: 2418 - DNA, 119 bp, homo sapiens
attcctgaacttaatgagtatttccgtgtgacattggtttctgcaattcctggagatgggaagctaggccaactcctaccagtggtgcaagcatagatcctgaaaaggaaacgactgat

SEQ ID NO: 2419 - DNA, 119 bp, homo sapiens
acattggtttctgcaattcctggagatgggaagctaggctcaactcctaccagtggtgcaagcatagatctgaaaaggaaacgactgatatcaccatcaaagctagtgatcatccatat

SEQ ID NO: 2420 - DNA, 119 bp, homo sapiens
gcttgctgcagttctccacagggctgcctcctcagcctaaggacgcaatgaccctgcctgcaagcagcgtccacatatcactgtggaggaggaagatggagaaatcaggttattggtca

SEQ ID NO: 2421 - DNA, 119 bp, homo sapiens
gacgcaatgaccctgcctgcaagcagcgttccacatatcactgtggaggaggaagatggagaaatcaggtattggtcatccgtgcacagggacttctgggaagggtgactgcggaattt

SEQ ID NO: 2422 - DNA, 119 bp, homo sapiens
tgtggaggaggaagatggagaaatcaggttattggtcatccgtgcacagggacttctgggaagggtgacgcggaatttagaacagtgtccttgacagcattcagtcctgaggattacca

SEQ ID NO: 2423 - DNA, 119 bp, homo sapiens
aatgttgctggcacattagaatttcaaccaggagaaagatataaatacattttcataaacatcactgatattctattcctgaactggaaaaatcttttaaagttgagttgttaaacttg

SEQ ID NO: 2424 - DNA, 119 bp, homo sapiens
gcacattagaatttcaaccaggagaaagatataaatacattttcataaacatcactgataattctattctgaactggaaaaatcttttaaagttgagttgttaaacttggaaggaggag

SEQ ID NO: 2425 - DNA, 119 bp, homo sapiens
ccagtctaggagtggcttcccaaattctagtgacaattgcagcctctgaccacgctcatggcgtatttgatttagccctgagtcactctttgtcagtggaactgaaccagaagatgggt

SEQ ID NO: 2426 - DNA, 119 bp, homo sapiens
caaattctagtgacaattgcagcctctgaccacgctcatggcgtatttgaatttagccctgagtcactcttgtcagtggaactgaaccagaagatgggtatagcactgttacattaaat

SEQ ID NO: 2427 - DNA, 119 bp, homo sapiens
gttataagacatcatggaactctgtctccagtgactttgcattggaacatagactctgatcctgatggtatctcgccttcacctctggcaacatcacatttgagattgggcagacgagc

SEQ ID NO: 2428 - DNA, 119 bp, homo sapiens
tctgatcctgatggtgatctcgccttcacctctggcaacatcacatttgagattgggcagacgagcgccatatcactgtggagatattgcctgacgaagacccagaactggataaggca

SEQ ID NO: 2429 - DNA, 119 bp, homo sapiens
gggcagacgagcgccaatatcactgtggagatattgcctgacgaagacccagaactggataaggcattcctgtgtcagtcctcagtgtttccagtggttctttgggagctcatattaat

SEQ ID NO: 2430 - DNA, 119 bp, homo sapiens
ctggataaggcattctctgtgtcagtcctcagtgtttccagtggttctttgggagctcatattaatgcccgttaacagttttggctagtgatgatccatatgggatattcattttttct

SEQ ID NO: 2431 - DNA, 119 bp, homo sapiens
gctcatattaatgccacgttaacagttttggctagtgatgatccatatgggatattcattttttctgagaaaacagacctgttaaagttgaggaagcaacccagaacatcacactatca

SEQ ID NO: 2432 - DNA, 119 bp, homo sapiens
ttcattttttctgagaaaaacagacctgttaaagttgaggaagcaacccagaacatcacactatcaatataaggttgaaaggcctcatgggaaaagtccttgtctcatatgcaacacta

SEQ ID NO: 2433 - DNA, 119 bp, homo sapiens
atcacactatcaataataaggttgaaaggcctcatgggaaaagtccttgtctcatatgcaacactagatatatggaaaaaccaccttattttccacctaatttagcgagagcaactcaa

SEQ ID NO: 2434 - DNA, 119 bp, homo sapiens
tatgcaacactagatgatatggaaaaaccaccttattttccacctaatttagcgagagcaactcaaggagagactatataccagcttctggatttgctctttttggagctaatcagagt

SEQ ID NO: 2435 - DNA, 119 bp, homo sapiens
agagcaactcaaggaagagactatataccagcttctggatttgctctttttggagctaatcagagtgagcaacaatagctatttcaattttggatgatgatgagccagaaaggtccgaa

SEQ ID NO: 2436 - DNA, 119 bp, homo sapiens
gctaatcagagtgaggcaacaatagctatttcaattttggatgatgatgagccagaaaggtccgaatcttctttatcgaactactcaactctactttagtagcgaaagtacagagtcgt

SEQ ID NO: 2437 - DNA, 119 bp, homo sapiens
ttccaaattctccacgtcttgggcctaaggtagaaactattgcgcaactaattatcattgccaatgatgtgcatttggaactcttcagctctcagcaccaattgtccgagtggcagaaa

SEQ ID NO: 2438 - DNA, 119 bp, homo sapiens
taattatcattgccaatgatgatgcatttggaactcttcagctctcagcaccaattgtccgagtggcagaaatcatgttggacccattatcaatgtgactagaacaggaggagcatttg

SEQ ID NO: 2439 - DNA, 119 bp, homo sapiens
caccaattgtccgagtggcagaaaatcatgttggacccattatcaatgtgactagaacaggaggagcattgcagatgtctctgtgaagtttaaagctgtgccaataactgcaatagctg

SEQ ID NO: 2440 - DNA, 119 bp, homo sapiens
gtgaagattatagtatagcttcatcagatgtggtcttgctagaaggggaaaccagtaaagccgtgccaaatatgtcattaatgatatctatcctgaactggaagaatcttttcttgtgc

SEQ ID NO: 2441 - DNA, 119 bp, homo sapiens
aaaccagtaaagccgtgccaatatatgtcattaatgatatctatcctgaactggaagaatcttttcttggcaactgatgaatgaaacaacaggaggagccagactaggggctttaacag

SEQ ID NO: 2442 - DNA, 119 bp, homo sapiens
aactggaagaatcttttcttgtgcaactgatgaatgaaacaacaggaggagccagactaggggctttaaagaggcagtcattattattgaggcctctgatgacccctatggattatttg

SEQ ID NO: 2443 - DNA, 119 bp, homo sapiens
gttttcagattactaaacttattgtagaggaacctgagtttaactcagtgaaggtaaacctgccaataatcgaaattctgggacactcggcaatgttactgttcagtgggttgccacca

SEQ ID NO: 2444 - DNA, 119 bp, homo sapiens
aactcagtgaaggtaaacctgccaataattcgaaattctgggacactcggcaatgttactgttcagtggttgccaccattaatggacagcttgctactggcgacctgcgagttgtctca

SEQ ID NO: 2445 - DNA, 119 bp, homo sapiens
gacactcggcaatgttactgttcagtgggttgccaccattaatggacagcttgctactggcgacctgcggttgtctcaggtaatgtgacctttgcccctggggaaaccattcaaacctt

SEQ ID NO: 2446 - DNA, 119 bp, homo sapiens
atggacagcttgctactggcgacctgcgagttgtctcaggtaatgtgacctttgcccctggggaaaccatcaaaccttgttgttagaggtcctggctgacgacgttccggagattgaag

SEQ ID NO: 2447 - DNA, 119 bp, homo sapiens
gttatccaagtgcaactaactgatgcctctggtggaggtactattgggttagatcgaattgcaaatattttattcctgccaatgatgatccttatggtacagtagcctttgctcagatg

SEQ ID NO: 2448 - DNA, 119 bp, homo sapiens
gtggaggtactattgggttagatcgaattgcaaatattattattcctgccaatgatgatccttatggtaagtagcctttgctcagatggtttatcgtgttcaagagcctctggaaagaa

SEQ ID NO: 2449 - DNA, 119 bp, homo sapiens
aaatattattattcctgccaatgatgatccttatggtacagtagcctttgctcagatggtttatcgtgtcaagagcctctggaaagaagttcctgtgctaatataactgtcaggcgaag

SEQ ID NO: 2450 - DNA, 119 bp, homo sapiens
cggagggcactttggtcggctgttgttgttctacagtacttccgacattgatgtagtggctctggcaatgaggaaggtcaagatttactgtcctactatgaatctccaattcaaggggt

SEQ ID NO: 2451 - DNA, 119 bp, homo sapiens
ggctctggcaatggaggaaggtcaagatttactgtcctactatgaatctccaattcaaggggtgcctgaccactttggagaacttggatgaatgtctctgccgtgggggagcccctgta

SEQ ID NO: 2452 - DNA, 119 bp, homo sapiens
aggggtgcctgacccactttggagaacttggatgaatgtctctgccgtgggggagcccctgtatacctggccactttgtgccttaaggaacaagcttgctcagcgttttcatttttcag

SEQ ID NO: 2453 - DNA, 119 bp, homo sapiens
cctgtatacctgtgccactttgtgccttaaggaacaagcttgctcagcgttttcatttttcagtgcttcgagggtccccagtgtttctggatgacatcatggatcagcccagctgtcaa

SEQ ID NO: 2454 - DNA, 119 bp, homo sapiens
tttcagtgcttctgagggtccccagtgtttctggatgacatcatggatcagcccagctgtcaacaattcgacttctggacctacaggaaaaacatgaccagggtagcatctctttttag

SEQ ID NO: 2455 - DNA, 119 bp, homo sapiens
tgtcaacaattcagacttctggacctacaggaaaaacatgaccagggtagcatctctttttagtggtcagctgtggctgggagtgactatgagcctgtgacaaggcaatgggccataat

SEQ ID NO: 2456 - DNA, 119 bp, homo sapiens
ttttagtggtcaggctgtggctgggagtgactatgagcctgtgacaaggcaatgggccataatgcaggaggtgatgaattcgcaaatctcacagtgtctattcttcctgatgatttccc

SEQ ID NO: 2457 - DNA, 119 bp, homo sapiens
cataatgcaggaaggtgatgaattcgcaaatctcacagtgtctattcttcctgatgatttcccagagatgatgagagttttctaatttctctccttgaagttcacctcatgaacatttc

SEQ ID NO: 2458 - DNA, 119 bp, homo sapiens
tttcccagagatggatgagagttttctaatttctctccttgaagttcacctcatgaacatttcagccagttgaaaaatcagccaaccataggacagccaaatatttctacagttgtcat

SEQ ID NO: 2459 - DNA, 119 bp, homo sapiens
catttcagccagtttgaaaaatcagccaaccataggacagccaaatatttctacagttgtcatagcactaatggtgatgcctttggagtgtttgtgatctacaatattagtcccaatac

SEQ ID NO: 2460 - DNA, 119 bp, homo sapiens
tgtcatagcactaaatggtgatgcctttggagtgtttgtgatctacaatattagtcccaatacttccgagatggcttatttgttgaagttcaggagcagccccaaaccttggtggagct

SEQ ID NO: 2461 - DNA, 119 bp, homo sapiens
caatacttccgaagatggcttatttgttgaagttcaggagcagccccaaaccttggtggagctgatgatcacaggacagggggcagcttaggtcaagtggcagtcgaatggcgtgttgt

SEQ ID NO: 2462 - DNA, 119 bp, homo sapiens
ggagctgatgatacacaggacagggggcagcttaggtcaagtggcagtcgaatggcgtgttgttggtggacagctactgaaggtttagattttataggtgctggagagattctgacctt

SEQ ID NO: 2463 - DNA, 119 bp, homo sapiens
gtgaaaccaaaaagacagtcattttaaccatcttggatgactctgaaccagaggatgacgaaagtatcaagttagtttggtgtacactgaaggtggaagtagaattttgccaagctccg

SEQ ID NO: 2464 - DNA, 119 bp, homo sapiens
aaccagaggatgacgaaagtatcatagttagtttggtgtacactgaaggtggaagtagaattttgccaactccgacactgttagagtgaacattttggccaatgacaatgtggcaggaa

SEQ ID NO: 2465 - DNA, 119 bp, homo sapiens
aaggtggaagtagaattttgccaagctccgacactgttagagtgaacattttggccaatgacaatgtggaggaattgttagctttcagacagcttccagatctgtcataggtcatgaag

SEQ ID NO: 2466 - DNA, 119 bp, homo sapiens
gagaaattttacaattccatgtgataagaactttccctggtcgaggaaatgttactgttaactggaaaatattgggcaaaatctagaactcaattttgctaactttagcggacaacttt

SEQ ID NO: 2467 - DNA, 119 bp, homo sapiens
caattccatgtgataagaactttccctggtcgaggaaatgttactgttaactggaaaattattgggcaaatctagaactcaattttgctaactttagcggacaacttttctttcctgag

SEQ ID NO: 2468 - DNA, 119 bp, homo sapiens
gagttccaccagccggaatcgccctgcttgatgctcaaggatatgcagctgtcctcacagtagaagccatgatgaaccacatggagttttaaattttgctctttcatcaagatttgtgt

SEQ ID NO: 2469 - DNA, 119 bp, homo sapiens
tagaagccagtgatgaaccacatggagttttaaattttgctctttcatcaagatttgtgttactacaagggctaacataacaattcagcttttcatcaacagagaatttggatctctag

SEQ ID NO: 2470 - DNA, 119 bp, homo sapiens
gagctatcaatgtcacatataccacggttcctggaatgctgagtctgaagaaccaaacagtaggaaaccagcagagccagaagttgattttgtccctatcattggctttctgattttag

SEQ ID NO: 2471 - DNA, 119 bp, homo sapiens
ctgaagaaccaaacagtaggaaacctagcagagccagaagttgattttgtccctatcattggctttctgttttagaagaaggggaaacagcagcagccatcaacattaccattcttgag

SEQ ID NO: 2472 - DNA, 119 bp, homo sapiens
gtttgaagtaaatgaaacccatggaagtttaacattggtagcccagaggagcagagaacctcttggccagtttccttatttgtgtatgctcagaatttggaagcacaagtggggctgga

SEQ ID NO: 2473 - DNA, 119 bp, homo sapiens
catggaagtttaacattggtagcccagaggagcagagaacctcttggccatgtttccttatttgtgtatctcagaatttggaagcacaagtggggctggattatatcttcaccccaatg

SEQ ID NO: 2474 - DNA, 119 bp, homo sapiens
attcttcattttgctgatggagaaaggtataaaaatgtcaatatcatgattcttgatgatgacattccaaaggagatgaaaaatttcagctgattttaacaaatccttctcctggacta

SEQ ID NO: 2475 - DNA, 119 bp, homo sapiens
aaaggtataaaaatgtcaatatcatgattcttgatgatgacattccagaaggagatgaaaaatttcagcgattttaacaaatccttctcctggactagagctagggaaaaatacaatag

SEQ ID NO: 2476 - DNA, 119 bp, homo sapiens
ccttaattattgtccttgctaatgatgacggccctggagttctatcatttaacaacagtgagcacttttcctaagagagccaacagctctctacgtccaggagagtgttgcagtattgt

SEQ ID NO: 2477 - DNA, 119 bp, homo sapiens
tttaacaacagtgagcactttttcctaagagagccaacagctctctacgtccaggagagtgttgcagtatgtacattgttcgggaacctgcacaaggattgtttggaacagtgacagtt

SEQ ID NO: 2478 - DNA, 119 bp, homo sapiens
cgtccaggagagtgttgcagtattgtacattgttcgggaacctgcacaaggattgtttggaacagtgacgttcagttcattgtgacagaagtgaattcctcaaatgaatctaaagatct

SEQ ID NO: 2479 - DNA, 119 bp, homo sapiens
aaggattgtttggaacagtgacagttcagttcattgtgacagaagtgaattcctcaaatgaatctaaagtctgactccttccaaaggctatattgttttagaagaaggtgttcgattca

SEQ ID NO: 2480 - DNA, 119 bp, homo sapiens
gccctacaaatatctgccatattagacacggaaccagaaatggatgagtattttgtttgcaccttgtttatccaactggaggtgctagactaggggtgcatgttcaaaccctgataaca

SEQ ID NO: 2481 - DNA, 119 bp, homo sapiens
ttgcaccttgtttaatccaactggaggtgctagactaggggtgcatgttcaaaccctgataacagttttcaaaaccaggcccctttggggctattcagtatctctgcagttgaaaatag

SEQ ID NO: 2482 - DNA, 119 bp, homo sapiens
agccacctccatagacatcgaagaagccaataggaccgtgtatttaaatgtatctcgaactaatggcatgatttggctgtgagtgtgcagtgggagacagtatctgaaacagcctttgg

SEQ ID NO: 2483 - DNA, 119 bp, homo sapiens
cctccatagacatcgaagaagccaataggaccgtgtatttaaatgtatctcgaactaatggcattgattggctgtgagtgtgcagtgggagacagtatctgaaacagcctttggcatga

SEQ ID NO: 2484 - DNA, 119 bp, homo sapiens
ggggaatggatgttgtgttttccgtatttcaaagttttttggatgaatcagcttctggctggtgtttcttactttggaaaatttaatatatggtataatgttaagaaaatcatctgtta

SEQ ID NO: 2485 - DNA, 119 bp, homo sapiens
ttggatgaatcagcttctggctggtgtttctttactttggaaaatttaatatatggtataatgttaagaaatcatctgttactgtttaccgatggcaggggatttttattccagttgag

SEQ ID NO: 2486 - DNA, 119 bp, homo sapiens
gatttaaatatagaaaatcctaaaacttgtgaggcctttaatattggtttttctccctactttgtgattctcatgaagaaagaaatgaagaaaagccttctcttaacagtgtgtttaca

SEQ ID NO: 2487 - DNA, 119 bp, homo sapiens
tgtgaggcctttaatattggtttttctccctactttgtgattactcatgaagaaagaaatgaagaaaagcttctcttaacagtgtgtttacattcacatctggatttaaattattcctg

SEQ ID NO: 2488 - DNA, 119 bp, homo sapiens
gtcttcaggtggaatggaggaagcttcgtgttgcatcaaaaactccctgtccgaggtgtgctgaccgtgccttgttcaacaagggaggctctgtgttcttagccatttcccaggctaat

SEQ ID NO: 2489 - DNA, 119 bp, homo sapiens
gtccgaggtgtgctgaccgtggccttgttcaacaagggaggctctgtgttcttagccatttcccaggctatgccaggctaaactcccttttattcagatggtctggcagtgggtttatt

SEQ ID NO: 2490 - DNA, 119 bp, homo sapiens
ttcttagccatttcccaggctaatgccaggctaaactcccttttattcagatggtctggcagtgggtttttaactttcaagaggtgcctgtcagtgggacaacagaagttgaggctttg

SEQ ID NO: 2491 - DNA, 119 bp, homo sapiens
agatggtctggcagtgggtttattaactttcaagaggtgcctgtcagtgggacaacagaagttgaggcttgtcttcagccaatgatatttacctaatatttgccgaaaatgtctttcta

SEQ ID NO: 2492 - DNA, 119 bp, homo sapiens
gagatcagaattcaattgatattttcatctgggagatgggacagtcttccttcaggtattttcagtctgagattttgctgctgttaacagaatccactccttcacaccagcctcaggaa

SEQ ID NO: 2493 - DNA, 119 bp, homo sapiens
atcagaattcaattgatattttcatctgggagatgggacagtcttccttcaggtattttcagtctgtagttttgctgctgttaacagaatccactccttcacaccagcctcaggaatag

SEQ ID NO: 2494 - DNA, 119 bp, homo sapiens
cccacatacttcttattggccaagatatgtctgctctttactgctggaattcggagcgtaatcaattctttttgttctggaagtaccttctgcttatgatgtggcttctgttacagtaa

SEQ ID NO: 2495 - DNA, 119 bp, homo sapiens
tcggagcgtaatcaattctcttttgttctggaagtaccttctgcttatgatgtggcttctgttacagtaagtcccttaattcaagcaagaatttaatagctctagtgggagctcattca

SEQ ID NO: 2496 - DNA, 119 bp, homo sapiens
tgtggcttctgttacagtaaagtcccttaattcaagcaagaatttaatagctctagtgggagctcattccatatatatgagctagcctacatttccagccattctgactttattcctag

SEQ ID NO: 2497 - DNA, 119 bp, homo sapiens
ttcaggtgaactgatatttgaacctggtgagagagaagctacaatagcagtaaatatccttgatgatacgttccagaaaaagaagaatccttcaaagttcaacttaaaaatcccaaagg

SEQ ID NO: 2498 - DNA, 119 bp, homo sapiens
aatagcagtaaatatccttgatgatacagttccagaaaaagaagaatccttcaaagttcaacttaaaaacccaaaggaggagcagagattggcattaatgattctgtaacaataaccat

SEQ ID NO: 2499 - DNA, 119 bp, homo sapiens
agaatccttcaaagttcaacttaaaaatcccaaaggaggagcagagattggcattaatgattctgtaacataaccattctgtctaatgatgatgcctatggaattgttgcatttgctca

SEQ ID NO: 2500 - DNA, 119 bp, homo sapiens
aattcattatataagcaagtggaagaaatggagcaagatagcctagtaaccttgaacgttgaacgcttaaaggaacatatggccgtataaccatagcatgggaagctgatggaagtatt

SEQ ID NO: 2501 - DNA, 119 bp, homo sapiens
atggagcaagatagcctagtaaccttgaacgttgaacgcttaaaaggaacatatggccgtataaccatacatgggaagctgatggaagtattagtgatatatttcctacctcaggagtg

SEQ ID NO: 2502 - DNA, 119 bp, homo sapiens
attttatttactgaaggccaggtactgtcaacaatcactctaactattcttgctgataatataccagagtatcagaggttgtgattgtaaccctcacccgtatcaccacagaaggggtt

SEQ ID NO: 2503 - DNA, 119 bp, homo sapiens
attcttgctgataatataccagagttatcagaggttgtgattgtaaccctcacccgtatcaccacagaagggttgaggactcatacaaaggtgctactattgatcaggacagaagcaag

SEQ ID NO: 2504 - DNA, 119 bp, homo sapiens
accctcacccgtatcaccacagaaggggttgaggactcatacaaaggtgctactattgatcaggacagagcaagtctgttataacaactttgcccaatgactcaccttttggcttggtg

SEQ ID NO: 2505 - DNA, 119 bp, homo sapiens
ggtgctactattgatcaggacagaagcaagtctgttataacaactttgcccaatgactcaccttttggctggtgggctggcgtgctgcgtctgtcttcattagagtagcagagcctaaa

SEQ ID NO: 2506 - DNA, 119 bp, homo sapiens
aaaacaccaccactcttcagttacaaatagctcgagataaaggactacttggggatattgccattcactgagagctcaacccaatttcttactgcatgtcgataatcaagctactgaga

SEQ ID NO: 2507 - DNA, 119 bp, homo sapiens
ggactacttggggatattgccattcacttgagagctcaacccaatttcttactgcatgtcgataatcaactactgagaatgaagattatgtattgcaagaaacaataataataatgaaa

SEQ ID NO: 2508 - DNA, 119 bp, homo sapiens
caatttcttactgcatgtcgataatcaagctactgagaatgaagattatgtattgcaagaaacaataatataatgaaagaaaacataaaagaagctcatgccgaagtttccattttgcc

SEQ ID NO: 2509 - DNA, 119 bp, homo sapiens
gatgaccttcctgaattggaggaaggatttattgtcactatcactgaggtgaacctggtgaactctgactctctacaggacagccaagtgtgcggaggcccggaatggaaatagctgag

SEQ ID NO: 2510 - DNA, 119 bp, homo sapiens
gtgaactctgacttctctacaggacagccaagtgtgcggaggcccggaatggaaatagctgagataatgtagaagaaaatgacgatcccagaggaatttttatgtttcatgttactaga

SEQ ID NO: 2511 - DNA, 119 bp, homo sapiens
ggcgctggggaagttattactgcctatgaggtgcctccacccttgaacgttcttcaagttcctgtagtcggctggctggaagctttggggcagtaaatgtttattggaaagcatcacca

SEQ ID NO: 2512 - DNA, 119 bp, homo sapiens
tgcctccacccttgaacgttcttcaagttcctgtagtccggctggctggaagctttggggcagtaaatgttattggaaagcatcaccagacagtgctggcctggaagactttaaaccat

SEQ ID NO: 2513 - DNA, 119 bp, homo sapiens
tgtagtccggctggctggaagctttggggcagtaaatgtttattggaaagcatcaccagacagtgctggctggaagactttaaaccatctcatgggattcttgaatttgcagataaaca

SEQ ID NO: 2514 - DNA, 119 bp, homo sapiens
gttactgcaatgatagaaatcaccataattgatgatgctgaatttgaattgacagagacgttcaatattccttgatcagtgttgctggaggtggcagacttggtgatgatgttgtggta

SEQ ID NO: 2515 - DNA, 119 bp, homo sapiens
ttcaatatttccttgatcagtgttgctggaggtggcagacttggtgatgatgttgtggtaactgttgttttccacaaaatgattctccatttggagtatttggatttgaagaaaagact

SEQ ID NO: 2516 - DNA, 119 bp, homo sapiens
gtaatgattgatgaatccctttcatccgatgaccctgattcatatgtgacattgacggttgtccggtcccaggaggaaaaggaaccgtccgacttgagtggaccatagatgagaaggct

SEQ ID NO: 2517 - DNA, 119 bp, homo sapiens
gtgacattgacggttgtccggtccccaggaggaaaaggaaccgtccgacttgagtggaccatagatgagaggctaaacataaccttagtcctttgaatgggacccttcattttgatgag

SEQ ID NO: 2518 - DNA, 119 bp, homo sapiens
gtagtgcatcaataattattcggggtgataagcgagcatcaggagaagttgggatagctccgtcatctagcacatcctcattggggaaccctcagcaaaatataatggtaccgctatta

SEQ ID NO: 2519 - DNA, 119 bp, homo sapiens
tgcatcaataattattcggggtgataagcgagcatcaggagaagttgggatagctccgtcatctaggcaatcctcattggggaaccctcagcaaaatataatggtaccgctattatcag

SEQ ID NO: 2520 - DNA, 119 bp, homo sapiens
ccttgttcgaggcccagggattttgggggaggtcacagtgttctggaggatattccctccttccgtggggaatttgctgaaacatcaggaaaactgacaatgcgagacgaacagtctgc

SEQ ID NO: 2521 - DNA, 119 bp, homo sapiens
attttgggggaggtcacagtgttctggaggatattccctccttccgtgggggaatttgctgaaacatcagaaaactgacaatgcgagacgaacagtctgcagtcattgtagtaatacag

SEQ ID NO: 2522 - DNA, 119 bp, homo sapiens
gctttgaacgatgacattcccgaggaaaaaagcttctatgagtttcagctcactgcagtcagtgagggagagttctgagtgaatccagcagcactgccaacatcacggtggtggccagc

SEQ ID NO: 2523 - DNA, 119 bp, homo sapiens
gcttctatgagtttcagctcactgcagtcagtgagggaggagttctgagtgaatccagcagcactgccacatcacggtggtggccagcgactctccctatggccgatttgccttttcac

SEQ ID NO: 2524 - DNA, 119 bp, homo sapiens
tgagggaggagttctgagtgaatccagcagcactgccaacatcacggtggtggccagcgactctccctaggccgatttgccttttcacatgagcaacttcgagtgtcagaagcacagag

SEQ ID NO: 2525 - DNA, 119 bp, homo sapiens
gttaacatcacaatcatccgttccagtggagattttggccatgtgcgactctggtacaagacgatgagcggacagcggaagcaggcttggattttgttcctgcagcaggggagctcctc

SEQ ID NO: 2526 - DNA, 119 bp, homo sapiens
caagacgatgagcgggacagcggaagcaggcttggattttgttcctgcagcaggggagctcctctttgagcaggggagatgaggaaaagtctgcatgttgaaatccttgatgatgacta

SEQ ID NO: 2527 - DNA, 119 bp, homo sapiens
agctcctctttgaagcaggggagatgaggaaaagtctgcatgttgaaatccttgatgatgactatcctgaggcccagaggaattttctctaacaattacaaaggtggaactccagggaa

SEQ ID NO: 2528 - DNA, 119 bp, homo sapiens
agggtatgattttaccattcaagaaaatggacttcagatagatcaacctcctgaaataggaaacatctcattgttcgcatcataataatgaaaaatgataacgcagaaggcatcattga

SEQ ID NO: 2529 - DNA, 119 bp, homo sapiens
gacttcagatagatcaacctcctgaaataggaaacatctccattgttcgcatcataataatgaaaaatgtaacgcagaaggcatcattgaatttgacccaaagtatactgccttcgaag

SEQ ID NO: 2530 - DNA, 119 bp, homo sapiens
tggaggaagatgttgggctgatcatgatcccagtggtgaggctacatggaacttatggctatgtgacagtgatttcatctctcagagctcctctgccagtcccggaggtgttgattaca

SEQ ID NO: 2531 - DNA, 119 bp, homo sapiens
ctacatggaacttatggctatgtgacagctgatttcatctctcagagctcctctgccagtcccggaggtttgattacattttgcatggcagtacagtcacctttcagcatgggcaaaac

SEQ ID NO: 2532 - DNA, 119 bp, homo sapiens
tcagagctcctctgccagtcccggaggtgttgattacattttgcatggcagtacagtcacctttcagcagggcaaaacttaagttttataaatatctccatcattgatgacaatgaaag

SEQ ID NO: 2533 - DNA, 119 bp, homo sapiens
tgaatttgaggagcccattgaaattctactcactggagctactggaggagcggtccttgggcgccacctgtgagcagaatcataatagctaagagtgactctccctttggagttataag

SEQ ID NO: 2534 - DNA, 119 bp, homo sapiens
cggtccttgggcgccacctagtgagcagaatcataatagctaagagtgactctccctttggagttataagtttctcaatcaaagcaaaatttctattgctaatcccaattccacaatga

SEQ ID NO: 2535 - DNA, 119 bp, homo sapiens
tctccctttggagttataaggtttctcaatcaaagcaaaatttctattgctaatcccaattccacaatgttttatcactggtgctggagcggactggaggactcttgggagagattcag

SEQ ID NO: 2536 - DNA, 119 bp, homo sapiens
gtgaactgggagacagtaggacccaactctcaagaagccttactgccacagaatagagacattgcagaccagtgagcgggttgttctattttggagaaggagaaggaggagtgagaacc

SEQ ID NO: 2537 - DNA, 119 bp, homo sapiens
attgcagacccagtgagcgggttgttctattttggagaaggagaaggaggagtgagaaccataattctgcaatctatcctcatgaagaaattgaagttgaagagacattcattattaaa

SEQ ID NO: 2538 - DNA, 119 bp, homo sapiens
ataattctgacaatctatcctcatgaagaaattgaagttgaagagacattcattattaaacttcatctttgaaaggagaagctaaattagactccagagctaaagatgttacattaacc

SEQ ID NO: 2539 - DNA, 119 bp, homo sapiens
atacaagagtttggtgacccaaatggagttgttcagtttgctcctgaaactttgtctaagaagacttatcagagcctctggctctggaagggcccctgctcattaccttctttgtcaga

SEQ ID NO: 2540 - DNA, 119 bp, homo sapiens
gttcagtttgctcctgaaactttgtctaagaagacttattcagagcctctggctctggaagggcccctgtcattaccttctttgtcagaagagtcaagggcacctttggagagattatg

SEQ ID NO: 2541 - DNA, 119 bp, homo sapiens
gtttactgggaattaagtagtgagtttgacattactgaagactttctttccaccagtggatttttcaccttgctgatggagagagtgaagctagctttgatgttcatttgctaccagat

SEQ ID NO: 2542 - DNA, 119 bp, homo sapiens
atttttcaccattgctgatggagagagtgaagctagctttgatgttcatttgctaccagatgaggtaccgagatagaggaagattatgtgatccagcttgtttctgtagagggaggagc

SEQ ID NO: 2543 - DNA, 119 bp, homo sapiens
atgaggtacctgagatagaggaagattatgtgatccagcttgtttctgtagagggaggagccgaactggtctggagaagagtatcacatggttctctgtttatgcaaatgatgacccac

SEQ ID NO: 2544 - DNA, 119 bp, homo sapiens
gccgaactggatctggagaagagtatcacatggttctctgtttatgcaaatgatgacccacatggagtattgccctgtattcggatcgccagtcaatacttattgggcagaaccttatt

SEQ ID NO: 2545 - DNA, 119 bp, homo sapiens
acatggagtatttgccctgtattcggatcgccagtcaatacttattgggcagaaccttattagatccatcaaattaacataacccggcttgctggaacatttggagatgtggctgttgg

SEQ ID NO: 2546 - DNA, 119 bp, homo sapiens
ttagatccatccaaattaacataacccggcttgctggaacatttggagatgtggctgttgggcttcgaaatcatcggatcataaagaacagccgattgttaccgaaaatgcagagaggc

SEQ ID NO: 2547 - DNA, 119 bp, homo sapiens
gggcttcgaatatcatcggatcataaagaacagccgattgttaccgaaaatgcagagaggcagctggtgtcaaagatggtgccacatataaagtggacgtggtgccaataaagaatcag

SEQ ID NO: 2548 - DNA, 119 bp, homo sapiens
gtcttcctatcactgggctctaatttcactttgcaactggtgactgtgatgcttgtcggtggacgtttcatggaatgccaacaattcttcaggaagcaaaatctgctgtccttccagtc

SEQ ID NO: 2549 - DNA, 119 bp, homo sapiens
ttcactttgcaactggtgactgtgatgcttgtcggtggacgtttctatggaatgccaacaattcttcagaagcaaaatctgctgtccttccagtctctgagaaagctgccaattctcag

SEQ ID NO: 2550 - DNA, 119 bp, homo sapiens
gtcggatttgaatccactgcttttcaactcatgaacatcactgctggcacaagccacgttatgatttctggagaggcacatatggagctctctcggttgcctggaccactggatatgct

SEQ ID NO: 2551 - DNA, 119 bp, homo sapiens
acgttatgatttctaggagaggcacatatggagctctctcggttgcctggaccactggatatgctcctggttagaaattcctgaattcattgttgttggcaacatgaccccaacactgg

SEQ ID NO: 2552 - DNA, 119 bp, homo sapiens
ggagcctttcattttcccacggtgaacaaaggaaaggagttttcctgtggacgtttcctagccctggttgccagaggcctttgttcttcacctatcaggagtgcagagcagtgctcctg

SEQ ID NO: 2553 - DNA, 119 bp, homo sapiens
ccacggtgaacaaaggaaaggagttttcctgtggacgtttcctagccctggttggccagaggcctttgtcttcacctatcaggagtgcagagcagtgctcctggcggagctcaactccg

SEQ ID NO: 2554 - DNA, 119 bp, homo sapiens
atcaggtttcattgttgctgaaattgaaccaatgggcgtcttccaattttccactagctcaagaaatatatagtgtcagaagatacacagatgatcagattacatgtacaaagactatt

SEQ ID NO: 2555 - DNA, 119 bp, homo sapiens
tcaagaaatatcatagtgtcagaagatacacagatgatcagattacatgtacaaagactatttgggttcacagcgatcttattaaagtttcttatcagaccactgcaggaagcgccaag

SEQ ID NO: 2556 - DNA, 119 bp, homo sapiens
tatttgggttccacagcgatcttattaaagtttcttatcagaccactgcaggaagcgccaagccactggagattttgagcctgttcagaatggggaactgttttttcaaaaattccaaa

SEQ ID NO: 2557 - DNA, 119 bp, homo sapiens
caagccactggaagattttgagcctgttcagaatggggaactgttttttcaaaaattccaaactgaggtgattttgaaataaccattattaatgatcagctttctgagatagaagaatt

SEQ ID NO: 2558 - DNA, 119 bp, homo sapiens
caaactgaggttgattttgaaataaccattattaatgatcagctttctgagatagaagaatttttttacttaaccttacttcagtagaaattaggggattacaaaagtttgatgttaat

SEQ ID NO: 2559 - DNA, 119 bp, homo sapiens
aatttttttacattaaccttacttcagtagaaattaggggattacaaaagtttgatgttaattggagccacgcctgaatctagatttcagtgttgcagtgattacaatattggataatg

SEQ ID NO: 2560 - DNA, 119 bp, homo sapiens
taattggagcccacgcctgaatctagatttcagtgttgcagtgattacaatattggataatgatgacctgcaggaatggatatttccttccccgagacaactgtggctgtagcagttga

SEQ ID NO: 2561 - DNA, 119 bp, homo sapiens
aatgatgacctggcaggaatggatatttccttccccgagacaactgtggctgtagcagttgacacaacttcattcctgtagaaactgaatccaccacatacctcagcacaagcaagacg

SEQ ID NO: 2562 - DNA, 119 bp, homo sapiens
ttgacacaactctcattcctgtagaaactgaatccaccacatacctcagcacaagcaagacgactaccatctgcagccaaccaacgtggttgccattgttactgaggcaactggtgtat

SEQ ID NO: 2563 - DNA, 119 bp, homo sapiens
gacgactaccattctgcagccaaccaacgtggttgccattgttactgaggcaactggtgtatctgccatcctgagaaacttgtcacccttcatggcacacctgctgtgtctgaaaagcc

SEQ ID NO: 2564 - DNA, 119 bp, homo sapiens
gtatctgccatccctgagaaacttgtcacccttcatggcacacctgctgtgtctgaaaagcctgatgtgccactgtaactgccaatgtttccattcatggaacattcagccttgggcca

SEQ ID NO: 2565 - DNA, 119 bp, homo sapiens
agcctgatgtggccactgtaactgccaatgtttccattcatggaacattcagccttgggccatccattgttatattgaagaggagatgaagaatggcacattcaacactgcagaagttc

SEQ ID NO: 2566 - DNA, 119 bp, homo sapiens
gccatccattgtttatattgaagaggagatgaagaatggcacattcaacactgcagaagttcttatccgagaactggtgggtttactggcaatgtcagcataacagttaaaactttcgg

SEQ ID NO: 2567 - DNA, 119 bp, homo sapiens
gttcttatccgaagaactggtgggtttactggcaatgtcagcataacagttaaaactttcggtgaaagagtgctcagatggaaccaaatgcattgccctttcgtggtatctatgggatt

SEQ ID NO: 2568 - DNA, 119 bp, homo sapiens
tcggtgaaagatgtgctcagatggaaccaaatgcattgccctttcgtggtatctatgggatttccaaccaacatgggcagttgaagaagaagactttgaagaacaaactcttaccctta

SEQ ID NO: 2569 - DNA, 119 bp, homo sapiens
gatttccaacctaacatgggcagttgaagaagaagactttgaagaacaaactcttacccttatattcctgatggagaaagagaacgtaaagtatcagttcaaattttggatgatgatga

SEQ ID NO: 2570 - DNA, 119 bp, homo sapiens
cttatattcctagatggagaaagagaacgtaaagtatcagttcaaattttggatgatgatgagcctgagggcaggaattcttctacgtgtttctcacaaaccctcaagggggagcacag

SEQ ID NO: 2571 - DNA, 119 bp, homo sapiens
atgagcctgaggggcaggaattcttctacgtgtttctcacaaaccctcaagggggagcacagattgtggggagaaggatgatactggatttgcagcttttgccatggttattattacag

SEQ ID NO: 2572 - DNA, 119 bp, homo sapiens
ggcctttgaagatgtcaaggtcttttggcgagtcacacttaacaaaacagtcgtcgtgctccagaaggaggggtaaacctggtggaggaacttcagtctgtgtcagggaccacaacctg

SEQ ID NO: 2573 - DNA, 119 bp, homo sapiens
gtcgtgctccagaaggatggggtaaacctggtggaggaacttcagtctgtgtcagggaccacaacctgtcaatgggtcaaacaaaatgctttatcagcattgaactcaaaccagaaaag

SEQ ID NO: 2574 - DNA, 119 bp, homo sapiens
gtaccacaggttgaagtgtatttttttgtggaactatatgaagctactgctggagcagcaataaacaacgtgccagattcgcacagattaaaatcttagaaagtgatgaatctcaaagc

SEQ ID NO: 2575 - DNA, 119 bp, homo sapiens
agctactgctggagcagcaataaacaacagtgccagattcgcacagattaaaatcttagaaagtgatgatctcaaagccttgtgtatttttctgtgggttctcggctggcagtggctca

SEQ ID NO: 2576 - DNA, 119 bp, homo sapiens
cacagattaaaatcttagaaagtgatgaatctcaaagccttgtgtatttttctgtgggttctcggctggagtggctcacaagaaggccactttaatcagtctgcaggtggccagagatt

SEQ ID NO: 2577 - DNA, 119 bp, homo sapiens
gtgtatttttctgtgggttctcggctggcagtggctcacaagaaggccactttaatcagtctgcaggtgccagagattctgggacaggactaatgatgtctgttaactttagtacccag

SEQ ID NO: 2578 - DNA, 119 bp, homo sapiens
gagttgaggagtgctgaaacaattggtcgtaccatcatatctccagctatttctggaaaggattttgtgtaactgaaggcacattggtctttgaacctggccagagaagcactgtattg

SEQ ID NO: 2579 - DNA, 119 bp, homo sapiens
aaggattttgtgataactgaaggcacattggtctttgaacctggccagagaagcactgtattggatgtctcctaacgccagagacaggatctttaaattcatttcctaaacgcttccag

SEQ ID NO: 2580 - DNA, 119 bp, homo sapiens
gtattggatgtcatcctaacgccagagacaggatctttaaattcatttcctaaacgcttccagattgtctttttgacccaaaaggtggtgccagaattgataaagtgtatgggactgcc

SEQ ID NO: 2581 - DNA, 119 bp, homo sapiens
ttccagattgtcctttttgacccaaaaggtggtgccagaattgataaagtgtatgggactgccaacatcctcttgtctcagatgcagattcgcaggccatttgggggcttgcagatcag

SEQ ID NO: 2582 - DNA, 119 bp, homo sapiens
actgccaacatcactcttgtctcagatgcagattcgcaggccatttgggggcttgcagatcagctacatagcctgtgaatgatgatattctcaacagagtgctccataccatcagcatg

SEQ ID NO: 2583 - DNA, 119 bp, homo sapiens
gatcagctacatcagcctgtgaatgatgatattctcaacagagtgctccataccatcagcatgaaagtgccacagaaaacacagatgaacaactcagtgccatgatgcatttaatagaa

SEQ ID NO: 2584 - DNA, 119 bp, homo sapiens
ataactactgaaggaaaaattcaagctttcagtgttgccagccgaactcttttctatgagattctttgtctcttattaacccaaagcgcaaggacactaggggattcagtcactttgct

SEQ ID NO: 2585 - DNA, 119 bp, homo sapiens
tgttgccagccgaactcttttctatgagattctttgttctcttattaacccaaagcgcaaggacactagggattcagtcactttgctgaagtgactgagaattttgccttttctctgct

SEQ ID NO: 2586 - DNA, 119 bp, homo sapiens
tttgttctcttattaacccaaagcgcaaggacactaggggattcagtcactttgctgaagtgactgagattttgccttttctctgctgactaatgttacttgcggctctcctggtgaaa

SEQ ID NO: 2587 - DNA, 119 bp, homo sapiens
aagcaaaaccatccttgatagttgcccatatttgtcaatattggctcttcactggtatcctcagcaaataatggacacaagtttgaaggaaaggaaggagattacattcgaattccaga

SEQ ID NO: 2588 - DNA, 119 bp, homo sapiens
gctcttcactggtatcctcagcaaatcaatggacacaagtttgaaggaaaggaaggagattacattcgattccagagaggctactggatgtccaggatgcagaaataatggctgggaaa

SEQ ID NO: 2589 - DNA, 119 bp, homo sapiens
aaggaaaggaaggagattacattcgaattccagagaggctactggatgtccaggatgcagaaataatggtgggaaaagtacatgtaaattagtccagtttacagagtatagcagccaac

SEQ ID NO: 2590 - DNA, 119 bp, homo sapiens
ggatgtccaggatgcagaaataatggctgggaaaagtacatgtaaattagtccagtttacagagtatagagccaacagtggtttataagtggaaacaatcttcctaccctaaaaaataa

SEQ ID NO: 2591 - DNA, 119 bp, homo sapiens
gtattatctttgagtgtgaaaggtcagagttcacaactcctgactaatgacaatgaggttctctacaggtttatgctgctgagcctagaattattcctcagacatctctgtgtctcctt

SEQ ID NO: 2592 - DNA, 119 bp, homo sapiens
aggtcagagttcacaactcctgactaatgacaatgaggttctctacaggatttatgctgctgagcctagattattcctcagacatctctgtgtctcctttggaatcaggctgctgcaag

SEQ ID NO: 2593 - DNA, 119 bp, homo sapiens
ctggttgtctgacagtcagttttgcaaagtggttgaggaaactgcagactatgtggaatgtgcctgttccacatgtctgtgtatgctgtctatgctcggactgacaacttgtcttcata

SEQ ID NO: 2594 - DNA, 119 bp, homo sapiens
ctgcagactatgtggaatgtgcctgttcacacatgtctgtgtatgctgtctatgctcggactgacaactgtcttcatacaatgaagccttcttcacttctggatttatatgtatctcag

SEQ ID NO: 2595 - DNA, 119 bp, homo sapiens
tctgtgaatttctggtacgtgctggtgatgaatgatgagcacacagagaggcgatatctgctgtttttcttctgagttggggactaccagcttttgtggtgattctcctcatagttatt

SEQ ID NO: 2596 - DNA, 119 bp, homo sapiens
gctgtttttccttctgagttggggactaccagcttttgtggtgattctcctcatagttattttgaaaggatctatcatcagagcatgtcacagatctatggactcattcatggtgacct

SEQ ID NO: 2597 - DNA, 119 bp, homo sapiens
gtgttttattccaaacgtctatgctgctttgttcactgcagctcttgttcctttgacgtgcctcgtggtgtgttcgtggtgttcatccatgcctaccaggtgaagccacagtggaaagc

SEQ ID NO: 2598 - DNA, 119 bp, homo sapiens
cagctcttgttcctttgacgtgcctcgtggtggtgttcgtggtgttcatccatgcctaccaggtgaagcacagtggaaagcatatgatgatgtcttcagaggaaggacaaatgctgcag

SEQ ID NO: 2599 - DNA, 119 bp, homo sapiens
ggactttatgttttcatggtttatttcattttacacaaccaaatgtgttgccctatgaaggccagttacctgtggaaatgaatgggcatcctggacccagcacagcctttttcacgccc

SEQ ID NO: 2600 - DNA, 119 bp, homo sapiens
aaccaaatgtgttgccctatgaaggccagttacactgtggaaatgaatgggcatcctggacccagcacacctttttcacgcccgggagtggaatgcctcctgctggaggggaaatcagc

SEQ ID NO: 2601 - DNA, 119 bp, homo sapiens
gtggaaatgaatgggcatcctggacccagcacagcctttttcacgcccgggagtggaatgcctcctgctgaggggaaatcagcaagtccacccagaatctcatcggtgctatggaggag

SEQ ID NO: 2602 - DNA, 119 bp, homo sapiens
gtgccacctgactgggagagagcatccttccaacagggcagtcaggccagccctgatttaaagccaagtcacaaaatggagccacgttcccgtcctctggaggatatggccaggggtca

SEQ ID NO: 2603 - DNA, 119 bp, homo sapiens
taaagccaagtccacaaaatggagccacgttcccgtcctctggaggatatggccaggggtcactgatagcgatgaggagtcccaggagtttgatgatttaatatttgcattaaaaactg

SEQ ID NO: 2604 - DNA, 119 bp, homo sapiens
gtgctggtctcagtgtcagtgataatgaatctggtcaaggcagccaggaggggggcaccttgactgactccagatcgtggagctcaggaggatacccatcgccgacactcacctgtagc

SEQ ID NO: 2605 - DNA, 119 bp, homo sapiens
gggcaccttgactgactcccagatcgtggagctcaggaggatacccatcgccgacactcacctgtagcactcactaaccattcgactgagcacactttcatatttgtatcagcttttgt

SEQ ID NO: 2606 - DNA, 119 bp, homo sapiens
gacactcacctgtagcacctcactaaccattcgactgagcacactttcatatttgtatcagcttttgtgtaaaactctctaagtacatccacctgtgtaataggaacctgtgaattgta

SEQ ID NO: 2607 - DNA, 119 bp, homo sapiens
ttgtatcagcttttgtgctaaaactctctaagtacatccacctgtgtaataggaacctgtgaattgtacggatgattaatacaaacgtgattgttgtatttggagtataaattactgat

SEQ ID NO: 2608 - DNA, 119 bp, homo sapiens
gaacctgtgaattgtactggatgattaatacaaacgtgattgttgtatttggagtataaattactgatttatgtgacctgaaaattcactgctataagaaaggtggagtcagtttgtat

SEQ ID NO: 2609 - DNA, 119 bp, homo sapiens
agtataaattactgattgtatgtgacctgaaaattcactgctataagaaaggtggagtcagtttgtatcgttaataggatgttcatattccaaggatattagttgtttttttaatcatc

SEQ ID NO: 2610 - DNA, 119 bp, homo sapiens
tggagtcagtttgtatcagttaataggatgttcatattccaaggatattagttgtttttttaatcatccatatggctaacattgtttaatgaaagtaataatcaataaagcaatagaat

SEQ ID NO: 2611 - DNA, 119 bp, homo sapiens
tggtggggggggaacgatagagaaggaaaaaaaatcaagatttggacaagtgtaacaaattgacttgcaatttttagcatgttattgccattttcaacttctggtttatttgtgctgtt

SEQ ID NO: 2612 - DNA, 119 bp, homo sapiens
acaaattgacttgcaaatttttagcatgttattgccattttcaacttctggtttatttgtgctgttttcacatcagttactatggtatgaatgctgatcaggccagtgcattccgctag

SEQ ID NO: 2613 - DNA, 119 bp, homo sapiens
atttgtgctgttttcaacatcagttactatggtatgaatgctgatcaggccagtgcattccgctaggtatgcatacttgccagaacatacttagattcggtttaaaagaaataagtcct

SEQ ID NO: 2614 - DNA, 119 bp, homo sapiens
aacatctatctttttaaaccaacagaatgcctgctaatttaagaaacagaagttctggaattgagaatatctgacttaatttatactctgtgaaatcaatgaaaaatccaagaataaaa

SEQ ID NO: 2615 - DNA, 119 bp, homo sapiens
acagaagttctggaattgagaataatctgacttaatttatactctgtgaaatcaatgaaaaatccaagataaaaagtacatcttcttttttctaaaaaccaacaaaaagaaacaactaa

SEQ ID NO: 2616 - DNA, 119 bp, homo sapiens
gtgaaatcaatgaaaaatccaagaataaaaagtacatcttcttttttctaaaaaccaacaaaaagaaacactaaattcaatatgtgaatttgtttggatcagattcaggcaagccaacc

SEQ ID NO: 2617 - DNA, 119 bp, homo sapiens
ttctaaaaaccaacaaaaagaaacaactaaattcaatatgtgaatttgtttggatcagattcaggcaagcaaccattgaaaacgttcatgagaatgaaggaaggttgattaagggctgg

SEQ ID NO: 2618 - DNA, 119 bp, homo sapiens
agctgggtattaggcaggcattggttgcatgggccagtgatgtggttatgttagaaaacatacttattttttaaagatgagatagtagaggtgtgaaatgatatgtttgggatttgcct

SEQ ID NO: 2619 - DNA, 119 bp, homo sapiens
cattaactgaaagtataagaacaaaaatgattctaagcaagccagtgaatctggcattaattaaatgtattaaatgtttaactgatgtctatgaaagctagaatattggttttagctca

SEQ ID NO: 2620 - DNA, 119 bp, homo sapiens
ttaattaaatgtaattaaatgtttaactgatgtctatgaaagctagaatattggttttagctcaataggagttctcaagactaaaagaatgtttaaaagccactggataaggtataagc

SEQ ID NO: 2621 - DNA, 119 bp, homo sapiens
gaagctaaattctctaacagctttcaaatcctatgactcttctacttctcaaggtgtgtggtcttccacggcttgagtcatctcttcccaggaaagggtggtgccgtccagccagcaca

SEQ ID NO: 2622 - DNA, 119 bp, homo sapiens
cttctcaaggtgtgtggtcttccactggcttgagtcatctcttcccaggaaagggtggtgccgtccagcagcacatccccagtggtgttactggatgcagcaggacttggatgtagttg

SEQ ID NO: 2623 - DNA, 119 bp, homo sapiens
ccaggaaagggtggtgccgtccagccagcacatccccagtggtgttactggatgcagcaggacttggattagttgcaccccctgggctggggtttccccccggctgatttcctgcggct

SEQ ID NO: 2624 - DNA, 119 bp, homo sapiens
ctgacttggccgactgctgtttctgcttcttctcctcctgcaccttcatcttggcatcgtactcatcagaagcgccttccactccttgcgattgttggtgatcccgtccaacattgggg

SEQ ID NO: 2625 - DNA, 119 bp, homo sapiens
cttctcctcctgcaccttcatcttggcatcgtactcatcagcaagcgccttccactccttgcgattgttgtgatcccgtccaacattggggtgatctcctcgtggaaacgggagaattc

SEQ ID NO: 2626 - DNA, 119 bp, homo sapiens
ctcttgtggaatgtgaaatttatccaccactttgagctcataatacatctgtattccacattttaccagtccagttctgttaggggtaagtcactgaagtgaaatttattaatttcgta

SEQ ID NO: 2627 - DNA, 119 bp, homo sapiens
cactttgagctcataatacatctgtattccacattttaccagctccagttctgttaggggtaagtcactaagtgaaatttattaatttcgtatttatctgcatctggcagctccgcttg

SEQ ID NO: 2628 - DNA, 119 bp, homo sapiens
caagattttctgaatttcttcattgtcacacttcacatgatattttactatgtcctggaaaatatccttctattttcaagtttattcattgactcataggtgtcaggatttaagacaga

SEQ ID NO: 2629 - DNA, 119 bp, homo sapiens
gtcacacttcacatgatattttactatgtcctggaaaatatccttcctattttcaagtttattcattgatcataggtgtcaggatttaagacagaccagcccagaaattgagtcaaaga

SEQ ID NO: 2630 - DNA, 119 bp, homo sapiens
ctccatgagcgtctcatccatttcatcaaagggcttcccatctttacgattgtaaaatgtggccactccacaatttcttccttcttgttcacaatcggcattgaaagcacatttttaat

SEQ ID NO: 2631 - DNA, 119 bp, homo sapiens
gggcttcccatctttacgattgtaaaatgtggccactccaacaatttcttccttcttgttcacaatcggattgaaagcacatttttaatcatccatccagactcatccagaggttcttt

SEQ ID NO: 2632 - DNA, 119 bp, homo sapiens
cttctgcttggtcatgtctaagagacccacagagtatctgtcacagttgaggaaagcacggactgtgtaagggctttgtggaactgtcgttcgatgtccgtaagttcttcaaagacttt

SEQ ID NO: 2633 - DNA, 119 bp, homo sapiens
gagacccacagagtatctgtcacagttgaggaaagcacggactgtgtacagggctttgtggaactgtcgtcgatgtccgtaagttcttcaaagactttgctcccagaccacagcagtat

SEQ ID NO: 2634 - DNA, 119 bp, homo sapiens
ctcttcatctctcttggtgaagtgggatccatccactttattcacagccatgattatggccaccacatcttcccattcattatgggggaagccaagatgttcttggtcttgtactctgt

SEQ ID NO: 2635 - DNA, 119 bp, homo sapiens
cactttattcacagccatgattatggccaccacatccttcccattcattatgggggaagccaagatgttttggtcttgtactctgtgaggatgtccacaaagtcacagaaatgctcatc

SEQ ID NO: 2636 - DNA, 119 bp, homo sapiens
ctcctctgtgttggggacgttagcaatcttcttagagtgtgcgacatggcccacgatgcccatgtccaagggaagacgatctcttggtcgggcatcaccaggcagtcctcgaggacagc

SEQ ID NO: 2637 - DNA, 119 bp, homo sapiens
ccatgtccaaagggaagacgatctcttggtcgggcatcaccaggcagtcctcgaggacagcatccttgtgacattgaaaagcctggtggccagctctgcgatgccattgcgggtccggt

SEQ ID NO: 2638 - DNA, 119 bp, homo sapiens
gcatccttgtggacattgaaaagcctggtggccagctctgcgatgccattgcgggtccggtacatgaacggctcatgcggtctgcctgcaggaggaagcacagcttcttcatgacattg

SEQ ID NO: 2639 - DNA, 119 bp, homo sapiens
gtacatgaacaggctcatgcggtctgcctgcaggaggaagcacagcttcttcatgacattgaagatgcattctctgtctgtaaattctcctgaaagtcccgcaggagatcaaagatgat

SEQ ID NO: 2640 - DNA, 119 bp, homo sapiens
tgaagatgcatttctctgtctgtaaattctcctgaaagtcccgcaggagatcaaagatgatttcgctctctccatgctgctcggggagtggtagttgctgaagtccacggcagcctcct

SEQ ID NO: 2641 - DNA, 119 bp, homo sapiens
atttcgctctcctccatgctgctcggggagtggtagttgctgaagtccacggcagcctccttggccccaggaggtcggagatgagcttggcccggtagtggaggttgtagtactgtttg

SEQ ID NO: 2642 - DNA, 119 bp, homo sapiens
cttggccccaaggaggtcggagatgagcttggcccggtagtggaggttgtagtactgtttggcaaagccatattcgagtccaggaacttctccacctcctctgctgtcacctcgcccat

SEQ ID NO: 2643 - DNA, 119 bp, homo sapiens
tggcaaagccaatattcgagtccaggaacttctccacctcctctgctgtcacctcgcccatggctgggatcccactggctactctgtagaaggactgggacggaggccttccaatggca

SEQ ID NO: 2644 - DNA, 119 bp, homo sapiens
atggctgggaatcccactggctactctgtagaaggactgggacggaggccttccaatggcagttttgcatctgcaacaagtccagtctggacttctctgggtcttgtctgcaaaacata

SEQ ID NO: 2645 - DNA, 119 bp, homo sapiens
ttgggaaaagttaaatttattgaacaggaagtaactgaataaagtcagttacctggactctttacagtagcaatgaatgtaataaattaaagggaaatttctaaagagcaaaaaggata

SEQ ID NO: 2646 - DNA, 119 bp, homo sapiens
ctctttacagtaagcaatgaatgtaataaattaaagggaaatttctaaagagcaaaaaggataagaaatggacaaagctataataaatgtgtcagaagattcacacaagtgagacagcc

SEQ ID NO: 2647 - DNA, 119 bp, homo sapiens
aggataagaaatgggacaaagctataataaatgtgtcagaagattcacacaagtgagacagcctaagaaatggttactatacagaagctcttctgtagaagtctcaacacagtggacca

SEQ ID NO: 2648 - DNA, 119 bp, homo sapiens
acagcctaagaaaatggttactatacagaagctcttctgtagaagtctcaacacagtggaccacaggtggaccttataaataggtggttaaagcttacatcagaacgtaatcttactct

SEQ ID NO: 2649 - DNA, 119 bp, homo sapiens
ggaccacaggtgagaccttataaataggtggttaaagcttacatcagaacgtaatcttactctgctttaagctctcatcccagagaggaacactgcaattttaattgtgtaaacatgga

SEQ ID NO: 2650 - DNA, 119 bp, homo sapiens
tactctgctttagagctctcatcccagagaggaacactgcaattttaattgtgtaaacatggaataagctccaacccagaactccattttcactggaacatataattcatacaaataat

SEQ ID NO: 2651 - DNA, 119 bp, homo sapiens
catggaataagcctccaacccagaactccattttcactggaacatataattcatacaaataattcaaggcaacaaatgggacaaaaccttcggtgcaggtcagctctcactcgacataa

SEQ ID NO: 2652 - DNA, 119 bp, homo sapiens
aataattcaagggcaacaaatgggacaaaaccttcggtgcaggtcagctctcactcgacataagagaaacacactggaagaatgccttataaattccacacatagaagaaaacccacaa

SEQ ID NO: 2653 - DNA, 119 bp, homo sapiens
acataagagaaaccacactggaagaatgccttataaattccacacatagaagaaaacccacaaaactttttcaggggtccaaataaattggacctcaaagaattcaaacccatgcatgc

SEQ ID NO: 2654 - DNA, 119 bp, homo sapiens
ccacaaaactttattcaggggtccaaataaattggacctcaaagaattcaaacccatgcatgcaaaaaacaggaaaatctttagggagctgtcaacctccactgaacaccacagaaatg

SEQ ID NO: 2655 - DNA, 119 bp, homo sapiens
tgatcacaggcagaaactgtatgcacacaccgagtgtggaaaagccctcttgtggaagtcagttatttggtacatcagaaaattctggaaggagagaaaccttgtgaaggtactaaata

SEQ ID NO: 2656 - DNA, 119 bp, homo sapiens
tcagttatttgtgtacatcagaaaattctggaaggagagaaaccttgtgaaggtactaaatatgacaactcttcagtaacagaggatgtccccctgtacccagaatggtgcatgctgtg

SEQ ID NO: 2657 - DNA, 119 bp, homo sapiens
aatatgacaacatcttcagtaacagaggatgtccccctgtacccagaatggtgcatgctgtggagatacctgcaagtagaccgaatgtgagaaagccacaggagtacatgggcctcgcg

SEQ ID NO: 2658 - DNA, 119 bp, homo sapiens
tgtggagataccctgcaagtagaccgaatgtgagaaagccacaggagtacatgggcctcgcggtgcatcgagttcctgccagagaggcccacaggcatgaacatggcagagtgtgaaag

SEQ ID NO: 2659 - DNA, 119 bp, homo sapiens
cgcggtgcatcagagttcctgccagagaggcccacaggcatgaacatggcagagtgtgaaagtcgtctggggaagccaggactctatgccagaaacttcacactggggagaaatcctca

SEQ ID NO: 2660 - DNA, 119 bp, homo sapiens
aaagtcgtctgcgggaagccaggactctatgccagaaacttcacactggggagaaatcctcagtgcaatagtgtagaaatgcctctactaagaactgcttctgattctgaatcacagag

SEQ ID NO: 2661 - DNA, 119 bp, homo sapiens
ctcagtgcaatcagtgtagaaatgcctctactaagaactgcttctgattctgaatcacagagttcacagggagaaaaccacatgaatgtaaaactgtggaaaagttttcagctagaagc

SEQ ID NO: 2662 - DNA, 119 bp, homo sapiens
agagttcacagtggagaaaaccacatgaatgtaaaactgtggaaaagttttcagctagaagccagagcgactgcacaccaaagaattcacactgggagagacatgagaaaacagcaaat

SEQ ID NO: 2663 - DNA, 119 bp, homo sapiens
aagccagagcgcactgcacaccaaagaattcacactgggagagacatgagaaaacagcaaatgcaggaaactttcccttggagatcagagctcactgatctcagagttcatacaggaga

SEQ ID NO: 2664 - DNA, 119 bp, homo sapiens
aaatgcaggaaaactttcccttggagatcagagctcactgatctcagagttcatacaggagaagagcccatacaatcacgagggtggaaccgcctttggcaagaaaacacgccccatta

SEQ ID NO: 2665 - DNA, 119 bp, homo sapiens
gagaagagccctatacaatcacgagggtggaaccgcctttggcaagaaaacacgccccattacccatgaagagctgcacaggagagaaaccctatggaataaataattctggaaagcat

SEQ ID NO: 2666 - DNA, 119 bp, homo sapiens
attacccatgagagagctgcacaggagagaaaccctatggaataaataattctggaaagcattcagcaaaaatgaaacgtcctaatgtgcactatagagaagccctaggaacacaacaa

SEQ ID NO: 2667 - DNA, 119 bp, homo sapiens
gcattcagcaacaaatgaaacgtcctaatgtgcactatagagaagccctaggaacacaacaaatgtggaaaggagagtcagtagcgcaacagaaatgtttctcagaggagaagctttta

SEQ ID NO: 2668 - DNA, 119 bp, homo sapiens
acaaatgtggagaaggagagtcagtagcgcaacagaaatgtttctcagaggagaagcttttaagttaatacttaaaacctgcagaagcacctagtcccacggtcaaaaccaactgcgca

SEQ ID NO: 2669 - DNA, 119 bp, homo sapiens
tttaagttaattacttaaaacctgcagaagcacctagtcccacggtcaaaaccaactgcgcaccagagagctgcatgggaaagtttgtatgttggataaagtgtggttcaccctcaaaa

SEQ ID NO: 2670 - DNA, 119 bp, homo sapiens
cgcaccagagaagctgcatgggaaagtttgtatgttggataaagtgtggttcaccctcaaaactagctcagacatcacagactagagaatgtatactgatcttaaacagtggtcaattt

SEQ ID NO: 2671 - DNA, 119 bp, homo sapiens
aaaactagctccagacatcacagactagagaatgtatactgatcttaaacagtggtcaatttaacaaattaaattctactcccagggacataaaactccataacttaaaccaagctttt

SEQ ID NO: 2672 - DNA, 119 bp, homo sapiens
atttaacaaatgtaaattctactcccagggacataaaactccataacttaaaccaagctttttgtaaaactatcagtgaaaaacaaatgtgcgtgcatctgcagcccaagcctcttcct

SEQ ID NO: 2673 - DNA, 119 bp, homo sapiens
tttttgtaaaaactatcagtgaaaaacaaatgtgcgtgcatctgcagcccaagcctcttcctccccaggctggcgctcagcttgcaaatggacttcccagtacctatgaggaatgaagg

SEQ ID NO: 2674 - DNA, 119 bp, homo sapiens
tcctccccaggcctggcgctcagcttgcaaatggacttcccagtacctatgaggaatgaagggtttccaacccgtcctgagccatccacttgggattcaccctcaccacggccatgact

SEQ ID NO: 2675 - DNA, 119 bp, homo sapiens
aagggtttccatacccgtcctgagccatccacttgggattcaccctcaccacggccatgactctctgtcctgctcccaacctggagctcctaaacccatccccaacccgaacacaacac

SEQ ID NO: 2676 - DNA, 119 bp, homo sapiens
gactctctgtcactgctcccaacctggagctcctaaacccatccccaacccgaacacaacacaaatgcaccctgctccttgttctcacatcactaacattacacacgtgtatctgaatt

SEQ ID NO: 2677 - DNA, 119 bp, homo sapiens
aaggttggggtgatttaagggagtacacagaggggaggaaaacagctgtactctaagtctgaccttgccaatcccggggggatgggggaaagcccatggcattgggaatctcatggggg

SEQ ID NO: 2678 - DNA, 119 bp, homo sapiens
tctgaccttgcccaatcccggggggatgggggaaagcccatggcattgggaatctcatgggggcgcacccagttcctcagctcactcccgcgcccactgcaggcccttcccatgctcac

SEQ ID NO: 2679 - DNA, 119 bp, homo sapiens
tgggggcgcaccccagttcctcagctcactcccgcgcccactgcaggcccttcccatgctcacaggggttcacccagggtctctccctccgtgccagaggaatcctacccaggcctgag

SEQ ID NO: 2680 - DNA, 119 bp, homo sapiens
gctcacaggggtctcacccagggtctctccctccgtgccagaggaatcctacccaggcctgagtgcctcatccagatgcacagccccaggtctcctcttgctgagacagctcctcctcc

SEQ ID NO: 2681 - DNA, 119 bp, homo sapiens
cctgagtgcctccatccagatgcacagccccaggtctcctcttgctgagacagctcctcctccactccaccccatgtttcattctggggtctacacgttcttccacactgcccaatccc

SEQ ID NO: 2682 - DNA, 119 bp, homo sapiens
tcctccactccaaccccatgtttcattctggggtctacacgttcttccacactgcccaatccccaggtttgggggttgactgaggggaggaaatctcccgcaaaccaggcaaagcccag

SEQ ID NO: 2683 - DNA, 119 bp, homo sapiens
aatccccaggttatgggggttgactgaggggaggaaatctcccgcaaaccaggcaaagcccagggcttctcatcctctttggacttcggatgagagaataagtttagtccctttctaga

SEQ ID NO: 2684 - DNA, 119 bp, homo sapiens
gcccagggcttcatcatcctctttggacttcggatgagagaataagtttagtccctttctagagctagaccttctcggtggctgtttcccaccatgggaagcgagtctggtctgtggtg

SEQ ID NO: 2685 - DNA, 119 bp, homo sapiens
tctagagctagaaccttctcggtggctgtttcccaccatgggaagcgagtctggtctgtggtgaggaagatgaagctcacatgctggaatcggggtagagctgggtccagttccttctc

SEQ ID NO: 2686 - DNA, 119 bp, homo sapiens
gtggtgaggaagcatgaagctcacatgctggaatcggggtagagctgggtccagttccttctcaaggccgccccaccgacgcggagcatggtcttggcaaactccctgccactgactgt

SEQ ID NO: 2687 - DNA, 119 bp, homo sapiens
cttctcaaggccagccccaccgacgcggagcatggtcttggcaaactccctgccactgactgttcaccgggacccgggctctatacagcttccacctcgaggcaagaggaagaaaggag

SEQ ID NO: 2688 - DNA, 119 bp, homo sapiens
gactgttcaccgtggacccgggctctatacagcttccacctcgaggcaagaggaagaaaggagaggcagaagcagtcccgttcccacctgccctgctacttgtgggcctctgcatcctc

SEQ ID NO: 2689 - DNA, 119 bp, homo sapiens
aaggagaggcagcaagcagtcccgttcccacctgccctgctacttgtgggcctctgcatcctcgcccttggtggggctgccaccgtggaggtggccttgaggctccgctttcgcttctg

SEQ ID NO: 2690 - DNA, 119 bp, homo sapiens
atcctcgcccttgggtggggctgccaccgtggaggtggccttgaggctccgctttcgcttctgcacatttgctctggatggaagaggatgacgtaggttttgggtacgtagagcatgcc

SEQ ID NO: 2691 - DNA, 119 bp, homo sapiens
cttctgcacattctgctctggatggaagaggatgacgtaggttttgggtacgtagagcatgccgagggaaccgaggcactcaggctcaaggacacggttagcgtggttgtctggatgta

SEQ ID NO: 2692 - DNA, 119 bp, homo sapiens
cttttcagctgactgggcagtgccaaagaagatgggcacgaatgccagccagatgatgcaggtggtgtaatggtgaagccgatgggcttggcctcgttgaaggtctcgggcacgccacg

SEQ ID NO: 2693 - DNA, 119 bp, homo sapiens
ccagatgatgcaggtggtgtacatggtgaagccgatgggcttggcctcgttgaaggtctcgggcacgcccgggccttgatggcgtacactgtgcacgtgaccatgagcaggaggctgta

SEQ ID NO: 2694 - DNA, 119 bp, homo sapiens
gttgaaggtctcgggcacgccacgggccttgatggcgtacactgtgcacgtgaccatgagcaggaggcttagcccaggcagccgatgagagacagatccgacatgtcgcacttgagcac

SEQ ID NO: 2695 - DNA, 119 bp, homo sapiens
cgtgaccatgagcaggaggctgtagcccaggcagccgatgagagacagatccgacatgtcgcacttgagacccctctggcctgctcggggtccaccgtccgctgttcctcatagtcaat

SEQ ID NO: 2696 - DNA, 119 bp, homo sapiens
atccgacatgtcgcacttgagcacccctctggcctgctcggggtccaccgtccgctgttcctcatagtcatcacgctgtgtgggggccgggcccccagccatgctatcatccccaccac

SEQ ID NO: 2697 - DNA, 119 bp, homo sapiens
ctgcagggaggtgaggctgaaggtgatgaccagctgtgaggtggggctgatgaagggagggggtgtgacgagcgcttgccctgctcaaagatgcggtagatacggttggtcttggtgag

SEQ ID NO: 2698 - DNA, 119 bp, homo sapiens
gagggggtgtgaccgagcgcttgccctgctcaaagatgcggtagatacggttggtcttggtgagcagggagagtagctgagggtcgtgcccaggcccaggaagagcctgcgggcggcac

SEQ ID NO: 2699 - DNA, 119 bp, homo sapiens
ttggtgagcagggcagagtagctgagggtcgtgcccaggcccaggaagagcctgcgggcggcacagacccggccccaggctcagccaccatgaggaaggtgatggcgtagatgaggaag

SEQ ID NO: 2700 - DNA, 119 bp, homo sapiens
ggcggcacagaccgcggccccaggctcagccaccatgaggaaggtgatggcgtagatgaggaagatgccgtgaggaggacgtagctgagctctcggcccgaggcccggacgatgggcgt

SEQ ID NO: 2701 - DNA, 119 bp, homo sapiens
tgaggaagatgccggtgaggaggacgtagctgagctctcggcccgaggcccggacgatgggcgtgttgtgtaccgcacgaaggtggccaccaccgtggtagtggccacgatgcccagca

SEQ ID NO: 2702 - DNA, 119 bp, homo sapiens
atgggcgtgttgttgtaccgcacgaaggtggccaccaccgtggtagtggccacgatgcccagcacggccggaggagcggcggggctgcccagggggaggaccagctcaggcgcaccaca

SEQ ID NO: 2703 - DNA, 119 bp, homo sapiens
gcccagcacggccaggaggagcggcggggctgcccagggggaggaccagctcaggcgcaccacaggtgtgggcggcagcccgtgtggttgggcgtgggcctcatgtccccaggacaggc

SEQ ID NO: 2704 - DNA, 119 bp, homo sapiens
gcaccacaggtgtggggcggcagcccgtgtggttgggcgtgggcctcatgtccccaggacaggcctcgctgtgaactcgtccacctggaagcggtacccgtcacaggcctcgcagtgcc

SEQ ID NO: 2705 - DNA, 119 bp, homo sapiens
ggacaggcctcgcatgtgaactcgtccacctggaagcggtacccgtcacaggcctcgcagtgccaacagaggggacgcccttcaccatcttcttccgctcccccggcccgcagggcagg

SEQ ID NO: 2706 - DNA, 119 bp, homo sapiens
gcagtgccaacagcaggggacgcccttcaccatcttcttccgctcccccggcccgcagggcaggctgcaagagacgagggcacctcgtgggggtcgccagaccactgcagggcctccac

SEQ ID NO: 2707 - DNA, 119 bp, homo sapiens
atccagtctgagggtctctgcccactggcccactgcctggtacccgccactgctggcactgccattggtgcctggtactggaagatgtcgtaccgcccgggcgcatctccgttctcgtt

SEQ ID NO: 2708 - DNA, 119 bp, homo sapiens
ggcccactgcctggtacccgccactgctggcactgccattggtcgcctggtactggaagatgtcgtacccccgggcgcatctccgttctcgttgaacatcacaggggttcctgcgctgc

SEQ ID NO: 2709 - DNA, 119 bp, homo sapiens
cattgaagcggacagctcgaatgtactgcagaagcatccgcccatcagtgggttccatcgccgggcacagcctgtgtgcccagggcagagcgcctggtgcatgctgtggagggcgtggg

SEQ ID NO: 2710 - DNA, 119 bp, homo sapiens
cccatcagtgggttccatcgccgggcacaggcctgtgtgcccagggcagagcgcctggtgcatgctgtgagggcgtgggcaatggcgtacaccgcatcaatcacaaactgcaccttgcc

SEQ ID NO: 2711 - DNA, 119 bp, homo sapiens
ccagggcagagcgcctggtgcatgctgtggagggcgtgggcaatggcgtacaccgcatcaatcacaaacgcaccttgccctcctgctcgtaggtggagtcccggccgatgcgttcctcg

SEQ ID NO: 2712 - DNA, 119 bp, homo sapiens
ctgtgcatttgcgggtggaatcgtctgactgggtacctgagctggtcagtttgcagttaaaattctcttccagaactcggcgaaccagatgttcctgcggttgttctccagggatcgag

SEQ ID NO: 2713 - DNA, 119 bp, homo sapiens
cgtctgactgggtacctgagctggtcagtttgcagttaaaattctcttcccagaactcggcgaaccagagttcctgcggttgttctccagggatcgagtcatgaagtactggtcaaatc

SEQ ID NO: 2714 - DNA, 119 bp, homo sapiens
cgtcgatggaggcccttttgggcaggatggtgatggccccaacggccacgtcctccaggctcaagatggtgaggtcttggctccccagctgtctgagccgacccacaggaagtggccgg

SEQ ID NO: 2715 - DNA, 119 bp, homo sapiens
gccccaacggccacgtcctccaggctcaagatgggtgaggtcttggctccccagctgtctgagccgaccacaggaagtggccggtcaggttggcctggcgagctgcctccaggacccgc

SEQ ID NO: 2716 - DNA, 119 bp, homo sapiens
ctgatgtcatcctcattggcaaagatgatgatgccccgggcgttgggcgtctccatgagtctcctgatcccttgctgaactctcctggctttggttccctgggaatcttgatagactgg

SEQ ID NO: 2717 - DNA, 119 bp, homo sapiens
tggcaaagatgatgatgccccgggcgttgggcgtctccatgagtctcctgatcaccttgctgaactctctggctttggttccctgggaatcttgatagactgggcaatacagacccccc

SEQ ID NO: 2718 - DNA, 119 bp, homo sapiens
cagcctctcgggagatctgaacgaaggcctcaaccccactttcgccatagttgccctcggaggccagcgggacacatagttccatcccagtgccctcacgatgtccaccatggcctgcg

SEQ ID NO: 2719 - DNA, 119 bp, homo sapiens
agttgccctcggaggccagcgtggacacatagttccatcccagtgccctcacgatgtccaccatggcctcgcctggtaggagtcgggtggcaccacccgggagaagaagtcatagcgtg

SEQ ID NO: 2720 - DNA, 119 bp, homo sapiens
tcacgatgtccaccatggcctgcgcctggtaggagtcgggtggcaccacccgggagaagaagtcatagctgtggagtcgctgagctccggggctgtggaggcatagctgatctggggta

SEQ ID NO: 2721 - DNA, 119 bp, homo sapiens
cgcaaacaggcgcagcacgttggcgaccatgatggagacggagctggccgaggcgcccacgacggccacacgcgctcggggggcgcggggcgcagcggagggacgcctcccgggcagcg

SEQ ID NO: 2722 - DNA, 119 bp, homo sapiens
gcccacgacggccacgacgcgctcggggggcgcggggcgcagcggagggacgcctcccgggcagcgcaccccacctcgtcgccgtcgccgcggccgcggatcagcgcctgcacgaagct

SEQ ID NO: 2723 - DNA, 119 bp, homo sapiens
tcccgggcagcgcacgcccacctcgtcgccgtcgccgcggccgcggatcagcgcctgcacgaagctcaggcctgctccagcgcgtaggtgtcccgcgagcaggtgtccagcagccgcgc

SEQ ID NO: 2724 - DNA, 119 bp, homo sapiens
ctgcacgaagctcagcgcctgctccagcgcgtaggtgtcccgcgagcaggtgtccagcagccgcgcgccaggcgcacgccgggcagcagctcggggtcggcgttgacgcggtccagcgc

SEQ ID NO: 2725 - DNA, 119 bp, homo sapiens
cagcagccgcgcgcccaggcgcacgccgggcagcagctcggggtcggcgttgacgcggtccagcgcgtaagcatggcctccagccggtgcacgccctgctccttcttcagctgcccgca

SEQ ID NO: 2726 - DNA, 119 bp, homo sapiens
tgcaccgggaacaggccgcccagcgtcaggccgcccgccaggcgcacagagcccgccgcgcgcgccaggccgcctgcgccagccacgccagcggcagcagcgccacgagcagcggctcc

SEQ ID NO: 2727 - DNA, 119 bp, homo sapiens
gcccgccgcgcgcgccaggcccgcctgcgccagccacgccagcggcagcagcgccacgagcagcggctccgggctctccggggccgcgccatcggctcgtctagcgggctgcggggaga

SEQ ID NO: 2728 - DNA, 119 bp, homo sapiens
gcgccacgagcagcggctcccgggctctccggggccgcgccatcggctcgtctagcgggctgcggggagcagaggggcggggagcgctctgagggcgggggaaggagagcgcgggctcg

SEQ ID NO: 2729 - DNA, 119 bp, homo sapiens
tctagcgggctgcggggagacagaggggcggggagcgctctgagggcgggggaaggagagcgcgggctcgggcgcggggagggacaccggggtcctggggagaaggcgctcggggcgcg

SEQ ID NO: 2730 - DNA, 119 bp, homo sapiens
ggaaggagagcgcgggctcggggcgcggggagggacaccggggtcctggggagaaggcgctcggggcgcccttccacttcggctctggggagttagctcagccggcctgcccgggcctc

SEQ ID NO: 2731 - DNA, 119 bp, homo sapiens
ttagccatattttttttaatgcctattcagagtttaaaagtgtcccagtaacaaaagactgcacagcttgagacattaatttaaactgtacaaatacatataaccattaccactaggat

SEQ ID NO: 2732 - DNA, 119 bp, homo sapiens
actgcacagctttgagacattaatttaaactgtacaaatacatataaccattaccactaggataaattatctttagattttaacatttttcaacatcttacatctgaacagttgactct

SEQ ID NO: 2733 - DNA, 119 bp, homo sapiens
taggataaattactctttagattttaacatttttcaacatcttacatctgaacagttgactcttctataaaaaatatcattattattttataatatgcctttgtataatgcccacaaga

SEQ ID NO: 2734 - DNA, 119 bp, homo sapiens
gactcttctatacaaaaatatcattattattttataatatgcctttgtataatgcccacaagatgacactattacaatagcagttgttacaaagtcacaaaatacataaaaatctcagc

SEQ ID NO: 2735 - DNA, 119 bp, homo sapiens
acaagatgacacttattacaatagcagttgttacaaagtcacaaaatacataaaaatctcagcagttggaacattattattctttaaaaagaatttacagtactaaggtccagtccaga

SEQ ID NO: 2736 - DNA, 119 bp, homo sapiens
ctcagcagttggtaacattattattctttaaaaagaatttacagtactaaggtccagtccagaaagtggagatttaaacagagtagcccaaagttcgaagtgtctatttaaaataccag

SEQ ID NO: 2737 - DNA, 119 bp, homo sapiens
tccagaaagtggcagatttaaacagagtagcccaaagttcgaagtgtctatttaaaataccagtttggaataaactaaggaaataatatatgtactatgtgatatcactgccccagcag

SEQ ID NO: 2738 - DNA, 119 bp, homo sapiens
taccagtttggaaataaactaaggaaataatatatgtactatgtgatatcactgccccagcagctgaaccacttgcttcagagcaaatgtgaaggtcagagctgagtcagtggtcagca

SEQ ID NO: 2739 - DNA, 119 bp, homo sapiens
cagcagctgaacgcacttgcttcagagcaaatgtgaaggtcagagctgagtcagtggtcagcagcatgactggcttgggggaaccagctggcacacttcatctttgtgtctggtaggga

SEQ ID NO: 2740 - DNA, 119 bp, homo sapiens
tcagcagcatgagctggcttgggggaaccagctggcacacttcatctttgtgtctggtagggacacagaacaaaacaatttgaaaagtccaatgaaccagcatcaaacaaacacagttt

SEQ ID NO: 2741 - DNA, 119 bp, homo sapiens
tagggacacagaaacaaaacaatttgaaaagtccaatgaaccagcatcaaacaaacacagtttccagaatttcttaatgatgtccagccaagagaaccttgacttggttactattgaag

SEQ ID NO: 2742 - DNA, 119 bp, homo sapiens
cagtttccagaactttcttaatgatgtccagccaagagaaccttgacttggttactattgaagtcatcagccattgggcttgattgtcaccttgaattcatgggaactgtactggtcaa

SEQ ID NO: 2743 - DNA, 119 bp, homo sapiens
ttgaagtcatcaagccattgggcttgattgtcaccttgaattcatgggaactgtactggtcaagatcaaacacaagccgtccactaaaatcaagtggcataactttgatattctctatg

SEQ ID NO: 2744 - DNA, 119 bp, homo sapiens
gatatcctgctcaagattgaaattaccatcgctcccatagcttcaaagtagaaaaacaaataattgcaactttctgtcattgacaaaatggcagcgcagagccttagtcaaataagaac

SEQ ID NO: 2745 - DNA, 119 bp, homo sapiens
caaataattgcaatctttctgtcattgacaaaatggcagcgcagagccttagtcaaataagaaccacagtgacagccagcaaaggttggcccaactgctgtacaaaaacaaaagacaaa

SEQ ID NO: 2746 - DNA, 119 bp, homo sapiens
ataagaaccacagctgacagccagcaaaggttggcccaactgctgtacaaaaacaaaagacaaacctctaagccaaccacagcaaagtgaagaactactaaaccatttgggcacataca

SEQ ID NO: 2747 - DNA, 119 bp, homo sapiens
aagacaaacctcttaagccaaccacagcaaagtgaagaactactaaaccatttgggcacatacaacaaagaaaactaaaacactctaaacattttctggaagttgtttttttttaaggg

SEQ ID NO: 2748 - DNA, 119 bp, homo sapiens
cacatacaacaaatgaaaactaaaacactctaaacattttctggaagttgtttttttttaagggttcttttggatttactatttattaaattgtagatcaaatacttcatactttggca

SEQ ID NO: 2749 - DNA, 119 bp, homo sapiens
tttaagggttcttattggatttactatttattaaattgtagatcaaatacttcatactttggcaaatagttattcaatactttgtaacatcctacccatatatcaacactgtgggcaat

SEQ ID NO: 2750 - DNA, 119 bp, homo sapiens
ctttggcaaatagtttattcaatactttgtaacatcctacccatatatcaacactgtgggcaatgatgcaagaaaatgcatttcttggaaataagtaaaataggggatgatttttgccc

SEQ ID NO: 2751 - DNA, 119 bp, homo sapiens
tgggcaatgatgctaagaaaatgcatttcttggaaataagtaaaataggggatgatttttgcccttccagtacccacttttgcatatttcttccagaactcagtagaaatagacatttg

SEQ ID NO: 2752 - DNA, 119 bp, homo sapiens
ttttgcccttccaagtacccacttttgcatatttcttccagaactcagtagaaatagacatttgtagactttcccagggtcaaggaacttgcacgtactctacggagcaatgctgtagg

SEQ ID NO: 2753 - DNA, 119 bp, homo sapiens
gacatttgtagacatttcccagggtcaaggaacttgcacgtactctacggagcaatgctgtagggtttccaccatagactcctaccggtggcctccatacttggccacccagtctgtcc

SEQ ID NO: 2754 - DNA, 119 bp, homo sapiens
gctgtagggtttcacaccatagactcctaccggtggcctccatacttggccacccagtctgtcctcccagcactgagggaatgggctgtgcacggttcacaatatttaggttttttgct

SEQ ID NO: 2755 - DNA, 119 bp, homo sapiens
gtctgtcctcccatgcactgagggaatgggctgtgcacggttcacaatatttaggttttttgctgtaggttataagtacgtcctgaaaactgcccccgaccagtttttgtgttccaggt

SEQ ID NO: 2756 - DNA, 119 bp, homo sapiens
ctgcattgctccttttgaaagcaagttctgccccaacgggtcccagtgacttggggaataactggttgcccaagtgtgggggtttatttcctttccactggctatcaaggacaccttct

SEQ ID NO: 2757 - DNA, 119 bp, homo sapiens
ttttgaaagcaagttctgccccaacgggtcccagtgacttggggaataactggttgctccaagtgtggggtttatttcctttccactggctatcaaggacaccttcttgggattcacac

SEQ ID NO: 2758 - DNA, 119 bp, homo sapiens
ctggaagatatcttgattgtttcaagtagtactgtttagaggttggagcagttgacaattcggaatcagttttagggaagtaacagcaggtaagctcttgttttcccctgtcgagtggt

SEQ ID NO: 2759 - DNA, 119 bp, homo sapiens
tactgtttagaggttggagcagttgacaattcggaatcagattttagggaagtaacagcaggtaagctctgttttcccctgtcgagtggttggagcctgagggtactggctctggaagc

SEQ ID NO: 2760 - DNA, 119 bp, homo sapiens
cgaaatggagaatcttttttccttttttctttaaaaacacccatgcttggcttcttggaatgggaggctcgaaatcatagtcctccaactcttcccagctatctccagacttgaagata

SEQ ID NO: 2761 - DNA, 119 bp, homo sapiens
cttggaatgggaggctccgaaatcatagtcctccaactcttcccagctatctccagacttgaagatagttgaccccaacgcctcctaccacttttatgactcagtgtgccatttggctt

SEQ ID NO: 2762 - DNA, 119 bp, homo sapiens
agttggcatgtttttgacgatgctcgggaatagcgtttgtggcggtttctcctgactctgttgctttggggttgctggacgctcaggttctgtggcggctgaatgggctgcagtggctg

SEQ ID NO: 2763 - DNA, 119 bp, homo sapiens
ctcctgactctgttgctttggaggttgctggacgctcaggttctgtggcggctgaatgggctgcagtggtgctggctagtttttggctggggttgtccaacaacctgatcgattatatc

SEQ ID NO: 2764 - DNA, 119 bp, homo sapiens
cggctgaatgggctgcagtggctgctggctagtttttggctggggttgtccaacaacctgatcgattattccggcagaggcttaggctctacctcaactaaagatggctttgattctaa

SEQ ID NO: 2765 - DNA, 119 bp, homo sapiens
tccaacaacctgatcgattatatccggcagaggcttaggctctacctcaactaaagatggctttgattcaatggttgcagctgcttatttaaagactgttttgattccagatgatttga

SEQ ID NO: 2766 - DNA, 119 bp, homo sapiens
aactaaagatggctttgattctaatggttgcagctgcttatttaaagactgttttgattccagatgattgacgaagggcctaatacctgaccaacttgaaaatatgggtgtttcaatgc

SEQ ID NO: 2767 - DNA, 119 bp, homo sapiens
ctggcttgctgtcggtcgtttctttggatcccaattcaacatttcggtcatgagctgaatagcttcattctggcattgggaataagagtttttaagtttataggaacacactggggaaa

SEQ ID NO: 2768 - DNA, 119 bp, homo sapiens
catgagctgaatagcttcattactggcattgggaataagagtttttaagtttataggaacacactggggaaacggaagttcatagaggatgccagctggtatccttctggccagtcact

SEQ ID NO: 2769 - DNA, 119 bp, homo sapiens
ttttttgggagtccctaaaacttggcaaattttaaagatttcatcgacctcacttgtccctgggaaaagggccttaacatatagagttcagccatgatacttccaacagcccacacatc

SEQ ID NO: 2770 - DNA, 119 bp, homo sapiens
cttgtccctgggaaaagtggccttaacatatagagttcagccatgatacttccaacagcccacacatcatgggagaactataaactgaagatctcagtaaaacttcaggggcacgatac

SEQ ID NO: 2771 - DNA, 119 bp, homo sapiens
catctggtagatacataatcagtgtatggtggctgtgaccttaattctcttgcaagtccaaaatcagcattttcacaagctctggacccatacaaagcaagttttctggtttcatgtcc

SEQ ID NO: 2772 - DNA, 119 bp, homo sapiens
cataatcagtgtatggtggctgtgaccttaattctcttgcaagtccaaaatcagcaattttcacaagcttggacccatacaaagcaagttttctggtttcatgtccctatgaaaaaagc

SEQ ID NO: 2773 - DNA, 119 bp, homo sapiens
cttttgatggccaccagctccccggattcattactcttgcccataagcacactcccatacgtgccgtccccaactgtctcatggttgtgtatcggttcatcttggaaaaataatgcagc

SEQ ID NO: 2774 - DNA, 119 bp, homo sapiens
tcccatacgtgccgtcccccaactgtctcatggttgtgtatcggttcatcttggaaaaataatgcagcaaagttgttgattgaaatgacttccttgttgaatataaatttgaacgcttc

SEQ ID NO: 2775 - DNA, 119 bp, homo sapiens
ggaaaaataatgcagcagaagttgttgattgaaatgacttccttgttgaatataaatttgaacgcttctaatttttatttgcttttgtcctcacactgttgttgctacactggtgacag

SEQ ID NO: 2776 - DNA, 119 bp, homo sapiens
taaatttgaacgcttcttaatttttatttgcttttgtcctcacactgttgttgctacactggtgacaggttgtcatcattaaatatagtctctcccccaagattacagaggttcatgag

SEQ ID NO: 2777 - DNA, 119 bp, homo sapiens
gctacactggtgacaggtttgtcatcattaaatatagtctctcccccaagattacagaggttcatgagaatagcatgaaggaatcgggcaaggaaacaacacttccattcttataaaca

SEQ ID NO: 2778 - DNA, 119 bp, homo sapiens
agttgacgatgtccctaacagcgaattccaaggcgcccgtgtagcaggagaggagcaagtcggccacgagcgtgcactgtgcatcagggagacctgcagctccgagctggggttcagca

SEQ ID NO: 2779 - DNA, 119 bp, homo sapiens
cgaattccaaggcgcccgtgtagcaggagaggagcaagtcggccacgatgcgtgcactgtgcatcaggggacctgcagctccgagctggggttcagcaggaactggtcccgcaggaagg

SEQ ID NO: 2780 - DNA, 119 bp, homo sapiens
agtacacaaagcctgtgggggagatctattgaccctatagatatattagcatcagggagacagggcaaagtttcacccttcagttcagtccccaatccctgcttattatttccctaaca

SEQ ID NO: 2781 - DNA, 119 bp, homo sapiens
agcatcagggagacagggcaaaggtttcacccttcagttcagtccccaatccctgcttattatttccctacagaagaccatcccccttgccactccctggtttttcttctctggcagca

SEQ ID NO: 2782 - DNA, 119 bp, homo sapiens
aatccctgcttattatttccctaacagaagaccatcccccttgccactccctggtttttcttctctggcgcaatgaagcagctgctgacccagctctagttttcgggaagtcagatgac

SEQ ID NO: 2783 - DNA, 119 bp, homo sapiens
tccctggtttttcttctctggcagcaatgaagcagctgctgacccagctctagttttcgggaagtcagagaccttttccctcccgcggctctctacctctcgccgcccctagggaggac

SEQ ID NO: 2784 - DNA, 119 bp, homo sapiens
ctctagttttcgggaagtcagatgaccttttccctcccgcggctctctacctctcgccgcccctagggagacaccatgggcccactgatggttcttttttgcctgctgttcctgtaccc

SEQ ID NO: 2785 - DNA, 119 bp, homo sapiens
gtctggcagactcggctccctcctgccctcagaacgtgaatatctcgggtggcaccttcaccctcagcctggctgggctcctgggagccttctcacctactcctgcccccagggcctgt

SEQ ID NO: 2786 - DNA, 119 bp, homo sapiens
cgggtggcaccttcaccctcagccatggctgggctcctgggagccttctcacctactcctgcccccaggcctgtacccatccccagcatcacggctgtgcaagagcagcggacagtggc

SEQ ID NO: 2787 - DNA, 119 bp, homo sapiens
ttctcacctactcctgcccccagggcctgtacccatccccagcatcacggctgtgcaagagcagcggacgtggcagaccccaggagccacccggtctctgtctaaggcggtctgcaaac

SEQ ID NO: 2788 - DNA, 119 bp, homo sapiens
ctgtgcgctgtccagcccctgtctcctttgagaatggcatttataccccacggctggggtcctatcccggggtggcaatgtgagcttcgagtgtgaggatggcttcatattgcggggct

SEQ ID NO: 2789 - DNA, 119 bp, homo sapiens
atggcatttataccccacggctggggtcctatcccgtgggtggcaatgtgagcttcgagtgtgaggatgcttcatattgcggggctcgcctgtgcgtcagtgtcgccccaacggcatgt

SEQ ID NO: 2790 - DNA, 119 bp, homo sapiens
ccgtgggtggcaatgtgagcttcgagtgtgaggatggcttcatattgcggggctcgcctgtgcgtcagttcgccccaacggcatgtgggatggagaaacagctgtgtgtgataatgggg

SEQ ID NO: 2791 - DNA, 119 bp, homo sapiens
ctggccactgccccaacccaggcatttcactgggcgcagtgcggacaggcttccgctttggtcatggggcaaggtccgctatcgctgctcctcgaatcttgtgctcacggggtcttcgg

SEQ ID NO: 2792 - DNA, 119 bp, homo sapiens
gctttggtcatggggacaaggtccgctatcgctgctcctcgaatcttgtgctcacggggtcttcggagcggagtgccagggcaacggggtctggagtggaacggagcccatctgccgcc

SEQ ID NO: 2793 - DNA, 119 bp, homo sapiens
aaagcctgggccgtaaaatccaaatccagcgctctggtcatctgaacctctacctgctcctggactgttgcagagtgtgtcggaaaatgactttctcatcttcaaggagagcgcctccc

SEQ ID NO: 2794 - DNA, 119 bp, homo sapiens
aaaatccaaatccagcgctctggtcatctgaacctctacctgctcctggactgttcgcagagtgtgtcgaaaatgactttctcatcttcaaggagagcgcctccctcatggtggacagg

SEQ ID NO: 2795 - DNA, 119 bp, homo sapiens
atcttcagctttgagatcaatgtgagcgttgccattatcacctttgcctcagagcccaaagtcctcatgctgtcctgaacgacaactcccgggatatgactgaggtgatcagcagcctg

SEQ ID NO: 2796 - DNA, 119 bp, homo sapiens
atgtgagcgttgccattatcacctttgcctcagagcccaaagtcctcatgtctgtcctgaacgacaactccgggatatgactgaggtgatcagcagcctggaaaatgccaactataaag

SEQ ID NO: 2797 - DNA, 119 bp, homo sapiens
atcatgaaaatggaactgggactaacacctatgcggccttaaacagtgtctatctcatgatgaacaaccaatgcgactcctcggcatggaaacgatggcctggcaggaaatccgacatg

SEQ ID NO: 2798 - DNA, 119 bp, homo sapiens
ctaacacctatgcggccttaaacagtgtctatctcatgatgaacaaccaaatgcgactcctcggcatggaacgatggcctggcaggaaatccgacatgccatcatccttctgacagatg

SEQ ID NO: 2799 - DNA, 119 bp, homo sapiens
acatctatgccatcggggtgggcaagctggatgtggactggagagaactgaatgagctagggtccaagaggatggtgagaggcatgccttcattctgcaggacacaaaggctctgcacc

SEQ ID NO: 2800 - DNA, 119 bp, homo sapiens
gcaagctggatgtggactggagagaactgaatgagctagggtccaagaaggatggtgagaggcatgcctcattctgcaggacacaaaggctctgcaccaggtctttgaacatatgctgg

SEQ ID NO: 2801 - DNA, 119 bp, homo sapiens
gagaccccaaatcccagtggggcaaagaattccttattgagaaggcggtgatctccccagggtttgatgctttgccaaaaagaaccagggaatcctggagttctatggtgatgacatag

SEQ ID NO: 2802 - DNA, 119 bp, homo sapiens
ggtgatctccccagggtttgatgtctttgccaaaaagaaccagggaatcctggagttctatggtgatgaatagctctgctgaagctggcccagaaagtaaagatgtccacccatgccag

SEQ ID NO: 2803 - DNA, 119 bp, homo sapiens
tggacaagctgtgccgaggttgtctcccaagaaaaaaccatgttccccaacttgacagatgtcagggagtggtgacagaccagttcctatgcagtgggacccaggaggatgagagtccc

SEQ ID NO: 2804 - DNA, 119 bp, homo sapiens
gctgtgccgaggttgtctcccaagaaaaaaccatgttccccaacttgacagatgtcagggaggtggtgaagaccagttcctatgcagtgggacccaggaggatgagagtccctgcaagg

SEQ ID NO: 2805 - DNA, 119 bp, homo sapiens
gtgggtctggtgagctggggtctttacaacccctgccttggctctgctgacaaaaactcccgcaaaaggcccctcgtagcaaggtcccgccgccacgagactttcacatcaatctcttc

SEQ ID NO: 2806 - DNA, 119 bp, homo sapiens
aaactcccgcaaaagggcccctcgtagcaaggtcccgccgccacgagactttcacatcaatctcttccgatgcagccctggctgaggcagcacctgggggatgtcctgaattttttacc

SEQ ID NO: 2807 - DNA, 119 bp, homo sapiens
acatcaatctcttccgcatgcagccctggctgaggcagcacctgggggatgtcctgaattttttaccccctagccatggccactgagccctctgctgccctgccagaatctgccgcccc

SEQ ID NO: 2808 - DNA, 119 bp, homo sapiens
ctgaattttttacccctctagccatggccactgagccctctgctgccctgccagaatctgccgcccctcatcttctacctctgaatggccacccttagaccctgtgatccatcctctct

SEQ ID NO: 2809 - DNA, 119 bp, homo sapiens
gaatctgccgcccctccatcttctacctctgaatggccacccttagaccctgtgatccatcctctctccagctgagtaaatccgggtctctaggatgccagaggcagcgcacacaagct

SEQ ID NO: 2810 - DNA, 119 bp, homo sapiens
gatccatcctctctcctagctgagtaaatccgggtctctaggatgccagaggcagcgcacacaagctggaaatcctcagggctcctaccagcaggactgcctcgctgccccacctcccg

SEQ ID NO: 2811 - DNA, 119 bp, homo sapiens
agcgcacacaagctgggaaatcctcagggctcctaccagcaggactgcctcgctgccccacctcccgctcttggcctgtccccagattccttccctggttgacttgactcatgcttgtt

SEQ ID NO: 2812 - DNA, 119 bp, homo sapiens
tgccccacctcccgctccttggcctgtccccagattccttccctggttgacttgactcatgcttgtttcctttcacatggaatttcccagttatgaaattaataaaaatcaatggtttc

SEQ ID NO: 2813 - DNA, 119 bp, homo sapiens
gacttctgcagtttctgtttccttgactggcagctcagcggggccctcccgcttggatgttccgggaaatgatgtgggtaggacaggcggggcgagccgcaggtgccagaacacagatt

SEQ ID NO: 2814 - DNA, 119 bp, homo sapiens
gatgttccgggaaagtgatgtgggtaggacaggcggggcgagccgcaggtgccagaacacagattgtataaaggctgggggctggtggggagcaggggaagggaatgtgaccaggtcta

SEQ ID NO: 2815 - DNA, 119 bp, homo sapiens
aacacagattgtataaaaggctgggggctggtggggagcaggggaagggaatgtgaccaggtctaggtcggagtttcagcttggacactgagccaagcagacaagcaaagcaagccagg

SEQ ID NO: 2816 - DNA, 119 bp, homo sapiens
accaggtctaggtctggagtttcagcttggacactgagccaagcagacaagcaaagcaagccaggacacccatcctgccccaggcccagcttctctcctgccttccaacgccatgggga

SEQ ID NO: 2817 - DNA, 119 bp, homo sapiens
gcaagccaggacacaccatcctgccccaggcccagcttctctcctgccttccaacgccatggggagcaactcagcccccaactctgcctgatgccctttatcttgggcctcttgtctgg

SEQ ID NO: 2818 - DNA, 119 bp, homo sapiens
gtgtgaccaccactccatggtctttggcccggccccagggatcctgctctctggagggggtagagatcaaggcggctccttccgacttctccaagagggccaggcactggagtacgtgt

SEQ ID NO: 2819 - DNA, 119 bp, homo sapiens
gggtagagatcaaaggcggctccttccgacttctccaagagggccaggcactggagtacgtgtgtcctttggcttctacccgtaccctgtgcagacacgtacctgcagatctacggggt

SEQ ID NO: 2820 - DNA, 119 bp, homo sapiens
acgtgtgtccttctggcttctacccgtaccctgtgcagacacgtacctgcagatctacggggtcctggacaccctgaagactcaagaccaaaagactgtcaggaaggcagagtgcagag

SEQ ID NO: 2821 - DNA, 119 bp, homo sapiens
caatccactgtccaagaccacacgacttcgagaacggggaatactggccccggtctccctactacaatggagtgatgagatctctttccactgctatgacggttacactctccggggct

SEQ ID NO: 2822 - DNA, 119 bp, homo sapiens
acggggaatactggccccggtctccctactacaatgtgagtgatgagatctctttccactgctatgacgttacactctccggggctctgccaatcgcacctgccaagtgaatggccgat

SEQ ID NO: 2823 - DNA, 119 bp, homo sapiens
atgtgagtgatgagatctctttccactgctatgacggttacactctccggggctctgccaatcgcacctccaagtgaatggccgatggagtgggcagacagcgatctgtgacaacggag

SEQ ID NO: 2824 - DNA, 119 bp, homo sapiens
cggggtactgctccaacccgggcatccccattggcacaaggaaggtgggcagccagtaccgccttgaagcagcgtcacctaccactgcagccgggggcttaccctgcgtggctcccagc

SEQ ID NO: 2825 - DNA, 119 bp, homo sapiens
agtaccgccttgaagacagcgtcacctaccactgcagccgggggcttaccctgcgtggctcccagcggcaacgtgtcaggaaggtggctcttggagcgggacggagccttcctgccaag

SEQ ID NO: 2826 - DNA, 119 bp, homo sapiens
gggaacaacagaagcggaagatcgtcctggacccttcaggctccatgaacatctacctggtgctagatgatcagacagcattggggccagcaacttcacaggagccaaaaagtgtctag

SEQ ID NO: 2827 - DNA, 119 bp, homo sapiens
aagatcgtcctggacccttcaggctccatgaacatctacctggtgctagatggatcagacagcattgggccagcaacttcacaggagccaaaaagtgtctagtcaacttaattgagaag

SEQ ID NO: 2828 - DNA, 119 bp, homo sapiens
gtggcaagttatggtgtgaagccaagatatggtctagtgacatatgccacataccccaaaatttgggtcaagtgtctgaagcagacagcagtaatgcagactgggtcacgaagcagctc

SEQ ID NO: 2829 - DNA, 119 bp, homo sapiens
agccaagatatggtctagtgacatatgccacataccccaaaatttgggtcaaagtgtctgaagcagacacagtaatgcagactgggtcacgaagcagctcaatgaaatcaattatgaag

SEQ ID NO: 2830 - DNA, 119 bp, homo sapiens
accacaagttgaagtcagggactaacaccaagaaggccctccaggcagtgtacagcatgatgagctggcagatgacgtccctcctgaaggctggaaccgcacccgccatgtcatcatcc

SEQ ID NO: 2831 - DNA, 119 bp, homo sapiens
agtcagggactaacaccaagaaggccctccaggcagtgtacagcatgatgagctggccagatgacgtcctcctgaaggctggaaccgcacccgccatgtcatcatcctcatgactgatg

SEQ ID NO: 2832 - DNA, 119 bp, homo sapiens
atgtctatgtgtttggggtcgggcctttggtgaaccaagtgaacatcaatgctttggcttccaagaaagcaatgagcaacatgtgttcaaagtcaaggatatggaaaacctggaagatg

SEQ ID NO: 2833 - DNA, 119 bp, homo sapiens
tcgggcctttggtgaaccaagtgaacatcaatgctttggcttccaagaaagacaatgagcaacatgtgtcaaagtcaaggatatggaaaacctggaagatgttttctaccaaatgatcg

SEQ ID NO: 2834 - DNA, 119 bp, homo sapiens
gaggggagaagcgggacctggagatagaagtagtcctatttcaccccaactacaacattaatgggaaaaagaagcaggaattcctgaattttatgactatgacgttgccctgatcaagc

SEQ ID NO: 2835 - DNA, 119 bp, homo sapiens
cctatttcaccccaactacaacattaatgggaaaaaagaagcaggaattcctgaattttatgactatgagttgccctgatcaagctcaagaataagctgaaatatggccagactatcag

SEQ ID NO: 2836 - DNA, 119 bp, homo sapiens
aaaggcagctgtgagagagatgctcaatatgccccaggctatgacaaagtcaaggacatctcagaggtgtcacccctcggttcctttgtactggaggagtgagtccctatgctgacccc

SEQ ID NO: 2837 - DNA, 119 bp, homo sapiens
agagagatgctcaatatgccccaggctatgacaaagtcaaggacatctcagaggtggtcacccctcggtcctttgtactggaggagtgagtccctatgctgaccccaatacttgcagag

SEQ ID NO: 2838 - DNA, 119 bp, homo sapiens
gttggtgtaatcagctggggagtagtggatgtctgcaaaaaccagaagcggcaaaagcaggtacctgctacgcccgagactttcacatcaacctctttcaagtgctgccctggctgaag

SEQ ID NO: 2839 - DNA, 119 bp, homo sapiens
aagcggcaaaagcaggtacctgctcacgcccgagactttcacatcaacctctttcaagtgctgccctggtgaaggagaaactccaagatgaggatttgggttttctataaggggtttcc

SEQ ID NO: 2840 - DNA, 119 bp, homo sapiens
aacctctttcaagtgctgccctggctgaaggagaaactccaagatgaggatttgggttttctataagggtttcctgctggacaggggcgtgggattgaattaaaacagctgcgacaaca

SEQ ID NO: 2841 - DNA, 119 bp, homo sapiens
ttggccaaggacgcggctttattggggatgtgggtgcctggccctcgtcccccatcacctaccccctcccctagcccgccccagctcctcggagccctagcgcggtcccggggagaggg

SEQ ID NO: 2842 - DNA, 119 bp, homo sapiens
ctaccccctcctcctagcccgccccagctcctcggagccctagcgcggtcccggggagaggggaggttaaacaacaatgactactgctcccggacaggaagtgactggggcgcggggag

SEQ ID NO: 2843 - DNA, 119 bp, homo sapiens
aggggaggttaaaacaacaatgactactgctcccggacaggaagtgactggggcgcggggaggagggggcacagcggcgcaggcgagctccgagaccagatgtgcggctccaactccag

SEQ ID NO: 2844 - DNA, 119 bp, homo sapiens
ggaggaggggggcacagcggcgcaggcgagctccgagaccagatgtgcggctccaactccagatgttctcatctccgtcctacccgccgtccgggctcctcctgcctcggcctgtgcca

SEQ ID NO: 2845 - DNA, 119 bp, homo sapiens
ccagatgttcttcatctccgtcctacccgccgtccgggctcctcctgcctcggcctgtgccaggctgggagaggacggaggtcaccgagaggcagtgagaggtcagccccgacacagga

SEQ ID NO: 2846 - DNA, 119 bp, homo sapiens
gccaggctggggagaggacggaggtcaccgagaggcagtgagaggtcagccccgacacaggagcagtttccgcgggagctttgctggagggaccctgccagcctccactgaatcctttc

SEQ ID NO: 2847 - DNA, 119 bp, homo sapiens
aggagcagttttccgcgggagctttgctggagggaccctgccagcctccactgaatcctttcccccacgtgacgggctctgggggcgctgaggggctgctggggtcactcgcaggccag

SEQ ID NO: 2848 - DNA, 119 bp, homo sapiens
tttcccccacgctgacgggctctgggggcgctgaggggctgctggggtcactcgcaggccagcttcccgcgaaactggagagggcgatggcgaaggcctgcagggcgcacagcgggtac

SEQ ID NO: 2849 - DNA, 119 bp, homo sapiens
ccagcttcccgtcgaaactggagagggcgatggcgaaggcctgcagggcgcacagcgggtaccggtagttagggtgaaggcgtcctccgccacgcggccgaactgcagcacgatatagt

SEQ ID NO: 2850 - DNA, 119 bp, homo sapiens
ggtcatcagcgtggacaatctggaagttcttgactgaggcctgggtgacccggccttggaagttgaggggtaggagccactgtcatcgttccagacaggtggcttgttgtgcagttcta

SEQ ID NO: 2851 - DNA, 119 bp, homo sapiens
gccttggaagttgagggtgtaggagccactgtcatcgttccagacaggtggcttgttgtgcagttctataggctctccagcgtcttgttctgccagcgcaccagcaggccgtcactagc

SEQ ID NO: 2852 - DNA, 119 bp, homo sapiens
cttcttctccgtgtccaggtgcaggaagtaggagggatacatgcctcgatccatgccctttttgtcccggtcagccggcagcgcaccgtgcggccctggggggcaggccggagcacaaa

SEQ ID NO: 2853 - DNA, 119 bp, homo sapiens
catgccctttttgtcccgggtcagccggcagcgcaccgtgcggccctggggggcaggccggagcacaaatcccggggttcgtccacctccacggggggagacggggccctctcctcctt

SEQ ID NO: 2854 - DNA, 119 bp, homo sapiens
cctcagcacccaccccttgggccctgggccttggccctcctctccttcaggtctgcggagctcttctcttcaggggcttcttgggaggcagaaggattttctctttcttttcctctgcc

SEQ ID NO: 2855 - DNA, 119 bp, homo sapiens
cgtcctccgcgtctggggcacgggctaccagaaaggtttcccgggggtcgcgcttcttggcctcggggtcctgaggaacctggcgtagaccgtctgcggcgcccgggcctgggctgggt

SEQ ID NO: 2856 - DNA, 119 bp, homo sapiens
cccgggggtcgcgcttcttggcctcggggtccctgaggaacctggcgtagaccgtctgcggcgcccgggctgggctgggtctggggaaggctcctcccgcggcctccccgtccgcccag

SEQ ID NO: 2857 - DNA, 119 bp, homo sapiens
agtatcctgccaagagtcctccctgaccaccagaagttccacctcaccatcaagaaaggccctggtccagatgtgcaaggtgtgatgaaatcacagggctggggaaggtcagctcgggg

SEQ ID NO: 2858 - DNA, 119 bp, homo sapiens
agttccacctcaccatcaagaaaggccctggtccaggatgtgcaaggtgtgatgaaatcacagggctgggaaggtcagctcggggtcacaagaagcctgatgggcaggaaagagcatga

SEQ ID NO: 2859 - DNA, 119 bp, homo sapiens
aggatgtgcaaggtgtgatgaaatcacagggctggggaaggtcagctcggggtcacaagaagcctgatggcaggaaagagcatgaaagccccagccagcctcacatgtgcggctgggag

SEQ ID NO: 2860 - DNA, 119 bp, homo sapiens
gactcacagaaaccctctgtacccagtcatgggccaaagacaccgtcatgcaagggggtgaaggctccaactcgtcccggccccgggcgtggaagcaggacctcgagcagtctctggca

SEQ ID NO: 2861 - DNA, 119 bp, homo sapiens
ggtgaaggctccacactcgtcccggccccgggcgtggaagcaggacctcgagcagtctctggcagcagctatgtgccggtcgttgtggactctaaggggcagaatccggacaagctcag

SEQ ID NO: 2862 - DNA, 119 bp, homo sapiens
ggtacagtctcccctggggctgcaaggatttagtggagactcttaacaccagttctctggcatctgtgatttgagtgtgggccatcatcttcttccttctgctctctccctctccacat

SEQ ID NO: 2863 - DNA, 119 bp, homo sapiens
gttctctggcatctgtgagtttgagtgtgggccatcatcttcttccttctgctctctccctctccacattcccggtaccatctgatccatcaggcccttctttgctcaggcctgaagga

SEQ ID NO: 2864 - DNA, 119 bp, homo sapiens
ctctctccctctccacatttcccggtaccatctgatccatcaggcccttctttgctcaggcctgaaggatcaggcctgtgagagaggacggccccgttgtcggccaagacacctttggg

SEQ ID NO: 2865 - DNA, 119 bp, homo sapiens
ttgctcaggcctgaaggactcaggcctgtgagagaggacggccccgttgtcggccaagacacctttggggaggagcagcgaacagggcctgtccatctcagacgtcagccccctgaagg

SEQ ID NO: 2866 - DNA, 119 bp, homo sapiens
ggccaagacacctttgggcgaggagcagcgaacagggcctgtccatctcagacgtcagccccctgaaggctgagcaatgggcaacgtgatggagggaaagtcagtggaggagctgagca

SEQ ID NO: 2867 - DNA, 119 bp, homo sapiens
acgtcagccccctgaaggcctgagcaatgggcaacgtgatggagggaaagtcagtggaggagctgagcacaccgagtgccaccagtggtacaagaagttcatgactgagtgcccctctg

SEQ ID NO: 2868 - DNA, 119 bp, homo sapiens
cagtggaggagctgagcagcaccgagtgccaccagtggtacaagaagttcatgactgagtgcccctctgccaactcaccctctatgagttccgccagttcttcggcctcaagaacctga

SEQ ID NO: 2869 - DNA, 119 bp, homo sapiens
tgactgagtgcccctctggccaactcaccctctatgagttccgccagttcttcggcctcaagaacctgacccgtcggccagccagtacgtggaacagatgtttgagacttttgacttca

SEQ ID NO: 2870 - DNA, 119 bp, homo sapiens
gacggctacattgatttcatggagtacgtggcagcgctcagcttggtcctcaaggggaaggtggaacagagctccgctggtacttcaagctctatgatgtagatggcaacggctgcatt

SEQ ID NO: 2871 - DNA, 119 bp, homo sapiens
gcagcgctcagcttggtcctcaaggggaaggtggaacagaagctccgctggtacttcaagctctatgattagatggcaacggctgcattgaccgcgatgagctgctcaccatcatccag

SEQ ID NO: 2872 - DNA, 119 bp, homo sapiens
gggaactctccctggaagagtttatagagggcgtccagaaggaccagatgctcctggacacactgacacaagcctggaccttacccgcatcgtgcgcaggctccagaatggcgagcaag

SEQ ID NO: 2873 - DNA, 119 bp, homo sapiens
tggacacactgacacgaagcctggaccttacccgcatcgtgcgcaggctccagaatggcgagcaagacgggagggggctgacgaggccgctgaggcagccggctgagtgcaccgcccgg

SEQ ID NO: 2874 - DNA, 119 bp, homo sapiens
atggcgagcaagacgaggagggggctgacgaggccgctgaggcagccggctgagtgcaccgcccggctgttctgcactagcgggtggggtggtatggtggtgcctgttggtggtgttct

SEQ ID NO: 2875 - DNA, 119 bp, homo sapiens
tgcaccgcccggctgcttctgcactagcgggtggggtggtatggtggtgcctgttggtggtgttcttgtttaaccctagatagaatctaatgaactcagaggcttagctcgcctcttta

SEQ ID NO: 2876 - DNA, 119 bp, homo sapiens
tggtggtgttcttgtcttaaccctagatagaatctaatgaactcagaggcttagctcgcctctttagggccatggtggcagcagagaggcagaagtgggagtccagagccaggaacagt

SEQ ID NO: 2877 - DNA, 119 bp, homo sapiens
ctcgcctctttagggtccatggtggcagcagagaggcagaagtgggagtccagagccaggaacagtgaagatggttcctggcccctctgagtgacagctggtggcagcactccttgctg

SEQ ID NO: 2878 - DNA, 119 bp, homo sapiens
gccaggaacagtgaaggatggttcctggcccctctgagtgacagctggtggcagcactccttgctgggggcactgttcaacatccctctgccgtcgggtgaccccctagcccttctgac

SEQ ID NO: 2879 - DNA, 119 bp, homo sapiens
cactccttgctggggggcactgttcaacatccctctgccgtcgggtgaccccctagcccttctgactccctcccagcttttcccagctttccccactgagcttctccagtccatgctct

SEQ ID NO: 2880 - DNA, 119 bp, homo sapiens
agcccttctgactcctctcccagcttttcccagctttccccactgagcttctccagtccatgctcttctgacgtggactctctgaggcagaactgagcttttccaggcctcttatggaa

SEQ ID NO: 2881 - DNA, 119 bp, homo sapiens
agtccatgctcttctggacgtggactctctgaggcagaactgagcttttccaggcctcttatggaatccgcagatccagtggctgcagcttcaatcccagtgctgcaatcacacatcca

SEQ ID NO: 2882 - DNA, 119 bp, homo sapiens
cctcttatggaatcctgcagatccagtggctgcagcttcaatcccagtgctgcaatcacacatccattcgccctgggggaccctggagcctacttgtgcgctttgcatttcattgattg

SEQ ID NO: 2883 - DNA, 119 bp, homo sapiens
tcaggtttaataggttagttttatttcttatataccaacataaaaacctatctattcaaggtaaagcaatgtttttccaggtctcactttaaactgtcttataggagtaacagtgaccc

SEQ ID NO: 2884 - DNA, 119 bp, homo sapiens
gtaaagcaaatgtttttccaggtctcactttaaactgtcttataggagtaacagtgacccagggcactgttttcagtttgcttttttcagaggtgcctccagttccagagggtactcag

SEQ ID NO: 2885 - DNA, 119 bp, homo sapiens
cagagacagacagaagttttctccatcctttaaagagaaacattcagcttatggctgggagttgtggaagtccatactgggggatatggatggaaagagaggattgttgggggagtggt

SEQ ID NO: 2886 - DNA, 119 bp, homo sapiens
tatggctgggagttgtggaaggtccatactgggggatatggatggaaagagaggattgttgggggagtgtgggttggcagcagggggtcccagagcagcacccaggcagagctgaaaca

SEQ ID NO: 2887 - DNA, 119 bp, homo sapiens
agaggattgttgggggagtggtgggttggcagcagggggtcccagagcagcacccaggcagagctgaaaagtccctttaagtacagctgaccctttcaaaggcagaaagaccacagcct

SEQ ID NO: 2888 - DNA, 119 bp, homo sapiens
gcacccaggcagagctgaaacagtccctttaagtacagctgaccctttcaaaggcagaaagaccacagctgcagcgtatttgctgccatttttcctgttgacaccactggtgaggatgc

SEQ ID NO: 2889 - DNA, 119 bp, homo sapiens
aaaggcagaaagaccacagcctgcagcgtatttgctgccatttttcctgttgacaccactggtgaggatccttggggaggaggaggccagggtcctccccatgaacgcccctcagcatc

SEQ ID NO: 2890 - DNA, 119 bp, homo sapiens
ttgacaccactggtgaggatgccttggggaggaggaggccagggtcctccccatgaacgcccctcagcacccggaagttatagaattattgctgccccctgccccccaaaactcctgcc

SEQ ID NO: 2891 - DNA, 119 bp, homo sapiens
aactcctgccttttcttcagtctcaacaccctcccacccctgcctcctaccagtctttgtgttctcattctgatttggtctgtgggaccctcacccctcagttggctcttgcttccaac

SEQ ID NO: 2892 - DNA, 119 bp, homo sapiens
ctttgtgttctcatttctgatttggtctgtgggaccctcacccctcagttggctcttgcttccaactgaaacacccagaaactgtgggagccccacaaccacccagccaaggcacagtc

SEQ ID NO: 2893 - DNA, 119 bp, homo sapiens
cttgcttccaactgagaacacccagaaactgtgggagccccacaaccacccagccaaggcacagtcctccaggagcggctgaacaggaaaagtaactgaattcccttcaccatcccagg

SEQ ID NO: 2894 - DNA, 119 bp, homo sapiens
caaggcacagtcctcccaggagcggctgaacaggaaaagtaactgaattcccttcaccatcccagggaccctccaaaatggactatgccctgttggccacttcaaacccagcagccctt

SEQ ID NO: 2895 - DNA, 119 bp, homo sapiens
caccatcccagggactcctccaaaatggactatgccctgttggccacttcaaacccagcagcccttcccatccccactcagccctgcacagggggtgccaggaagtcaacaccagggga

SEQ ID NO: 2896 - DNA, 119 bp, homo sapiens
ccagcagcccttccccatccccactcagccctgcacagggggtgccaggaagtcaacaccaggggaagatgggcatgagcaggctgagccagggaccctcctactaccctggaaacctg

SEQ ID NO: 2897 - DNA, 119 bp, homo sapiens
aacaccaggggaagagtgggcatgagcaggctgagccagggaccctcctactaccctggaaacctgggtagcctggagtcgtggaggggccccagactcctcagaacatggcacttttc

SEQ ID NO: 2898 - DNA, 119 bp, homo sapiens
cctggaaacctgggtgagcctggagtcgtggaggggccccagactcctcagaacatggcacttttccgttctgctgagcgagccagctgctgggattcatgtccatctgcagcatcttc

SEQ ID NO: 2899 - DNA, 119 bp, homo sapiens
atggcacttttccgtctctgctgagcgagccagctgctgggattcatgtccatctgcagcatcttcatccccacttgtcccgacgggcaccttcaacaaactcgttcagagacagctgg

SEQ ID NO: 2900 - DNA, 119 bp, homo sapiens
ctccacaatgttgagtagctccaggcggtcgatgcagccattgccatccttatcatagatcttgaatgtcacttcagcttgtgctccagggtgcccctcagcacgagattcagagctgc

SEQ ID NO: 2901 - DNA, 119 bp, homo sapiens
gatgcagccattgccatccttatcatagatcttgaatgtccacttcagcttgtgctccagggtgcccctagcacgagattcagagctgccacgtactccaggaagtcgatggtgttgtc

SEQ ID NO: 2902 - DNA, 119 bp, homo sapiens
cccattcttgtcgaaggctcggaacatgccctctacatactgggaggcctcctcatcgtctgtgaccttaagaagcgcttaaactcatgcataaagagtgtgccgctggggcactccat

SEQ ID NO: 2903 - DNA, 119 bp, homo sapiens
tcgtctgtgaccttgaagaagcgcttaaactcatgcataaagagtgtgccgctggggcactccatcacaacttcttgtaccactcctggagctccgccacatctatctcgccagctgcc

SEQ ID NO: 2904 - DNA, 119 bp, homo sapiens
ggcactccatcacaaacttcttgtaccactcctggagctccgccacatctatctcgccagctgcctccgctcctcccagctaaactcctgccccatgctagccctgaggagcatcaggg

SEQ ID NO: 2905 - DNA, 119 bp, homo sapiens
gccagctgcctccgcctcctcccagctaaactcctgccccatgctagccctgaggagcatcagggagcagggtctgtatctcctccctggcttctgctgatggatctctccaactaggg

SEQ ID NO: 2906 - DNA, 119 bp, homo sapiens
agcatcagggagcaagggtctgtatctcctccctggcttctgctgatggatctctccaactagggccctttcctccctttccaggaggcctgatcagcctctccatcatctcctgggtg

SEQ ID NO: 2907 - DNA, 119 bp, homo sapiens
tgattttcatacagtatgaattttaattatctattgacagctgttaacagcatagttacacttgtgggctagagcagcactttcaccgtggttctcagcactcttgagagatagcaaga

SEQ ID NO: 2908 - DNA, 119 bp, homo sapiens
acttgtgggcctagagcagcactttcaccgtggttctcagcactcttgagagatagcaagagctcagggcctttgccaaagatggctggctcagcattttttcagtatggatcattcct

SEQ ID NO: 2909 - DNA, 119 bp, homo sapiens
gagctcagggacctttgccaaagatggctggctcagcattttttcagtatggatcattccttggcctcacgagattcagaaatctaattaaacttgggaccaacgtctgacagggtgtc

SEQ ID NO: 2910 - DNA, 119 bp, homo sapiens
cttggcctcaacgagattcagaaatctaattaaacttgggaccaacgtctgacagggtgtccaaacatctggatctggtcttctgcttgggggaattaagcccagaacataccccagca

SEQ ID NO: 2911 - DNA, 119 bp, homo sapiens
tccaaacatcttggatctggtcttctgcttgggggaattaagcccagaacataccccagcagcaccagagtcttattttctctacactgaagttcttaggacagcagagaacccaaact

SEQ ID NO: 2912 - DNA, 119 bp, homo sapiens
cagcaccagaagtcttattttctctacactgaagttcttaggacagcagagaacccaaactcagtccaagtaacctattcccaaacaccatcggtcagaagcagaggtaagttatggac

SEQ ID NO: 2913 - DNA, 119 bp, homo sapiens
ctcagtccaaagtaacctattcccaaacaccatcggtcagaagcagaggtaagttatggactgttcccttctggtttttgccttctggcctcggtctccagccaggtaggaacgagctc

SEQ ID NO: 2914 - DNA, 119 bp, homo sapiens
actgttccctttctggtttttgccttctggcctcggtctccagccaggtaggaacgagctctcttgaatttcatccaactggaggaattatgctgggccctgccttggtctggtcacca

SEQ ID NO: 2915 - DNA, 119 bp, homo sapiens
tctcttgaatgttcatccaactggaggaattatgctgggccctgccttggtctggtcaccagggcttggaagtcagcaaaatcattctctccttcccctgaaagcttctctttcctaaa

SEQ ID NO: 2916 - DNA, 119 bp, homo sapiens
cagggcttgggaagtcagcaaaatcattctctccttcccctgaaagcttctctttcctaaagaaagtgaaactcctgtatttgctagctcaggaagatgggctatctcaaagaatctcc

SEQ ID NO: 2917 - DNA, 119 bp, homo sapiens
aagaaagtgaaaactcctgtatttgctagctcaggaagatgggctatctcaaagaatctcctttgatgcgaagcattccagaaatagtgtttttcaagatgggtatctggggggaagaa

SEQ ID NO: 2918 - DNA, 119 bp, homo sapiens
cctttgatgcagaagcattccagaaatagtgtttttcaagatgggtatctggggggaagaaacggaagagctcccagaggattccttgccctttgctgtggacaattagtgttgtccat

SEQ ID NO: 2919 - DNA, 119 bp, homo sapiens
aaacggaagaagctcccagaggattccttgccctttgctgtggacaattagtgttgtccatggggctgtatggccacctgtgtgggtgtccctgggcccaccaagagctgaggcctggt

SEQ ID NO: 2920 - DNA, 119 bp, homo sapiens
atggggctgtgatggccacctgtgtgggtgtccctgggcccaccaagagctgaggcctggtctccaaaggtggactcatgtctgattgttgctcctcttccacagcagggcagcagcct

SEQ ID NO: 2921 - DNA, 119 bp, homo sapiens
gtctccaaagggtggactcatgtctgattgttgctcctcttccacagcagggcagcagcctaccccactcttccaccgatgagccacaggagatcacctggcactttaggggtggtgtg

SEQ ID NO: 2922 - DNA, 119 bp, homo sapiens
ctaccccactgcttccaccgatgagccacaggagatcacctggcactttaggggtggtgtggtgctgggcacgccaacagcctgacttcctcaacccgtggttcactccagactcagtg

SEQ ID NO: 2923 - DNA, 119 bp, homo sapiens
tggtgctgggacacgccaacagcctgacttcctcaacccgtggttcactccagactcagtgaccgagggatgtgaatgggacacaaaagcaggcctttcactgtgtttttggtggggga

SEQ ID NO: 2924 - DNA, 119 bp, homo sapiens
tgaccgagggcatgtgaatgggacacaaaagcaggcctttcactgtgtttttggtgggggataaaatccctgccttgaaattctcttgctccatgattaaagaatcctgtttagagccc

SEQ ID NO: 2925 - DNA, 119 bp, homo sapiens
gataaaatcccctgccttgaaattctcttgctccatgattaaagaatcctgtttagagccctcaatgcctaagagtccattattcttagaaaagcgtaactttcccccaacttctggca

SEQ ID NO: 2926 - DNA, 119 bp, homo sapiens
cctcaatgccttaagagtccattattcttagaaaagcgtaactttcccccaacttctggcattaagcaacggccaacctgtcaatcttggcattaaaaaaaaaaaaaaaagacaacatg

SEQ ID NO: 2927 - DNA, 119 bp, homo sapiens
cattaagcaaacggccaacctgtcaatcttggcattaaaaaaaaaaaaaaaagacaacatggccattttcagatttctgtgcttatgcaccaagtgacactttggatagagtgaagcaa

SEQ ID NO: 2928 - DNA, 119 bp, homo sapiens
tggccatttttcagatttctgtgcttatgcaccaagtgacactttggatagagtgaagcaacatggagccataagaggtaaattctaaaaggggagcagccctcagatacggccagtgg

SEQ ID NO: 2929 - DNA, 119 bp, homo sapiens
aacatggagctcataagaggtaaattctaaaaggggagcagccctcagatacggccagtggccataggggggactaaatccgtgtgagaaagatgggtcctgggctagtcgtctgagac

SEQ ID NO: 2930 - DNA, 119 bp, homo sapiens
ggccatagggtgggactaaatccgtgtgagaaagatgggtcctgggctagtcgtctgagacagcccccggtcaccaggagggcatatcctagggcagcgggcctgaagggagcttcact

SEQ ID NO: 2931 - DNA, 119 bp, homo sapiens
acagcccccgagtcaccaggagggcatatcctagggcagcgggcctgaagggagcttcactcacattcaattagcttcattcacattttgggtcagtcattcaacaactgtgtgtcaaa

SEQ ID NO: 2932 - DNA, 119 bp, homo sapiens
ctcacattcacattagcttcattcacattttgggtcagtcattcaacaactgtgtgtcaaatgcttttaggaccctaaacttaaattccaccgtcagggagagtctctgtaagatggtg

SEQ ID NO: 2933 - DNA, 119 bp, homo sapiens
aatgcttttagggaccctaaacttaaattccaccgtcagggagagtctctgtaagatggtgccctccttggagattcagactttcggagttggatgagggggagatccacgtttcttgg

SEQ ID NO: 2934 - DNA, 119 bp, homo sapiens
tgccctccttgggagattcagactttcggagttggatgagggggagatccacgtttcttggagtgcacttttctcagtgttcgggaggggaggggccccagggccctcagccagcctct

SEQ ID NO: 2935 - DNA, 119 bp, homo sapiens
ggagtgcactatttctcagtgttcgggaggggaggggccccagggccctcagccagcctctggggcctgcctgcgtctgcgccctcggcttccacctggttgcccttgcccagcttctt

SEQ ID NO: 2936 - DNA, 119 bp, homo sapiens
ctggggcctggcctgcgtctgcgccctcggcttccacctggttgcccttgcccagcttcttcacactctcagaaaggccttccaggtctccggcacgctcctctccagcagccagccct

SEQ ID NO: 2937 - DNA, 119 bp, homo sapiens
ttcacactctccagaaaggccttccaggtctccggcacgctcctctccagcagccagccctggctctcgtctcagattcctcggggttggacacaccatccagcgacgtctgtaggtag

SEQ ID NO: 2938 - DNA, 119 bp, homo sapiens
ctcgaagagccaaatgaggagcgtgacgacacccatggagttcatgaggctgctgtagtagctcagcaggcagccctgcagccacgcacccacaggttgagctcctccgtctggtggtc

SEQ ID NO: 2939 - DNA, 119 bp, homo sapiens
catgaggctgctgtagtagctcagcagggcagccctgcagccacgcacccacaggttgagctcctccgttggtggtcgtaactgtagtgtgctgagttgttggtgatctgatactggat

SEQ ID NO: 2940 - DNA, 119 bp, homo sapiens
acgcacccacaggttgagctcctccgtctggtggtcgtaactgtagtgtgctgagttgttggtgatctgtactggatgcagggccgtggcgagctaggattgcagcagctgaaagggac

SEQ ID NO: 2941 - DNA, 119 bp, homo sapiens
gtagtgtgctgagttgttggtgatctgatactggatgcagggccgtggcgagctaggattgcagcagctaaagggacgccgtccaccaggtaccgcccatccacgttgctcttgattcg

SEQ ID NO: 2942 - DNA, 119 bp, homo sapiens
tctttgacttctttggaggaaaagtccaggtagcgattgctgatccactgaatctcaaaccagtcccgaaaccgttgttgccgcagcatttgaactcgatctgcagcatgtcgatggtc

SEQ ID NO: 2943 - DNA, 119 bp, homo sapiens
aaccagtcccgaaaaccgttgttgccgcagcatttgaactcgatctgcagcatgtcgatggtcttcttctgaaacacctgccaggggtgtctgtgtcccggtagtacttcatgccgttc

SEQ ID NO: 2944 - DNA, 119 bp, homo sapiens
atggtcttcttcatgaaacacctgccaggggtgtctgtgtcccggtagtacttcatgccgttcttgagccttggcccagggtgttctccagcgagccccgaagcagaaagcagcagaga

SEQ ID NO: 2945 - DNA, 119 bp, homo sapiens
ccgttcttgagcccttggcccagggtgttctccagcgagccccgaagcagaaagcagcagagagccacaggaagaggatgatgttgaagagaacacagatagccaggtacggcttcagc

SEQ ID NO: 2946 - DNA, 119 bp, homo sapiens
cagagagccacaaggaagaggatgatgttgaagagaacacagatagccaggtacggcttcagccagggctccatctggcatacttggctgggtccagggcgtcgtagcagatcttccca

SEQ ID NO: 2947 - DNA, 119 bp, homo sapiens
ttcagccagggcttccatctggcatacttggctgggtccagggcgtcgtagcagatcttcccagccagcagttgaagacacaggatagcacccccatccctatcaatgagttgggcaca

SEQ ID NO: 2948 - DNA, 119 bp, homo sapiens
ttcccagccagcgagttgaagacacaggatagcacccccatccctatcaatgagttgggcacaaaatggtctcagaattattcatcacatcgctcctctttcggagttcaatcttcagg

SEQ ID NO: 2949 - DNA, 119 bp, homo sapiens
ggcacaaaatggctctcagaattattcatcacatcgctcctctttcggagttcaatcttcaggaacagtctaggctgaagatgatgatgccagccaacacggagaaccagttcatgagc

SEQ ID NO: 2950 - DNA, 119 bp, homo sapiens
ttcaggaacagtcctaggctgaagatgatgatgccagccaacacggagaaccagttcatgagccagagccttgggccaacttgacccgcttcttctggtcaaacttgactttcagtagc

SEQ ID NO: 2951 - DNA, 119 bp, homo sapiens
atgagccagagcccttgggccaacttgacccgcttcttctggtcaaacttgactttcagtagcgccatgttgccaagtgtagtccgggttgcttcccacagcacagctcccaccccaaa

SEQ ID NO: 2952 - DNA, 119 bp, homo sapiens
agtagcgccatgcttgccaagtgtagtccgggttgcttcccacagcacagctcccaccccaaaccttaagagcccagaggcggagacttagggccttgggaaaagtgcagatggcccaa

SEQ ID NO: 2953 - DNA, 119 bp, homo sapiens
cccaaaccttaacgagcccagaggcggagacttagggccttgggaaaagtgcagatggcccaagctgtaggagctgccctgggggctacccatgtcgagtcccactagcctgggatccc

SEQ ID NO: 2954 - DNA, 119 bp, homo sapiens
gcccaagctgtagggagctgccctgggggctacccatgtcgagtcccactagcctgggatccccgtgaagcagtagtggtggcaggggtctcggaatcacagcttgagcaggggatagt

SEQ ID NO: 2955 - DNA, 119 bp, homo sapiens
gatccccgtgaatgcagtagtggtggcaggggtctcggaatcacagcttgagcaggggatagtcctggtctgggcgttgtttcttcagcgcccttcccagccaagaaggggcagcctga

SEQ ID NO: 2956 - DNA, 119 bp, homo sapiens
ttcctgcatgcattgtgtttatttatgtcagaaggatcaggctcccatgctgcccacccccccaccctccccagggcttactcctcccacaaccctgctctttctcactccaacctttc

SEQ ID NO: 2957 - DNA, 119 bp, homo sapiens
ccccaccctctcccagggcttactcctcccacaaccctgctctttctcactccaacctttcatgccacacaccagtagggggcgggacatgctttattttcagccacagaactagccct

SEQ ID NO: 2958 - DNA, 119 bp, homo sapiens
tcatgccacaacaccagtagggggcgggacatgctttattttcagccacagaactagccctctcagggccaatccccagaacccaaggccctggccctcttcctgagtagatgggcctt

SEQ ID NO: 2959 - DNA, 119 bp, homo sapiens
ctctcagggcccaatccccagaacccaaggccctggccctcttcctgagtagatgggcctttctcttaggccggcctggaaggaggggcaagtaggcaggagatatctcttgagctgtt

SEQ ID NO: 2960 - DNA, 119 bp, homo sapiens
tttctcttagagccggcctggaaggaggggcaagtaggcaggagatatctcttgagctgttgctgctgttcaatgccactttgcaccctgggatctcctggagggaggtggcctccagg

SEQ ID NO: 2961 - DNA, 119 bp, homo sapiens
ttgctgctgtctcaatgccactttgcaccctgggatctcctggagggaggtggcctccaggtgggttggagcagcctgaggaggagcccttccttcccagatctctctgtgggctatca

SEQ ID NO: 2962 - DNA, 119 bp, homo sapiens
ggtgggttggcagcagcctgaggaggagcccttccttcccagatctctctgtgggctatcaaggtacctcagccatgctgagcggggtcccagaccctggggggctcctagcaggcagc

SEQ ID NO: 2963 - DNA, 119 bp, homo sapiens
caaggtacctgcagccatgctgagcggggtcccagaccctggggggctcctagcaggcagcaaacttgcctggatgcgcttgtaccggagcagctcctgctcactgactgagggttgca

SEQ ID NO: 2964 - DNA, 119 bp, homo sapiens
gcaaacttgcgctggatgcgcttgtaccggagcagctcctgctcactgactgagggttgcagccgggcgcagcctgcagcaagtcctccatggtgagcatcagtgctgagctacctggc

SEQ ID NO: 2965 - DNA, 119 bp, homo sapiens
cttcctccaggtcatgaaccctgcgtttgagggcagctgtcatagcatcagagcagagagagtagaggtcgcgcccgtcagctggggagggcagcaatctagcacgtttaccaggctca

SEQ ID NO: 2966 - DNA, 119 bp, homo sapiens
ctgcgtttgagggcagctgtcatagcatcagagcagagagagtagaggtccgcgcccgtcagctggggaggcagcaatctagcacgtttaccaggctcacagatggctctagcttgaat

SEQ ID NO: 2967 - DNA, 119 bp, homo sapiens
ctgaggaaggtaaggctgcactcagtggctactgccttggccagaagggtcttgccggtgccagggggccatggagcagaaggcctgagcgtctcaggcccaggctcagtagctcaggg

SEQ ID NO: 2968 - DNA, 119 bp, homo sapiens
gaagggtcttgccggtgccagggggcccatggagcagaaggcctgagcgtctcaggcccaggctcagtactcagggtgctccagggggagctgaatggtctccaggatctccttcttca

SEQ ID NO: 2969 - DNA, 119 bp, homo sapiens
tgagcgtctcaggcccaggctcagtagctcagggtgctccagggggagctgaatggtctccaggatctcttcttcacctcctgcagcccacccacatcatgccaggacactgaggggat

SEQ ID NO: 2970 - DNA, 119 bp, homo sapiens
cttgggggctccaacggcctgggagtgagctgtctgcagttgctccagtgcctgcccaaagtcctcagcaggagaggaaagccggcagcacacagctccccctcatcctcctcagtcaa

SEQ ID NO: 2971 - DNA, 119 bp, homo sapiens
acggcctgggagtgagctgtctgcagttgctccagtgcctgcccaaagtcctcagccaggagaggaaagcggcagcacacagctccccctcatcctcctcagtcaagccacctgccaaa

SEQ ID NO: 2972 - DNA, 119 bp, homo sapiens
tgcacaccgccgtgctagctgtgccaagttcacctcctggcccaggggaaggtgggcagtgagggcccgaggatgctgagccgctgcccctctgacagagcaggcacctcgagctcatg

SEQ ID NO: 2973 - DNA, 119 bp, homo sapiens
ggcccaggggaaggtgggcagtgagggcccgcaggatgctgagccgctgcccctctgacagagcaggcactcgagctcatgaggaaatgctgtctgcacatcagcaggcaggtcctggg

SEQ ID NO: 2974 - DNA, 119 bp, homo sapiens
ctgagccgctgcccctctgacagagcaggcacctcgagctcatgaggaaatgctgtctgcacatcagcagcaggtcctgggcccggcttgtggtggccacaaccatgaggggagggcag

SEQ ID NO: 2975 - DNA, 119 bp, homo sapiens
ctgttgagggggtcctcattgaggaggaggtgacgcagcacagccatcacacgggcatcctcacccagccatcacggtcccggcccagaaggtccacagctgtgagcaacaggactgca

SEQ ID NO: 2976 - DNA, 119 bp, homo sapiens
catcacacgggcatcctcacccagcccatcacggtcccggcccagaaggtccacagctgtgagcaacagactgcaggccggcaacggcgggcccgggagaagatggcctgcagttttgt

SEQ ID NO: 2977 - DNA, 119 bp, homo sapiens
gaaggtccacagctgtgagcaacaggactgcaggccggcaacggcgggcccgggagaagatggcctgcattttgtctccacagccccactactttctgcacagaggctggagcagggca

SEQ ID NO: 2978 - DNA, 119 bp, homo sapiens
cctggctggaggcgaggcttcaggacagcacagagttcagacaccaaggcctccaggcctggaggagacaactgctccagagagtggattcctctgaagggagccatggaacagggctc

SEQ ID NO: 2979 - DNA, 119 bp, homo sapiens
aggcttcaggacagcacagagttcagacaccaaggcctccaggcctggaggagacaaactgctccagaggtggattcctctgaagggagccatggaacagggctcagggtagaacccac

SEQ ID NO: 2980 - DNA, 119 bp, homo sapiens
ctgggtatctgaaagtgccggtaaagaacaccgtcataatttccattagtgctgtagtggggagaagaccaatttcgatgtgtaactctctggcaaatggaggcccaggcagcaatgag

SEQ ID NO: 2981 - DNA, 119 bp, homo sapiens
attagtgctgtagtggggagaagacacaatttcgatgtgtaactctctggcaaatggaggcccaggcagaatgagcagcttcctttgtcttcaggggcgatggagccttccaagtacct

SEQ ID NO: 2982 - DNA, 119 bp, homo sapiens
ctgaattctgagctctcccatttccagggggtcacagccaagattaaaagccaaagtggcagggacaaggccagtccgtcagcgaggggctctcccagcggtccagagccgggtcccag

SEQ ID NO: 2983 - DNA, 119 bp, homo sapiens
tggcagggacaagcgccagtccgtcagcgaggggctctcccagcggtccagagccgggtcccagtctatagagaggtcccagcgaggttctaggacctgcaccctagccaagtgcggct

SEQ ID NO: 2984 - DNA, 119 bp, homo sapiens
ggtcccagtctatcagagaggtcccagcgaggttctaggacctgcaccctagccaagtgcggctgtgaatgttcgatgactctctggcctgggccacccacacccattcgccctggaag

SEQ ID NO: 2985 - DNA, 119 bp, homo sapiens
gtgcggctgtgaagtgttcgatgactctctggcctgggccacccacacccattcgccctggaagaggccaggccacggagacagctccggctcacccctagtgaatctccagtccctcc

SEQ ID NO: 2986 - DNA, 119 bp, homo sapiens
cctggaagaggccaaggccacggagacagctccggctcacccctagtgaatctccagtccctcccagaatccctggagtcgccgcactgtgccagaaaccgcaaaggaggacaccacgg

SEQ ID NO: 2987 - DNA, 119 bp, homo sapiens
gtccctcccagaactccctggagtcgccgcactgtgccagaaaccgcaaaggaggacaccacgggcggggtgggggccgactgctgtccccagactctggacacagtctggcccgcccg

SEQ ID NO: 2988 - DNA, 119 bp, homo sapiens
caccacgggcgggggtgggggccgactgctgtccccagactctggacacagtctggcccgcccgcggagtcagtcacagccagccgagtccctgggcccagcagcccttgcaacgccgg

SEQ ID NO: 2989 - DNA, 119 bp, homo sapiens
cccgcccgcggagctcagtcacagccagccgagtccctgggcccagcagcccttgcaacgccggccgcgctccagcacccgcggtccgggcactgggagggtctctccgcgcctcacca

SEQ ID NO: 2990 - DNA, 119 bp, homo sapiens
aacgccggccgcgtctccagcacccgcggtccgggcactgggagggtctctccgcgcctcaccagcagcgcccgactcgcggtccgagcccaggccccagcgaggtgccaagcagtgcc

SEQ ID NO: 2991 - DNA, 119 bp, homo sapiens
acccaggccccggagcccagtgccaggagccgcagcagcgcgcggctaaccagtagctgcggcggcccggaccctgctcttcggtgcccgcgtccggcccctccagggctgccaccagc

SEQ ID NO: 2992 - DNA, 119 bp, homo sapiens
ccagtagctgcggcggcccgggaccctgctcttcggtgcccgcgtccggcccctccagggctgccaccacagcgccggccctgccgggctctcccctgcaggcctcagggccagcacca

SEQ ID NO: 2993 - DNA, 119 bp, homo sapiens
cccctccagggctgccaccagcagcgccggccctgccgggctctcccctgcaggcctcagggccagcacaggcccagctccgccgccggccacgggcccccgggtggcagcagcactgc

SEQ ID NO: 2994 - DNA, 119 bp, homo sapiens
gcaggcctcagggccagcaccaggcccagctccgccgccggccacgggcccccgggtggcagcagcactccaacgggggtgtctcggtcggaaagggctccaggacccgcaagacagcc

SEQ ID NO: 2995 - DNA, 119 bp, homo sapiens
ccccgggtggcagcagcactgccaacgggggtgtctcggtcggaaagggctccaggacccgcaagacagcagcgccatggtgacaggacaccaacgaggagggtgaaggagcgcagctt

SEQ ID NO: 2996 - DNA, 119 bp, homo sapiens
ctccaggacccgcaagacagccagcgccatggtgacaggacaccaacgaggagggtgaaggagcgcagctccggagccagagagccagacgactagtgtgcgcgagggccgcttccgct

SEQ ID NO: 2997 - DNA, 119 bp, homo sapiens
ctgaattttaaacattttaaagttcagcttacacattgatttttaaaattgtgtttacacgttgattttaaatgtaagcattagggataggtaaaaagtgaataagcaaagtgaataag

SEQ ID NO: 2998 - DNA, 119 bp, homo sapiens
acgttgattttaaaatgtaagcattagggataggtaaaaagtgaataagcaaagtgaataagcacattcgtgaataagcactgaactaatggagttaaaacatgaatcaaaatatatac

SEQ ID NO: 2999 - DNA, 119 bp, homo sapiens
taagcacattctgtgaataagcactgaactaatggagttaaaacatgaatcaaaatatatacagataaatagatgtaggaaaaacaatcagaaccttcagtgacattttacaatcttat

SEQ ID NO: 3000 - DNA, 119 bp, homo sapiens
atacagataaattagatgtaggaaaaacaatcagaaccttcagtgacattttacaatcttatcaaaaagtatgttagcatttagactatttcaggtaatatagtaaacagttgattccc

SEQ ID NO: 3001 - DNA, 119 bp, homo sapiens
ttatcaaaaagatatgttagcatttagactatttcaggtaatatagtaaacagttgattccccgtaagcatgtatcaaagaaataactatcaaaataactgcatttatgtatagtgtgt

SEQ ID NO: 3002 - DNA, 119 bp, homo sapiens
tccccgtaagcaatgtatcaaagaaataactatcaaaataactgcatttatgtatagtgtgtactaaaactctagtgttaacttatgtaacctcattttgttcatctccatcataaaca

SEQ ID NO: 3003 - DNA, 119 bp, homo sapiens
gtgtactaaaatctctagtgttaacttatgtaacctcattttgttcatctccatcataaacattgtatcttctaatttaattagttcaatgttttttggttcctgaaaaaatacaacat

SEQ ID NO: 3004 - DNA, 119 bp, homo sapiens
aacattgtatccttctaatttaattagttcaatgttttttggttcctgaaaaaatacaacatctttaatttgccaacaaaattggttttaaaaatctcttgagtaacgatatttacctt

SEQ ID NO: 3005 - DNA, 119 bp, homo sapiens
acatctttaattttgccaacaaaattggttttaaaaatctcttgagtaacgatatttacctttctaccaattcaaagccccctagataacaaatgccatcatagtttagagccacaaag

SEQ ID NO: 3006 - DNA, 119 bp, homo sapiens
cctttctaccatattcaaagccccctagataacaaatgccatcatagtttagagccacaaagtttttattggatcaatatcctcggaaagaattagactgttatttatgtaggccttga

SEQ ID NO: 3007 - DNA, 119 bp, homo sapiens
aaagtttttatgtggatcaatatcctcggaaagaattagactgttatttatgtaggccttgataagagttgattttgaattacaactacatggtgccatttattacaacagaatgtgcc

SEQ ID NO: 3008 - DNA, 119 bp, homo sapiens
ttgataagagtctgattttgaattacaactacatggtgccatttattacaacagaatgtgccattgttaagctcataggcacagagattctttctcccaagttaactgctattttcaag

SEQ ID NO: 3009 - DNA, 119 bp, homo sapiens
tgccattgttatagctcataggcacagagattctttctcccaagttaactgctattttcaaggtctgatatggagaccaattgccagaaaatcattttcttcattttgagctattccca

SEQ ID NO: 3010 - DNA, 119 bp, homo sapiens
caaggtctgattatggagaccaattgccagaaaatcattttcttcattttgagctattcccatccatacattagaccttctgttttagtggtactgaaatttaaggatatagtagtgaa

SEQ ID NO: 3011 - DNA, 119 bp, homo sapiens
cccatccatacaattagaccttctgttttagtggtactgaaatttaaggatatagtagtgaactggaggttctcattctataatttggatcaatgtatttaatgtaagaattacccata

SEQ ID NO: 3012 - DNA, 119 bp, homo sapiens
tgaactggaggtttctcattctataatttggatcaatgtatttaatgtaagaattacccataaattttgagttgaaaatgaagttttgttttcacaataccttcccacccaacccaaag

SEQ ID NO: 3013 - DNA, 119 bp, homo sapiens
cataaattttgcagttgaaaatgaagttttgttttcacaataccttcccacccaacccaaagtacacagcaactgtaagaaaatgattggtcaggtatacataaagattggtggaggca

SEQ ID NO: 3014 - DNA, 119 bp, homo sapiens
aaagtacacaggcaactgtaagaaaatgattggtcaggtatacataaagattggtggaggcaaagattatcaaacaggacacagactggttacatgtatttccagcccaatctggcaaa

SEQ ID NO: 3015 - DNA, 119 bp, homo sapiens
ggcaaagattattcaaacaggacacagactggttacatgtatttccagcccaatctggcaaacatctgcagaaaaagttgtgccatttactgtacattcacctccatttctgcatgtgt

SEQ ID NO: 3016 - DNA, 119 bp, homo sapiens
caaacatctgcaagaaaaagttgtgccatttactgtacattcacctccatttctgcatgtgttgtaccccaggctgtcccatcacagtcacctacatttgagccaccttttgctccaaa

SEQ ID NO: 3017 - DNA, 119 bp, homo sapiens
gtgttgtacccacaggctgtcccatcacagtcacctacatttgagccaccttttgctccaaattcagttattgtaattcttgattatttatgataacttgtcggatacagccttgaaaa

SEQ ID NO: 3018 - DNA, 119 bp, homo sapiens
caaattcagttaattgtaattcttgattatttatgataacttgtcggatacagccttgaaaacctacagttcattttctattgccatgggatttacaagatttaaagaagatactcctc

SEQ ID NO: 3019 - DNA, 119 bp, homo sapiens
aaaacctacaggttcattttctattgccatgggatttacaagatttaaagaagatactcctccaatataaagtctgtatttgtgtccagagaactcattttagtggaggccttttctgt

SEQ ID NO: 3020 - DNA, 119 bp, homo sapiens
cctccaatatagaagtctgtatttgtgtccagagaactcattttagtggaggccttttctgttacattttcccatctagatccaggtagccttctgcaccaactcttcctgcttttatt

SEQ ID NO: 3021 - DNA, 119 bp, homo sapiens
ctgttacatttatcccatctagatccaggtagccttctgcaccaactcttcctgcttttattatatgccagtacttccgtttatagttactttttggagagtttctagaatgatagttc

SEQ ID NO: 3022 - DNA, 119 bp, homo sapiens
tattatatgccaagtacttccgtttatagttactttttggagagtttctagaatgatagttctgtcgccaggttgtagcgaagttgaacggaactatttactaaagagatgcataaaaa

SEQ ID NO: 3023 - DNA, 119 bp, homo sapiens
ctgattgggcttttaagtgttgtgcagcataaaataggataccatctgcagcgagaggctgaaactgcattgaatatgtgtcttttttcgaacatgaaaggaagcaaaagacatccagg

SEQ ID NO: 3024 - DNA, 119 bp, homo sapiens
catctgcagcgagaggctgaaactgcaattgaatatgtgtcttttttcgaacatgaaaggaagcaaaagcatccaggataactcattgcttctgaaagatggatcacttatggataaag

SEQ ID NO: 3025 - DNA, 119 bp, homo sapiens
cttgttcacagtagattccagtggttcctagaggacagaaacaggtgtatccatgaggtaatgaaatgcggttgctcctctgctacagtggtgtggagggtcatgttcaggatcacagg

SEQ ID NO: 3026 - DNA, 119 bp, homo sapiens
tgaggtaatgaaatgcaggttgctcctctgctacagtggtgtggagggtcatgttcaggatcacaggtaaaactgtctctgtgcagaatgatcctttccacccagtggtacaattgcag

SEQ ID NO: 3027 - DNA, 119 bp, homo sapiens
taaacactagttccactctctatgcatgtcccaccattgccacatttcattaaactgcagggagaagcagacactggccaacactgcgtccagcatttgggtggccctcaggatttccc

SEQ ID NO: 3028 - DNA, 119 bp, homo sapiens
tgcagggagaagcatgacactggccaacactgcgtccagcatttgggtggccctcaggatttcccagtctctgaaatggccatccttctcagtgcgaacttgaagagtgaaaatacagc

SEQ ID NO: 3029 - DNA, 119 bp, homo sapiens
cttgaaaaccatttttaaaatctgctccatttggtaagagatctggagtgtattcactgtagccacctaataaaactgactgaagacattgagaccaaccagtcttcctggggcgataa

SEQ ID NO: 3030 - DNA, 119 bp, homo sapiens
tccatttggtaagagatctggagtgtattcactgtagccacctacataaaactgactgaagacattgagccaaccagtcttcctggggcgataatggatttatttttatgatcatctac

SEQ ID NO: 3031 - DNA, 119 bp, homo sapiens
cttcagccagccctcttggaagaacttgcccagatgaacagtgtggactccaaggctcagattgaggggtcgctcctgatgcttgctatgccagaccccaggttataactataaaccac

SEQ ID NO: 3032 - DNA, 119 bp, homo sapiens
ctccaaggctcagattgaggggctcgctcctgatgcttgctatgccagaccccaggttataactataaacacactgccattgagcaggcccacagccaggaagtcatcgccattcaacc

SEQ ID NO: 3033 - DNA, 119 bp, homo sapiens
catggcctttctgtccagtaaaaaatatcaagttattttgcagtgctgagtggttgtttgccagctgaacttcaggtggaattcataatggaagctgatgtctgagatccgtgaataag

SEQ ID NO: 3034 - DNA, 119 bp, homo sapiens
gttattttgcagtgctgagtggttgtttgccagctgaaacttcaggtggaattcataatggaagctgattctgagatccgtgaataagccaggaatgaggtgtatccaaaggcatctgt

SEQ ID NO: 3035 - DNA, 119 bp, homo sapiens
agctgaaacttcaggtggaattcataatggaagctgatgtctgagatccgtgaataagccaggaatgagtgtatccaaaggcatctgtgccactgaaccttggctgagtaatattaata

SEQ ID NO: 3036 - DNA, 119 bp, homo sapiens
catcagtgcagaggggtccagacctcccatatgggcagaggcagacaatatctgttccggattttggaaacaggtggcaccatttccacatgggttgttttcacaacttgcaaactggc

SEQ ID NO: 3037 - DNA, 119 bp, homo sapiens
gttccggattttggaacacaggtggcaccatttccacatgggttgttttcacaacttgcaaactggcacgcttgcctgaatacagccttggacactcacaaaacagattttcattatca

SEQ ID NO: 3038 - DNA, 119 bp, homo sapiens
ctgatgcaggtgccattgttgcggcacagatgatgagcacaccaagggacgtggcagttctcaatattcttccatgtcgtgcttcatcgatgatgaagaattctttgttgtttacttga

SEQ ID NO: 3039 - DNA, 119 bp, homo sapiens
gtggcagttctcaatattctttccatgtcgtgcttcatcgatgatgaagaattctttgttgtttacttgaggtctagaatgcagcccctgaacccataaacaggacctgctttcttatg

SEQ ID NO: 3040 - DNA, 119 bp, homo sapiens
attctttgttgtttacttgaaggtctagaatgcagcccctgaacccataaacaggacctgctttcttataatttgaacatttgcaggaatatggccaaggaacattgattcaaaatatg

SEQ ID NO: 3041 - DNA, 119 bp, homo sapiens
cgtattgtgataggggtgaatgcatttgtgttaatgctgtaattagcagaaacagtcaaaatattttgaaatttccacacccatatttaactgatggccttccttccacaagaaataaa

SEQ ID NO: 3042 - DNA, 119 bp, homo sapiens
tgctgtaattagcagaaacagtcaaaatattttgagaatttccacacccatatttaactgatggccttcttccacaagaaataaatgaagaaactgctttccacaattattcccattac

SEQ ID NO: 3043 - DNA, 119 bp, homo sapiens
tgtaaagaatagttccatttaaactgtttgtttttatagtcaagtagatggtaacagttctgttatgttcttctccaggacaaacttcaaaaagggcagttctaaataggaattcccat

SEQ ID NO: 3044 - DNA, 119 bp, homo sapiens
ttgtttttatagtcaagtagatggtaacagttctgttatgttccttctccaggacaaacttcaaaaaggcagttctaaataggaattcccattgaaagatggaaagaataaacctgcat

SEQ ID NO: 3045 - DNA, 119 bp, homo sapiens
ctttttcacagaagcggccagtgaaatgtagtggacagtcacattggaatgacactatgccactggagagaagatggcatggcatgtgcctccattgtggcatacatcctgctggcaca

SEQ ID NO: 3046 - DNA, 119 bp, homo sapiens
atgccactggagaggaagatggcatggcatgtgcctccattgtggcatacatcctgctggcacacagaggtgctgcaacagaggggctgacagaagtccacatggtatcaaccccttgt

SEQ ID NO: 3047 - DNA, 119 bp, homo sapiens
ctggcacacagagggtgctgcaacagaggggctgacagaagtccacatggtatcaaccccttgtgtcactcagaagcatcaacaaaggaggctgttggagacagcataaatccctggga

SEQ ID NO: 3048 - DNA, 119 bp, homo sapiens
ctggattttcccatgaaggtctggaaatccaccaatgaagacagatcctgattttggcaggggttttccagtacatgattgatagattcgcatatttgtgtattcctccctaaaatagt

SEQ ID NO: 3049 - DNA, 119 bp, homo sapiens
ccaatgaagacagatcctgattttggcaggggttttccgagtacatgattgatagattcgcatatttgttattcctccctaaaatagtcagctcagcgttacatggatccaattcttgc

SEQ ID NO: 3050 - DNA, 119 bp, homo sapiens
ctttaaagtaccattttcaataaacaattgaataaaaaatccatctactaaatttgagtcttgcttgactacagcagaagtccataggagctgaaggtctgaaattctagggagatgtt

SEQ ID NO: 3051 - DNA, 119 bp, homo sapiens
aaaatccatctactaaatttgagtcttgcttgacatacagcagaagtccataggagctgaaggtctgaattctagggagatgttattttgtggatttaaagccacattctgaaattcta

SEQ ID NO: 3052 - DNA, 119 bp, homo sapiens
tacagcagaagtccataggagctgaaggtctgaaattctagggagatgttattttgtggatttaaagcccattctgaaattctagataagaatctccataataacgaacacaactgaaa

SEQ ID NO: 3053 - DNA, 119 bp, homo sapiens
cagaaatcatcagccgttgaggtgccagaatggattccagtgaagacaaagtaagagatctagtgaaggaagatgccggcttgcagtgggaaattcctgatattgcacactaggctgaa

SEQ ID NO: 3054 - DNA, 119 bp, homo sapiens
tctagtgaagggaagatgccggcttgcagtgggaaattcctgatattgcacactaggctgaagttcccattggaccattctgaagaagtcttgacctcttttttaagagaggtcatata

SEQ ID NO: 3055 - DNA, 119 bp, homo sapiens
tgaagttcccatttggaccattctgaagaagtcttgacctcttttttaagagaggtcatataatctgtaaatatggccaatctggcctaattacagacatggaggaagacgtctgtatt

SEQ ID NO: 3056 - DNA, 119 bp, homo sapiens
tataatctgtaaaatatggccaatctggcctaattacagacatggaggaagacgtctgtattgaaagtgtggagttgctgaaactgtataaaatgcaacattggtggtgacttctgaaa

SEQ ID NO: 3057 - DNA, 119 bp, homo sapiens
tattgaaagtgctggagttgctgaaactgtataaaatgcaacattggtggtgacttctgaaaaatcaggactgagcctgtcaatggtggcagattatttttgaagtcatttgcatgtgt

SEQ ID NO: 3058 - DNA, 119 bp, homo sapiens
gaaaaatcaggcactgagcctgtcaatggtggcagattatttttgaagtcatttgcatgtgtaatttctaatatgtctttaaagtaacatccggataaatttgtaagtttaactcaaaa

SEQ ID NO: 3059 - DNA, 119 bp, homo sapiens
gtgtaatttctgaatatgtctttaaagtaacatccggataaatttgtaagtttaactcaaaatccagagactatcacttgggtgaagtttgaacagtgtatgagatcctttactttttt

SEQ ID NO: 3060 - DNA, 119 bp, homo sapiens
aaaatccagagaactatcacttgggtgaagtttgaacagtgtatgagatcctttacttttttccatgtcaataagctctcttgatttagtacctcagtgggtcccatagttatgccata

SEQ ID NO: 3061 - DNA, 119 bp, homo sapiens
ttttccatgtccaataagctctcttgatttagtacctcagtgggtcccatagttatgccatattgtcttttttcaatagttttaaaatgttttctgatactgacagttcatcagtagtc

SEQ ID NO: 3062 - DNA, 119 bp, homo sapiens
catattgtcttattttcaatagttttaaaatgttttctgatactgacagttcatcagtagtcatttttgagtcaaatcagaattcatcaagtctgaagagatagtttgtgaagggacaa

SEQ ID NO: 3063 - DNA, 119 bp, homo sapiens
agtcatttttgaagtcaaatcagaattcatcaagtctgaagagatagtttgtgaagggacaatggataacaagtcttatccaaacataaattaacatccaaattacttgatagggtaat

SEQ ID NO: 3064 - DNA, 119 bp, homo sapiens
acaatggataaacaagtcttatccaaacataaattaacatccaaattacttgatagggtaatggattctccaaggatgaggataaaattgttctttttgcactctttttagaaggaaat

SEQ ID NO: 3065 - DNA, 119 bp, homo sapiens
taatggattcttccaaggatgaggataaaattgttctttttgcactctttttagaaggaaataaagatgcacttctgtgaatgccactgatggtgttatttcagtagcagaagaaaatg

SEQ ID NO: 3066 - DNA, 119 bp, homo sapiens
aaataaagatggcacttctgtgaatgccactgatggtgttatttcagtagcagaagaaaatgaatgcccgaagtgatagtttgagctcccattagtgcataccagctggctaatatcgc

SEQ ID NO: 3067 - DNA, 119 bp, homo sapiens
aatgaatgcccagaagtgatagtttgagctcccattagtgcataccagctggctaatatcgctgagttctccagaatgtctcataaaagtgggactgtttgctatgcaaaacttgatct

SEQ ID NO: 3068 - DNA, 119 bp, homo sapiens
tcgctgagttcatccagaatgtctcataaaagtgggactgtttgctatgcaaaacttgatctgagaattacgagaggattttatttcagtcatagaacatgttgcacatgtttggctta

SEQ ID NO: 3069 - DNA, 119 bp, homo sapiens
atctgagaattcacgagaggattttatttcagtcatagaacatgttgcacatgtttggcttaattctctaaagaatcagcagcctgtgatttgatgtttgtgagtctctggttgcttga

SEQ ID NO: 3070 - DNA, 119 bp, homo sapiens
cttaattctcttaaagaatcagcagcctgtgatttgatgtttgtgagtctctggttgcttgaagcctcataatagcctgatattcactgggattgaaggcttttgtactgaaccggtgc

SEQ ID NO: 3071 - DNA, 119 bp, homo sapiens
ttgaagcctcagtaatagcctgatattcactgggattgaaggcttttgtactgaaccggtgcagagctgtgagtttaagatggttacctgtttagatataattaccttagcaggaaaaa

SEQ ID NO: 3072 - DNA, 119 bp, homo sapiens
gtgcagagctgatgagtttaagatggttacctgtttagatataattaccttagcaggaaaaatgggagaatcgaggggctgagcaatctccagtgctctcttcttgaaattaaagaatc

SEQ ID NO: 3073 - DNA, 119 bp, homo sapiens
aaaatgggagacatcgaggggctgagcaatctccagtgctctcttcttgaaattaaagaatcagctgaaattcttcaatatcctcttgagcccccctagagacaactggagttgcactt

SEQ ID NO: 3074 - DNA, 119 bp, homo sapiens
aatcagctgaatattcttcaatatcctcttgagcccccctagagacaactggagttgcacttatggaggagctataagcaggaatccacgggagagtaatgactgcctgtttagctcaa

SEQ ID NO: 3075 - DNA, 119 bp, homo sapiens
acttatggaggcagctataagcaggaatccacgggagagtaatgactgcctgtttagctcaatatcagccctggaatgcttctaattactgaagtcgttggggtagcagataaagcaac

SEQ ID NO: 3076 - DNA, 119 bp, homo sapiens
tcaatatcagcccctggaatgcttctaattactgaagtcgttggggtagcagataaagcaacagtctgaagttctcaaataataaagattgtgtaggaaaaataaaatctgacattaag

SEQ ID NO: 3077 - DNA, 119 bp, homo sapiens
caacagtctgacagttctcaaataataaagattgtgtaggaaaaataaaatctgacattaaggaagacagataaatggggtccttgctctcctatcaggaaaaaagaaacctagtgtgg

SEQ ID NO: 3078 - DNA, 119 bp, homo sapiens
taaggaagacatgataaatggggtccttgctctcctatcaggaaaaaagaaacctagtgtggctgctgagttcgaataggcatatgtgataccgatgttttgtcctggacaatttgtgc

SEQ ID NO: 3079 - DNA, 119 bp, homo sapiens
gtggctgctgaagttcgaataggcatatgtgataccgatgttttgtcctggacaatttgtgctgggtcagaataccaaaattcaggaatcgagaagaggaaacatctgcggaagaaaga

SEQ ID NO: 3080 - DNA, 119 bp, homo sapiens
gtgctgggtcacgaataccaaaattcaggaatcgagaagaggaaacatctgcggaagaaagaagactgtttttgctgaaagctctctagtgacaatcagttcttggagtaagtagcttt

SEQ ID NO: 3081 - DNA, 119 bp, homo sapiens
aagaagactgtgttttgctgaaagctctctagtgacaatcagttcttggagtaagtagctttccaaggggtgctaattcttaatgttgccaaaccagtggttgggagaatgtcgtgctt

SEQ ID NO: 3082 - DNA, 119 bp, homo sapiens
cttgatcaactgggtaagtgtccattatggctggtattctagtagcctttatagatggaaagctgctgacaaagtctcagaagggggaattgtatatgtctgtgtggaaatgggatctg

SEQ ID NO: 3083 - DNA, 119 bp, homo sapiens
ttctagtagcctttatagatggaaagctgctgaccaaagtctcagaagggggaattgtatatgtctgtgggaaatgggatctgttctttgaaagatgggagttaaacaggtaattctcc

SEQ ID NO: 3084 - DNA, 119 bp, homo sapiens
aagtctcagaagggggaattgtatatgtctgtgtggaaatgggatctgttctttgaaagatgggagttaacaggtaattctccttatttcatcaccacaaagaagcccaatggagcagg

SEQ ID NO: 3085 - DNA, 119 bp, homo sapiens
ctggttggcatttgcaaacatatccattgatgtgatcttcacagtctgcaccatgtagacatggtgatgagagcattcatttatattaatttcacaaaattgaccagaaaatccaggaa

SEQ ID NO: 3086 - DNA, 119 bp, homo sapiens
tggcatttgcaaacatatccattgatgtgatcttcacagtctgcaccatgtagacatggtgatgaagagattcatttatattaatttcacaaaattgaccagaaaatccaggaagacat

SEQ ID NO: 3087 - DNA, 119 bp, homo sapiens
ctgcagtcaaaagtatgtccaggcccatcaacacagatccctccattaagacagatgactgaattaagtcaggctcagcacaattatcaatgcttttttcacagtatgcaccagtgtat

SEQ ID NO: 3088 - DNA, 119 bp, homo sapiens
ctccattaagacagatgactgaattaagttcaggctcagcacaattatcaatgcttttttcacagtatgaccagtgtatccacgtgggcaaatgcaagtaaatccatgtgctgacttct

SEQ ID NO: 3089 - DNA, 119 bp, homo sapiens
acaattatcaatgcttttttcacagtatgcaccagtgtatccacgtgggcaaatgcaagtaaatccatggctgacttctgacagaagccttcattcatacaagggattgatgtgcagtc

SEQ ID NO: 3090 - DNA, 119 bp, homo sapiens
cttccatgtagacaaggatttgaaaggcaatcattggcgtttgtttcacagtgtgttccaaaaaacccatcttgcagtcacaggtataatgattgatgccatcgatacaaactccatca

SEQ ID NO: 3091 - DNA, 119 bp, homo sapiens
gtgttccaaaaaacccactcttgcagtcacaggtataatgattgatgccatcgatacaaactccatcatgagacagggctctgataggcattcatctagatttatttcacagttgatgc

SEQ ID NO: 3092 - DNA, 119 bp, homo sapiens
ctgtataaccaggggcacagaggcagttgtatccatcagtcctgtagacacaattttcttcatctagacaggtgagattttacatttatttacatcaagttcacagaagggcccatggt

SEQ ID NO: 3093 - DNA, 119 bp, homo sapiens
ttgtatccatcagtcctgtagacacaattttcttcatctagacaaggtgagattttacatttatttacacaagttcacagaagggcccatggtactcaggttcacaattacaaaaaaat

SEQ ID NO: 3094 - DNA, 119 bp, homo sapiens
cttctctacaaatacaatgctgatttgcgtctaccaaagctaagcatgttgagttgtttctgcaagggtatgaagtaggtcacaaaggttatagcgttggtggcaaaattgtccagtat

SEQ ID NO: 3095 - DNA, 119 bp, homo sapiens
tgttgagttgtttctgcaagggttatgaagtaggtcacaaaggttatagcgttggtggcaaaattgtccgtataaaggggtgggcacagacatacaaattgtccagggatggtagattc

SEQ ID NO: 3096 - DNA, 119 bp, homo sapiens
tagcgttggtggcaaaattgtccagtataaaggggtgggcacagacatacaaattgtccagggatggtaattcatgacaaagacctccattcatgcatggatcagagtcgcattcattt

SEQ ID NO: 3097 - DNA, 119 bp, homo sapiens
atacaaattgtccagggatggtagattcatgacaaagacctccattcatgcatggatcagagtcgcattatttatttcttcactacagttctgtccagtccatccagatgtacactcac

SEQ ID NO: 3098 - DNA, 119 bp, homo sapiens
ctttaaatcctgggacacacttgcggaagaaatatccccttaaatgtgtactagttgttccatttttgcggacgcagatttgcagtcttcagtatctatctcacagatgttcctttcat

SEQ ID NO: 3099 - DNA, 119 bp, homo sapiens
gtgtactagttgttccatttttgcaggacgcagatttgcagtcttcagtatctatctcacagatgttccttcatatctttgcagaccgctacagttacaattgtgcgaaagggccaggc

SEQ ID NO: 3100 - DNA, 119 bp, homo sapiens
cagtatctatctcacagatgttcctttcatatctttgcagaccgctacagttacaattgtgcgaaagggcaggcagaggccatgcactgatatactgtggttccctaagcaatagtcaa

SEQ ID NO: 3101 - DNA, 119 bp, homo sapiens
tacagttacaattgtgcgaaagggccaggcagaggccatgcactgatatactgtggttccctaagcaatgtcaacattgacaacacacaatctgccaatgtaactaagagaacagctgc

SEQ ID NO: 3102 - DNA, 119 bp, homo sapiens
ttattcaaaaatgcttcatttaatgaagtttgttataataattttggtatgtgtatgggtaatacaatgtatgtactctagaattgcttaaatgaatgatttctatatcattttactat

SEQ ID NO: 3103 - DNA, 119 bp, homo sapiens
ggtaatacaatgatatgtactctagaattgcttaaatgaatgatttctatatcattttactataaggattaagaaccaagattatttggttttctagagcataataaagagagaaaata

SEQ ID NO: 3104 - DNA, 119 bp, homo sapiens
tactataaggatttaagaaccaagattatttggttttctagagcataataaagagagaaaatatatcaggtatgtaagtgccttagacaaaaagatttagacacttgatctagtggttt

SEQ ID NO: 3105 - DNA, 119 bp, homo sapiens
aaaatatatcagtgtatgtaagtgccttagacaaaaagatttagacacttgatctagtggtttcaagacggccccaacccaaaaatacattcaatatgacactttcatatgcagttcga

SEQ ID NO: 3106 - DNA, 119 bp, homo sapiens
tggtttcaagactggccccaacccaaaaatacattcaatatgacactttcatatgcagttcgatatctttttgctttaaaggtaaaaatatacccacataaaacttttacttgaaggca

SEQ ID NO: 3107 - DNA, 119 bp, homo sapiens
gttcgatatcttttttgctttaaaggtaaaaatatacccacataaaacttttacttgaaggcagaaaagttgcatagtatagccaaaataaataaataaacctaaaaccaactattcaa

SEQ ID NO: 3108 - DNA, 119 bp, homo sapiens
aaggcagaaaagtttgcatagtatagccaaaataaataaataaacctaaaaccaactattcaacttgttataaaatcacggacatcacggcagaaattacaatagtcttagaataaata

SEQ ID NO: 3109 - DNA, 119 bp, homo sapiens
attcaacttgttaataaaatcacggacatcacggcagaaattacaatagtcttagaataaataattattgacttttgggatcagaaataatttaagaaaatcctggtcaaattatacta

SEQ ID NO: 3110 - DNA, 119 bp, homo sapiens
taaataattattagacttttgggatcagaaataatttaagaaaatcctggtcaaattatactatactttgtgccatattcacataaagctctatttttacaagcctcctgactctacag

SEQ ID NO: 3111 - DNA, 119 bp, homo sapiens
atactatacttttgtgccatattcacataaagctctatttttacaagcctcctgactctacagaaatagttttgaaacttcacctgattttcttatggacttttagattctacactttg

SEQ ID NO: 3112 - DNA, 119 bp, homo sapiens
ctacagaaatagtttttgaaacttcacctgattttcttatggacttttagattctacactttgaaacagactcttacttataactgaaaattatgttttggatatatttaacattacac

SEQ ID NO: 3113 - DNA, 119 bp, homo sapiens
actttgaaacagaactcttacttataactgaaaattatgttttggatatatttaacattacacagaaaagtgaatctcctaaaatagcctgtaaaggaaacaggttaaatttaaaactt

SEQ ID NO: 3114 - DNA, 119 bp, homo sapiens
ttacacagaaaatgtgaatctcctaaaatagcctgtaaaggaaacaggttaaatttaaaacttccagaagaaagccagaagacacactgctataatcaagcaacttgtatgttcagaaa

SEQ ID NO: 3115 - DNA, 119 bp, homo sapiens
aaacttccagaaagaaagccagaagacacactgctataatcaagcaacttgtatgttcagaaagtgaaaaaataattactttagtactttaaaaatgtgttcactttctaaatgaaaca

SEQ ID NO: 3116 - DNA, 119 bp, homo sapiens
cagaaagtgaaaaaaataattactttagtactttaaaaatgtgttcactttctaaatgaaacagaagaacatgagatgtgttctgaagagtgtataatcttacctatgtatagtacatt

SEQ ID NO: 3117 - DNA, 119 bp, homo sapiens
gaaacagaagaaccatgagatgtgttctgaagagtgtataatcttacctatgtatagtacattacctgggacaggtatcatgtctcattgtcataacattttgaaaaatatcttccagt

SEQ ID NO: 3118 - DNA, 119 bp, homo sapiens
tacattacctggggacaggtatcatgtctcattgtcataacattttgaaaaatatcttccagttagagggattcaataaataataaatgtatgaatgaatatatttcattctgttatga

SEQ ID NO: 3119 - DNA, 119 bp, homo sapiens
tccagttagaggagattcaataaataataaatgtatgaatgaatatatttcattctgttatgatatttcggtagcaagtagggattggtgacttagacataaatttgaggcttcaaaaa

SEQ ID NO: 3120 - DNA, 119 bp, homo sapiens
ttatgatatttctggtagcaagtagggattggtgacttagacataaatttgaggcttcaaaaacaggtggagtcatgaacacttcacagtctgggcatggtattaagaaattaacatcc

SEQ ID NO: 3121 - DNA, 119 bp, homo sapiens
caaaaacaggtgggagtcatgaacacttcacagtctgggcatggtattaagaaattaacatcccagactagcaaatctttcctggtcttaagtaacaatatggctggtatgatttagtc

SEQ ID NO: 3122 - DNA, 119 bp, homo sapiens
acatcccagacttagcaaatctttcctggtcttaagtaacaatatggctggtatgatttagtctttggccattaaacattttataaacccccagaaaaattttttgaagatttcagggc

SEQ ID NO: 3123 - DNA, 119 bp, homo sapiens
ttagtctttggctcattaaacattttataaacccccagaaaaattttttgaagatttcagggcaaaaaatgtggtaatatgcagacctgtttgcaatacatcatttatataatgaattt

SEQ ID NO: 3124 - DNA, 119 bp, homo sapiens
cagggcaaaaaaatgtggtaatatgcagacctgtttgcaatacatcatttatataatgaattttaatctcacccatttaaaatacactttaaaagaaaatgtttatacgctattcatta

SEQ ID NO: 3125 - DNA, 119 bp, homo sapiens
gaattttaatctgcacccatttaaaatacactttaaaagaaaatgtttatacgctattcattaactttggtccgttaacatcatcaacattattagtgtctatcattataatactatca

SEQ ID NO: 3126 - DNA, 119 bp, homo sapiens
tatgagacaatatcaagaactcattaaagtgttgataaattacaaaaattttgtaatttatccaagatttctggatatcaaaaaataatggcaaacaaaagagaatcacaaaatcagaa

SEQ ID NO: 3127 - DNA, 119 bp, homo sapiens
tgtaatttatccaagattctctggatatcaaaaaataatggcaaacaaaagagaatcacaaaatcagaaaaaggaaataacatcacaaaacgaaggataattttcttagtaaataaaaa

SEQ ID NO: 3128 - DNA, 119 bp, homo sapiens
agaatcacaaaatcagaaaaaaggaaataacatcacaaaacgaaggataattttcttagtaaataaaaagcttctgaaaatcattgtttcattaaacaagtatttgttgagcactattc

SEQ ID NO: 3129 - DNA, 119 bp, homo sapiens
gatgactatcaatttaattataactttttgatatgtgatattatctgctcaaatgatacataaatacctggtctattaatttcatctttacaaacagcttcatgttgacactcattttc

SEQ ID NO: 3130 - DNA, 119 bp, homo sapiens
acataaatacctgggtctattaatttcatctttacaaacagcttcatgttgacactcattttcttgatctcagttgtattttccagatacatgttgccagcccatctgagaaaacatag

SEQ ID NO: 3131 - DNA, 119 bp, homo sapiens
attttcttgatcatcagttgtattttccagatacatgttgccagcccatctgagaaaacatagataccgtattcctgactgtcttcttcactcaaacaactgcatccatttgcacaaat

SEQ ID NO: 3132 - DNA, 119 bp, homo sapiens
ctcttttgtgccttcatgtgggaaccaacatgaagaattattatcttcaggatcgttcacataggttgctcttcagtgcagtttgcagccagaaagaaataggcatcaataaccccttg

SEQ ID NO: 3133 - DNA, 119 bp, homo sapiens
ggaaccaacatgaagaattattatcttcaggatcgttcacataggttgcatcttcagtgcagtttgcagcagaaagaaataggcatcaataaccccttggcacttttcgccttcagatc

SEQ ID NO: 3134 - DNA, 119 bp, homo sapiens
ctgcaaatcccaattgccacacatattcaaattgagcaggacctttatcttggcaaataccatggaagggactccacagtagcagaggtgttgatgaattaggtaaacattcttcaaaa

SEQ ID NO: 3135 - DNA, 119 bp, homo sapiens
acctttatcttggcaaataccatggaaggtgactccacagtagcagaggtgttgatgaattaggtaaacttcttcaaaaaccaacatggattttttgtgcaccctggaatgcatacata

SEQ ID NO: 3136 - DNA, 119 bp, homo sapiens
ctgcaaggataatctttctcacatttcttacatgtagcattattcctcaaaggaaatgactcacatgattttgaatgctcttacaaagcaaatctgtaaatattggtgaacagatgcac

SEQ ID NO: 3137 - DNA, 119 bp, homo sapiens
ataatctttctcacatttcttacatgtagcattattcctcaaaggaaatgactcacatgatgtttgaatctcttacaaagcaaatctgtaaatattggtgaacagatgcacataacatc

SEQ ID NO: 3138 - DNA, 119 bp, homo sapiens
atttgatattttgatgcagtcagtaccattctgacatggtactaatgaaaactcactgacatcagtttcccattttggctggaagatccttttgggcattcataagtataagcagaact

SEQ ID NO: 3139 - DNA, 119 bp, homo sapiens
ggtactaatgaaaactcactgacatcagtttcaccattttggctggaagatccttttgggcattcataatataagcagaactgctatttgggcaaattcctcttttccaaaaaagcaga

SEQ ID NO: 3140 - DNA, 119 bp, homo sapiens
tttggctggaagatccttttgggcattcataagtataagcagaactgctatttgggcaaattcctctttccaaaaaagcagagaaacacaaggttttgctgacacctcacagaatggac

SEQ ID NO: 3141 - DNA, 119 bp, homo sapiens
ctgtaaatggtgggtgacagacacattcatatgcttgctcatcccaattttctcttttattaatgcaacgccattatttttacatggtttaaaagaacatgcatcaagttcctggcagt

SEQ ID NO: 3142 - DNA, 119 bp, homo sapiens
tttattaatgcaactgccattatttttacatggtttaaaagaacatgcatcaagttcctggcagtatttccagaaaatggaggctggcaatggcagctatatgtcttgctccaagcttc

SEQ ID NO: 3143 - DNA, 119 bp, homo sapiens
tcctggcagtattttccagaaaatggaggctggcaatggcagctatatgtcttgctccaagcttcactagacatttaccatgaccagagcaaaattctgaactcagagattcctggcag

SEQ ID NO: 3144 - DNA, 119 bp, homo sapiens
tccaagcttcactaagacatttaccatgaccagagcaaaattctgaactcagagattcctggcagaactctgtttcactgtcacatttagtcgaagtcccagtggacaaggtgatggac

SEQ ID NO: 3145 - DNA, 119 bp, homo sapiens
ttcctggcagaactgctgtttcactgtcacatttagtcgaagtcccagtggacaaggtgatggaccactgccataactgtgataaaataatgtgtcccaacactcagccacttagaatt

SEQ ID NO: 3146 - DNA, 119 bp, homo sapiens
ggtgatggaccacttgccataactgtgataaaataatgtgtcccaacactcagccacttagaattaacatgtgcattccttttagtctgcagccaaaaagtaactgatcttccgttgtg

SEQ ID NO: 3147 - DNA, 119 bp, homo sapiens
acttagaattaacagtgtgcattccttttagtctgcagccaaaaagtaactgatcttccgttgtggtatttgcacacagccaacgaaagatgtttcagaaacattcatcaaatttattt

SEQ ID NO: 3148 - DNA, 119 bp, homo sapiens
ttccgttgtggtattttgcacacagccaacgaaagatgtttcagaaacattcatcaaatttatttctggaattgaagagatggttcagaagaaattacaaggatatctcctaattgaat

SEQ ID NO: 3149 - DNA, 119 bp, homo sapiens
aaatttatttctggaaattgaagagatggttcagaagaaattacaaggatatctcctaattgaatttgcaagggcaaatctggggaacagcttgattgcctgaagtatctattttagtg

SEQ ID NO: 3150 - DNA, 119 bp, homo sapiens
ctaattgaatttgcaaagggcaaatctggggaacagcttgattgcctgaagtatctattttagtgtttaacccaaaaaccagcaatctctgtagaagtccaagcagatgttttctgtta

SEQ ID NO: 3151 - DNA, 119 bp, homo sapiens
tattttagtgtttacacccaaaaaccagcaatctctgtagaagtccaagcagatgttttctgttagtgtcaatttaccacatatgatgagggttgtggatgccattcttccaccaattg

SEQ ID NO: 3152 - DNA, 119 bp, homo sapiens
ttttctgttagtgtccaatttaccacatatgatgagggttgtggatgccattcttccaccaattgccgttacatgtttttccatttatgaaagagctgtgaaaaaccatcaggctcaga

SEQ ID NO: 3153 - DNA, 119 bp, homo sapiens
ccaccaattgccgtctacatgtttttccatttatgaaagagctgtgaaaaaccatcaggctcagaatgagattgatttgtcagtcattttcgggtagctgtattttacagtttatcata

SEQ ID NO: 3154 - DNA, 119 bp, homo sapiens
ttcaatctaatcaaaacacagcacagccaagattcttttacagatggtttcaattttcttgggagataacattcctcttctgattagttttcaaaaaacacctttaaaacgtagaagag

SEQ ID NO: 3155 - DNA, 119 bp, homo sapiens
tagttaagtaatgtttaatgtatctaaataagctcagtaacttcttttcattgaacatgattatttatagaaaacatgcaagagattaagaaaccatatttatttcttctttggtacaa

SEQ ID NO: 3156 - DNA, 119 bp, homo sapiens
tgattatttataagaaaacatgcaagagattaagaaaccatatttatttcttctttggtacaaccagagtgttacctcaaacctttaaaataaataatctcatcaataaaatttatgaa

SEQ ID NO: 3157 - DNA, 119 bp, homo sapiens
gtacaaccagagatgttacctcaaacctttaaaataaataatctcatcaataaaatttatgaatgccaggtattaaaattatttctttgctttcacatagaagcgctcaaaatattaac

SEQ ID NO: 3158 - DNA, 119 bp, homo sapiens
tatgaatgccagagtattaaaattatttctttgctttcacatagaagcgctcaaaatattaacaggtttgggtaaagtacatacagttcaacaaaagttcaaggtgaagaaggaaacca

SEQ ID NO: 3159 - DNA, 119 bp, homo sapiens
attaacaggtttggggtaaagtacatacagttcaacaaaagttcaaggtgaagaaggaaaccaatacatacgtaaagaaatcatttcgggagatgtagccctttcttatcactccagag

SEQ ID NO: 3160 - DNA, 119 bp, homo sapiens
aaaccaatacatgacgtaaagaaatcatttcgggagatgtagccctttcttatcactccagagacagcaatcgatgagattttaagcaccaattccattgaatgtagtggggtttcttc

SEQ ID NO: 3161 - DNA, 119 bp, homo sapiens
ccagagacagcacatcgatgagattttaagcaccaattccattgaatgtagtggggtttcttcataactgtctagtaatcctctatataactgaaacaataatctgagaacaacttcta

SEQ ID NO: 3162 - DNA, 119 bp, homo sapiens
ttcttcataactagtctagtaatcctctatataactgaaacaataatctgagaacaacttctaaatgaaataactactgcaactgaggtaaaccaaacagttgtttttgtttattggca

SEQ ID NO: 3163 - DNA, 119 bp, homo sapiens
cttctaaatgaaaataactactgcaactgaggtaaaccaaacagttgtttttgtttattggcacagtggccacgataagacacataggtatagcacactaaagctcaagatcctgggaa

SEQ ID NO: 3164 - DNA, 119 bp, homo sapiens
ttggcacagtggcccacgataagacacataggtatagcacactaaagctcaagatcctgggaacaggagataaatttattcaagggaggtgtttggttttctttttttttttttaactg

SEQ ID NO: 3165 - DNA, 119 bp, homo sapiens
tgggaacaggagtataaatttattcaagggaggtgtttggttttctttttttttttttaactgatgacttgctgtcttccctccaagggaaaggaaagagaacttactgaatagcaccg

SEQ ID NO: 3166 - DNA, 119 bp, homo sapiens
taactgatgactctgctgtcttccctccaagggaaaggaaagagaacttactgaatagcaccgttcttcatatgtgattgtcaagtaggacttctgtaatcatactgaaggtaatacat

SEQ ID NO: 3167 - DNA, 119 bp, homo sapiens
gcaccgttcttctatatgtgattgtcaagtaggacttctgtaatcatactgaaggtaatacattgtaatatgctgaaggtaatcatctttgccccagctttggatggtgtttctcaccc

SEQ ID NO: 3168 - DNA, 119 bp, homo sapiens
atacattgtaatcatgctgaaggtaatcatctttgccccagctttggatggtgtttctcacccaggctcttcaccaggcgtggttcatgcagacagccatgcagcagtaagcctttcaa

SEQ ID NO: 3169 - DNA, 119 bp, homo sapiens
tcacccaggctccttcaccaggcgtggttcatgcagacagccatgcagcagtaagcctttcaagggtcagccctttgttaaatgctcgctgaccagcctgcatggtgcaggaggctggc

SEQ ID NO: 3170 - DNA, 119 bp, homo sapiens
tttcaagggtcaggccctttgttaaatgctcgctgaccagcctgcatggtgcaggaggctggctcacagaaccgggaagcccaggaggtcccgggggtccaggcactccaggaattcct

SEQ ID NO: 3171 - DNA, 119 bp, homo sapiens
gctggctcacagaaaccgggaagcccaggaggtcccgggggtccaggcactccaggaattcctgccaccctggggggcctcgctcaccgtctcggccatttctgccatagctggcaggg

SEQ ID NO: 3172 - DNA, 119 bp, homo sapiens
ctttaggtcccctcaaaccaagagcaccagggggccccttaatgcccggaaggccacgaattcccatctgcctgggaaaccattctctccaggagggccggggggaccaggagggccag

SEQ ID NO: 3173 - DNA, 119 bp, homo sapiens
ccccttaatgcccggaaggccacgaattcccatctggcctgggaaaccattctctccaggagggccgggggaccaggagggccaggccttccaggaagcccagtggcacctgagtctgg

SEQ ID NO: 3174 - DNA, 119 bp, homo sapiens
tggcctgggaaaccattctctccaggagggccggggggaccaggagggccaggccttccaggaagcccatggcacctgagtctggacgcttaagactggcagccatctcagcaaaatgt

SEQ ID NO: 3175 - DNA, 119 bp, homo sapiens
cggagggccctggacaccaggcaggccggtggcaccctgttctccctgcacaccccggggtccaggtggcctcttggtccttccactccaggaagcccccgacttccctcaggccctct

SEQ ID NO: 3176 - DNA, 119 bp, homo sapiens
ggtggcaccctgttctccctgcacaccccggggtccaggtggtcctcttggtccttccactccaggaagccccgacttccctcaggccctctcaagccaggttccccaggattacctgc

SEQ ID NO: 3177 - DNA, 119 bp, homo sapiens
ttgagccgcgcacaagcagagccccaacagcagcagccccagggccccgcggtcccgcgcagtccaggcatgcccgccgcccgccgctaatcccttggcccggctctgcagcctggttc

SEQ ID NO: 3178 - DNA, 119 bp, homo sapiens
ccgcgcagtccaggccatgcccgccgcccgccgctaatcccttggcccggctctgcagcctggttccccctaggcttccagacccgccactagcataggtggcacttcgtccctgcaga

SEQ ID NO: 3179 - DNA, 119 bp, homo sapiens
gcagcctggttcccctctaggcttccagacccgccactagcataggtggcacttcgtccctgcagaaaagcacccccgggagtagcggttgccaaagcgtccaggcccgggaggcgcgc

SEQ ID NO: 3180 - DNA, 119 bp, homo sapiens
tggaacagaaacttgaggattatctgcaagttttcccagcacagcaaagccatcaatgtcaattgggcccttggctttataggtaaagattcaatcctgttgcagtcaacaaaaagagt

SEQ ID NO: 3181 - DNA, 119 bp, homo sapiens
atgtcaattgggcctcttggctttataggtaaagattcaatcctgttgcagtcaacaaaaagagtagcatactcctctccacgccaatcatgatcttatgccactgggaatcaaacaag

SEQ ID NO: 3182 - DNA, 119 bp, homo sapiens
caaaaagagtagcactactcctctccacgccaatcatgatcttatgccactgggaatcaaacaaggaggcaaattcgaaaaggctgctgtttggagacttccatccagtcccttgtatg

SEQ ID NO: 3183 - DNA, 119 bp, homo sapiens
atcaaacaaggaggacaaattcgaaaaggctgctgtttggagacttccatccagtcccttgtatgaaaaacaacagattgtgtttggccattaatctttatgccaacttgctccttccc

SEQ ID NO: 3184 - DNA, 119 bp, homo sapiens
cccttgtatgaaaatacaacagattgtgtttggccattaatctttatgccaacttgctccttcccagagaatcctgaatctgccaaatgttccagttctttttgagagtgcttccagtc

SEQ ID NO: 3185 - DNA, 119 bp, homo sapiens
gctccttcccagaggaatcctgaatctgccaaatgttccagttctttttgagagtgcttccagtcattcaaacgtcgtcaagaaggagtattcttcaggcagtccactgggatataaat

SEQ ID NO: 3186 - DNA, 119 bp, homo sapiens
ctagttggaatcctgaagtctacattatttcccaacttgtaagccacctgcaatgtagctgatcccactctctctggatagctcttctagatgctgctttatctacctggaactgagag

SEQ ID NO: 3187 - DNA, 119 bp, homo sapiens
tgaagtctacattatttcccaacttgtaagccacctgcaatgtagctgatcccactactctctggatagtcttctagatgctgctttatctacctggaactgagagatcagatcaaacc

SEQ ID NO: 3188 - DNA, 119 bp, homo sapiens
cagcaggtcttcattttcccagttgattttctttgtttgccaacagtccctatgaagaaggggttggaaggagtcactgtcccctcacgaccccttcactgttaccctaggactatgtg

SEQ ID NO: 3189 - DNA, 119 bp, homo sapiens
gaagaaggggttggaagggagtcactgtcccctcacgaccccttcactgttaccctaggactatgtgtttgggcccagccttggtccctcctgcccccggtgagggctaaaagcaaagg

SEQ ID NO: 3190 - DNA, 119 bp, homo sapiens
caggggcgcagctgctgggcgtgcatccgaaaggtgagagccagagagcgagcagagggggcgggcaggcacgaaaatgtcctcggccgtggggccccgcggtcctcgcccacccacgg

SEQ ID NO: 3191 - DNA, 119 bp, homo sapiens
ccagagagcgagcagagggggcgggcaggccacgaaaatgtcctcggccgtggggccccgcggtcctcgccacccacggtgcctccccccatgcaagagctgcccgacctgagccacct

SEQ ID NO: 3192 - DNA, 119 bp, homo sapiens
tcctcggccgtggggccccgcggtcctcgcccacccacggtgcctccccccatgcaagagctgcccgactgagccacctgaccgaagaggagaggaacattatcatggcagtgatggac

SEQ ID NO: 3193 - DNA, 119 bp, homo sapiens
tgcctccccccatgcaagagctgcccgacctgagccacctgaccgaagaggagaggaacattatcatggagtgatggaccggcagaaggaagaggaggaaaaagaagaagccatgctca

SEQ ID NO: 3194 - DNA, 119 bp, homo sapiens
gagattgcatcaacagtttgaaagctataaggaacaagtgagaaaaataggggaagaagcgcggcgttacagggcgagcacaaagacgatgctccgacttgtggaatctgtcataaaac

SEQ ID NO: 3195 - DNA, 119 bp, homo sapiens
taggggaagaagcgcggcgttaccagggcgagcacaaagacgatgctccgacttgtggaatctgtcataaacaaagtttgctgatgggtgcggtcatctctgctcctattgtcgcacta

SEQ ID NO: 3196 - DNA, 119 bp, homo sapiens
ccgacttgtggaatctgtcataaaacaaagtttgctgatgggtgcggtcatctctgctcctattgtcgcctaagttctgtgcgcgctgcggaggccgcgtgtctctacggtcaaacaac

SEQ ID NO: 3197 - DNA, 119 bp, homo sapiens
gttatgtgggtatgcaatttatgtcgaaagcaacaagaaatcttaaccaaatctggggcatggttctttgaagtggccctcagcagacaagtcaggatggaaccctgagtgatacagct

SEQ ID NO: 3198 - DNA, 119 bp, homo sapiens
gggcatggttctttggaagtggccctcagcagacaagtcaggatggaaccctgagtgatacagctacagtgctggctctgaggtaccaagagaaaagaaagcacgactccaagagcgat

SEQ ID NO: 3199 - DNA, 119 bp, homo sapiens
tgatacagctacaggtgctggctctgaggtaccaagagaaaagaaagcacgactccaagagcgatcgcgtctcagacacccctaagcacagcagctgcctcctcccaggatgctgctcc

SEQ ID NO: 3200 - DNA, 119 bp, homo sapiens
caagagcgatcgcggtctcagacacccctaagcacagcagctgcctcctcccaggatgctgctcctcccgcgcaccaccagacaggagcaaaggggctgagccctcgcagcaagccttg

SEQ ID NO: 3201 - DNA, 119 bp, homo sapiens
atgctgctcctcccagcgcaccaccagacaggagcaaaggggctgagccctcgcagcaagccttggggctgaacagaagcaggcttcatccaggtctagaagtgaacctcctagagaga

SEQ ID NO: 3202 - DNA, 119 bp, homo sapiens
aaagaagaccccagggctttccgagcagaatggcaaaggagccctgaagagcgagcggaaacgcgtgccaagacctcagcgcagcccgtggagggggccgtcgaagaacgggagcgcaa

SEQ ID NO: 3203 - DNA, 119 bp, homo sapiens
gaaacgcgtgccaaagacctcagcgcagcccgtggagggggccgtcgaagaacgggagcgcaaagaaagcgggaaagccgaaggcttgagaaagggcgatcacaggattacccagacac

SEQ ID NO: 3204 - DNA, 119 bp, homo sapiens
gcgcaaagaaaggcgggaaagccgaaggcttgagaaagggcgatcacaggattacccagacacgccggaaaacgggatgagggcaaagcggcggatgaggaaaagcaaagaaaagagga

SEQ ID NO: 3205 - DNA, 119 bp, homo sapiens
agacacgccggaaaaacgggatgagggcaaagcggcggatgaggaaaagcaaagaaaagaggaggattacagaccaggtaccgcagcgacccgaacctagctcggtacccggtgaaacc

SEQ ID NO: 3206 - DNA, 119 bp, homo sapiens
agaggaggattatcagaccaggtaccgcagcgacccgaacctagctcggtacccggtgaaaccgccgccgaggagcagcagatgcgcatgcacgcccgggtgtcccgcgccaggcacga

SEQ ID NO: 3207 - DNA, 119 bp, homo sapiens
gaaaccgccgcctgaggagcagcagatgcgcatgcacgcccgggtgtcccgcgccaggcacgagcggcgcacagcgacgtggcgctcccgcgcaccgaggcgggcgcggcgctgccgga

SEQ ID NO: 3208 - DNA, 119 bp, homo sapiens
gcacgagcggcgccacagcgacgtggcgctcccgcgcaccgaggcgggcgcggcgctgccggagggcaagccggcaaacgcgcgccggcggcagccagggcctcgccgccggactcgcc

SEQ ID NO: 3209 - DNA, 119 bp, homo sapiens
gccggagggcaaggccggcaaacgcgcgccggcggcagccagggcctcgccgccggactcgccgcgggctactcggctgagagaactgcggagaccagggcgccgggcgccaagcagct

SEQ ID NO: 3210 - DNA, 119 bp, homo sapiens
ctcgccgcgggcttactcggctgagagaactgcggagaccagggcgccgggcgccaagcagctaacgaacacagcccgccggcgcccagacatgggccggttcccgcagaagccccgga

SEQ ID NO: 3211 - DNA, 119 bp, homo sapiens
gcagctaacgaaccacagcccgccggcgcccagacatgggccggttcccgcagaagccccggagctcaagcccaggagcccctcaggaagcagagccgcctggaccccagctcggcggt

SEQ ID NO: 3212 - DNA, 119 bp, homo sapiens
cccggagctcaaagcccaggagcccctcaggaagcagagccgcctggaccccagctcggcggtcctcatcggaaggccaagcgcgagaaggtggagaccatgctgcggaacgactcttt

SEQ ID NO: 3213 - DNA, 119 bp, homo sapiens
ggcggtcctcatgcggaaggccaagcgcgagaaggtggagaccatgctgcggaacgactctttgagctcgaccagtccgagtcggtgcggccgtccccgcccaagccgcaccggtccaa

SEQ ID NO: 3214 - DNA, 119 bp, homo sapiens
ctctttgagctcagaccagtccgagtcggtgcggccgtccccgcccaagccgcaccggtccaagagaggggcaagaagcggcagatgtcggtgagcagctctgaggaggagggcgtgtc

SEQ ID NO: 3215 - DNA, 119 bp, homo sapiens
gtccaagagaggcggcaagaagcggcagatgtcggtgagcagctctgaggaggagggcgtgtcgacgccgagtacaccagctgcgaggacgtggagctggagagcgagagcgtcagcga

SEQ ID NO: 3216 - DNA, 119 bp, homo sapiens
agtaaatgctaccagtccccacaccaccaggcccaccgaagcttgtctacagtattttatccaagcagtctttgggtaactgcacagtgcctgcagtgacctgagtcagtcatgcaagg

SEQ ID NO: 3217 - DNA, 119 bp, homo sapiens
atccaagcagtcctttgggtaactgcacagtgcctgcagtgacctgagtcagtcatgcaaggagactttttgttctcacaccaatgttttatttcagtttccattttctgctggtcctg

SEQ ID NO: 3218 - DNA, 119 bp, homo sapiens
aaggagactttcttgttctcacaccaatgttttatttcagtttccattttctgctggtcctgttgttcatgatataagcagagtgatgaaggaggcgcttcacactcttcttagataag

SEQ ID NO: 3219 - DNA, 119 bp, homo sapiens
cctgttgttcaatgatataagcagagtgatgaaggaggcgcttcacactcttcttagataagatcttgacagcagagagtggtttaaacagcaaggcttaaatctctcaagctggattt

SEQ ID NO: 3220 - DNA, 119 bp, homo sapiens
taagatcttgagcagcagagagtggtttaaacagcaaggcttaaatctctcaagctggatttatttccagtttgctgtcatgtgtgcacctgggattcatgtctcttcagaagggtggg

SEQ ID NO: 3221 - DNA, 119 bp, homo sapiens
atttatttccaagtttgctgtcatgtgtgcacctgggattcatgtctcttcagaagggtgggaagaagtaggtctgttgattccgaagagggaacaattgaagctcgacgagcagttgc

SEQ ID NO: 3222 - DNA, 119 bp, homo sapiens
agaaaagcctgaagaagcacttttgcctgtgttcccaacaatcaattgtgtatactcttggtttatgcttctggtgccagttgtcattgagctgagtaagattcctcagttagggaaac

SEQ ID NO: 3223 - DNA, 119 bp, homo sapiens
caatcaattgtgtatactcttggtttatgctttctggtgccagttgtcattgagctgagtaagattcctagttagggaaactgcagaggaaatgatctgttacacagggcttggcagga

SEQ ID NO: 3224 - DNA, 119 bp, homo sapiens
gccagttgtcattgagctgagtaagattcctcagttagggaaactgcagaggaaatgatctgttacacaggcttggcaggaccattgccagtgattgataatgggaccaaatcatttca

SEQ ID NO: 3225 - DNA, 119 bp, homo sapiens
gtgttagctttaaggaccacaacgtttcatctctctggcttcaggaaggtagcagcttctgtgcattgtttaggaaatggttaattgaggagctaaaagagctttagtgtatgctacac

SEQ ID NO: 3226 - DNA, 119 bp, homo sapiens
cagcttctgtgcattgttttaggaaatggttaattgaggagctaaaagagctttagtgtatgctacactggagccactttagtacagcacagagcactatagattaatgctgtaatcaa

SEQ ID NO: 3227 - DNA, 119 bp, homo sapiens
ttagtgtatgctacactgggagccactttagtacagcacagagcactatagattaatgctgtaatcaatagaatctgttcactgcagagatctgttttgatgacagcagcacttatggc

SEQ ID NO: 3228 - DNA, 119 bp, homo sapiens
ttaatgctgtaatcaatgagaatctgttcactgcagagatctgttttgatgacagcagcacttatggcctgtttagtgtcactgttgtataatgttggacactgcaggcttttttggct

SEQ ID NO: 3229 - DNA, 119 bp, homo sapiens
cagcagcacttatggccttgtttagtgtcactgttgtataatgttggacactgcaggcttttttggcttgatttagaatgcaaggaccacagggaattttatttaaaatgttgtatttt

SEQ ID NO: 3230 - DNA, 119 bp, homo sapiens
gcaggcttttttggctttgatttagaatgcaaggaccacagggaattttatttaaaatgttgtattttgtggattttttaattgtgttgtgcatttgctgccattgctagctgaaattt

SEQ ID NO: 3231 - DNA, 119 bp, homo sapiens
taaaatgttgtattttggtggattttttaattgtgttgtgcatttgctgccattgctagctgaaatttatgatttgatgccagtggcatttagttaaccactccgatgctgctgttatg

SEQ ID NO: 3232 - DNA, 119 bp, homo sapiens
ttgctagctgaaatttaatgatttgatgccagtggcatttagttaaccactccgatgctgctgttatgttgctgggtttctgcagtttctactacttcatacattgcactcaggaacag

SEQ ID NO: 3233 - DNA, 119 bp, homo sapiens
gggatgaagttctagaatggaatggtaaacccctgccgggagctacaaatgaagaagtttacaacattatttagaatcaaaatcagaacctcaagttgaaattattgtttcaaggccta

SEQ ID NO: 3234 - DNA, 119 bp, homo sapiens
tgaagttctagaatggaatggtaaacccctgccgggagctacaaatgaagaagtttacaacattattttgaatcaaaatcagaacctcaagttgaaattattgtttcaaggcctattgg

SEQ ID NO: 3235 - DNA, 119 bp, homo sapiens
gtgaagttgtggtatgataaagtgggacaccagctgattgtaaatgttctgcaagcaacagatctacctctagagtagatggacgtcctcgaaatccctatgtaaaaatgtattttctt

SEQ ID NO: 3236 - DNA, 119 bp, homo sapiens
gtatgataaagtgggacaccagctgattgtaaatgttctgcaagcaacagatctacctgctagagtagaggacgtcctcgaaatccctatgtaaaaatgtattttcttccagatagaag

SEQ ID NO: 3237 - DNA, 119 bp, homo sapiens
tgataaaagtaaaaggaggaccaaaacagtaaagaaaatactagaaccaaaatggaatcaaacttttgttattcacatgtacatcgtagagattttagagaacgaatgttagaaataac

SEQ ID NO: 3238 - DNA, 119 bp, homo sapiens
tggaatcaaacttttgtctattcacatgtacatcgtagagattttagagaacgaatgttagaaataacttgtgggaccaaccaagagtgcaagaagaagaaagtgaatttcttggagag

SEQ ID NO: 3239 - DNA, 119 bp, homo sapiens
atcctcatagaattggagacagcgcttttagatgatgaaccgcattggtataaacttcagacacatgatagtcttcactacctctgcctcagccatcacctttcatgccaaggcgacat

SEQ ID NO: 3240 - DNA, 119 bp, homo sapiens
atgaaccgcattggtataaacttcagacacatgatgagtcttcactacctctgcctcagccatcaccttcatgccaaggcgacatattcatggagaaagctctagcaaaaagctacaaa

SEQ ID NO: 3241 - DNA, 119 bp, homo sapiens
taggctataggtctagtgctagagaaagtaaatctacaacattaactgtgccagaacagcaaagaacaatcatcaccgctcacgttcagtatctcctcatcgcggcaatgatcagggaa

SEQ ID NO: 3242 - DNA, 119 bp, homo sapiens
aacattaactgtgccagaacagcaaagaacaactcatcaccgctcacgttcagtatctcctcatcgcggaatgatcagggaaagccgcgttcacgtttaccaaatgtgccattacagag

SEQ ID NO: 3243 - DNA, 119 bp, homo sapiens
gagtttagatgaaattcatccaacaagaaggtcacgttctccaaccagacaccatgatgcctcccgaagccagttgatcatagaaccagagatgtggatagtcagtatttatcagaaca

SEQ ID NO: 3244 - DNA, 119 bp, homo sapiens
agatgaaattcatccaacaagaaggtcacgttctccaaccagacaccatgatgcctcccgaagtccagtgatcatagaaccagagatgtggatagtcagtatttatcagaacaagacag

SEQ ID NO: 3245 - DNA, 119 bp, homo sapiens
ggttctcccaacatgtctttctagaaggggacacgcagccccaagagcaactgatcagccagtcattagggaaaacatcctgctcgctcaaggtcgagtgagcactctagtatcagaac

SEQ ID NO: 3246 - DNA, 119 bp, homo sapiens
cacgcagccccaagagcaactgatcagccagtcattaggggaaaacatcctgctcgctcaaggtcgagtagcactctagtatcagaacactgtgttctatgcaccaccttgtccctgga

SEQ ID NO: 3247 - DNA, 119 bp, homo sapiens
tcattaggggaaaacatcctgctcgctcaaggtcgagtgagcactctagtatcagaacactgtgttctagcaccaccttgtccctggagggtcggcgccaccttctccgcttctgacaa

SEQ ID NO: 3248 - DNA, 119 bp, homo sapiens
tataacatacataaagatcagtacagaagctgtgataacgtctctgccaaatcatcagatagtgatgtcgtgatgtttccgccatttcccgaaccagcagtgcctcacgcctcagcagc

SEQ ID NO: 3249 - DNA, 119 bp, homo sapiens
caaatcatcagatagtgatgtcagtgatgtttccgccatttcccgaaccagcagtgcctcacgcctcagagcacaagctttatgtcagagcaatctgagcgccccaggggtagaatcag

SEQ ID NO: 3250 - DNA, 119 bp, homo sapiens
ttcatttacccccaaaatgcaaggcagacggatggggacttcaggaagatccatcatgaagagcaccaggtcagtggagagatgtacacactggagcataatgacggcagccagtcaga

SEQ ID NO: 3251 - DNA, 119 bp, homo sapiens
aagagcaccagtgtcagtggagagatgtacacactggagcataatgacggcagccagtcagacacagcttgggtacagttggagcaggtggaaagaaacggagatccagccttagtgcc

SEQ ID NO: 3252 - DNA, 119 bp, homo sapiens
cagacacagctgtgggtacagttggagcaggtggaaagaaacggagatccagccttagtgccaaagtggtgccatagtgtctcgaaggagtagaagcacatcccagcttagtcaaacag

SEQ ID NO: 3253 - DNA, 119 bp, homo sapiens
agttcacaggcagctcagacagatattccagccagccaccgcacaagttatttaaaccaggtcaaagctctttggcattcagttttccccagagaacaatttaatgctgatacttaatt

SEQ ID NO: 3254 - DNA, 119 bp, homo sapiens
gacagatattccagccagccaccgcacaagttatttaaaccaggtcaaagcttctttggcattcagtttccccagagaacaatttaatgctgatacttaattttttcaagatagacaag

SEQ ID NO: 3255 - DNA, 119 bp, homo sapiens
agtcgggccacaaaaagttaaaaagtaccatccagagaagcacagaaacaggcatggcagctgaaatgaaaagatggtaaggcagccgagccgagagtctactgatggcagcatcaaca

SEQ ID NO: 3256 - DNA, 119 bp, homo sapiens
aaaaagtaccatccagagaagcacagaaacaggcatggcagctgaaatgagaaagatggtaaggcagccagccgagagtctactgatggcagcatcaacagttacagctctgagggcaa

SEQ ID NO: 3257 - DNA, 119 bp, homo sapiens
ctccatatgtcaaagtatatcttttggaaaatggggcctgtatagccaagaagaagacaagaattgcacaaaaacccttgatcctttgtatcagcagtctctggtttttgatgaaagtc

SEQ ID NO: 3258 - DNA, 119 bp, homo sapiens
cttttggaaaatggggcctgtatagccaagaagaagacaagaattgcacgaaaaacccttgatcctttgatcagcagtctctggtttttgatgaaagtccacagggtaaagttcttcag

SEQ ID NO: 3259 - DNA, 119 bp, homo sapiens
gtgattgtctggggagactatggcagaatggaccacaaatgctttatgggtgtggctcagatcttgttgaagaactcgacctgtccagcatggtgatcggatggtacaaattgttccca

SEQ ID NO: 3260 - DNA, 119 bp, homo sapiens
tggctcagatcttgttggaagaactcgacctgtccagcatggtgatcggatggtacaaattgttcccacgtcctcactggtggatcccacactcactcccctcacccggcgggcttccc

SEQ ID NO: 3261 - DNA, 119 bp, homo sapiens
gtacaaattgttcccaccgtcctcactggtggatcccacactcactcccctcacccggcgggcttcccatcatctctggaaagttcaactgggcctccctgtattcgatcatagtgaac

SEQ ID NO: 3262 - DNA, 119 bp, homo sapiens
acccggcgggcttcccagtcatctctggaaagttcaactgggcctccctgtattcgatcatagtgaactataccagagtcattccaataaaactctacttttcaggataataatctgaa

SEQ ID NO: 3263 - DNA, 119 bp, homo sapiens
ttcgatcatagtgaactcataccagagtcattccaataaaactctacttttcaggataataatctgaacagatatttcatgatcgaaagcattgttggagacagacaatcaacttgtgt

SEQ ID NO: 3264 - DNA, 119 bp, homo sapiens
aggataataatctgaaccagatatttcatgatcgaaagcattgttggagacagacaatcaacttgtgtttgcctgtagtagtttttcaataatatgtcccaattgttatttaaaacatg

SEQ ID NO: 3265 - DNA, 119 bp, homo sapiens
gacaatcaacttgtgttttgcctgtagtagtttttcaataatatgtcccaattgttatttaaaacatggttcatatgacagaacaaggcaatctatcaaatttacaggaagaatcaaca

SEQ ID NO: 3266 - DNA, 119 bp, homo sapiens
tgttatttaaaacatggcttcatatgacagaacaaggcaatctatcaaatttacaggaagaatcaacatctggtgagagtcactgatgcttctaacaaatagaaaaagaggaaacttta

SEQ ID NO: 3267 - DNA, 119 bp, homo sapiens
tcaccacatctgttatttccactagtttttttttggctgtgtcatgacaggcctcatgatgctaacagaattcttcccttcttttttccaaaagcaccaaaaaaaagggctgaagtagt

SEQ ID NO: 3268 - DNA, 119 bp, homo sapiens
tgctaacagagattcttcccttcttttttccaaaagcaccaaaaaaaagggctgaagtagtctctgtagatctccccaaagtgttaaacagctacataaggtgaagccaaggaagggtt

SEQ ID NO: 3269 - DNA, 119 bp, homo sapiens
gtctctgtagcatctccccaaagtgttaaacagctacataaggtgaagccaaggaagggtttcactagcttcattttataattatttaaagtcttatgtgtggatacccaagagacaaa

SEQ ID NO: 3270 - DNA, 119 bp, homo sapiens
tttcactagctttcattttataattatttaaagtcttatgtgtggatacccaagagacaaaaagttatctccaaaataaataatcacagaagtacttttttaatgaagagcctatctgt

SEQ ID NO: 3271 - DNA, 119 bp, homo sapiens
aaaagttatcttccaaaataaataatcacagaagtacttttttaatgaagagcctatctgtttgcattcagaaaattaatttatggtttccattgttttgcatggaagacttttaaaga

SEQ ID NO: 3272 - DNA, 119 bp, homo sapiens
gtttgcattctagaaaattaatttatggtttccattgttttgcatggaagacttttaaagaagtcaatcgcaactaatgctggggactaaaactaactgcataattgtactttgaaaac

SEQ ID NO: 3273 - DNA, 119 bp, homo sapiens
gaagtcaatctgcaactaatgctggggactaaaactaactgcataattgtactttgaaaacactccttgaatgcctttttcttcctgatattaaaaaaatgctcatgtgtataaaccat

SEQ ID NO: 3274 - DNA, 119 bp, homo sapiens
acactccttgtaatgcctttttcttcctgatattaaaaaaatgctcatgtgtataaaccatactttgactcccaaaaatggtgactaggaatggatttgagcctaagacactttgagct

SEQ ID NO: 3275 - DNA, 119 bp, homo sapiens
atactttgacttcccaaaaatggtgactaggaatggatttgagcctaagacactttgagctatgcccagcttctcagccatacctcagtgtagacacatccatctgccctggaaagagc

SEQ ID NO: 3276 - DNA, 119 bp, homo sapiens
ctatgcccaggcttctcagccatacctcagtgtagacacatccatctgccctggaaagagcatggtatggctgttcaatattccactggaaattccagttgaaatattctgcactaaac

SEQ ID NO: 3277 - DNA, 119 bp, homo sapiens
gcatggtatgagctgttcaatattccactggaaattccagttgaaatattctgcactaaactattgttttattgaattttagtttacatttctttgagattgatgcaagcacaaagctt

SEQ ID NO: 3278 - DNA, 119 bp, homo sapiens
actattgtttttattgaattttagtttacatttctttgagattgatgcaagcacaaagcttgattttttatgcaaagtatcttactttttggggggaaaataaacaaaatgaactttca

SEQ ID NO: 3279 - DNA, 119 bp, homo sapiens
ttgattttttaatgcaaagtatcttactttttggggggaaaataaacaaaatgaactttcaatttgcatttcatttagtttctcttggccttgaatttcccttgtgacattctgtacat

SEQ ID NO: 3280 - DNA, 119 bp, homo sapiens
caatttgcattttcatttagtttctcttggccttgaatttcccttgtgacattctgtacatgtgctacaactgcagtctctgcaggtgcattgatatgttctccctccttttatgagtc

SEQ ID NO: 3281 - DNA, 119 bp, homo sapiens
atgtgctacaaactgcagtctctgcaggtgcattgatatgttctccctccttttatgagtcactccactttgtgattacacaaatagagcagcatgacttggaactgttcagagctgca

SEQ ID NO: 3282 - DNA, 119 bp, homo sapiens
gaaaagaaacaaaaggttatttaataatgtatgttagttccacataggccagcttgtatgttgcatgtattgtacagtttgcttgttaattactataccgaaataaccaagaaatctaa

SEQ ID NO: 3283 - DNA, 119 bp, homo sapiens
tatgttgcatgtacttgtacagtttgcttgttaattactataccgaaataaccaagaaatctaagccatcacttttgttatagacattttgcaggttttagccagactcagtctctggg

SEQ ID NO: 3284 - DNA, 119 bp, homo sapiens
aaatctaagccatccacttttgttatagacattttgcaggttttagccagactcagtctctgggtctgtgtgaaatgtctatagatggactttattttttaccctccggaaaacgtgat

SEQ ID NO: 3285 - DNA, 119 bp, homo sapiens
tctctgggtctgtggtgaaatgtctatagatggactttattttttaccctccggaaaacgtgatgtagtcggaccaaattccttctaataaatattttggtgtagattcctactgtggg

SEQ ID NO: 3286 - DNA, 119 bp, homo sapiens
aacgtgatgtagtacggaccaaattccttctaataaatattttggtgtagattcctactgtggggctgtacacatgtagacactgtgtacacactaggttttaattcatagacatactg

SEQ ID NO: 3287 - DNA, 119 bp, homo sapiens
actgtggggctgtaacacatgtagacactgtgtacacactaggttttaattcatagacatactgcctgcccaagtgaattatttattattatttacacatgccagaattatctgcccat

SEQ ID NO: 3288 - DNA, 119 bp, homo sapiens
acatactgcctgcaccaagtgaattatttattattatttacacatgccagaattatctgcccatcattcacagggcacagattgaccactgctcaccatgctgagtaggaggaactgaa

SEQ ID NO: 3289 - DNA, 119 bp, homo sapiens
ctgcccatcattccacagggcacagattgaccactgctcaccatgctgagtaggaggaactgaagcattgtgcacttctactagattccgttctgtcttagtggccaacaatcaactga

SEQ ID NO: 3290 - DNA, 119 bp, homo sapiens
gaactgaagcattggtgcacttctactagattccgttctgtcttagtggccaacaatcaactgattatattgggtagtatctttctattttgaccacttgtcttaacactcccctgtgc

SEQ ID NO: 3291 - DNA, 119 bp, homo sapiens
tcaactgattataattgggtagtatctttctattttgaccacttgtcttaacactcccctgtgcttttaatgaaattccaattcatgtatgtaaacatgtttaataaaatttacttttc

SEQ ID NO: 3292 - DNA, 119 bp, homo sapiens
ccctgtgcttttaaatgaaattccaattcatgtatgtaaacatgtttaataaaatttacttttcatgtcgtcagtagccatatgtgttctatgtcttgccagatttccattgtgggttc

SEQ ID NO: 3293 - DNA, 119 bp, homo sapiens
tacttttcatgtcagtcagtagccatatgtgttctatgtcttgccagatttccattgtgggttctatgggcaaaatgggagccaggccatgggaaggggaggctggggtttgttgtctg

SEQ ID NO: 3294 - DNA, 119 bp, homo sapiens
gtgggttctatggtgcaaaatgggagccaggccatgggaaggggaggctggggtttgttgtctgctgcggcatttgacttgacttgtcactgcactatattatgtcttaatcgatggcc

SEQ ID NO: 3295 - DNA, 119 bp, homo sapiens
gttgtctgctgcgggcatttgacttgacttgtcactgcactatattatgtcttaatcgatggcccaaaggtactttgcatcacatacaagttttcacttcgtcagcctgtctaagtgag

SEQ ID NO: 3296 - DNA, 119 bp, homo sapiens
cgatggcccaaagggtactttgcatcacatacaagttttcacttcgtcagcctgtctaagtgagcacatactatacttctgaaaagtggcattattaaaaataataaatctcagtaaga

SEQ ID NO: 3297 - DNA, 119 bp, homo sapiens
taagtgagcacatgactatacttctgaaaagtggcattattaaaaataataaatctcagtaagaatcaatggaaggttgttttctgctgctgtttgaatgtgctaataaaagagacaac

SEQ ID NO: 3298 - DNA, 119 bp, homo sapiens
tgcatttttaatttttattagtaacagttctgagtacaaataaatttaatgacatttagaaaaaaaaacatttaccctgtaaggtttgttcataaggaaaaccctgttttgtacatttt

SEQ ID NO: 3299 - DNA, 119 bp, homo sapiens
aaaaaaaaacaatttaccctgtaaggtttgttcataaggaaaaccctgttttgtacattttaatctccattttaatgcttaatatcataatgcctttaaatctgtaacttaactttagg

SEQ ID NO: 3300 - DNA, 119 bp, homo sapiens
ttaatctccaattttaatgcttaatatcataatgcctttaaatctgtaacttaactttaggtttaatttaataattctgtcttgttgcatcttgttaaagagattatcaggtagaaaaa

SEQ ID NO: 3301 - DNA, 119 bp, homo sapiens
ggtttaattttaataattctgtcttgttgcatcttgttaaagagattatcaggtagaaaaaaagcaaaaactaatttaaatgacgtgaataaaaaacttaactaaaaagttttaaaagc

SEQ ID NO: 3302 - DNA, 119 bp, homo sapiens
aaaagcaaaaaactaatttaaatgacgtgaataaaaaacttaactaaaaagttttaaaagcctttaaaaaacctgaaaattagaatacttttggcagaaaaattagcagctaggaacaa

SEQ ID NO: 3303 - DNA, 119 bp, homo sapiens
gcctttaaaacaacctgaaaattagaatacttttggcagaaaaattagcagctaggaacaaaattaacatacataatattttaccaataactgcattacaaataatattgttttacata

SEQ ID NO: 3304 - DNA, 119 bp, homo sapiens
aaaattaacattacataatattttaccaataactgcattacaaataatattgttttacatatattagaagatttgcaacatattatagtaaatggttatacatatcagacatacaaatc

SEQ ID NO: 3305 - DNA, 119 bp, homo sapiens
tatattagaatgatttgcaacatattatagtaaatggttatacatatcagacatacaaatctattaagaaactttttaatatagtttagcacttttgagagattctgttcccaataaat

SEQ ID NO: 3306 - DNA, 119 bp, homo sapiens
tctattaagaaaactttttaatatagtttagcacttttgagagattctgttcccaataaatgaaaggaaacaatttagaagatgacaggtggtacatcttttaattggagacctaacca

SEQ ID NO: 3307 - DNA, 119 bp, homo sapiens
atgaaaggaacacaatttagaagatgacaggtggtacatcttttaattggagacctaaccaggtaagtctgacaaatagtcatgcaatgaaattcaataatatgcatttataagaactc

SEQ ID NO: 3308 - DNA, 119 bp, homo sapiens
caggtaagtcttgacaaatagtcatgcaatgaaattcaataatatgcatttataagaactcagaataaccagtaactccttcccctcatcagtatatatgactggcgtcagaaatcata

SEQ ID NO: 3309 - DNA, 119 bp, homo sapiens
tcagaataacacagtaactccttcccctcatcagtatatatgactggcgtcagaaatcatactacgagcaatgctagtaaattcttgaaaaaaacagctcactttagaataagtgccaa

SEQ ID NO: 3310 - DNA, 119 bp, homo sapiens
tactacgagcaaatgctagtaaattcttgaaaaaaacagctcactttagaataagtgccaatctaaatttttattcttcccaacacactatttccaccactcttcattttaacaatgtt

SEQ ID NO: 3311 - DNA, 119 bp, homo sapiens
aatctaaattttttattcttcccaacacactatttccaccactcttcattttaacaatgttttctccttggctggtggtatattactgctttttaaagaccaatcatacccagcatgat

SEQ ID NO: 3312 - DNA, 119 bp, homo sapiens
ttttctccttgggctggtggtatattactgctttttaaagaccaatcatacccagcatgatccaaggtctcaacttctctataagctgaagtgaattacaaacagccaaaagaccaatg

SEQ ID NO: 3313 - DNA, 119 bp, homo sapiens
atccaaggtcatcaacttctctataagctgaagtgaattacaaacagccaaaagaccaatgcatttaaaagaaaactatccactctagtcaacaaggcagaagtcctatgtctgaaaca

SEQ ID NO: 3314 - DNA, 119 bp, homo sapiens
tgcatttaaacagaaaactatccactctagtcaacaaggcagaagtcctatgtctgaaacacttctattaaagttgctttaaaactaatcctgtaagtccaatagtattacactattgt

SEQ ID NO: 3315 - DNA, 119 bp, homo sapiens
cacttctattcaaagttgctttaaaactaatcctgtaagtccaatagtattacactattgttgtctcctggtttgaggacaagttcaaatcttaaaagcattaacattgccaaattata

SEQ ID NO: 3316 - DNA, 119 bp, homo sapiens
gttgtctccttggtttgaggacaagttcaaatcttaaaagcattaacattgccaaattatattactctgacataattgaactgaagatctttctataatatattgggataaagtttttc

SEQ ID NO: 3317 - DNA, 119 bp, homo sapiens
tattactctggacataattgaactgaagatctttctataatatattgggataaagtttttctattctttcagttggtatgtatttccactattccttgcatttggcatgaaatcttaca

SEQ ID NO: 3318 - DNA, 119 bp, homo sapiens
tctattctttgcagttggtatgtatttccactattccttgcatttggcatgaaatcttacacccagtcatgagatacaaagagtgtaggagaacaaggagaggaattacactgtagcca

SEQ ID NO: 3319 - DNA, 119 bp, homo sapiens
cacccagtcactgagatacaaagagtgtaggagaacaaggagaggaattacactgtagccaagcttctggggctatgacagagagcaactaactgtccttgcaaacagagaaatgtctt

SEQ ID NO: 3320 - DNA, 119 bp, homo sapiens
caagcttctgcgggctatgacagagagcaactaactgtccttgcaaacagagaaatgtcttccgaactcacataatattctaacagaattgtaggtaagtgatttcagtaaatactgaa

SEQ ID NO: 3321 - DNA, 119 bp, homo sapiens
ttccgaactcaacataatattctaacagaattgtaggtaagtgatttcagtaaatactgaaattgggaatgagtagtgtttagctgtgggtactttcagaggaatgggaaatcccaatg

SEQ ID NO: 3322 - DNA, 119 bp, homo sapiens
aaattgggaaatgagtagtgtttagctgtgggtactttcagaggaatgggaaatcccaatgttgtgactctatcactcaagagtagcttaggactgccacgtaagatagggacccctgg

SEQ ID NO: 3323 - DNA, 119 bp, homo sapiens
tgttgtgactgctatcactcaagagtagcttaggactgccacgtaagatagggacccctggccctatcctaaagggaagggctcctaagaagcactggttctccaccatccggagctac

SEQ ID NO: 3324 - DNA, 119 bp, homo sapiens
ggccctatccataaagggaagggctcctaagaagcactggttctccaccatccggagctacacttcccacacagactttcacccttaattttcattcaacaattagtgggaagactgta

SEQ ID NO: 3325 - DNA, 119 bp, homo sapiens
aggaataccacctccagtgcagttaaacttgccatagcactggatgaagagttaaaatctatttcattttcaagacatatttttatttttggtttcattcaaaaaagcctccttcattc

SEQ ID NO: 3326 - DNA, 119 bp, homo sapiens
ctatttcatttttcaagacatatttttatttttggtttcattcaaaaaagcctccttcattcttggcaactatctatgtggtgtatgtatgatctacttctttttaactgcattgtatt

SEQ ID NO: 3327 - DNA, 119 bp, homo sapiens
attcttggcaaactatctatgtggtgtatgtatgatctacttctttttaactgcattgtatttagctataaaaatcattccttaataaggacattttagcattaaaaagtctaaatgtt

SEQ ID NO: 3328 - DNA, 119 bp, homo sapiens
tatttagctattaaaaatcattccttaataaggacattttagcattaaaaagtctaaatgtttataataatactgtattaaaatatttcaatatttacaattagaaaaaatgtatactc

SEQ ID NO: 3329 - DNA, 119 bp, homo sapiens
tgtttataataaatactgtattaaaatatttcaatatttacaattagaaaaaatgtatactctagtcagcatctcagtgctacttcttcaatttcatcttctacagaatcagctgcttt

SEQ ID NO: 3330 - DNA, 119 bp, homo sapiens
actctagtcagtcatctcagtgctacttcttcaatttcatcttctacagaatcagctgcttttactgctgtttatcgtctgcatgttttaatcggtgcctatttggattaaaacttctt

SEQ ID NO: 3331 - DNA, 119 bp, homo sapiens
cttttactgctggtttatcgtctgcatgttttaatcggtgcctatttggattaaaacttcttccttcacgaggaaaaagccttcatcttcatcatgttcttgatctctgctgcctttat

SEQ ID NO: 3332 - DNA, 119 bp, homo sapiens
tcttccttcactgaggaaaaagccttcatcttcatcatgttcttgatctctgctgcctttattcccaggagaaaatttagagggtcaatgtctcctttactggaagccacagaatttgg

SEQ ID NO: 3333 - DNA, 119 bp, homo sapiens
ttattcccagggagaaaatttagagggtcaatgtctcctttactggaagccacagaatttgggtcactgttttggaggaaatggtgctgctaccactggcaccaaataactgttccatc

SEQ ID NO: 3334 - DNA, 119 bp, homo sapiens
ttgggtcactgcttttggaggaaatggtgctgctaccactggcaccaaataactgttccatcaaattagttttttctcttttcttgtaattaaatctacaccatctttactaagttttt

SEQ ID NO: 3335 - DNA, 119 bp, homo sapiens
catcaaattagcttttttctcttttcttgtaattaaatctacaccatctttactaagtttttccatacttttctttggaaatccaaaaaactacttttttgactaaatggatttgacct

SEQ ID NO: 3336 - DNA, 119 bp, homo sapiens
ttttccatactgtttctttggaaatccaaaaaactacttttttgactaaatggatttgacctctctgattttttgcaaacgaaggcacgtagctaccaaatgcgaactcattaggggag

SEQ ID NO: 3337 - DNA, 119 bp, homo sapiens
acctctctgatgtttttgcaaacgaaggcacgtagctaccaaatgcgaactcattaggggaggctggactctaacatttcctgaattctgaccttctccttttggagttgagaaactga

SEQ ID NO: 3338 - DNA, 119 bp, homo sapiens
ggaggctggacttctaacatttcctgaattctgaccttctccttttggagttgagaaactgatgtcttgaaatgatgcccattaaataatctctctgaggattcagagaacctgtatgt

SEQ ID NO: 3339 - DNA, 119 bp, homo sapiens
ctgatgtcttgcaaatgatgcccattaaataatctctctgaggattcagagaacctgtatgttttggggttctctctggggagtgtagttttgattcaaaatcaggtaacaatggcaaa

SEQ ID NO: 3340 - DNA, 119 bp, homo sapiens
atgttttggggcttctctctggggagtgtagttttgattcaaaatcaggtaacaatggcaaaacagggtttttagatttcgagaatcttggagttctctgtcaatttcattcagtttag

SEQ ID NO: 3341 - DNA, 119 bp, homo sapiens
caaaacagggtattttagatttcgagaatcttggagttctctgtcaatttcattcagtttagcaagtagatttctctcttcagtctttcttcttcctctccttgcaatttatccatatt

SEQ ID NO: 3342 - DNA, 119 bp, homo sapiens
ttagcaagtagcatttctctcttcagtctttcttcttcctctccttgcaatttatccatattctgaattgatacattcctagttggtaccttccagtttcccactctggcttttcttct

SEQ ID NO: 3343 - DNA, 119 bp, homo sapiens
tattctgaattggatacattcctagttggtaccttccagtttcccactctggcttttcttctctttccataaagatgccttttctttttgctttttatcaagttcttctctttcccatt

SEQ ID NO: 3344 - DNA, 119 bp, homo sapiens
catcctccagcttttcaacctcctgttttacgacatggagttcttcatctgtaacaaatttttcttctcttccataattgggtttagaatccctgcttctccatgcctgtcttgctttt

SEQ ID NO: 3345 - DNA, 119 bp, homo sapiens
ttcaacctcctgttttacgacatggagttcttcatctgtaacaaatttttcttctctttccataattggtttagaatccctgcttctccatgcctgtcttgcttttgagattgcaagtc

SEQ ID NO: 3346 - DNA, 119 bp, homo sapiens
caaagtaagatgtcctggttcttcccatttgttttcgtaacacataattgtttctggagttaaaggatatcttctggcttgaagtcttccatggtttgtactccttttgtacacaggtc

SEQ ID NO: 3347 - DNA, 119 bp, homo sapiens
cccatttgttttcgtaacacataattgtttctggagttaaaggatattcttctggcttgaagtcttccaggtttgtactccttttgtacacaggtctgcaaaatcactctggcatgcag

SEQ ID NO: 3348 - DNA, 119 bp, homo sapiens
ctttaatttgtgatatagtcgctgtacctccttttgaagaactttattttcatcatgagcctcatatgccttttcctttcagcaagcaactgtcgttggaaactgttagtactcagttc

SEQ ID NO: 3349 - DNA, 119 bp, homo sapiens
tcgctgtacctccttttgaagaactttattttcatcatgagcctcatatgcccttttcctttcagcaagaactgtcgttggaaactgttagtactcagttcaaggtttttcgatagctc

SEQ ID NO: 3350 - DNA, 119 bp, homo sapiens
cttaattcttctctcggtgtcatctaactttaactctgctgaaactagtttctttgccaaatcatctcgtcaggtaggtgtctagcttcagagatctctttcagtttctgtaaggaaaa

SEQ ID NO: 3351 - DNA, 119 bp, homo sapiens
aaatcatctcgttcaggtaggtgtctagcttcagagatctctttcagtttctgtaaggaaaattttgtctaaatagttcactttctgtatcttttacccttttctcagttgcccgttct

SEQ ID NO: 3352 - DNA, 119 bp, homo sapiens
aaaattttgtcctaaatagttcactttctgtatcttttacccttttctcagttgcccgttctttctcttagattttcttaagcgttctttgagtgctgtaatctcattgttatgacgaa

SEQ ID NO: 3353 - DNA, 119 bp, homo sapiens
ttctttctcttgagattttcttaagcgttctttgagtgctgtaatctcattgttatgacgaaatataagtgtgagatttcattttcggcatcttcaaacttattcagggctttctcctg

SEQ ID NO: 3354 - DNA, 119 bp, homo sapiens
cgaaatataagttgtgagatttcattttcggcatcttcaaacttattcagggctttctcctgtctgtacgaagccttttcaaagatttattttcttttagcagctcagctaacttgacc

SEQ ID NO: 3355 - DNA, 119 bp, homo sapiens
cctgtctgtactgaagccttttcaaagatttattttcttttagcagctcagctaacttgacctggagttagatacttcattctgcaactcattgatttttagcagtcttgcagacagaa

SEQ ID NO: 3356 - DNA, 119 bp, homo sapiens
gacctggagttcagatacttcattctgcaactcattgatttttagcagtcttgcagacagaatccgtttgtaacaagatcagtatctttccgaagtggctctctattgaggctctggga

SEQ ID NO: 3357 - DNA, 119 bp, homo sapiens
agaatccgttttgtaacaagatcagtatctttccgaagtggctctctattgaggctctgggagcgaaatccactcggactccctttctgtttggtagacccttagggcttggtttccga

SEQ ID NO: 3358 - DNA, 119 bp, homo sapiens
cttggtgatgtacttggccatctgaagtttgtcttttaggattttttctcctaacacttgcaggtgaagactgaccagcgatgatcggccagaagactgtggcgtttcaaaatcagata

SEQ ID NO: 3359 - DNA, 119 bp, homo sapiens
aacacttgcaggtgaagaactgaccagcgatgatcggccagaagactgtggcgtttcaaaatcagataataagaataatggtgtttgcctgcctttctttcttgatcagtacctggact

SEQ ID NO: 3360 - DNA, 119 bp, homo sapiens
gtttcaaaatcagataagtaagaataatggtgtttgcctgcctttctttcttgatcagtacctggacttctgctctttcccccattgttttgaaaaatggtctctattcacataatttc

SEQ ID NO: 3361 - DNA, 119 bp, homo sapiens
gatcagtacctggacttcctgctctttcccccattgttttgaaaaatggtctctattcacataatttcaagattattttctccagaggagactatgacaatactgaaaaacattttcac

SEQ ID NO: 3362 - DNA, 119 bp, homo sapiens
ctattcacataatttcacagattattttctccagaggagactatgacaatactgaaaaacattttcacatcttcagatcctgataatattcatttctgtgcaatctattttctccacaa

SEQ ID NO: 3363 - DNA, 119 bp, homo sapiens
tgaaaaacattttcacagtcttcagatcctgataatattcatttctgtgcaatctattttctccacaattatttgtagaccacaattcacattggcatccagaagataaacttttttgc

SEQ ID NO: 3364 - DNA, 119 bp, homo sapiens
gcaggctcttcagcagagccgatgcggcgtcccgcctccttgccttccctcttaggaccaaactcccagtggggcctcggcgtctgaccgccaaagagcgggtgcctggttcctgcgga

SEQ ID NO: 3365 - DNA, 119 bp, homo sapiens
tccctcttaggaccaaactcccagctggggcctcggcgtctgaccgccaaagagcgggtgcctggttccgcggaggctgccgggcgggtgccgaggttgccgagatgcgggaggtttga

SEQ ID NO: 3366 - DNA, 119 bp, homo sapiens
gccaaagagcgggtgcctggttcctgcggaggctgccgggcgggtgccgaggttgccgagatgcgggagtttgaacacaaggatgggacagaggcgaggatcggggctcctgggtggca

SEQ ID NO: 3367 - DNA, 119 bp, homo sapiens
gccgaggttgccgagatgcgggaggtttgaacacaaggatgggacagaggcgaggatcggggctcctggtggcagcggcggtaacctgggctccagggtaacggaggcggaggcctaga

SEQ ID NO: 3368 - DNA, 119 bp, homo sapiens
tatttttcccacagcagaagtatatttattgtgctgaaatcaggtagcagggaatgaatagctcttgggaccagtacagaatgttcacaaagatttacaaatctcagtcattacacact

SEQ ID NO: 3369 - DNA, 119 bp, homo sapiens
tagctcttgggaaccagtacagaatgttcacaaagatttacaaatctcagtcattacacactgagcaacaaacaaaggtgttgaatcctcttagatcaaactactttatatgttgcaaa

SEQ ID NO: 3370 - DNA, 119 bp, homo sapiens
cactgagcaacaaaacaaaggtgttgaatcctcttagatcaaactactttatatgttgcaaattttctgaattctcatgactgcatgcctttggggaaaaagtatttaattttaatgca

SEQ ID NO: 3371 - DNA, 119 bp, homo sapiens
caaattttctgtaattctcatgactgcatgcctttggggaaaaagtatttaattttaatgcacaataaaatgttatagcttacaaaatattctgaaatagtttgtacaaacagcataca

SEQ ID NO: 3372 - DNA, 119 bp, homo sapiens
tgcacaataaatatgttatagcttacaaaatattctgaaatagtttgtacaaacagcatacatcctacaatgcagctttgacatgttgttgagatacttaagaaatattcatgcttttt

SEQ ID NO: 3373 - DNA, 119 bp, homo sapiens
tacatcctacacatgcagctttgacatgttgttgagatacttaagaaatattcatgcttttttttggtccattttgtctttctctagtaatccctttgcaacatcccttaaaaaattaa

SEQ ID NO: 3374 - DNA, 119 bp, homo sapiens
tttttttggtcacattttgtctttctctagtaatccctttgcaacatcccttaaaaaattaacctatgtgtaaaacatgatacaaattctttcctactttatttccagttgttcactta

SEQ ID NO: 3375 - DNA, 119 bp, homo sapiens
ttaacctatgtagtaaaacatgatacaaattctttcctactttatttccagttgttcacttatattacagaaatacttcatttgtaaatagcaaattgaatgttatagttctgactact

SEQ ID NO: 3376 - DNA, 119 bp, homo sapiens
cttatattacatgaaatacttcatttgtaaatagcaaattgaatgttatagttctgactactctcactttattcattttgtgttttaacaacaccttgtaacatcaagcattgaattta

SEQ ID NO: 3377 - DNA, 119 bp, homo sapiens
tactctcacttttattcattttgtgttttaacaacaccttgtaacatcaagcattgaatttaacaatcttagcaccaaggagtcaagaatattgcaccaaaatgggtttatacttcata

SEQ ID NO: 3378 - DNA, 119 bp, homo sapiens
tttaacaatctttagcaccaaggagtcaagaatattgcaccaaaatgggtttatacttcatacctagttataaataagatcttgcaacttagtcacaaggaaaacgttactccaaaatt

SEQ ID NO: 3379 - DNA, 119 bp, homo sapiens
catacctagttaataaataagatcttgcaacttagtcacaaggaaaacgttactccaaaattaaacacatgaaagagaaggatagtttcacagaaatgtttggtgtatgctatttgtca

SEQ ID NO: 3380 - DNA, 119 bp, homo sapiens
aattaaacacattgaaagagaaggatagtttcacagaaatgtttggtgtatgctatttgtcataaaagcaaaaaaatactagtggatttgaaagttaacattaaaatttacattagaag

SEQ ID NO: 3381 - DNA, 119 bp, homo sapiens
gttctttccaacggaagaggtaggtatatttccacatatgaaaaatcaggaacagccataaatcaaaacaggaaagcctgataaaaatcaacatattctaacagcacataaatgtaact

SEQ ID NO: 3382 - DNA, 119 bp, homo sapiens
ccataaatcaaaacaaggaaagcctgataaaaatcaacatattctaacagcacataaatgtaactatctatgatgttactaataaagacatgagttgtttcatgtttcaatcagacaat

SEQ ID NO: 3383 - DNA, 119 bp, homo sapiens
aaatgtaactatcttatgatgttactaataaagacatgagttgtttcatgtttcaatcagacaataatctaattttcataatatatttctgctactaacaggagtattcaaatgctgcc

SEQ ID NO: 3384 - DNA, 119 bp, homo sapiens
atcagacaataatcttaattttcataatatatttctgctactaacaggagtattcaaatgctgccttttatcacaaaaaattgtttccccacagtgatttgtgcctcaagtcatggtga

SEQ ID NO: 3385 - DNA, 119 bp, homo sapiens
aaatgctgccttttcatcacaaaaaattgtttccccacagtgatttgtgcctcaagtcatggtgatctcgggtcaccagacaagactttactgcaattctttcttattttcaccaacac

SEQ ID NO: 3386 - DNA, 119 bp, homo sapiens
gtcatggtgatctctgggtcaccagacaagactttactgcaattctttcttattttcaccaacaccatctcatcaagcctctaagattctacagagatcagcagattttaaaaatttaa

SEQ ID NO: 3387 - DNA, 119 bp, homo sapiens
tcaccaacaccatcatcatcaagcctctaagattctacagagatcagcagattttaaaaatttaattacaccaaaattatactctgactagaggtggagagatttgaccattccggtca

SEQ ID NO: 3388 - DNA, 119 bp, homo sapiens
aaaaatttaattacaaccaaaattatactctgactagaggtggagagatttgaccattccggtcagcaatgaattcaaatgtgcaagtttaagtgtatacacattttcagctttggaca

SEQ ID NO: 3389 - DNA, 119 bp, homo sapiens
attccggtcagcaaatgaattcaaatgtgcaagtttaagtgtatacacattttcagctttggacaagaaatgtaacaccactgatttcagtcagtagataagataattagtaatttatc

SEQ ID NO: 3390 - DNA, 119 bp, homo sapiens
gctttggacaagaaaatgtaacaccactgatttcagtcagtagataagataattagtaatttatcaaaaaattcataaagaccgtttctgtgatcgtctaaaattcagaccgaagaatg

SEQ ID NO: 3391 - DNA, 119 bp, homo sapiens
gtaatttatcaaaataattcataaagaccgtttctgtgatcgtctaaaattcagaccgaagaatgagtgctataagatacatgaaaaatctcatcctttagacaactggatgtgaacag

SEQ ID NO: 3392 - DNA, 119 bp, homo sapiens
ccgaagaatgagtgactataagatacatgaaaaatctcatcctttagacaactggatgtgaacaggggggaatccccaaagtcacttaatgattgctttggtctggagaatatcaaggc

SEQ ID NO: 3393 - DNA, 119 bp, homo sapiens
cttcataaataaaacatctgggtatggtattaacactttactcagtctaagagttactaggacatagagacatttgtcttttctccccacccccaagctctcctttgcttctgttttcc

SEQ ID NO: 3394 - DNA, 119 bp, homo sapiens
ctaggacatagagcacatttgtcttttctccccacccccaagctctcctttgcttctgttttccctgaattttatatgatatgggagtttttcctcactgtcaacaacagttaaggccc

SEQ ID NO: 3395 - DNA, 119 bp, homo sapiens
tgttttccctgaaattttatatgatatgggagtttttcctcactgtcaacaacagttaaggcccagttcatttaatctccttttgcttttccatttttctgcttttttccattttctat

SEQ ID NO: 3396 - DNA, 119 bp, homo sapiens
taaggcccagttcaatttaatctccttttgcttttccatttttctgcttttttccattttctatcatgattgtttttctgatttgctcacaccatttgctgaaataccattcatggctg

SEQ ID NO: 3397 - DNA, 119 bp, homo sapiens
ttttctatcatgagttgtttttctgatttgctcacaccatttgctgaaataccattcatggctgtttttcagcttttggtttcttaggctctttgtatgtccgaatgtagaagttaaga

SEQ ID NO: 3398 - DNA, 119 bp, homo sapiens
catggctgtttttccagcttttggtttcttaggctctttgtatgtccgaatgtagaagttaagaaagagaatatgaagctgattgcataggcaattagagcccagtgcatccatttggg

SEQ ID NO: 3399 - DNA, 119 bp, homo sapiens
agttaagaaagagaaatatgaagctgattgcataggcaattagagcccagtgcatccatttggggaagggcagtcagtgtaaagagacagtgccgtgtgcccaatggtcacatggaatt

SEQ ID NO: 3400 - DNA, 119 bp, homo sapiens
cagttgcaacatagtcaggtatcgtttccaccaaagatatttctgaatccatgggccaaatgcagttaaccatagtatgagtacataatcacatggataaaggaattcaactgggctcc

SEQ ID NO: 3401 - DNA, 119 bp, homo sapiens
acatagtcaggtatcgtttccaccaaagatatttctgaatccatgggccaaatgcagttaacccatagttgagtacataatcacatggataaaggaattcaactgggctccaaaaaatg

SEQ ID NO: 3402 - DNA, 119 bp, homo sapiens
cttgtcctcctgcaacccacttaattccaatccaccacaaggtaaacatcgtacagtgatgatacacataaggaaagaaacttggttgtttttctttctcagaataaaaaacactgtgt

SEQ ID NO: 3403 - DNA, 119 bp, homo sapiens
acagtgatgatacacatgaaggaaagaaacttggttgtttttctttctcagaataaaaaacactgtgtcaaatactcaactcctttagatacaaagtaccaccacagagcagcagctat

SEQ ID NO: 3404 - DNA, 119 bp, homo sapiens
ctctctgaagataaagaggttaagcaaaaccatcccaaaattatagataatgagcactagacgcatctgaaaggttctcggtccttcatccattttggacccagccacacaaacaggag

SEQ ID NO: 3405 - DNA, 119 bp, homo sapiens
ccaaaattatagataatgagcactagacgcatctgaaaaggttctcggtccttcatccattttggacccgccacacaaacaggagataaagagtgcttatacttagtgtaggccaagga

SEQ ID NO: 3406 - DNA, 119 bp, homo sapiens
gaaaaggttctcggtccttcatccattttggacccagccacacaaacaggagataaagagtgcttatactagtgtaggccaaggagactgcatcagaggccaattttccacacgcttat

SEQ ID NO: 3407 - DNA, 119 bp, homo sapiens
ctgcgatggaccaggtccagcggtagaactctaccgtgtcgttgagtgccgtggacactacgtttaggaactacccggctccgagtccaggagccccatcgcggcgatgagcgggcgct

SEQ ID NO: 3408 - DNA, 119 bp, homo sapiens
acgtttaggacactacccggctccgagtccaggagccccatcgcggcgatgagcgggcgctggcggcagagaaagcggagacccagagagagggctgaccccggaggcggtggcggccg

SEQ ID NO: 3409 - DNA, 119 bp, homo sapiens
ctggcggcaggagaaagcggagacccagagagagggctgaccccggaggcggtggcggccgacggggcggcggcggccgggaacccctctaacggcggcggcccggctgcgtcttctcc

SEQ ID NO: 3410 - DNA, 119 bp, homo sapiens
cgacggggcgagcggcggccgggaacccctctaacggcggcggcccggctgcgtcttctcctgctcctcaggcgccgcggcggcggggatgcggcagaaggcagggccaagcggaaggc

SEQ ID NO: 3411 - DNA, 119 bp, homo sapiens
cctgctcctcaaggcgccgcggcggcggggatgcggcagaaggcagggccaagcggaaggcgtcgtcaagttcccgggagaaagacgaggaggtggaggaggcccagccgccagcacag

SEQ ID NO: 3412 - DNA, 119 bp, homo sapiens
gcgtcgtcaaggttcccgggagaaagacgaggaggtggaggaggcccagccgccagcacagtgcgctgcccagtctgcagcctcgcgcagccgcccctccaatctcctcagccggcgtc

SEQ ID NO: 3413 - DNA, 119 bp, homo sapiens
caagtgcattcacaagacagaaaaaaacaagcttgtacaagagtgactcaagctggctgggcccagctgacctgacacacagacttatacatccagaacaatgaaaactcagtgccatc

SEQ ID NO: 3414 - DNA, 119 bp, homo sapiens
gctgggcccagctgtacctgacacacagacttatacatccagaacaatgaaaactcagtgccatcagaaagacttttgggcggatggctgtaggcttcaccagttatcagtgccactca

SEQ ID NO: 3415 - DNA, 119 bp, homo sapiens
cagtgccatcagaacagacttttgggcggatggctgtaggcttcaccagttatcagtgccactcaacacttcaaaaatgccttttttttaaagttctacacagcgggacatgtttacca

SEQ ID NO: 3416 - DNA, 119 bp, homo sapiens
gtgccactcaacactttcaaaaatgccttttttttaaagttctacacagcgggacatgtttaccaattttatgcctctacatgtgcagggataagagccaaatatatttttattagaag

SEQ ID NO: 3417 - DNA, 119 bp, homo sapiens
atgtttaccaatttttatgcctctacatgtgcagggataagagccaaatatatttttattagaagatattcacactgggtatacatctgggcaaaatttacacctcaatgcccaacatt

SEQ ID NO: 3418 - DNA, 119 bp, homo sapiens
ttattagaagatatttcacactgggtatacatctgggcaaaatttacacctcaatgcccaacattgttttctcacttcttattttaatggaattgactgtctaatttggataggtcttt

SEQ ID NO: 3419 - DNA, 119 bp, homo sapiens
gcccaacattgtttttctcacttcttattttaatggaattgactgtctaatttggataggtctttctaatttatattagttttcactttcttggggttaaatattttatcagcagacct

SEQ ID NO: 3420 - DNA, 119 bp, homo sapiens
ataggtctttctaattttatattagttttcactttcttggggttaaatattttatcagcagaccttatccacacttgagaaaggagtcaagaaaagaacaaaaaatgaatatcccatta

SEQ ID NO: 3421 - DNA, 119 bp, homo sapiens
cagcagaccttatcacacacttgagaaaggagtcaagaaaagaacaaaaaatgaatatcccattataattcaaacttcaaaacatatagtctataataatgacactattattctggaac

SEQ ID NO: 3422 - DNA, 119 bp, homo sapiens
caatgtaagtctacaaaataggtatgtgcttaaatatgaaaagccttttttaaaaagtaaagacattggaacattgttgccagtccagccaaaaatcacttttaatttaggtctatgaa

SEQ ID NO: 3423 - DNA, 119 bp, homo sapiens
agacattgggaacattgttgccagtccagccaaaaatcacttttaatttaggtctatgaagttacctattgatttgatcttaagaaacacaaaattttaattagaaagtaaattgtttt

SEQ ID NO: 3424 - DNA, 119 bp, homo sapiens
gttacctatatgatttgatcttaagaaacacaaaattttaattagaaagtaaattgttttcttttaatgctttgttactgagactgttttgaatgcgccatattctaaagctgcttatc

SEQ ID NO: 3425 - DNA, 119 bp, homo sapiens
agctgcttatcttttaaataaagtgaatttcaaaaacagatacttcatattctgggcatagcatcacactacaaccattaccaatataataatattaaatgattacttaacagacatcc

SEQ ID NO: 3426 - DNA, 119 bp, homo sapiens
agcatcacacatacaaccattaccaatataataatattaaatgattacttaacagacatcctaataacgaaacaccttttattcacatttgctgagtagcaattacagtgttttcttca

SEQ ID NO: 3427 - DNA, 119 bp, homo sapiens
cctaataacgcaaacaccttttattcacatttgctgagtagcaattacagtgttttcttcattagttttcaacactggtaatgtaattatgatgcaattactaacaatataagtaccaa

SEQ ID NO: 3428 - DNA, 119 bp, homo sapiens
cattagttttccaacactggtaatgtaattatgatgcaattactaacaatataagtaccaatactttgacaacaatagtcacaatggtttataacaactgaactcaaaggccacgttga

SEQ ID NO: 3429 - DNA, 119 bp, homo sapiens
aatactttgaccaacaatagtcacaatggtttataacaactgaactcaaaggccacgttgatttttccaccacaacttgattctgatttttctagagtcattcataagaacaagaagta

SEQ ID NO: 3430 - DNA, 119 bp, homo sapiens
gatttttccacccacaacttgattctgatttttctagagtcattcataagaacaagaagtagtggatccttcttcctccttagtatctgaaaattctgaactctgaagagaaattccat

SEQ ID NO: 3431 - DNA, 119 bp, homo sapiens
tagtggatcctttcttcctccttagtatctgaaaattctgaactctgaagagaaattccatttggtttgcattttcacctctgtgcatttcggcagctcttaacttttcttcaattctt

SEQ ID NO: 3432 - DNA, 119 bp, homo sapiens
tttcactagccacatgattagctggaaaataaccttcctgtccctttcctatgctgccataccaccagtttcattatctttgaaaaacactcggataatgtctccgcgatggatggtta

SEQ ID NO: 3433 - DNA, 119 bp, homo sapiens
ctttcctatgctgccataccaccagtcttcattatctttgaaaaacactcggataatgtctccgcgatgatggttagttcatctgatcgattcgctgtgtagtcataaagagccactac

SEQ ID NO: 3434 - DNA, 119 bp, homo sapiens
catcacttaacaaattttattaagttgtatcttaaaatatcttccactcttttggcaataaaacaaacttataatttcaaactaaaaaaaaaaatcaaaaaagcctcccataacctcat

SEQ ID NO: 3435 - DNA, 119 bp, homo sapiens
aaacaaactgtataatttcaaactaaaaaaaaaaatcaaaaaagcctcccataacctcatactgtttatctcccaatattttatgagtttcaaagtattaaatgtattgtgttgattct

SEQ ID NO: 3436 - DNA, 119 bp, homo sapiens
actgtttattctcccaatattttatgagtttcaaagtattaaatgtattgtgttgattctgacaattcttgaagtaggaaatgtggagacatttatccgaagagagaaagtgaactacc

SEQ ID NO: 3437 - DNA, 119 bp, homo sapiens
tgtgacagtttcaagcctctgttttactagctgcatcttcgttgaagaactttcagtgtggacaaattctcaatctgaaaagagccttgatggggtagttttggacaggtacatagggc

SEQ ID NO: 3438 - DNA, 119 bp, homo sapiens
tcgttgaagaactttcagtgtggacaaattcatcaatctgaaaagagccttgatggggtagttttggacggtacatagggcatcttgactttggtgtattccaggtaatggaaatgttc

SEQ ID NO: 3439 - DNA, 119 bp, homo sapiens
tgaaaagagccttgatggggtagttttggacaggtacatagggcatcttgactttggtgtattccaggtatggaaatgttccattgtagcgtttgaacatttcagcctcctgctgggca

SEQ ID NO: 3440 - DNA, 119 bp, homo sapiens
catggaaatcgtaaatatacagaagaattggctcattttgcccaaatgcacagaatgcaaccatattttaaatggatgataagaaatgtctcgaatgggtgacttgaatggcaagtcag

SEQ ID NO: 3441 - DNA, 119 bp, homo sapiens
gaagaattggctcattttgcccaaatgcacagaatgcaaccatattttcaaatggatgataagaaatgttcgaatgggtgacttgaatggcaagtcagaatacatggctacttgttctc

SEQ ID NO: 3442 - DNA, 119 bp, homo sapiens
ctgtttctgggttccaaacatacactataccatcctcacttccagcaaacagaaaagtcccacatggagcaaagtactatgaatcttctcccgataatttgctgctcctacaaacttcc

SEQ ID NO: 3443 - DNA, 119 bp, homo sapiens
ttccaaacatacactataccatcctcacttccagcaaacagaaaagtcccacatggagtcaaagtactagaatcttctcccgataatttgctgctcctacaaacttccttgctactaat

SEQ ID NO: 3444 - DNA, 119 bp, homo sapiens
cttcagtatcaaaacaaagtgagttgataaaacttttgtgaacatcaaactgtcggaccaatatggcagatcttctctcatctcaactttccatatccgtatcatggaatcatagcatc

SEQ ID NO: 3445 - DNA, 119 bp, homo sapiens
gaccaatatggcagaatcttctctcatctcaactttccatatccgtatcatggaatcatagcatcctgtactactagctctcttacagctggatggaatttagccgtgtaaacaaaaga

SEQ ID NO: 3446 - DNA, 119 bp, homo sapiens
tcatagcatcctgtaactactagctctcttacagctggatggaatttagccgtgtaaacaaaagaaggagaggtaaaactctgaaagtatttgtattgtttatttcatttttccatatc

SEQ ID NO: 3447 - DNA, 119 bp, homo sapiens
ctggcagtgccatcagatgatgaagtaaggatgtagtgatcatcttttgaccaggaaagatcataaatgtattgaggtggccacacaattctctcatgaaacgtccagaaggaatttca

SEQ ID NO: 3448 - DNA, 119 bp, homo sapiens
cagtgccatcagatgatgaagtaaggatgtagtgatcatcttttgaccaggaaagatcataaatgatatgaggtggccacacaattctctcatgaaacgtccagaaggaatttcatata

SEQ ID NO: 3449 - DNA, 119 bp, homo sapiens
aaataattggatatccatcccggctggcacaagctgctgctaatattcttccattgtgggagaaatcaaacaaaaacatcctcgttctcctgcatttagtgagaagaggtgtttgtttg

SEQ ID NO: 3450 - DNA, 119 bp, homo sapiens
tccatcccggctggcacaagctgctgctaatattcttccattgtgggagaaatcaagacaaaaacatcccgttctcctgcatttagtgagaagaggtgtttgtttgggatacggcaagc

SEQ ID NO: 3451 - DNA, 119 bp, homo sapiens
ctgcccagggagtcgtttccactttattacttcctttgactcttctaatccaggttctgtgtctactgacttgactcatggtgacgttcacaatgcactggtttacctttttcctcctg

SEQ ID NO: 3452 - DNA, 119 bp, homo sapiens
ctttgactcttctaatccaggttctgtgtctactgagcttgactcatggtgacgttcacaatgcactggttacctttttcctcctgaagagccatcatagagcggtaagatggctttat

SEQ ID NO: 3453 - DNA, 119 bp, homo sapiens
acagtctggaactttcagtcctcttacagttacgtacagtgttgatgggtaatgatttcttggacatttgaccaccattcaaatgcctcaacaacacttaatggggatcgaggcttagt

SEQ ID NO: 3454 - DNA, 119 bp, homo sapiens
gtacagtgttgatgggtaatgatttcttggacattttgaccaccattcaaatgcctcaacaacacttaaggggatcgaggcttagtaggtgggtaatatagctgcaagcgaagttttga

SEQ ID NO: 3455 - DNA, 119 bp, homo sapiens
ttttgaccaccattcaaatgcctcaacaacacttaatggggatcgaggcttagtaggtgggtaatatagtgcaagcgaagttttgagttgatgtttgcatttccattggctcccagaag

SEQ ID NO: 3456 - DNA, 119 bp, homo sapiens
ctcaaagaacaggatgactttaggactctcatcagagcctcgaagcaaatagggaaaattttcattaaaacaatttgttcttcccactctggaagtcttgattttaactgtttaaaatc

SEQ ID NO: 3457 - DNA, 119 bp, homo sapiens
gcctcgaagcaaatagggaaaattttcattaaatacaatttgttcttcccactctggaagtcttgatttaactgtttaaaatcatatggctgggtcataataggaagaatataatccac

SEQ ID NO: 3458 - DNA, 119 bp, homo sapiens
aatttgttcttcccactctggaagtcttgattttaactgtttaaaatcatatggctgggtcataataggagaatataatccacattctctttttcatagtaagatgaaacaggccgtcc

SEQ ID NO: 3459 - DNA, 119 bp, homo sapiens
ctatcatctttcttgacatattgaccagtatgctcatcaaccacatgaatttttaccattgggtgagaatcataaaatctgacttaagtctatcagttcggtgaatgtaaactcccaag

SEQ ID NO: 3460 - DNA, 119 bp, homo sapiens
ttttaccattgggtgagaaatcataaaatctgacttaagtctatcagttcggtgaatgtaaactcccaaacaaggtcatcatcaagcaaacatttgggataaaccgggctatctcggct

SEQ ID NO: 3461 - DNA, 119 bp, homo sapiens
ggtgaatgtaaactcccaagacaaggtcatcatcaagcaaacatttgggataaaccgggctatctcggctgttatttcatgaacaccatcaccatcaacatcttcattattatctgcaa

SEQ ID NO: 3462 - DNA, 119 bp, homo sapiens
ctgctttagtcttcttttttgttttttttggtttaggttttgtatcatcttgcatgctgtcttctgtgcttgttccattgagcttatttcatcatcttgatgagaatctgaagaaactg

SEQ ID NO: 3463 - DNA, 119 bp, homo sapiens
tttaggttttgtatcatcttgcatgctgtcttctgtgctttgttccattgagcttatttcatcatcttgtgagaatctgaagaaactgatctaactgaagattctttcttttgttcacc

SEQ ID NO: 3464 - DNA, 119 bp, homo sapiens
tctgtgctttgttccattgagcttatttcatcatcttgatgagaatctgaagaaactgatctaactgaaattctttcttttgttcaccttcaactgtgtcaccagagatggtcaatgta

SEQ ID NO: 3465 - DNA, 119 bp, homo sapiens
cttgtttcagctttagagaagactggaacttcctttttctttttccttttttcactgcttagtttgtcacatggaataaagtatctgagggaaagtaagtcaactgttctttcagtttc

SEQ ID NO: 3466 - DNA, 119 bp, homo sapiens
tgcttagtttgtcatcatggaataaagtatctgagggaaagtaagtcaactgttctttcagtttctttctattttcctcttaatctcctttgccatttcttcagttacatggcactgat

SEQ ID NO: 3467 - DNA, 119 bp, homo sapiens
tttcagtttctttcttattttcctcttaatctcctttgccatttcttcagttacatggcactgatatgctgcatcaattcttcatcctcttctaaatcagtctcttctcttccctcatt

SEQ ID NO: 3468 - DNA, 119 bp, homo sapiens
tggcactgatatgcttgcatcaattcttcatcctcttctaaatcagtctcttctcttccctcatttgcctctcacttttctgatgatcaacgcctggctgtggctttgtatgtgttttc

SEQ ID NO: 3469 - DNA, 119 bp, homo sapiens
ttccctcatttgccttctcacttttctgatgatcaacgcctggctgtggctttgtatgtgttttctggttgtagaatcaaccttattctcaggagtttccggtttcaggtcttgtgtag

SEQ ID NO: 3470 - DNA, 119 bp, homo sapiens
atgtgttttctggtgtgtagaatcaaccttattctcaggagtttccggtttcaggtcttgtgtagtcaatggggcaccgtctttatcacctttttatttggctttccttgtttgtcttc

SEQ ID NO: 3471 - DNA, 119 bp, homo sapiens
tcttgtgtagtcaactggggcaccgtctttatcacctttttatttggctttccttgtttgtcttcctctcactagcatcaccattaggattttcagttgctaactgtgtgttcctcaat

SEQ ID NO: 3472 - DNA, 119 bp, homo sapiens
gtttgtcttcctctacactagcatcaccattaggattttcagttgctaactgtgtgttcctcaatttgttttagtgactctcgtgctcttcttcaggttgttagtgttagcagcactta

SEQ ID NO: 3473 - DNA, 119 bp, homo sapiens
gttcctcaatttgtttttagtgactctcgtgctcttcttcaggttgttagtgttagcagcacttacatctcacttgtagtttctttaatatggggaagattgcttctaatagtgtcggg

SEQ ID NO: 3474 - DNA, 119 bp, homo sapiens
tgagatgttttcttcagacctgacaagttttttcttcagttttttcttttcacgcattagatcactgtggtcttaagcaattcttcaaagcgaactttggtttttacttttgcttcact

SEQ ID NO: 3475 - DNA, 119 bp, homo sapiens
tgttttcttcagacctgacaagttttttcttcagttttttcttttcacgcattagatcactgtgggtctaagcaattcttcaaagcgaactttggtttttacttttgcttcactctcag

SEQ ID NO: 3476 - DNA, 119 bp, homo sapiens
ggagaggggtacgcagaaccgcccgtcccgccggagccgacacccggagcagtgcaaatcaactcccccgcctagcggcgcgtgcgcgaagtgaggcggccacgcagccacctaacccg

SEQ ID NO: 3477 - DNA, 119 bp, homo sapiens
cggagccgacacccggagcagtgcaaatcaactcccccagcctagcggcgcgtgcgcgaagtgaggcggcacgcagccacctaacccgccagcgacccgtgtcctgaaagcaagccgcg

SEQ ID NO: 3478 - DNA, 119 bp, homo sapiens
ctcccccagcctagcggcgcgtgcgcgaagtgaggcggccacgcagccacctaacccgccagcgacccggtcctgaaagcaagccgcggctctgtgccgcagtgcggacagcgcgccgc

SEQ ID NO: 3479 - DNA, 119 bp, homo sapiens
gaccaatcagaatctcaaacacagggcacggggcccacacttccgtccggtctgcctggtctctctaacgcgccagtgtgcctccgactcggaacggcttccgcggccggggcagcgag

SEQ ID NO: 3480 - DNA, 119 bp, homo sapiens
atgagtgcggtgtgcggtggagcggcgcggatgctgcggacgccgggacgccacggctacgccgccgagtctccccgtacctgccgggccgcctggcctgcgccaccgcgcagcactac

SEQ ID NO: 3481 - DNA, 119 bp, homo sapiens
tgtgcggtggagcggcgcggatgctgcggacgccgggacgccacggctacgccgccgagttctccccgtcctgccgggccgcctggcctgcgccaccgcgcagcactacggcatcgcgg

SEQ ID NO: 3482 - DNA, 119 bp, homo sapiens
ctttgactggaatgatggtttgtttgatgtgacttggagtgagaacaacgaacatgtcctcatcacctgagtggcgatggctcgctgcagctctgggacactgccaaagctgcagggcc

SEQ ID NO: 3483 - DNA, 119 bp, homo sapiens
acttggagtgagaacaacgaacatgtcctcatcacctgtagtggcgatggctcgctgcagctctgggacctgccaaagctgcagggccactgcaagtctataaagaacacgctcaggag

SEQ ID NO: 3484 - DNA, 119 bp, homo sapiens
gtggctgactgttcttgggatgaaacaataaagatctatgaccctgcttgtcttactattcctgcttgaatacactactttggtcagaaacagaggatgttggctgaagaactgcctaa

SEQ ID NO: 3485 - DNA, 119 bp, homo sapiens
tcctgcttgagatacactactttggtcagaaacagaggatgttggctgaagaactgcctaacagcaaataattaactatggaaaacatagacattatgcttttatatgctattcagatt

SEQ ID NO: 3486 - DNA, 119 bp, homo sapiens
aacagcaaataaattaactatggaaaacatagacattatgcttttatatgctattcagatttcaaatcttccaatttaccctggaatcagttttgagggagctgataaagactttagct

SEQ ID NO: 3487 - DNA, 119 bp, homo sapiens
tttcaaatctttccaatttaccctggaatcagttttgagggagctgataaagactttagctgactcgttagcctgatacataagccatatttaaaattctaagaaataattaatgttat

SEQ ID NO: 3488 - DNA, 119 bp, homo sapiens
ctgactcgttaagcctgatacataagccatatttaaaattctaagaaataattaatgttatgatatatctgtagtatctattaaaatgtctctgggtcataaaatggattaaaatatgg

SEQ ID NO: 3489 - DNA, 119 bp, homo sapiens
atgatatatcttgtagtatctattaaaatgtctctgggtcataaaatggattaaaatatgggagatcagaggttatacttatatagatagtgatatatttcatttttaatttgtcattt

SEQ ID NO: 3490 - DNA, 119 bp, homo sapiens
gggagatcagtaggttatacttatatagatagtgatatatttcatttttaatttgtcatttttgatgtaaatataatcactgctgtgataaataaactatctattgatcatttatcatt

SEQ ID NO: 3491 - DNA, 119 bp, homo sapiens
atagtgcccccgcctccttgcgcgaagtgcgcaggctcctgggcagggctcgggttctgcccggggacgagcccagttggtagcgtcgctccctgagcgtttctaagggggccgcccgg

SEQ ID NO: 3492 - DNA, 119 bp, homo sapiens
gcccggggacgcagcccagttggtagcgtcgctccctgagcgtttctaagggggccgcccggccttgtcttcggcagtggccgagccaccgccgcctgccgcgcgttccagagctgggc

SEQ ID NO: 3493 - DNA, 119 bp, homo sapiens
ccggccttgtctttcggcagtggccgagccaccgccgcctgccgcgcgttccagagctgggcgctgcagtgcactgccgatcgccgtgtttggtcgatagaatccccagtgtgcccaga

SEQ ID NO: 3494 - DNA, 119 bp, homo sapiens
gggcgctgcagctgcactgccgatcgccgtgtttggtcgatagaatccccagtgtgcccagagagtgcgcccctcgcccggcccggcgagccccgggcgtgaaccgagctgagggagga

SEQ ID NO: 3495 - DNA, 119 bp, homo sapiens
cagagagtgcgacccctcgcccggcccggcgagccccgggcgtgaaccgagctgagggaggatggcagctctggggtggagaagagcagcaagaagaagaccgagaagaaacttgctgc

SEQ ID NO: 3496 - DNA, 119 bp, homo sapiens
aggatggcagcctctggggtggagaagagcagcaagaagaagaccgagaagaaacttgctgctcgggaaaagctaaattgttggcgggtttcatgggcgtcatgaataacatgcggaaa

SEQ ID NO: 3497 - DNA, 119 bp, homo sapiens
agttggtagaggggcgcgtaaaacaattctcgagcaaaagtgcttctcgtctgccgaggatgtagctccaagtcagactcctgggggactcctcaggctggctttcgccgtcgggtatc

SEQ ID NO: 3498 - DNA, 119 bp, homo sapiens
ccgaggatgtagctcccaagtcagactcctgggggactcctcaggctggctttcgccgtcgggtatcggtgtgtaacagctctgccctagttatctctttgtggggcgaggatccttcc

SEQ ID NO: 3499 - DNA, 119 bp, homo sapiens
cgccgtcgggtatcggttgtgtaacagctctgccctagttatctctttgtggggcgaggatccttccatggcgagccgttttaaggtgccgtgagatcttgtgtgaagaaacccgttgg

SEQ ID NO: 3500 - DNA, 119 bp, homo sapiens
gcgaggatccttccattggcgagccgttttaaggtgccgtgagatcttgtgtgaagaaacccgttggcaagcccaaaccgaagcccccaaagggaggagagttgctggcctgacatcag

SEQ ID NO: 3501 - DNA, 119 bp, homo sapiens
aagaaacccgttggcatagcccaaaccgaagcccccaaagggaggagagttgctggcctgacatcagctctcttaaataaggatccccgccccctcctgtgttccccggtggagctagt

SEQ ID NO: 3502 - DNA, 119 bp, homo sapiens
tggcctgacatcagctgctcttaaataaggatccccgccccctcctgtgttccccggtggagctagttgagaggagtcctcctgttcgtgctaatttagagcagaagcagccatcgata

SEQ ID NO: 3503 - DNA, 119 bp, homo sapiens
ccggtggagctagttgaagaggagtcctcctgttcgtgctaatttagagcagaagcagccatcgataaaaccatgccatcttctaagggcactgtgcgcctctgttattaagaggagct

SEQ ID NO: 3504 - DNA, 119 bp, homo sapiens
agcagccatcgataaataccatgccatcttctaagggcactgtgcgcctctgttattaagaggagctcttgttctgtccttggtgtgtggtgcattcgtgaaattctgcagcacatcgg

SEQ ID NO: 3505 - DNA, 119 bp, homo sapiens
tgatttaaatctaccacccagctgtagttgaatctacaatctgctcagggatttatactcaatgccaattgatatcatgctgggagggactgattgcagaaccttcttgacaagccaca

SEQ ID NO: 3506 - DNA, 119 bp, homo sapiens
taccacccagctgtagttgaatctacaatctgctcagggatttatactcaatgccaatttgatatcatgtgggagggactgattgcagaaccttcttgacaagccacataaatctaaag

SEQ ID NO: 3507 - DNA, 119 bp, homo sapiens
aatttccgtgaatagcaacaatgttcagtctttgctggatgcagcaaaccaatatcagattgaacctgtaagaaaatgtgtgttgattttttgaaagaacaagttgatgcttcaaattg

SEQ ID NO: 3508 - DNA, 119 bp, homo sapiens
ccgtgaatagcaacaatgttcagtctttgctggatgcagcaaaccaatatcagattgaacctgtgaagaaatgtgtgttgattttttgaaagaacaagttgatgcttcaaattgtcttg

SEQ ID NO: 3509 - DNA, 119 bp, homo sapiens
ggagaagcagaaaaagttgatcagagccttccagagtgtggtatgcttttcactgtgtgatgatccttatggcacatgaatgaacgtccagatgtttgtgcagtagcccacccttatct

SEQ ID NO: 3510 - DNA, 119 bp, homo sapiens
gtataagtgtgctagcggagtgtctagattgtcctgaattgaaagcaactgcagatgactttattcatcgcactttactgaagtttacaaaactgatgaatttcttcaacttgatgtca

SEQ ID NO: 3511 - DNA, 119 bp, homo sapiens
gactttattcatcagcactttactgaagtttacaaaactgatgaatttcttcaacttgatgtcaagcgataacacatcttctcaaccaggacactctgactgtgagagcagaggatcag

SEQ ID NO: 3512 - DNA, 119 bp, homo sapiens
gtttatgatgctgcagtcaggtggttgaaatacgatgaacctaatcgccagccatttatggttgatatcttgctaaagtcaggtttcctcttatatcaaagaatttcttaagtaaaacg

SEQ ID NO: 3513 - DNA, 119 bp, homo sapiens
ttatggttgatatccttgctaaagtcaggtttcctcttatatcaaagaatttcttaagtaaaacggtacagctgaaccacttattcaagacaatcctgaatgccttaagatggtgataa

SEQ ID NO: 3514 - DNA, 119 bp, homo sapiens
gtggaatgaggtaccatctactgtctccagaggaccgagaagaacttgtagatggcacaagacctagaaaaagaaacatgactaccgcatagccctatttggaggctctcaaccacagt

SEQ ID NO: 3515 - DNA, 119 bp, homo sapiens
tctccagaggaccgagaagaacttgtagatggcacaagacctagaagaaagaaacatgactaccgcataccctatttggaggctctcaaccacagtcttgtagatattttaacccaaag

SEQ ID NO: 3516 - DNA, 119 bp, homo sapiens
gattatagctggacagacatccgctgcccctttgaaaaacgaagagatgcagcatgcgtgttttgggacatgtagtatacattttgggaggctctcagcttttcccaataaagcgaatg

SEQ ID NO: 3517 - DNA, 119 bp, homo sapiens
gaagagatgcagcatgcgtgttttgggacaatgtagtatacattttgggaggctctcagcttttcccaaaaagcgaatggactgctataatgtagtgaaggatagctggtattcgaaac

SEQ ID NO: 3518 - DNA, 119 bp, homo sapiens
cattttgggaggctctcagcttttcccaataaagcgaatggactgctataatgtagtgaaggatagctgtattcgaaactgggtcctccgacacctcgagacagccttgctgcatgtgc

SEQ ID NO: 3519 - DNA, 119 bp, homo sapiens
gactgctataatgtagtgaaggatagctggtattcgaaactgggtcctccgacacctcgagacagccttctgcatgtgctgcagaaggcaaaatttatacatctggaggttcagaagta

SEQ ID NO: 3520 - DNA, 119 bp, homo sapiens
gaaactcagctctgtatttatttgagtgctatgatacgagaactgaaagctggcacacaaagcccagcagctgacccagcgctgcagccatgggatggtggaagccaatggcctaatct

SEQ ID NO: 3521 - DNA, 119 bp, homo sapiens
actgaaagctggcacacaaagcccagcatgctgacccagcgctgcagccatgggatggtggaagccaatgcctaatctatgtttgtggtggaagtttaggaaacaatgtttctgggaga

SEQ ID NO: 3522 - DNA, 119 bp, homo sapiens
ctgcagccatgggatggtggaagccaatggcctaatctatgtttgtggtggaagtttaggaaacaatgttctgggagagtgcttaattcctgtgaagtttatgatcctgccacagaaac

SEQ ID NO: 3523 - DNA, 119 bp, homo sapiens
gtggtctggacaatgtggaatattacgatattaagttgaacgaatggaagatggtctcaccaatgccatgaagggtgtaacagtgaaatgtgcagcagttggctctatagtttatgtct

SEQ ID NO: 3524 - DNA, 119 bp, homo sapiens
ccaatgccatggaagggtgtaacagtgaaatgtgcagcagttggctctatagtttatgtcttggctggtttcagggtgttggtcgattaggacacattctcgaatataataccgaaaca

SEQ ID NO: 3525 - DNA, 119 bp, homo sapiens
cttggctggttttcagggtgttggtcgattaggacacattctcgaatataataccgaaacagacaaatggttgccaactccaaagttcgtgcttttccagtcacaagttgtttaatttg

SEQ ID NO: 3526 - DNA, 119 bp, homo sapiens
cagacaaatgggttgccaactccaaagttcgtgcttttccagtcacaagttgtttaatttgtgttgtcgtacttgtggagcaaatgaagagacccttgaaacatgaaaaatgagtggac

SEQ ID NO: 3527 - DNA, 119 bp, homo sapiens
tgtgttgtcgatacttgtggagcaaatgaagagacccttgaaacatgaaaaatgagtggacttcagactatcagagactctaaaatatagccaccagtgctttgttccaggagtttggt

SEQ ID NO: 3528 - DNA, 119 bp, homo sapiens
acttcagactcatcagagactctaaaatatagccaccagtgctttgttccaggagtttggtgacaaagtttggtttggtgttttggtaaagaaagtttcaagtgaaatgaggttcctat

SEQ ID NO: 3529 - DNA, 119 bp, homo sapiens
gtgacaaagttttggtttggtgttttggtaaagaaagtttcaagtgaaatgaggttcctataaaatagagtttcttttatatggatttccttaattcaaagatcatattttagctggcc

SEQ ID NO: 3530 - DNA, 119 bp, homo sapiens
ataaaatagatgtttcttttatatggatttccttaattcaaagatcatattttagctggccacaaaaccagaacatatctagcaagaaaacttgaaaaagtataagcatttgttaaaaa

SEQ ID NO: 3531 - DNA, 119 bp, homo sapiens
ccacaaaaccaagaacatatctagcaagaaaacttgaaaaagtataagcatttgttaaaaatgtgaattcttgaatgaatttcacatttgtaactatgattttggcagaatagaagatt

SEQ ID NO: 3532 - DNA, 119 bp, homo sapiens
aatgtgaatttcttgaatgaatttcacatttgtaactatgattttggcagaatagaagattggctcatcgtgaagcgcagtatcttagctctagattctattttcatgcatcacagaag

SEQ ID NO: 3533 - DNA, 119 bp, homo sapiens
ttggctcatcagtgaagcgcagtatcttagctctagattctattttcatgcatcacagaagtgctatacgttaggtctgtttgtgctcagtcaagaactaagaaatagtatgaattgta

SEQ ID NO: 3534 - DNA, 119 bp, homo sapiens
agtgctatacggttaggtctgtttgtgctcagtcaagaactaagaaatagtatgaattgtaagtcaagagggcaactcagatggagcagcttagtctcacagtttgcttgtctatttat

SEQ ID NO: 3535 - DNA, 119 bp, homo sapiens
taagtcaagatgggcaactcagatggagcagcttagtctcacagtttgcttgtctatttattttatttatgccaaatgtattccattttaaaagtaagccagagtgagtcaaggcatat

SEQ ID NO: 3536 - DNA, 119 bp, homo sapiens
attttatttagtgccaaatgtattccattttaaaagtaagccagagtgagtcaaggcatatacacacttctcacaaaacttcctaaacagatttgggggtttaatatgtccaactcctc

SEQ ID NO: 3537 - DNA, 119 bp, homo sapiens
atacacactttctcacaaaacttcctaaacagatttgggggtttaatatgtccaactcctcatgaaataattcaatccacttaaatatattccatctttttaacataaaatgtaaagct

SEQ ID NO: 3538 - DNA, 119 bp, homo sapiens
tcatgaaatatattcaatccacttaaatatattccatctttttaacataaaatgtaaagcttagcaccctcattaatttatgtctctgttttatccagtggttaaaaaaggattctgcc

SEQ ID NO: 3539 - DNA, 119 bp, homo sapiens
cttagcacccatcattaatttatgtctctgttttatccagtggttaaaaaaggattctgcctctttagtctcactgttaaataaaacccaatcatagtaagtgattaactagcaaaaag

SEQ ID NO: 3540 - DNA, 119 bp, homo sapiens
cctctttagtcctcactgttaaataaaacccaatcatagtaagtgattaactagcaaaaagtaaagctattatagcaaatttctagatcattagaaaagcactggtagttgtacaatat

SEQ ID NO: 3541 - DNA, 119 bp, homo sapiens
agtaaagctatttatagcaaatttctagatcattagaaaagcactggtagttgtacaatatcagtgttgctttgaacttctttaacgagatcatgaattcttttcccttagccaaaaca

SEQ ID NO: 3542 - DNA, 119 bp, homo sapiens
atcagtgttgactttgaacttctttaacgagatcatgaattcttttcccttagccaaaacatgaaatattaacctagttgtctctaaaagttttgtaatcatgagttagatatatgtca

SEQ ID NO: 3543 - DNA, 119 bp, homo sapiens
catgaaatatttaacctagttgtctctaaaagttttgtaatcatgagttagatatatgtcatctcctatcattgcttttatgtgatcaataaatcttttacaaacccaactactcattt

SEQ ID NO: 3544 - DNA, 119 bp, homo sapiens
catctcctattcattgcttttatgtgatcaataaatcttttacaaacccaactactcatttccttcctataatactttgcctttttcactgtgtatggaatgaaacatgtaaagctgtc

SEQ ID NO: 3545 - DNA, 119 bp, homo sapiens
ttaaaaaataaataatgagcttttattattctcaacaacagagaagactccagcctgatgtctatgggactgagtccacactgtggagggcacaagctgtgggagggcctggaagacac

SEQ ID NO: 3546 - DNA, 119 bp, homo sapiens
gcctgatgtctatgggacctgagtccacactgtggagggcacaagctgtgggagggcctggaagacacgctcagagattctcccagtcctgccaccctgtgggagacacttcaaaggaa

SEQ ID NO: 3547 - DNA, 119 bp, homo sapiens
agggcctggaagacacgcctcagagattctcccagtcctgccaccctgtgggagacacttcaaaggaatgtaaactcatgtgaccagcagggaggacaacgatgaagaaactttcctgc

SEQ ID NO: 3548 - DNA, 119 bp, homo sapiens
agacacttcaaaggaatcgtaaactcatgtgaccagcagggaggacaacgatgaagaaactttcctgccaaaatcagctgctgtccagagctagcacctggaaggagacactccctctc

SEQ ID NO: 3549 - DNA, 119 bp, homo sapiens
gaagaaactttcctgcctaaaatcagctgctgtccagagctagcacctggaaggagacactccctctccggggtcacatcttcactgcaaggcgggtgggagctcactgctgtgaccca

SEQ ID NO: 3550 - DNA, 119 bp, homo sapiens
ggagacactccctctcctggggtcacatcttcactgcaaggcgggtgggagctcactgctgtgacccactatactcctctctcggcgtctctatcctgctgctttctctgactgcatct

SEQ ID NO: 3551 - DNA, 119 bp, homo sapiens
tcactgctgtgacccacatatactcctctctcggcgtctctatcctgctgctttctctgactgcatcttctctgttccttggtcagtgtttgagaagagaatgttgaacaagtcacatc

SEQ ID NO: 3552 - DNA, 119 bp, homo sapiens
ttctctgactgcatcttcctctgttccttggtcagtgtttgagaagagaatgttgaacaagtcacatcctgtcactctgagtcagaaccctcatttgacttggaagatttgtgcttccg

SEQ ID NO: 3553 - DNA, 119 bp, homo sapiens
ctttcttcttctttttcttgtgtttctctttaccttcagaggaactggagctgctcctatcttcatctgggtagaatcctccagtaactgttttaactgctgtatcctaaacattcaaa

SEQ ID NO: 3554 - DNA, 119 bp, homo sapiens
actgcataactttgacttctttccccagtggcatccaaagtcctttagttggtgcatgagccagaaattcctggcgtgttcattgcctggtacatctggtatgcaatcttctggcttag

SEQ ID NO: 3555 - DNA, 119 bp, homo sapiens
tttgacttctttccccagtggcatccaaagtcctttagttggtgcatgagccagaaattccctggcgtgtcattgcctggtacatctggtatgcaatcttctggcttagtctcatcttc

SEQ ID NO: 3556 - DNA, 119 bp, homo sapiens
agtggcgtccgttgtaagtgctatgacaacagggcgaagatggctcagagttaggctggagaggggagggtcccttccgctgcggccgtcgggtttctgctacatcccattcaccgcct

SEQ ID NO: 3557 - DNA, 119 bp, homo sapiens
gctggagaggggaggtgtcccttccgctgcggccgtcgggtttctgctacatcccattcaccgcctcctcatcctttcctcctcggtgtgagcagcaggacttgcatttgttctcgcct

SEQ ID NO: 3558 - DNA, 119 bp, homo sapiens
cattcaccgcctcctccatcctttcctcctcggtgtgagcagcaggacttgcatttgttctcgcctgccagtgtcttccaagggatagatgccgtttcctctgctggtctctgggggtg

SEQ ID NO: 3559 - DNA, 119 bp, homo sapiens
ttgttctcgcctgcctagtgtcttccaagggatagatgccgtttcctctgctggtctctgggggtgacgggggcgcaggggagcttcttgggggaatcactccaactctgtggagctgg

SEQ ID NO: 3560 - DNA, 119 bp, homo sapiens
tctctgggggtgacggggggcgcaggggagcttcttgggggaatcactccaactctgtggagctggtgggctgcctggtggggctctctctttgcccgggacgtggaacaactttcagc

SEQ ID NO: 3561 - DNA, 119 bp, homo sapiens
ctgtggagctggtggtgctgcctggtggggctctctctttgcccgggacgtggaacaactttcagctggggacgagagggaatagtgaagctaaaggttgcttttctctgcaccgtccg

SEQ ID NO: 3562 - DNA, 119 bp, homo sapiens
acaactttcagctggaggacgagagggaatagtgaagctaaaggttgcttttctctgcaccgtccgttctgctccctctgctccatcactgggaccttgtcaggcgttcataaagcaaa

SEQ ID NO: 3563 - DNA, 119 bp, homo sapiens
ctgcaccgtccgttcttgctccctctgctccatcactgggaccttgtcaggcgttcataaagcaaaattgccgaacgagggttcgcagaaaggtggggcagagctcatctgacgtggca

SEQ ID NO: 3564 - DNA, 119 bp, homo sapiens
tgtgaaagaaaatgtctttatttaaagcccgtgattggtggtctactattctgggagataaagaagaattgatcaaggctgtttgtgtctggctaatgttgacaatagtggaaatggac

SEQ ID NO: 3565 - DNA, 119 bp, homo sapiens
gaaagaaaatgtctttatttaaagcccgtgattggtggtctactattctgggagataaagaagaatttgtcaaggctgtttgtgtctggctaatgttgacaatagtggaaatggacaag

SEQ ID NO: 3566 - DNA, 119 bp, homo sapiens
ataaaataattgtgggtagctttatgggatacctaaggatctttagcccccatcctgcaaaaacaggagtggagctcaagccgaagatttgcttctagaagtggatctacgagatccag

SEQ ID NO: 3567 - DNA, 119 bp, homo sapiens
cctaaggatctttagcccccatcctgcaaaaacaggagatggagctcaagccgaagatttgcttctagagtggatctacgagatccagtacttcaagtggaagtaggaaagtttgtttc

SEQ ID NO: 3568 - DNA, 119 bp, homo sapiens
gtcgagatttaatttgcatccagtctatggatgggatgctgatggtatttgagcaggagagctatgctttggaagatttctccctggctttcttctgcctggtcctcttgcctacagtt

SEQ ID NO: 3569 - DNA, 119 bp, homo sapiens
ggagagctatgcttttggaagatttctccctggctttcttctgcctggtcctcttgcctacagttcccgacagattccttccttactgtctcttcctgccaacaagtggaaagttataa

SEQ ID NO: 3570 - DNA, 119 bp, homo sapiens
gtggattggactctaaatattggagagcaagcccttgacatatgtattgtctctttcaatcagtcggcacctctgtttttgttcttggtgagagaaactttttttgccttaaggataat

SEQ ID NO: 3571 - DNA, 119 bp, homo sapiens
ccttgacatatgtattgtctctttcaatcagtcggcatcctctgtttttgttcttggtgagagaaacttttttgccttaaggataatggacaaattcgattcatgaagaagcttgattg

SEQ ID NO: 3572 - DNA, 119 bp, homo sapiens
cggcatcctctgtttttgttcttggtgagagaaactttttttgccttaaggataatggacaaattcgatcatgaagaagcttgattggagcccaagttgttttctgccatattgctcag

SEQ ID NO: 3573 - DNA, 119 bp, homo sapiens
tttctgaaggaacaataaatactttgattggaaatcataataacatgctgcatatttatcaagatgtgaactgaagtgggccacccaacttccccacattcctgtagcagtaagagtgg

SEQ ID NO: 3574 - DNA, 119 bp, homo sapiens
aacaataaatactttgattggaaatcataataacatgctgcatatttatcaagatgtgacactgaagtggccacccaacttccccacattcctgtagcagtaagagtgggctgtttgca

SEQ ID NO: 3575 - DNA, 119 bp, homo sapiens
tgatttaaagggagtgatagtcactctgagtgatgatggtcacttgcagtgttcatacctggggacagaccttctctgttccaagctccaaacgttcaatctcgagaactaaactatga

SEQ ID NO: 3576 - DNA, 119 bp, homo sapiens
gatgatggtcacttgcagtgttcatacctggggacagatccttctctgttccaagctccaaacgttcaactcgagaactaaactatgatgaacttgatgtagaaatgaaagaacttcag

SEQ ID NO: 3577 - DNA, 119 bp, homo sapiens
ggacagatccttctctgttccaagctccaaacgttcaatctcgagaactaaactatgatgaacttgatgagaaatgaaagaacttcagaaaatcatcaaagatgttaacaaatcacaag

SEQ ID NO: 3578 - DNA, 119 bp, homo sapiens
gcattccgcgagttatccaatgtaaatttagacttcccctaaagttaatttgcctaccaggtcagccttaaaaactgcaagccacaaaattactattgataccaacaaatctccagtca

SEQ ID NO: 3579 - DNA, 119 bp, homo sapiens
gtaaatttagacttcccctaaagttaatttgcctaccaggtcagccttcaaaaactgcaagccacaaaatactattgataccaacaaatctccagtcagtcttcttagtctcttcccag

SEQ ID NO: 3580 - DNA, 119 bp, homo sapiens
aacgatatcgcattcagagtgaacaatttgaagatctttggctcataaccaatgagcttattcttcgcctcaagaatattttgaaaaacagggagtcaaagattttgcatgttcttttt

SEQ ID NO: 3581 - DNA, 119 bp, homo sapiens
gagcttattcttcgccttcaagaatattttgaaaaacagggagtcaaagattttgcatgttctttttcggatctataccccttcaagaatattttgagttgattgatcatcattttgag

SEQ ID NO: 3582 - DNA, 119 bp, homo sapiens
ctacggataaatggtgaaaaattagaagaactcttatctgagagagctgtacaatttcgggccattcaagccggctactagcaagattcaaagataaaactcctgcccctcttcaacac

SEQ ID NO: 3583 - DNA, 119 bp, homo sapiens
ttatctgagagagctgtacaatttcgggccattcaacgccggctactagcaagattcaaagataaaactctgcccctcttcaacacctggacaccttgttagatggaacctacaagcag

SEQ ID NO: 3584 - DNA, 119 bp, homo sapiens
gtaattgctctagcagatgcagtggaggaaaaccaaggcaatctgttccagtcattcaccaggctgaaggtgccacccatttggtgattctgctgatcgcgctgtggcagaagcttagt

SEQ ID NO: 3585 - DNA, 119 bp, homo sapiens
accaaggcaatctgttccagtcattcaccaggctgaagagtgccacccatttggtgattctgctgatcggctgtggcagaagcttagtgctgaccaggttgctattctggaagcggcat

SEQ ID NO: 3586 - DNA, 119 bp, homo sapiens
gctgaagagtgccacccatttggtgattctgctgatcgcgctgtggcagaagcttagtgctgaccaggtgctattctggaagcggcatttctgccgctacaagaagacactcaagaatt

SEQ ID NO: 3587 - DNA, 119 bp, homo sapiens
ggctgggaagaaacggtggatgccgccatttcccacctgttgaagacttgcctgtcgaagagttctaagagcaggctttgaacctcaacagccagctgaacatacccaaagacacaagc

SEQ ID NO: 3588 - DNA, 119 bp, homo sapiens
ctgtcgaagagttctaaggagcaggctttgaacctcaacagccagctgaacatacccaaagacacaagcaactgaagaaacatatcaccttgctctgcgatagattatccaaaggtggc

SEQ ID NO: 3589 - DNA, 119 bp, homo sapiens
atacccaaagacacaagccaactgaagaaacatatcaccttgctctgcgatagattatccaaaggtggcgtctctgcctaagtaccgatgcagcagccccacagaccatggtcatgcca

SEQ ID NO: 3590 - DNA, 119 bp, homo sapiens
aagtttcacccctccaaggagtctcggaataattcaagtagagttgtttggttgagaggaacatccccactcaaggccgaacctgtgtgaacctcatgccaagcacagatatagggctg

SEQ ID NO: 3591 - DNA, 119 bp, homo sapiens
gaacatccccatctcaaggccgaacctgtgtgaacctcatgccaagcacagatatagggctggcgcagggcttcctaaagctcaccttcctggagatgacatgcatagaaagaggggtt

SEQ ID NO: 3592 - DNA, 119 bp, homo sapiens
gctggcgcaggtgcttcctaaagctcaccttcctggagatgacatgcatagaaagaggggttgggacttttacttcactaggagaacttgtaacaccatggggaagtcagctgaaactt

SEQ ID NO: 3593 - DNA, 119 bp, homo sapiens
ggttgggactttttacttcactaggagaacttgtaacaccatggggaagtcagctgaaacttgtcttgtttgccaggaaaggaagtagttgcctttggtcatccatctgctaatagtca

SEQ ID NO: 3594 - DNA, 119 bp, homo sapiens
acttgtcttgttttgccaggaaaggaagtagttgcctttggtcatccatctgctaatagtcacagaataagtgaaatgacatagttttgggttagattttataatgcaaagattcagat

SEQ ID NO: 3595 - DNA, 119 bp, homo sapiens
gtcacagaatacagtgaaatgacatagttttgggttagattttataatgcaaagattcagatccaaaatatttcataccccattttttcacagaattcttatatagtaaatgtatcaag

SEQ ID NO: 3596 - DNA, 119 bp, homo sapiens
agatccaaaataatttcataccccattttttcacagaattcttatatagtaaatgtatcaagtttaataagcatctcattgtcaaataatatcttggattttatttataattagaggga

SEQ ID NO: 3597 - DNA, 119 bp, homo sapiens
caagtttaataaagcatctcattgtcaaataatatcttggattttatttataattagagggatttatgatgattgctctacattatttcttcaaaggaaaggaaaggaattgaagactt

SEQ ID NO: 3598 - DNA, 119 bp, homo sapiens
gggatttatgagtgattgctctacattatttcttcaaaggaaaggaaaggaattgaagactttgctacttctggtaagacttgaatgtgattattttataaataaaagaaccactatga

SEQ ID NO: 3599 - DNA, 119 bp, homo sapiens
actttgctactctctggtaagacttgaatgtgattattttataaataaaagaaccactatgaaactttctgtgatttgttctattaagctaaacgtggaagaagggaagttttctagta

SEQ ID NO: 3600 - DNA, 119 bp, homo sapiens
atgaaactttcatgtgatttgttctattaagctaaacgtggaagaagggaagttttctagtattgtatgaaatgtttaaatattttcaaggaagctagtacattaacatccccttttca

SEQ ID NO: 3601 - DNA, 119 bp, homo sapiens
agtattgtatgaaaatgtttaaatattttcaaggaagctagtacattaacatccccttttcattaccccttgggtggcaccttttaaaaatccaggttattaaaggattcacactttat

SEQ ID NO: 3602 - DNA, 119 bp, homo sapiens
ttcattaccccattgggtggcaccttttaaaaatccaggttattaaaggattcacactttattacagttaaatttaaggtttttatgtgtaagaagtgaaagaaactttgctaatttca

SEQ ID NO: 3603 - DNA, 119 bp, homo sapiens
ttattacagttaaaatttaaggtttttatgtgtaagaagtgaaagaaactttgctaatttcaagttcgattacagttgtgagattgatttatttaaataaaaatatgcctttgccagtt

SEQ ID NO: 3604 - DNA, 119 bp, homo sapiens
tatcagtaggtaataggatattttatttcaaaacagtgaagaagctgctaagcataaaatttgtcaaatctacaaaggtgatgaatatacaactgggaattccaagaaatttaaattta

SEQ ID NO: 3605 - DNA, 119 bp, homo sapiens
aatttgtcaaatgctacaaaggtgatgaatatacaactgggaattccaagaaatttaaatttaattacatctttattatcttttcctcaaaagaaataaattagttccaccatttggct

SEQ ID NO: 3606 - DNA, 119 bp, homo sapiens
aatttaattacattctttattatcttttcctcaaaagaaataaattagttccaccatttggctaatatttttcattaaagactgaatttagattttaggaaataaaatatggaatctgt

SEQ ID NO: 3607 - DNA, 119 bp, homo sapiens
ttggctaatattatttcattaaagactgaatttagattttaggaaataaaatatggaatctgttataattcccaatttatactacagtattaatctcaatcctgatcattacataatta

SEQ ID NO: 3608 - DNA, 119 bp, homo sapiens
atctgttataatgtcccaatttatactacagtattaatctcaatcctgatcattacataattatagcattaccaatctgtgattttataaattaaccaaatttgttaaattaagaagaa

SEQ ID NO: 3609 - DNA, 119 bp, homo sapiens
taattatagcatttaccaatctgtgattttataaattaaccaaatttgttaaattaagaagaaattcatgacaccatttttttcctgttacaacatatggaaaagccatcaaaaaactt

SEQ ID NO: 3610 - DNA, 119 bp, homo sapiens
gaagaaattcatagacaccatttttttcctgttacaacatatggaaaagccatcaaaaaacttaacagaccaaatcaaaaagaagtatattttatgctaaagttactttctgtccaggt

SEQ ID NO: 3611 - DNA, 119 bp, homo sapiens
aaacttaacagaaccaaatcaaaaagaagtatattttatgctaaagttactttctgtccaggtcgaaacttgttccactttgattttttctcctctttggattttgaaagctttcatat

SEQ ID NO: 3612 - DNA, 119 bp, homo sapiens
agctcagcaaaattcttccagtcatcttcactaatggatggtcttgtgtgaccaagtgcagtcattaaagtgactgactaatagccagtctggttttgattggtcctggttggttcatg

SEQ ID NO: 3613 - DNA, 119 bp, homo sapiens
attcttccagtcatcttcactaatggatggtcttgtgtgaccaagtgcagtcattaaatgtgactgactatagccagtctggttttgattggtcctggttggttcatggattcgtcctc

SEQ ID NO: 3614 - DNA, 119 bp, homo sapiens
tccactttggctccggtatctgcctttgataatactgatatctgccctcagttgatctctttgttcttggtaagttcttggcaaccctcttgtgaagctgtccttaacactggaggctg

SEQ ID NO: 3615 - DNA, 119 bp, homo sapiens
atctgccctcagttgatctctttgttcttgtgtaagttcttggcaaccctcttgtgaagctgtccttaaactggaggctgtgaaaacaactggtctttcccaggaactccaggcaaatc

SEQ ID NO: 3616 - DNA, 119 bp, homo sapiens
ttggcaaccctcttgtgaagctgtccttaacactggaggctgtgaaaacaactggtctttcccaggaacccaggcaaatcctgagtcatggagcttggtgcagagagacattgtgagct

SEQ ID NO: 3617 - DNA, 119 bp, homo sapiens
caaatcagaagaggttccatttccaagttctgattcataagagcttccaaagtagagccggtacatattaattttgattcatctggaaggatctcggacatctctaaagaaacaaggga

SEQ ID NO: 3618 - DNA, 119 bp, homo sapiens
agccggtacatattgaattttgattcatctggaaggatctcggacatctctaaagaaacaagggactgactaagccacattctccatctccagctgaatcgtcagagccactgctatgg

SEQ ID NO: 3619 - DNA, 119 bp, homo sapiens
aaacaagggactgatctaagccacattctccatctccagctgaatcgtcagagccactgctatggttaaaaagaccattgaagacagacttaggtcactatcagagctggaacttccat

SEQ ID NO: 3620 - DNA, 119 bp, homo sapiens
ctggagtccactcgagagcagcattccatgtaaggcctccaattgggcattgtaaagtaaagctttcagtcagctccagtaaaggagtcagttactgatgctacatgctgaaggtcaac

SEQ ID NO: 3621 - DNA, 119 bp, homo sapiens
taaagctttcagatcagctccagtaaaggagtcagttactgatgctacatgctgaaggtcaacatcatcgccagaggtagagagtcactgaggacatttaaaatttcaagacgtgacac

SEQ ID NO: 3622 - DNA, 119 bp, homo sapiens
cctgtaagccttctactccatccaactgagtcagcaactggttaactactcggtctgtaactcctgtatatcatgaccccgccgaggagcaatggattcaaattcatcaaagaaaagaa

SEQ ID NO: 3623 - DNA, 119 bp, homo sapiens
aactgagtcagcaactggttaactactcggtctgtaactcctgtattatcatgaccccgccgaggagcatggattcaaattcatcaaagaaaagaatgcagggctttgcagcctgtgct

SEQ ID NO: 3624 - DNA, 119 bp, homo sapiens
cttgacacttataaaattcattctactctctcgtgcaattaccccagctagtaaggtttttcctgttccggcggaccatacaacagtattcctgttctttgtcgtatgggcaagtttgc

SEQ ID NO: 3625 - DNA, 119 bp, homo sapiens
attcattctactctctcgtgcaattaccccagctagtaaggtttttcctgttccaggcggaccatacaaagtattcctgttctttgtcgtatgggcaagtttgcaaataattctggata

SEQ ID NO: 3626 - DNA, 119 bp, homo sapiens
cttggcaggtaactggatagtatccatgagtatctgcctaacttcatgtaacccaccaatcttgtcccacccaggtctctaggtttatgcaggttgacacttcgcaaagacgcaggaag

SEQ ID NO: 3627 - DNA, 119 bp, homo sapiens
gtaacccaccaatcttgtcccaacccaggtctctaggtttatgcaggttgacacttcgcaaagacgcagaagaaatccgcggagagccttttggaagtccaatgttgttaaaactaatt

SEQ ID NO: 3628 - DNA, 119 bp, homo sapiens
tttctctggtggatatactctgacgagagagtcgagaatgtatggctcgatccacaagtactgtaaaattctagccacaaacccgccagtttctttagctacatgctgcaggtcaagat

SEQ ID NO: 3629 - DNA, 119 bp, homo sapiens
gaatgtatggctcgatccacaagtactgtaaaatctctagccacaaacccgccagtttctttagctacagctgcaggtcaagatcggtgaacttgtttatatcacagtccaatttattt

SEQ ID NO: 3630 - DNA, 119 bp, homo sapiens
tctagccacaaacccgccagtttctttagctacatgctgcaggtcaagatcggtgaacttgtttatatccagtccaatttattttttattacattacacagaatttcacatctttgttc

SEQ ID NO: 3631 - DNA, 119 bp, homo sapiens
ctgattaggaggctgaatgtgttggacgcactgaaatatgtgaactccttgagcagaaacaagtaaaggtgtagagattgctgagactgacttgtggcaatcagtgcaaccaaacttcc

SEQ ID NO: 3632 - DNA, 119 bp, homo sapiens
atatgtgaactccttgagcagaaacaagtaaaggatgtagagattgctgagactgacttgtggcaatcatgcaaccaaacttcccatggagataaactcttttatcatatcattcaaag

SEQ ID NO: 3633 - DNA, 119 bp, homo sapiens
catgagcaagccgctggctctgcaccgcatcaggactgtgctcatgttccgggacagcaggcagtccagaatgaggtcaaggtcatccagcaggacaacagatggctgcatccacactg

SEQ ID NO: 3634 - DNA, 119 bp, homo sapiens
ggacagcaggcagtccagcaatgaggtcaaggtcatccagcaggacaacagatggctgcatccacactgctctgagaaagccacctctagggttttttgtatgttttcaagcctttttc

SEQ ID NO: 3635 - DNA, 119 bp, homo sapiens
ctttcctcctgtgagtaaaagagctccattcctaagtcctgcaacaagagacatcagctgccgagacaagggcgtcccaggaggctgtgagtgatgtgctccaaggaggatacgcctaa

SEQ ID NO: 3636 - DNA, 119 bp, homo sapiens
agtaaaagagctccattcctaagtcctgcaacaagagacatcagctgccgagacaaagggcgtcccaggggctgtgagtgatgtgctccaaggaggatacgcctaaggaattcactcct

SEQ ID NO: 3637 - DNA, 119 bp, homo sapiens
catctttagtttccagcttaataaattcttcctctgatattaccaaaggaagcatggtggtagtagactctgtagccatgaataaaatacagtttttatgtcttcttcacttatgtctt

SEQ ID NO: 3638 - DNA, 119 bp, homo sapiens
tttagtttccagcttaataaattcttcctctgatattaccaaaggaagcatggtggtagtagactgctgagccatgaataaaatacagtttttatgtcttcttcacttatgtctttagg

SEQ ID NO: 3639 - DNA, 119 bp, homo sapiens
ccagactttcccaagatggagaacttctacatttttggtatatttgatggcattgttcaattcttcaagccattccagactacttgtagcacacaggccttctcatcttcttcattatg

SEQ ID NO: 3640 - DNA, 119 bp, homo sapiens
aattcttcaagtccattccagactacttgtagcacacaggccttctcatcttcttcattatgatctgactaatttttttttgatctagtggctctgacatctgcttctctttttcaggt

SEQ ID NO: 3641 - DNA, 119 bp, homo sapiens
tatgatctgacctaatttttttttgatctagtggctctgacatctgcttctctttttcaggtgataacaattttgttttgttttactttgctgttgctttggagaaagtagcttaacta

SEQ ID NO: 3642 - DNA, 119 bp, homo sapiens
aggtgataacacattttgttttgttttactttgctgttgctttggagaaagtagcttaactagctttcctatgtcacagtaaagctgggctctacatcaaaatattcctggtcccatgg

SEQ ID NO: 3643 - DNA, 119 bp, homo sapiens
actagctttccatatgtcacagtaaagctgggctctacatcaaaatattcctggtcccatggaaatacagaatggcacagtgtttatgaaaaacagaggttgctgacgcgttatatata

SEQ ID NO: 3644 - DNA, 119 bp, homo sapiens
atggaaatacatgaatggcacagtgtttatgaaaaacagaggttgctgacgcgttatatatactaggagttgagatttgcatactctgaaaatattgtctagaggaacaacctttgact

SEQ ID NO: 3645 - DNA, 119 bp, homo sapiens
tatactaggaggttgagatttgcatactctgaaaatattgtctagaggaacaacctttgactgcatattttgaatgcattgatttcagttaaaccccaagatgtctcttgtttcttctc

SEQ ID NO: 3646 - DNA, 119 bp, homo sapiens
gactgcatatttttgaatgcattgatttcagttaaaccccaagatgtctcttgtttcttctcagattgaaggaaaaaatgcttcctatcatagtccataaacttgctactgatgatgag

SEQ ID NO: 3647 - DNA, 119 bp, homo sapiens
tctcagattgaaaggaaaaaatgcttcctatcatagtccataaacttgctactgatgatgagtcaactgaatctctgactcgttttcattagattcagtgattcccacagtatttgact

SEQ ID NO: 3648 - DNA, 119 bp, homo sapiens
tgagtcaactggaatctctgactcgttttcattagattcagtgattcccacagtatttgactgaagttgttggtttgaagttctttcatcattcctttctggtctcttccataactatg

SEQ ID NO: 3649 - DNA, 119 bp, homo sapiens
gactgaagttgcttggtttgaagttctttcatcattcctttctggtctcttccataactatgaagtttttatattcagcatcagcttttgaaaatgtattctctttggctcggcgtgtc

SEQ ID NO: 3650 - DNA, 119 bp, homo sapiens
tatgaagttttttatattcagcatcagcttttgaaaatgtattctctttggctcggcgtgtctttggctaataaggagtttggtgtcagtttccagccttccataagaggcagctggta

SEQ ID NO: 3651 - DNA, 119 bp, homo sapiens
ctgtcccccatttgagagtccaagtttttgaccaacttgtctgttaatttcagccacattttcaccttgtcactaaaatgcctgccttccacccagctcaagaatgcaggctggtgact

SEQ ID NO: 3652 - DNA, 119 bp, homo sapiens
tttttgaccaacttgtctgttaatttcagccacattttcaccttgatcactaaaatgcctgccttccaccagctcaagaatgcaggctggtgactccagaccacttctatagcttgatt

SEQ ID NO: 3653 - DNA, 119 bp, homo sapiens
ctgcagcagatgcagctgggccacgagacgccgcggcaggtggaggaagcagtcgcgagcgttggtgaagccacagtcactgccgccccgcctcccccagcacccgccaggcgatcgct

SEQ ID NO: 3654 - DNA, 119 bp, homo sapiens
gtcgcgagcgttggtgaaggccacagtcactgccgccccgcctcccccagcacccgccaggcgatcgctccccacatcgtcccggagcgtcgctctgggttcgcccaccctagcgccgc

SEQ ID NO: 3655 - DNA, 119 bp, homo sapiens
acccgccaggcgatcgctgccccacatcgtcccggagcgtcgctctgggttcgcccaccctagcgccgcaaggacccgggacccggcaggccgaggacgtcggagccggaggagatcga

SEQ ID NO: 3656 - DNA, 119 bp, homo sapiens
ttactctctagaaaatatttattgacacattttaattttctttccatattctgagaaataaacaaaataacaaaatacagtaaaatgcacttttcccatttcaaataaatatactatac

SEQ ID NO: 3657 - DNA, 119 bp, homo sapiens
taaacaaaatacacaaaatacagtaaaatgcacttttcccatttcaaataaatatactatactcttgtaaaaaatttaataatctgtgtaatttgccacagtatattaatcagtgaaat

SEQ ID NO: 3658 - DNA, 119 bp, homo sapiens
atactcttgtaaaaaaatttaataatctgtgtaatttgccacagtatattaatcagtgaaataaaacaagaatctctaaattgtcacatgttttaatgattctcacaagcatttttctg

SEQ ID NO: 3659 - DNA, 119 bp, homo sapiens
aaataaaacaaagaatctctaaattgtcacatgttttaatgattctcacaagcatttttctggagaaaagaacactattttctgtagaatttatattgacttggagactattgcttctt

SEQ ID NO: 3660 - DNA, 119 bp, homo sapiens
tctggagaaaaagaacactattttctgtagaatttatattgacttggagactattgcttcttgtttggaaaggcaaagataagctttttaaaaagtgtttagtgtcaaaaagagtcttc

SEQ ID NO: 3661 - DNA, 119 bp, homo sapiens
tcttgtttggagaaggcaaagataagctttttaaaaagtgtttagtgtcaaaaagagtcttcatttggggaaaaacagcatacaagtcctttctgaatcaactaagttatgtgcaaatt

SEQ ID NO: 3662 - DNA, 119 bp, homo sapiens
cttcatttgggagaaaaacagcatacaagtcctttctgaatcaactaagttatgtgcaaattttcttataatacttcctaaagaccagactacattctgaataatgattcctatgtatc

SEQ ID NO: 3663 - DNA, 119 bp, homo sapiens
aattttcttattaatacttcctaaagaccagactacattctgaataatgattcctatgtatcacactggaattttcaaaattagtggttaagtatttaaataacagttatatgtgtaat

SEQ ID NO: 3664 - DNA, 119 bp, homo sapiens
tatcacactggtaattttcaaaattagtggttaagtatttaaataacagttatatgtgtaatataagccaggacagaatagtaaagctttattaacaggaaaggctaaaaataatgatg

SEQ ID NO: 3665 - DNA, 119 bp, homo sapiens
taatataagcccaggacagaatagtaaagctttattaacaggaaaggctaaaaataatgatgctatacagacaaattttccttttcataatggttattcttaacattatcagaactgaa

SEQ ID NO: 3666 - DNA, 119 bp, homo sapiens
gatgctatacaggacaaattttccttttcataatggttattcttaacattatcagaactgaaatcgactaattatacagatttaacacagacttatatacaaaaaatccctgatcagct

SEQ ID NO: 3667 - DNA, 119 bp, homo sapiens
tgaaatcgactgaattatacagatttaacacagacttatatacaaaaaatccctgatcagcttaagacatgtgttagcttgctcttttaagtggtaagaatattttagtaaccagcaaa

SEQ ID NO: 3668 - DNA, 119 bp, homo sapiens
agcttaagacaatgtgttagcttgctcttttaagtggtaagaatattttagtaaccagcaaaaatcacattaggtagtcaccaatattgaaagttttctgatatataatttatttagca

SEQ ID NO: 3669 - DNA, 119 bp, homo sapiens
caaaaatcacatttaggtagtcaccaatattgaaagttttctgatatataatttatttagcatcagaagatagatcgctgagtaataaaagttattagtattttctaacttcctatgtt

SEQ ID NO: 3670 - DNA, 119 bp, homo sapiens
agcatcagaagaatagatcgctgagtaataaaagttattagtattttctaacttcctatgttagcatttattagtactttatatactagttggtagaagtaaatcaacctttactatgg

SEQ ID NO: 3671 - DNA, 119 bp, homo sapiens
tgttagcatttaattagtactttatatactagttggtagaagtaaatcaacctttactatggctccagtccaccatatgtgactcgtttgcatggatgcggaaatgctaatcaaaccat

SEQ ID NO: 3672 - DNA, 119 bp, homo sapiens
atggctccagtcccaccatatgtgactcgtttgcatggatgcggaaatgctaatcaaaccatgctgcctaaaacataactgtgttcagtaaaagtcatacacaggctacacagtgggta

SEQ ID NO: 3673 - DNA, 119 bp, homo sapiens
ccatgctgcctcaaaacataactgtgttcagtaaaagtcatacacaggctacacagtgggtatgacatcgtcttcagcattttaagggcatcaattattgtccaggtggtgacttatga

SEQ ID NO: 3674 - DNA, 119 bp, homo sapiens
ggtatgacatctgtcttcagcattttaagggcatcaattattgtccaggtggtgacttatgacatgaaattttccatcctcattttaaagcatagaatagtatatgcttaggtgttatt

SEQ ID NO: 3675 - DNA, 119 bp, homo sapiens
atgacatgaaacttttccatcctcattttaaagcatagaatagtatatgcttaggtgttattttatggcacatttttatttctacatatttctgaaacacatagtatgtactcaaaaat

SEQ ID NO: 3676 - DNA, 119 bp, homo sapiens
tattttatggcaacatttttatttctacatatttctgaaacacatagtatgtactcaaaaattcacaagccagtaaaacaagtttgtggttttcttctgtgacatttctttttataact

SEQ ID NO: 3677 - DNA, 119 bp, homo sapiens
aaattcacaagtccagtaaaacaagtttgtggttttcttctgtgacatttctttttataactcctccattcaaagtgtgtattaaagctgtttgccatggatgtgtgttcaaagattct

SEQ ID NO: 3678 - DNA, 119 bp, homo sapiens
aactcctccatctcaaagtgtgtattaaagctgtttgccatggatgtgtgttcaaagattcttgacaggttggtttcaacagttctactgagggacatgacaggtgctgagagttgtca

SEQ ID NO: 3679 - DNA, 119 bp, homo sapiens
ttcttgacaggcttggtttcaacagttctactgagggacatgacaggtgctgagagttgtcattcttcaggacatcatttggtctgtccccggctcccttctatcataatacagagccc

SEQ ID NO: 3680 - DNA, 119 bp, homo sapiens
gtcattcttcaaggacatcatttggtctgtccccggctcccttctatcataatacagagcccagagcaggtaatggtgagaatcatggccaggatttgtgtcaccccaatggagattcc

SEQ ID NO: 3681 - DNA, 119 bp, homo sapiens
gcccagagcagagtaatggtgagaatcatggccaggatttgtgtcaccccaatggagattcccagaaactcagcacctgcagttgtttggttcctctcaaaaaggaatacattttcttc

SEQ ID NO: 3682 - DNA, 119 bp, homo sapiens
ctcttgataaaggtcactgagatcttcctggtgggcctgtttggaacatcctgggaattctctaacacacaggaatctgggggccagtccatctctgtcatttccaaccagtcagtgaa

SEQ ID NO: 3683 - DNA, 119 bp, homo sapiens
ttcctggtgggcctgtttggaacatcctgggaattctctaacacagcaggaatctgggggccagtccattctgtcatttccaaccagtcagtgaaatatactactccacagcacttaaa

SEQ ID NO: 3684 - DNA, 119 bp, homo sapiens
ccatgcaagaagcaacagatttcttttcaccgttccacaatatcctaacatccccacaatgataaggaacagcaaacagcaatcatgaccggatgaaccacaggaaagtaagtcaaaat

SEQ ID NO: 3685 - DNA, 119 bp, homo sapiens
agatttcttttcaccgttccacaatatcctaacatccccacaatgataaggaaacagcaaacagcaatctgaccggatgaaccacaggaaagtaagtcaaaatgactgcttcctctacc

SEQ ID NO: 3686 - DNA, 119 bp, homo sapiens
ccaaaagagcagattgagggcgtagagcaggcagcgcagacacttcacggaatcttctctggccattgtagccccgtaagggagaagccccatcctttcaccacatcctactcccaagg

SEQ ID NO: 3687 - DNA, 119 bp, homo sapiens
agggcgtagagcaggcagcgcagacacttcacggaatcttctctggccattgtgagccccgtaagggagagccccatcctttcaccacatcctactcccaagggcaaaacggcagcgat

SEQ ID NO: 3688 - DNA, 119 bp, homo sapiens
cgtcggcgctgggcccggtgccccacgcccgcctggggatagtcggggacgcacggcgggggctcatcgggcagggaacttcttcgcggagagccggagggctgcattggcttcagctg

SEQ ID NO: 3689 - DNA, 119 bp, homo sapiens
ggacgcacggcgggggctcatcggggcagggaacttcttcgcggagagccggagggctgcattggcttcgctggagacgcttctttctcttcctctccccccgccgccgccgtcgccgc

SEQ ID NO: 3690 - DNA, 119 bp, homo sapiens
agccggagggctgcattggcttcagctggagacgcttctttctcttcctctccccccgccgccgccgtcccgcctcctgggaaaaagaaaaaaaaaaaaaaaagtcctgggcagcagtt

SEQ ID NO: 3691 - DNA, 119 bp, homo sapiens
cctctccccccgccgccgccgtcgccgcctcctgggaaaaagaaaaaaaaaaaaaaaagtcctgggcagagttgctggaaagtctctgctaagccacctcccagcgccgctgtccctcc

SEQ ID NO: 3692 - DNA, 119 bp, homo sapiens
aaaaaaaaaaaagtcctgggcagcagttgctggaaagtctctgctaagccacctcccagcgccgctgtcctcccaagtcctctccgagtccggacgaggcagcggcggcagccagggcc

SEQ ID NO: 3693 - DNA, 119 bp, homo sapiens
tagtggaggcgttgagacctgcttgatttattccaagtatttaatacacaatgacgcaactgtgatcccagtgtgcaaagttaaagccttcgactgcagctgaggagaagggaggaatg

SEQ ID NO: 3694 - DNA, 119 bp, homo sapiens
aactgtgatcccaagtgtgcaaagttaaagccttcgactgcagctgaggagaagggaggaatggttcactggggacggtggtgagtcaggaatgacaggcaggcggccatgaccagggc

SEQ ID NO: 3695 - DNA, 119 bp, homo sapiens
ggaatggttcacctggggacggtggtgagtcaggaatgacaggcaggcggccatgaccagggcagtctctacccatggccagggacaggggagcggcctgaggagcaggacccaagggt

SEQ ID NO: 3696 - DNA, 119 bp, homo sapiens
cagggcagtctcctacccatggccagggacaggggagcggcctgaggagcaggacccaagggtagcccaggccggggaagggggcagagacctccccttggcctaggtcaggagctcag

SEQ ID NO: 3697 - DNA, 119 bp, homo sapiens
aagggtagcccagggccggggaagggggcagagacctccccttggcctaggtcaggagctcagaagtgcacatggctgaggggcagcggcccgggaagggccagaggcagggccaggag

SEQ ID NO: 3698 - DNA, 119 bp, homo sapiens
gctcagaagtgccacatggctgaggggcagcggcccgggaagggccagaggcagggccaggagagcacctttcctgggaggctaggggcagggaggtgccctacaggagaagccaggag

SEQ ID NO: 3699 - DNA, 119 bp, homo sapiens
caggagagcaccatttcctgggaggctaggggcagggaggtgccctacaggagaagccaggaggggccgctgcccctggggtgggggccaggctggagcaggctgcagcaagaaagacc

SEQ ID NO: 3700 - DNA, 119 bp, homo sapiens
caggaggggccgcctgcccctggggtgggggccaggctggagcaggctgcagcaagaaagacctgaggcggcgcagggcctgagagcctggctggctgggctcggaggggggctcccag

SEQ ID NO: 3701 - DNA, 119 bp, homo sapiens
aagacctgaggcaggcgcagggcctgagagcctggctggctgggctcggaggggggctcccagggcagctggccccgggagcagtcctgactctgcaggggatgccgagtgaggggcag

SEQ ID NO: 3702 - DNA, 119 bp, homo sapiens
tcccagggcagcctggccccgggagcagtcctgactctgcaggggatgccgagtgaggggcagcagtccctcaggacctcccctcctctctgcctggaaaggagctggagaacccgtag

SEQ ID NO: 3703 - DNA, 119 bp, homo sapiens
gggcagcagtcccctcaggacctcccctcctctctgcctggaaaggagctggagaacccgtagtgcaaactgtggaccactcagttatggagggaggctgtgcccaaaagtggacactg

SEQ ID NO: 3704 - DNA, 119 bp, homo sapiens
ccgtagtgcaaatctgtggaccactcagttatggagggaggctgtgcccaaaagtggacactggggtgctcccctccaccacctcggcctccaccgctgtcctcagtacagccgctttt

SEQ ID NO: 3705 - DNA, 119 bp, homo sapiens
cgaaggacagacaggctgcgggccccgatatcctggcagccgtgttggatgcctgctatgaggtagggccgaacttctgaatggatcctttgtcctggatggagcccgagacaccctgc

SEQ ID NO: 3706 - DNA, 119 bp, homo sapiens
ccgatatcctggcagccgtgttggatgcctgctatgaggtagggcacgaacttctgaatggatcctttgcctggatggagcccgagacaccctgcgcgatcttcactttatccccctcg

SEQ ID NO: 3707 - DNA, 119 bp, homo sapiens
ctgaagtatcgtttctggctgctgctgctcttctccatggcatccagtgagcccatgccccggtacttctgagccgcaccccgtctgagaagaagtactcgccaggggcctccgtagtg

SEQ ID NO: 3708 - DNA, 119 bp, homo sapiens
tgctcttctccatggcatccagtgagcccatgccccggtacttcttgagccgcaccccgtctgagaagagtactcgccaggggcctccgtagtggcggccagcagggagcccatcatca

SEQ ID NO: 3709 - DNA, 119 bp, homo sapiens
ctgtggaggctccaagggccagggccttgaccacgtgtcccacggtctggatgccgccatcggctatgagggcacaccaaagcgccgggcatactcagccaccttgtacacagcagtgc

SEQ ID NO: 3710 - DNA, 119 bp, homo sapiens
ccttgaccacgtgtcccacggtctggatgccgccatcggctatgatgggcacaccaaagcgccgggcatctcagccaccttgtacacagcagtgccctggggccgaccacaggccatca

SEQ ID NO: 3711 - DNA, 119 bp, homo sapiens
caagactatgacgtcgacgcccgcctgggtgagcaggtccagacggtatttgtcatcctcacgggtgccacagctgccccacagagcagctgcttctgggaatccttggaggccagagg

SEQ ID NO: 3712 - DNA, 119 bp, homo sapiens
agacggtatttgtcatcctcacgggtgcccacagctgccccacagagcagctgcttctgggaatccttgaggccagagggtagtctcggttcttcttcaggtcggtgcgggcgatgatg

SEQ ID NO: 3713 - DNA, 119 bp, homo sapiens
cacagagcagctgcttctgggaatccttggaggccagagggtagtctcggttcttcttcaggtcggtgcggcgatgatggccaccagctcatcgcaatcattgacgataggcagcttcc

SEQ ID NO: 3714 - DNA, 119 bp, homo sapiens
ctcactgaggagggtggtgtggtccttctcagcaagaaagtcgatgtctcgggaggtgacgatgcccacagcttgctgcccatggtgcccgtctcagtgatggggatgccagagaagcc

SEQ ID NO: 3715 - DNA, 119 bp, homo sapiens
atgtctcgggaggtgacgatgcccaccagcttgctgcccatggtgcccgtctcagtgatggggatgccaagaagccatgccgcatcttggcctccagcacatcgcccacagtgtgcgag

SEQ ID NO: 3716 - DNA, 119 bp, homo sapiens
tgcccgtctcagtgatggggatgccagagaagccatgccgcatcttggcctccagcacatcgcccacaggtgcgaggggctcagcaccacagggtccgtgatgaagccctgttcaaact

SEQ ID NO: 3717 - DNA, 119 bp, homo sapiens
ttgtaggtgaggccgtcggcgctggcgaagagctgctgcgcggtgagcccatcctcgggcacgtagccgtgccgccgctgatcaggtagtccgccatgctgccgcgagaccccgcgacc

SEQ ID NO: 3718 - DNA, 119 bp, homo sapiens
gaagagctgctgcgcggtgagcccatcctcgggcacgtagccggtgccgccgctgatcaggtagtccgcatgctgccgcgagaccccgcgacccgacataaacacccgcgcggccgccc

SEQ ID NO: 3719 - DNA, 119 bp, homo sapiens
ctctcgggctcgtagccggcctgcagcagtcgggcgctgtaccgctgcgccgccgtctcgtgtcccggggttgccgggctccgggctccggaacagcggcggctccgcctccctgcagc

SEQ ID NO: 3720 - DNA, 119 bp, homo sapiens
cgtctcgtgtcccgggtgttgccgggctccgggctccggaacagcggcggctccgcctccctgcagcggggtggagtgagtggcccctccatgcggaggccgcagctcagggcgggcgg

SEQ ID NO: 3721 - DNA, 119 bp, homo sapiens
cgcctccctgcagcggtggtggagtgagtggcccctccatgcggaggccgcagctcagggcgggcgggacctggaggctcccggggccccggctgggcagtgagcgcagcccggtcgag

SEQ ID NO: 3722 - DNA, 119 bp, homo sapiens
ttaaaagtaaaatttaattctagctgttgcaaacaggccaatattgggtcctcagttggggccaacttggtagacgagacagtagaaacttctgttttctgggagctgcatgtgtcgga

SEQ ID NO: 3723 - DNA, 119 bp, homo sapiens
tcagttggggccaacttgggtagacgagacagtagaaacttctgttttctgggagctgcatgtgtcggatcatctgtcatggccttcccacacaccatcttcatgatgcaagcttggaa

SEQ ID NO: 3724 - DNA, 119 bp, homo sapiens
ctgcttattcatgaagcagtagatgatgggattgtagatgcaagcactcttggagaagaatgaaggaatgtgacaagccgtaagtccagcccatggttacggttgttgaccatgtacat

SEQ ID NO: 3725 - DNA, 119 bp, homo sapiens
tgaaggaatggtgacaagccgtaagtccagcccatggttacggttgttgaccatgtacatggcgaaggcgcgtagggcacgtagcagacacagaaggatcctaccatcacaaccaccat

SEQ ID NO: 3726 - DNA, 119 bp, homo sapiens
ggcgaaggccgcgtagggcacgtagcagacacagaaggatcctaccatcacaaccaccatgcggctcactcccgttcagccttctgggtcgtagctgactcctgctgctgagctgcaac

SEQ ID NO: 3727 - DNA, 119 bp, homo sapiens
agctttcagggccctcagcagctgagtgtaggagaagcagatgagggagagaggcacaatgaagcagaaatgaagaggaaccacgtataggactcgctgcggtatttggtgcccacggt

SEQ ID NO: 3728 - DNA, 119 bp, homo sapiens
gagagaggcacaatgaagcagaagatgaagaggaaccacgtataggactcgctgcggtatttggtgccccggtgtaccagtcagggccacaggaacactgcaggccctcagggatgaac

SEQ ID NO: 3729 - DNA, 119 bp, homo sapiens
cggctccagccaaagaagggtgggatggagacgccaataccaatggtccaggtagccaggaccaccgtcgtgcatgcttggagctgaagcggaagttgccgaagggcttacagatgaca

SEQ ID NO: 3730 - DNA, 119 bp, homo sapiens
aggtagccaggaccaccgtcagtgcatgcttggagctgaagcggaagttgccgaagggcttacagatgaaatgtagcgctcaaaggccaggaaggccagtgaccatcctgtaaccagac

SEQ ID NO: 3731 - DNA, 119 bp, homo sapiens
ctgctacagtgcccaggaagccctccaaagcacaaacatggcgaccgaagacgaagtatccgttacagcggcgacgaagacagggaagacagagaagatgcagaggaggaagcctccga

SEQ ID NO: 3732 - DNA, 119 bp, homo sapiens
tccgttacagctggcgacgaagacagggaagacagagaagatgcagaggaggaagcctccgaaggacacttgaccagaatgtagttgaggggctgccgcaactttttgtagcgcagtgt

SEQ ID NO: 3733 - DNA, 119 bp, homo sapiens
ccgaaggacacgttgaccagaatgtagttgaggggctgccgcaactttttgtagcgcagtgtggccaccgcaccatggcattgagtgggaaccctataaggaagacagtgcccatgaaa

SEQ ID NO: 3734 - DNA, 119 bp, homo sapiens
gtgtggccaccagcaccatggcattgagtgggaaccctataaggaagacagtgcccatgaaagctgcctgaggtagaaggcccagacaggggcaatgtggtactgaggcccatcccacg

SEQ ID NO: 3735 - DNA, 119 bp, homo sapiens
gaaagctgcctggaggtagaaggcccagacaggggcaatgtggtactgaggcccatcccacggccccacgaagagatatttttgaacagataaaactcttcctccgacatttttctcat

SEQ ID NO: 3736 - DNA, 119 bp, homo sapiens
gaccttgctaagcagtactctgacagactagaatgctgtgaaaatgaagtagaaaaggtaatagaagaatacgttgcaaggcaattgagcgtggaacaggaaatgacaattatagaaca

SEQ ID NO: 3737 - DNA, 119 bp, homo sapiens
gtagaaaaggtaatagaagaaatacgttgcaaggcaattgagcgtggaacaggaaatgacaattatagacaacgggaattgctacaatcgaggtgtttttaccaccaagactaaaaaaa

SEQ ID NO: 3738 - DNA, 119 bp, homo sapiens
ggaaaacccttgaagaacaaggcgtggctcacaatgtgaaagcgatggtgcttgaactaaaacaatctgagaggacgcgaggaaaaacttccagttagaggaagaggagcaaaatgagg

SEQ ID NO: 3739 - DNA, 119 bp, homo sapiens
caatgtgaaagcgatggtgcttgaactaaaacaatctgaagaggacgcgaggaaaaacttccagttagagaagaggagcaaaatgaggccaaactcaaagaaaaacaaattcagaggac

SEQ ID NO: 3740 - DNA, 119 bp, homo sapiens
caatctgaagaggacgcgaggaaaaacttccagttagaggaagaggagcaaaatgaggccaaactcaaaaaaaacaaattcagaggaccaagagaggactagaaatactggcaaagaga

SEQ ID NO: 3741 - DNA, 119 bp, homo sapiens
tgagtgttgcagagagctgctggacacagtggataactacgccgtcctccagctggatatagtgtggtgtacttccgcctggaacagctggaatgccttgatgatgcagaaaaaaaatt

SEQ ID NO: 3742 - DNA, 119 bp, homo sapiens
taactacgccgtcctccagctggatatagtgtggtgttacttccgcctggaacagctggaatgccttgagatgcagaaaaaaaattaaacttggcccagaaatgctttaaaaattgtta

SEQ ID NO: 3743 - DNA, 119 bp, homo sapiens
gtgttacttccgcctggaacagctggaatgccttgatgatgcagaaaaaaaattaaacttggcccagaatgctttaaaaattgttacggagaaaatcatcagagactggtccacataaa

SEQ ID NO: 3744 - DNA, 119 bp, homo sapiens
gcacgtcagctctttaaagagctatatattgatccatcaaaagtggacaatttgttgcagttggggtttctgcccaggaagcccggcttggcctgagggcgtgtgatgggaacgtggat

SEQ ID NO: 3745 - DNA, 119 bp, homo sapiens
ccatcaaaagtggacaatttgttgcagttggggtttactgcccaggaagcccggcttggcctgagggcggtgatgggaacgtggatcatgcggccactcatattaccaaccgcagagag

SEQ ID NO: 3746 - DNA, 119 bp, homo sapiens
gaactggcccaaataaggaaggaggaaaaagagaagaaaagacgccgcctcgagaacatcaggtttctgaagggatgggctactccacgcacgcggcccagcaggtactccacgcagcc

SEQ ID NO: 3747 - DNA, 119 bp, homo sapiens
aaagagaagaaaagacgccgcctcgagaacatcaggtttctgaaagggatgggctactccacgcacgcgcccagcaggtactccacgcagccagcgggaacttggatgaggccctgaag

SEQ ID NO: 3748 - DNA, 119 bp, homo sapiens
ttggtgtacatgggttttgatgcactcgtggccgaagctgcgctgagagtgttcagaggcaacgtccagtggccgcccagacccttgctcacaacggaggaagcctgcctcccgagctg

SEQ ID NO: 3749 - DNA, 119 bp, homo sapiens
gcaacgtccagctggccgcccagacccttgctcacaacggaggaagcctgcctcccgagctgccgctgtgccagaagactctttgtccccgccagccacgtccccttctgactccgcag

SEQ ID NO: 3750 - DNA, 119 bp, homo sapiens
gaacctctagtgcctcaacagacgaagacatggagacagaggccgtcaatgagatactggaagacattcagagcatgaggaagactatcttgactcaactctggaagatgaagaaatta

SEQ ID NO: 3751 - DNA, 119 bp, homo sapiens
ctggaagacattccagagcatgaggaagactatcttgactcaactctggaagatgaagaaattattattcagagtacctatcctatgtagaaaataggaagtcagcaacaaagaaaaac

SEQ ID NO: 3752 - DNA, 119 bp, homo sapiens
agaaattattattgcagagtacctatcctatgtagaaaataggaagtcagcaacaaagaaaaactaaatatgaacagaaatagcgctaattttctgcttataaatgctatcattatgaa

SEQ ID NO: 3753 - DNA, 119 bp, homo sapiens
agaaaaactaaataatgaacagaaatagcgctaattttctgcttataaatgctatcattatgaaaaggcaatgcagctctttctgttcttactttttatctgaattacaagtcctcttt

SEQ ID NO: 3754 - DNA, 119 bp, homo sapiens
attatgaaaaggctaatgcagctctttctgttcttactttttatctgaattacaagtcctctttgggtgaggagggggtgggcaggggacaagtccaggaggggtcccagggccttcat

SEQ ID NO: 3755 - DNA, 119 bp, homo sapiens
tcctctttgggtgtaggagggggtgggcaggggacaagtccaggaggggtcccagggccttcatgcgtgtctcggggaagaagcttcctctggcctggcgcaggccgttccatctgcct

SEQ ID NO: 3756 - DNA, 119 bp, homo sapiens
gccttcatgcgtggtctcggggaagaagcttcctctggcctggcgcaggccgttccatctgcctcccagtctgcgtccctaaccccttccccagcttggtgttttaccccgaaacagga

SEQ ID NO: 3757 - DNA, 119 bp, homo sapiens
atctgcctcccaggtctgcgtccctaaccccttccccagcttggtgttttaccccgaaacaggaaggaaaggggtcctgtagaacaggggtcctggggaaggtgtccagggcagggtcc

SEQ ID NO: 3758 - DNA, 119 bp, homo sapiens
aaacaggaaggaacaggggtcctgtagaacaggggtcctggggaaggtgtccagggcagggtcctgggagggtgtcccgaccgcttcctctccagctgtggctccatctgcccagcttg

SEQ ID NO: 3759 - DNA, 119 bp, homo sapiens
cagggtcctgggaagggtgtcccgaccgcttcctctccagctgtggctccatctgcccagcttgcctgctcctgcacccactgccctgaccttcctgcttcccacgctgccatctctgc

SEQ ID NO: 3760 - DNA, 119 bp, homo sapiens
ccagcttgcctgcctcctgcacccactgccctgaccttcctgcttcccacgctgccatctctgccaggggccacatgggttcctgtgccaccctttccccgcccctcaaatcgtccttt

SEQ ID NO: 3761 - DNA, 119 bp, homo sapiens
atctctgccagggtgccacatgggttcctgtgccaccctttccccgcccctcaaatcgtcctttaagtctccttccaagtgctgtggggcataacgatgaggcgctggccttgggggcc

SEQ ID NO: 3762 - DNA, 119 bp, homo sapiens
cgtcctttaagtcttccttccaagtgctgtggggcataacgatgaggcgctggccttgggggccacaccggtcgcagcaaatggcttcagcctgggacgccagtgttttatgctcttag

SEQ ID NO: 3763 - DNA, 119 bp, homo sapiens
tgggggccacaccaggtcgcagcaaatggcttcagcctgggacgccagtgttttatgctcttagttcagaaaatacgcccccgaaattcaagattgagtgtcaggctttatatatattc

SEQ ID NO: 3764 - DNA, 119 bp, homo sapiens
gctcttagttcagtaaaatacgcccccgaaattcaagattgagtgtcaggctttatatatattcagcatcctcattacagaaatcttctattgaatgggaaaggtttaaatgctaacca

SEQ ID NO: 3765 - DNA, 119 bp, homo sapiens
gactctgtgctgtcatactgaactcactgctagctaagagacctatcagagatttagatatattttctcaggttttttgtgggttttctttgttgttgttgttgttctagccatgtgac

SEQ ID NO: 3766 - DNA, 119 bp, homo sapiens
atttagatatattttctccaggttttttgtgggttttctttgttgttgttgttgttctagccatgtgacgaggctctttctaaaagtatgtagttcgctgtgtgtcggctccagcagta

SEQ ID NO: 3767 - DNA, 119 bp, homo sapiens
ttgttctagccatgtgacagaggctctttctaaaagtatgtagttcgctgtgtgtcggctccagcagtaccgtcctcactgcgccacgcactcctctgtagatgtgtgcccagtgggag

SEQ ID NO: 3768 - DNA, 119 bp, homo sapiens
gtgtcggctccagcagtaaccgtcctcactgcgccacgcactcctctgtagatgtgtgcccagtgggagtccttccagccccaggaccacagcagcagccaggtgccgagtggattgag

SEQ ID NO: 3769 - DNA, 119 bp, homo sapiens
atgtgtgcccagtgggagttccttccagccccaggaccacagcagcagccaggtgccgagtggattgaggccaggtgcatccaagactttccctcccttccagaaggcactgactgaag

SEQ ID NO: 3770 - DNA, 119 bp, homo sapiens
ggtgccgagtggattgagtgccaggtgcatccaagactttccctcccttccagaaggcactgactgaagcaggatggatcatgcggagccggctgaaatgctccaactttttcaaagtg

SEQ ID NO: 3771 - DNA, 119 bp, homo sapiens
agaaggcactgactgaagacaggatggatcatgcggagccggctgaaatgctccaactttttcaaagtggggtggtccagtttggactgatgggaatcttcttgtcattctttttaaac

SEQ ID NO: 3772 - DNA, 119 bp, homo sapiens
tccaactttttcaaagtgtgggtggtccagtttggactgatgggaatcttcttgtcattctttttaaacgatgataccgatggaaataaaaggtgggaaatatattcaaaaattgtcac

SEQ ID NO: 3773 - DNA, 119 bp, homo sapiens
ttggagttgagaacaaactttatccaatgactctgaagttacctgctttgcccaagtatttctgcagagcatcaaatatattcaagactagaaaaaaagcacctcaaagtcaaatgagg

SEQ ID NO: 3774 - DNA, 119 bp, homo sapiens
ttctgcagagtcatcaaatatattcaagactagaaaaaaagcacctcaaagtcaaatgaggtgagtgccacagaagccaaggagaaaagtaacaggagatcaacagggaaaagacagag

SEQ ID NO: 3775 - DNA, 119 bp, homo sapiens
ggtgagtgccaacagaagccaaggagaaaagtaacaggagatcaacagggaaaagacagagagcaacactgctagcagaaaacaaacccacaaacaaaagctaaactggagcctttcca

SEQ ID NO: 3776 - DNA, 119 bp, homo sapiens
agagcaacacttgctagcagaaaacaaacccacaaacaaaagctaaactggagcctttccaatcagttcatctttcgggctctgcagacaaataaataggagccgggctgacctccgat

SEQ ID NO: 3777 - DNA, 119 bp, homo sapiens
caatcagttccatctttcgggctctgcagacaaataaataggagccgggctgacctccgataaccgggcgatccgcagacaccccctttcttcacactgcgtgtgggacgggccgcaga

SEQ ID NO: 3778 - DNA, 119 bp, homo sapiens
ataaccgggcagatccgcagacaccccctttcttcacactgcgtgtgggacgggccgcagagctctctgcacttctggacttaagagtcccaggacagcatggcatgggctgtgtcctt

SEQ ID NO: 3779 - DNA, 119 bp, homo sapiens
gagctctctgacacttctggacttaagagtcccaggacagcatggcatgggctgtgtccttggcaagtcttggtctttgtccatgtactatggacatctccagtggactgaacgttgct

SEQ ID NO: 3780 - DNA, 119 bp, homo sapiens
ttggcaagtccttggtctttgtccatgtactatggacatctccagtggactgaacgttgctcagttttgagaaaaaatatgaataaaaacagagctcccaagctcgtgattgttttcta

SEQ ID NO: 3781 - DNA, 119 bp, homo sapiens
ctcagttttgtagaaaaaatatgaataaaaacagagctcccaagctcgtgattgttttctagcttgatctgtctagaaatctaagtcatcttggccaaagccgtctgccctgcccactg

SEQ ID NO: 3782 - DNA, 119 bp, homo sapiens
tagcttgatcttgtctagaaatctaagtcatcttggccaaagccgtctgccctgcccactgcctcagtggggcgagacttccgagtgcctggtcctcttgtaggtcataaccttcactg

SEQ ID NO: 3783 - DNA, 119 bp, homo sapiens
tgcctcagtgggggcgagacttccgagtgcctggtcctcttgtaggtcataaccttcactggccccctgtctggagtccttgagcccaaaggggcctcttcttgctcagaagtagaact

SEQ ID NO: 3784 - DNA, 119 bp, homo sapiens
tggccccctgctctggagtccttgagcccaaaggggcctcttcttgctcagaagtagaactttctgggtcatcctggtggccttcctctctgcatgaggggtccccgtggacttggcat

SEQ ID NO: 3785 - DNA, 119 bp, homo sapiens
ctttctgggtacatcctggtggccttcctctctgcatgaggggtccccgtggacttggcatcagggctcttgtgtctccaagtacatggtcattttctgagtctttctgccagcagttg

SEQ ID NO: 3786 - DNA, 119 bp, homo sapiens
atcagggctccttgtgtctccaagtacatggtcattttctgagtctttctgccagcagttgccccaagagatgctctggaggaggaagggcctgtttgggagcctggcctttggtgggg

SEQ ID NO: 3787 - DNA, 119 bp, homo sapiens
tgccccaagaggatgctctggaggaggaagggcctgtttgggagcctggcctttggtggggagtgtctcacctggggaagggggtggagtgggcctgtcctcagggactgggctgctgc

SEQ ID NO: 3788 - DNA, 119 bp, homo sapiens
ggagtgtctccacctggggaagggggtggagtgggcctgtcctcagggactgggctgctgctttcagaacctcctcagattggccatctcctagactgacctgagggctcccctttttc

SEQ ID NO: 3789 - DNA, 119 bp, homo sapiens
gctttcagaagcctcctcagattggccatctcctagactgacctgagggctcccctttttctcaccttggtttctccttctgactctggctgggcctccccttcagcctccggggtctc

SEQ ID NO: 3790 - DNA, 119 bp, homo sapiens
tctcaccttgagtttctccttctgactctggctgggcctccccttcagcctccggggtctctacgcctttggctctggctgggcctcctcttcagcctccggggcctctacaccttcta

SEQ ID NO: 3791 - DNA, 119 bp, homo sapiens
tctacgccttctggctctggctgggcctcctcttcagcctccggggcctctacaccttctaactctggtgggcctccccttctgcctctggggcctctataccttctgactctggctgg

SEQ ID NO: 3792 - DNA, 119 bp, homo sapiens
taactctggttgggcctccccttctgcctctggggcctctataccttctgactctggctgggcctcccctctgcctctggggcctctacaccttctaactctggttgggcctcctcttc

SEQ ID NO: 3793 - DNA, 119 bp, homo sapiens
gggcctccccttctgcctctggggcctctacaccttctaactctggttgggcctcctcttcagcctcctggcctctataccttctgactctggctgggcctccccttctgcatcctggg

SEQ ID NO: 3794 - DNA, 119 bp, homo sapiens
tcagcctcctgggcctctataccttctgactctggctgggcctccccttctgcatcctgggcctctacacttctgactcaggctgggcctccccttcagcctctggggcctctatacct

SEQ ID NO: 3795 - DNA, 119 bp, homo sapiens
ggcctctacaccttctgactcaggctgggcctccccttcagcctctggggcctctataccttctgactcggctgggcctccccttcagtctctggggcctctataccttctgccttctg

SEQ ID NO: 3796 - DNA, 119 bp, homo sapiens
cttctgactctggctgggcctccccttcagtctctggggcctctataccttctgccttctgggcctcccttctgcctctggggcctctacaccttctgattctggctgggcctcccctt

SEQ ID NO: 3797 - DNA, 119 bp, homo sapiens
tgggcctccccttctgcctctggggcctctacaccttctgattctggctgggcctccccttctgcctccgggcatctacatcttctgactctgggtgggcctccccttctgcctcctgg

SEQ ID NO: 3798 - DNA, 119 bp, homo sapiens
ttctgcctcctgggcatctacatcttctgactctgggtgggcctccccttctgcctcctggacctcccctcagcctcctgtgcctcctcttctgcctccggggcctctacaccgtctga

SEQ ID NO: 3799 - DNA, 119 bp, homo sapiens
ggacctccccttcagcctcctgtgcctcctcttctgcctccggggcctctacaccgtctgactctggctggcatccccttctgtcttctgggtctccccttcaacctcctgggcctctt

SEQ ID NO: 3800 - DNA, 119 bp, homo sapiens
gactctggctgggcatccccttctgtcttctgggtctccccttcaacctcctgggcctcttcaccttctactttggctgggcctctacaccgtctgactctggctgggcctcctcttct

SEQ ID NO: 3801 - DNA, 119 bp, homo sapiens
ttcaccttctgactttggctgggcctctacaccgtctgactctggctgggcctcctcttctgcctcttgatctccccttcagcctctggggcctctacatcttctgactctggctgggc

SEQ ID NO: 3802 - DNA, 119 bp, homo sapiens
ctgcctcttgcatctccccttcagcctctggggcctctacatcttctgactctggctgggcctcccctttgcctcctgggtctccacttcaacctccagggcctctacatcttctgact

SEQ ID NO: 3803 - DNA, 119 bp, homo sapiens
gcctccccttctgcctcctgggtctccacttcaacctccagggcctctacatcttctgactctggctggcttcctcttctgcctcctgggactctataacttctgactctggctgggtc

SEQ ID NO: 3804 - DNA, 119 bp, homo sapiens
ctctggctgggcttcctcttctgcctcctgggactctataacttctgactctggctgggtctgcccttcgcctcctgggccgcctcttctgcctcttgggcctctgcaccttctgactc

SEQ ID NO: 3805 - DNA, 119 bp, homo sapiens
tctgcccttctgcctcctgggccgcctcttctgcctcttgggcctctgcaccttctgactctggctcgtctccccttcagtctccagggcctctacactttctgtctctggctgggcct

SEQ ID NO: 3806 - DNA, 119 bp, homo sapiens
tctggctcgtcctccccttcagtctccagggcctctacactttctgtctctggctgggcctccttttctcctccggggcttctgcaccttctgactctggctggacctcccattctgcc

SEQ ID NO: 3807 - DNA, 119 bp, homo sapiens
ctccttttctgcctccggggcttctgcaccttctgactctggctggacctcccattctgcctctggggttctacatcttctgactctggctgggcctctccttctgcctctggggcctc

SEQ ID NO: 3808 - DNA, 119 bp, homo sapiens
cctctggggtctctacatcttctgactctggctgggcctctccttctgcctctggggcctctacatctttgactctggctgggcctccccttcagcctcctgggcatccccttctgcct

SEQ ID NO: 3809 - DNA, 119 bp, homo sapiens
tctacatcttctgactctggctgggcctccccttcagcctcctgggcatccccttctgcctctggggccctacaccttctgactctggctgggcctccccttcagcctccggggcctct

SEQ ID NO: 3810 - DNA, 119 bp, homo sapiens
ctctggggcctctacaccttctgactctggctgggcctccccttcagcctccggggcctctatgccttcgccccatcactctgtcctggatcttggtcacctcctgccgcagcttcacc

SEQ ID NO: 3811 - DNA, 119 bp, homo sapiens
ctatgccttcggccccatcactctgtcctggatcttggtcacctcctgccgcagcttcaccctgcaagtgtcctcatgcccagagccttgacccccagtttctcccctttcacttatgc

SEQ ID NO: 3812 - DNA, 119 bp, homo sapiens
ccctgcaagttgtcctcatgcccagagccttgacccccagtttctcccctttcacttatgccctctccccctgctcagcttcccccaactcactgcccgcactggtttcactgttgtgg

SEQ ID NO: 3813 - DNA, 119 bp, homo sapiens
gccctctccctcctgctcagcttcccccaactcactgcccgcactggtttcactgttgtgggttttccctctctctcctgagccattgcatctccctctgcctccccgagtttgggatc

SEQ ID NO: 3814 - DNA, 119 bp, homo sapiens
gggttttcccttctctctcctgagccattgcatctccctctgcctccccgagtttgggatctttgtctcgttgagtctctggctcccctcgccatcctcaccctcgtccactccaggcc

SEQ ID NO: 3815 - DNA, 119 bp, homo sapiens
tctttgtctctgttgagtctctggctcccctcgccatcctcaccctcgtccactccaggcccctggctcgccccggccccagccctccctcagctccctggacagtcctagtgctcgtg

SEQ ID NO: 3816 - DNA, 119 bp, homo sapiens
cccctggctcagccccggccccagccctccctcagctccctggacagtcctagtgctcgtggggtccgttgggtcttgccaggggccacctctgctgcctccccatcagtgtgttctcc

SEQ ID NO: 3817 - DNA, 119 bp, homo sapiens
tggggtccgtgtgggtcttgccaggggccacctctgctgcctccccatcagtgtgttctcccctcttccctgcagaatctgctgcaggtcaaaggcctctttgatgggacctctggttg

SEQ ID NO: 3818 - DNA, 119 bp, homo sapiens
cccctcttcctctgcagaatctgctgcaggtcaaaggcctctttgatgggacctctggttgcccccatttggccttgggggacatagggctcactttcttcctcacgcaggcctcgcag

SEQ ID NO: 3819 - DNA, 119 bp, homo sapiens
tgcccccattgtggccttgggggacatagggctcactttcttcctcacgcaggcctcgcagggacagaatcctccccctccgcctcctcgcccagctggctccccagggctgtgctgag

SEQ ID NO: 3820 - DNA, 119 bp, homo sapiens
agggacagaactcctccccctccgcctcctcgcccagctggctccccagggctgtgctgagggctggctgtcctccagggtgaaggagaggggccccaggcccagggtccgctcagaga

SEQ ID NO: 3821 - DNA, 119 bp, homo sapiens
agggctggctcgtcctccagggtgaaggagaggggccccaggcccagggtccgctcagagaaggccgagggtttcgcaggccccggagacggtgtctgcgctgctgggtctgcaggagc

SEQ ID NO: 3822 - DNA, 119 bp, homo sapiens
gaaggccgagaggtttcgcaggccccggagacggtgtctgcgctgctgggtctgcaggagcagctccccgtgagggcctcccttggaggctccagcaccatcctacccgcccggccctg

SEQ ID NO: 3823 - DNA, 119 bp, homo sapiens
gcagctccccggtgagggcctcccttggaggctccagcaccatcctacccgcccggccctggagcttctgagctctctcttggtgctgtcctggaggcgttgggccacgtcctgctgca

SEQ ID NO: 3824 - DNA, 119 bp, homo sapiens
tggagcttctggagctctctcttggtgctgtcctggaggcgttgggccacgtcctgctgcagctcggccccatctggtccagcagatcattgtcctgcaggccccagcgtgctcggagc

SEQ ID NO: 3825 - DNA, 119 bp, homo sapiens
cagctcggccgccatctggtccagcagatcattgtcctgcaggccccagcgtgctcggagctcagccacgcactggcaaggtgggccaggaaggccttctccgtcttcttcagtaacac

SEQ ID NO: 3826 - DNA, 119 bp, homo sapiens
gctcagccaccgcactggcaaggtgggccaggaaggccttctccgtcttcttcagtaacacggacacccgatggggtcgcagtccagagccgcgctgcaggccaccgaagagctcctct

SEQ ID NO: 3827 - DNA, 119 bp, homo sapiens
acggacacccagatggggtcgcagtccagagccgcgctgcaggccaccgaagagctcctctctgcagcccctgggtgggttgggcctgcgtgtgctcttggcccatcatggtggctccg

SEQ ID NO: 3828 - DNA, 119 bp, homo sapiens
ctctgcagccccctgggtgggttgggcctgcgtgtgctcttggcccatcatggtggctccgggcggctttccaaaccaggctcaagctgggagccactctgcctctcgctggcacttgg

SEQ ID NO: 3829 - DNA, 119 bp, homo sapiens
cgggcggcttttccaaaccaggctcaagctgggagccactctgcctctcgctggcacttgggtccgtctgctgagatgactagggggctctgtgggttcctctgtgccctctgcggggc

SEQ ID NO: 3830 - DNA, 119 bp, homo sapiens
gggtccgtctcgctgagatgactagggggctctgtgggttcctctgtgccctctgcggggcacggctctcagaggcagaggctcttcctgcttcctcctcctggactgggtcatcttcc

SEQ ID NO: 3831 - DNA, 119 bp, homo sapiens
gcacggctctgcagaggcagaggctcttcctgcttcctcctcctggactgggtcatcttcctgggagccttcccatccggagagctggcctctgacaattcctgcccgtggacgcttcc

SEQ ID NO: 3832 - DNA, 119 bp, homo sapiens
cctgggagcctttcccatccggagagctggcctctgacaattcctgcccgtggacgcttccttcttctgaagtccttcctctttgagaccctcttcaagagcctctccttgcagtcctc

SEQ ID NO: 3833 - DNA, 119 bp, homo sapiens
tagtttcctctaattgcacctcttcttgcactgtgttttcagctaactgctccaggttcgagctcgcccctgctcctcactgtctctttctgcttcatcctcattggtggcacaagcgc

SEQ ID NO: 3834 - DNA, 119 bp, homo sapiens
gagctcgccctctgctcctcactgtctctttctgcttcatcctcattggtggcacaagcgcaggctcggcgttcaagaaggttgggaaacaacactgctgttggttttccagatcccct

SEQ ID NO: 3835 - DNA, 119 bp, homo sapiens
gcaggctcgggcgttcaagaaggttgggaaacaacactgctgttggttttccagatcccctgggctctctaagttcttgaatcaggcctctggttggaggttttcaggggcagctctgt

SEQ ID NO: 3836 - DNA, 119 bp, homo sapiens
ctgggctctcataagttcttgaatcaggcctctggttggaggttttcaggggcagctctgtcccctgtgcaccagggtgccgtccatggcacagggtacgctactctcccctgagcctc

SEQ ID NO: 3837 - DNA, 119 bp, homo sapiens
gtcccctgtgtcaccagggtgccgtccatggcacagggtacgctactctcccctgagcctccagagccgtgctgatgtccacaccagaggaggatgtgggcgtgaagttctccgtcatg

SEQ ID NO: 3838 - DNA, 119 bp, homo sapiens
tccagagccgctgctgatgtccacaccagaggaggatgtgggcgtgaagttctccgtcatggcatgggaccaaggtctggcagagcctggctccatgtgagctcccagaggcctgagtc

SEQ ID NO: 3839 - DNA, 119 bp, homo sapiens
tggcatgggacccaaggtctggcagagcctggctccatgtgagctcccagaggcctgagtccagctggtttccccaacgtcacatcctggccacaggtccttcgagatgctgagcagct

SEQ ID NO: 3840 - DNA, 119 bp, homo sapiens
tccagctggtcttccccaacgtcacatcctggccacaggtccttcgagatgctgagcagctcctggtacgaggggagtctttgaacctcactttgctggcaggagacccaaggtcttcc

SEQ ID NO: 3841 - DNA, 119 bp, homo sapiens
ctcctggtaccgaggggagtctttgaacctcactttgctggcaggagacccaaggtcttcctcaaataatgcagactggccagacaagtaatgagggccccggctgagcagctgagcct

SEQ ID NO: 3842 - DNA, 119 bp, homo sapiens
cctcaaataactgcagactggccagacaagtaatgagggccccggctgagcagctgagcctcctggccagggcctagacacttcgggcacgctgctgggccggccctgcttggagccca

SEQ ID NO: 3843 - DNA, 119 bp, homo sapiens
ctcctggccatgggcctagacacttcgggcacgctgctgggccggccctgcttggagcccatcagcgcctcatgatctgcgtggaggcagacacccggccaggaagtgcccgcaggctc

SEQ ID NO: 3844 - DNA, 119 bp, homo sapiens
catcagcgccctcatgatctgcgtggaggcagacacccggccaggaagtgcccgcaggctcaccctgcacctgctggggcctctctgtctgctccggcctctgcaggggcctcggaaac

SEQ ID NO: 3845 - DNA, 119 bp, homo sapiens
tcaccctgcagcctgctggggcctctctgtctgctccggcctctgcaggggcctcggaaactccctctgagctgccccttgggggacaccctctcctgattggggaccagtgtcactac

SEQ ID NO: 3846 - DNA, 119 bp, homo sapiens
actccctctggagctgccccttgggggacaccctctcctgattggggaccagtgtcactactccccagggggctccctctggctctgggtcctggccggggtccccttccagggactgc

SEQ ID NO: 3847 - DNA, 119 bp, homo sapiens
actccccaggagggctccctctggctctgggtcctggccggggtccccttccagggactgctgtcccgctgagctggctcccccaggccttccagagaatggtcatccccagggtccac

SEQ ID NO: 3848 - DNA, 119 bp, homo sapiens
gctgtcccgcctgagctggctcccccaggccttccagagaatggtcatccccagggtccacctcggggctctcaggccacccccagctgcacctgtggtctcgtccgccaactcatatg

SEQ ID NO: 3849 - DNA, 119 bp, homo sapiens
acctcggggcctctcaggccacccccagctgcacctgtggtctcgtccgccaactcatatgtcatgagttgggctcttctggaatgttgtccagccattcgcggaccacagcctctgga

SEQ ID NO: 3850 - DNA, 119 bp, homo sapiens
tgtcatgagtatgggctcttctggaatgttgtccagccattcgcggaccacagcctctggagacgagcgggcagagagctgggtgacacaccactggcctcctcctgcccctgggggcc

SEQ ID NO: 3851 - DNA, 119 bp, homo sapiens
gagacgagcggggcagagagctgggtgacacaccactggcctcctcctgcccctgggggcctcccccaccctcaaggtcttctcctcggacagcccccgagaccccgcaccctggctgg

SEQ ID NO: 3852 - DNA, 119 bp, homo sapiens
cctcccccactcctcaaggtcttctcctcggacagcccccgagaccccgcaccctggctggcactgctttccttgatgcccctgaattggggcctggggacggcgtggggcctggctgg

SEQ ID NO: 3853 - DNA, 119 bp, homo sapiens
ggcactgcttctccttgatgcccctgaattggggcctggggacggcgtggggcctggctggcgtgtccctcctgcgggctcccacctggcccccgggcagtgctttggtggctgctgcc

SEQ ID NO: 3854 - DNA, 119 bp, homo sapiens
ggcgtgtcccctcctgcgggctcccacctggcccccgggcagtgctttggtggctgctgccggtgctccacagctggaagagcgcctctgggggcagggccgccccctgggcggggtgg

SEQ ID NO: 3855 - DNA, 119 bp, homo sapiens
ccggtgctcccacagctggaagagcgcctctgggggcagggccgccccctgggcggggtgggacagtactgccacacagccagctagcctcaggggagggtccccgctgggcctcttgg

SEQ ID NO: 3856 - DNA, 119 bp, homo sapiens
gggacagtacctgccacacagccagctagcctcaggggagggtccccgctgggcctcttgggccggctggtcccaggctgtgagcagcagtggcttcggtgggggcccaccgccccttg

SEQ ID NO: 3857 - DNA, 119 bp, homo sapiens
gggccggctgcgtcccaggctgtgagcagcagtggcttcggtgggggcccaccgccccttgctcaggcctccaacctgcagaaccaagggtgaggagggctgaggcgtgtccctggcct

SEQ ID NO: 3858 - DNA, 119 bp, homo sapiens
tgctcaggccgtccaacctgcagaaccaagggtgaggagggctgaggcgtgtccctggcctcttcccccggctggcagccccagattttgagcaggagtcggatgtgtggggaggtatg

SEQ ID NO: 3859 - DNA, 119 bp, homo sapiens
ctcttcccccaggctggcagccccagattttgagcaggagtcggatgtgtggggaggtatgggggccgggagcatgtcctggaccccgcgtcccctgcccacccggcagagggagcgtt

SEQ ID NO: 3860 - DNA, 119 bp, homo sapiens
tgggggccggcgagcatgtcctggaccccgcgtcccctgcccacccggcagagggagcgttgtgcgggggactccagaaacaaaatccgagtggactgcaggggtgacagtggcactgc

SEQ ID NO: 3861 - DNA, 119 bp, homo sapiens
ttgtgcggggagactccagaaacaaaatccgagtggactgcaggggtgacagtggcactgctggttcccgaaggtcctgggaaggaagagagcccgaggagggaggtctcaggttccca

SEQ ID NO: 3862 - DNA, 119 bp, homo sapiens
gctggttcccagaaggtcctgggaaggaagagagcccgaggagggaggtctcaggttcccagaggcctggtcctggtgctcgatgagcttccagaatatcgtggcactgagccatcctg

SEQ ID NO: 3863 - DNA, 119 bp, homo sapiens
cagaggcctgtgtcctggtgctcgatgagcttccagaatatcgtggcactgagccatcctggcaggccctcgccgctcaggaggcctcggcacttgcttggttacagaggagtccagtg

SEQ ID NO: 3864 - DNA, 119 bp, homo sapiens
tggcaggcccttcgccgctcaggaggcctcggcacttgcttggttacagaggagtccagtgggctgtggtgtccttgcggtagtgagaatgcctgggatggcctctcggggccactcgg

SEQ ID NO: 3865 - DNA, 119 bp, homo sapiens
tgggctgtgggtgtccttgcggtagtgagaatgcctgggatggcctctcggggccactcggccaaggccgggctgctgggtgaggacattgcactggcccggcttctgtgccttctctg

SEQ ID NO: 3866 - DNA, 119 bp, homo sapiens
ggccaaggccagggctgctgggtgaggacattgcactggcccggcttctgtgccttctctgcccctgctggatgaagtgcaggtggaaggggtggaagaggctccttccgagtcccagg

SEQ ID NO: 3867 - DNA, 119 bp, homo sapiens
tgcccctgctgggatgaagtgcaggtggaaggggtggaagaggctccttccgagtcccaggagcaggaaggcccagaaccagaggctcccttgtcacagccgctcccgtggcctgctcg

SEQ ID NO: 3868 - DNA, 119 bp, homo sapiens
ggagcaggaaaggcccagaaccagaggctcccttgtcacagccgctcccgtggcctgctcggtgccctgccttgcgtctctgcctgcaggtcgtcactccttaaagatgaaagactcag

SEQ ID NO: 3869 - DNA, 119 bp, homo sapiens
cggtgccctgtccttgcgtctctgcctgcaggtcgtcactccttaaagatgaaagactcagggctggagagcggggtcgcctccctcgctggcctcctgctgagaggtctcggcccttg

SEQ ID NO: 3870 - DNA, 119 bp, homo sapiens
agggctggagaagcggggtcgcctccctcgctggcctcctgctgagaggtctcggcccttgccttgcctgacagccctggggccgcccaccccattcgctggatccctcatgagagccg

SEQ ID NO: 3871 - DNA, 119 bp, homo sapiens
tgccttgcctggacagccctggggccgcccaccccattcgctggatccctcatgagagccggtgctggcgacgagtccgaagaagccccctcctcactccgggccctcggtgtcaggcg

SEQ ID NO: 3872 - DNA, 119 bp, homo sapiens
cggtgctggctgacgagtccgaagaagccccctcctcactccgggccctcggtgtcaggcggccgccttctctgggccgcccagccctgctccatctatgcataggccggggtcctcac

SEQ ID NO: 3873 - DNA, 119 bp, homo sapiens
cggccgccttgctctgggccgcccagccctgctccatctatgcataggccggggtcctcacccaggctcctccagctttccgctcagcccctatctgggcagaggggctggcactgtcc

SEQ ID NO: 3874 - DNA, 119 bp, homo sapiens
acccaggctccctccagctttccgctcagcccctatctgggcagaggggctggcactgtccaccccgtctccggggtcctggggcagcaggaggactctggctccgagccctcggggag

SEQ ID NO: 3875 - DNA, 119 bp, homo sapiens
ccaccccgtcctccggggtcctggggcagcaggaggactctggctccgagccctcggggaggccggtgcggaggctgggctggcactgtcctggctgcatctctccctcccggcagtcc

SEQ ID NO: 3876 - DNA, 119 bp, homo sapiens
aggccggtgctggaggctgggctggcactgtcctggctgcatctctccctcccggcagtcccgtggcccacaggccactgcagcggacgtgctgggccagtccccacctcttccgagct

SEQ ID NO: 3877 - DNA, 119 bp, homo sapiens
cccgtggccccacaggccactgcagcggacgtgctgggccagtccccacctcttccgagctgccactcttctccctgggaggcatgcaggggattcgtccagatttcatacttgggccc

SEQ ID NO: 3878 - DNA, 119 bp, homo sapiens
ctgccactctctctccctgggaggcatgcaggggattcgtccagatttcatacttgggccctggctgccgcctcggccaaagacttccctgcatcccaccctgcagggccggggtcccc

SEQ ID NO: 3879 - DNA, 119 bp, homo sapiens
cctggctgcccgcctcggccaaagacttccctgcatcccaccctgcagggccggggtccccacaccccagctctgagaagccccaagggtagccctcccacacacagcagagggggtct

SEQ ID NO: 3880 - DNA, 119 bp, homo sapiens
ccacaccccaggctctgagaagccccaagggtagccctcccacacacagcagagggggtctacctccccagaacggggtcttccccactggctgccgtgagggcgctggccctgcccat

SEQ ID NO: 3881 - DNA, 119 bp, homo sapiens
ctacctcccccagaacggggtcttccccactggctgccgtgagggcgctggccctgcccatcctccgggccataggagcgtgtcctcgccgaccaggtggaagcggactttcatctcca

SEQ ID NO: 3882 - DNA, 119 bp, homo sapiens
atcctccgggaccataggagcgtgtcctcgccgaccaggtggaagcggactttcatctccacggacaggtgccgtcctcattcatgcggaccttcttcttcatgtcatcgccagccacc

SEQ ID NO: 3883 - DNA, 119 bp, homo sapiens
cacggacaggctgccgtcctcattcatgcggaccttcttcttcatgtcatcgccagccaccagcgggccgactgagctggcgtgtcctgagggtgcctgccaggagcagggcccaccgg

SEQ ID NO: 3884 - DNA, 119 bp, homo sapiens
ccagcgggcccgactgagctggcgtgtcctgagggtgcctgccaggagcagggcccaccggggggttgcaggaccaggcctttctggcagccgtggcgtgctgcctggcggagaccgcg

SEQ ID NO: 3885 - DNA, 119 bp, homo sapiens
cgtttttgtttcttgaagtcagcccagataaagtttcagcctcgcttctcctggcatttttcatggctgggttctgaaggcctcatgcccggcacacaccagcacagaggggctgtgca

SEQ ID NO: 3886 - DNA, 119 bp, homo sapiens
cccagataaagtttcagcctcgcttctcctggcatttttcatggctggggttctgaaggcctcatgcccgcacacaccagcacagaggggctgtgcagcagggcctgcagcgagtccac

SEQ ID NO: 3887 - DNA, 119 bp, homo sapiens
ctttttcccgctggtcgtgtacaactgcttcacaggaaagcgcaggagatctgaggctttgccgagaaagcggccaggttcctagtattcctgtgactgagaaccactgtctgctggag

SEQ ID NO: 3888 - DNA, 119 bp, homo sapiens
ctttgccgagaaaggcggccaggttcctagtattcctgtgactgagaaccactgtctgctggaggcgaggtccatgttcttaatcagcagtatcctccggggggttttaagactcttcc

SEQ ID NO: 3889 - DNA, 119 bp, homo sapiens
tgctggaggcgagggtccatgttcttaatcagcagtatcctccggggggttttaagactcttccgggagaggaggtgcctggggcttcacgctggccttcgacatcccgcaactgctga

SEQ ID NO: 3890 - DNA, 119 bp, homo sapiens
actcttccgggaggaggaggtgcctggggcttcacgctggccttcgacatcccgcaactgctgagcagtgggtttctctcctgtggccggcctggtccactgggggtcttggggggctt

SEQ ID NO: 3891 - DNA, 119 bp, homo sapiens
actgctgagcagtggggtttctctcctgtggccggcctggtccactgggggtcttggggggcttcttatagagcagaggtagcagcctccatcttccagctgctccagggcgctgaggc

SEQ ID NO: 3892 - DNA, 119 bp, homo sapiens
gggggcttcttatcagagcagaggtagcagcctccatcttccagctgctccagggcgctgaggctatgcggccccggggtgtggtgacagagcgcaccccaaaggagagaggcacgcgc

SEQ ID NO: 3893 - DNA, 119 bp, homo sapiens
gctgaggctatgcaggccccggggtgtggtgacagagcgcaccccaaaggagagaggcacgcgctgggaagctcgtccatgagggcgctgaaggtcttaaaggcgcgctggtgaacggc

SEQ ID NO: 3894 - DNA, 119 bp, homo sapiens
gcacgcgctgggagagctcgtccatgagggcgctgaaggtcttaaaggcgcgctggtgaacggccaggcgaccccagcaaaccgtggatcccctcgcttgaggaaggtgatcttcttgg

SEQ ID NO: 3895 - DNA, 119 bp, homo sapiens
tgaacggccaggcggaccccagcaaaccgtggatcccctcgcttgaggaaggtgatcttcttggctggctgaccttggtgaccgagggggtgcgagccacagagggcaggaagcactca

SEQ ID NO: 3896 - DNA, 119 bp, homo sapiens
cttcttggctggcgtgaccttggtgaccgagggggtgcgagccacagagggcaggaagcactcacggtgctcggggcctgggcattcctgggggtgctgttcatggtgtgggggctctg

SEQ ID NO: 3897 - DNA, 119 bp, homo sapiens
cgtcctccagggagcacaagggcatggctcagcccctaagcctcagggggacgtcctttggaggaaagtaggccagggggaacaccgcctccttccctgccagtggctcagtccctctg

SEQ ID NO: 3898 - DNA, 119 bp, homo sapiens
gggggacgtcctttggaggaaagtcaggccagggggaacaccgcctccttccctgccagtggctcagtcctctgggcagcagggctggccaccctcctccggacagtcctcggggccac

SEQ ID NO: 3899 - DNA, 119 bp, homo sapiens
tccttccctgccagtggctcagtccctctgggcagcagggctggccaccctcctccggacagtcctcgggccactctccttggcctgagagcctgaggccccagtcccttgggcaggag

SEQ ID NO: 3900 - DNA, 119 bp, homo sapiens
gacatactgagaataaatccaaagacattagtttctttgcacgaaatgaggttacatatccagtgacattatttgagctatttaaacaacttaaacatctttttcttttcttaataagg

SEQ ID NO: 3901 - DNA, 119 bp, homo sapiens
atccaaagacattagtttctttgcacgaaatgaggttacatatccagtgacatttatttgagctatttaacaacttaaacatctttttcttttcttaataagggacgtttcaagttgtg

SEQ ID NO: 3902 - DNA, 119 bp, homo sapiens
gtctcagccaaaatgagtgataccccttctactggtttttccatcattcatcctacgtcttctgaaggtaagttccaccccctcgccatttgagcctcactcatcctgttgtggccaag

SEQ ID NO: 3903 - DNA, 119 bp, homo sapiens
gtcttctgaaggtcaagttccaccccctcgccatttgagcctcactcatcctgttgtggccaagcgaatagtttctacaagagcggagacccccaattcggcggggtcagggtggtggt

SEQ ID NO: 3904 - DNA, 119 bp, homo sapiens
tggccaagcgaatcagtttctacaagagcggagacccccaattcggcggggtcagggtggtggtcaacctcgctcctttaagtcctttgatgctctgctggataacttgtccaggaagg

SEQ ID NO: 3905 - DNA, 119 bp, homo sapiens
gtggtggtcaaccctcgctcctttaagtcctttgatgctctgctggataacttgtccaggaaggtgccctcccttttggagtgaggaacatcagcacccctcggggcaggcacagcatc

SEQ ID NO: 3906 - DNA, 119 bp, homo sapiens
caggaaggtgcccctcccttttggagtgaggaacatcagcacccctcggggcaggcacagcatcacgcgctggaggagctggaggacggcgagtcctacctatgttcccacggcaggaa

SEQ ID NO: 3907 - DNA, 119 bp, homo sapiens
acagcatcacgcgcctggaggagctggaggacggcgagtcctacctatgttcccacggcaggaaggtgcgcctgtagacctggacaaagcccgtcggcgcccgcggccctggctcagca

SEQ ID NO: 3908 - DNA, 119 bp, homo sapiens
ggcaggaaggtgcagcctgtagacctggacaaagcccgtcggcgcccgcggccctggctcagcagccggccattagcgcgcactcaccgccccaccccgtagccgtcgctgctcccggc

SEQ ID NO: 3909 - DNA, 119 bp, homo sapiens
gctcagcagccgggccattagcgcgcactcaccgccccaccccgtagccgtcgctgctcccggcatgcccgccccccacggagcctagtggtcttcaggaatggcgacccgaagacgag

SEQ ID NO: 3910 - DNA, 119 bp, homo sapiens
ctcccggcatgccccgccccccacggagcctagtggtcttcaggaatggcgacccgaagacgaggcgtgggttcttctgagcaggagggtcacccagagcttcgaggcatttctacagc

SEQ ID NO: 3911 - DNA, 119 bp, homo sapiens
aagacgaggcgtgcggttcttctgagcaggagggtcacccagagcttcgaggcatttctacagcacctgcagaggtcatgcagcgccctgtggtcaagctgtacgctacggacggaagg

SEQ ID NO: 3912 - DNA, 119 bp, homo sapiens
gttcccagcctccaggcagtgatcctgagctctggagctgtggtggcggcaggaagggagccatttaaacaggaaattatgacatccaaaaatacttgcttcctgctagattaccaggg

SEQ ID NO: 3913 - DNA, 119 bp, homo sapiens
gaagggagccatttaaaccaggaaattatgacatccaaaaatacttgcttcctgctagattaccagggactctcagcgtgtgtaccccaagggaaatgcaaagtcagaaagcagaaaga

SEQ ID NO: 3914 - DNA, 119 bp, homo sapiens
taagcacacatatgtcttcaagctcaaggtcccagatttattctgtttcttctgagaaaacacataatatgattgctacttagactattcttttgttcctgaaaagtacttggccttag

SEQ ID NO: 3915 - DNA, 119 bp, homo sapiens
acacataataatgattgctacttagactattcttttgttcctgaaaagtacttggccttagaaaagaatattctcagaatttaccaatatatccttctgaagatgatattgagaaatca

SEQ ID NO: 3916 - DNA, 119 bp, homo sapiens
agaaaagaatgattctcagaatttaccaatatatccttctgaagatgatattgagaaatcaattattttaatcaagacggcactatgacagttgagatgaaagttcgattcagaataaa

SEQ ID NO: 3917 - DNA, 119 bp, homo sapiens
caattatttttaatcaagacggcactatgacagttgagatgaaagttcgattcagaataaaagaggaagaaccataaaatggacaactactgtcagtaaaactggtccttctaataatg

SEQ ID NO: 3918 - DNA, 119 bp, homo sapiens
aaagaggaagaaaccataaaatggacaactactgtcagtaaaactggtccttctaataatgatgaaaaggtgagatgagttttccaggaagaacagaaagtcgatcatctggtttaaag

SEQ ID NO: 3919 - DNA, 119 bp, homo sapiens
tgatgaaaagagtgagatgagttttccaggaagaacagaaagtcgatcatctggtttaaagcttgcagctgttcattctctgcagatgtgtcacctatggagcgaagcagtaatcaaga

SEQ ID NO: 3920 - DNA, 119 bp, homo sapiens
agcttgcagcatgttcattctctgcagatgtgtcacctatggagcgaagcagtaatcaagagggcagttggcagaggagataaacattcaaatgacagatcaagtggctgaaacttgca

SEQ ID NO: 3921 - DNA, 119 bp, homo sapiens
gagggcagtttggcagaggagataaacattcaaatgacagatcaagtggctgaaacttgcagttctgctgttgggagaatgctactgtggacacagatatcatccagggaactcaagac

SEQ ID NO: 3922 - DNA, 119 bp, homo sapiens
cagttctgctagttgggagaatgctactgtggacacagatatcatccagggaactcaagaccaagcaaacatcgtttttataggccccctacacctggactaagaagagtgagacaaaa

SEQ ID NO: 3923 - DNA, 119 bp, homo sapiens
accaagcaaagcatcgtttttataggccccctacacctggactaagaagagtgagacaaaagaaatctggattggcagtgtgaccttagtatctgaaactgaggttcaagagaaaatga

SEQ ID NO: 3924 - DNA, 119 bp, homo sapiens
aagaaatctgtgattggcagtgtgaccttagtatctgaaactgaggttcaagagaaaatgattggacagtttcatatagtgaagaaagggaaagtggggaaaacaagtctgagtatcac

SEQ ID NO: 3925 - DNA, 119 bp, homo sapiens
gattggacagttttcatatagtgaagaaagggaaagtggggaaaacaagtctgagtatcacatgtttaccattcttgcagtaaaatgtcatcagtatctaacaaaccagtacttgttca

SEQ ID NO: 3926 - DNA, 119 bp, homo sapiens
acatgtttacacattcttgcagtaaaatgtcatcagtatctaacaaaccagtacttgttcagatcaatacaatgatcaaatggaggagtcatcattagaaagaaaaaaggaaaacagtc

SEQ ID NO: 3927 - DNA, 119 bp, homo sapiens
cagatcaataacaatgatcaaatggaggagtcatcattagaaagaaaaaaggaaaacagtctgcttaagcaagtgcaataagtgctggtgttatagaaattacaagtcagaagatgtta

SEQ ID NO: 3928 - DNA, 119 bp, homo sapiens
tctgcttaagtcaagtgcaataagtgctggtgttatagaaattacaagtcagaagatgttagagatgtccataataatggtttgccatcaactatatcaaataactcaattgtggagga

SEQ ID NO: 3929 - DNA, 119 bp, homo sapiens
tagagatgtcacataataatggtttgccatcaactatatcaaataactcaattgtggaggaagatgtagtgattgtgtggtattggacaacaaaactggtatcaagaacttcaaaactt

SEQ ID NO: 3930 - DNA, 119 bp, homo sapiens
gaagatgtagttgattgtgtggtattggacaacaaaactggtatcaagaacttcaaaacttatggtaacccaatgataggttcagtcctatttcagcagatgcaacccatttttcaagt

SEQ ID NO: 3931 - DNA, 119 bp, homo sapiens
ttatggtaacaccaatgataggttcagtcctatttcagcagatgcaacccatttttcaagtaataactcggaactgacaaaaatatttctgaggctccagcttcagaagcatcctctac

SEQ ID NO: 3932 - DNA, 119 bp, homo sapiens
gtaataactctggaactgacaaaaatatttctgaggctccagcttcagaagcatcctctactgtcactgaagaattgacagactaattaatgaatttgctcagtgtggtttaacaaaac

SEQ ID NO: 3933 - DNA, 119 bp, homo sapiens
actgtcactgcaagaattgacagactaattaatgaatttgctcagtgtggtttaacaaaacttccaaaaatgaaaagaagattttgtcatctgttgccagcaaaaagaagaaaaaatct

SEQ ID NO: 3934 - DNA, 119 bp, homo sapiens
acttccaaaaaatgaaaagaagattttgtcatctgttgccagcaaaaagaagaaaaaatctcgacagcagcaataaattccaggtatcaagatggacagcttgcaaccaaaggaattct

SEQ ID NO: 3935 - DNA, 119 bp, homo sapiens
ctcgacagcaagcaataaattccaggtatcaagatggacagcttgcaaccaaaggaattcttaataagatgagagaataaacacaaaaggtagaattacaaaggaaatgatagtgcaag

SEQ ID NO: 3936 - DNA, 119 bp, homo sapiens
cttaataagaatgagagaataaacacaaaaggtagaattacaaaggaaatgatagtgcaagattcagatgtccccttaaaggagggatactttgtgaggaagacctccagaaaagtgat

SEQ ID NO: 3937 - DNA, 119 bp, homo sapiens
agattcagatagtccccttaaaggagggatactttgtgaggaagacctccagaaaagtgatactgtaatgaatcaaatactttttgttccaaaagtaatctcaattccacgatttccaa

SEQ ID NO: 3938 - DNA, 119 bp, homo sapiens
atactgtaattgaatcaaatactttttgttccaaaagtaatctcaattccacgatttccaagaatttcctagaaataaattaaatactactcaaaattccaaggttcaaggacttttaa

SEQ ID NO: 3939 - DNA, 119 bp, homo sapiens
aagaatttccatagaaataaattaaatactactcaaaattccaaggttcaaggacttttaaccaaaagaaatctagatcactaaataaaataagcttaggagcacctaaaaaaagagaa

SEQ ID NO: 3940 - DNA, 119 bp, homo sapiens
aaccaaaagaaaatctagatcactaaataaaataagcttaggagcacctaaaaaaagagaaatcggtcaagagataaagtgtttcctcacaatgaatctaaatattgcaaaagtacttt

SEQ ID NO: 3941 - DNA, 119 bp, homo sapiens
aaatcggtcaaagagataaagtgtttcctcacaatgaatctaaatattgcaaaagtacttttgaaaacaaagtttatttcatgtatttaacatccttgagcaaaaacccaaagattttt

SEQ ID NO: 3942 - DNA, 119 bp, homo sapiens
tttgaaaacaaaagtttatttcatgtatttaacatccttgagcaaaaacccaaagatttttatgcaccgaatctcaagcagaagtggcatctgggtatttgagaggaatggcaaagaag

SEQ ID NO: 3943 - DNA, 119 bp, homo sapiens
ttatgcaccgcaatctcaagcagaagtggcatctgggtatttgagaggaatggcaaagaagagtttagttcaaaagttactgattcacacataactttaaaaagccagaaaaaacgtaa

SEQ ID NO: 3944 - DNA, 119 bp, homo sapiens
agagtttagtttcaaaagttactgattcacacataactttaaaaagccagaaaaaacgtaaaggggataagtgaaagcaagtgctattttaagtaaacaacatgctacaaccagggcaa

SEQ ID NO: 3945 - DNA, 119 bp, homo sapiens
aaaggggataaagtgaaagcaagtgctattttaagtaaacaacatgctacaaccagggcaaattctttacttctttgaaaaaacctgattttcctgaggctattgctcatcattcaatt

SEQ ID NO: 3946 - DNA, 119 bp, homo sapiens
aaattctttagcttctttgaaaaaacctgattttcctgaggctattgctcatcattcaattcaaaattaatacagagttggttgcagaacataaatccatatccaactttaaagcctat

SEQ ID NO: 3947 - DNA, 119 bp, homo sapiens
ttcaaaattatatacagagttggttgcagaacataaatccatatccaactttaaagcctataaaatcagtccagtatgtagaaatgaaacgagtgtggtaaattgtagcaataatagtt

SEQ ID NO: 3948 - DNA, 119 bp, homo sapiens
ataaaatcagctccagtatgtagaaatgaaacgagtgtggtaaattgtagcaataatagtttttcagggatgatccccatacaaattctggaaaaataagtaattttgttatggaaagt

SEQ ID NO: 3949 - DNA, 119 bp, homo sapiens
tttttcagggaatgatccccatacaaattctggaaaaataagtaattttgttatggaaagtaataagcaataactaaaattgccggtttgacaggagataatctatgtaaagagggaga

SEQ ID NO: 3950 - DNA, 119 bp, homo sapiens
gtaataagcacataactaaaattgccggtttgacaggagataatctatgtaaagagggagataagtctttattgccaatgacactggtgaagaagatctccatgagacacaggttggat

SEQ ID NO: 3951 - DNA, 119 bp, homo sapiens
gataagtcttttattgccaatgacactggtgaagaagatctccatgagacacaggttggatctctgaatatgcttatttggttcccctgcatgaacactgtactttgtcacagtcagct

SEQ ID NO: 3952 - DNA, 119 bp, homo sapiens
atctctgaatgatgcttatttggttcccctgcatgaacactgtactttgtcacagtcagctattaatgacataatactaaaagtcatatagctgctgaaaaatcaggaccagagaaaaa

SEQ ID NO: 3953 - DNA, 119 bp, homo sapiens
ctattaatgatcataatactaaaagtcatatagctgctgaaaaatcaggaccagagaaaaaacttgtttccaggaaataaacctagctagaaaaaggcaaagtgtagaggctgccattc

SEQ ID NO: 3954 - DNA, 119 bp, homo sapiens
aaacttgtttaccaggaaataaacctagctagaaaaaggcaaagtgtagaggctgccattcaagtagatctatagaagaggaaactccaaaagacctcttaccagtcctgatgcttcac

SEQ ID NO: 3955 - DNA, 119 bp, homo sapiens
tcaagtagatcctatagaagaggaaactccaaaagacctcttaccagtcctgatgcttcaccaattgcagcttcagttcctggtattcacaagactcagaatggagttgttcaaatgcc

SEQ ID NO: 3956 - DNA, 119 bp, homo sapiens
accaattgcaagcttcagttcctggtattcacaagactcagaatggagttgttcaaatgccaggttcactgcaggtgttccctttcattctgcaatatgtaattcatccactaatctcc

SEQ ID NO: 3957 - DNA, 119 bp, homo sapiens
ccaggttcacttgcaggtgttccctttcattctgcaatatgtaattcatccactaatctccttctagctggctcttggtgctaaacctaaagggaagtatgaatagcttctgtcaagtt

SEQ ID NO: 3958 - DNA, 119 bp, homo sapiens
ccttctagcttggctcttggtgctaaacctaaagggaagtatgaatagcttctgtcaagttgatgctcaaaggctaccaacaaatcttcagaaacacttgcattgttggagattctaaa

SEQ ID NO: 3959 - DNA, 119 bp, homo sapiens
ttgatgctcacaaggctaccaacaaatcttcagaaacacttgcattgttggagattctaaagcacatagtatcacagaggaagctgatgacttgaaagctgctgttgccaatttagtgg

SEQ ID NO: 3960 - DNA, 119 bp, homo sapiens
aagcacatagctatcacagaggaagctgatgacttgaaagctgctgttgccaatttagtggagtcaactcaagccactttggactcagtgagaaagaacaagacatggttccaatagat

SEQ ID NO: 3961 - DNA, 119 bp, homo sapiens
ggagtcaactacaagccactttggactcagtgagaaagaacaagacatggttccaatagatctttctgcaattgttccacggtcaacattcagagtgttcctaagtgcagtgaaaatga

SEQ ID NO: 3962 - DNA, 119 bp, homo sapiens
atctttctgcaaattgttccacggtcaacattcagagtgttcctaagtgcagtgaaaatgaaagaacacaggaatctcctctttggatggaggttgctctgccagtgaggcatgtgccc

SEQ ID NO: 3963 - DNA, 119 bp, homo sapiens
gaaagaacacaaggaatctcctctttggatggaggttgctctgccagtgaggcatgtgcccctgaagtcgtgttttggaagtgacttgctctccatgtgagatgtgcactgtaaataag

SEQ ID NO: 3964 - DNA, 119 bp, homo sapiens
ccctgaagtctgtgttttggaagtgacttgctctccatgtgagatgtgcactgtaaataaggcttattcccaaaagagacatgtaaccccagtgacactttttttcctagtgatggtta

SEQ ID NO: 3965 - DNA, 119 bp, homo sapiens
aggcttattctccaaaagagacatgtaaccccagtgacactttttttcctagtgatggttatggtgtggtcagacttctatgaataaggcttgtttcctaggagaggtctgttcactta

SEQ ID NO: 3966 - DNA, 119 bp, homo sapiens
tatggtgtggatcagacttctatgaataaggcttgtttcctaggagaggtctgttcacttactgatacttgttttctgataaggcttgtgctcaaaaggagaaccatacctatgaggga

SEQ ID NO: 3967 - DNA, 119 bp, homo sapiens
tactgatactgtgttttctgataaggcttgtgctcaaaaggagaaccatacctatgagggagcttgcccattgatgagacctacgttcctgtcaatgtctgcaataccattgacttttt

SEQ ID NO: 3968 - DNA, 119 bp, homo sapiens
gagcttgcccaattgatgagacctacgttcctgtcaatgtctgcaataccattgactttttaaactccaagaaaacacatatactgataacttggattcaactgaagagttagaaagag

SEQ ID NO: 3969 - DNA, 119 bp, homo sapiens
ttaaactccaaagaaaacacatatactgataacttggattcaactgaagagttagaaagaggtgatgacttcagaaagatctaaatattttgacagaccctgaatataaaaatggattt

SEQ ID NO: 3970 - DNA, 119 bp, homo sapiens
aggtgatgacattcagaaagatctaaatattttgacagaccctgaatataaaaatggatttaatacattgtgtcacatcaaaatgtcagtaatttaagctcctgtggcctttgcctaag

SEQ ID NO: 3971 - DNA, 119 bp, homo sapiens
ttaatacattggtgtcacatcaaaatgtcagtaatttaagctcctgtggcctttgcctaagtgaaaaagagcagaacttgataagaaacatagttctctagatgattttgaaaattgtt

SEQ ID NO: 3972 - DNA, 119 bp, homo sapiens
agtgaaaaagaagcagaacttgataagaaacatagttctctagatgattttgaaaattgttcactaaggagtttcaggatgaaaatgcatatacttcctttgatatggaagaaccacgg

SEQ ID NO: 3973 - DNA, 119 bp, homo sapiens
ttcactaaggaagtttcaggatgaaaatgcatatacttcctttgatatggaagaaccacggacttctgagaaccaggctcaataaccaacagcatgacatcaagtgaaagaaacatttc

SEQ ID NO: 3974 - DNA, 119 bp, homo sapiens
ggacttctgaagaaccaggctcaataaccaacagcatgacatcaagtgaaagaaacatttcagaattggatcttttgaagaattagaaaaccatgacactgatatctttaatacagtgg

SEQ ID NO: 3975 - DNA, 119 bp, homo sapiens
tcagaattggaatcttttgaagaattagaaaaccatgacactgatatctttaatacagtggtaaatggagagagcaagccactgaagaattaatccaagaagaggtagaggctagtaaa

SEQ ID NO: 3976 - DNA, 119 bp, homo sapiens
ggtaaatggaggagagcaagccactgaagaattaatccaagaagaggtagaggctagtaaaactttagattgatagacatctctagtaagaatattatggaagaaaaaagaatgaacgg

SEQ ID NO: 3977 - DNA, 119 bp, homo sapiens
aaactttagaattgatagacatctctagtaagaatattatggaagaaaaaagaatgaacggtataattttgaaataatcagtaagaggctggcaacaccaccatctttagatttttgct

SEQ ID NO: 3978 - DNA, 119 bp, homo sapiens
ggtataatttatgaaataatcagtaagaggctggcaacaccaccatctttagatttttgctatgattctagcaaaatagtgaaaaggagaccaatgaaggagaaactaagatggtaaaa

SEQ ID NO: 3979 - DNA, 119 bp, homo sapiens
ctatgattctaagcaaaatagtgaaaaggagaccaatgaaggagaaactaagatggtaaaaatgatggtaaaactatggaaactggaagttattcagagtcctctcctgatttaaaaaa

SEQ ID NO: 3980 - DNA, 119 bp, homo sapiens
aaatgatggtgaaaactatggaaactggaagttattcagagtcctctcctgatttaaaaaaatgcatcaaagtccagtgacttctgattggtcagactatcggcctgacagtgacagtg

SEQ ID NO: 3981 - DNA, 119 bp, homo sapiens
aaatgcatcaaaagtccagtgacttctgattggtcagactatcggcctgacagtgacagtgagcagccaataaaacatccagtgatgatcccaatgacagtggcgaacttacccaagag

SEQ ID NO: 3982 - DNA, 119 bp, homo sapiens
tgagcagccatataaaacatccagtgatgatcccaatgacagtggcgaacttacccaagagaaagaataaacataggatttgttaaaagggcaatagaaaaactgtacggtaaagcaga

SEQ ID NO: 3983 - DNA, 119 bp, homo sapiens
agaaagaatataacataggatttgttaaaagggcaatagaaaaactgtacggtaaagcagatattatcaaccatctttttttcctgggtctacccgcaaatctcaggtttgtccttata

SEQ ID NO: 3984 - DNA, 119 bp, homo sapiens
gatattatcaaaccatctttttttcctgggtctacccgcaaatctcaggtttgtccttataattctgtgaatttcagtgttccaggaaagcaagtctttatgattctgaagggcagtca

SEQ ID NO: 3985 - DNA, 119 bp, homo sapiens
taattctgtggaatttcagtgttccaggaaagcaagtctttatgattctgaagggcagtcatttggctctctgaacaggtatctagtagttcatctatgttgcaggaattccaggagga

SEQ ID NO: 3986 - DNA, 119 bp, homo sapiens
catttggctcttctgaacaggtatctagtagttcatctatgttgcaggaattccaggaggaaagacaagtaagtgtgatgttagtgctgtgagggacaattattgtaggggtgacattg

SEQ ID NO: 3987 - DNA, 119 bp, homo sapiens
gaaagacaagataagtgtgatgttagtgctgtgagggacaattattgtaggggtgacattgtagaacctgtacaaaacaaaatgatgatagcagaatcctcacagacatagaggaagga

SEQ ID NO: 3988 - DNA, 119 bp, homo sapiens
tgtagaacctggtacaaaacaaaatgatgatagcagaatcctcacagacatagaggaaggagtactgatgacaaaggcaaatggcttctgaaagaaaatcatttgctaaggatgtcatc

SEQ ID NO: 3989 - DNA, 119 bp, homo sapiens
gagtactgattgacaaaggcaaatggcttctgaaagaaaatcatttgctaaggatgtcatctgaaaatctggcatgtgtggcaatgcagacaccacatcagtggacaccctacttgata

SEQ ID NO: 3990 - DNA, 119 bp, homo sapiens
tctgaaaatcctggcatgtgtggcaatgcagacaccacatcagtggacaccctacttgataataacagcgtgaggtaccatattcacattttggtaatttggccccaggcccaacgatg

SEQ ID NO: 3991 - DNA, 119 bp, homo sapiens
taataacagcagtgaggtaccatattcacattttggtaatttggccccaggcccaacgatggatgaacttcctcttcagaactcgaggaactgactcaaccccttgaactaaaatgcaa

SEQ ID NO: 3992 - DNA, 119 bp, homo sapiens
tggatgaactctcctcttcagaactcgaggaactgactcaaccccttgaactaaaatgcaattactttacatgcctcatggtagtgactcagaaccttttcatgaggacttgctggatg

SEQ ID NO: 3993 - DNA, 119 bp, homo sapiens
aattactttaacatgcctcatggtagtgactcagaaccttttcatgaggacttgctggatgttcgcaataaacctgtgccaaggaaagaatagcaaatcatcatacagaggagaagggt

SEQ ID NO: 3994 - DNA, 119 bp, homo sapiens
tgttcgcaatgaaacctgtgccaaggaaagaatagcaaatcatcatacagaggagaagggtagtcatcatcagaaagagtatgcacatctgtcactcattcctttatttctgctggtaa

SEQ ID NO: 3995 - DNA, 119 bp, homo sapiens
gtagtcatcagtcagaaagagtatgcacatctgtcactcattcctttatttctgctggtaacaaagtctccctgtctctgatgatgctattaaaaaccaaccattgcctggcagtaata

SEQ ID NO: 3996 - DNA, 119 bp, homo sapiens
aacaaagtctaccctgtctctgatgatgctattaaaaaccaaccattgcctggcagtaatatgattcatgtacacttcaggaagctgactctttggataaactgtatgctctttgtggt

SEQ ID NO: 3997 - DNA, 119 bp, homo sapiens
tatgattcatggtacacttcaggaagctgactctttggataaactgtatgctctttgtggtcaacattgccaatactaactgttattatccaacccatgaatgaggaagaccgaggatt

SEQ ID NO: 3998 - DNA, 119 bp, homo sapiens
gtcaacattgcccaatactaactgttattatccaacccatgaatgaggaagaccgaggatttgcatatccaaagaatctgatattgaaaatttcttgggtttttatttatggatgaaaa

SEQ ID NO: 3999 - DNA, 119 bp, homo sapiens
tttgcatatcgcaaagaatctgatattgaaaatttcttgggtttttatttatggatgaaaatacacccaatttacttcagacagacaaaaatgtgttcagggaagagaacaataaagca

SEQ ID NO: 4000 - DNA, 119 bp, homo sapiens
aatacacccatatttacttcagacagacaaaaatgtgttcagggaagagaacaataaagcaagtatgagcaaaatcttattgataatgccattggtgatatatttgatcagttttattt

SEQ ID NO: 4001 - DNA, 119 bp, homo sapiens
caagtatgagacaaaatcttattgataatgccattggtgatatatttgatcagttttatttcagtaacaatttgacttgatgggtaaaagaagaaaacaaaaaagaattaacttcttgg

SEQ ID NO: 4002 - DNA, 119 bp, homo sapiens
ttcagtaacacatttgacttgatgggtaaaagaagaaaacaaaaaagaattaacttcttggggttagagaagaaggtaatttaaagaaatttcaaccagatttgaaggaaaggttttgt

SEQ ID NO: 4003 - DNA, 119 bp, homo sapiens
ggggttagaggaagaaggtaatttaaagaaatttcaaccagatttgaaggaaaggttttgtatgaatttttgcacacatcattgttagttgtgggtaatgtggattcaaatacacaaga

SEQ ID NO: 4004 - DNA, 119 bp, homo sapiens
gtatgaatttcttgcacacatcattgttagttgtgggtaatgtggattcaaatacacaagacctcagcgtcagacaaatgaaatctttaaagcagtcgatgagaataacaacttattaa

SEQ ID NO: 4005 - DNA, 119 bp, homo sapiens
gacctcagcggtcagacaaatgaaatctttaaagcagtcgatgagaataacaacttattaaataacagatccagggctcaagaacaaatctcaaccaagtagtaagagaaaatatcaac

SEQ ID NO: 4006 - DNA, 119 bp, homo sapiens
aaataacagattccagggctcaagaacaaatctcaaccaagtagtaagagaaaatatcaactgtcattattctttgaaatgcttggtcaagcttgcctcttagatatttgccaagttga

SEQ ID NO: 4007 - DNA, 119 bp, homo sapiens
actgtcattacttctttgaaatgcttggtcaagcttgcctcttagatatttgccaagttgagacctcctaaatattagcaacagaaatattttagaactttgtatgtttgagggtgaaa

SEQ ID NO: 4008 - DNA, 119 bp, homo sapiens
gagacctccttaaatattagcaacagaaatattttagaactttgtatgtttgagggtgaaaatcttttctttgggaagaggaagacatattaaatttaactgatcttgaaagcagtaga

SEQ ID NO: 4009 - DNA, 119 bp, homo sapiens
aaatcttttcatttgggaagaggaagacatattaaatttaactgatcttgaaagcagtagagaacaagagatttataatttcaatatcagcacactcattctttgtcaattcatttttt

SEQ ID NO: 4010 - DNA, 119 bp, homo sapiens
gagaacaagaagatttataatttcaatatcagcacactcattctttgtcaattcattttttcccatgagtgaagcacatgtgacgaatacggactagataacctctaagaattttccac

SEQ ID NO: 4011 - DNA, 119 bp, homo sapiens
ttcccatgagatgaagcacatgtgacgaatacggactagataacctctaagaattttccacttcttcaaatgaacttactctagaaagcttacccttggataaccagtttgactttcat

SEQ ID NO: 4012 - DNA, 119 bp, homo sapiens
acttcttcaaaatgaacttactctagaaagcttacccttggataaccagtttgactttcataatgtctcgttttttgtttttccaacaattacagactcaggttctcttattttggaag

SEQ ID NO: 4013 - DNA, 119 bp, homo sapiens
ataatgtctctgttttttgtttttccaacaattacagactcaggttctcttattttggaagtttctatcggttttgttctgaacttacattttttttttttttggtatctatgattttt

SEQ ID NO: 4014 - DNA, 119 bp, homo sapiens
agtttctatctggttttgttctgaacttacattttttttttttttggtatctatgattttttttgctcaggcatcaaaatgtgctaaggacaagaattatatcctttttaaaaaatgtt

SEQ ID NO: 4015 - DNA, 119 bp, homo sapiens
tttttgctcagggcatcaaaatgtgctaaggacaagaattatatcctttttaaaaaatgttgttagcttgtgtaaaatgtatattgactgtattggtgaataaattgaatagacataac

SEQ ID NO: 4016 - DNA, 119 bp, homo sapiens
ttgttagcttggtgtaaaatgtatattgactgtattggtgaataaattgaatagacataacctcaaagtcttcacttattctttttaactactgatttgataaaaagtatgattataag

SEQ ID NO: 4017 - DNA, 119 bp, homo sapiens
ttgatataacaattttgttgactttatttaatcctttcaaatctgcaatgttaaagaatcatccagttattatgaatgtccttatcaagctagatcactggtaaaatgagactgcaatg

SEQ ID NO: 4018 - DNA, 119 bp, homo sapiens
gttaaagaatcatccagttacttatgaatgtccttatcaagctagatcactggtaaaatgagactgcaagtggacttttgaaatgagtaaggcaaatgtagactctaactagtagagat

SEQ ID NO: 4019 - DNA, 119 bp, homo sapiens
tgaacagatgtgcagagatgtggcacattgccctaggttatacacaagtgggatttgaattctagcggatctgtgtccctcatgccatgtacactcatcaaaaaaatgagagccaaagg

SEQ ID NO: 4020 - DNA, 119 bp, homo sapiens
tttgaattctagcggaatctgtgtccctcatgccatgtacactcatcaaaaaaatgagagccaaaggataagcctgtctcaaagagaaccatctgagcacctacatccagactgggcct

SEQ ID NO: 4021 - DNA, 119 bp, homo sapiens
atgagagccaaaggataaagcctgtctcaaagagaaccatctgagcacctacatccagactgggcctgcgtgtgcagctggactcttcacttaatgaactcagattcaacattgcatta

SEQ ID NO: 4022 - DNA, 119 bp, homo sapiens
tccagactgggcctgcagtgtgcagctggactcttcacttaatgaactcagattcaacattgcattattacaacagaaagtgaaaagaacctaaatgctctatgatggtggttaaataa

SEQ ID NO: 4023 - DNA, 119 bp, homo sapiens
tcaacattgcattattcacaacagaaagtgaaaagaacctaaatgctctatgatggtggttaaataatataggaataggaatatgatggcatatacatagcattttaaaaatatattat

SEQ ID NO: 4024 - DNA, 119 bp, homo sapiens
ctaaaatagttttgaagaatatttatacataggaaaaaatgctattttttatgcattataataattttgaaataagaaatgtacgtgcaacaaatctacaaatatagtaaaatatagtg

SEQ ID NO: 4025 - DNA, 119 bp, homo sapiens
atgcattataataattttgtaaataagaaatgtacgtgcaacaaatctacaaatatagtaaaatatagtatgatctctctcaaaaaattgtgggaaagttgattttatattttttcctg

SEQ ID NO: 4026 - DNA, 119 bp, homo sapiens
aaatatagtaaaatatagtgatgatctctctcaaaaaattgtgggaaagttgattttatattttttcctaattgttggtgttttctacaataatgttttaaaattacagaaggcaaaag

SEQ ID NO: 4027 - DNA, 119 bp, homo sapiens
tgattttatattttttcctgaattgttggtgttttctacaataatgttttaaaattacagaaggcaaaaaaggcaaattcttaagatgtaaaatactcttaactcaaactacaaaactt

SEQ ID NO: 4028 - DNA, 119 bp, homo sapiens
aaaattacagaaggcaaaagaaggcaaattcttaagatgtaaaatactcttaactcaaactacaaaactcttcagtatcttacactaaattgaacctaaattaaacttacagttcattc

SEQ ID NO: 4029 - DNA, 119 bp, homo sapiens
aggtgaagagaaaaatgaactggcagtgtatttccatcatactagcaagatgtttatttaaaaacatttaaaactgttttttaaaaaacattctagttaagacgagataattcaatgtt

SEQ ID NO: 4030 - DNA, 119 bp, homo sapiens
tatttaaaaacatttaaaaactgttttttaaaaaacattctagttaagacgagataattcaatgttcaactaataattctataccattttaagagtctgaatttacttttaagtaaaaa

SEQ ID NO: 4031 - DNA, 119 bp, homo sapiens
taattcaatgttcaagctaataattctataccattttaagagtctgaatttacttttaagtaaaaaaagcagagaaaaagagtgaaggatacagaattatcttgattatgcactgctgt

SEQ ID NO: 4032 - DNA, 119 bp, homo sapiens
tttaagtaaaaaaaggcagagaaaaagagtgaaggatacagaattatcttgattatgcactgctgttacattcccatgctaaagaccccttttgtttcaataaaactatcaatatttac

SEQ ID NO: 4033 - DNA, 119 bp, homo sapiens
atgcactgctgttactattcccatgctaaagaccccttttgtttcaataaaactatcaatatttactgaaatgacagctctgaatcaaaggcaagagaaagagacctgtaaatagtgct

SEQ ID NO: 4034 - DNA, 119 bp, homo sapiens
atcaatatttactgagaatgacagctctgaatcaaaggcaagagaaagagacctgtaaatagtgctgttatactagttgcccccagtagttcccaggcctcacttccaagctgccttaa

SEQ ID NO: 4035 - DNA, 119 bp, homo sapiens
gtaaatagtgctgttcatactagttgcccccagtagttcccaggcctcacttccaagctgccttaagtatttttactttctgaatataaagccaactgtggaggggtcagacagctgag

SEQ ID NO: 4036 - DNA, 119 bp, homo sapiens
aagctgccttaagtaatttttactttctgaatataaagccaactgtggaggggtcagacagctgaggacgaacttcttaaaaattggcttcagagaaaagcataacattacaactgagg

SEQ ID NO: 4037 - DNA, 119 bp, homo sapiens
gttacaactgaggcatcaggtcttaaggtttaaaacagtctcataattgtcacattatcatattatgtcactctgaaaataaatgcacactcatcccagagtctccaaaatctttatct

SEQ ID NO: 4038 - DNA, 119 bp, homo sapiens
atattatgtcaactctgaaaataaatgcacactcatcccagagtctccaaaatctttatctttagaatcaaccttgttttaagaagtagtaaaatgaaggagcattgttagtagtcacc

SEQ ID NO: 4039 - DNA, 119 bp, homo sapiens
ctttagaatccaaccttgttttaagaagtagtaaaatgaaggagcattgttagtagtcacctgacaaaactgtccattattcttgacattaaaaattgaatgcaatgatttaaaaaaca

SEQ ID NO: 4040 - DNA, 119 bp, homo sapiens
cctgacaaaagctgtccattattcttgacattaaaaattgaatgcaatgatttaaaaaacataatacataacatttacataatatatttagaatcacatggtttccagtgattagattt

SEQ ID NO: 4041 - DNA, 119 bp, homo sapiens
cataatacattaacatttacataatatatttagaatcacatggtttccagtgattagatttcagtcatgctggaaaggagaagacagtggctaggagcacattccttataaaggataca

SEQ ID NO: 4042 - DNA, 119 bp, homo sapiens
ttcagtcatgcctggaaaggagaagacagtggctaggagcacattccttataaaggatacataaatggttacttaggatgactaatattaagaatttaaacacggtgcatttttttcct

SEQ ID NO: 4043 - DNA, 119 bp, homo sapiens
cataaatggtatacttaggatgactaatattaagaatttaaacacggtgcatttttttcctcaaaggaacaattttagtttctaaagagcatttacttctgacatctcgattcctgatt

SEQ ID NO: 4044 - DNA, 119 bp, homo sapiens
ctcaaaggaagcaattttagtttctaaagagcatttacttctgacatctcgattcctgatttcagtggcgcagactgtgtacttctgtgccacacttaggacaagtaaagtacacgtca

SEQ ID NO: 4045 - DNA, 119 bp, homo sapiens
tttcagtggctgcagactgtgtacttctgtgccacacttaggacaagtaaagtacacgtcaaataagaactactcttagcacagaaataacagaaaatatgctcacatcctatggtgtg

SEQ ID NO: 4046 - DNA, 119 bp, homo sapiens
caaataagaaactactcttagcacagaaataacagaaaatatgctcacatcctatggtgtgaggcatgggggccactctccacatagagcgcattctttgccactggtggctaatgtat

SEQ ID NO: 4047 - DNA, 119 bp, homo sapiens
tgaggcatggtgggccactctccacatagagcgcattctttgccactggtggctaatgtattgtcactataggtgcaccagtaagaggaatacaccatgaagacagcttggctttcaac

SEQ ID NO: 4048 - DNA, 119 bp, homo sapiens
attgtcactattaggtgcaccagtaagaggaatacaccatgaagacagcttggctttcaacttctggacttgataagtggtaagagaaaaatcagaaattcagcaaaaccatgccagag

SEQ ID NO: 4049 - DNA, 119 bp, homo sapiens
acttctggacattgataagtggtaagagaaaaatcagaaattcagcaaaaccatgccagagaagttcccattcatgtattcaaagccaacttcacatatgttttgaggcttgcaaaata

SEQ ID NO: 4050 - DNA, 119 bp, homo sapiens
agaagttccctattcatgtattcaaagccaacttcacatatgttttgaggcttgcaaaatacagaatgatacctaggagacgttctgtcaaagttgcaaactttcccctctgaaggaaa

SEQ ID NO: 4051 - DNA, 119 bp, homo sapiens
tacagaatgaatacctaggagacgttctgtcaaagttgcaaactttcccctctgaaggaaaatcaaaaattaatcagcccacctaatttcaaaagtccaatcacaaaattcacacactg

SEQ ID NO: 4052 - DNA, 119 bp, homo sapiens
aaatcaaaaaattaatcagcccacctaatttcaaaagtccaatcacaaaattcacacactgcttgacttcccaaatgatgctaaatgatggtttcgaaacaaatcatagcatcgttctt

SEQ ID NO: 4053 - DNA, 119 bp, homo sapiens
tgcttgactttcccaaatgatgctaaatgatggtttcgaaacaaatcatagcatcgttcttctaaccactgccaccaattgtacaaacagcataccagattttttgatttttactgggt

SEQ ID NO: 4054 - DNA, 119 bp, homo sapiens
ttctaaccacctgccaccaattgtacaaacagcataccagattttttgatttttactgggtggctgatactcaggttaggggaaaaatcatttttgtacttaatattcaaaactgactg

SEQ ID NO: 4055 - DNA, 119 bp, homo sapiens
gtggctgatatctcaggttaggggaaaaatcatttttgtacttaatattcaaaactgactgtcccactgggcatttttggagtagatggtgaatctccacaagaaaacccataagcacg

SEQ ID NO: 4056 - DNA, 119 bp, homo sapiens
tgtcccactgtggcatttttggagtagatggtgaatctccacaagaaaacccataagcacgctttcaccctggctcaaagcgagctaacagcccaggtttaaatccatgaaagcactga

SEQ ID NO: 4057 - DNA, 119 bp, homo sapiens
cgctttcacctctggctcaaagcgagctaacagcccaggtttaaatccatgaaagcactgagtaaactggaccaaactagctgctccagggccttgtttagttcaagtgcatccaactg

SEQ ID NO: 4058 - DNA, 119 bp, homo sapiens
gagtaaactgggaccaaactagctgctccagggccttgtttagttcaagtgcatccaactggcttattctagcactctgtttgcactcttcgcattctcttttctggaagccatgtctt

SEQ ID NO: 4059 - DNA, 119 bp, homo sapiens
cttaggagtctgcgaaacgcccacgctccacgtaactttctctgaaacattctctggaaagcttgtctttcctagccgaatctggattaccaaggcttccggaactcgcaggcttccgg

SEQ ID NO: 4060 - DNA, 119 bp, homo sapiens
agcttgtcttttcctagccgaatctggattaccaaggcttccggaactcgcaggcttccggagcgacgcggagccggaagtggctgaaaaaaaaaagaaaaagttacaccaacgagaac

SEQ ID NO: 4061 - DNA, 119 bp, homo sapiens
ggagcgacgcaggagccggaagtggctgaaaaaaaaaagaaaaagttacaccaacgagaactgcgctttgcggcgctgctgaaggcactggatggccaaacaaccgcgaacgccgacaa

SEQ ID NO: 4062 - DNA, 119 bp, homo sapiens
actgcgctttagcggcgctgctgaaggcactggatggccaaacaaccgcgaacgccgacaagccgaagaccgaagggccgaaaagccgaagcggacacccgcgcgcggtgattggccgg

SEQ ID NO: 4063 - DNA, 119 bp, homo sapiens
caggcagtgacatgtagccgttgaggatcgccactgccttctcgttctgtggtatgaatggcagtgtcttctagagagttagtgcttaagtttgaatgatggcaggcacttcaggattc

SEQ ID NO: 4064 - DNA, 119 bp, homo sapiens
cgttctgtggtatgaatggcagtgtctctctagagagttagtgcttaagtttgaatgatggcaggcactcaggattccagcacgtagtagggtttaagaacgtcttagttcttacctcc

SEQ ID NO: 4065 - DNA, 119 bp, homo sapiens
taggtaaaaagtgaatgtttatttgcattgaacagaaaatatgttctgggtgttagcaatgggattgaaaagaaaggataattagaaagatttaaaaagaaaaagaatttggtggcacc

SEQ ID NO: 4066 - DNA, 119 bp, homo sapiens
tgggattgaaaaagaaaggataattagaaagatttaaaaagaaaaagaatttggtggcaccaaatcaacataaaagagttcttgaattttcttagattttagtctgatggattggaaat

SEQ ID NO: 4067 - DNA, 119 bp, homo sapiens
ccaaatcaacaataaaagagttcttgaattttcttagattttagtctgatggattggaaataaattgatttatctgaaacaggatagcttgggggggaaaataactgccaggcgaaaag

SEQ ID NO: 4068 - DNA, 119 bp, homo sapiens
ataaattgatattatctgaaacaggatagcttgggggggaaaataactgccaggcgaaaagcataaattcaatggtcttgtattttaatatcatttgaataaattacagggtgtaaagg

SEQ ID NO: 4069 - DNA, 119 bp, homo sapiens
agcataaattgcaatggtcttgtattttaatatcatttgaataaattacagggtgtaaagggaaagcatttgctcacaagttgaggacttttgtccttttcttttcctattatcagatg

SEQ ID NO: 4070 - DNA, 119 bp, homo sapiens
gggaaagcatattgctcacaagttgaggacttttgtccttttcttttcctattatcagatgcttcagcctattctaccttttgtttctgggtttttaaatcaccctttttatacgcaat

SEQ ID NO: 4071 - DNA, 119 bp, homo sapiens
tgcttcagccctattctaccttttgtttctgggtttttaaatcaccctttttatacgcaattcactcttctgcatacaaactcccatttatcaaataaatactatttaacaatttgtcc

SEQ ID NO: 4072 - DNA, 119 bp, homo sapiens
attcactctttctgcatacaaactcccatttatcaaataaatactatttaacaatttgtccatattccctaaatcctgaaaaaaccaaccatcctttagtaaaacttgttatattttgt

SEQ ID NO: 4073 - DNA, 119 bp, homo sapiens
ccatattcccttaaatcctgaaaaaaccaaccatcctttagtaaaacttgttatattttgtgatactctacactacatgcaaaaacggtgactctatcaaatgatgcagtttattatag

SEQ ID NO: 4074 - DNA, 119 bp, homo sapiens
gtgatactctaacactacatgcaaaaacggtgactctatcaaatgatgcagtttattatagtgattgattgtacatggtttgctaaatgcatctatgttgtaggctttttggctaatat

SEQ ID NO: 4075 - DNA, 119 bp, homo sapiens
agtgattgatttgtacatggtttgctaaatgcatctatgttgtaggctttttggctaatatgatttgttaaaccctctcagcaaagtgctgttacagtgaccatctttggagacttgga

SEQ ID NO: 4076 - DNA, 119 bp, homo sapiens
atgatttgttaaaaccctctcagcaaagtgctgttacagtgaccatctttggagacttggaaatagcctattacacagaacttgatgttatacactaatggcatttattagaatggaat

SEQ ID NO: 4077 - DNA, 119 bp, homo sapiens
gaaatagcctcattacacagaacttgatgttatacactaatggcatttattagaatggaattctatatgattattacttccgacaccagcctggcctttgtagcctcctcacagcatgc

SEQ ID NO: 4078 - DNA, 119 bp, homo sapiens
attctatatgtattattacttccgacaccagcctggcctttgtagcctcctcacagcatgcaacgtcggaattatgctaatgctagctaattcatgaggacaacttcctaaagtgccct

SEQ ID NO: 4079 - DNA, 119 bp, homo sapiens
gcaacgtcggtaattatgctaatgctagctaattcatgaggacaacttcctaaagtgcccttaattaactggagattttgtaaacagctatacatgtaggttccggaaattgtggggat

SEQ ID NO: 4080 - DNA, 119 bp, homo sapiens
cttaattaacttggagattttgtaaacagctatacatgtaggttccggaaattgtggggatatgtcaattgacatgtgtagagtctgccttcctaacctcatcactttgttttactaaa

SEQ ID NO: 4081 - DNA, 119 bp, homo sapiens
atatgtcaatctgacatgtgtagagtctgccttcctaacctcatcactttgttttactaaagcttaatttaaacaagaagttccaatctgatatcttttccagcaagtgcttgaggaag

SEQ ID NO: 4082 - DNA, 119 bp, homo sapiens
aagcttaattttaaacaagaagttccaatctgatatcttttccagcaagtgcttgaggaagattctgatagtgtcactttagcctgtatcctccagtccaagtcccttgagccagatga

SEQ ID NO: 4083 - DNA, 119 bp, homo sapiens
agattctgataagtgtcactttagcctgtatcctccagtccaagtcccttgagccagatgagttaggtaattggtgtcttttaagttggttagaagagaaaatattgaagtttatttct

SEQ ID NO: 4084 - DNA, 119 bp, homo sapiens
gagttaggtagattggtgtcttttaagttggttagaagagaaaatattgaagtttatttctttagtaaaggtacaatttttccaatatgttcctgcaatgtgattttgccagtttgcta

SEQ ID NO: 4085 - DNA, 119 bp, homo sapiens
ctttagtaaagggtacaatttttccaatatgttcctgcaatgtgattttgccagtttgctaattctgccaccaacattggtcttcaggggactgttccaaaaatcagacttctcattca

SEQ ID NO: 4086 - DNA, 119 bp, homo sapiens
taattctgccgaccaacattggtcttcaggggactgttccaaaaatcagacttctcattcagaaagcttatgatctctgcttcccttcagtcccagctgctggggattttttgatatta

SEQ ID NO: 4087 - DNA, 119 bp, homo sapiens
cagaaagcttcatgatctctgcttcccttcagtcccagctgctggggattttttgatattacagtgactatcatcctcatttgaatgaaaataatctgatttttgacctattacattaa

SEQ ID NO: 4088 - DNA, 119 bp, homo sapiens
tacagtgactcatcatcctcatttgaatgaaaataatctgatttttgacctattacattaaaatcttatccctttacatgtaagaggtgaaattcataaacctagaacaattagccagg

SEQ ID NO: 4089 - DNA, 119 bp, homo sapiens
aaaatcttataccctttacatgtaagaggtgaaattcataaacctagaacaattagccaggctttagaggccaaagaagaaattaaacacaataaaaattaagagaaaaggttagtgaa

SEQ ID NO: 4090 - DNA, 119 bp, homo sapiens
ggctttagagtgccaaagaagaaattaaacacaataaaaattaagagaaaaggttagtgaatcacatcaagccaagagcaagctaataaaactggaaggaagagacatcatcaggaaag

SEQ ID NO: 4091 - DNA, 119 bp, homo sapiens
aatcacatcacagccaagagcaagctaataaaactggaaggaagagacatcatcaggaaagaaccaaagaaaaggaaacttactacatacaattagaagatatagcaattgcataaagt

SEQ ID NO: 4092 - DNA, 119 bp, homo sapiens
agaaccaaaggaaaaggaaacttactacatacaattagaagatatagcaattgcataaagttaatgaaacggagaatagggatggcttttaataatcttcttattaccactgcatgaaa

SEQ ID NO: 4093 - DNA, 119 bp, homo sapiens
gttaatgaaaacggagaatagggatggcttttaataatcttcttattaccactgcatgaaatcacactccagataagtcctagaaactaagctagggatttgcctttcgtttctcaagg

SEQ ID NO: 4094 - DNA, 119 bp, homo sapiens
aatcacactctcagataagtcctagaaactaagctagggatttgcctttcgtttctcaagggtcccagctgtcgtttcccctcgttaatttaagttacaatcctaggtacaatcacttt

SEQ ID NO: 4095 - DNA, 119 bp, homo sapiens
gggtcccagcatgtcgtttcccctcgttaatttaagttacaatcctaggtacaatcactttgggaactactatatcacatctaaagataatcaaacatttattgcttagccttttcttt

SEQ ID NO: 4096 - DNA, 119 bp, homo sapiens
ttgggaactagctatatcacatctaaagataatcaaacatttattgcttagccttttctttgacttcaaagtaagaacctcttctccgccctcagcagaaggagccatgctgataatga

SEQ ID NO: 4097 - DNA, 119 bp, homo sapiens
ttgacttcaatagtaagaacctcttctccgccctcagcagaaggagccatgctgataatgagtgattgagagaagtccctctgggtaaaactgtccttctaactgagtggggttcttcc

SEQ ID NO: 4098 - DNA, 119 bp, homo sapiens
gagtgattgacgagaagtccctctgggtaaaactgtccttctaactgagtggggttcttcctccactgcataggacttgctgtacattcaggtctgtccagtggcttctcttctggctc

SEQ ID NO: 4099 - DNA, 119 bp, homo sapiens
ctgagctgcttgctctcgcttcaatttgagtagtcttgcaagacttgcttttcctgtgcctcctaggaggttttaaacagtttgggtgtctcttctttcggtgggaagaggagggcaag

SEQ ID NO: 4100 - DNA, 119 bp, homo sapiens
gtgcctcctaggagagttttaaacagtttgggtgtctcttctttcggtgggaagaggagggcaagatctttcttggaggggttgcttctgcggtcttagccttctgctttaaaagcact

SEQ ID NO: 4101 - DNA, 119 bp, homo sapiens
ctggctttcttcatgaggatcctttcagaatctggataatgcactagaatttcttggagggtctttttgctagagttaaaagattggcaaacccgtgggccaccacattggcagttcga

SEQ ID NO: 4102 - DNA, 119 bp, homo sapiens
gaatctggataatgcactagaatttcttggagggtctttttgtctagagttaaaagattggcaaacccggggccaccacattggcagttcgacggtttcctcctcctgctgctagaagg

SEQ ID NO: 4103 - DNA, 119 bp, homo sapiens
ctagcattctttgagagtcccatgtatattcataccaagtccgaactcgcttttgcacaagtttaggaaggagtaattgttcatgtaggcaatggtgtcatccatgcaggcgcggaagt

SEQ ID NO: 4104 - DNA, 119 bp, homo sapiens
ccgaactcgcttttgcacaagtttaggaatggagtaattgttcatgtaggcaatggtgtcatccatgcagcgcggaagtagttctgattggctgtagctgctccaatcacatctctcat

SEQ ID NO: 4105 - DNA, 119 bp, homo sapiens
ctgaccaattaaactggagaacacaaaaactccagaaaaaaaattcaagagttgaaaaacaatttcaaaaaagtttgtggttctggaaggccaccaatggtaattaaagttcgaactgc

SEQ ID NO: 4106 - DNA, 119 bp, homo sapiens
acaaaaactccagaaaaaaaattcaagagttgaaaaacaatttcaaataaagtttgtggttctggaaggcaccaatggtaattaaagttcgaactgcccaataataacatctcagatac

SEQ ID NO: 4107 - DNA, 119 bp, homo sapiens
tcgtttccttccccatcatacacccatctagtagtgccaattccttcatagtttgaagcccagtaataacacaggcattaatgtgcagaataaacagcaagtatccagttgttcgaata

SEQ ID NO: 4108 - DNA, 119 bp, homo sapiens
tttccttccccatcatacacccatctagtagtgccaattccttcatagtttgaagcccagtaataaacaaggcattaatgtgcagaataaacagcaagtatccagttgttcgaataact

SEQ ID NO: 4109 - DNA, 119 bp, homo sapiens
tattatgtctcctcctcttacaaactggagtctgggctggataaatagcatatcataaaggtagatgattcacatatgatgtccgcaataagccagtagtgtatgttgtctgcggtttg

SEQ ID NO: 4110 - DNA, 119 bp, homo sapiens
atagcatatcataaaggtagatgatatcacatatgatgtccgcaataagccagtagtgtatgttgtctgggtttgatatgggaagacgaggcgcagtggtataaaacagcagttccagt

SEQ ID NO: 4111 - DNA, 119 bp, homo sapiens
ataagccagtagtgtatgttgtctgcggtttgatatgggaagacgaggcgcagtggtataaaacagcagtccagttataggcaagagtgacaagcaagagccacaggagatagagtcga

SEQ ID NO: 4112 - DNA, 119 bp, homo sapiens
ctgtgtatgaatctatgctgtttggaagtttaattcgctttaagtactctgttaaaggcatctttttgatttgaaccacaacagcctgtagtaatgttctgttggcttatcatcgcttt

SEQ ID NO: 4113 - DNA, 119 bp, homo sapiens
taattcgctttaagtactctgttaaaggcatctttttgactttgaaccacaacagcctgtagtaatgtttgttggcttatcatcgctttcttttactggtggtacagccgtgggctttg

SEQ ID NO: 4114 - DNA, 119 bp, homo sapiens
cagtttgtgggctggcttcgggtgaggagagatctccctctaccaactttttcttgtagagggctgttcttgacgcattcttttcaccaggttgtgtagctgggcatcggcatactcat

SEQ ID NO: 4115 - DNA, 119 bp, homo sapiens
ccctctaccaactttttcttgtagagggctgttctttgacgcattcttttcaccaggttgtgtagctggcatcggcatactcatttataacaggagctgcaggcggtttgttttgtggg

SEQ ID NO: 4116 - DNA, 119 bp, homo sapiens
ctgtttggaccttctttcccggggtccatttccttctgctctggcactgttccagttggttctgctgcatttgagggtcagggtttgtggtcagatctccagaggaatttttcttggag

SEQ ID NO: 4117 - DNA, 119 bp, homo sapiens
gaccttctttcccggggtccatttccttctgctctggcactgttccagttggttctgctgcattttgaggtcagggtttgtggtcagatctccagaggaatttttcttggagagtttgt

SEQ ID NO: 4118 - DNA, 119 bp, homo sapiens
ctgtgctgtggtttgctgagactgattacttgggtgagagccttcttcattccgacgagaactttgttcttctcattgttctctcctataggcttcaccttgttgacttttgtcagcga

SEQ ID NO: 4119 - DNA, 119 bp, homo sapiens
agaactttgttcattctcattgttctctcctataggcttcaccttgttgacttttgtcagcgatttaaaatcttctctgaggtggttctgaaaaccctctgtatttatgactgtgcctt

SEQ ID NO: 4120 - DNA, 119 bp, homo sapiens
aatcagctcagcgaagccgccgcagaggctgatggggggctggaggctgtgaggcttccagcgtcggtacatggcgacgcgcggtggggctggggtggcaatggcggtttggtccctct

SEQ ID NO: 4121 - DNA, 119 bp, homo sapiens
cagcgtcggtaccatggcgacgcgcggtggggctggggtggcaatggcggtttggtccctcttatccgccgggccgtgaccgcgttccttctgttgttcctccctcgcttcttacaggc

SEQ ID NO: 4122 - DNA, 119 bp, homo sapiens
ctcttatccgcccgggccgtgaccgcgttccttctgttgttcctccctcgcttcttacaggcccagacctctctttccctttccagcagccggagaagtgcgacaacaaccagtacttt

SEQ ID NO: 4123 - DNA, 119 bp, homo sapiens
aggcccagaccttctctttccctttccagcagccggagaagtgcgacaacaaccagtactttgatatctcgccctctcgtgtgttccttgtggagctaaccagaggcaagatgcccgag

SEQ ID NO: 4124 - DNA, 119 bp, homo sapiens
gtatatgccaatctaacatcttgtcaagctcttggaaatatgtgtgtgatgaacatgaattcttacgacttgccacatttgatgcatgtggactatttcagtttatctttgaaaatact

SEQ ID NO: 4125 - DNA, 119 bp, homo sapiens
aaatatgtgtgtgatgaacatgaattcttacgactttgccacatttgatgcatgtggactatttcagttatctttgaaaatactgctggactgagcactgttcattctatttcattttg

SEQ ID NO: 4126 - DNA, 119 bp, homo sapiens
tgtgagattcctatctctaagatcttaattgactttcccactcctatattttatgatgtgtaccttgaaatactgatgaaaatcaacatcaatatattttggctgtgcctgtgttaaac

SEQ ID NO: 4127 - DNA, 119 bp, homo sapiens
ccactcctatattttatgatgtgtaccttgaatatactgatgaaaatcaacatcaatatattttggctggcctgtgttaaacctaaatcttcaacataataagatatttgtgaaccaag

SEQ ID NO: 4128 - DNA, 119 bp, homo sapiens
acagcaactctggaaagtggcttctaactcggcgcattttcttagtggatgcagtaagtggacgagaaatgacttaggaactcagccaagagtaattcgagttgctactcaaatatcac

SEQ ID NO: 4129 - DNA, 119 bp, homo sapiens
caactctggaaagtggcttctaactcggcgcattttcttagtggatgcagtaagtggacgagaaaatgattaggaactcagccaagagtaattcgagttgctactcaaatatcactgag

SEQ ID NO: 4130 - DNA, 119 bp, homo sapiens
gtgagggtggtgtacgaagtgccactgttcctgtaagcatatggagaacatattttgtagcaaatgaatgaatgaaattcagactgtgagaaaaattaattcactctttcaagtactta

SEQ ID NO: 4131 - DNA, 119 bp, homo sapiens
gccactgttcctgtaagcatatggagaacatattttgtagcaaatgaatggaatgaaattcagactgtggaaaaattaattcactctttcaagtacttactgtcctcttctttttggag

SEQ ID NO: 4132 - DNA, 119 bp, homo sapiens
gttgtgggattcaagaacttagcattaatggactcatcttctagtctttctagaaacccacctagctactagctccttatagctgcattttgagatatgcagtgtctgctgctctttgg

SEQ ID NO: 4133 - DNA, 119 bp, homo sapiens
gcattaatggactcatcttctagtctttctagaaacccacctagctacatagctccttatagctgcatttgagatatgcagtgtctgctgctctttggctagccattggaattatacag

SEQ ID NO: 4134 - DNA, 119 bp, homo sapiens
atgaaggttattctttcagcagtgtcctgtattatggaaatgaagctactcttcttatttttgatctgcgttcttctgtgttgtggatttggcttgccaaaattttattttagcatcct

SEQ ID NO: 4135 - DNA, 119 bp, homo sapiens
gtcctgtattatggaaatgaagctactcttcttatttttgatctgctgttcttctgtgttgtggatttgcttgccaaaattttattttagcatccttccttacatatctacaacaagag

SEQ ID NO: 4136 - DNA, 119 bp, homo sapiens
atttttagatatatccgtaatacagtaggacaaaagaatttggcatccaaaacattggtggatcaaagattttgatttaacttcctgaataaataacttaaagactcagtataatcatg

SEQ ID NO: 4137 - DNA, 119 bp, homo sapiens
tggatcaaagatttttgatttaacttcctgaataaataacttaaagactcagtataatcatggccaaaaaaagtcatgatatcaggttagtttgccatattttttaaaacttataatgc

SEQ ID NO: 4138 - DNA, 119 bp, homo sapiens
catggccaaaaaaaagtcatgatatcaggttagtttgccatattttttaaaacttataatgcagactatctgtttttgttttttatttgcagaaagatttatttttataacttgggaat

SEQ ID NO: 4139 - DNA, 119 bp, homo sapiens
atgcagactattctgtttttgttttttatttgcagaaagatttatttttataacttgggaatatataactgatataatagaaaatactgttttcccattgtgtgtagtatttaatgcag

SEQ ID NO: 4140 - DNA, 119 bp, homo sapiens
gaatatataacctgatataatagaaaatactgttttcccattgtgtgtagtatttaatgcagtaaataaaaattaatactgacagtgaggccaaaaaaaatctaaatgttgctttcagc

SEQ ID NO: 4141 - DNA, 119 bp, homo sapiens
gcagtaaataataaattaatactgacagtgaggccaaaaaaaatctaaatgttgctttcagcataatacttttaatgctaattaaaacagtccccatcatttgtctctgtagattattt

SEQ ID NO: 4142 - DNA, 119 bp, homo sapiens
cagcataatactttttaatgctaattaaaacagtccccatcatttgtctctgtagattattttataaacgagagctgcctgaatcttctcacattgacaaagtaatttgattccaagtt

SEQ ID NO: 4143 - DNA, 119 bp, homo sapiens
attttataaactgagagctgcctgaatcttctcacattgacaaagtaatttgattccaagtttaagactgttttcagtttgatattttcatgttttgtgtgcttatggttaaataaatg

SEQ ID NO: 4144 - DNA, 119 bp, homo sapiens
agtttaagactagttttcagtttgatattttcatgttttgtgtgcttatggttaaataaatgttgaaagtattttcaagtttacttagaaattttaaattgtattattgctgattcaat

SEQ ID NO: 4145 - DNA, 119 bp, homo sapiens
aatgttgaaagatattttcaagtttacttagaaattttaaattgtattattgctgattcaatttgcatcttctaattgctcatcctctttggcagtggattaattcactgttgggttaa

SEQ ID NO: 4146 - DNA, 119 bp, homo sapiens
caatttgcatcattctaattgctcatcctctttggcagtggattaattcactgttgggttaatatgcattcatgaaatgatatcttttcattcctttgtatacctgtattaggtcagta

SEQ ID NO: 4147 - DNA, 119 bp, homo sapiens
ttaatatgcatctcatgaaatgatatcttttcattcctttgtatacctgtattaggtcagtatacgcttccatgaaatatatttgcatttctaatatagtttacatttattaagttata

SEQ ID NO: 4148 - DNA, 119 bp, homo sapiens
agtatacgctttccatgaaatatatttgcatttctaatatagtttacatttattaagttataacgtatgcatttttcccaatatcattttttatacattttaattacttaatgttttaa

SEQ ID NO: 4149 - DNA, 119 bp, homo sapiens
tataacgtatgacatttttcccaatatcattttttatacattttaattacttaatgttttaagagttctttccagagttttgcttttcaattacgtttaaagactgtaaataacaaaca

SEQ ID NO: 4150 - DNA, 119 bp, homo sapiens
ctcagatgaaaatatatactaaaacatttggtatttctgttttctgtttcattaatgtatatctgatgggtaccatttaggaatataacattattggggcagaggtcccagccattgcc

SEQ ID NO: 4151 - DNA, 119 bp, homo sapiens
taatgtatatctgatggagtaccatttaggaatataacattattggggcagaggtcccagccattgccaagttgaatcttttacatttccctgaatcttgaggatgactgaaaaggaag

SEQ ID NO: 4152 - DNA, 119 bp, homo sapiens
ggtcccagccattgccaaagttgaatcttttacatttccctgaatcttgaggatgactgaaaaggaagttttgaaactgcagtttctgaaggatcacagtacaggaatgcctttataaa

SEQ ID NO: 4153 - DNA, 119 bp, homo sapiens
atgactgaaaaggaagtctttgaaactgcagtttctgaaggatcacagtacaggaatgcctttataaaactgcagagataaatacatgtacttatatggcatggatatttaaaaccact

SEQ ID NO: 4154 - DNA, 119 bp, homo sapiens
ggaatgcctttataaaagctgcagagataaatacatgtacttatatggcatggatatttaaaaccactcctcagaagcatatgaaagaaattcaaccatcattcaacatagaagaagtt

SEQ ID NO: 4155 - DNA, 119 bp, homo sapiens
gatatttaaaaccactcactcagaagcatatgaaagaaattcaaccatcattcaacatagaagaagttattttagtgcaaaagtttttaagtattaaatttcacaataaaggatcaatt

SEQ ID NO: 4156 - DNA, 119 bp, homo sapiens
caacatagaagaagttaattttagtgcaaaagtttttaagtattaaatttcacaataaaggatcaattgcttacttgctgataaattaaaacagaaaacatttaaaatcattctaaatt

SEQ ID NO: 4157 - DNA, 119 bp, homo sapiens
caataaaggatcaattggcttacttgctgataaattaaaacagaaaacatttaaaatcattctaaatttgtatgatatttttattttggctaggtgcataaaaatgtgttcagattttc

SEQ ID NO: 4158 - DNA, 119 bp, homo sapiens
aggattagtttcttagaatgtgcttttaacattgagtaaactatgaatgctggaatttttatttttagttaaaatatctgccccaaaatatatttttttcttgctaataaattaataat

SEQ ID NO: 4159 - DNA, 119 bp, homo sapiens
tcttagaatgtgcttttaacattgagtaaactatgaatgctggaatttttatttttagtttaaaatatcgccccaaaatatatttttttcttgctaataaattaataatatgatattaa

SEQ ID NO: 4160 - DNA, 119 bp, homo sapiens
ttaatgtccatccaaatgaatattttactataaaataaaagaagtaaataatacagagtaattatttatacttattcatttctaggcaggatgagggtctgagagtataatacagttca

SEQ ID NO: 4161 - DNA, 119 bp, homo sapiens
gtaattatttattacttattcatttctaggcaggatgagggtctgagagtataatacagttcaaataaaaagttacctggcttaaaaatagctacttgctaaagatagaaaattattat

SEQ ID NO: 4162 - DNA, 119 bp, homo sapiens
agttcaaataaagaagttacctggcttaaaaatagctacttgctaaagatagaaaattattataaatctaaaaacaaacaggcaaaacatcttgaaagttttataggctttgcatttta

SEQ ID NO: 4163 - DNA, 119 bp, homo sapiens
tattataaatcttaaaaacaaacaggcaaaacatcttgaaagttttataggctttgcattttaaaattaagatgattagaaactatacttttcttctatactgatactaaaatagtttc

SEQ ID NO: 4164 - DNA, 119 bp, homo sapiens
attttaaaattatagatgattagaaactatacttttcttctatactgatactaaaatagtttcattttcgcttaaattacaacagttaataatttatctgactgtatataaacataata

SEQ ID NO: 4165 - DNA, 119 bp, homo sapiens
agtttcattttcagcttaaattacaacagttaataatttatctgactgtatataaacataatattcttttacattttagtttaaaatagtacaatattaaaaagcttataaattgccaa

SEQ ID NO: 4166 - DNA, 119 bp, homo sapiens
ataatattctttctacattttagtttaaaatagtacaatattaaaaagcttataaattgccaataaacagggaactcacacatacatttctgacattgggggattattataattattat

SEQ ID NO: 4167 - DNA, 119 bp, homo sapiens
tgccaataaacatgggaactcacacatacatttctgacattgggggattattataattattatgttatgaatgccaaacataggcaatgtatgtaagttttaggatagttataatgaaa

SEQ ID NO: 4168 - DNA, 119 bp, homo sapiens
tattatgttatggaatgccaaacataggcaatgtatgtaagttttaggatagttataatgaaataataaagggaaaaaaaaaccaggacaactttgtcccttcaaagtagaggcaatgt

SEQ ID NO: 4169 - DNA, 119 bp, homo sapiens
ttttttttttcaaattagtgatttagtaaatttgcttactggaataaaaaagaaagaattgcaccattagaataatgtgtcaaattctatgaggttctaaatgtgtggatcttgttgct

SEQ ID NO: 4170 - DNA, 119 bp, homo sapiens
gaataaaaaagaaagaattgcaccattatgaataatgtgtcaaattctatgaggttctaaatgtgtggacttgttgctctgctatttttttccagcagtcgacttcaatcgacatcccc

SEQ ID NO: 4171 - DNA, 119 bp, homo sapiens
aaattctatgaggttctaaatgtgtggatcttgttgctctgctatttttttccagcagtcgacttcaatgacatccccctaggtttctgactcaattacatatagatataactttaggg

SEQ ID NO: 4172 - DNA, 119 bp, homo sapiens
ctatttttttccagcagtcgacttcaatcgacatccccctaggtttctgactcaattacatatagatatactttagggatataatacatttttattaaaagataaaatctgtcataatg

SEQ ID NO: 4173 - DNA, 119 bp, homo sapiens
ttagtctgtcataatatccttaatacaaaagtgtgaggattggccattataagatctattctgttgcaagctagacttactacaataaattttacaagtatgtaaatgtgtcatggcta

SEQ ID NO: 4174 - DNA, 119 bp, homo sapiens
tctgttgcaatgctagacttactacaataaattttacaagtatgtaaatgtgtcatggctaggaaaaggttctaatgatcagatcttcctcccttcagtagggtggctggaataaattt

SEQ ID NO: 4175 - DNA, 119 bp, homo sapiens
taggaaaaggattctaatgatcagatcttcctcccttcagtagggtggctggaataaatttagcataagctaagaagattataactttgtttcaattattccctttcagggtgctctgt

SEQ ID NO: 4176 - DNA, 119 bp, homo sapiens
ttagcataagactaagaagattataactttgtttcaattattccctttcagggtgctctgtatcacacattgaactatatagtacatatgtagcagggagtttgtggcagattggaaag

SEQ ID NO: 4177 - DNA, 119 bp, homo sapiens
gtatcacacatttgaactatatagtacatatgtagcagggagtttgtggcagattggaaagctcccaaatctctcaatggggttgggagctagaaattttgagggacctgatttcctga

SEQ ID NO: 4178 - DNA, 119 bp, homo sapiens
agctcccaaaatctctcaatggggttgggagctagaaattttgagggacctgatttcctgaatgtgctgtattgtagggctcctcagatctcagtgatgtcaggaaggagcccaacagg

SEQ ID NO: 4179 - DNA, 119 bp, homo sapiens
gaatgtgctgctattgtagggctcctcagatctcagtgatgtcaggaaggagcccaacaggttacctgtggttcagttatgctttacttgtcttttcacttactcacctaataaacgat

SEQ ID NO: 4180 - DNA, 119 bp, homo sapiens
ggttacctgttggttcagttatgctttacttgtcttttcacttactcacctaataaacgatatgtcaactgatcctaccagagaagtccacaggctgcctgaaaaattatattacttgc

SEQ ID NO: 4181 - DNA, 119 bp, homo sapiens
atatgtcaacctgatcctaccagagaagtccacaggctgcctgaaaaattatattacttgctgtttactcccttgatggagttttaggcattaaaggatagaaagtacttggaaaatcc

SEQ ID NO: 4182 - DNA, 119 bp, homo sapiens
gctgtttacttcccttgatggagttttaggcattaaaggatagaaagtacttggaaaatccaacaataactgtatgtattaggatttttgtgattttgggtgcatcaaactctttttat

SEQ ID NO: 4183 - DNA, 119 bp, homo sapiens
ccaacaataacctgtatgtattaggatttttgtgattttgggtgcatcaaactctttttatatattattggtaatcaaaatagaaaataacttttgatagttaaatgaacaaaagaggg

SEQ ID NO: 4184 - DNA, 119 bp, homo sapiens
atatattattgggtaatcaaaatagaaaataacttttgatagttaaatgaacaaaagagggaaaaataactaaaactggtaacatgtatttaatattgtgcataacattgctttgagtt

SEQ ID NO: 4185 - DNA, 119 bp, homo sapiens
ggaaaaataagctaaaactggtaacatgtatttaatattgtgcataacattgctttgagttgatgaggtagatcagctatgaggcagtgtttttgcaaaatacctgtaactacttctga

SEQ ID NO: 4186 - DNA, 119 bp, homo sapiens
ttgatgaggtaagatcagctatgaggcagtgtttttgcaaaatacctgtaactacttctgaacacccttagtcagccactgatcacctggtttctgccatgtccaaattatgatctttg

SEQ ID NO: 4187 - DNA, 119 bp, homo sapiens
gaacacccttcagtcagccactgatcacctggtttctgccatgtccaaattatgatctttggcaacaaagatctgactggaagaagtgttgtagacacccctaaatgatctctttgccc

SEQ ID NO: 4188 - DNA, 119 bp, homo sapiens
tggcaacaaaagatctgactggaagaagtgttgtagacacccctaaatgatctctttgccctggccggcttatccactttaactgctacaagttggggaatgatttgctaaacgtatta

SEQ ID NO: 4189 - DNA, 119 bp, homo sapiens
cctggccggctttatccactttaactgctacaagttggggaatgatttgctaaacgtattagcaatcaaattgcagttgctaatgaaaaactagatatttgtatggaactccataatca

SEQ ID NO: 4190 - DNA, 119 bp, homo sapiens
tagcaatcaatattgcagttgctaatgaaaaactagatatttgtatggaactccataatcaaacctctataaacagaagacagattagtaaagaatgtagatgcctgttactaagtgaa

SEQ ID NO: 4191 - DNA, 119 bp, homo sapiens
caaacctctattaaacagaagacagattagtaaagaatgtagatgcctgttactaagtgaaacatccattatcaggaataattccaaagtgttataatacatgatcttccttagtccat

SEQ ID NO: 4192 - DNA, 119 bp, homo sapiens
aaacatccatgtatcaggaataattccaaagtgttataatacatgatcttccttagtccatttggtcttaaaaatgtatgtagttgtatcaataaaattcactgccttttcccacaggg

SEQ ID NO: 4193 - DNA, 119 bp, homo sapiens
atttggtcttcaaaaatgtatgtagttgtatcaataaaattcactgccttttcccacagggaatggtatgctagggactattgtctaaacatgatgatgattcatggagaccactctca

SEQ ID NO: 4194 - DNA, 119 bp, homo sapiens
ggaatggtattgctagggactattgtctaaacatgatgatgattcatggagaccactctcatggatgcactgtccgaatgtgcagtctgcattcttaatgtttaccacaaacccagcga

SEQ ID NO: 4195 - DNA, 119 bp, homo sapiens
catggatgcatctgtccgaatgtgcagtctgcattcttaatgtttaccacaaacccagcgaagctgatgtctgtctgaaggtcagtcacttcttcaatagttctccagctacactggca

SEQ ID NO: 4196 - DNA, 119 bp, homo sapiens
gaagctgatgatctgtctgaaggtcagtcacttcttcaatagttctccagctacactggcaggcatatgccgtgttcctttcttctttatcaactttgcttttaatttgtgaaattctg

SEQ ID NO: 4197 - DNA, 119 bp, homo sapiens
ctgagcgtctctttcgccttggcttggttccggtcgctactgtgggtgccgccgccgcagcctttgggcgctcgaccataccccgtcttagaaggtcaggtgtgcaaaacttggactcg

SEQ ID NO: 4198 - DNA, 119 bp, homo sapiens
tgtgggtgccgccgccgcagcctttgggctgctcgaccataccccgtcttagaaggtcaggtgtgcaaacttggactcgacttcatccaagagctcgtccaggtcctccgccatcttga

SEQ ID NO: 4199 - DNA, 119 bp, homo sapiens
accccgtcttagaaggtcaggtgtgcaaaacttggactcgacttcatccaagagctcgtccaggtcctcgccatcttgaatcgcctggccttttcccctccaatcgccaaggctccggt

SEQ ID NO: 4200 - DNA, 119 bp, homo sapiens
cttccgacttcgactccttaccttaaaagatgctggagtcatatgtaactccaattttaatgagctatggaatcgctacatcaagaacttaaagccgtcggatctacagctttcactat

SEQ ID NO: 4201 - DNA, 119 bp, homo sapiens
ttaatgagctatgtgaatcgctacatcaagaacttaaagccgtcggatctacagctttcactatggggtgagacgtggtactcagcaagctcgagttaaagttggatgtgctggaacag

SEQ ID NO: 4202 - DNA, 119 bp, homo sapiens
gaactgaaattaccattcacttttttaagtggacatattcatgaattgaggattcatgtaccatggacaaactgggttcagaaccagtggtaattaccatcaatactatggaatgcatt

SEQ ID NO: 4203 - DNA, 119 bp, homo sapiens
ttaagtggacatattcatgaattgaggattcatgtaccatggacaaaactgggttcagaaccagtggtattaccatcaatactatggaatgcattttgaaacttaaggatgggatacag

SEQ ID NO: 4204 - DNA, 119 bp, homo sapiens
gttatgtgcagagtctgattagacgagttgtaaataatgtaaacattgtgataaataatctcatactaaatatgttgaagatgatatcgtcctttccgtcaatatcacttctgcagaat

SEQ ID NO: 4205 - DNA, 119 bp, homo sapiens
tgataaataatctcatactaaaatatgttgaagatgatatcgtcctttccgtcaatatcacttctgcagatgttatacagtaggtgaattatgggatcgtgcattcatggatatttctg

SEQ ID NO: 4206 - DNA, 119 bp, homo sapiens
caactgatttggtgctgagaaaggttatcaatttttctgactgtacagtttgtcttgataaacggaatgcagtggtaaaatagaattttaccaggatcctttattatacaaatgttcct

SEQ ID NO: 4207 - DNA, 119 bp, homo sapiens
tttttctgactgtacagtttgtcttgataaacggaatgccagtggtaaaatagaattttaccaggatccttattatacaaatgttccttcagaactcgtcttcattttacatatgaaaa

SEQ ID NO: 4208 - DNA, 119 bp, homo sapiens
cggaatgccagtggtaaaatagaattttaccaggatcctttattatacaaatgttccttcagaactcgtttcattttacatatgaaaacctaaattccaagatgccatctgttattaaa

SEQ ID NO: 4209 - DNA, 119 bp, homo sapiens
attcatactttagtggaaagtttgaaactttctatcacagatcaacaactgcctatgtttattcgtatatgcaacttggaattgctctttactatggagaaataggcaattttaaagaa

SEQ ID NO: 4210 - DNA, 119 bp, homo sapiens
tgtttattcgtataatgcaacttggaattgctctttactatggagaaataggcaattttaaagaaggcgaatagaggaccttacttgtcataataaagatatgctaggaaacattacag

SEQ ID NO: 4211 - DNA, 119 bp, homo sapiens
gttctgaagatgaaacaagaatagatatgcaatatcctgctcagcataaaggtcaagagttatattcacgcaagatgaggagcagccacagggatgggtgtcatgggcctggtcctttg

SEQ ID NO: 4212 - DNA, 119 bp, homo sapiens
ttatattcacagcaagatgaggagcagccacagggatgggtgtcatgggcctggtcctttgtgcctgcattgtgagttatgacgatggcgaggaagactttgttgggaacgatcctgca

SEQ ID NO: 4213 - DNA, 119 bp, homo sapiens
tgtgcctgcaattgtgagttatgacgatggcgaggaagactttgttgggaacgatcctgcatcaaccatcatcaacaaaaagcacagactttgaaggatcctattgtttctataggatt

SEQ ID NO: 4214 - DNA, 119 bp, homo sapiens
catcaaccatgcatcaacaaaaagcacagactttgaaggatcctattgtttctataggattttattgcaaaaggcaacggtgactttcaaagtaggtcttttctcttgctgtttatatc

SEQ ID NO: 4215 - DNA, 119 bp, homo sapiens
ttttattgcacaaaggcaacggtgactttcaaagtaggtcttttctcttgctgtttatatctctatcaatttaatgcttaaatttggattgttagtacaattctagctttattcaagtt

SEQ ID NO: 4216 - DNA, 119 bp, homo sapiens
tctctatcaactttaatgcttaaatttggattgttagtacaattctagctttattcaagtttgctttgcttcagtagatgtgagatagagtctaacagttcttacttcataaaattaca

SEQ ID NO: 4217 - DNA, 119 bp, homo sapiens
gcccttatgatgggagaacctttctttgattgccagattgggtttgttggttgcagagccatgtgccttaaggaattatgggtgttaaagattttgaagagaatatgaatagaagtgaa

SEQ ID NO: 4218 - DNA, 119 bp, homo sapiens
cttatgatgggagaacctttctttgattgccagattgggtttgttggttgcagagccatgtgccttaaagaattatgggtgttaaagattttgaagagaatatgaatagaagtgaaact

SEQ ID NO: 4219 - DNA, 119 bp, homo sapiens
gaagcctgtttcttcatttgtggtgacaatttgagtacgaaaggtttcacataccttacaaattcattgttgattaccgaagcccagaaaataatggtactcgcgcagaatttatcttg

SEQ ID NO: 4220 - DNA, 119 bp, homo sapiens
tgtggtgacaatttgagtacgaaaggtttcacataccttacaaattcattgtttgattaccgaagcccaaaaataatggtactcgcgcagaatttatcttggattcaactcatcataag

SEQ ID NO: 4221 - DNA, 119 bp, homo sapiens
gttccacaaatcaacaagacttttcttcagggaaaagtgaagatttgggaacagttcaggagaagtccacaaaagccttgttataggtcctcttgattttcgtttggatagcagtgcgg

SEQ ID NO: 4222 - DNA, 119 bp, homo sapiens
gtgaagatttgggaacagttcaggagaagtccaccaaaagccttgttataggtcctcttgattttcgttggatagcagtgcggtgcataggattttgaaaatgattgtgtgtgccttgg

SEQ ID NO: 4223 - DNA, 119 bp, homo sapiens
aaagccttgttataggtcctcttgattttcgtttggatagcagtgcggtgcataggattttgaaaatgatgtgtgtgccttggaacatgaatatgaaccatatagcaggctaaaatcag

SEQ ID NO: 4224 - DNA, 119 bp, homo sapiens
ggatgaaaatgaaacaatactgaatcctgaagaggtggctcttctggaggaatatattcctactcgacaacaagtgttactctcctcaaatgtacctgcacaatttccatggctgaatt

SEQ ID NO: 4225 - DNA, 119 bp, homo sapiens
ctggaggaatatattcctactcgacatacaagtgttactctcctcaaatgtacctgcacaatttccatgctgaattcaacttgctggaccatttactacctgtcattatgggagaaaag

SEQ ID NO: 4226 - DNA, 119 bp, homo sapiens
aactcaagtaacttcatgaatactacaaacttccagtctcttcggcctttgccatccattcgaatattgtggataaaattaatctggaacattcagtgccaatgtatgctgaacagttg

SEQ ID NO: 4227 - DNA, 119 bp, homo sapiens
ctcttcggcctttgccatccattcgaatattggtggataaaattaatctggaacattcagtgccaatgttgctgaacagttggtgcatgtggtcagcagccttactcaaccttctgata

SEQ ID NO: 4228 - DNA, 119 bp, homo sapiens
taaaattaatctggaacattcagtgccaatgtatgctgaacagttggtgcatgtggtcagcagccttaccaaccttctgataacctgcttcattattgttatgtacactgctatcttaa

SEQ ID NO: 4229 - DNA, 119 bp, homo sapiens
atatttggtttccaggcaggactgacgtctttggattgcagtggatcttactgcttacctgtaccagttttccctctttcagcactgctctttatgggaaacttctgaaactccccaca

SEQ ID NO: 4230 - DNA, 119 bp, homo sapiens
tggtttccaggcaggactgacgtctttggattgcagtggatcttactgcttacctgtaccagttattcctctttcagcactgctctttatgggaaacttctgaaactccccacatgctg

SEQ ID NO: 4231 - DNA, 119 bp, homo sapiens
gaccaaaagatctcagattgctataactgaaggtatatttgaacttccaaatctcacaattcaagctacagagcacagacacttctcttgcaagcaatatatcaaagttggtctcatct

SEQ ID NO: 4232 - DNA, 119 bp, homo sapiens
ggtatatttgaacttccaaatctcacaattcaagctacaagagcacagacacttctcttgcaagcaataatcaaagttggtctcatcttggaaatgtcagctcttccgcagtgattgaa

SEQ ID NO: 4233 - DNA, 119 bp, homo sapiens
aagctacaagagcacagacacttctcttgcaagcaatatatcaaagttggtctcatcttggaaatgtcactcttccgcagtgattgaagctttgataaatgaaatcttcctaagtatag

SEQ ID NO: 4234 - DNA, 119 bp, homo sapiens
caagccactgtgcctggccctttataaattatgttataatttcatgtaatacataattgtatagtcaaatggctcacatattaaatattctttatacaaggaagtctcaaagagaaatt

SEQ ID NO: 4235 - DNA, 119 bp, homo sapiens
gtgtgaaatctaagaatcccctgccaactcttgagggctcaatccagaatgttgaattgaagtactgcacacatcattggtcaaatgtgcctctgggaccatgggatcaataaaaattt

SEQ ID NO: 4236 - DNA, 119 bp, homo sapiens
atcccctgccaactcttgagggctcaatccagaatgttgaattgaagtactgcagcacatcattggtcaatgtgcctctgggaccatgggatcaataaaaatttgtgccaaagccccag

SEQ ID NO: 4237 - DNA, 119 bp, homo sapiens
ttgatagtggaaaagagaagttgattcccttgcttcagggtccttctgacactaaagaccttcatagcacaagtggctcaatgagagtagaaagccagagtctctcttagctccagatt

SEQ ID NO: 4238 - DNA, 119 bp, homo sapiens
aagaccttcatagcaccaagtggctcaatgagagtagaaagccagagtctctcttagctccagatttgaggccttcacaatccaagttccacaatatattgactactgccacaattccg

SEQ ID NO: 4239 - DNA, 119 bp, homo sapiens
cagcctgtggtagctgttcctcttgttatgccagtttgtagaaggaaagaggatgaggtgtctattggagtgcccccttggcaaagcagcaatcatatcaggcctctgaatatgccagc

SEQ ID NO: 4240 - DNA, 119 bp, homo sapiens
tgccagtttgtagaaggaaagaggatgaggtgtctattggaagtgcccccttggcaaagcagcaatcattcaggcctctgaatatgccagcagccctgtaaaaacaaaaacggtaacag

SEQ ID NO: 4241 - DNA, 119 bp, homo sapiens
aatcccgcccattgtcagttcctgttaaagccatgttgaatatatctgaaagctgtagaagtcctgaagaagaatgaaggaatttattggaattgtttggaatgcagtgaagcatctca

SEQ ID NO: 4242 - DNA, 119 bp, homo sapiens
ccattgtcagttcctgttaaagccatgttgaatatatctgaaagctgtagaagtcctgaagaaagaatgaggaatttattggaattgtttggaatgcagtgaagcatctcacactacag

SEQ ID NO: 4243 - DNA, 119 bp, homo sapiens
cttgaagtacaatcttgttgtgtgtttattccaaatgatagcctgccttccccaagtacaattgtatctgtgacattcctggaacagtaagaagttggtaccatggacaaaccagcatg

SEQ ID NO: 4244 - DNA, 119 bp, homo sapiens
acaattgtatctggtgacattcctggaacagtaagaagttggtaccatggacaaaccagcatgccgggacacttgtcctctgtttgcctcaaataaagattattagtgctgggcacaag

SEQ ID NO: 4245 - DNA, 119 bp, homo sapiens
agcatgccgggaacacttgtcctctgtttgcctcaaataaagattattagtgctgggcacaagtatatgaacctctgcaggagattccatttgttatcccacgacccatccttgaagaa

SEQ ID NO: 4246 - DNA, 119 bp, homo sapiens
gtgatgcttttccttggacgatcagcttgcataatttcagcatatatacccttcttggaaaacaagtgaactttgcctagtggaacctatgggttgcacctccactctagctgtcacgt

SEQ ID NO: 4247 - DNA, 119 bp, homo sapiens
cttcttggaaaacaagtgacactttgcctagtggaacctatgggttgcacctccactctagctgtcacgctcaaaaactgcttgctacgggacctgatacacgacattcatttgttgtc

SEQ ID NO: 4248 - DNA, 119 bp, homo sapiens
ctccactctagctgtcacgtctcaaaaactgcttgctacgggacctgatacacgacattcatttgttgttgtctccatgttgacctagagtcactagagataaaatgctctaatcccca

SEQ ID NO: 4249 - DNA, 119 bp, homo sapiens
gtccagctcttctatgaactaactgatatcatgaataaggtctggaacaagattcagaagagaggcaattcaacctatctccaacctctccagagaccatggcagggcctgttcctact

SEQ ID NO: 4250 - DNA, 119 bp, homo sapiens
tggaacaagattcagaagagaggcaatctcaacctatctccaacctctccagagaccatggcagggcctttcctacttctccagttagaagcagtataggcacagctcctccagatacc

SEQ ID NO: 4251 - DNA, 119 bp, homo sapiens
acctctccagagaccatggcagggcctgttcctacttctccagttagaagcagtataggcacagctcctcagataccagcacatgcagcccatctgctgacattgggactactactgag

SEQ ID NO: 4252 - DNA, 119 bp, homo sapiens
ggagattctatacaagcaggtgaggaatcaccattctcagattctgtgaccttggaacaaactacaagtatattggaggaaccagtggacgtgttagtttatggatgcagtgggtgctt

SEQ ID NO: 4253 - DNA, 119 bp, homo sapiens
tggaacaaactacaagtaatattggaggaaccagtggacgtgttagtttatggatgcagtgggtgcttccaaaattactataaagctctttgctccagatcctgaaaataaaggcacag

SEQ ID NO: 4254 - DNA, 119 bp, homo sapiens
ccttggggaagagtgttggtctttggggcaatgtggaggtgtcttcctttcctgtactgacaagctgaaagacgcaccttgttggttcgacccatcagcaagcaggaccctttcagtaa

SEQ ID NO: 4255 - DNA, 119 bp, homo sapiens
ttggggcaatgtggaggtgtcttcctttcctgtactgacaagctgaacagacgcaccttgttggttcgaccatcagcaagcaggaccctttcagtaattgctctggcttctttccttct

SEQ ID NO: 4256 - DNA, 119 bp, homo sapiens
acaactacaaaacttctagatggcactcatcagcagcatggattcctctctctgacatacacaaaagcttaacaaaaaatgtccgccacaagttaacatcaagaaatgagcgaagaagt

SEQ ID NO: 4257 - DNA, 119 bp, homo sapiens
tacacaaaagctgtaacaaaaaatgtccgccacaagttaacatcaagaaatgagcgaagaagttttcatagttatctgaaggcctaatggatggttctcctcattttcttcatgaaatt

SEQ ID NO: 4258 - DNA, 119 bp, homo sapiens
agaagttttcataagttatctgaaggcctaatggatggttctcctcattttcttcatgaaattcttcttcagcacaagcttttgatattgttctttattttcctttacttaatgccatt

SEQ ID NO: 4259 - DNA, 119 bp, homo sapiens
gaaattcttctttcagcacaagcttttgatattgttctttattttcctttacttaatgccattgcaagttatttcaagcaaaactaccaaagacccaaaaagagaaaagaaaatctcct

SEQ ID NO: 4260 - DNA, 119 bp, homo sapiens
gccattgcaagtatatttcaagcaaaactaccaaagacccaaaaagagaaaagaaaatctcctggtcagccatgaggacccatacactgacatcccgcaatttacctttgatttatgtc

SEQ ID NO: 4261 - DNA, 119 bp, homo sapiens
tctcctggtcagcccatgaggacccatacactgacatcccgcaatttacctttgatttatgtcaacacagtgtaatcagaatttttattccaaaaacagaagaaatgcagccaactgtt

SEQ ID NO: 4262 - DNA, 119 bp, homo sapiens
gagagccttgaacttaggaattcttcgagatcctggatcagaaatcgaagacagacaataccaaatagactgcagtccatcaatattggtactgcacagtggcatcaactaaaaccaga

SEQ ID NO: 4263 - DNA, 119 bp, homo sapiens
aatcgaagacagacaataccaaatagatctgcagtccatcaatattggtactgcacagtggcatcaactaaaccagagaaggaaagtgtctcaggaggggtggtaacagagactgaaag

SEQ ID NO: 4264 - DNA, 119 bp, homo sapiens
tattggtactgcacagtggcatcaactaaaaccagagaaggaaagtgtctcaggaggggtggtaacagaactgaaaggaattctcaaaatccagcccttgagtggaatatggccagcag

SEQ ID NO: 4265 - DNA, 119 bp, homo sapiens
catacggcggcatcaagaaaggagagcaattttgacccccgttttgacagatttttctgtccgaataacggagcacctgctgtcattttcaccaaagtagtttctccagaaaatttgca

SEQ ID NO: 4266 - DNA, 119 bp, homo sapiens
cggcatcaagaaaggagagcaattttgacccccgttttgacagatttttctgtccgaataactggagcactgctgtcattttcaccaaagtagtttctccagaaaatttgcatactgag

SEQ ID NO: 4267 - DNA, 119 bp, homo sapiens
gagattttagtgtgtggccattccttagaagtgaatataaccacaaacctggacttcttcctaagtgtgctcaagttcaactcttacatcagttaatagtagcaaatatgactggactg

SEQ ID NO: 4268 - DNA, 119 bp, homo sapiens
ttagaagtgaatataaccacaaacctggacttcttcctaagtgtggctcaagttcaactcttacatcagtaatagtagcaaatatgactggactggaaccatcaaacaaggctgcagag

SEQ ID NO: 4269 - DNA, 119 bp, homo sapiens
atctctaaacaagaacagaaaaaagtggatatatttgatggaggcatggctgaaacctcatctcgctacgtggtgctcaggatagtggaattggcagtgacagtgttaaaatcagaata

SEQ ID NO: 4270 - DNA, 119 bp, homo sapiens
ctcatctcgctacagtggtgctcaggatagtggaattggcagtgacagtgttaaaatcagaatagtgcaatagagcagcacagtggtgccagtcagcatcgcattgcccgtccctcacg

SEQ ID NO: 4271 - DNA, 119 bp, homo sapiens
tcagaatagtgcaaatagagcagcacagtggtgccagtcagcatcgcattgcccgtccctcacgccagtatcaattgtaaaaaatctaaattttattccctttgacatatttattactg

SEQ ID NO: 4272 - DNA, 119 bp, homo sapiens
ccctcacgccagtcatcaattgtaaaaaatctaaattttattccctttgacatatttattactgcaagtgaatctcactaatgacctattcctgtatggccttatccaaatcgaaatca

SEQ ID NO: 4273 - DNA, 119 bp, homo sapiens
tattactgcaagtagaatctcactaatgacctattcctgtatggccttatccaaatcgaaatcacaagacagaagaataatgaaaaaacagacaagagttcattaaatctcccagaagt

SEQ ID NO: 4274 - DNA, 119 bp, homo sapiens
cgaaatcacaagaacagaagaataatgaaaaaacagacaagagttcattaaatctcccagaagttgattagatgttgctaagcccaaccaggcatgtatttccacggtgacagcagaag

SEQ ID NO: 4275 - DNA, 119 bp, homo sapiens
ccagaagttgattcagatgttgctaagcccaaccaggcatgtatttccacggtgacagcagaagatctctaaggagcagcatttcttttccttcagggaaaaaaataggggtcctctct

SEQ ID NO: 4276 - DNA, 119 bp, homo sapiens
agcagaagatctcttaaggagcagcatttcttttccttcagggaaaaaaataggggtcctctctcttgaagtcttcatgcatccacaaggtcatctgctagacaagcacttggtataac

SEQ ID NO: 4277 - DNA, 119 bp, homo sapiens
tcctctctcttgaaagtcttcatgcatccacaaggtcatctgctagacaagcacttggtataactattgtcggcagcctggtcgaagaggaactggtgacttacagctagagccttttc

SEQ ID NO: 4278 - DNA, 119 bp, homo sapiens
ggtataactattgttcggcagcctggtcgaagaggaactggtgacttacagctagagccttttctgtacttattgtgtcccagccttccttgcttctgagttgtcaccacagaaagcag

SEQ ID NO: 4279 - DNA, 119 bp, homo sapiens
gccttttctgtactttattgtgtcccagccttccttgcttctgagttgtcaccacagaaagcagcgagtgaagtatccatttttgatgctgtgcttaaaggggtggcctctgattacaa

SEQ ID NO: 4280 - DNA, 119 bp, homo sapiens
atcctgggaagactctgcctgaagcccttgattattgcactgtttggctacagacagtgcctggagaaaagacagcaaaagtggtattccaccttcctttataacactacagattaaag

SEQ ID NO: 4281 - DNA, 119 bp, homo sapiens
ctgaagcccttgattattgcactgtttggctacagacagtgcctggagaaatagacagcaaaagtggtatccaccttcctttataacactacagattaaagactttctgaatggaccag

SEQ ID NO: 4282 - DNA, 119 bp, homo sapiens
cggatgtcaatttggatatatcaaagcctttgaaagcaaacctgagtttcaccaaactggatcagataacctttttttaaagaagataaaaaatgcacacagtttggcacatagtgaag

SEQ ID NO: 4283 - DNA, 119 bp, homo sapiens
tggatcagataaacctttttttaaagaagataaaaaatgcacacagtttggcacatagtgaagagacttagccatgtccaacaccatggtgaataaggatgatcttccagtctccaaat

SEQ ID NO: 4284 - DNA, 119 bp, homo sapiens
gtgaagagacttcagccatgtccaacaccatggtgaataaggatgatcttccagtctccaaatattacctggaaagttgtctaaacccaaaattcatggtgatggagtgcaaaagattt

SEQ ID NO: 4285 - DNA, 119 bp, homo sapiens
ccaaatattaccgtggaaagttgtctaaacccaaaattcatggtgatggagtgcaaaagatttcagctcagaaaacatgtggagagctgtttcctgctttcaaaaaatttctgttcaaa

SEQ ID NO: 4286 - DNA, 119 bp, homo sapiens
agatttcagctcaagaaaacatgtggagagctgtttcctgctttcaaaaaatttctgttcaaactactcgattgtgatctccatggaaactgtaccccataccagcaaaccatgcctgt

SEQ ID NO: 4287 - DNA, 119 bp, homo sapiens
ttcaaactactcagattgtgatctccatggaaactgtaccccataccagcaaaccatgcctgttagcattctctcaaacctcaatggaagccttagtgtcaaggcaacacaaaaagtac

SEQ ID NO: 4288 - DNA, 119 bp, homo sapiens
gcataattcttgggtcatcatttctactcagtataaacgattttctccttaaaacaagtctcaaagaaaaagccgcattctgataggaccatgttgtgctactgccaatctggaagcta

SEQ ID NO: 4289 - DNA, 119 bp, homo sapiens
tttctccttaaaacaagtctcaaagaaagaagccgcattctgataggaccatgttgtgctactgccaattggaagctaagtggtgtaaacacagcgggaatccaggcccagaacaatcc

SEQ ID NO: 4290 - DNA, 119 bp, homo sapiens
gataggaccatgttgtgctactgccaatctggaagctaagtggtgtaaacacagcgggaatccaggcccgaacaatccataccaaaaatatccattgacttaagaggaggtctactaca

SEQ ID NO: 4291 - DNA, 119 bp, homo sapiens
gtcttctggggtcaagaacatttgaattgtttagttcttctacatgaattactcaatggataccttaataggagggaaattttgaagtacaagtttctgaaccagtgcctcaaatgtca

SEQ ID NO: 4292 - DNA, 119 bp, homo sapiens
tgaattactcaatggataccttaatgaggagggaaattttgaagtacaagtttctgaaccagtgcctcaatgtcatctcctgtggaaaagaatcagacatttaaaagtgaacaaagttc

SEQ ID NO: 4293 - DNA, 119 bp, homo sapiens
tacaagtttctgaaccagtgcctcaaatgtcatctcctgtggaaaagaatcagacatttaaaagtgaacaagttcagatgacctacggacaggtctatttcagtatgtacaggatgctg

SEQ ID NO: 4294 - DNA, 119 bp, homo sapiens
aatctttgaaattgcctggggtctatgaagtcttattttataatgaaactgaagattgcccagggatgagttatggagatatccagaacctagagtactcacccttgtacgaataactc

SEQ ID NO: 4295 - DNA, 119 bp, homo sapiens
ttattttataatgaaactgaagattgcccagggatgatgttatggagatatccagaacctagagtactccccttgtacgaataactcctgtaccttttaacaccacagaggatccagat

SEQ ID NO: 4296 - DNA, 119 bp, homo sapiens
gatgatgttatggagatatccagaacctagagtactcacccttgtacgaataactcctgtaccttttaaaccacagaggatccagatattagcacagcagaccttggtgatgtgctaca

SEQ ID NO: 4297 - DNA, 119 bp, homo sapiens
gttccttgtagcttggaatactgggatgaactccagaaggtttttgttgcatttagagaatttaatctgctgaaagcaaagtttgtgaactgcagttgccggatatcaatctcgtgaat

SEQ ID NO: 4298 - DNA, 119 bp, homo sapiens
ggtttttgttgcatttagagaatttaatctgtctgaaagcaaagtttgtgaactgcagttgccggatataatctcgtgaatgaccagaagaaattagtatcttcagatctttggagaat

SEQ ID NO: 4299 - DNA, 119 bp, homo sapiens
gcaaagtttgtgaactgcagttgccggatatcaatctcgtgaatgaccagaagaaattagtatcttcagtctttggagaattgtcttgaacagcagtcaaaatggagctgatgaccaaa

SEQ ID NO: 4300 - DNA, 119 bp, homo sapiens
ctctgcaagtgagtctggttctcaaagcacttgtgatccacttgtgactccaacagccctggctgcctgaccagagttgactcctgctttaccccatggtttgtcccatccctttgcgt

SEQ ID NO: 4301 - DNA, 119 bp, homo sapiens
tgtgatccacttgtgactccaacagccctggctgcctgtaccagagttgactcctgctttaccccatggttgtcccatccctttgcgtttctttccagtttgctcacctggaattccat

SEQ ID NO: 4302 - DNA, 119 bp, homo sapiens
ctgcctgtaccagagttgactcctgctttaccccatggtttgtcccatccctttgcgtttctttccagttgctcacctggaattccatctttgtcatcaccttgaccaactaggcacag

SEQ ID NO: 4303 - DNA, 119 bp, homo sapiens
ctgcaccacagtacctacagccatttgtttccgacagaaatatgccatctgaactagaatacatgattgttccttcagagaaccacacatgtatcttcgacagtggaataatggttctg

SEQ ID NO: 4304 - DNA, 119 bp, homo sapiens
aatacatgattgtttccttcagagaaccacacatgtatcttcgacagtggaataatggttctgtctgtcggagatccagttcttagctcaagcagactgtaaacttctagagtgcagaa

SEQ ID NO: 4305 - DNA, 119 bp, homo sapiens
gttctgtctgtcaggagatccagttcttagctcaagcagactgtaaacttctagagtgcagaaatgtcatatgcaaagtgtggtgaaacccttcagcatcttcgggcagatggcagttt

SEQ ID NO: 4306 - DNA, 119 bp, homo sapiens
gcagaaatgtcactatgcaaagtgtggtgaaacccttcagcatcttcgggcagatggcagtttccagcgtgtagtggaaaagctgcttgactgcaccgtgatagttgattctgtatttg

SEQ ID NO: 4307 - DNA, 119 bp, homo sapiens
cagtttccagcgatgtagtggaaaagctgcttgactgcaccgtgatagttgattctgtatttgtaaacctggacagcatgtagtccattcactaaacactgcaatacaagcttggcaac

SEQ ID NO: 4308 - DNA, 119 bp, homo sapiens
aacaaatgccctgaggtagaggagttggtcttcagccattttgtgatctgtaatgacacacaggagacatgcggtttggccaggtggatactgatgaaaatattctgctggcgagtctc

SEQ ID NO: 4309 - DNA, 119 bp, homo sapiens
gtgatctgtaatgacacacaggagacactgcggtttggccaggtggatactgatgaaaatattctgctgcgagtctccacagtcaccagtacagctggcgctctcacaaatccccacag

SEQ ID NO: 4310 - DNA, 119 bp, homo sapiens
ctgttacacatctgtattgaaggttggggcaactggcgttggtcagagcctttcagtgtggaccatgccggacttttattagaacaattcagtacaggggtcgaactgcttctctcatc

SEQ ID NO: 4311 - DNA, 119 bp, homo sapiens
cgttggtcagagcctttcagtgtggaccatgccgggacttttattagaacaattcagtacaggggtcgactgcttctctcatcatcaaggttcagcaactcaatggagtacaaaaacag

SEQ ID NO: 4312 - DNA, 119 bp, homo sapiens
attatcatctgtggaagacagatcatctgtagttacttgtctcaaagcatagaactaaaagtcgttcagattacattggtcaagatggacaagctgtagttcgggaacattttgactgc

SEQ ID NO: 4313 - DNA, 119 bp, homo sapiens
atagaactaaaagtcgttcagcattacattggtcaagatggacaagctgtagttcgggaacattttgacgcctcacagccaaacagaaattgccttcgtacatactagaaaacaatgaa

SEQ ID NO: 4314 - DNA, 119 bp, homo sapiens
gtagttcgggaacattttgactgcctcacagccaaacagaaattgccttcgtacatactagaaaacaataactgacggagctgtgtgtgaaggccaaaggagatgaagactggtcaaga

SEQ ID NO: 4315 - DNA, 119 bp, homo sapiens
tcgtacatactagaaaacaatgaactgacggagctgtgtgtgaaggccaaaggagatgaagactggtcagagatgtgtgcctggaatccaaagcccctgagtacagcattgtcattcag

SEQ ID NO: 4316 - DNA, 119 bp, homo sapiens
attgtgttcagccctctttttatcatgaggagtcatcttccagaccccattatcatacatttggagaaaggagtctgggattgagtgaaacacaaattattccaggaaaagggcaggaa

SEQ ID NO: 4317 - DNA, 119 bp, homo sapiens
acatttggagaaaaggagtctgggattgagtgaaacacaaattattccaggaaaagggcaggaaaaaccctgcaaaacatagaacctgaccttgtacatcacctgacattccaagcaag

SEQ ID NO: 4318 - DNA, 119 bp, homo sapiens
agaagaatatgatccttcagattgtgcagttcccatctcaacatccctcattaagcaaatagccactaagtacaccctggaggcacagttaatcagatccttgacgaattctatgggcc

SEQ ID NO: 4319 - DNA, 119 bp, homo sapiens
taagcaaatagccactaaggtacaccctggaggcacagttaatcagatccttgacgaattctatgggccgaaaagtcgcttcaacccatatggccctataataagaaggattctgacag

SEQ ID NO: 4320 - DNA, 119 bp, homo sapiens
gaatgaacagctaagtcagtgggatagcccaatgcgagtgaagctgtcaatctggaagccatatgttagactttgttgatagaacttctgccctgggccctgcttatcaatgaatccaa

SEQ ID NO: 4321 - DNA, 119 bp, homo sapiens
agctgtcaatctggaagccatatgttagaactttgttgatagaacttctgccctgggccctgcttatcatgaatccaaatgggacctctggctatttgaaggagagaaaattgttctac

SEQ ID NO: 4322 - DNA, 119 bp, homo sapiens
gaacttctgccctgggccctgcttatcaatgaatccaaatgggacctctggctatttgaaggagagaaattgttctacaggttcctgctggcaaaattattattcctcctaattttcag

SEQ ID NO: 4323 - DNA, 119 bp, homo sapiens
gaagcttttcaaattggaatatactgggcaaatacaaacactgtgcacaagtcagtagcaattaaactgtccataacctgacatctccaaagtggaaagatggaggtaatggtgaagtt

SEQ ID NO: 4324 - DNA, 119 bp, homo sapiens
caaacactgtgcacaagtcagtagcaattaaactggtccataacctgacatctccaaagtggaaagatgaggtaatggtgaagttgtgacactggatgaagaagcgtttgttgatactg

SEQ ID NO: 4325 - DNA, 119 bp, homo sapiens
ggtccataacctgacatctccaaagtggaaagatggaggtaatggtgaagttgtgacactggatgaagagcgtttgttgatactgaaataagacttggtgcttttccaggacatcagaa

SEQ ID NO: 4326 - DNA, 119 bp, homo sapiens
ttatgtcagttctgcatttcctccatggtacagcaaggtatacaaattattcagattgaagacaagactcaataatcaataatacaccatatcaaatattttataaaccacagctatct

SEQ ID NO: 4327 - DNA, 119 bp, homo sapiens
gtacagcaaggtatacaaattattcagattgaagacaagactacaataatcaataatacaccatatcaatattttataaaccacagctatctgtctgcaatccccattctggaaaggag

SEQ ID NO: 4328 - DNA, 119 bp, homo sapiens
tattttcgtgttccagacagtgctacttttagcatttgcccaggtggagagcagcctgctatgaaatccgctcccttccttgctgggacttgatgcctgacatcagtcagtcagtactg

SEQ ID NO: 4329 - DNA, 119 bp, homo sapiens
cctgctatgaaatccagctcccttccttgctgggacttgatgcctgacatcagtcagtcagtactggatcatccctgcttcagaaacagatcatgctgggcttttctcctgccccaggt

SEQ ID NO: 4330 - DNA, 119 bp, homo sapiens
cagtcagtactggatgcatccctgcttcagaaacagatcatgctgggcttttctcctgccccaggtgctacagctcacagtgctggagcctgccagctatagttagaccagagtttccc

SEQ ID NO: 4331 - DNA, 119 bp, homo sapiens
cctgccccaggtgctgacagctcacagtgctggagcctgccagctatagttagaccagagtttcccagaagagtgtggcagtacccctcgggaatttccgggaaaatggattctgtacc

SEQ ID NO: 4332 - DNA, 119 bp, homo sapiens
ggctatagtgctgacatatcaagaacacctcggagtgacttatttaaccctctcagaagaccctagtcccgagtaattatccacaatagatgtccagtaaaaatgcttataaaggaaaa

SEQ ID NO: 4333 - DNA, 119 bp, homo sapiens
tgctgacatatcaagaacacctcggagtgacttatttaaccctctcagaagaccctagtcctcgagtaatatccacaatagatgtccagtaaaaatgcttataaaggaaaacattaaag

SEQ ID NO: 4334 - DNA, 119 bp, homo sapiens
atattccaaagtttgaggtttattgcaaaaaaattccctccgagtgctcaattcatcatgagctgtatctcagatttccagttatccggactgcaagaccaaagacttacttccaagcc

SEQ ID NO: 4335 - DNA, 119 bp, homo sapiens
cgagtgctcaattcatcatgagctgtatcatcagatttccagttatccggactgcaagaccaaagacttcttccaagcctacttttgagagttgaacctctagatgaagtaacaactga

SEQ ID NO: 4336 - DNA, 119 bp, homo sapiens
agttatccggactgcaagaccaaagacttacttccaagcctacttttgagagttgaacctctagatgaataacaactgagtggagtgatgccattgacatcaacagtcagggaacacag

SEQ ID NO: 4337 - DNA, 119 bp, homo sapiens
agcgccagagaagattgttacatttaaaatgttcatcactcagttaagcctggcagtgtttgatgacctacccaccacaaagcatcagctgagcttctgagactcacactggacaacat

SEQ ID NO: 4338 - DNA, 119 bp, homo sapiens
gtttgatgacctcacccaccacaaagcatcagctgagcttctgagactcacactggacaacatttttcttgtgtggccccgggagctggtcccctccctggggaagagcctgtggctgc

SEQ ID NO: 4339 - DNA, 119 bp, homo sapiens
caacatttttctctgtgtggccccgggagctggtcccctccctggggaagagcctgtggctgcgttgttgaactttactgtgtggagatctgctgtggggacctgcagctagacaacca

SEQ ID NO: 4340 - DNA, 119 bp, homo sapiens
ggctgcgttgtttgaactttactgtgtggagatctgctgtggggacctgcagctagacaaccagctttaaacaagtccaatttccactttgctgtcttagtctgccagggagaaaaagc

SEQ ID NO: 4341 - DNA, 119 bp, homo sapiens
caaccagctttataacaagtccaatttccactttgctgtcttagtctgccagggagaaaaagcagaaccattcagtgttccaaaatgcagagtctcctcatatccaacaaagagttgga

SEQ ID NO: 4342 - DNA, 119 bp, homo sapiens
aaaagcagaacccattcagtgttccaaaatgcagagtctcctcatatccaacaaagagttggaagaataaaggaaaaatgttttatcaaactttgcatcaccttaaatgaaggcaagag

SEQ ID NO: 4343 - DNA, 119 bp, homo sapiens
gttggaagaatacaaggaaaaatgttttatcaaactttgcatcaccttaaatgaaggcaagagcatccttgtgatattaatgagttcagctttgaattaaaacctgctcggttatacgt

SEQ ID NO: 4344 - DNA, 119 bp, homo sapiens
caagagcatcctctgtgatattaatgagttcagctttgaattaaaacctgctcggttatacgtggaagaacatttgtatactacatcaagactttgtttgacacctaccttcctaacag

SEQ ID NO: 4345 - DNA, 119 bp, homo sapiens
atacgtggaagacacatttgtatactacatcaagactttgtttgacacctaccttcctaacagcaggttgctggtcactccacacacctctccgggggtaaacaggtgttgcccatgca

SEQ ID NO: 4346 - DNA, 119 bp, homo sapiens
taacagcaggttggctggtcactccacacacctctccgggggtaaacaggtgttgcccatgcaggtcaccagcacgccagggccttggtgaatcctgtgaagttacggaaactggtgat

SEQ ID NO: 4347 - DNA, 119 bp, homo sapiens
catgcaggtcacacagcacgccagggccttggtgaatcctgtgaagttacggaaactggtgatccagccgtaaatttgctcgtcagcatccacgcttccctcaagctgtacatagcctc

SEQ ID NO: 4348 - DNA, 119 bp, homo sapiens
ggtgatccagccagtaaatttgctcgtcagcatccacgcttccctcaagctgtacatagcctcagaccaactcctctctccttctcggtgtttgaaagaggacccatcttcaccactgc

SEQ ID NO: 4349 - DNA, 119 bp, homo sapiens
agcctcagaccacactcctctctccttctcggtgtttgaaagaggacccatcttcaccactgcgaggcacttgtgcacgccctggcaatgcactatgccgctggggccctttttagagc

SEQ ID NO: 4350 - DNA, 119 bp, homo sapiens
gctgggtagttgggtctctggatattcttggcagccctgcaagcctggtgagaagcatcgggaacggggcgccgacttcttcaggcttccgtatgaggggctgacccggggccctggag

SEQ ID NO: 4351 - DNA, 119 bp, homo sapiens
tcgggaacggggtcgccgacttcttcaggcttccgtatgaggggctgacccggggccctggagccttcggagtggcgtctccagagggaccacatcgtttgtaaagcacatctccaaag

SEQ ID NO: 4352 - DNA, 119 bp, homo sapiens
gtaccctcacatccatcaccaacctcgccacaagcctggcccggaacatggaccggctctcactggatgggagcactacaaccggcaggaggagtggcggcggcagctccccgagagcc

SEQ ID NO: 4353 - DNA, 119 bp, homo sapiens
accggctctcactggatgaggagcactacaaccggcaggaggagtggcggcggcagctccccgagagccgggcgaggggcttcgacagggcctgtcccggctgggcatcagcctgcttg

SEQ ID NO: 4354 - DNA, 119 bp, homo sapiens
gtgcaattgctggtatagttgatcagccgatgcagaacttccagaaaacatctgaggcacaggcttcagaggacacaaggccaagggtgtcatctcgggtgtggggaaaggaatcatgg

SEQ ID NO: 4355 - DNA, 119 bp, homo sapiens
cacaggcttcagcaggacacaaggccaagggtgtcatctcgggtgtggggaaaggaatcatgggggtgtcacaaagcccatcggaggagctgctgagctggtgtcacagactggctatg

SEQ ID NO: 4356 - DNA, 119 bp, homo sapiens
gaaaatgcttcagtctctgggcagaccagaagtccacatggccctggacgtggttctggtgaggggctcggccaggagcatgaagggtgcttgctgctgacatcagaagtgctcttcgt

SEQ ID NO: 4357 - DNA, 119 bp, homo sapiens
ctggacgtggttctggtgaggggctcaggccaggagcatgaagggtgcttgctgctgacatcagaagtgtcttcgtggtgagtgtcagtgaggacacacagcagcaggccttccccgtc

SEQ ID NO: 4358 - DNA, 119 bp, homo sapiens
ggtgcttgctgctgacatcagaagtgctcttcgtggtgagtgtcagtgaggacacacagcagcaggcctccccgtcacagaaatcgactgtgcacaggacagcaagcagaacaacttac

SEQ ID NO: 4359 - DNA, 119 bp, homo sapiens
cagtgaggacacacagcagcaggccttccccgtcacagaaatcgactgtgcacaggacagcaagcagaaaacttactcacagtgcagctcaagcagccaagagtggcctgtgatgtgga

SEQ ID NO: 4360 - DNA, 119 bp, homo sapiens
gtagatggagtccgagagagactgtcagagcaacagtacaacagactggtggactacatcacaaagacacttgtcacctggcccccagctgttcttccatgcaaataccatgccctgtg

SEQ ID NO: 4361 - DNA, 119 bp, homo sapiens
catcacaaagacatcttgtcacctggcccccagctgttcttccatgcaaataccatgccctgtggtggcgcagaacctcccccctccactgttaaaacataccattacctggttgatcc

SEQ ID NO: 4362 - DNA, 119 bp, homo sapiens
gccctgtggtggctgcagaacctcccccctccactgttaaaacataccattacctggttgatccacatttgctcaggtcttccttagtaaatttaccatggtgaaaaataaagccctga

SEQ ID NO: 4363 - DNA, 119 bp, homo sapiens
gttgatccacattttgctcaggtcttccttagtaaatttaccatggtgaaaaataaagccctgaggaaaggtttccttgagtcccctctgaggtgtttattcctgcttgtgtgatttag

SEQ ID NO: 4364 - DNA, 119 bp, homo sapiens
ataaagggctgcattttgccaccataaagggctgcatttttttaaaaagcctaggcagctctaacatcactgatatggacacaaggccaacagtttccttatttacatccttacctcta

SEQ ID NO: 4365 - DNA, 119 bp, homo sapiens
agctctaacatcatctgatatggacacaaggccaacagtttccttatttacatccttacctctaaaagaacttcaaagtgacaaaaacgtgttccttccccacttagagacaatgatta

SEQ ID NO: 4366 - DNA, 119 bp, homo sapiens
tacctctaaaagatacttcaaagtgacaaaaacgtgttccttccccacttagagacaatgattaacaggccctatatgttcttaccacatacagaggatgcatttatttttgctctatg

SEQ ID NO: 4367 - DNA, 119 bp, homo sapiens
aatgattaacagggccctatatgttcttaccacatacagaggatgcatttatttttgctctatgacactgcaaaaatctctactgtaattaatttgggtctattattaactctctgttc

SEQ ID NO: 4368 - DNA, 119 bp, homo sapiens
gctctatgacacttgcaaaaatctctactgtaattaatttgggtctattattaactctctgttccatcaagaatgtggccaggccttacaatggagagccagagttaaaacttcaagtt

SEQ ID NO: 4369 - DNA, 119 bp, homo sapiens
ctctgttccatcatagaatgtggccaggccttacaatggagagccagagttaaaacttcaagttgcatcgtttttgggctgagtcaccacctttgcctcatgctcctttgtctgcaaag

SEQ ID NO: 4370 - DNA, 119 bp, homo sapiens
ttcaagttgcatctgtttttgggctgagtcaccacctttgcctcatgctcctttgtctgcaaaggcctagattctttctttaaatgaaatgcttaggactttgtggcttgttacatttg

SEQ ID NO: 4371 - DNA, 119 bp, homo sapiens
ctgcaaaggcctaggattctttctttaaatgaaatgcttaggactttgtggcttgttacatttgtcattaactgcagtgctattctttgaaagctgctatgtgtattttctctgaagtc

SEQ ID NO: 4372 - DNA, 119 bp, homo sapiens
tacatttgtcatttaactgcagtgctattctttgaaagctgctatgtgtattttctctgaagtctgcatttactaaaatttacaacagtctgatgattgattgattactgtccaggtac

SEQ ID NO: 4373 - DNA, 119 bp, homo sapiens
ctgaagtctgcattttactaaaatttacaacagtctgatgattgattgattactgtccaggtacattttgaaaaagtgttcttcttccagtttgttttactaagcaaactttgagtaaa

SEQ ID NO: 4374 - DNA, 119 bp, homo sapiens
ccaggtacattttagaaaaagtgttcttcttccagtttgttttactaagcaaactttgagtaaatccttgtcctatattgaatccagtcccaaagtgttcaggtgagtttctctagttc

SEQ ID NO: 4375 - DNA, 119 bp, homo sapiens
tgagtaaatcctttgtcctatattgaatccagtcccaaagtgttcaggtgagtttctctagttccataacaaaacatacatagtgggaactccctggtatgccatagagcacacaagaa

SEQ ID NO: 4376 - DNA, 119 bp, homo sapiens
tctagttccataaacaaaacatacatagtgggaactccctggtatgccatagagcacacaagaaccccatattaatgctaacaattataccagtccattttgtttattctgtggaattg

SEQ ID NO: 4377 - DNA, 119 bp, homo sapiens
cacaagaaccccaatattaatgctaacaattataccagtccattttgtttattctgtggaattgacttgcaaagcatgaagatattcccagtgtctgtctgataatattttgcatctaa

SEQ ID NO: 4378 - DNA, 119 bp, homo sapiens
tggaattgacttgacaaagcatgaagatattcccagtgtctgtctgataatattttgcatctaagaatggtttgactcaagatcttgggttaccaagatgtcttaaatgttcagtaaat

SEQ ID NO: 4379 - DNA, 119 bp, homo sapiens
gcatctaagaatgggtttgactcaagatcttgggttaccaagatgtcttaaatgttcagtaaatatcttcttacagtccagtagcttagagcatgtttgctgattgatattacatttaa

SEQ ID NO: 4380 - DNA, 119 bp, homo sapiens
cagtaaatatctttcttacagtccagtagcttagagcatgtttgctgattgatattacatttaaacttgggctacagcttgttacctagaattttgagatactaagagaatgcaatttt

SEQ ID NO: 4381 - DNA, 119 bp, homo sapiens
aacacccactgatctttaactctcacatgttgggcataagaagtcactatataattgttactggaaagcagacttaacgaacaattctgactatgaaaaatgtctctttcagtttgttc

SEQ ID NO: 4382 - DNA, 119 bp, homo sapiens
ataattgttactggaaagcaagacttaacgaacaattctgactatgaaaaatgtctctttcagtttgtttgtaaatatttagaaaagtgacagctgtcaacctcagagtaactatttct

SEQ ID NO: 4383 - DNA, 119 bp, homo sapiens
atgtctctttcagtttgttctgtaaatatttagaaaagtgacagctgtcaacctcagagtaactatttcaaaaatgtaaatatgtattaatccttgtatcttttatggtaattttgcat

SEQ ID NO: 4384 - DNA, 119 bp, homo sapiens
acctcagagtaactatttctaaaaatgtaaatatgtattaatccttgtatcttttatggtaattttgcaattgatatgaattatataaaattgtttaaaataaaaggtgtccttgaatt

SEQ ID NO: 4385 - DNA, 119 bp, homo sapiens
cttttatggtaattttgcatattgatatgaattatataaaattgtttaaaataaaaggtgtccttgaatactgaccacccatagatgtctactgttaccaggttttacaatgcaaattt

SEQ ID NO: 4386 - DNA, 119 bp, homo sapiens
ataaaaggtgtccttgaattactgaccacccatagatgtctactgttaccaggttttacaatgcaaatttcactaatacctgggtttaatacagctcacatcactgaatgttacacatg

SEQ ID NO: 4387 - DNA, 119 bp, homo sapiens
aggttttacaatgcaaattttcactaatacctgggtttaatacagctcacatcactgaatgttacacatagtttaaatgggtaatatacaggttttgttataataaagttactgattaa

SEQ ID NO: 4388 - DNA, 119 bp, homo sapiens
gactgcgttcagaccctgcaggctgggctggcctgcccaggacctgagaaggggcagctccggtggcaagtctgagcccctagctgtgctggtccgggctggcctctctaagacagtgc

SEQ ID NO: 4389 - DNA, 119 bp, homo sapiens
tccggtggcaatgtctgagcccctagctgtgctggtccgggctggcctctctaagacagtgcaggccactgatccatcctcctagaggcagtgagcaggtgagggacccctaccacagc

SEQ ID NO: 4390 - DNA, 119 bp, homo sapiens
gtgcaggccacgtgatccatcctcctagaggcagtgagcaggtgagggacccctaccacagccaggaggaaaagctaggcgtccactttccgcagccatgctcaaacagagtgagagga

SEQ ID NO: 4391 - DNA, 119 bp, homo sapiens
cagccaggaggaaaaagctaggcgtccactttccgcagccatgctcaaacagagtgagaggagacggtctggagctacaggccctggaacacgacggagaatgagggcagccaacaccg

SEQ ID NO: 4392 - DNA, 119 bp, homo sapiens
aggagacggtcctggagctacaggccctggaacacgacggagaatgagggcagccaacaccgcaggagctttgctccctgggtgcccgttccggctcccaggccagcatccacggctgg

SEQ ID NO: 4393 - DNA, 119 bp, homo sapiens
accgcaggagcatttgctccctgggtgcccgttccggctcccaggccagcatccacggctggacagaggcaactataactactacatcgaggaagacgaagacggcgaggaggaggacc

SEQ ID NO: 4394 - DNA, 119 bp, homo sapiens
ctggacagagggcaactataactactacatcgaggaagacgaagacggcgaggaggaggaccagtggaagacgacctggcagaagaggaccagcaggcaggggaggtcaccaccgccaa

SEQ ID NO: 4395 - DNA, 119 bp, homo sapiens
gaccagtggaaggacgacctggcagaagaggaccagcaggcaggggaggtcaccaccgccaagcccgaggccccagcgaccctccggccctgctgtccacgctgaatgtgaacgtgggt

SEQ ID NO: 4396 - DNA, 119 bp, homo sapiens
ccaagcccgagggccccagcgaccctccggccctgctgtccacgctgaatgtgaacgtgggtggccacactaccagctggactactgcgagctggccggcttccccaagacgcgcctag

SEQ ID NO: 4397 - DNA, 119 bp, homo sapiens
gggtggccacagctaccagctggactactgcgagctggccggcttccccaagacgcgcctaggtcgcctgccacctccaccagccgcagccgccagctaagcctgtgcgacgactacga

SEQ ID NO: 4398 - DNA, 119 bp, homo sapiens
ctaggtcgcctggccacctccaccagccgcagccgccagctaagcctgtgcgacgactacgaggagcagcagacgaatacttcttcgaccgcgacccggccgtcttccagctggtctac

SEQ ID NO: 4399 - DNA, 119 bp, homo sapiens
acgaggagcagacagacgaatacttcttcgaccgcgacccggccgtcttccagctggtctacaatttctcctgtccggggtgctgctggtgctcgacgggctgtgtccgcgccgcttcc

SEQ ID NO: 4400 - DNA, 119 bp, homo sapiens
ctacaatttctacctgtccggggtgctgctggtgctcgacgggctgtgtccgcgccgcttcctggaggactgggctactggggcgtgcggctcaagtacacgccacgctgctgccgcat

SEQ ID NO: 4401 - DNA, 119 bp, homo sapiens
ttcctggaggagctgggctactggggcgtgcggctcaagtacacgccacgctgctgccgcatctgcttcaggagcggcgcgacgagctgagcgaacggctcaagatccagcacgagctg

SEQ ID NO: 4402 - DNA, 119 bp, homo sapiens
gcatctgcttcgaggagcggcgcgacgagctgagcgaacggctcaagatccagcacgagctgcgcgcgcggcgcaggtcgaggaggcggaggaactcttccgcgacatgcgcttctacg

SEQ ID NO: 4403 - DNA, 119 bp, homo sapiens
gctgcgcgcgcaggcgcaggtcgaggaggcggaggaactcttccgcgacatgcgcttctacggcccgcacggcgccgcctctggaacctcatggagaagccattctcctcggtggccgc

SEQ ID NO: 4404 - DNA, 119 bp, homo sapiens
tacggcccgcagcggcgccgcctctggaacctcatggagaagccattctcctcggtggccgccaaggcctcggggtggcctccagcaccttcgtgctcgtctccgtggtggcgctggcg

SEQ ID NO: 4405 - DNA, 119 bp, homo sapiens
ccgccaaggccatcggggtggcctccagcaccttcgtgctcgtctccgtggtggcgctggcgctcaacacgtggaggagatgcagcagcactcggggcagggcgagggcggcccagacc

SEQ ID NO: 4406 - DNA, 119 bp, homo sapiens
ggcgctcaacaccgtggaggagatgcagcagcactcggggcagggcgagggcggcccagacctgcggccatcctggagcacgtggagatgctgtgcatgggcttcttcacgctcgagta

SEQ ID NO: 4407 - DNA, 119 bp, homo sapiens
gacctgcggcccatcctggagcacgtggagatgctgtgcatgggcttcttcacgctcgagtacctgctggcctagcctccacgcccgacctgaggcgcttcgcgcgcagcgccctcaac

SEQ ID NO: 4408 - DNA, 119 bp, homo sapiens
agtacctgctgcgcctagcctccacgcccgacctgaggcgcttcgcgcgcagcgccctcaacctggtggcctggtggccatcctgccgctctaccttcagctgctgctcgagtgcttca

SEQ ID NO: 4409 - DNA, 119 bp, homo sapiens
caacctggtggacctggtggccatcctgccgctctaccttcagctgctgctcgagtgcttcacgggcgaggccaccaacgcggccagacggtgggcagcgtgggtaaggtgggtcaggt

SEQ ID NO: 4410 - DNA, 119 bp, homo sapiens
ttcacgggcgagggccaccaacgcggccagacggtgggcagcgtgggtaaggtgggtcaggtgttgcgctcatgcgcctcatgcgcatcttccgcatcctcaagctggcgcgccactcc

SEQ ID NO: 4411 - DNA, 119 bp, homo sapiens
aggtgttgcgcgtcatgcgcctcatgcgcatcttccgcatcctcaagctggcgcgccactccaccggacgcgtgccttcggcttcacgctgcgccagtgctaccagcaggtgggctgcc

SEQ ID NO: 4412 - DNA, 119 bp, homo sapiens
ctccaccggactgcgtgccttcggcttcacgctgcgccagtgctaccagcaggtgggctgcctgctgctttcatcgccatgggcatcttcactttctctgcggctgtctactctgtgga

SEQ ID NO: 4413 - DNA, 119 bp, homo sapiens
tgcctgctgctcttcatcgccatgggcatcttcactttctctgcggctgtctactctgtggagcacgattgcccagcaccaacttcactaccatcccccactcctggtggtgggccgcg

SEQ ID NO: 4414 - DNA, 119 bp, homo sapiens
gtgagcatctccaccgtgggctacggagacatgtacccagagacccacctgggcaggttttttgccttctctgcattgcttttgggatcattctcaacgggatgcccatttccatcctc

SEQ ID NO: 4415 - DNA, 119 bp, homo sapiens
ttttgccttcctctgcattgcttttgggatcattctcaacgggatgcccatttccatcctctacaacaattttctgattactacagcaagctgaaggcttatgagtataccaccatacg

SEQ ID NO: 4416 - DNA, 119 bp, homo sapiens
tctacaacaagttttctgattactacagcaagctgaaggcttatgagtataccaccatacgcagggagagggagaggtgaacttcatgcagagagccagaaagaagatagctgagtgtt

SEQ ID NO: 4417 - DNA, 119 bp, homo sapiens
cgcagggagaggggagaggtgaacttcatgcagagagccagaaagaagatagctgagtgtttgcttggagcaacccacagctcaccccaagacaagagaattagtattttataggacat

SEQ ID NO: 4418 - DNA, 119 bp, homo sapiens
tttgcttggaagcaacccacagctcaccccaagacaagagaattagtattttataggacatgtggctggagattccatgaacttcaaggcttcattgctctttttttaatcattatgat

SEQ ID NO: 4419 - DNA, 119 bp, homo sapiens
atgtggctggtagattccatgaacttcaaggcttcattgctctttttttaatcattatgattggcagcaaaggaaatgtgaagcagacatacacaaaggccatttcgttcacaaagtac

SEQ ID NO: 4420 - DNA, 119 bp, homo sapiens
attggcagcaaaaggaaatgtgaagcagacatacacaaaggccatttcgttcacaaagtactgcctctaaaatactcattttggcccaaactcagaatgtctcatagttgctctgtgtt

SEQ ID NO: 4421 - DNA, 119 bp, homo sapiens
actgcctctagaaatactcattttggcccaaactcagaatgtctcatagttgctctgtgttgtgtgaaaatctgaccttctcaatgacgttgatattgaaaacctgaggggagcaacag

SEQ ID NO: 4422 - DNA, 119 bp, homo sapiens
ttgtgtgaaacatctgaccttctcaatgacgttgatattgaaaacctgaggggagcaacagcttagattttcttgtagcttctcgtggcatctagctcaataaatatttttggacttga

SEQ ID NO: 4423 - DNA, 119 bp, homo sapiens
ctggattttcctctacgtgcttcagtcttctctacacaaagagctgcaaaccaggtctttgttttgcaccttatttcaagcagaatgagtgctcctaaactcctctctctgggctgtat

SEQ ID NO: 4424 - DNA, 119 bp, homo sapiens
ttgttttgcactcttatttcaagcagaatgagtgctcctaaactcctctctctgggctgtatcttcttcccttgctactttttcagcaggcccgggctcaattcccaagacagtgtgcc

SEQ ID NO: 4425 - DNA, 119 bp, homo sapiens
gtatcttcttccccttgctactttttcagcaggcccgggctcaattcccaagacagtgtgccactgttgggctttgagaagtggtatgtgttgcccagacctgtcccctgtgtctgggc

SEQ ID NO: 4426 - DNA, 119 bp, homo sapiens
tgccactgttgaggctttgagaagtggtatgtgttgcccagacctgtcccctgtgtctgggcctgggacgaccgctgtggctcatcatcagggaggggcagatgtgaggcagtgactgc

SEQ ID NO: 4427 - DNA, 119 bp, homo sapiens
gggcctgggacagaccgctgtggctcatcatcagggaggggcagatgtgaggcagtgactgcagactccggccccacagccctcagtatccccatgatggcagagatgatcgggaggtc

SEQ ID NO: 4428 - DNA, 119 bp, homo sapiens
ctgcagactcccggccccacagccctcagtatccccatgatggcagagatgatcgggaggtctggccctgcgcttcttcaataggacatgtcactgcaacggcaatttctcaggacaca

SEQ ID NO: 4429 - DNA, 119 bp, homo sapiens
ggtctggcccttgcgcttcttcaataggacatgtcactgcaacggcaatttctcaggacacaactgtggacgtgccgtcctggctggagaggagctgcctgtgaccagagggttctcat

SEQ ID NO: 4430 - DNA, 119 bp, homo sapiens
tcaggagaaatcttctggacttaagtaaagaagaaaagaaccactttgtccgggccctggatatggcaagcgcacaactcaccctttatttgtcattgccaccaggagatcagaagaaa

SEQ ID NO: 4431 - DNA, 119 bp, homo sapiens
cgggccctggatatggcaaagcgcacaactcaccctttatttgtcattgccaccaggagatcagaagaatactggggccagatggcaacacgccacaatttgagaacatttccatttat

SEQ ID NO: 4432 - DNA, 119 bp, homo sapiens
caccaggagatcagaagaaatactggggccagatggcaacacgccacaatttgagaacatttccatttaaactactttgtttggacacactattactcagtcaaaaagactttccttgg

SEQ ID NO: 4433 - DNA, 119 bp, homo sapiens
ttgagaacatttccatttataactactttgtttggacacactattactcagtcaaaaagactttccttgggtaggacaggaaagctttggtgaagtggatttctctcatgagggaccag

SEQ ID NO: 4434 - DNA, 119 bp, homo sapiens
gtcaaaaagactttccttggggtaggacaggaaagctttggtgaagtggatttctctcatgagggaccacttttctcacatggcacaggtaccacctcctgcgtctggagaaagacatg

SEQ ID NO: 4435 - DNA, 119 bp, homo sapiens
gaaatgttgcaagagccttctttctcccttccttactggaattttgcaacggggaaaaatgtctgtgattctgcacggatgacttgatgggatccagaagcaactttgattccactcta

SEQ ID NO: 4436 - DNA, 119 bp, homo sapiens
tttgcaacggggaaaaatgtctgtgatatctgcacggatgacttgatgggatccagaagcaactttgatccactctaataagcccaaactctgtcttttctcaatggcgagtggtctgt

SEQ ID NO: 4437 - DNA, 119 bp, homo sapiens
ttgatgggatccagaagcaactttgattccactctaataagcccaaactctgtcttttctcaatggcgatggtctgtgactccttggaagattatgataccctgggaacactttgtaac

SEQ ID NO: 4438 - DNA, 119 bp, homo sapiens
gcaccgaggatgggccaattaggagaaatccagctggaaatgtggccagaccaatggtgcaacgtcttctgaaccacaggatgtcgctcagtgcttggaagttggtttatttgacacgc

SEQ ID NO: 4439 - DNA, 119 bp, homo sapiens
gaccaatggtgcaacgtcttcctgaaccacaggatgtcgctcagtgcttggaagttggtttatttgacagcctcctttttattccaactctacaaacagtttccgaaacacagtggaag

SEQ ID NO: 4440 - DNA, 119 bp, homo sapiens
gttacagtgaccccacgggaaagtatgaccctgctgttcgaagtcttcacaatttggctcatctattccgaatggaacagggggacaaacccatttgtctccaaatgatcctatttttg

SEQ ID NO: 4441 - DNA, 119 bp, homo sapiens
atctattcctgaatggaacagggggacaaacccatttgtctccaaatgatcctatttttgtcctcctgccaccttcacagatgcagtctttgatgaatggctgaggagatacaatgctg

SEQ ID NO: 4442 - DNA, 119 bp, homo sapiens
atatatccacatttccattggaaaatgcccctattggacataatagacaatacaacatggtgccattctgcccccagtcaccaacacagaaatgtttgttactgctccagacaacctgg

SEQ ID NO: 4443 - DNA, 119 bp, homo sapiens
cccctattggacataatagacaatacaacatggtgccattctggcccccagtcaccaacacagaaatgttgttactgctccagacaacctgggatacacttatgaaattcaatggccaa

SEQ ID NO: 4444 - DNA, 119 bp, homo sapiens
gtcgggagtttagtgtacctgagataattgccatagcagtagttggcgctttgttactggttgcactcattttgggactgcttcttatctgattcgtgccagacgcagtatggatgaag

SEQ ID NO: 4445 - DNA, 119 bp, homo sapiens
gttgcactcatttttgggactgcttcttatctgattcgtgccagacgcagtatggatgaagctaaccagctctcctcactgatcagtatcaatgctatgctgaagaatatgaaaaactc

SEQ ID NO: 4446 - DNA, 119 bp, homo sapiens
agctaaccagcctctcctcactgatcagtatcaatgctatgctgaagaatatgaaaaactccagaatccaatcagtctgtggtctaacaaatgccctactctcttatgcattagtatca

SEQ ID NO: 4447 - DNA, 119 bp, homo sapiens
tccagaatcctaatcagtctgtggtctaacaaatgccctactctcttatgcattagtatcacaaaaccactggttgaatataatagattgagttattaactgtattttctttcacttta

SEQ ID NO: 4448 - DNA, 119 bp, homo sapiens
cacaaaaccacctggttgaatataatagattgagttattaactgtattttctttcactttattaccttcttctaatacaagcatatgttagcattaaagttctaggcatacttttcaaa

SEQ ID NO: 4449 - DNA, 119 bp, homo sapiens
tattaccttctttctaatacaagcatatgttagcattaaagttctaggcatacttttcaaagctgggaaaccctttcagaatcttttcaatgggttttaattttcagttctatttaaaa

SEQ ID NO: 4450 - DNA, 119 bp, homo sapiens
aagctgggaagaccctttcagaatcttttcaatgggttttaattttcagttctatttaaaatggtgaatacactaaactccatgatatttaaggatagtgtgaagatctttggcatgat

SEQ ID NO: 4451 - DNA, 119 bp, homo sapiens
aatggtgaatgacactaaactccatgatatttaaggatagtgtgaagatctttggcatgatttaaaggtgagtatgtgaagatataagtaagtgaactaccatgctttgtttacgtgta

SEQ ID NO: 4452 - DNA, 119 bp, homo sapiens
atttaaaggttgagtatgtgaagatataagtaagtgaactaccatgctttgtttacgtgtaaaggaaaaaatgtttgatagtaaatgtccacttaaaatacatgaatgggcatttctaa

SEQ ID NO: 4453 - DNA, 119 bp, homo sapiens
taaaggaaaataatgtttgatagtaaatgtccacttaaaatacatgaatgggcatttctaaaatgttaaacataaacacatttccattcatggatatttgtcaacagatttaaagaaaa

SEQ ID NO: 4454 - DNA, 119 bp, homo sapiens
aaaatgttaaaacataaacacatttccattcatggatatttgtcaacagatttaaagaaaaccacagttttaattaaagaaaattaattatgtgtagttataaaccaatgaaattttga

SEQ ID NO: 4455 - DNA, 119 bp, homo sapiens
aaccacagttattaattaaagaaaattaattatgtgtagttataaaccaatgaaattttgattaacctttcaaattaatgttccagtttgaagaccaatcaaatatattatttagtcaa

SEQ ID NO: 4456 - DNA, 119 bp, homo sapiens
gattaaccttttcaaattaatgttccagtttgaagaccaatcaaatatattatttagtcaacatatacttttagtctcaggttcaaggctacaacaaaaatcaccatctttgtcaaact

SEQ ID NO: 4457 - DNA, 119 bp, homo sapiens
aacatatactatttagtctcaggttcaaggctacaacaaaaatcaccatctttgtcaaactttggagaggaaaatcttcactttcttaagcaacaatggatattgcctgtgtttgccac

SEQ ID NO: 4458 - DNA, 119 bp, homo sapiens
ctttggagagggaaaatcttcactttcttaagcaacaatggatattgcctgtgtttgccactgtgtttcctgcctctcaattcgctgaaaaaggaactacctatccttacatttcacct

SEQ ID NO: 4459 - DNA, 119 bp, homo sapiens
actgtgtttccctgcctctcaattcgctgaaaaaggaactacctatccttacatttcacctactaatgttcttctaacatcttagaggtccatggagaaggcatatggagaacatgttt

SEQ ID NO: 4460 - DNA, 119 bp, homo sapiens
ctactaatgtctcttctaacatcttagaggtccatggagaaggcatatggagaacatgttttatactgcctataaatagtattccaatcactgtgcttaatttaaatagcattatctta

SEQ ID NO: 4461 - DNA, 119 bp, homo sapiens
tttatactgctctataaatagtattccaatcactgtgcttaatttaaatagcattatcttatcatttatagccttttatgtattttccaagtaaaatattaacatattatttcattggt

SEQ ID NO: 4462 - DNA, 119 bp, homo sapiens
tatcatttatcagccttttatgtattttccaagtaaaatattaacatattatttcattggtcttctttttatctggttctatatgaatgctattttttcccttctcttctaacatgaaa

SEQ ID NO: 4463 - DNA, 119 bp, homo sapiens
gtcttcttttttatctggttctatatgaatgctattttttcccttctcttctaacatgaaatatatttttctttttgatcttgtgctatgaaacaatcttccaaagaactgtataaggt

SEQ ID NO: 4464 - DNA, 119 bp, homo sapiens
tatgacaagggtttttcatgtttatttagcaagttaaatgctgtttttactgatgatagaaagcaaatagatactcctcaaaatcaaagaaaataattaaaactataaagtatttgttc

SEQ ID NO: 4465 - DNA, 119 bp, homo sapiens
gatagaaagcaaataagatactcctcaaaatcaaagaaaataattaaaactataaagtatttgttcaccgaagttcagtatttatgacataattatgcccttagctactttcaagattt

SEQ ID NO: 4466 - DNA, 119 bp, homo sapiens
aagtatttgttcacctgaagttcagtatttatgacataattatgcccttagctactttcaagattttaatttactaaaataaactttaaaaaaaaatactgcataggaaaatgtctgat

SEQ ID NO: 4467 - DNA, 119 bp, homo sapiens
ctttcaagattttaactttactaaaataaactttaaaaaaaaatactgcataggaaaatgtctgattctgttttaaagtgttactgttttattttttttcttttgttgaatacacattt

SEQ ID NO: 4468 - DNA, 119 bp, homo sapiens
aaaatgtctgattcttgttttaaagtgttactgttttattttttttcttttgttgaatacacatttgtttactggcagtccagataaacaagtatataaaggaaatagtaaatttttat

SEQ ID NO: 4469 - DNA, 119 bp, homo sapiens
gaatacacatttgttttactggcagtccagataaacaagtatataaaggaaatagtaaatttttattttgcagaagataaactgtgcagattaaaatgcctcaatttaacctgaagaaa

SEQ ID NO: 4470 - DNA, 119 bp, homo sapiens
gtaaatttttattttggcagaagataaactgtgcagattaaaatgcctcaatttaacctgaagaaatggtttgaatcatataaatttttaagaagaaaaataaagactgtccaaaggga

SEQ ID NO: 4471 - DNA, 119 bp, homo sapiens
aacctgaagaaatggttttgaatcatataaatttttaagaagaaaaataaagactgtccaaagggattccctagcttataacacatttccagaataactctcaaaaaaaaaaaattcaa

SEQ ID NO: 4472 - DNA, 119 bp, homo sapiens
tgtccaaagggattctcctagcttataacacatttccagaataactctcaaaaaaaaaaaattcaaaaaactcattgactaccttaaaaatatgtcaataccgtatggctttatgaaat

SEQ ID NO: 4473 - DNA, 119 bp, homo sapiens
ggaccccaagttttaaataagctgctagcagtatcattttcttcacttaaaagtgcatatctttgaggggggacatacattttgaacaaataatgatttttacaaattaacaccaaaaa

SEQ ID NO: 4474 - DNA, 119 bp, homo sapiens
atctttgagggtgggacatacattttgaacaaataatgatttttacaaattaacaccaaaaaaaaaatctttaaaatattgtaaggaggaagagagttttcaccaaatgtcatctttaa

SEQ ID NO: 4475 - DNA, 119 bp, homo sapiens
aaaaaaaaatcatttaaaatattgtaaggaggaagagagttttcaccaaatgtcatctttaaatagactcagtagacgacattcttcctttttcctttttataacatcataattctcaa

SEQ ID NO: 4476 - DNA, 119 bp, homo sapiens
ttaaatagactgcagtagacgacattcttcctttttcctttttataacatcataattctcaatgaaatgtttggcagttttaagacatatcacagtctctaccaagacatactgacatt

SEQ ID NO: 4477 - DNA, 119 bp, homo sapiens
tcaatgaaatgctttggcagttttaagacatatcacagtctctaccaagacatactgacattaatgatgccgtggcgatggcaattgccttgatggctcagtttgaagagacacaatgt

SEQ ID NO: 4478 - DNA, 119 bp, homo sapiens
cattaatgatgtccgtggcgatggcaattgccttgatggctcagtttgaagagacacaatgttactgggtggttctccaaatcagaaacaaaggtgctctcttctcttacatcgagagt

SEQ ID NO: 4479 - DNA, 119 bp, homo sapiens
atgttactgggctggttctccaaatcagaaacaaaggtgctctcttctcttacatcgagagtttgttcactgaagctgccagaggtggaatattatctacagttttgttggcattattc

SEQ ID NO: 4480 - DNA, 119 bp, homo sapiens
gagtttgttcaactgaagctgccagaggtggaatattatctacagttttgttggcattattcaagttgtactaagtgtggcaatatcacattccttgtccagcacaccaaattcagctt

SEQ ID NO: 4481 - DNA, 119 bp, homo sapiens
attcaagttgttactaagtgtggcaatatcacattccttgtccagcacaccaaattcagcttctattgtactacatctttagtttcaaatggttccaaggaaggagccaaaaactcatt

SEQ ID NO: 4482 - DNA, 119 bp, homo sapiens
gcttctattgtaactacatctttagtttcaaatggttccaaggaaggagccaaaaactcattttgtagaggtcttgaggaccactattgtcacattctgtatcctcctttacttcagaa

SEQ ID NO: 4483 - DNA, 119 bp, homo sapiens
cattttgtagagggtcttgaggaccactattgtcacattctgtatcctcctttacttcagaatccttatactgtcactgtcaatggtaattacaactggggaacgtgaagcattatctc

SEQ ID NO: 4484 - DNA, 119 bp, homo sapiens
atggtgtttagttgtatcagtagcttttccttcataaactatctctacacttaggctccgggtcttccttttctccttttgtgttttgtctctctgtctgatgatcggctgtctgaaaa

SEQ ID NO: 4485 - DNA, 119 bp, homo sapiens
gggtcttcctttttctccttttgtgttttgtctctctgtctgatgatcggctgtctgaaaaggtatcacctcatttttgtagtttccatccaattttgatgaagatttttggtaatgac

SEQ ID NO: 4486 - DNA, 119 bp, homo sapiens
aaggtatcactctcatttttgtagtttccatccaattttgatgaagatttttggtaatgactgtcctttctttagaagcaaattcacgagatggctgagccacttcgttagtaccctcc

SEQ ID NO: 4487 - DNA, 119 bp, homo sapiens
actgtcctttgctttagaagcaaattcacgagatggctgagccacttcgttagtaccctccaaatgccggttttgtattttcgtttccctccaggcttttcatttctcacccggtcagt

SEQ ID NO: 4488 - DNA, 119 bp, homo sapiens
ccaaatgccgtgttttgtattttcgtttccctccaggcttttcatttctcacccggtcagtcccggtagtgcagtccttgatctgttactagacaggctccttgatctgtgcctttcat

SEQ ID NO: 4489 - DNA, 119 bp, homo sapiens
gtcccggtagatgcagtccttgatctgttactagacaggctccttgatctgtgcctttcatagtagtaaacttcctctcactgtgattattttttttcctagcatttgttctttcagaa

SEQ ID NO: 4490 - DNA, 119 bp, homo sapiens
atagtagtaatacttcctctcactgtgattattttttttcctagcatttgttctttcagaaaaggactgactctaaattctggacttgaagactgtctagaataatgagctctggacag

SEQ ID NO: 4491 - DNA, 119 bp, homo sapiens
aaaaggactgaactctaaattctggacttgaagactgtctagaataatgagctctggacagagtcctcccctgtaagatgattcgtacccatccctgtccttgtttctactgtaataag

SEQ ID NO: 4492 - DNA, 119 bp, homo sapiens
agagtcctcctcctgtaagatgattcgtacccatccctgtccttgtttctactgtaataagtatactccatttgtatctgcttccataattatttcttaaataataacgatctctattt

SEQ ID NO: 4493 - DNA, 119 bp, homo sapiens
agtatactcccatttgtatctgcttccataattatttcttaaataataacgatctctatttctgctccggatcttcttttaccatgatcactgctacgagaccttgatctgcttgtgct

SEQ ID NO: 4494 - DNA, 119 bp, homo sapiens
ttctgctccgtgatcttcttttaccatgatcactgctacgagaccttgatctgcttgtgctttcactactagagacagagtttggcttcttctggaccaactgctatctctagttcttg

SEQ ID NO: 4495 - DNA, 119 bp, homo sapiens
ctttcactacttagagacagagtttggcttcttctggaccaactgctatctctagttcttgatctcttttgtctcttctccctctaggtctgctactttccctgcttctggatcgttta

SEQ ID NO: 4496 - DNA, 119 bp, homo sapiens
tgatctctttttgtctcttctccctctaggtctgctactttccctgcttctggatcgtttacttttcatcttttcttcccatgatgctttctatgattcttctgatcatgcccacttct

SEQ ID NO: 4497 - DNA, 119 bp, homo sapiens
tacttttcattcttttcttcccatgatgctttctatgattcttctgatcatgcccacttctactctgagacgtgaatctgaacttcttgatcttcccctctttctgtgtctatggttat

SEQ ID NO: 4498 - DNA, 119 bp, homo sapiens
ctactctgagaacgtgaatctgaacttcttgatcttcccctctttctgtgtctatggttatatggagaaatactctgtctcctcttacagatgagttcaggtttctgggagatgacaat

SEQ ID NO: 4499 - DNA, 119 bp, homo sapiens
atatggagaatatactctgtctcctcttacagatgagttcaggtttctgggagatgacaatgatgtagacgtttctcttccttctttgatttgattcttgtactagaatcacaatgacc

SEQ ID NO: 4500 - DNA, 119 bp, homo sapiens
atgatgtagatcgtttctcttccttctttgatttgattcttgtactagaatcacaatgacctttatttattgttcatcctttccaaggacagagtgtggagatgagcatctactaacat

SEQ ID NO: 4501 - DNA, 119 bp, homo sapiens
cctttatttatttgttcatcctttccaaggacagagtgtggagatgagcatctactaacatcgctatcacagaactgtaagattgctcctgttcttgtgtcttcactgtctccattttc

SEQ ID NO: 4502 - DNA, 119 bp, homo sapiens
atcgctatcaccagaactgtaagattgctcctgttcttgtgtcttcactgtctccattttctcataagacctaagtcctcagaatcagaggacagttcaacaagttctggggtcctctc

SEQ ID NO: 4503 - DNA, 119 bp, homo sapiens
tctcataagaacctaagtcctcagaatcagaggacagttcaacaagttctggggtcctctcagctagtgtttaacaaacccaacaatgacacaattatctgaagaatcatcactgtcat

SEQ ID NO: 4504 - DNA, 119 bp, homo sapiens
tcagctagtggtttaacaaacccaacaatgacacaattatctgaagaatcatcactgtcattatttaggcgtcattggtttgtactccttgtatctgagacgtggctcctcctgtgaca

SEQ ID NO: 4505 - DNA, 119 bp, homo sapiens
attatttaggtcgtcattggtttgtactccttgtatctgagacgtggctcctcctgtgacaagttcttctctgaactgtcagaagtatttaaaagagaagacatagtaacgtgtacctg

SEQ ID NO: 4506 - DNA, 119 bp, homo sapiens
caagttcttcatctgaactgtcagaagtatttaaaagagaagacatagtaacgtgtacctgctctgagctgagtaagatggtcctggagtttcatcatcccatggtgcctgactaacag

SEQ ID NO: 4507 - DNA, 119 bp, homo sapiens
tgctctgagcttgagtaagatggtcctggagtttcatcatcccatggtgcctgactaacagtggctacataatatccagctcttgggtctcagcctcatctggagatattgttatgact

SEQ ID NO: 4508 - DNA, 119 bp, homo sapiens
agtggctacattaatatccagctcttgggtctcagcctcatctggagatattgttatgactgaagaatcgaatggctgccttcttcgtatgaaggagcagggcaatcataattggcatg

SEQ ID NO: 4509 - DNA, 119 bp, homo sapiens
ctgaagaatcagaatggctgccttcttcgtatgaaggagcagggcaatcataattggcatgctggtcaaggctgccatgttaaaaggagatcgggcaaaactgataaattcatgtataa

SEQ ID NO: 4510 - DNA, 119 bp, homo sapiens
tgctggtcaaaggctgccatgttaaaaggagatcgggcaaaactgataaattcatgtataaaatgctcattcgattaagtaaaaatggtcttaaatcagacacaaatgcctgactctcc

SEQ ID NO: 4511 - DNA, 119 bp, homo sapiens
aaaatgctcagttcgattaagtaaaaatggtcttaaatcagacacaaatgcctgactctccaagtcatacgagtaacattactcatgataatatgctggacaatattcactaaagatcc

SEQ ID NO: 4512 - DNA, 119 bp, homo sapiens
ccaagtcatagcgagtaacattactcatgataatatgctggacaatattcactaaagatccatgagctcaaaaagaactgtaagttcacgttttaaccaggggactaatctgtgaaggc

SEQ ID NO: 4513 - DNA, 119 bp, homo sapiens
ccatgagctccaaaaagaactgtaagttcacgttttaaccaggggactaatctgtgaaggcaagctggattctacggaaaaattcagctgaaatatccctgtagcggccaccatcttca

SEQ ID NO: 4514 - DNA, 119 bp, homo sapiens
gcaagctggatttctacggaaaaattcagctgaaatatccctgtagcggccaccatcttcaatatttctactcgagcaccagcacgataaagagttcgtctaaaattaataatatcttg

SEQ ID NO: 4515 - DNA, 119 bp, homo sapiens
caatatttctaactcgagcaccagcacgataaagagttcgtctaaaattaataatatcttgttcttgaatttccgcaaagatctttcatctgccgtagttggcctccttactgcaatct

SEQ ID NO: 4516 - DNA, 119 bp, homo sapiens
tgttcttgaattttccgcaaagatctttcatctgccgtagttggcctccttactgcaatctgtctcataactgaggaatttcaacatctctaggtcttgttgaaatgcctaacccttca

SEQ ID NO: 4517 - DNA, 119 bp, homo sapiens
ctgtctcataaactgaggaatttcaacatctctaggtcttgttgaaatgcctaacccttcaaacagtacccactatccggtggagttgttgttcttctgttcacaggaccactaggtga

SEQ ID NO: 4518 - DNA, 119 bp, homo sapiens
caaacagtactccactatccggtggagttgttgttcttctgttcacaggaccactaggtgaatacacagagcatttcgttcccttgtcagagttgtacggtagcgaaatcgtcgatcag

SEQ ID NO: 4519 - DNA, 119 bp, homo sapiens
gaatacacagaagcatttcgttcccttgtcagagttgtacggtagcgaaatcgtcgatcaggggtgacaaagaaccattatacgaaggccttaggacatactccttgaagtcatcttct

SEQ ID NO: 4520 - DNA, 119 bp, homo sapiens
aggggtgacaaaagaaccattatacgaaggccttaggacatactccttgaagtcatcttctgccctcacgaatggaaaatagaatcaaagggctgtttacatagtgggcattcagcttt

SEQ ID NO: 4521 - DNA, 119 bp, homo sapiens
ctgccctcacagaatggaaaatagaatcaaagggctgtttacatagtgggcattcagctttgttttttgccactcctgtacacagcgaaaacagaacttatgtaagcagcgatctaagt

SEQ ID NO: 4522 - DNA, 119 bp, homo sapiens
ttgttttttgaccactcctgtacacagcgaaaacagaacttatgtaagcagcgatctaagtaagacacatatcaaatctatccaagcatataggacacttagaatcaggagatgcatca

SEQ ID NO: 4523 - DNA, 119 bp, homo sapiens
gtaagacacattatcaaatctatccaagcatataggacacttagaatcaggagatgcatcagctggtacgtctgttgcaatttgctagtgccagctttaggtgaaaagttgtccatttt

SEQ ID NO: 4524 - DNA, 119 bp, homo sapiens
ctcggaggatgccggcgcaggcctggctggggcgctcgccgcgagctcccggcagcccagaaagctaggcggtgtcggcaggatccgcgaaggcgtacccggcgacttctccgcctacc

SEQ ID NO: 4525 - DNA, 119 bp, homo sapiens
gccgcgagctcccggcagcccagaaagctaggtcggtgtcggcaggatccgcgaaggcgtacccggcgattctccgcctaccctccgaagcgggagcaggcgggggcgcttcaccctcc

SEQ ID NO: 4526 - DNA, 119 bp, homo sapiens
gtcggcaggatccgcgaaggcgtacccggcgacttctccgcctaccctccgaagcgggagcaggcggggcgcttcaccctcctcgcgagacagcggagaccccagcggcggctgcgacc

SEQ ID NO: 4527 - DNA, 119 bp, homo sapiens
catgaagccagtaagtcgtcgcacgctggactggatttattcagtggtaagtcccggggatcgcgggccccaccgtgtcgactcactgggcccgcaggcggaaaggccctatttcttca

SEQ ID NO: 4528 - DNA, 119 bp, homo sapiens
tattcagtggtaagtcccggggatcgcgggcccccaccgtgtcgactcactgggcccgcaggcggaaagccctatttcttcagcacccagaaactccaaaatccattcctgaattaagc

SEQ ID NO: 4529 - DNA, 119 bp, homo sapiens
cgtgtcgactcactgggcccgcaggcggaaaggccctatttcttcagcacccagaaactccaaaatccatcctgaattaagcatttcactccctcacctcgactccgcctcttcctgga

SEQ ID NO: 4530 - DNA, 119 bp, homo sapiens
gaactacaattcccagaaggatgtgcggccgaaagcctcgggcggccttttgaggggctcggctagcttagcgccgtggggtctgacctggctggatatagtgtaccggcccggcagga

SEQ ID NO: 4531 - DNA, 119 bp, homo sapiens
gcctcgggcggccttttgaggggctcggctagcttcagcgccgtggggtctgacctggctggatatagttaccggcccggcaggaggggcggcccggtccgggttgcgcctcctggagc

SEQ ID NO: 4532 - DNA, 119 bp, homo sapiens
tcagcgccgtggggtctgacctggctggatatagtgtaccggcccggcaggaggggcggcccggtccggttgcgcctcctggagccgcccccgggacgtcagtcctggaggaggcgagg

SEQ ID NO: 4533 - DNA, 119 bp, homo sapiens
gttgctccggttgctaagaagactatgaacaagtcagagaacctgctgtttgctggttcatcattagcacacaagtccatgctgctgccgttaatggagataagggtgctctacagagg

SEQ ID NO: 4534 - DNA, 119 bp, homo sapiens
ttgctaagaagactatgaacaagtcagagaacctgctgtttgctggttcatcattagcatcacaagtcctgctgctgccgttaatggagataagggtgctctacagaggctcatcgtag

SEQ ID NO: 4535 - DNA, 119 bp, homo sapiens
gaaactctgctcttaaagacaaagaagatcagtttgggagaacaccacttatgtattgcgtgttggctgcagattggattgtgcagatgctcttctgaaggcaggagcagatgtgaata

SEQ ID NO: 4536 - DNA, 119 bp, homo sapiens
cttatgtattgcgtgttggctgacagattggattgtgcagatgctcttctgaaggcaggagcagatgtgataaaactgaccatagccagagaacagccctccatcttgcagcccagaag

SEQ ID NO: 4537 - DNA, 119 bp, homo sapiens
ggaaattatcgtttcatgaaactcttacttacacgcagagcaaactggatgcaaaaggatctggaagagtgactcctttgcacttgaccacccggcacaggagccctaagtgtttggca

SEQ ID NO: 4538 - DNA, 119 bp, homo sapiens
aaggatctggaagagatgactcctttgcacttgaccacccggcacaggagccctaagtgtttggcactttgctgaagtttatggcaccaggagaagtggatacacaggataaaaacaag

SEQ ID NO: 4539 - DNA, 119 bp, homo sapiens
caaacagctctgcattggagtgcctactacaataaccctgagcatgtgaagctgctcatcaagcatgatctaacattgggattcctgatgttgaaggcaagatcccacttcactgggca

SEQ ID NO: 4540 - DNA, 119 bp, homo sapiens
aagctgctcatcaagcatgattctaacattgggattcctgatgttgaaggcaagatcccacttcactggcagccaaccataaagatccaagtgctgttcacacagtgagatgcattctg

SEQ ID NO: 4541 - DNA, 119 bp, homo sapiens
gatgctgctccaacagagtctttactgaactggcaagactacgagggtcgaactcctcttcactttgcattgctgatgggaatgtgaccgtggttgatgtcttgacctcatatgaaagc

SEQ ID NO: 4542 - DNA, 119 bp, homo sapiens
tggcaagactacgagggtcgaactcctcttcactttgcagttgctgatgggaatgtgaccgtggttgattcttgacctcatatgaaagctgcaatataacgtcttatgataacttattt

SEQ ID NO: 4543 - DNA, 119 bp, homo sapiens
cactttgcagttgctgatgggaatgtgaccgtggttgatgtcttgacctcatatgaaagctgcaatatacgtcttatgataacttatttcgaaccccactgcactgggcagctttatta

SEQ ID NO: 4544 - DNA, 119 bp, homo sapiens
gaaacggttaaagtgtttttaaaacatccttcagtgaaagatgattcagacctggaaggaagaacatccttatgtgggcagctggcaaaggcagtgatgatgtccttagaactatgctg

SEQ ID NO: 4545 - DNA, 119 bp, homo sapiens
tggaaggaagaacatcctttatgtgggcagctggcaaaggcagtgatgatgtccttagaactatgctgacttaaaatcggacatagatattaacatggctgacaaatatggaggtacag

SEQ ID NO: 4546 - DNA, 119 bp, homo sapiens
ctttgcatgctgctgctctttctggccatgtcagcaccgtgaagttattactggaaaataatgctcaagagatgctactgatgttatgaaacatactccacttttccgagcctgtgaga

SEQ ID NO: 4547 - DNA, 119 bp, homo sapiens
ccgtgaagttattactggaaaataatgctcaagtagatgctactgatgttatgaaacatactccactttccgagcctgtgagatgggacacaaagatgtgattcagacactcattaaag

SEQ ID NO: 4548 - DNA, 119 bp, homo sapiens
gtggagcaagggtagatctagttgaccaagatggacattctcttctacattgggcagcactgggaggaatgctgatgtttgccagatattaatagaaaataagatcaatccaaatgtcc

SEQ ID NO: 4549 - DNA, 119 bp, homo sapiens
agcactgggaggaaatgctgatgtttgccagatattaatagaaaataagatcaatccaaatgtccaggatatgcaggaagaacccctttgcagtgtgcagcatatggaggctatatcaa

SEQ ID NO: 4550 - DNA, 119 bp, homo sapiens
ccaaatgtccaggattatgcaggaagaacccctttgcagtgtgcagcatatggaggctatatcaactgctggcagttctcatggaaaacaatgcagaccctaacattcaagacaaagag

SEQ ID NO: 4551 - DNA, 119 bp, homo sapiens
atacacaccccttgattatgctttgcttggtgagcgccatgaagtgatccagttcatgttggagcacgggccctgtccatcgcagccatacaagacatcgccgccttcaaaatccaagc

SEQ ID NO: 4552 - DNA, 119 bp, homo sapiens
atccagttcatgttggagcacggtgccctgtccatcgcagccatacaagacatcgccgccttcaaaatcaagctgtctacaaagggtacaaggtcagaaaagccttccgagacaggaaa

SEQ ID NO: 4553 - DNA, 119 bp, homo sapiens
aagacatcgccgccttcaaaatccaagctgtctacaaagggtacaaggtcagaaaagccttccgagacagaaaaatctcctcatgaagcatgaacagttgagaaaagatgctgctgcca

SEQ ID NO: 4554 - DNA, 119 bp, homo sapiens
aaagcgagaggaagaaaacaaacgaaaagaggcagaacagcaaaaaggaaggcggagcccagattcctgagaccccaggcccttccctgtctgcctagcacccaggatgtgcccagcag

SEQ ID NO: 4555 - DNA, 119 bp, homo sapiens
gagcccagattcctgcagaccccaggcccttccctgtctgcctagcacccaggatgtgcccagcaggcaagccgggcccccagcaagcagcctcctgctggcaacgtggcccaaggccc

SEQ ID NO: 4556 - DNA, 119 bp, homo sapiens
tgtgcccagcaggcagagccgggcccccagcaagcagcctcctgctggcaacgtggcccaaggccctgaccaagagacagcagaggatctccaggagggtctctaggcggagccctcca

SEQ ID NO: 4557 - DNA, 119 bp, homo sapiens
ggcccaaggccctgagccaagagacagcagaggatctccaggagggtctctaggcggagccctccagaagagcagcatgtttcctcagatttgcagggaacaaactccagaaggccaaa

SEQ ID NO: 4558 - DNA, 119 bp, homo sapiens
aaacagccagagaacattctaaaggccaatctgcttgtgtccacttcagacccaatgaaggcagtgatgaagcaggcatccaggagttccctctgttgagaagtccagaggtgagacag

SEQ ID NO: 4559 - DNA, 119 bp, homo sapiens
ggcagtgatggaagcaggcatccaggagttccctctgttgagaagtccagaggtgagacagctggcgatagcggtgtgcaaaggggaaaggcttcgtgaagcagccctcctgtatcagg

SEQ ID NO: 4560 - DNA, 119 bp, homo sapiens
agctggcgatgagcggtgtgcaaaggggaaaggcttcgtgaagcagccctcctgtatcagggtggctggcctgatgagaaaggagaggactccaggcgggcagctgcaagccttccacc

SEQ ID NO: 4561 - DNA, 119 bp, homo sapiens
gggtggctgggcctgatgagaaaggagaggactccaggcgggcagctgcaagccttccaccgcacgataccactggaagcccagcaggcggcatgacacagaacccaaggccaaatgtg

SEQ ID NO: 4562 - DNA, 119 bp, homo sapiens
ccgcacgatagccactggaagcccagcaggcggcatgacacagaacccaaggccaaatgtgccccccagaaaggcgcactcaagagctcagaggaggaaggtgctctccggctggttct

SEQ ID NO: 4563 - DNA, 119 bp, homo sapiens
tgccccccagaaaaggcgcactcaagagctcagaggaggaaggtgctctccggctggttctagccgcccggcagtgcccggggggaggcggtccatgctgggcagaatcctccccacca

SEQ ID NO: 4564 - DNA, 119 bp, homo sapiens
ctagccgccctggcagtgcccggggggaggcggtccatgctgggcagaatcctccccaccatcgtacacaagaaacaaagtgacacaagccaagctcacaggagggctctattcacatt

SEQ ID NO: 4565 - DNA, 119 bp, homo sapiens
catcgtacaccaagaaacaaagtgacacaagccaagctcacaggagggctctattcacatttgccacaggcacagaggagttgaggtcaggagctaggaggctggagacatctaccctg

SEQ ID NO: 4566 - DNA, 119 bp, homo sapiens
tttgccacagagcacagaggagttgaggtcaggagctaggaggctggagacatctaccctgtccgaggatttcaggtatctaaggagactgatccagcacctggtcccctctctgggca

SEQ ID NO: 4567 - DNA, 119 bp, homo sapiens
tgtccgaggactttcaggtatctaaggagactgatccagcacctggtcccctctctgggcagagtgtgatattgaccttctccccgtagagctccgactgcagataattcagagagaac

SEQ ID NO: 4568 - DNA, 119 bp, homo sapiens
cagagtgtgaatattgaccttctccccgtagagctccgactgcagataattcagagagaacgaaggaggaggagctgtttcgcaaaaagaacaaggcagcagcagtcatccagcgcgcc

SEQ ID NO: 4569 - DNA, 119 bp, homo sapiens
ctaccagctcaggaagcacctgtcccaccttcggcatatgaagcagcttggagctggagatgtggacagtggaggcaagagtctacagcattgctcctccaggtttggaggaaggaact

SEQ ID NO: 4570 - DNA, 119 bp, homo sapiens
ggagatgtggacagatggaggcaagagtctacagcattgctcctccaggtttggaggaaggaactggaataaaattcccccaaaccactgcagtaagcaaggcccccaagagtccatcc

SEQ ID NO: 4571 - DNA, 119 bp, homo sapiens
ggaaggaactggaactaaaattcccccaaaccactgcagtaagcaaggcccccaagagtccatccaaggcacctcaggcacaaagtccaccaagcactcagtgcttaagcaaatctatg

SEQ ID NO: 4572 - DNA, 119 bp, homo sapiens
tgagcaacctacagtgtatacatctccttgagaacagtggaagatcaaagaacttttcttataacctgcatcagctactcagccaaaaaacaaaacaaaaccttgactgcctatggagg

SEQ ID NO: 4573 - DNA, 119 bp, homo sapiens
tcttataacctgcaatcagctactcagccaaaaaacaaaacaaaaccttgactgcctatggaggaagacgtgttcgggggagctggcatagctagtgcagagttcagattttctgctga

SEQ ID NO: 4574 - DNA, 119 bp, homo sapiens
tatggaggaagactgtgttcgggggagctggcatagctagtgcagagttcagattttctgctgataatctttacaccttgggaaaactttaatatccgtacctgaaggctgattcacct

SEQ ID NO: 4575 - DNA, 119 bp, homo sapiens
tctgctgataatcttttacaccttgggaaaactttaatatccgtacctgaaggctgattcacctaaaaagtgttaactgaaagaaaatgtcagaatgtttcctttctgctcttacacag

SEQ ID NO: 4576 - DNA, 119 bp, homo sapiens
attcacctaaaaatgtgttaactgaaagaaaatgtcagaatgtttcctttctgctcttacacagcattgtttgtcaatcaacacagcctgcactgaaaggacctgcatagactatgtct

SEQ ID NO: 4577 - DNA, 119 bp, homo sapiens
ttacacagcattgttttgtcaatcaacacagcctgcactgaaaggacctgcatagactatgtctgtgcaagtgcctgagtgtctgctttcacctcagtctgtacagttggaaatgagaa

SEQ ID NO: 4578 - DNA, 119 bp, homo sapiens
ctatgtctgtgcaaagtgcctgagtgtctgctttcacctcagtctgtacagttggaaatgagaattcatattaacagcaaaatctaaggaaaactacggctgctgggttgggatttctg

SEQ ID NO: 4579 - DNA, 119 bp, homo sapiens
aatgagaattcataattaacagcaaaatctaaggaaaactacggctgctgggttgggatttctgccagcagctggtactggcttcttgtttcaagagatgaacctaaatgagataggaa

SEQ ID NO: 4580 - DNA, 119 bp, homo sapiens
gatttctgccagctagctggtactggcttcttgtttcaagagatgaacctaaatgagataggaagcctgcccatagcagccttcctctcactactttcctggcatctaatgcaacaaac

SEQ ID NO: 4581 - DNA, 119 bp, homo sapiens
taaccttgttcagatttctttattgaaaaattaaagtcataagctctgtatataaatacaatgacactgtggtcacctgcaaggcctctgggataggctgggggtgcagagggaagctg

SEQ ID NO: 4582 - DNA, 119 bp, homo sapiens
tacaatgacactgctggtcacctgcaaggcctctgggataggctgggggtgcagagggaagctggggcctggggtccccaggggcatggggagggaaataaataataaacaccatgggg

SEQ ID NO: 4583 - DNA, 119 bp, homo sapiens
ggaagctggggccttggggtccccaggggcatggggagggaaataaataataaacaccatgggggataagagccaggaggaatgggggtgtgaatggggaggtgctcgatgcttatttg

SEQ ID NO: 4584 - DNA, 119 bp, homo sapiens
ccatgggggataaggagccaggaggaatgggggtgtgaatggggaggtgctcgatgcttatttgtggcataaaggtcttgcaagatgccccctgactgggggccgtgtccatgaattct

SEQ ID NO: 4585 - DNA, 119 bp, homo sapiens
cttatttgtggcactaaaggtcttgcaagatgccccctgactgggggccgtgtccatgaattctcgagtacctcactttggacaaaggctcaggcatctggggatgggctgggtcctag

SEQ ID NO: 4586 - DNA, 119 bp, homo sapiens
tgaattctcgagtgacctcactttggacaaaggctcaggcatctggggatgggctgggtcctagctggagggggacagcagtgcccccaacccaacctggagaaaccagcactctgccc

SEQ ID NO: 4587 - DNA, 119 bp, homo sapiens
ggtcctagctggaggggggacagcagtgcccccaacccaacctggagaaaccagcactctgcccttcctttcctttcttcctgtcttgcaacccacttgtcctgggcgcctactgtgta

SEQ ID NO: 4588 - DNA, 119 bp, homo sapiens
ctctgcccttccttttcctttcttcctgtcttgcaacccacttgtcctgggcgcctactgtgtacccagacagcaccagttcctgacctgaccttctgtctgccttgtcctgctctctt

SEQ ID NO: 4589 - DNA, 119 bp, homo sapiens
actgtgtacccagtacagcaccagttcctgacctgaccttctgtctgccttgtcctgctctcttcctctccagttctggtccagtgggctgggatggaggggggatgtcttcctgccac

SEQ ID NO: 4590 - DNA, 119 bp, homo sapiens
gctctcttcctctcccagttctggtccagtgggctgggatggaggggggatgtcttcctgccaccctggcatgcagccccaaccccgcaaggagcttgatgaagccaacggtggaaagg

SEQ ID NO: 4591 - DNA, 119 bp, homo sapiens
cctgccaccctggccatgcagccccaaccccgcaaggagcttgatgaagccaacggtggaaagggactggaccaggggctgggcagtggtgggaggccctcaggccttggcctctagag

SEQ ID NO: 4592 - DNA, 119 bp, homo sapiens
tggaaagggactgggaccaggggctgggcagtggtgggaggccctcaggccttggcctctagagcatcaattgaactcagtgaccagaaagtcaatgtagtcacggtccttagtcttga

SEQ ID NO: 4593 - DNA, 119 bp, homo sapiens
ctctagagcatcacattgaactcagtgaccagaaagtcaatgtagtcacggtccttagtcttgaaggcccggcgataatgcgggcggcctcccggtgctccttgccccgaagcgtcagc

SEQ ID NO: 4594 - DNA, 119 bp, homo sapiens
agtcttgaaggcctcggcgataatgcgggcggcctcccggtgctccttgccccgaagcgtcagcccattacttccagaatcacgtggcccaccttgagctgcccacagttgtgagctga

SEQ ID NO: 4595 - DNA, 119 bp, homo sapiens
ctgaatagtgacaatcctaggcaggggctggcgggtgttggcgccaccctcgatggcgatgcccagggtgccgcacttttcttcacacggaccagagtggacgtgggctccagaagtcc

SEQ ID NO: 4596 - DNA, 119 bp, homo sapiens
aatagtgacaatcctaggcaggggctggcgggtgttggcgccaccctcgatggcgatgcccagggtggcgcacttttcttcacacggaccagagtggacgtgggctccagaagtccagg

SEQ ID NO: 4597 - DNA, 119 bp, homo sapiens
cggtttgttggccccatctgtgggcctctcgttccgaggcagctccttgctactcctgctcttggtggaaccgactgccttcctcggcctggggcgctggcctctgcctcgccagcatc

SEQ ID NO: 4598 - DNA, 119 bp, homo sapiens
ttccgaggcagctccttgctactcctgctcttggtggacaccgactgccttcctcggcctggggcgctgcctctgcctcgccagcatccacaccactgtcctcgcttagagtctgcccg

SEQ ID NO: 4599 - DNA, 119 bp, homo sapiens
tggtggacaccgactgccttcctcggcctggggcgctggcctctgcctcgccagcatccacaccactgtctcgcttagagtctgcccgctgtccgagaggtgggagagcgtagaggctg

SEQ ID NO: 4600 - DNA, 119 bp, homo sapiens
tgcgcgtctggggcagcgccctcacttcattgacgtctggctcgctgtcggggcggtggacctccaccagacaaagtgctggtttgtgcctgtctggtctgggtggccagagggtgatg

SEQ ID NO: 4601 - DNA, 119 bp, homo sapiens
acctccaccatgacaaagtgctggtttgtgcctgtctggtctgggtggccagagggtgatgggggcagaggcagcccccagccactgtggcctctgcagaggggcttttcaggtgcggg

SEQ ID NO: 4602 - DNA, 119 bp, homo sapiens
tgggggcagaaggcagcccccagccactgtggcctctgcagaggggcttttcaggtgcgggggtgactgacccgtgggaaggggccgatggggtgttggttgaccagggccagatgggc

SEQ ID NO: 4603 - DNA, 119 bp, homo sapiens
ggggtgactggacccgtgggaaggggccgatggggtgttggttgaccagggccagatgggcgtccagcgcctcttggagctggggttggcaggggagacggaggcatagatgggggaag

SEQ ID NO: 4604 - DNA, 119 bp, homo sapiens
gcgtccagcggcctcttggagctggggttggcaggggagacggaggcatagatgggggaagagggcaagcctgtgcagaggaggtccctggggtgggtgcggtgcccgctggcgggctg

SEQ ID NO: 4605 - DNA, 119 bp, homo sapiens
agagggcaagtcctgtgcagaggaggtccctggggtgggtgcggtgcccgctggcgggctgcggttctgggagccgagaagacagtgcccgagcaggaaggcatggaggaaggtggctg

SEQ ID NO: 4606 - DNA, 119 bp, homo sapiens
tgcggttctgtggagccgagaagacagtgcccgagcaggaaggcatggaggaaggtggctggaggtccttctccccagcttccttggctggcctagtgggaggtcgttgccttgggcca

SEQ ID NO: 4607 - DNA, 119 bp, homo sapiens
tggaggtcctctctccccagcttccttggctggcctagtgggaggtcgttgccttgggccagaggtggtggcgaggcagtggcttgaagcttgacagcccctgggaggtggatctgaca

SEQ ID NO: 4608 - DNA, 119 bp, homo sapiens
cctggccgagctgacggtggtggaggtgccgtggctgcctgtggatgaacccgtgtcactgtaggagacatggagtaggtgtccccagccccggggcctgggggctgccgcgccttcat

SEQ ID NO: 4609 - DNA, 119 bp, homo sapiens
tgaacccgtgtcactgtaggagaccatggagtaggtgtccccagccccggggcctgggggctgccgcgcttcatggactcaatctcacgcctcagcaccaggtggtcgaagcgttctag

SEQ ID NO: 4610 - DNA, 119 bp, homo sapiens
cccggggcctgggggctgccgcgccttcatggactcaatctcacgcctcagcaccaggtggtcgaagcgtctaggtcttgcggggaaatggtgcctctcacctcagagaggagtgagaa

SEQ ID NO: 4611 - DNA, 119 bp, homo sapiens
cttggcgtgggtgttgagcagcttgaacagggccatgacgagggcctccacagagacgctgccaccacgtactcatccaggtagtaggccatggtggcgtgttcctgctcgttcagcag

SEQ ID NO: 4612 - DNA, 119 bp, homo sapiens
tccacagagacgctgccaccacggtactcatccaggtagtaggccatggtggcgtgttcctgctcgttcgcaggtgccgagcctgctcctccagcagcactcgtgtctggttccccagg

SEQ ID NO: 4613 - DNA, 119 bp, homo sapiens
tggtggcgtgttcctgctcgttcagcaggtgccgagcctgctcctccagcagcactcgtgtctggttcccaggctgctcagggtcacctgggagccggctgggcccttgtaaaatcctg

SEQ ID NO: 4614 - DNA, 119 bp, homo sapiens
cctgccgagttcgccatggtctccctgatccgggaactggcgatccacttggtctcgtccacagtggtggggcacggggcagcctcccgacgtccttcactgtcaggatgaggtgccga

SEQ ID NO: 4615 - DNA, 119 bp, homo sapiens
gatccacttggtctcgtccacagtggtgcgggcacggggcagcctcccgacgtccttcactgtcaggataggtgccgagatgacttaagcagcctgacagcctcgtcgtgtaggatgtt

SEQ ID NO: 4616 - DNA, 119 bp, homo sapiens
gcctcccgacgtccttcactgtcaggatgaggtgccgagatgacttaagcagcctgacagcctcgtcgttaggatgttgagaaagctccgcccattcacttctagaatctggtccccaa

SEQ ID NO: 4617 - DNA, 119 bp, homo sapiens
cttgagcccgctgccttctgcttcagagcctgggtccacgccagtgatgtaaatgccaaggccgtactcgctcccccacggatcgtgaggcccagggaccggccgtcccccagcaccag

SEQ ID NO: 4618 - DNA, 119 bp, homo sapiens
cccgctgccttctgcttcagagcctgggtccacgccagtgatgtaaatgccaaggccgtactcagctccccacggatcgtgaggcccagggaccggccgtcccccagcaccaggttcac

SEQ ID NO: 4619 - DNA, 119 bp, homo sapiens
ctttttctcatcccctccttgcaggaggtgcagggtgctcctccggtcaccctcctgctgcctcagggcccaccgtggggctggggcaggcccgagggtggggagatgctgcggccctg

SEQ ID NO: 4620 - DNA, 119 bp, homo sapiens
ccctcctgctgcctcagggcaccaccgtggggctggggcaggcccgagggtggggagatgctgcggcccgcgggtccacccaggtgtagatgtggttggtgacgtagcccccagggatg

SEQ ID NO: 4621 - DNA, 119 bp, homo sapiens
gtggggagatgctgcggccctgcgggtccacccaggtgtagatgtggttggtgacgtagcccccagggagcgccctgctgagtacacagacagcaccagcttcttggagcccttcagag

SEQ ID NO: 4622 - DNA, 119 bp, homo sapiens
cttgacggcctccgcgtgggtcacccgggccagggatttgtcgttgacgcgcagaatctggtccccgaccgcagtccttccttctcagctagagagcctggttccaccagagacacgta

SEQ ID NO: 4623 - DNA, 119 bp, homo sapiens
ctggtccccgacccgcagtccttccttctcagctagagagcctggttccaccagagacacgtagatgccacgccgtgctccgagcccccacggatgctgaagcccaagccctcgtgggc

SEQ ID NO: 4624 - DNA, 119 bp, homo sapiens
cacgtagatgcccacgccgtgctccgagcccccacggatgctgaagcccaagccctcgtgggccttggccgccgcaaactcaccaggcgcacctcccctggccccgcgctgtcggggcc

SEQ ID NO: 4625 - DNA, 119 bp, homo sapiens
gtgggccttggcacgccgcaaactcaccaggcgcacctcccctggccccgcgctgtcggggccgccccagcgggctgcctgtagggggtggtggcgggcaggtagaggccctcggccgt

SEQ ID NO: 4626 - DNA, 119 bp, homo sapiens
ggggccgccccaggcgggctgcctgtagggggtggtggcgggcaggtagaggccctcggccgtgtattgtcgaagagcagctggtcggagcgcgggatgaccagacgaagcatgggcag

SEQ ID NO: 4627 - DNA, 119 bp, homo sapiens
ggccgtgtattggtcgaagagcagctggtcggagcgcgggatgaccagacgaagcatgggcagcaggcgcgcttgaccggactgtccagcagcacgcgcagggtgcgcaccaggtcgaa

SEQ ID NO: 4628 - DNA, 119 bp, homo sapiens
gggcagcaggcgccgcttgaccggactgtccagcagcacgcgcagggtgcgcaccaggtcgaagacgttcggcgcgcgtggtaagcgttcaggcagtgggtgaactgctcccgctccgc

SEQ ID NO: 4629 - DNA, 119 bp, homo sapiens
gtcgaagacgttgcggcgcgcgtggtaagcgttcaggcagtgggtgaactgctcccgctccgcctcgctagcagcgcggtcagcgcttggtgcagctggcgcacgttggcagacagtaa

SEQ ID NO: 4630 - DNA, 119 bp, homo sapiens
agcccagcgagccggtggaggacgagctcaccgacaggccgtccagcggcgcgttcatctccacgccgagcccggccgggctctgagcgcgcggggtgtgggcggtgccgctgtcctcg

SEQ ID NO: 4631 - DNA, 119 bp, homo sapiens
tccacgccgaggcccggccgggctctgagcgcgcggggtgtgggcggtgccgctgtcctcgcgggtactgcgcgacagctggatccccgggagcgcggagacgacggctggagcctggg

SEQ ID NO: 4632 - DNA, 119 bp, homo sapiens
cgcgggtactggcgcgacagctggatccccgggagcgcggagacgacggctggagcctgggtttggggacacgggtacagtggctggatcctagggggtcgcggagaccgctgctagag

SEQ ID NO: 4633 - DNA, 119 bp, homo sapiens
ggtttggggagcacgggtacagtggctggatcctagggggtcgcggagaccgctgctagagtcccggagcgcgaagacggcgggggtcgcgaacctggaatccgggggacgcggagacg

SEQ ID NO: 4634 - DNA, 119 bp, homo sapiens
agtcccggaggcgcgaagacggcgggggtcgcgaacctggaatccgggggacgcggagacgtcggcgggtcctgagagacacaagagttggctgctggagcccggaggtggcggagact

SEQ ID NO: 4635 - DNA, 119 bp, homo sapiens
cgtcggcgggttcctgagagacacaagagttggctgctggagcccggaggtggcggagactgctgctgggtccggggggcgcggggtcagcagctacattctggagggcacggagacga

SEQ ID NO: 4636 - DNA, 119 bp, homo sapiens
ctgctgctggagtccggggggcgcggggtcagcagctacattctggagggcacggagacgacgggtggcggagtttgggggcgccgcaaagctgacctgactgccccgtcacaccatgc

SEQ ID NO: 4637 - DNA, 119 bp, homo sapiens
gacgggtggctggagtttgggggcgccgcaaagctgacctgactgccccgtcacaccatgcccggggctccccagccgggcgcccgttcctctagggctgggggaccccaaagtcagaa

SEQ ID NO: 4638 - DNA, 119 bp, homo sapiens
gcccggggctcccccagccgggcgcccgttcctctagggctgggggaccccaaagtcagaagttggggcgagggcgctctagtcccagagcactccggggagtggcagccggtgaagcg

SEQ ID NO: 4639 - DNA, 119 bp, homo sapiens
aagttggggcggagggcgctctagtcccagagcactccggggagtggcagccggtgaagcggcgcgggctccgacaaggggtgcggggcatgtccggggcagccccgggatgcagccgc

SEQ ID NO: 4640 - DNA, 119 bp, homo sapiens
cggcgcgggcgtccgacaaggggtgcggggcatgtccggggcagccccgggatgcagccgcccggggagctccgcgcctctgcgccgcccggccgcaagcccggactttgcgaactgtt

SEQ ID NO: 4641 - DNA, 119 bp, homo sapiens
caggaatttgaccctctagggcatgaatactgtgctgttcagttctgagctgtgctagcaatacccttcaaggaagagcaatggctgcagcagcagcttctcacctgaacctggatgcc

SEQ ID NO: 4642 - DNA, 119 bp, homo sapiens
aatacccttcaaaggaagagcaatggctgcagcagcagcttctcacctgaacctggatgccctccgggagtgctagaatgccccatctgcatggagtccttcacagaagagcagctgcg

SEQ ID NO: 4643 - DNA, 119 bp, homo sapiens
ccctccgggaagtgctagaatgccccatctgcatggagtccttcacagaagagcagctgcgtcccaagctctgcactgtggccataccatctgccgccagtgcctggagaagctattgg

SEQ ID NO: 4644 - DNA, 119 bp, homo sapiens
cgtcccaagcttctgcactgtggccataccatctgccgccagtgcctggagaagctattggccagtagctcaatggtgtccgctgtcccttttgcagcaagattacccgcataaccagc

SEQ ID NO: 4645 - DNA, 119 bp, homo sapiens
ggccagtagcatcaatggtgtccgctgtcccttttgcagcaagattacccgcataaccagcttgacccactgacagacaatctgacagtgctaaagatcattgatacagctgggctcag

SEQ ID NO: 4646 - DNA, 119 bp, homo sapiens
gcttgacccagctgacagacaatctgacagtgctaaagatcattgatacagctgggctcagcgaggctgggggctgctcatgtgtcggtcctgtgggcggcgtctgccccggcaattct

SEQ ID NO: 4647 - DNA, 119 bp, homo sapiens
agcgaggctgtggggctgctcatgtgtcggtcctgtgggcggcgtctgccccggcaattctgccggagcgtggtttggtgttatgtgagccctgccgggaggcagaccatcagcctcct

SEQ ID NO: 4648 - DNA, 119 bp, homo sapiens
ctgccggagctgtggtttggtgttatgtgagccctgccgggaggcagaccatcagcctcctggccactgacactccctgtcaaagaagcagctgaggagcggcgtcgggactttggaga

SEQ ID NO: 4649 - DNA, 119 bp, homo sapiens
ctggccactgtacactccctgtcaaagaagcagctgaggagcggcgtcgggactttggagagaagttaatcgtctgcgggaacttatgggggagctgcagcggcggaaggcagccttgg

SEQ ID NO: 4650 - DNA, 119 bp, homo sapiens
gagaagttaactcgtctgcgggaacttatgggggagctgcagcggcggaaggcagccttggaaggtgtcccaaggaccttcaggcaaggtataaagcagttctccaggagtatgggcat

SEQ ID NO: 4651 - DNA, 119 bp, homo sapiens
ggaaggtgtctccaaggaccttcaggcaaggtataaagcagttctccaggagtatgggcatgaggagcgagggtccaggatgagctggctcgctctcggaagttcttcacaggctcttt

SEQ ID NO: 4652 - DNA, 119 bp, homo sapiens
atgaggagcgcagggtccaggatgagctggctcgctctcggaagttcttcacaggctctttggctgaagtgagaagtccaatagtcaagtggtagaggagcagagttacctgcttaaca

SEQ ID NO: 4653 - DNA, 119 bp, homo sapiens
ttggctgaagttgagaagtccaatagtcaagtggtagaggagcagagttacctgcttaacattgcagagtgcaggctgtgtctcgctgtgactacttcctggccaagatcaagcaggca

SEQ ID NO: 4654 - DNA, 119 bp, homo sapiens
cattgcagaggtgcaggctgtgtctcgctgtgactacttcctggccaagatcaagcaggcagatgtagcctactggaggagacagctgatgaggaggagccagagctcactgccagctt

SEQ ID NO: 4655 - DNA, 119 bp, homo sapiens
cagatgtagcactactggaggagacagctgatgaggaggagccagagctcactgccagcttgcctcggggctcaccctgcaagatgtggagctccttaaggtaggtcatgttggccccc

SEQ ID NO: 4656 - DNA, 119 bp, homo sapiens
ttgcctcgggagctcaccctgcaagatgtggagctccttaaggtaggtcatgttggccccctccaaattgacaagctgttaagaagccccggacagttaacgtggaagattcctgggcc

SEQ ID NO: 4657 - DNA, 119 bp, homo sapiens
cctccaaattggacaagctgttaagaagccccggacagttaacgtggaagattcctgggccatggaggcacagcgtctgctgcctctacctctgttacttttagagagatggacatgag

SEQ ID NO: 4658 - DNA, 119 bp, homo sapiens
ccatggaggccacagcgtctgctgcctctacctctgttacttttagagagatggacatgagcccggaggagtggttgccagccctagggcctcacctgctaaacagcggggtcctgagg

SEQ ID NO: 4659 - DNA, 119 bp, homo sapiens
agcccggaggaagtggttgccagccctagggcctcacctgctaaacagcggggtcctgaggcagcctccatatccagcagtgcctctttctcaagaagatgggggccaaaggcagcact

SEQ ID NO: 4660 - DNA, 119 bp, homo sapiens
ggcagcctccaatatccagcagtgcctctttctcaagaagatgggggccaaaggcagcactccaggaatttcaatcttccagtcagtctctacgtgaccagtcaaggtgaagtactagt

SEQ ID NO: 4661 - DNA, 119 bp, homo sapiens
ctccaggaatgttcaatcttccagtcagtctctacgtgaccagtcaaggtgaagtactagtcgctgacctggtaactatcgtatacaagtctttacccgcaaaggctttttgaaggaaa

SEQ ID NO: 4662 - DNA, 119 bp, homo sapiens
gtcgctgaccgtggtaactatcgtatacaagtctttacccgcaaaggctttttgaaggaaatccgccgcgccccagtggcattgatagctttgtgctaagcttccttggggcagatcta

SEQ ID NO: 4663 - DNA, 119 bp, homo sapiens
aatccgccgcagccccagtggcattgatagctttgtgctaagcttccttggggcagatctacccaacctactcctctctcagtggcaatgaactgccaggggctgattggtgtgactga

SEQ ID NO: 4664 - DNA, 119 bp, homo sapiens
tacccaacctcactcctctctcagtggcaatgaactgccaggggctgattggtgtgactgacagctatgtaactccctcaaggtatataccttggatggccactgcgtggcctgtcaca

SEQ ID NO: 4665 - DNA, 119 bp, homo sapiens
gacagctatgataactccctcaaggtatataccttggatggccactgcgtggcctgtcacaggagccagtgagcaaaccatggggtatcacagccttgccatctggccagtttgtagta

SEQ ID NO: 4666 - DNA, 119 bp, homo sapiens
caggagccagctgagcaaaccatggggtatcacagccttgccatctggccagtttgtagtaaccgatgtgaaggtggaaagctttggtgtttcacagttgatcgaggatcaggggtggt

SEQ ID NO: 4667 - DNA, 119 bp, homo sapiens
taaccgatgtggaaggtggaaagctttggtgtttcacagttgatcgaggatcaggggtggtcaaatacactgcctatgtagtgctgtgcggcccaaatttgtcacctgtgatgctgagg

SEQ ID NO: 4668 - DNA, 119 bp, homo sapiens
gtcaaatacagctgcctatgtagtgctgtgcggcccaaatttgtcacctgtgatgctgagggcaccgtcacttcacccagggcttaggcctcaatctggagaatcggcagaatgagcac

SEQ ID NO: 4669 - DNA, 119 bp, homo sapiens
gggcaccgtctacttcacccagggcttaggcctcaatctggagaatcggcagaatgagcaccacctggaggtggcttttccattggctctgtaggccctgatgggcagctgggtcgcca

SEQ ID NO: 4670 - DNA, 119 bp, homo sapiens
accacctggagggtggcttttccattggctctgtaggccctgatgggcagctgggtcgccagattagcccttcttctcggagaatgaggatttccgctgcattgctggcatgtgtgtgg

SEQ ID NO: 4671 - DNA, 119 bp, homo sapiens
cagattagccacttcttctcggagaatgaggatttccgctgcattgctggcatgtgtgtggatgctcgtgtgatctcatcgtggctgacagtagtcgcaaggaaattctccattttcct

SEQ ID NO: 4672 - DNA, 119 bp, homo sapiens
ggatgctcgtggtgatctcatcgtggctgacagtagtcgcaaggaaattctccattttcctaagggtggggctatagtgtccttattcgagagggacttacctgtccggtgggcatagc

SEQ ID NO: 4673 - DNA, 119 bp, homo sapiens
ctaagggtgggggctatagtgtccttattcgagagggacttacctgtccggtgggcatagccctaactctaaggggcagctgctggtcttggactgttgggatcattgcatcaagatct

SEQ ID NO: 4674 - DNA, 119 bp, homo sapiens
gccctaactcctaaggggcagctgctggtcttggactgttgggatcattgcatcaagatctacagctacatctgagaagatattccaccccataggggatgagaaattatcagtttctt

SEQ ID NO: 4675 - DNA, 119 bp, homo sapiens
ctacagctaccatctgagaagatattccaccccataggggatgagaaattatcagtttcttctgctcccagccaacttcccttcccttagttcttggttgttagtggcacatgcagaat

SEQ ID NO: 4676 - DNA, 119 bp, homo sapiens
ttctgctcccaagccaacttcccttcccttagttcttggttgttagtggcacatgcagaatagactcagctatgtcctgattccagctgggtagttctagaacttcagaagctccatct

SEQ ID NO: 4677 - DNA, 119 bp, homo sapiens
atagactcagcctatgtcctgattccagctgggtagttctagaacttcagaagctccatcttttaatgttttatttgttatgtccccctccccgcttcccacctaaatttagagcttta

SEQ ID NO: 4678 - DNA, 119 bp, homo sapiens
cttttaatgtttttatttgttatgtccccctccccgcttcccacctaaatttagagctttaaaagatgcctgcccaaataggacacacgatggtgttagctgaagtttgattagcaatt

SEQ ID NO: 4679 - DNA, 119 bp, homo sapiens
taaaagatgcactgcccaaataggacacacgatggtgttagctgaagtttgattagcaattaggcacttcaaggctttagtagagagagccactttagccctttgtgccatgtttgaaa

SEQ ID NO: 4680 - DNA, 119 bp, homo sapiens
ttaggcacttccaaggctttagtagagagagccactttagccctttgtgccatgtttgaaatttgccctgtattaaatccttgattttttcccatttggctttgatgcccttgatccat

SEQ ID NO: 4681 - DNA, 119 bp, homo sapiens
aatttgcccttgtattaaatccttgattttttcccatttggctttgatgcccttgatccattgtttcctcctactataatgtgcttcatctgtgacactttctcttgaactctgattgg

SEQ ID NO: 4682 - DNA, 119 bp, homo sapiens
attgtttccttcctactataatgtgcttcatctgtgacactttctcttgaactctgattggattcactggcatgcttcagtgggatctgctccacctttcagtgacatttaagacatca

SEQ ID NO: 4683 - DNA, 119 bp, homo sapiens
ggattcactgtgcatgcttcagtgggatctgctccacctttcagtgacatttaagacatcatattcccgaacattatgtctcagtctgatcgtctttaccagtatgaaagtcattcatt

SEQ ID NO: 4684 - DNA, 119 bp, homo sapiens
catattcccgtaacattatgtctcagtctgatcgtctttaccagtatgaaagtcattcatttagtgctacaaaggggatacacaagccctttaggaagcagtacctctcgcctggagga

SEQ ID NO: 4685 - DNA, 119 bp, homo sapiens
tttagtgctaccaaaggggatacacaagccctttaggaagcagtacctctcgcctggaggatctgtgcctcttggattgagaattgcagatgtgacagaatggattgaccctagttggt

SEQ ID NO: 4686 - DNA, 119 bp, homo sapiens
gatctgtgccatcttggattgagaattgcagatgtgacagaatggattgaccctagttggttggtattgtgacttcagcctggaaattgcttgccttttaaagaagcatatatgggttg

SEQ ID NO: 4687 - DNA, 119 bp, homo sapiens
gttggtattgatgacttcagcctggaaattgcttgccttttaaagaagcatatatgggttggaattatgcaaagcataggaagctgggaataagcaaacaaatgctgatatagtcagca

SEQ ID NO: 4688 - DNA, 119 bp, homo sapiens
tggaattatgccaaagcataggaagctgggaataagcaaacaaatgctgatatagtcagcaaatttggaagtctctagggctcatcatttttcatactacctctctcttctggcctgtg

SEQ ID NO: 4689 - DNA, 119 bp, homo sapiens
caaatttggatagtctctagggctcatcatttttcatactacctctctcttctggcctgtgtctaaggattgtacaacataggccagggccaacaaagtggagaggtggacacattttc

SEQ ID NO: 4690 - DNA, 119 bp, homo sapiens
tgtctaaggaattgtacaacataggccagggccaacaaagtggagaggtggacacattttcatgttcatactaaaacaaacagcaaaactattggtttgttattctgtgttttcctcaa

SEQ ID NO: 4691 - DNA, 119 bp, homo sapiens
tcatgttcattactaaaacaaacagcaaaactattggtttgttattctgtgttttcctcaagtcagtactactatttggtttcaggatttctttccatttctctatcaagcattaaata

SEQ ID NO: 4692 - DNA, 119 bp, homo sapiens
aagtcagtacatactatttggtttcaggatttctttccatttctctatcaagcattaaataattgagaatgtttcttcatctctggtgttcatgtcttttaattaaatacggaattttg

SEQ ID NO: 4693 - DNA, 119 bp, homo sapiens
taattgagaactgtttcttcatctctggtgttcatgtcttttaattaaatacggaattttggagatgatagagggataacctgcgctatgccattttgcttccttatctcactgtgttc

SEQ ID NO: 4694 - DNA, 119 bp, homo sapiens
tggagatgataagagggataacctgcgctatgccattttgcttccttatctcactgtgttctttcagaggtagatatctacccaggtcaaaattcagccaaaagcactattatgtaaag

SEQ ID NO: 4695 - DNA, 119 bp, homo sapiens
tctttcagagtgtagatatctacccaggtcaaaattcagccaaaagcactattatgtaaagataataatcaaatctttctcccaaatacatgtgtacagaatcatcccccaaggtttag

SEQ ID NO: 4696 - DNA, 119 bp, homo sapiens
agataataatccaaatctttctcccaaatacatgtgtacagaatcatcccccaaggtttagagtcaccataccctattctgagcttctgctgtatgttttatgtttataattacagttc

SEQ ID NO: 4697 - DNA, 119 bp, homo sapiens
agagtcaccaataccctattctgagcttctgctgtatgttttatgtttataattacagttcacaaaaagaagttagtcttgtttttaagatcagaagtgggtgagaggacctgtgatga

SEQ ID NO: 4698 - DNA, 119 bp, homo sapiens
tcacaaaaaggaagttagtcttgtttttaagatcagaagtgggtgagaggacctgtgatgaggttcctggggtttggtgtttactaagtaatatatcttactctaggtgcagggctgat

SEQ ID NO: 4699 - DNA, 119 bp, homo sapiens
gaggttcctgagggtttggtgtttactaagtaatatatcttactctaggtgcagggctgatggcaagccaagagcaactgccttactttgatgtaaacaaaatttgctaaactgagctg

SEQ ID NO: 4700 - DNA, 119 bp, homo sapiens
atggcaagccaaagagcaactgccttactttgatgtaaacaaaatttgctaaactgagctgctcaaaatgtttttatggtagtagtgtttctttggattgtatcataatagctgccaaa

SEQ ID NO: 4701 - DNA, 119 bp, homo sapiens
tagcttcctcttgctgtttctttagccactggtctgcaggcgttttcttcttctaacttcctctcctgtacaaaagagataactattagagaaacaaaagtccagaatgctaaggttgc

SEQ ID NO: 4702 - DNA, 119 bp, homo sapiens
aacttcctctcctgtgacaaaagagataactattagagaaacaaaagtccagaatgctaaggttgccgcttcacttcctctcaccctttagcccagaactgctttgaatacaccaattg

SEQ ID NO: 4703 - DNA, 119 bp, homo sapiens
tgctaaggttgccgctttcacttcctctcaccctttagcccagaactgctttgaatacaccaattgctgggggcggctcgaggaagagaagacaccagtgcctcagaaactgctcggtc

SEQ ID NO: 4704 - DNA, 119 bp, homo sapiens
atacaccaattgctgtggggcggctcgaggaagagaagacaccagtgcctcagaaactgctcggtcagaggtgatagcgagccacgcattcacagggccactgctgctcacagaagcag

SEQ ID NO: 4705 - DNA, 119 bp, homo sapiens
aactgctcggtcagacggtgatagcgagccacgcattcacagggccactgctgctcacagaagcagtgagatgatgccaggatgatgtctgcctcgcgcctggctgggactctgatccc

SEQ ID NO: 4706 - DNA, 119 bp, homo sapiens
tcacagaagcagtgaggatgatgccaggatgatgtctgcctcgcgcctggctgggactctgatcccagcatggccttcctctcctgcgtgagaccagaaagctgggagccctgcgtgga

SEQ ID NO: 4707 - DNA, 119 bp, homo sapiens
gtggttcctaatattacttatcaatgcatggagctgaatttctacaaaatccccgacaacctccccttccaaccaagaacctggacctgagctttaatcccctgaggcatttaggcagc

SEQ ID NO: 4708 - DNA, 119 bp, homo sapiens
aatccccgacaacctccccttctcaaccaagaacctggacctgagctttaatcccctgaggcatttaggagctatagcttcttcagtttcccagaactgcaggtgctggatttatccag

SEQ ID NO: 4709 - DNA, 119 bp, homo sapiens
gtgtgaaatccagacaattgaagatggggcatatcagagcctaagccacctctctaccttaatattgacggaaaccccatccagagtttagccctgggagccttttctggactatcaag

SEQ ID NO: 4710 - DNA, 119 bp, homo sapiens
taatattgacaggaaaccccatccagagtttagccctgggagccttttctggactatcaagtttacagagctggtggctgtggagacaaatctagcatctctagagaacttccccattg

SEQ ID NO: 4711 - DNA, 119 bp, homo sapiens
agtttacagaagctggtggctgtggagacaaatctagcatctctagagaacttccccattggacatctcaaactttgaaagaacttaatgtggctcacaatcttatccaatctttcaaa

SEQ ID NO: 4712 - DNA, 119 bp, homo sapiens
tggacatctcaaaactttgaaagaacttaatgtggctcacaatcttatccaatctttcaaattacctgatatttttctaatctgaccaatctagagcacttggacctttccagcaacaa

SEQ ID NO: 4713 - DNA, 119 bp, homo sapiens
aattacctgagtatttttctaatctgaccaatctagagcacttggacctttccagcaacaagattcaaatatttattgcacagacttgcgggttctacatcaaatgcccctactcaatc

SEQ ID NO: 4714 - DNA, 119 bp, homo sapiens
aagattcaaagtatttattgcacagacttgcgggttctacatcaaatgcccctactcaatctctctttaacctgtccctgaaccctatgaactttatccaaccaggtgcatttaaagaa

SEQ ID NO: 4715 - DNA, 119 bp, homo sapiens
tctctctttagacctgtccctgaaccctatgaactttatccaaccaggtgcatttaaagaaattaggctcataagctgactttaagaaataattttgatagtttaaatgtaatgaaaac

SEQ ID NO: 4716 - DNA, 119 bp, homo sapiens
aaattaggcttcataagctgactttaagaaataattttgatagtttaaatgtaatgaaaacttgtattcaggtctggctggtttagaagtccatcgtttggttctgggagaatttagaa

SEQ ID NO: 4717 - DNA, 119 bp, homo sapiens
acttgtattcaaggtctggctggtttagaagtccatcgtttggttctgggagaatttagaaatgaaggaacttggaaaagtttgacaaatctgctctagagggcctgtgcaatttgacc

SEQ ID NO: 4718 - DNA, 119 bp, homo sapiens
aaatgaaggaaacttggaaaagtttgacaaatctgctctagagggcctgtgcaatttgaccattgaagattccgattagcatacttagactactacctcgatgatattattgacttatt

SEQ ID NO: 4719 - DNA, 119 bp, homo sapiens
ccattgaagaattccgattagcatacttagactactacctcgatgatattattgacttatttaattgttgacaaatgtttcttcattttccctggtgagtgtgactattgaaagggtaa

SEQ ID NO: 4720 - DNA, 119 bp, homo sapiens
tttaattgtttgacaaatgtttcttcattttccctggtgagtgtgactattgaaagggtaaaagactttcttataatttcggatggcaacatttagaattagttaactgtaaatttgga

SEQ ID NO: 4721 - DNA, 119 bp, homo sapiens
aaaagacttttcttataatttcggatggcaacatttagaattagttaactgtaaatttggacagtttccacattgaaactcaaatctctcaaaaggcttactttcacttccaacaaagg

SEQ ID NO: 4722 - DNA, 119 bp, homo sapiens
gacagtttcccacattgaaactcaaatctctcaaaaggcttactttcacttccaacaaaggtgggaatgtttttcagaagttgatctaccaagccttgagtttctagatctcagtagaa

SEQ ID NO: 4723 - DNA, 119 bp, homo sapiens
ggtgggaatgctttttcagaagttgatctaccaagccttgagtttctagatctcagtagaaatggcttggtttcaaaggttgctgttctcaaagtgattttgggacaaccagcctaaag

SEQ ID NO: 4724 - DNA, 119 bp, homo sapiens
aaatggcttgagtttcaaaggttgctgttctcaaagtgattttgggacaaccagcctaaagtatttagactgagcttcaatggtgttattaccatgagttcaaacttcttgggcttaga

SEQ ID NO: 4725 - DNA, 119 bp, homo sapiens
agtatttagatctgagcttcaatggtgttattaccatgagttcaaacttcttgggcttagaacaactagacatctggatttccagcattccaatttgaaacaaatgagtgagttttcag

SEQ ID NO: 4726 - DNA, 119 bp, homo sapiens
gaacaactagaacatctggatttccagcattccaatttgaaacaaatgagtgagttttcagtattcctacactcagaaacctcatttaccttgacatttctcatactcacaccagagtt

SEQ ID NO: 4727 - DNA, 119 bp, homo sapiens
agtattcctatcactcagaaacctcatttaccttgacatttctcatactcacaccagagttgctttcaaggcatcttcaatggcttgtccagtctcgaagtcttgaaaatggctggcaa

SEQ ID NO: 4728 - DNA, 119 bp, homo sapiens
ttgctttcaatggcatcttcaatggcttgtccagtctcgaagtcttgaaaatggctggcaattctttccggaaaacttccttccagatatcttcacagagctgagaaacttgaccttcc

SEQ ID NO: 4729 - DNA, 119 bp, homo sapiens
aattctttccaggaaaacttccttccagatatcttcacagagctgagaaacttgaccttcctggacctcctcagtgtcaactggagcagttgtctccaacagcatttaactcactctcc

SEQ ID NO: 4730 - DNA, 119 bp, homo sapiens
cctggacctctctcagtgtcaactggagcagttgtctccaacagcatttaactcactctccagtcttcagtactaaatatgagccacaacaacttcttttcattggatacgtttcctta

SEQ ID NO: 4731 - DNA, 119 bp, homo sapiens
ccagtcttcaggtactaaatatgagccacaacaacttcttttcattggatacgtttccttataagtgtcgaactccctccaggttcttgattacagtctcaatcacataatgacttcca

SEQ ID NO: 4732 - DNA, 119 bp, homo sapiens
tataagtgtctgaactccctccaggttcttgattacagtctcaatcacataatgacttccaaaaaacagaactacagcattttccaagtagtctagctttcttaaatcttactcagaat

SEQ ID NO: 4733 - DNA, 119 bp, homo sapiens
caaaaaacaggaactacagcattttccaagtagtctagctttcttaaatcttactcagaatgactttgctgtacttgtgaacaccagagtttcctgcaatggatcaaggaccagaggca

SEQ ID NO: 4734 - DNA, 119 bp, homo sapiens
atgactttgcttgtacttgtgaacaccagagtttcctgcaatggatcaaggaccagaggcagctcttggggaagttgaacgaatggaatgtgcaacaccttcagataagcagggcatgc

SEQ ID NO: 4735 - DNA, 119 bp, homo sapiens
cagctcttggtggaagttgaacgaatggaatgtgcaacaccttcagataagcagggcatgcctgtgctggtttgaatatcacctgtcagatgaataagaccatcattggtgtgtcggtc

SEQ ID NO: 4736 - DNA, 119 bp, homo sapiens
gcctgtgctgagtttgaatatcacctgtcagatgaataagaccatcattggtgtgtcggtcctcagtgtcttgtagtatctgttgtagcagttctggtctataagttctattttcacct

SEQ ID NO: 4737 - DNA, 119 bp, homo sapiens
tcctcagtgtgcttgtagtatctgttgtagcagttctggtctataagttctattttcacctgatgcttctgctggctgcataaagtatggtagaggtgaaaacatctatgatgcctttg

SEQ ID NO: 4738 - DNA, 119 bp, homo sapiens
ctgatgcttcttgctggctgcataaagtatggtagaggtgaaaacatctatgatgcctttgttatctaccaagccaggatgaggactgggtaaggaatgagctagtaaagaatttagaa

SEQ ID NO: 4739 - DNA, 119 bp, homo sapiens
tgttatctactcaagccaggatgaggactgggtaaggaatgagctagtaaagaatttagaagaaggggtcctccatttcagctctgccttcactacagagactttattcccggtgtggc

SEQ ID NO: 4740 - DNA, 119 bp, homo sapiens
aagaaggggtgcctccatttcagctctgccttcactacagagactttattcccggtgtggccattgctgcaacatcatccatgaaggtttccataaaagccgaaaggtgattgttgtgg

SEQ ID NO: 4741 - DNA, 119 bp, homo sapiens
gccattgctgccaacatcatccatgaaggtttccataaaagccgaaaggtgattgttgtggtgtcccagacttcatccagagccgctggtgtatctttgaatatgagattgctcagacc

SEQ ID NO: 4742 - DNA, 119 bp, homo sapiens
ggtgtcccagcacttcatccagagccgctggtgtatctttgaatatgagattgctcagacctggcagttctgagcagtcgtgctggtatcatcttcattgtcctgcagaaggtggagaa

SEQ ID NO: 4743 - DNA, 119 bp, homo sapiens
cctggcagtttctgagcagtcgtgctggtatcatcttcattgtcctgcagaaggtggagaagaccctgccaggcagcaggtggagctgtaccgccttctcagcaggaacacttacctgg

SEQ ID NO: 4744 - DNA, 119 bp, homo sapiens
aagaccctgctcaggcagcaggtggagctgtaccgccttctcagcaggaacacttacctggagtgggagacagtgtcctggggcggcacatcttctggagacgactcagaaaagccctg

SEQ ID NO: 4745 - DNA, 119 bp, homo sapiens
ggagtgggaggacagtgtcctggggcggcacatcttctggagacgactcagaaaagccctgctggatggaaatcatggaatccagaaggaacagtgggtacaggatgcaattggcagga

SEQ ID NO: 4746 - DNA, 119 bp, homo sapiens
tgctggatggtaaatcatggaatccagaaggaacagtgggtacaggatgcaattggcaggaagcaacattatctgaagaggaaaaataaaaacctcctgaggcatttcttgcccagctg

SEQ ID NO: 4747 - DNA, 119 bp, homo sapiens
gcatttcaaccaactcagtcaaggaacccatgacaaagaaagtcatttcaactcttacctcatcaagttaataaagacagagaaaacagaaagagacattgttcttttcctgagtcttt

SEQ ID NO: 4748 - DNA, 119 bp, homo sapiens
acctcatcaagttgaataaagacagagaaaacagaaagagacattgttcttttcctgagtcttttgaatgaaattgtattatgttatagccatcataaaaccattttggtagttttgac

SEQ ID NO: 4749 - DNA, 119 bp, homo sapiens
gagtcttttgaatggaaattgtattatgttatagccatcataaaaccattttggtagttttgactgaacgggtgttcactttttcctttttgattgaatacaatttaaattctacttga

SEQ ID NO: 4750 - DNA, 119 bp, homo sapiens
gttttgactgaactgggtgttcactttttcctttttgattgaatacaatttaaattctacttgatgactcagtcgtcaaggggctcctgatgcaagatgccccttccattttaagtctg

SEQ ID NO: 4751 - DNA, 119 bp, homo sapiens
ctacttgatgactgcagtcgtcaaggggctcctgatgcaagatgccccttccattttaagtctgtctcctacagaggttaaagtctagtggctaattcctaaggaaacctgattaacac

SEQ ID NO: 4752 - DNA, 119 bp, homo sapiens
taagtctgtctccttacagaggttaaagtctagtggctaattcctaaggaaacctgattaacacatgctacaaccatcctggtcattctcgagcatgttctattttttaactaatcacc

SEQ ID NO: 4753 - DNA, 119 bp, homo sapiens
ccagttttcatttttttacgtcttgcctataagctaatatcataaataaggttgtttaagacgtgcttcaatatccatattaaccactatttttcaaggaagtatggaaaagtacactc

SEQ ID NO: 4754 - DNA, 119 bp, homo sapiens
aagacgtgcttcaaatatccatattaaccactatttttcaaggaagtatggaaaagtacactctgtcacttgtcactcgatgtcattccaaagttattgcctactaagtaatgactgtc

SEQ ID NO: 4755 - DNA, 119 bp, homo sapiens
acactctgtcactttgtcactcgatgtcattccaaagttattgcctactaagtaatgactgtcatgaaacagcattgaaataatttgtttaaagggggcactcttttaaacgggaagaa

SEQ ID NO: 4756 - DNA, 119 bp, homo sapiens
actgtcatgaaagcagcattgaaataatttgtttaaagggggcactcttttaaacgggaagaaaatttcgcttcctggtcttatcatggacaatttgggctagaggcaggaaggaagtg

SEQ ID NO: 4757 - DNA, 119 bp, homo sapiens
gaagaaaatttccgcttcctggtcttatcatggacaatttgggctagaggcaggaaggaagtgggatgactcaggaggtcaccttttcttgattccagaaacatatgggctgataaacc

SEQ ID NO: 4758 - DNA, 119 bp, homo sapiens
gaagtgggatgacctcaggaggtcaccttttcttgattccagaaacatatgggctgataaacccggggtacctcatgaaatgagttgcagcagaagtttatttttttcagaacaagtga

SEQ ID NO: 4759 - DNA, 119 bp, homo sapiens
taaacccggggtgacctcatgaaatgagttgcagcagaagtttatttttttcagaacaagtgatgtttgtggacctctgaatctctttagggagacacagatggctgggatccctcccc

SEQ ID NO: 4760 - DNA, 119 bp, homo sapiens
aagtgatgtttgatggacctctgaatctctttagggagacacagatggctgggatccctcccctgtaccttctcactgccaggagaactacgtgtgaaggtattcaaggcagggagtat

SEQ ID NO: 4761 - DNA, 119 bp, homo sapiens
ctcccctgtacccttctcactgccaggagaactacgtgtgaaggtattcaaggcagggagtatacattgtgtttcctgttgggcaatgctccttgaccacattttgggaagagtggatg

SEQ ID NO: 4762 - DNA, 119 bp, homo sapiens
gagtatacattgctgtttcctgttgggcaatgctccttgaccacattttgggaagagtggatgttatcatgagaaaacaatgtgtctggaattaatggggttcttataaagaaggttcc

SEQ ID NO: 4763 - DNA, 119 bp, homo sapiens
tggatgttatcattgagaaaacaatgtgtctggaattaatggggttcttataaagaaggttcccagaaagaatgttcatccagcctcctcagaaacagaacattcaagaaaaggacaat

SEQ ID NO: 4764 - DNA, 119 bp, homo sapiens
gaaaagacaacaaaattcagttgtcaaaactggaaatatgaccacagtcagaagtgtttgttactgagttttcagagtgtgtttggtttgagcaggtctagggtgattgaacatccctg

SEQ ID NO: 4765 - DNA, 119 bp, homo sapiens
tgtttgttactgagtgtttcagagtgtgtttggtttgagcaggtctagggtgattgaacatccctgggttgtttccatgtctcatgtactagtgaaagtagatgtgtgcatttgtgcac

SEQ ID NO: 4766 - DNA, 119 bp, homo sapiens
tgaacatccctgggtgtgtttccatgtctcatgtactagtgaaagtagatgtgtgcatttgtgcacataccctatgtatccctatcagggctgtgtgtatttgaaagtgtgtgtgtccg

SEQ ID NO: 4767 - DNA, 119 bp, homo sapiens
gcatttgtgcacatatccctatgtatccctatcagggctgtgtgtatttgaaagtgtgtgtgtccgcatatcatatctgtatagaagagagtgtgattatatttcttgaagaatacatc

SEQ ID NO: 4768 - DNA, 119 bp, homo sapiens
tgtgtgtgtccgcatgatcatatctgtatagaagagagtgtgattatatttcttgaagaatacatccattgaaatggatgtctatggctgtttgagatgagttctctactcttgtgctt

SEQ ID NO: 4769 - DNA, 119 bp, homo sapiens
tcagtcataactattttatttaactacttccccaaggatgtggaccttacacttactttacagccagcccagaaaacttcctagtggcaactaaggctagagcagctgtagagtggtct

SEQ ID NO: 4770 - DNA, 119 bp, homo sapiens
cttactttacagccagcctcagaaaacttcctagtggcaactaaggctagagcagctgtagagtggtctgagggggctcttccattctcacacgtgtgtgcatgaaccctttctcctat

SEQ ID NO: 4771 - DNA, 119 bp, homo sapiens
gcagctgtagagtggtctggagggggctcttccattctcacacgtgtgtgcatgaaccctttctcctatctaaaggcccttcgggaagaagctctagctggtgatgagagcaaggtttg

SEQ ID NO: 4772 - DNA, 119 bp, homo sapiens
atgaaccctttctcctatcctaaaggcccttcgggaagaagctctagctggtgatgagagcaaggtttggggccgctacacttcggcagtgcagtgttgggaaggtgagaacacagttc

SEQ ID NO: 4773 - DNA, 119 bp, homo sapiens
tgatgagagcaaggtttgggggccgctacacttcggcagtgcagtgttgggaaggtgagaacacagttcaaagaacaagaattgttgagtctgaggaatatggggtctggacccccagc

SEQ ID NO: 4774 - DNA, 119 bp, homo sapiens
aaggtgagaacacagttctaaagaacaagaattgttgagtctgaggaatatggggtctggacccccagccatccccttcataggtctccatgggttgggagagcagggtcaccctcatt

SEQ ID NO: 4775 - DNA, 119 bp, homo sapiens
ggggtctggacccccagcacatccccttcataggtctccatgggttgggagagcagggtcaccctcattttgttgcaggattcacttgcagtgtgaatttcaattgtgctggcatcaga

SEQ ID NO: 4776 - DNA, 119 bp, homo sapiens
cttcagacagcatgctcagggcttcgtcagaagtctgcccacccacttgagacaccttcccggaagcaggttttcatggggcatcagtggggatgggtgagccccctcagcagccgagg

SEQ ID NO: 4777 - DNA, 119 bp, homo sapiens
tcccggaagcagggttttcatggggcatcagtggggatgggtgagccccctcagcagccgaggtggtcatgattcccactggatctccttcctgggagactgaaaacccaggctgcatc

SEQ ID NO: 4778 - DNA, 119 bp, homo sapiens
ccgaggtggtcagtgattcccactggatctccttcctgggagactgaaaacccaggctgcatcctgtccgccgtagaaggccaaagacaagagaaatccctgggctggattcaggattc

SEQ ID NO: 4779 - DNA, 119 bp, homo sapiens
agcagctgcagaaggcccagcgccaagcggagcccgccgctgcccaggcagagcgcgtggaaggcccgcgctggaagctcagcacgagctgcgtggctgcgtcccgcgtggggcagcag

SEQ ID NO: 4780 - DNA, 119 bp, homo sapiens
ggaaggcccgcggctggaagctcagcacgagctgcgtggctgcgtcccgcgtggggcagcagaaggtcctaggcgcggggaggccatgggctgtgttcgcggacgcggctcgggtgtgc

SEQ ID NO: 4781 - DNA, 119 bp, homo sapiens
gcagaaggtccctaggcgcggggaggccatgggctgtgttcgcggacgcggctcgggtgtgccaggacccgccggcctgcctgggtcatgtgctgggcgggctgggggcggcatcatgt

SEQ ID NO: 4782 - DNA, 119 bp, homo sapiens
gtgccaggaccccgccggcctgcctgggtcatgtgctgggcgggctgggggcggcatcatgtgccctggcctctcccccaccccaacccccagcgcctgcagtagagccaggctcggtg

SEQ ID NO: 4783 - DNA, 119 bp, homo sapiens
gtttccaacatgaactcttatttggaaagcctttctccctgcctcactgtttcctcctctcctttttcctgaactgcactctctcgactcctgtgtttgatgtgccttaactcttagga

SEQ ID NO: 4784 - DNA, 119 bp, homo sapiens
tcctttttccctgaactgcactctctcgactcctgtgtttgatgtgccttaactcttaggatactgccatttgtctgacagtccatgtcgtgaccaaagttaattcacctttccaaata

SEQ ID NO: 4785 - DNA, 119 bp, homo sapiens
gatactgccattttgtctgacagtccatgtcgtgaccaaagttaattcacctttccaaataagggtctcgttcaggcatttctatccaaaatagatttgtcctgtgtcctaaggccagg

SEQ ID NO: 4786 - DNA, 119 bp, homo sapiens
taagggtctctgttcaggcatttctatccaaaatagatttgtcctgtgtcctaaggccagggataagtcccccaccccccccccccacccccaacaccctgtgtgatgtgtttatattt

SEQ ID NO: 4787 - DNA, 119 bp, homo sapiens
gggataagtccccccaccccccccccccacccccaacaccctgtgtgatgtgtttatatttgagagaagttgggcggggaaaagcattttccgaagttcaagcatacagcatagggact

SEQ ID NO: 4788 - DNA, 119 bp, homo sapiens
ttgagagaagattgggcggggaaaagcattttccgaagttcaagcatacagcatagggactagaaagatctgggttggatataaaataattgagcccccaaagcatcaagaaggatgtt

SEQ ID NO: 4789 - DNA, 119 bp, homo sapiens
ctagaaagatgctgggttggatataaaataattgagcccccaaagcatcaagaaggatgtttggggctttagaaggctgcctgttcacagaaaaggtgaatgtgttgtccagcactgta

SEQ ID NO: 4790 - DNA, 119 bp, homo sapiens
tttggggcttttagaaggctgcctgttcacagaaaaggtgaatgtgttgtccagcactgtattagcgcggtctagtcacttgccttggcatttgaaaatgaaaagtaactcggaaatga

SEQ ID NO: 4791 - DNA, 119 bp, homo sapiens
tattagcgcgagtctagtcacttgccttggcatttgaaaatgaaaagtaactcggaaatgagctgctagaaagactaccctgtgtctggggccagaacagtctttagagcagcctcgtc

SEQ ID NO: 4792 - DNA, 119 bp, homo sapiens
gagctgctagcaaagactaccctgtgtctggggccagaacagtctttagagcagcctcgtcctctgattcaccacctgctctccatatccctctcctgcccctcccccgtgttaacagc

SEQ ID NO: 4793 - DNA, 119 bp, homo sapiens
tcctctgattccaccacctgctctccatatccctctcctgcccctcccccgtgttaacagcctctcccagaaggggcctggaaactcaggctgcgctctaagtggccaatgaggcctcc

SEQ ID NO: 4794 - DNA, 119 bp, homo sapiens
gcctctcccaggaaggggcctggaaactcaggctgcgctctaagtggccaatgaggcctcccaatctaagcgccgcctccaggaacggaaagccaggcccattccttcccagagagctt

SEQ ID NO: 4795 - DNA, 119 bp, homo sapiens
cccaatctaaggcgccgcctccaggaacggaaagccaggcccattccttcccagagagcttttcaggagaggcgcagtttgcgtattgcaaggcagagggtggagggtgagaagctttc

SEQ ID NO: 4796 - DNA, 119 bp, homo sapiens
ttttcaggagcaggcgcagtttgcgtattgcaaggcagagggtggagggtgagaagctttcagggaaaagctacatggtcctttttatgatgtgagtccttcccacttcctgcgaagca

SEQ ID NO: 4797 - DNA, 119 bp, homo sapiens
tcagggaaaaagctacatggtcctttttatgatgtgagtccttcccacttcctgcgaagcatgtagccactaatgagcctcctctgagtagccagtggtagctcctgggccagctgttc

SEQ ID NO: 4798 - DNA, 119 bp, homo sapiens
catgtagccagctaatgagcctcctctgagtagccagtggtagctcctgggccagctgttctcgaactagtttggtttgctaggaaatggtagccctaggtaaagggcaattgtactgt

SEQ ID NO: 4799 - DNA, 119 bp, homo sapiens
tctcgaactatgtttggtttgctaggaaatggtagccctaggtaaagggcaattgtactgtgttgtggtatttggggtccctacatatactgagatgtgcagcctgtcctgtatgatca

SEQ ID NO: 4800 - DNA, 119 bp, homo sapiens
gtgttgtggtcatttggggtccctacatatactgagatgtgcagcctgtcctgtatgatcacctaaatgtgaccacagacacggggaatttgctggaatggattgcataatggagctgt

SEQ ID NO: 4801 - DNA, 119 bp, homo sapiens
cacctaaatggtgaccacagacacggggaatttgctggaatggattgcataatggagctgtgtgtattggcgctctggtccctccccaatccctgtgttcatgagggtggaagcccaga

SEQ ID NO: 4802 - DNA, 119 bp, homo sapiens
gtgtgtattgggcgctctggtccctccccaatccctgtgttcatgagggtggaagcccagatccgccttaaggtaagaactgtgagcagaggaaactcccctaccttgggcttttggtc

SEQ ID NO: 4803 - DNA, 119 bp, homo sapiens
gatccgccttgaaggtaagaactgtgagcagaggaaactcccctaccttgggcttttggtcatttgtcagtatagcctctcagggcaccgggattctcacccaccgcactcatccctgc

SEQ ID NO: 4804 - DNA, 119 bp, homo sapiens
tcatttgtcacgtatagcctctcagggcaccgggattctcacccaccgcactcatccctgccacccagtacccttgagaccctcagctgcctccccagggctctgaagtcctctttggc

SEQ ID NO: 4805 - DNA, 119 bp, homo sapiens
gccacccagtcacccttgagaccctcagctgcctccccagggctctgaagtcctctttggcgatgatttgtggaaacttaactaggaggagctgctcccttctgcattcaaagccaggc

SEQ ID NO: 4806 - DNA, 119 bp, homo sapiens
gcgatgatttagtggaaacttaactaggaggagctgctcccttctgcattcaaagccaggctttaggaactgtatgtttctgtcttgaatgtggtaaagcaaatgaattttcaaattat

SEQ ID NO: 4807 - DNA, 119 bp, homo sapiens
gctttaggaaactgtatgtttctgtcttgaatgtggtaaagcaaatgaattttcaaattatcagggctgtttgtgttcccctgagactgcacctttcacagtatcactgagacaaaaaa

SEQ ID NO: 4808 - DNA, 119 bp, homo sapiens
atcagggctgctttgtgttcccctgagactgcacctttcacagtatcactgagacaaaaaatgagcagaaattacccctgctacttaggcttttgtaagaaaattcgtttcggggacat

SEQ ID NO: 4809 - DNA, 119 bp, homo sapiens
aatgagcagaaaattacccctgctacttaggcttttgtaagaaaattcgtttcggggacattttctttgtctgactttctctggccctgagtggggaataagttcatttttatttcatt

SEQ ID NO: 4810 - DNA, 119 bp, homo sapiens
attttctttgttctgactttctctggccctgagtggggaataagttcatttttatttcattgaaatcagaagctatatcttaaaaaaaaaaaaattatctacccagcactgcagttaca

SEQ ID NO: 4811 - DNA, 119 bp, homo sapiens
ttgaaatcagaaagctatatcttaaaaaaaaaaaaattatctacccagcactgcagttacaattgctttcgaaatatagccctgtccatctcggtggtgtgtgagggggtcccctacgg

SEQ ID NO: 4812 - DNA, 119 bp, homo sapiens
caattgctttgcgaaatatagccctgtccatctcggtggtgtgtgagggggtcccctacggcccgctcttgccagtcaccccctggcaggcgccgagctgaggcaggcatcaggcacac

SEQ ID NO: 4813 - DNA, 119 bp, homo sapiens
ggcccgctctgtgccagtcaccccctggcaggcgccgagctgaggcaggcatcaggcacacttgctgaccactccagcagctccatccggatggcaatgcggacgtgccagcccagcgg

SEQ ID NO: 4814 - DNA, 119 bp, homo sapiens
acttgctgacgcactccagcagctccatccggatggcaatgcggacgtgccagcccagcgggatgaggcgatgaagcgggagatgatggggggccgcagcaggttctgaaccgtggagg

SEQ ID NO: 4815 - DNA, 119 bp, homo sapiens
ccggttgtttccagtctggtccttgtagtaaatccagttcaggcgctcatcggtcctgtactgcacgcttacttggtcatccactcatcgatgtcacagcgcccctgggtgaggatccc

SEQ ID NO: 4816 - DNA, 119 bp, homo sapiens
tcaggcgctcatcggtcctgtactgcacgctgtacttggtcatccactcatcgatgtcacagcgcccctggtgaggatccctgaaatcactttgatctccttcagatctatctgtaacc

SEQ ID NO: 4817 - DNA, 119 bp, homo sapiens
gtcatccactcatcgatgtcacagcgcccctgggtgaggatccctgaaatcactttgatctccttcagactatctgtaaccactggctactgtcctggaacttggagagccaggcacac

SEQ ID NO: 4818 - DNA, 119 bp, homo sapiens
ccaaagccttgactgttgagccgggccttgtttgcagtccacgaagaataccagcccacatactgctccggttagagcaggtgatctggtccggtgtgacctcccctgactcgaaaccc

SEQ ID NO: 4819 - DNA, 119 bp, homo sapiens
gggccttgtttgcagtccacgaagaataccagcccacatactgctccgggttagagcaggtgatctggtcggtgtgacctcccctgactcgaaacccagaggcttgtgatatgggcatt

SEQ ID NO: 4820 - DNA, 119 bp, homo sapiens
tggaactgaccagatatagtttattaaaatatgttcattataaacaattttacctcagttttgtaaaaatgtaaatacatcaaaaactgttacagtgtcgtaagattgcaaatattgcc

SEQ ID NO: 4821 - DNA, 119 bp, homo sapiens
ttcattataaacaattttacctcagttttgtaaaaattgtaaatacatcaaaaactgttacagtgtcgtagattgcaaatattgccttataaaattataaagaagtaaaattgtttagt

SEQ ID NO: 4822 - DNA, 119 bp, homo sapiens
aaattgtaaatacatcaaaaactgttacagtgtcgtaagattgcaaatattgccttataaaattataaaaagtaaaattgtttagtaaaaactaggaaatatcttatttcaattttcca

SEQ ID NO: 4823 - DNA, 119 bp, homo sapiens
gcaatactgaacagttaaggccacaacactttagggagaatttgagatacacatattttgaaatgacttttaaaaatattagcataaataaatatcaaaactggtcacacttatagaag

SEQ ID NO: 4824 - DNA, 119 bp, homo sapiens
ttttgaaatgacttgttaaaaatattagcataaataaatatcaaaactggtcacacttatagaagctgataaaacatattaagtcttatatcttttaaagactactatcagaaacttta

SEQ ID NO: 4825 - DNA, 119 bp, homo sapiens
cttatagaagctgaataaaacatattaagtcttatatcttttaaagactactatcagaaactttacttctaagttataacatttttcaagtatacattacaatacacttggtgactgtg

SEQ ID NO: 4826 - DNA, 119 bp, homo sapiens
agaaactttacttcataagttataacatttttcaagtatacattacaatacacttggtgactgtgaaaaataaatatatatttatagtattgtacaggattttgatcttctctctgtat

SEQ ID NO: 4827 - DNA, 119 bp, homo sapiens
ggtgactgtgaaaacataaatatatatttatagtattgtacaggattttgatcttctctctgtatttgtggtgggatattctgatgattctgactcatgtggttctggtcggcatcttt

SEQ ID NO: 4828 - DNA, 119 bp, homo sapiens
ctctctgtatttgttggtgggatattctgatgattctgactcatgtggttctggtcggcatctttattacactttttaaaatgatctggtctcctatggattttatctctgggagcggc

SEQ ID NO: 4829 - DNA, 119 bp, homo sapiens
cggcatctttattatcactttttaaaatgatctggtctcctatggattttatctctgggagcggctcatgttattcttgacaatcttttgatttattgaggggactcttttgaacagaa

SEQ ID NO: 4830 - DNA, 119 bp, homo sapiens
cttttcaatagtttcagctgagctatcatcattggttctttctgctccttctgttttactgtgataaccgtaggaacactttcatcatctcccacagttttcttcttgctttccacatt

SEQ ID NO: 4831 - DNA, 119 bp, homo sapiens
ggttctttctgctccttctgttttactgtgataacctgtaggaacactttcatcatctcccacagttttttcttgctttccacattttcagcattaatttcctcatccacatcttctag

SEQ ID NO: 4832 - DNA, 119 bp, homo sapiens
acctgtaggaacactttcatcatctcccacagttttcttcttgctttccacattttcagcattaatttctcatccacatcttctagttttagttcctcagttttagaaaattcatgatc

SEQ ID NO: 4833 - DNA, 119 bp, homo sapiens
aacagacaaactgaaattacagaacagtcagtgaatacattgagggcatataacacataccagaaatgaggctctgataaagtacagttaaagcttggaaatgataggagtttagaaat

SEQ ID NO: 4834 - DNA, 119 bp, homo sapiens
acataccagaaatgaaggctctgataaagtacagttaaagcttggaaatgataggagtttagaaataaaaattacagaagacaagagacgttaaagctgtcataacttttcaagagtaa

SEQ ID NO: 4835 - DNA, 119 bp, homo sapiens
gagtttagaaataaaaaattacagaagacaagagacgttaaagctgtcataacttttcaagagtaaagaaacaactgtatagaaaactaaattaattttaaagtgtaatttttctccct

SEQ ID NO: 4836 - DNA, 119 bp, homo sapiens
tttcaagagtaaagaaaacaactgtatagaaaactaaattaattttaaagtgtaatttttctccctaaacgtttcttacatgaataacaataatgatagagtgaatctgtgagaatgaa

SEQ ID NO: 4837 - DNA, 119 bp, homo sapiens
tacctttgcctggacaaaaaatacttcaagttttacatatttccagattatacatttaaattaatcacctttcattagatatactaccatctgcccagatagtaactaaaagagatcac

SEQ ID NO: 4838 - DNA, 119 bp, homo sapiens
aaattaatcaccatttcattagatatactaccatctgcccagatagtaactaaaagagatcacgtttttggatctaagctctgaacacagctgtcactttgtagatttttgcaaaaaga

SEQ ID NO: 4839 - DNA, 119 bp, homo sapiens
gatcacgtttttgggatctaagctctgaacacagctgtcactttgtagatttttgcaaaaagaacacataaaggtgaaagacaatactttctttaaaatgtgaatgcctcaattgagtt

SEQ ID NO: 4840 - DNA, 119 bp, homo sapiens
aaaagaacacataaaaggtgaaagacaatactttctttaaaatgtgaatgcctcaattgagttttagaaaccatccattattagaaaattattctatacagtaggtaaactgtaatcac

SEQ ID NO: 4841 - DNA, 119 bp, homo sapiens
tgagttttagaataccatccattattagaaaattattctatacagtaggtaaactgtaatcactaacttaaaaaagtgctaacatatttataagaaattagaagtttttatagccctta

SEQ ID NO: 4842 - DNA, 119 bp, homo sapiens
aatcactaacttaaaaaaagtgctaacatatttataagaaattagaagtttttatagcccttaagcatcgtgccatttaaaaatggaatgatttgtatacacaaacaaaacactcttgt

SEQ ID NO: 4843 - DNA, 119 bp, homo sapiens
cccttaagcatctgtgccatttaaaaatggaatgatttgtatacacaaacaaaacactcttgtagtatatcctgtttcctaaagctgcctttaatgaatatataatgttaataatctga

SEQ ID NO: 4844 - DNA, 119 bp, homo sapiens
tcttgtagtatattcctgtttcctaaagctgcctttaatgaatatataatgttaataatctgatatgacttttaatattttctagttatgtttttataatttgggggggaaatacacga

SEQ ID NO: 4845 - DNA, 119 bp, homo sapiens
atctgatatgaccttttaatattttctagttatgtttttataatttgggggggaaatacacgaaaatttagtttgagagaggccaaaatttaccagtgcctcctattgtctttggctcc

SEQ ID NO: 4846 - DNA, 119 bp, homo sapiens
acacgaaaattttagtttgagagaggccaaaatttaccagtgcctcctattgtctttggctccttaacaagctgcatcagttgcttttttttttactacacataaaataattgacataa

SEQ ID NO: 4847 - DNA, 119 bp, homo sapiens
ggctccttaacacagctgcatcagttgcttttttttttactacacataaaataattgacataaaatcaattaataacacgtaatgagtgcccgttatatgcaaggcatttaaattgtct

SEQ ID NO: 4848 - DNA, 119 bp, homo sapiens
acataaaatcaatttaataacacgtaatgagtgcccgttatatgcaaggcatttaaattgtctgactggcataatcgggtcacatttaaggtttgttacttcaattccaagtaatgtgg

SEQ ID NO: 4849 - DNA, 119 bp, homo sapiens
ttgtctgactggccataatcgggtcacatttaaggtttgttacttcaattccaagtaatgtggtaatacttattccagaactttttggaacctgatggcccgttttttaaaagtcgttt

SEQ ID NO: 4850 - DNA, 119 bp, homo sapiens
atgtggtaatacattattccagaactttttggaacctgatggcccgttttttaaaagtcgttttgactgactggcattttggacctctgctctttcccatttccctgtgtgttagtaac

SEQ ID NO: 4851 - DNA, 119 bp, homo sapiens
tcgttttgactggactggcattttggacctctgctctttcccatttccctgtgtgttagtaactgacttttttgatatgttttatgtttgccatatttcacagatccttttattttgct

SEQ ID NO: 4852 - DNA, 119 bp, homo sapiens
agtaactgactttttttgatatgttttatgtttgccatatttcacagatccttttattttgctcactttttgtactcctctccatcctgcctttcattctcttcttcgcctgtctcctg

SEQ ID NO: 4853 - DNA, 119 bp, homo sapiens
tcatcttgccagtgttctgctcctgaactaccttcctcacaggttccatcccctctaccttcaggcccacctctgcttctcccactgattttgccttgccttcactcacctctgctttg

SEQ ID NO: 4854 - DNA, 119 bp, homo sapiens
ccttcctcacaggttccatcccctctaccttcaggcccatcctctgcttctcccactgattttgccttgcttcactcacctctgctttgtctgtaaggtcatctgataggatctctgtt

SEQ ID NO: 4855 - DNA, 119 bp, homo sapiens
ctacttcctcatctgaaaatgcttcgatagtcgtagctggctgcgtcatgaaaatcccttgtgacacatttgtttacatgctttcccttctttcatttctgacatttcttcatattcat

SEQ ID NO: 4856 - DNA, 119 bp, homo sapiens
tcgtagctggctgcgtcatgaaaatcccttgtgacacatgttgtttacatgctttcccttctttcattttgacatttcttcatattcatcactatcatcgttttcagtaagagctgtat

SEQ ID NO: 4857 - DNA, 119 bp, homo sapiens
gtgacacatgttgtttacatgctttcccttctttcatttctgacatttcttcatattcatcactatcatgttttcagtaagagctgtatcctgcgtcagttccccaattgtttgttgtt

SEQ ID NO: 4858 - DNA, 119 bp, homo sapiens
ctggttcctctggctgcatgaggtcctgttcagataagacactctcttggaggtttctctcagaacatctggaaagactgaattggggagaaaacaagcagaaaggccaagagtccctt

SEQ ID NO: 4859 - DNA, 119 bp, homo sapiens
gaggtttctctcagaacatcgtggaaagactgaattggggagaaaacaagcagaaaggccaagagtccctctattggaggtagtgttctcctcattgaaaaagaatctggagacctctc

SEQ ID NO: 4860 - DNA, 119 bp, homo sapiens
cctctctcttcgccgcatacgtgctgatagagtcctctgcagtacatttcctgaggttaaactgctataggcagaaaagtcgccacagataagcaagtatcatttatttcatcgaattc

SEQ ID NO: 4861 - DNA, 119 bp, homo sapiens
cctctgcagtacatttcctgaggttaaactgctatacggcagaaaagtcgccacagataagcaagtatctttatttcatcgaattcaatttcttttgccacaccacgatgaggagcagc

SEQ ID NO: 4862 - DNA, 119 bp, homo sapiens
atacggcagaaaagtcgccacagataagcaagtatcatttatttcatcgaattcaatttcttttgccacccacgatgaggagcagcaaaaactaccatgtgacatccaccacaagcaac

SEQ ID NO: 4863 - DNA, 119 bp, homo sapiens
caatttaactataaacctcaaaaaattagagcacaaagtaggaatgaagtgattggtaaaattctccagccaagtcctaattttccgtggcgaccatctccaaaagtatacataaggcc

SEQ ID NO: 4864 - DNA, 119 bp, homo sapiens
taactataaacctcaaaaaattagagcacaaagtaggaatgaagtgattggtaaaattctccagtccaatcctaattttccgtggcgaccatctccaaaagtatacataaggccgatat

SEQ ID NO: 4865 - DNA, 119 bp, homo sapiens
ctgttatcaaagctgtgtgattttctccacaagaaatataacttattgtttgatccctaatattctcaagactttgggttctgaagtttcaaaaagaaaagtgccaagacccagctgac

SEQ ID NO: 4866 - DNA, 119 bp, homo sapiens
tataacttattgtttgatccctaatattctcaatgactttgggttctgaagtttcaaaaagaaaagtgcaagacccagctgaccaaattgtcccagcccaaaggtatacacagcattct

SEQ ID NO: 4867 - DNA, 119 bp, homo sapiens
ccgtgagaaccacagtatgctctccaccacaggctacttggatcaccttctccggaatttcagacaccactggggtgttctgtgattgcccaggagctgattgggaagacctaacttcc

SEQ ID NO: 4868 - DNA, 119 bp, homo sapiens
ggatcaccttctccggaatttcagacaccagctggggtgttctgtgattgcccaggagctgattgggaaacctaacttcccattctcaggttctccaaacacatatagctcaccatctg

SEQ ID NO: 4869 - DNA, 119 bp, homo sapiens
ttgttacaaaagctgaatggtaatatccacaagagatccaggagacaggtttcccaatggtcacttgctagggacacagacattacttacattttttaaaccaatttgcccttcggaat

SEQ ID NO: 4870 - DNA, 119 bp, homo sapiens
aagagatccaggagacaggtttcccaatggtcacttgctgagggacacagacattacttacattttttaaccaatttgcccttcggaattgtcaccccacataaaaagtcttccatcct

SEQ ID NO: 4871 - DNA, 119 bp, homo sapiens
cagttagggcagctgaagtattagatccagcagacagctgcttaatcttatgctcggatgtaaaaaagcaattacatgaaaagtgtttctttcttcggtgtcaccaagccccaactgtc

SEQ ID NO: 4872 - DNA, 119 bp, homo sapiens
gcttaatcttatgctcggatgtaaaaaagctaattacatgaaaagtgtttctttcttcggtgtcaccaaccccaactgtccttcattatttccaccagttgcatatacattgcctcctt

SEQ ID NO: 4873 - DNA, 119 bp, homo sapiens
cggtaacaacagcagaatgttcatctccacatgaaagatgtacagggacatcatttttaaaccagaattaccgggattattttcagcaaatttacttttcccaaatgtaaacacagcac

SEQ ID NO: 4874 - DNA, 119 bp, homo sapiens
caacagcagaatgttcatctccacatgaaagatgtacagggacatcatttttaaaccagaatttaccggattattttcagcaaatttacttttcccaaatgtaaacacagcacccgaat

SEQ ID NO: 4875 - DNA, 119 bp, homo sapiens
cgggcatcagctcttccggctccctcatgccacgggcagtacgggcagcctgcgccggggccaggaggcgtagaggacggtttggtcggggctaaagcagctactccgcaccgacgcgg

SEQ ID NO: 4876 - DNA, 119 bp, homo sapiens
gtacgggcagcctgcgccggggccaggaggctgtagaggacggtttggtcggggctaaagcagctactcgcaccgacgcgggccgcgaaagcccccaagttccgcatggcgaaactccg

SEQ ID NO: 4877 - DNA, 119 bp, homo sapiens
gacggtttggtcggggctaaagcagctactccgcaccgacgcgggccgcgaaagcccccaagttccgcaggcgaaactccggagatcaactacaaccgcgctcccggaagtcaacaaac

SEQ ID NO: 4878 - DNA, 119 bp, homo sapiens
ggctgagggagtggagggggacctcagaggagcaggaccagggagactcccaggacggtaagcaacattgaggaccattcactaacgcttctctgcaggggtttcctctccatccattt

SEQ ID NO: 4879 - DNA, 119 bp, homo sapiens
gtaagcaacatttgaggaccattcactaacgcttctctgcaggggtttcctctccatccatttccttgcgggttgtcagtgatgccatctgagttgctgtcagggctgtagcctgacaa

SEQ ID NO: 4880 - DNA, 119 bp, homo sapiens
ccatttccttgctgggttgtcagtgatgccatctgagttgctgtcagggctgtagcctgacaaagggttcctaatagatccaaactgtccatttgtggggagcttctgattttctgttg

SEQ ID NO: 4881 - DNA, 119 bp, homo sapiens
tgacaaagggtttcctaatagatccaaactgtccatttgtggggagcttctgattttctgttgttactgtttcccttagcccaacaccagggtcattaagaaggaaggaatgtgaggaa

SEQ ID NO: 4882 - DNA, 119 bp, homo sapiens
ctgttgttactggtttcccttagcccaacaccagggtcattaagaaggaaggaatgtgaggaagaaagaaggcagggcattcaggaagaagtgtggaggcatgggagggttctcatggg

SEQ ID NO: 4883 - DNA, 119 bp, homo sapiens
gaggaagaaagaaaggcagggcattcaggaagaagtgtggaggcatgggagggttctcatggggccctctgggcactgggtgacctgtcctttctcccctcaggtaggggtcccacggc

SEQ ID NO: 4884 - DNA, 119 bp, homo sapiens
catggggccctcctgggcactgggtgacctgtcctttctcccctcaggtaggggtcccacggctgggtgtcctaagccactgggtggatgaaaggccgagggatgttggtcctgcttct

SEQ ID NO: 4885 - DNA, 119 bp, homo sapiens
cggtggtcctcggcctgcccagcgcctgggccgtgggggcctgcgcccgcgcttgtcccgccgcctgcgctgcagcaccgtggagcgcggctgctcggtgcgctgcgaccgcgcgggcc

SEQ ID NO: 4886 - DNA, 119 bp, homo sapiens
cgccgcctgcgcctgcagcaccgtggagcgcggctgctcggtgcgctgcgaccgcgcgggcctcctgcggtgccggccgagctcccgtgcgaggcggtctccatcgacctggaccggaa

SEQ ID NO: 4887 - DNA, 119 bp, homo sapiens
ggcctcctgcgggtgccggccgagctcccgtgcgaggcggtctccatcgacctggaccggaacggcctggcttcctgggcgagcgagccttcggcacgctgccgtccttgcgccgcctg

SEQ ID NO: 4888 - DNA, 119 bp, homo sapiens
ggaacggcctgcgcttcctgggcgagcgagccttcggcacgctgccgtccttgcgccgcctgtcgctgcccacaacaacctgtccttcatcacgcccggcgccttcaagggcctgccgc

SEQ ID NO: 4889 - DNA, 119 bp, homo sapiens
cctgtcgctgcgccacaacaacctgtccttcatcacgcccggcgccttcaagggcctgccgcgcctggcgagctgcgcctggcgcacaacggcgacctgcgctacctgcacgcgcgcac

SEQ ID NO: 4890 - DNA, 119 bp, homo sapiens
ccgcgcctggctgagctgcgcctggcgcacaacggcgacctgcgctacctgcacgcgcgcaccttcgcgcgctcagccgcctgcgccgcctagacctagcagcctgccgcctcttcagc

SEQ ID NO: 4891 - DNA, 119 bp, homo sapiens
gcaccttcgcggcgctcagccgcctgcgccgcctagacctagcagcctgccgcctcttcagcgtgcccggcgcctcctggccgaactgccggccctgcgcgaactcgccgccttcgaca

SEQ ID NO: 4892 - DNA, 119 bp, homo sapiens
cagcgtgcccgagcgcctcctggccgaactgccggccctgcgcgaactcgccgccttcgacaacctgttcgccgcgtgccgggcgcgctgcgcggcctggccaacctgacgcacgcgca

SEQ ID NO: 4893 - DNA, 119 bp, homo sapiens
gacaacctgttccgccgcgtgccgggcgcgctgcgcggcctggccaacctgacgcacgcgcacctggaggcggccgcatcgaggcggtggcctccagctcgctgcagggcctgcgccgc

SEQ ID NO: 4894 - DNA, 119 bp, homo sapiens
cgcacctggagcgcggccgcatcgaggcggtggcctccagctcgctgcagggcctgcgccgcctgcgctgctcagcctgcaggccaaccgcgtccgtgccgtgcacgctggcgccttcg

SEQ ID NO: 4895 - DNA, 119 bp, homo sapiens
ccgcctgcgctcgctcagcctgcaggccaaccgcgtccgtgccgtgcacgctggcgccttcggggactgggcgtcctggagcatctgctgctcaacgacaacctgctggccgagctccc

SEQ ID NO: 4896 - DNA, 119 bp, homo sapiens
ttcggggactgtggcgtcctggagcatctgctgctcaacgacaacctgctggccgagctcccggccgacccttccgcggcctgcggcgcctgcgcacgctcaacctgggtggcaacgcg

SEQ ID NO: 4897 - DNA, 119 bp, homo sapiens
tcccggccgacgccttccgcggcctgcggcgcctgcgcacgctcaacctgggtggcaacgcgctggacccgtggcgcgcgcctggttcgctgacctggccgagctcgagctgctctacc

SEQ ID NO: 4898 - DNA, 119 bp, homo sapiens
cgcgctggaccgcgtggcgcgcgcctggttcgctgacctggccgagctcgagctgctctacctggaccgaacagcatcgccttcgtggaggagggcgccttccagaacctctcgggtct

SEQ ID NO: 4899 - DNA, 119 bp, homo sapiens
tacctggaccgcaacagcatcgccttcgtggaggagggcgccttccagaacctctcgggtctcctcgcgtgcacctcaacggcaaccgcctcaccgtgctcgcctgggtcgccttccag

SEQ ID NO: 4900 - DNA, 119 bp, homo sapiens
gtctcctcgcgctgcacctcaacggcaaccgcctcaccgtgctcgcctgggtcgccttccagcccggctcttcctgggccgcctcttcctcttccgcaacccgtggtgctgcgactgcc

SEQ ID NO: 4901 - DNA, 119 bp, homo sapiens
ccagcccggcttcttcctgggccgcctcttcctcttccgcaacccgtggtgctgcgactgccgtctggatggctgagggactggatggagggctccggacgtgtcaccgacgtgccgtg

SEQ ID NO: 4902 - DNA, 119 bp, homo sapiens
tgccgtctggagtggctgagggactggatggagggctccggacgtgtcaccgacgtgccgtgcgcctcccgggctccgtggccggcctggacctcagccaggtgaccttcgggcgctcc

SEQ ID NO: 4903 - DNA, 119 bp, homo sapiens
cgtgcgcctccccgggctccgtggccggcctggacctcagccaggtgaccttcgggcgctcctccgatgcctctgtgtggaccccgaggagctgaacctcaccacgtccagtccaggcc

SEQ ID NO: 4904 - DNA, 119 bp, homo sapiens
ctcctccgatggcctctgtgtggaccccgaggagctgaacctcaccacgtccagtccaggcccgtccccgaaccagcggccaccaccgtgagcaggttcagcagcctcctctccaagct

SEQ ID NO: 4905 - DNA, 119 bp, homo sapiens
ggcccgtccccagaaccagcggccaccaccgtgagcaggttcagcagcctcctctccaagctgctggcccgagggtcccggtggaggaggcggccaacaccactggggggctggccaac

SEQ ID NO: 4906 - DNA, 119 bp, homo sapiens
agctgctggccccgagggtcccggtggaggaggcggccaacaccactggggggctggccaacgcctcccgtccgacagcctctcctcccgtggggtgggaggcgcgggccggcagccct

SEQ ID NO: 4907 - DNA, 119 bp, homo sapiens
caacgcctccctgtccgacagcctctcctcccgtggggtgggaggcgcgggccggcagccctggtttctctcgcctcttgtctcctgcccagcgtggcccagcacgtggtgtttggcct

SEQ ID NO: 4908 - DNA, 119 bp, homo sapiens
ccctggtttctcctcgcctcttgtctcctgcccagcgtggcccagcacgtggtgtttggcctgcagatgactgacctggccagaggggggaaagtttgcttaactgggcttgagtgtgt

SEQ ID NO: 4909 - DNA, 119 bp, homo sapiens
gcctgcagatggactgacctggccagaggggggaaagtttgcttaactgggcttgagtgtgtttgtggtaggggagaggagccggaatggagggcagaggtgaaaatcccagtggaggg

SEQ ID NO: 4910 - DNA, 119 bp, homo sapiens
gtgtttgtggtaaggggagaggagccggaatggagggcagaggtgaaaatcccagtggagggtggaaggaccgtttgcctccagagatggccccagggagaacacagggacgtgccact

SEQ ID NO: 4911 - DNA, 119 bp, homo sapiens
agggtggaaggaaccgtttgcctccagagatggccccagggagaacacagggacgtgccactcgaggggaggatggtatggatttctgcttttgtcacacgggcatccattggaaaaga

SEQ ID NO: 4912 - DNA, 119 bp, homo sapiens
cactcgagggggaggatggtatggatttctgcttttgtcacacgggcatccattggaaaagagaagcaaaatgaacgtgggccctcgggtgggaagactaggaatcggaagcttctagg

SEQ ID NO: 4913 - DNA, 119 bp, homo sapiens
ctcatcttccaggcaacagtgcctgcaaggcctgaattagagagacttccattggctaagtagttaagaccgtcccatttctcctggcggggtaacccattacaccgaagtcctttgtt

SEQ ID NO: 4914 - DNA, 119 bp, homo sapiens
ttggctaagtagttaagagccgtcccatttctcctggcggggtaacccattacaccgaagtcctttgtttctaccacaatcctcctcctcctctccaggggcctggaaacactaggatt

SEQ ID NO: 4915 - DNA, 119 bp, homo sapiens
acaccgaagtcctttgttttctaccacaatcctcctcctcctctccaggggcctggaaacactaggattaggaaggtaggcaggacgtgagagaagggagatgggagagagatttaaga

SEQ ID NO: 4916 - DNA, 119 bp, homo sapiens
cctggaaacactaggattcaggaaggtaggcaggacgtgagagaagggagatgggagagagatttaagaaaagggtggcggtggttcctggggtctgagatgtgttaggaggcgtttaa

SEQ ID NO: 4917 - DNA, 119 bp, homo sapiens
tgggagagagatttaagacaaagggtggcggtggttcctggggtctgagatgtgttaggaggcgtttaaacaaagatccagttcatttactccacagttattcccagggctggccctag

SEQ ID NO: 4918 - DNA, 119 bp, homo sapiens
gtgttaggaggcgtttaaaacaaagatccagttcatttactccacagttattcccagggctggccctagcacaaaggaactttagggcagggtagggaaaaaaggggcagcagggggtg

SEQ ID NO: 4919 - DNA, 119 bp, homo sapiens
ttgaatatactctttttatttcaaaacgtgggaataactcaaaatttgagcctccaggaccaaaacacattgaaccaaacgttcagaagacaagccaggccaccattttggcaacatgt

SEQ ID NO: 4920 - DNA, 119 bp, homo sapiens
ccaaaacacatttgaaccaaacgttcagaagacaagccaggccaccattttggcaacatgtttcacatgacaagtggatattagagaatgatgcccgtgacacggctaaagctatagca

SEQ ID NO: 4921 - DNA, 119 bp, homo sapiens
gtttcacatggacaagtggatattagagaatgatgcccgtgacacggctaaagctatagcacacccacaatagattcatacttggttgtctaatttgcatgcatgagtatggtgcattc

SEQ ID NO: 4922 - DNA, 119 bp, homo sapiens
cacacccacaaatagattcatacttggttgtctaatttgcatgcatgagtatggtgcattctccatgccctagtacatatatgccttttccagagtcagtgcaggatccgtatttgtgc

SEQ ID NO: 4923 - DNA, 119 bp, homo sapiens
tctccatgccactagtacatatatgccttttccagagtcagtgcaggatccgtatttgtgcaagtctttaaagtctgctcccttacaaaattttaccataatttatctgagacagcctt

SEQ ID NO: 4924 - DNA, 119 bp, homo sapiens
gcaagtctttaaaagtctgctcccttacaaaattttaccataatttatctgagacagccttcctgtgacaattctttatgctgcttttactttcaaaaagtcatttctgaataataatt

SEQ ID NO: 4925 - DNA, 119 bp, homo sapiens
ttcctgtgacaaattctttatgctgcttttactttcaaaaagtcatttctgaataataattatagctgtaagagttccagcatcacataaaagaatctgtttgttagttattttaatgt

SEQ ID NO: 4926 - DNA, 119 bp, homo sapiens
ttatagctgtcaagagttccagcatcacataaaagaatctgtttgttagttattttaatgtcagttcgcggctgtgagtaaacgtagctaaacatatccacatgcttggtatctggact

SEQ ID NO: 4927 - DNA, 119 bp, homo sapiens
gtcagttcgctggctgtgagtaaacgtagctaaacatatccacatgcttggtatctggactttgaaatcgtaacctttagcagcaatggcaaccttagaccaaaatgacaaggtaaaaa

SEQ ID NO: 4928 - DNA, 119 bp, homo sapiens
ctttgaaatcggtaacctttagcagcaatggcaaccttagaccaaaatgacaaggtaaaaaaaaacatcacaataacagaagatgtcccaggaaaagctgggcttttctactttccaaa

SEQ ID NO: 4929 - DNA, 119 bp, homo sapiens
aaaaaacatcaacaataacagaagatgtcccaggaaaagctgggcttttctactttccaaagtaaattctccccagcgtgcaccaaacactgacagcctgacacgcttgtgtatgaggg

SEQ ID NO: 4930 - DNA, 119 bp, homo sapiens
aagtaaattcttccccagcgtgcaccaaacactgacagcctgacacgcttgtgtatgagggcccacttttcccactaatgctgaattgttggaaacccaaacagcattgagagccaagg

SEQ ID NO: 4931 - DNA, 119 bp, homo sapiens
ggcccactttttcccactaatgctgaattgttggaaacccaaacagcattgagagccaagggggaaaatcctgaatctgaaaatgaaccaaaagaaattgtaccagagaaaggagatgg

SEQ ID NO: 4932 - DNA, 119 bp, homo sapiens
gggggaaaatgcctgaatctgaaaatgaaccaaaagaaattgtaccagagaaaggagatgggaactgcaagaagttcccagagtatctctctctgtcaacaagcatgtagagtctttat

SEQ ID NO: 4933 - DNA, 119 bp, homo sapiens
gggaactgcaaagaagttcccagagtatctctctctgtcaacaagcatgtagagtctttattactagaaatgcagagtcccgggagaattgttgcatccttttttgccttaactctttt

SEQ ID NO: 4934 - DNA, 119 bp, homo sapiens
attactagaatatgcagagtcccgggagaattgttgcatccttttttgccttaactcttttcttgccagctttccctggctggtcgaactgcctctacagttgtcccatccagaagcca

SEQ ID NO: 4935 - DNA, 119 bp, homo sapiens
ttcttgccagtctttccctggctggtcgaactgcctctacagttgtcccatccagaagccacacacagcgcgggcctcaggaattgcattcctcgcagtgacaggagaggatgtaccgg

SEQ ID NO: 4936 - DNA, 119 bp, homo sapiens
cacacacagcagcgggcctcaggaattgcattcctcgcagtgacaggagaggatgtaccggtaggtggcgtgagtcgcatgccccctgagcatcgcagccgcagtgccttcagcttgga

SEQ ID NO: 4937 - DNA, 119 bp, homo sapiens
ggtaggtggcagtgagtcgcatgccccctgagcatcgcagccgcagtgccttcagcttggaagtctgggccggcagcagtgacaggaggaacggaagggttgcttgaggacagtgctga

SEQ ID NO: 4938 - DNA, 119 bp, homo sapiens
gaagtctggggccggcagcagtgacaggaggaacggaagggttgcttgaggacagtgctgaacgacaccaaggctcggagcgtgacgcctggctgcagtgcccctcgcacctggccagg

SEQ ID NO: 4939 - DNA, 119 bp, homo sapiens
ctttgagctacacttgtacaatgggtgactgatagaatccacatagtggtgcctcatgcagcgtcgaggtccgagtccattatgaatgagctgtccgttttactgtctgtatctcccat

SEQ ID NO: 4940 - DNA, 119 bp, homo sapiens
ctcatgcagcgtcgagggtccgagtccattatgaatgagctgtccgttttactgtctgtatctcccatttcaccagcagggagagcatagaaaaggatgcagctagtacatgttttctc

SEQ ID NO: 4941 - DNA, 119 bp, homo sapiens
tgtctgtatctcccattatcaccagcagggagagcatagaaaaggatgcagctagtacatgttttctcatgttgtaaggaaaaacttctctagaagaacagcagagggaggcagaggac

SEQ ID NO: 4942 - DNA, 119 bp, homo sapiens
tagtacatgttttctcattgttgtaaggaaaaacttctctagaagaacagcagagggaggcagaggacaaaaattggaaatggcttcacctcctaggatccagtcccgttcaaggaaag

SEQ ID NO: 4943 - DNA, 119 bp, homo sapiens
gagggaggcagaggacaaaaaattggaaatggcttcacctcctaggatccagtcccgttcaaggaaaggcaggatcgggctgaagctttctggttgtcattgtcctttatgtgctggag

SEQ ID NO: 4944 - DNA, 119 bp, homo sapiens
tcccgttcaaggaaagggcaggatcgggctgaagctttctggttgtcattgtcctttatgtgctggagtttgtcttactctttgcacttgcaatccatcatcacagtatctgctgcaca

SEQ ID NO: 4945 - DNA, 119 bp, homo sapiens
cttaggggaacgcagggctcctttcttctcagacttttctgagagctagaaagaggtcctgttacttccaatgcttttgttcttctgtccctctgtcacatggcttgccttttatattt

SEQ ID NO: 4946 - DNA, 119 bp, homo sapiens
ctgagagctagaaagaggtcctgttacttccaaatgcttttgttcttctgtccctctgtcacatggcttccttttatatttgcaacacacaaaagttaggactgttgtttaagcgacac

SEQ ID NO: 4947 - DNA, 119 bp, homo sapiens
atgtcaaatggaaaagtgccattgcagtcatatatcaatcaggcgtgcggccgcagcagcgcactagcaatgggaatgccacggaaatgtgaggcgctcgttatcggggactcagcctc

SEQ ID NO: 4948 - DNA, 119 bp, homo sapiens
caatcaggcgtgcggccgcagcagcgcactagcaaatgggaatgccacggaaatgtgaggcgctcgttacggggactcagcctctgcccaccgctcggctcccttccacggagcatctt

SEQ ID NO: 4949 - DNA, 119 bp, homo sapiens
gggtcgtcagggcgacgaaaaaggggaaggggtgctgggcctggcgggcaaactaaggctgcggaccgtgggcggttccgcggggcgttgtccggagagctgcgaggccggggttccca

SEQ ID NO: 4950 - DNA, 119 bp, homo sapiens
gctgcggaccgttgggcggttccgcggggcgttgtccggagagctgcgaggccggggttcccagggttccgccacactctaggaagtgcctgagctagtgagctggccaacgagctccg

SEQ ID NO: 4951 - DNA, 119 bp, homo sapiens
ttcccagggttcacgccacactctaggaagtgcctgagctagtgagctggccaacgagctccgcgggctggaccatgggctgcttcttctccaagagacggaaggctgacaaggagtcg

SEQ ID NO: 4952 - DNA, 119 bp, homo sapiens
gctccgcgggctgggaccatgggctgcttcttctccaagagacggaaggctgacaaggagtcgcggcccagaacgaggaggagcggccaaagcagtacagctgggatcagcgcgagaag

SEQ ID NO: 4953 - DNA, 119 bp, homo sapiens
gttgatccaaaagactacatgttcagtggactgaaggatgaaacagtaggtcgcttacctgggacggtacaggacaacagtttctcattcaagactgtgagaactgtaacatctatatt

SEQ ID NO: 4954 - DNA, 119 bp, homo sapiens
ttacctgggacggtagcaggacaacagtttctcattcaagactgtgagaactgtaacatctatatttttatcactctgctacagttaccattgatgactgtactaactgcataattttt

SEQ ID NO: 4955 - DNA, 119 bp, homo sapiens
aacatctatatttttgatcactctgctacagttaccattgatgactgtactaactgcataatttttctggacccgtgaaaggcagcgtgtttttccggaattgcagagattgcaagtgc

SEQ ID NO: 4956 - DNA, 119 bp, homo sapiens
tgcataatttttctgggacccgtgaaaggcagcgtgtttttccggaattgcagagattgcaagtgcacatagcctgccaacaatttcgtgtgcgagattgtagaaagctggaagtcttt

SEQ ID NO: 4957 - DNA, 119 bp, homo sapiens
gattgcaagtgcacattagcctgccaacaatttcgtgtgcgagattgtagaaagctggaagtctttttggttgtgccactcaacccatcattgagtcttcctcaaatatcaaatttgga

SEQ ID NO: 4958 - DNA, 119 bp, homo sapiens
ctggaagtctttttgtgttgtgccactcaacccatcattgagtcttcctcaaatatcaaatttggatgtttcaatggtactatcctgaattagctttccagttcaaagatgcagggcta

SEQ ID NO: 4959 - DNA, 119 bp, homo sapiens
atcaaatttggatgttttcaatggtactatcctgaattagctttccagttcaaagatgcagggctaagttcttcaacaatacatggagtaacattcatgactttacacctgtgtcagga

SEQ ID NO: 4960 - DNA, 119 bp, homo sapiens
gatgcagggctaagtatcttcaacaatacatggagtaacattcatgactttacacctgtgtcaggagaatcaactggagccttcttccagaagatgctgtggttcaggactatgttcct

SEQ ID NO: 4961 - DNA, 119 bp, homo sapiens
cctgtgtcaggagaactcaactggagccttcttccagaagatgctgtggttcaggactatgttcctatactactaccgaagagctcaaagctgttcgtgtttccacagaagccaataga

SEQ ID NO: 4962 - DNA, 119 bp, homo sapiens
gactatgttcctatacctactaccgaagagctcaaagctgttcgtgtttccacagaagccaatagaagcttgttccaatatcccggggtcagagacagaagagcagcgatgaatcatgc

SEQ ID NO: 4963 - DNA, 119 bp, homo sapiens
gaagccaatagaagcattgttccaatatcccggggtcagagacagaagagcagcgatgaatcatgcttatggtattatttgctggtgattacactattgcaaatgccagaaaactaatt

SEQ ID NO: 4964 - DNA, 119 bp, homo sapiens
atgtttgtatctgaaagcaaggagacggcatctggagatgtagacagcttctacaactttgctgatataagatgggaatatgaagtgcaatgtggaaccaggacttggtattaagcctt

SEQ ID NO: 4965 - DNA, 119 bp, homo sapiens
ttgctgatatacagatgggaatatgaagtgcaatgtggaaccaggacttggtattaagcctttcccaactgtgaatatagaatttgataatacacttttgtgtattagcaatggttttt

SEQ ID NO: 4966 - DNA, 119 bp, homo sapiens
cctttcccaacttgtgaatatagaatttgataatacacttttgtgtattagcaatggtttttactaatgtaaaacttttaaagtttattttttaataaattgttgagtattacatcatt

SEQ ID NO: 4967 - DNA, 119 bp, homo sapiens
ttttactaatgctaaaacttttaaagtttattttttaataaattgttgagtattacatcatttacttgagttcaaaaataattcattttaaattaagtagttttaatcagcttaaaagc

SEQ ID NO: 4968 - DNA, 119 bp, homo sapiens
catttacttgaggttcaaaaataattcattttaaattaagtagttttaatcagcttaaaagctatttaaccattttaataagcttgcagttttgtttctctgcatatgatattcttatt

SEQ ID NO: 4969 - DNA, 119 bp, homo sapiens
aagctatttaacccattttaataagcttgcagttttgtttctctgcatatgatattcttattagaaaacgaagtagctaaaagtttattattttaatcctatttaaatgttctttcaaa

SEQ ID NO: 4970 - DNA, 119 bp, homo sapiens
tattagaaaacagaagtagctaaaagtttattattttaatcctatttaaatgttctttcaaatctctaaaatttaaactttcctcagtgctccatgatactttttttgagactccatat

SEQ ID NO: 4971 - DNA, 119 bp, homo sapiens
caaatctctaataatttaaactttcctcagtgctccatgatactttttttgagactccatatcattgctattttacctttttcaatttagagggatttgttactagtcgatcaattaga

SEQ ID NO: 4972 - DNA, 119 bp, homo sapiens
atatcattgcttattttacctttttcaatttagagggatttgttactagtcgatcaattagaatgaaccatgcacatttttatgtacacatatccagttatataattgcttcctagttg

SEQ ID NO: 4973 - DNA, 119 bp, homo sapiens
tagaatgaacctatgcacatttttatgtacacatatccagttatataattgcttcctagttgcattataggcaaatgagattttgtacatggagttgacataatactttgtaaattgaa

SEQ ID NO: 4974 - DNA, 119 bp, homo sapiens
gttgcattatatggcaaatgagattttgtacatggagttgacataatactttgtaaattgaattttttaagaaataggcatttgataaccagcttggcaagtaactctactaacagatg

SEQ ID NO: 4975 - DNA, 119 bp, homo sapiens
tgaattttttaaagaaataggcatttgataaccagcttggcaagtaactctactaacagatgttggtatgctatttaaagactacttcgtaagtagtatgattatttgaataaattaca

SEQ ID NO: 4976 - DNA, 119 bp, homo sapiens
gatgttggtatagctatttaaagactacttcgtaagtagtatgattatttgaataaattacacattgttagttttttaatacaactgctatatgactcttctgcttcctgataagaaaa

SEQ ID NO: 4977 - DNA, 119 bp, homo sapiens
tacacattgtttagttttttaatacaactgctatatgactcttctgcttcctgataagaaaaggtatatcaatgctaaaactgtagaagcccaatcaccagcagtttttaaaaaggtga

SEQ ID NO: 4978 - DNA, 119 bp, homo sapiens
aaaaggtatatgcaatgctaaaactgtagaagcccaatcaccagcagtttttaaaaaggtgataactttattagctcttgtgggctatcaagagaattggaacaaaaccttgtgacttt

SEQ ID NO: 4979 - DNA, 119 bp, homo sapiens
gtgataacttttattagctcttgtgggctatcaagagaattggaacaaaaccttgtgacttttaggtaaaaataggcatgatgataagctatgcagattattaaaaagcttgatacatt

SEQ ID NO: 4980 - DNA, 119 bp, homo sapiens
cttttaggtaagaaataggcatgatgataagctatgcagattattaaaaagcttgatacatttgattttcattagatatgccattcatatcaagtaatgttcaagtatgataaaattat

SEQ ID NO: 4981 - DNA, 119 bp, homo sapiens
catttgatttttcattagatatgccattcatatcaagtaatgttcaagtatgataaaattattttggttctttaaagcactgtttcccaaatctacctgatcataataatttaccagga

SEQ ID NO: 4982 - DNA, 119 bp, homo sapiens
aaactctgttttaaggggtatgttgtaatctaaagtaattggttcaggaggtgtcaataggttgaactttgagaaggcactgaatctgccatccacatcacatatagcagctattatga

SEQ ID NO: 4983 - DNA, 119 bp, homo sapiens
taggttgaacttgtgagaaggcactgaatctgccatccacatcacatatagcagctattatgaaatcagtttcataggcctatttttaaaaggaatctgaaatttaattctattttgat

SEQ ID NO: 4984 - DNA, 119 bp, homo sapiens
ttatgaaatcagctttcataggcctatttttaaaaggaatctgaaatttaattctattttgataaaactagactgaaaataaccacttgtaaacattcctatgattgttactaaaatgt

SEQ ID NO: 4985 - DNA, 119 bp, homo sapiens
tttgataaaactaagactgaaaataaccacttgtaaacattcctatgattgttactaaaatgtattttctgtttaaaatgtttttggatatttttgggttaataactactacattgaat

SEQ ID NO: 4986 - DNA, 119 bp, homo sapiens
aaatgtattttcatgtttaaaatgtttttggatatttttgggttaataactactacattgaattgcatgtaaggtgcagaaataatacattaaaagattttcactttaaattaattagt

SEQ ID NO: 4987 - DNA, 119 bp, homo sapiens
cttttataagggcattcaatactacaaaatcaacatgatttcataaggtgcaaataaaagttggtgacaatttaatataattttgatcacaatttacaaatgatctttgcaaatagtgg

SEQ ID NO: 4988 - DNA, 119 bp, homo sapiens
aaaagttggtgacagatttaatataattttgatcacaatttacaaatgatctttgcaaatagtggtcagcggcattagtttttcccttagttaagctaaattaaagggactccatcctg

SEQ ID NO: 4989 - DNA, 119 bp, homo sapiens
atgatgatattattaaacaccattattcacatttcaaataataacaatactttttgtttttcaaaaataaatgcaatgttatataaagctataaactaagttctttatgatatttgagc

SEQ ID NO: 4990 - DNA, 119 bp, homo sapiens
ttttcaaaaataaaatgcaatgttatataaagctataaactaagttctttatgatatttgagcaacaaccaggaatataacatataagggagatgttaatttaaaaatttccactacac

SEQ ID NO: 4991 - DNA, 119 bp, homo sapiens
ttgagcaacaactcaggaatataacatataagggagatgttaatttaaaaatttccactacacttattactattaaccaaagcttaaaattttgtattcttctgttagataagaccttt

SEQ ID NO: 4992 - DNA, 119 bp, homo sapiens
ctacacttattatctattaaccaaagcttaaaattttgtattcttctgttagataagaccttttacccattaatttgtctttaaggacagtcatttggcttctgaatgtttgaaacgat

SEQ ID NO: 4993 - DNA, 119 bp, homo sapiens
accttttacccatttaatttgtctttaaggacagtcatttggcttctgaatgtttgaaacgattttaaaaataagtagtgctatggttgtttctataattctaacctttgatagtaatc

SEQ ID NO: 4994 - DNA, 119 bp, homo sapiens
aacgattttaaaaaataagtagtgctatggttgtttctataattctaacctttgatagtaatcagaatgattacatttcatttctgaatagcttttgaatttatgaaaaattattaaca

SEQ ID NO: 4995 - DNA, 119 bp, homo sapiens
gtaatcagaatgtattacatttcatttctgaatagcttttgaatttatgaaaaattattaacaatgaaaattggtaattttattaagttatatgtgtttaaatattatattagcttatt

SEQ ID NO: 4996 - DNA, 119 bp, homo sapiens
ttaacaatgaaaaattggtaattttattaagttatatgtgtttaaatattatattagcttatttctcttcattaatagtactgctgtttttgttttgcttctttatatttatgtctagc

SEQ ID NO: 4997 - DNA, 119 bp, homo sapiens
cttatttctcttgcattaatagtactgctgtttttgttttgcttctttatatttatgtctagcttttattgtaatttatctagtgtttataaaatgtgatttgtaataaatgttgttaa

SEQ ID NO: 4998 - DNA, 119 bp, homo sapiens
tgtggtccatgcctgcctcctgctggggaggggagggcaggaggtttattgagcagttggggaggggtggaattcagagggcgtggacgcaggccatctcgtctcccaagtcctcctca

SEQ ID NO: 4999 - DNA, 119 bp, homo sapiens
tattgagcagttggggaggggtgggaattcagagggcgtggacgcaggccatctcgtctcccaagtcctctcatcgaagcgggagaggatggactcctcgtcgctatagagagagctgg

SEQ ID NO: 5000 - DNA, 119 bp, homo sapiens
ggccatctcgtctcccaagtcctcctcatcgaagcgggagaggatggactcctcgtcgctatagagagactggttccctgtgccagcaggtcactggcagcattgtccatctcatccag

SEQ ID NO: 5001 - DNA, 119 bp, homo sapiens
gactcctcgtcgctatagagagagctggttccctgtgccagcaggtcactggcagcattgtccatctcaccagcgtcaggcgacacgcatctgcaatctcctgcttggccagggccacg

SEQ ID NO: 5002 - DNA, 119 bp, homo sapiens
cactggcagcattgtccatctcatccagcgtcaggcgacacgcatctgcaatctcctgcttggccagggcacgaaacgtgggtctcgagcaaagaggcccagaccctctgagataagca

SEQ ID NO: 5003 - DNA, 119 bp, homo sapiens
agcctccaccaagctgtcggcactgcccctcttcccatggctggggtccgagtgggttccaggcacgtgagacaggtgaaggtgcgcagtgggccactggatctgccgaggtacccctc

SEQ ID NO: 5004 - DNA, 119 bp, homo sapiens
gctggggtccgagtgggttccaggcacgtgcagacaggtgaaggtgcgcagtgggccactggatctgccaggtacccctcccccgctgcgccctcttccaccaacaacagcggggcata

SEQ ID NO: 5005 - DNA, 119 bp, homo sapiens
gaaggtgcgcagtgggccactggatctgccgaggtacccctcccccgctgcgccctcttccaccaacaaagcggggcatacaggagccgaccccgctgaggtggtgttgcccaggaacc

SEQ ID NO: 5006 - DNA, 119 bp, homo sapiens
ctgcaggtgtggggggcagcagacggcggcgtggtaccaggtgcccatccatgtatctctgagctctgtaggtggcaaaaggactgagcacgggggagtccctgcctgctcatctaggt

SEQ ID NO: 5007 - DNA, 119 bp, homo sapiens
gtggggggcagcagacggcggcgtggtaccaggtgcccatccatgtatctctgagctctgtgaggtggcaaaggactgagcacgggggagtccctgcctgctcatctaggtaggaaagc

SEQ ID NO: 5008 - DNA, 119 bp, homo sapiens
ctgtgggtgttggatccagcctggggcacactgggctgactggaggtgggagtccccctgtcatcatcatgggcccaaaggagagtgaatctggaagtctgtccccgacaggcagagac

SEQ ID NO: 5009 - DNA, 119 bp, homo sapiens
agtccccctgtcatcatcactgggcccaaaggagagtgaatctggaagtctgtccccgacaggcagagaacagaaatcccggagccccggcgagctgagggctgggagaccatcgtggc

SEQ ID NO: 5010 - DNA, 119 bp, homo sapiens
ctgaagggcggaagaggtgctaggggcggcgtcgttgcctagtagccctttttctttcctccgccggaattgcggaaatagtcctggatcagaaatgtggcgtagaatttgcccacggt

SEQ ID NO: 5011 - DNA, 119 bp, homo sapiens
aagaggtgctaggggcggcgtcgttgcctagtagccctttttctttcctccgccggaatttgcggaaatgtcctggatcagaaatgtggcgtagaatttgcccacggtgacctcctcct

SEQ ID NO: 5012 - DNA, 119 bp, homo sapiens
ttggccccagggtcatattcagaccagatcctcttgaattcatcaaggtgatgggggcccaggatggacaatctctggtgagataatcaaagttgtccatgatcacagccacaaagaga

SEQ ID NO: 5013 - DNA, 119 bp, homo sapiens
agggtcatattcagaccagatcctcttgaattcatcaaggtgatgggggcccaggatggaccaatctctgtgagataatcaaagttgtccatgatcacagccacaaagagatttatgat

SEQ ID NO: 5014 - DNA, 119 bp, homo sapiens
caggaaggcacagagcatgaagaagctgatgaaataggcgatggcaaaattgctaccacaggtaaactctcaccagggccgaagtcagactcaggatcacaccgatttccgggaaggct

SEQ ID NO: 5015 - DNA, 119 bp, homo sapiens
atggcaaaattgctaccacaggtaaactcttcaccagggccgaagtcagactcaggatcacaccgatttcgggaaggctggcaagcattatctcctgccatgcctcaccagtggcacac

SEQ ID NO: 5016 - DNA, 119 bp, homo sapiens
ctggaaggacttgatgaatgtccagagcaatgtgcggatcccttcacccttactgagaagcttgaccagcgcataactcggaagaggcgaaagaaggtaatggaaatgcgggagctgtc

SEQ ID NO: 5017 - DNA, 119 bp, homo sapiens
cttgatgaatgtccagagcaatgtgcggatcccttcacccttactgagaagcttgaccagccgcataaccggaagaggcgaaagaaggtaatggaaatgcgggagctgtcctcagagct

SEQ ID NO: 5018 - DNA, 119 bp, homo sapiens
ctgcatggctagggcaactgtgttgagcaggatgagcaggaacatcaggtactcaaaggcagcagagttacagtggcccacacacgatactgatgcgggttcttggggatgtaacggcg

SEQ ID NO: 5019 - DNA, 119 bp, homo sapiens
gaacatcaggtactcaaaggcagcagagttcacagtggcccacacacgatactgatgcgggttcttgggatgtaacggcggagtggctgggccttgagggcatattccacacattgacg

SEQ ID NO: 5020 - DNA, 119 bp, homo sapiens
ctggttcttgtccagctcacagttttggtactcctgctcgccctgggcacggaaagtgatgatgacgaacccacgaagatgttcatcatgaagaacgcaatgatgatgatgtagacaat

SEQ ID NO: 5021 - DNA, 119 bp, homo sapiens
cctgggcacggaaagtgatgatgacgaagcccacgaagatgttcatcatgaagaacgcaatgatgatgagtagacaatgaagaacactgagatctccacacggtaattatagatggggc

SEQ ID NO: 5022 - DNA, 119 bp, homo sapiens
ttcatcatgaagaacgcaatgatgatgatgtagacaatgaagaacactgagatctccacacggtaattaagatggggccatggtcctctgcatatgcatcgatggccttgtatagcagt

SEQ ID NO: 5023 - DNA, 119 bp, homo sapiens
gcaggccagccttcaaaggtggagacagtgaacagggccatcatggctgaaaggacattgtcaaagttgaatcactgttgacccagagccgctcccggaccaggggccgtgacacgtct

SEQ ID NO: 5024 - DNA, 119 bp, homo sapiens
gtgaacagggccatcatggctgaaaggacattgtcaaagttgaaatcactgttgacccagagccgctccggaccaggggccgtgacacgtctccatctgggtataccaggaaggagccc

SEQ ID NO: 5025 - DNA, 119 bp, homo sapiens
atggttgcggaaggagtgggctcggatggggtcctcagcggccagggacacactgctgaggatgatgaaaccaggataagattggtgaagacatgatggtggatgagggtgtggcagcc

SEQ ID NO: 5026 - DNA, 119 bp, homo sapiens
aaggagtgggctcggatggggtcctcagcggccagggacacactgctgaggatgatgaacaccaggatagattggtgaagacatgatggtggatgagggtgtggcagcccttcctcagc

SEQ ID NO: 5027 - DNA, 119 bp, homo sapiens
cgggttggtttggctgaggcagaagaaggcgctgccctcagggatgggtaccaccttctccttgggtacacttcctgcaggagttccacaccccctgcaccctcttcctcttcttcctc

SEQ ID NO: 5028 - DNA, 119 bp, homo sapiens
ctgaaagacagtgaggagggcctgggggaacgtgtcaaaggtgcttcgcttggtgtgggtctggtcaaattgaacttgcccccaaacagctgcatgccaagcagggagaagataatgat

SEQ ID NO: 5029 - DNA, 119 bp, homo sapiens
ttcgcttggtgtgggtctggtcaaagttgaacttgcccccaaacagctgcatgccaagcagggagaagaaatgatgaagaggaagaggagaagcagcaaggatgcgatggatttcattg

SEQ ID NO: 5030 - DNA, 119 bp, homo sapiens
agctgcatgccaagcagggagaagataatgatgaagaggaagaggagaagcagcaaggatgcgatggattcattgaattgagcagggatgccaccagattgctcagagaagcccagtgt

SEQ ID NO: 5031 - DNA, 119 bp, homo sapiens
ctggtgaccttaaagatcctgaggaggcgcacacatcggagcactgagatgcccaagggctgcatggcgccacctccaccaaggtggtctctaggatgcccccacagaccacaaagcag

SEQ ID NO: 5032 - DNA, 119 bp, homo sapiens
caagggctgcatggcgcccacctccaccaaggtggtctctaggatgcccccacagaccacaaagcagtcaagcggttgaagaaggaagacacataggcagaggggcccagaccgtacaa

SEQ ID NO: 5033 - DNA, 119 bp, homo sapiens
agaccacaaagcagtcaaagcggttgaagaaggaagacacataggcagaggggcccagaccgtacaattgagaagcatctccaccgtgaacagacagagcaacactttgttggcatact

SEQ ID NO: 5034 - DNA, 119 bp, homo sapiens
cctggatctgggtgagccacacaggctgcccgtggtgctcagaggcgatggtcaacgtgttgaggaagagagcaacagcacagcccagtagcaggcattggacttcactgcccgacggc

SEQ ID NO: 5035 - DNA, 119 bp, homo sapiens
gaggcgatggtcaacgtgttgaggaagacgagcaacagcacagcccagtagcaggcattggacttcactcccgacggcagcgtgcccgaaggacccggttggctcggcggaggcggcgg

SEQ ID NO: 5036 - DNA, 119 bp, homo sapiens
gatggcccgcccggccctcttcagccatagaaccaaggttgtcatcggcggaggggtcctccatgtccactcttcggcttgagtgatccagtccaggtagccccgcaggtcttcctcca

SEQ ID NO: 5037 - DNA, 119 bp, homo sapiens
aggttgtcatcggcggaggggtcctccatgtccagctcttcggcttgagtgatccagtccaggtagcccgcaggtcttcctccatctgctgcttctcccgctgcttctggaagtccccg

SEQ ID NO: 5038 - DNA, 119 bp, homo sapiens
ctcttcggcttgagtgatccagtccaggtagccccgcaggtcttcctccatctgctgcttctcccgctgttctggaagtccccgcgagctttcgctttctctctctccttggagaactc

SEQ ID NO: 5039 - DNA, 119 bp, homo sapiens
ccagtagagcacatcggtccagccttccatggtgacacactggaagactgtcagcatggcgaagaagaattgtcaaagttggtgatgcctccattgggccctggccagcgcccgcggca

SEQ ID NO: 5040 - DNA, 119 bp, homo sapiens
actggaagactgtcagcatggcgaagaagaagttgtcaaagttggtgatgcctccattgggccctggccgcgcccgcggcactcagtctggttcagcgtgcacgcacgccctgatcccg

SEQ ID NO: 5041 - DNA, 119 bp, homo sapiens
aagttggtgatgcctccattgggccctggccagcgcccgcggcactcagtctggttcagcgtgcacgcagccctgatcccgaagacgcacagggcgatgggtcctcctccgcttccatg

SEQ ID NO: 5042 - DNA, 119 bp, homo sapiens
cggatcccaggaagtagcacgtcttgtgcattcgtccaaggaacagctcgagcccaatgatggcataaagatgatgacgaagagcacgagcagtgcaatgtgcagcagcggcaccagag

SEQ ID NO: 5043 - DNA, 119 bp, homo sapiens
gtccaaggaacagctcgagcccaatgatggcataaatgatgatgacgaagagcacgagcagtgcaatgtcagcagcggcaccagagccttcatgatggaattgagcactatgtgcaggc

SEQ ID NO: 5044 - DNA, 119 bp, homo sapiens
tcgggaccccagacaccagcctcagtggccgcagcacccgaaacgccctcaatgccttcacatcgaagctcctggctttcccccggtgtgcggggcgtcgcctggccgtccggggccct

SEQ ID NO: 5045 - DNA, 119 bp, homo sapiens
agtggccgcagcacccgaaacgccctcaatgccttcacatcgaagcctcctggctttcccccggtgtgcgggcgtcgcctggccgtccggggccctgctccagcagaacgctgaacagc

SEQ ID NO: 5046 - DNA, 119 bp, homo sapiens
ccgaccacgacgatgatgaagtcgagtaggttccagccattgcggatgtaggcgctggggtggagcaccgcccgtaggccacgatcttgagcaccgtctccacagtgaaaatcaccagg

SEQ ID NO: 5047 - DNA, 119 bp, homo sapiens
gtcgagtaggttccagccattgcggatgtaggcgctggggtggagcaccagcccgtaggccacgatcttagcaccgtctccacagtgaaaatcaccaggaatacgtactccacctgctc

SEQ ID NO: 5048 - DNA, 119 bp, homo sapiens
ttccactccacgatgctgatgcaggaccgtcgcagaggattggccagggtgaggcagaagagtgcccgagtgaccgctgggcactggccactgccactgtcttgtgcttgctgtgctgg

SEQ ID NO: 5049 - DNA, 119 bp, homo sapiens
ccagggtgaggcagaagagtgcccgaggtgaccgctgggcactggccactgccactgtcttgtgcttgcgtgctggtttcttcgcttaggggtccctaggcctgatgccccactgcttt

SEQ ID NO: 5050 - DNA, 119 bp, homo sapiens
ggccactgccactgtcttgtgcttgctgtgctggtttcttcgcttaggggtccctaggcctgatgccccctgctttcaccttccacagctgggggcccggggcacagcccccattcggg

SEQ ID NO: 5051 - DNA, 119 bp, homo sapiens
ttaggggtccctaggcctgatgccccactgctttcaccttccacagctgggggcccggggcacagccccattcgggaccagggcctgccccattggctggactgggctctggggtggtg

SEQ ID NO: 5052 - DNA, 119 bp, homo sapiens
tgaaaaggatttaaaagtctttatttcctctgaaaacttactggtaaagtatacaatttatgaataatctatattcatgctttttgaaatatatctgaataaaagacaaattattcaat

SEQ ID NO: 5053 - DNA, 119 bp, homo sapiens
atgaataatcatatattcatgctttttgaaatatatctgaataaaagacaaattattcaatatcaatagagtaaataacttatttgcaagaaaattattacaattcctactgtaaagaa

SEQ ID NO: 5054 - DNA, 119 bp, homo sapiens
atatcaatagcagtaaataacttatttgcaagaaaattattacaattcctactgtaaagaatcaccaacactatttagcaattaaatttcaacacattttttttggaactctttaggac

SEQ ID NO: 5055 - DNA, 119 bp, homo sapiens
aatcaccaaccactatttagcaattaaatttcaacacattttttttggaactctttaggactttagacaaggctaccaaggctgacaatccaggtaactatggcagtgacagaagtcaa

SEQ ID NO: 5056 - DNA, 119 bp, homo sapiens
actttagacaaaggctaccaaggctgacaatccaggtaactatggcagtgacagaagtcaatcattaatctgccattattttagacaaagggctgacaatctcagaaactagttctaga

SEQ ID NO: 5057 - DNA, 119 bp, homo sapiens
aatcattaatactgccattattttagacaaagggctgacaatctcagaaactagttctagaaattatcacaatgtggccattttactatggacaaataaatatgggagatagggaactt

SEQ ID NO: 5058 - DNA, 119 bp, homo sapiens
gaaattatcatcaatgtggccattttactatggacaaataaatatgggagatagggaacttgttactccttttcctatagaaaaatatataaattgaccttttatatatacacaggtat

SEQ ID NO: 5059 - DNA, 119 bp, homo sapiens
ttgttactccattttcctatagaaaaatatataaattgaccttttatatatacacaggtatgtatacactacagtatatgtttttctgagcaggcacaccaactaggaaaaaatacaat

SEQ ID NO: 5060 - DNA, 119 bp, homo sapiens
atgtatacacatacagtatatgtttttctgagcaggcacaccaactaggaaaaaatacaatagcaacatggattaggtattgcttctcatactgatcactaaactaaatggtattatca

SEQ ID NO: 5061 - DNA, 119 bp, homo sapiens
atagcaacataggattaggtattgcttctcatactgatcactaaactaaatggtattatcattttcggtaataagaagcatgcataactaaacagtttaaatacttgaatcaaaattct

SEQ ID NO: 5062 - DNA, 119 bp, homo sapiens
cattttcggttaataagaagcatgcataactaaacagtttaaatacttgaatcaaaattctttaatagcttttctgaaattttaaattagctactgaaaattttccactatgtacaata

SEQ ID NO: 5063 - DNA, 119 bp, homo sapiens
ctttaatagcattttctgaaattttaaattagctactgaaaattttccactatgtacaatatattttataatatgatttcaagcttaaggttttataacaagacttttctttttgattt

SEQ ID NO: 5064 - DNA, 119 bp, homo sapiens
tatattttattaatatgatttcaagcttaaggttttataacaagacttttctttttgatttaaaactatagaacaaatatttatttgcagtaattaggatagctaaaatcaaagctcta

SEQ ID NO: 5065 - DNA, 119 bp, homo sapiens
ttaaaactataagaacaaatatttatttgcagtaattaggatagctaaaatcaaagctctaagaataattctgttacattttgaggcaacaggaaatatataaagttcttaaagtcttt

SEQ ID NO: 5066 - DNA, 119 bp, homo sapiens
taagaataatttctgttacattttgaggcaacaggaaatatataaagttcttaaagtcttttatcagtttatgatattttaatcatcatgaatcatgttcaggaacttttaaacatttc

SEQ ID NO: 5067 - DNA, 119 bp, homo sapiens
tttatcagttgtatgatattttaatcatcatgaatcatgttcaggaacttttaaacatttcaatcatattaataaatgacctgaaagagagattctgatgctaatggatgaaacagggt

SEQ ID NO: 5068 - DNA, 119 bp, homo sapiens
tcaatcatatttaataaatgacctgaaagagagattctgatgctaatggatgaaacagggtacaataatgaccacaaactatctcctccattgttctacatataggtggctgcagtaag

SEQ ID NO: 5069 - DNA, 119 bp, homo sapiens
gtacaataatggaccacaaactatctcctccattgttctacatataggtggctgcagtaaggccaatagatttttgtggttattctaggcctaccctgattgtctgtttacatgaatgt

SEQ ID NO: 5070 - DNA, 119 bp, homo sapiens
aggccaatagaatttttgtggttattctaggcctaccctgattgtctgtttacatgaatgtgcatgctgattcaagcggctttaactctaagaccgtaacagtacaatatctttattgg

SEQ ID NO: 5071 - DNA, 119 bp, homo sapiens
gtgcatgctgcattcaagcggctttaactctaagaccgtaacagtacaatatctttattggcacaatttctgcaattgtattcagactcaatcgtctcatctactggaaccttttataa

SEQ ID NO: 5072 - DNA, 119 bp, homo sapiens
ggcacaatttactgcaattgtattcagactcaatcgtctcatctactggaaccttttataatatattgcgatatccaggggcaaggccaatatccggtacattaataagtatgtattag

SEQ ID NO: 5073 - DNA, 119 bp, homo sapiens
aatatattgctgatatccaggggcaaggccaatatccggtacattaataagtatgtattagacattgaggcatatgccccagctgggtttcaggaaacatgatttgatataagaaaaat

SEQ ID NO: 5074 - DNA, 119 bp, homo sapiens
agacattgagtgcatatgccccagctgggtttcaggaaacatgatttgatataagaaaaatcgaatcccatgacaaagtaggttataatgtgatcctactgtccctgatttgtgtgaca

SEQ ID NO: 5075 - DNA, 119 bp, homo sapiens
atcgaatccctatgacaaagtaggttataatgtgatcctactgtccctgatttgtgtgacattataaaagggaagtgagggaaaggggactaaagagatggggaggggctgtacactgg

SEQ ID NO: 5076 - DNA, 119 bp, homo sapiens
cattataaaaggggaagtgagggaaaggggactaaagagatggggaggggctgtacactgggaggtaggataggagcagcctgagaggctagtaagttaagttcttccattactctggc

SEQ ID NO: 5077 - DNA, 119 bp, homo sapiens
gggaggtagggataggagcagcctgagaggctagtaagttaagttcttccattactctggcttgaactaatctgcagtgggtagaaaggtgaggcaagagctatattccttggttcttt

SEQ ID NO: 5078 - DNA, 119 bp, homo sapiens
gcttgaactatatctgcagtgggtagaaaggtgaggcaagagctatattccttggttctttccatttccatgaatctgtgacctgccacagctggcttcctttaagaacatctctgaaa

SEQ ID NO: 5079 - DNA, 119 bp, homo sapiens
ttccatttcccatgaatctgtgacctgccacagctggcttcctttaagaacatctctgaaacctggtgagtcagggaccagctgcagttgaagtatgtaagaactatgtactttacatt

SEQ ID NO: 5080 - DNA, 119 bp, homo sapiens
aacctggtgaggtcagggaccagctgcagttgaagtatgtaagaactatgtactttacattggagccatgcttcctgacagacaatataggccagatgttgtgagaaaaaaaaacaaat

SEQ ID NO: 5081 - DNA, 119 bp, homo sapiens
ttggagccatggcttcctgacagacaatataggccagatgttgtgagaaaaaaaaacaaatagttcattgtttgtttatttataggcaattataagtctcaactattgctcaaataaag

SEQ ID NO: 5082 - DNA, 119 bp, homo sapiens
atagttcatttgtttgtttatttataggcaattataagtctcaactattgctcaaataaagtagaccatagagcttggccatttgagaaaatttaaatataggcaacatcactgcagct

SEQ ID NO: 5083 - DNA, 119 bp, homo sapiens
agccctaacgtttttatgtagtgtatattagggcttaccaactgtcatacacaatttggagtccttggtgttgcaggtttacctaccagaaaaggaataaaacaatttatagagtgttt

SEQ ID NO: 5084 - DNA, 119 bp, homo sapiens
ggagtccttggtggttgcaggtttacctaccagaaaaggaataaaacaatttatagagtgttttccttataatatttcaaaaccacaattctacttgttactatttttactggtctgta

SEQ ID NO: 5085 - DNA, 119 bp, homo sapiens
gtgttttccttagtaatatttcaaaaccacaattctacttgttactatttttactggtctgtaagactaaaaatactactttaaaaaagaaattttcatttaaaaagcttaatgcaata

SEQ ID NO: 5086 - DNA, 119 bp, homo sapiens
tctgtaagactataaaatactactttaaaaaagaaattttcatttaaaaagcttaatgcaataaaaacatgtgatctattttgtttggaagttgactgacagcaagcaattatttcctg

SEQ ID NO: 5087 - DNA, 119 bp, homo sapiens
gcaataaaaacactgtgatctattttgtttggaagttgactgacagcaagcaattatttcctgcgtgagcttttgagattcatcaagtcaatgggaaaattctaaaacaattttcttct

SEQ ID NO: 5088 - DNA, 119 bp, homo sapiens
gtagacaattagcctaatactctagttacttgacagacagaatattcaaataccaatgagcctatccaccctttccttccattctttcatttcttcattattgacctttcccaatatgt

SEQ ID NO: 5089 - DNA, 119 bp, homo sapiens
agcctatccacacctttccttccattctttcatttcttcattattgacctttcccaatatgtaaataattacaaacaaatatcactactgatactaaaaaacactactgacttattcgt

SEQ ID NO: 5090 - DNA, 119 bp, homo sapiens
atgtaaataatttacaaacaaatatcactactgatactaaaaaacactactgacttattcgtaaaaatgctaaacacctttatattagcattttcaatgcttctcaacatagaaagcaa

SEQ ID NO: 5091 - DNA, 119 bp, homo sapiens
tcgtaaaaatgtctaaacacctttatattagcattttcaatgcttctcaacatagaaagcaaaacaaactgtattccaaatacaggcttctatctagatcatgatactttagtttttct

SEQ ID NO: 5092 - DNA, 119 bp, homo sapiens
gcaaaacaaacctgtattccaaatacaggcttctatctagatcatgatactttagtttttctatatgttttatcattatgttatgatgctcttgtccataaagaaaataaaattcaaat

SEQ ID NO: 5093 - DNA, 119 bp, homo sapiens
ttctatatgtttttatcattatgttatgatgctcttgtccataaagaaaataaaattcaaataaccaaaaaaatacatgagctggttctgaaaatgtggctttcaaacaaagatccaaa

SEQ ID NO: 5094 - DNA, 119 bp, homo sapiens
aaataaccaaagaaaatacatgagctggttctgaaaatgtggctttcaaacaaagatccaaagtggtaacaaaattgtcctaagaccatggaattattaacaatgcataggatcacttt

SEQ ID NO: 5095 - DNA, 119 bp, homo sapiens
caaagtggtaagcaaaattgtcctaagaccatggaattattaacaatgcataggatcactttcatatcccagttacattcctgagaatcaattgatttataattttcatctgctagtca

SEQ ID NO: 5096 - DNA, 119 bp, homo sapiens
ctttcatatccacagttacattcctgagaatcaattgatttataattttcatctgctagtcacacaagttggtatttaaaatgagcaagtcaatgtgctttataagtgttgtgtgttct

SEQ ID NO: 5097 - DNA, 119 bp, homo sapiens
gtcacacaagtttggtatttaaaatgagcaagtcaatgtgctttataagtgttgtgtgttcttggaatgcctctataaggaaaatccccttttggatttctattacctattttgcctta

SEQ ID NO: 5098 - DNA, 119 bp, homo sapiens
ttcttggaatgtcctctataaggaaaatccccttttggatttctattacctattttgccttataattgcgctgctttctaacatttctcaaacagtccttctatcaagtagactctgag

SEQ ID NO: 5099 - DNA, 119 bp, homo sapiens
cttataattgctgctgctttctaacatttctcaaacagtccttctatcaagtagactctgagaccagtcgaatttccaaagttgggtatccagtttggtgtatatccattattcagagg

SEQ ID NO: 5100 - DNA, 119 bp, homo sapiens
tgagaccagtcagaatttccaaagttgggtatccagtttggtgtatatccattattcagaggactcctcaggtttccaaggtttgtgctttccttgaaagtctccgagttagcctctgg

SEQ ID NO: 5101 - DNA, 119 bp, homo sapiens
gaggactcctctaggtttccaaggtttgtgctttccttgaaagtctccgagttagcctctggtatggcatggattctgaagcctctggctgtaaactgtctccatcaaggataatgtct

SEQ ID NO: 5102 - DNA, 119 bp, homo sapiens
ctggtatggcactggattctgaagcctctggctgtaaactgtctccatcaaggataatgtcttcaggattggtggagggggacagaaatcttcattggggcagatttcctggaaaagtg

SEQ ID NO: 5103 - DNA, 119 bp, homo sapiens
ctgtttgactgcattatcatttcctaaaccacaatctgggccagagcagacataaacgttggatggtaatcattataacagctcctgctgatgtctgacgaatctctcatattgaagta

SEQ ID NO: 5104 - DNA, 119 bp, homo sapiens
cagagcagacataaacgttggatggtaaatcattataacagctcctgctgatgtctgacgaatctctcaattgaagtaaagagcccacagaattcttggcttttctacttgttcatttt

SEQ ID NO: 5105 - DNA, 119 bp, homo sapiens
ctgcagaaacactgggggagttctccttggccatataaaggaaacaaaaatggagtgttgccataccgccaagacagtgaagaaagtttttggtagctttgagaccatctatggtgctg

SEQ ID NO: 5106 - DNA, 119 bp, homo sapiens
agtgttgccataccgcccaagacagtgaagaaagtttttggtagctttgagaccatctatggtgctgctgctgtctctgatgtcattgcaattgaatgcatgacaatatattggaggtt

SEQ ID NO: 5107 - DNA, 119 bp, homo sapiens
catctatggtgctgctggctgtctctgatgtcattgcaattgaatgcatgacaatatattggaggttggggttaatttttgagtctttaaatattcataaaatgtgatctcttcatatc

SEQ ID NO: 5108 - DNA, 119 bp, homo sapiens
ctttgatactaaatcaatattaaatctcctgccttctttaataatttgtgagtaagtaattctgttttttttggttgctctgtggtatcttctgctataggcacattttcactcatgtc

SEQ ID NO: 5109 - DNA, 119 bp, homo sapiens
aagtaattctgtttttctttggttgctctgtggtatcttctgctataggcacattttcactcatgtctttgctgaagttgatggcacacaagttttatcatcacaatggttttcttttt

SEQ ID NO: 5110 - DNA, 119 bp, homo sapiens
ttttcactcatgtcttctgctgaagttgatggcacacaagttttatcatcacaatggttttctttttccctgtcacttcagcaccatttacttctagcgcattctctggatcgctgctt

SEQ ID NO: 5111 - DNA, 119 bp, homo sapiens
atggttttctttttcccctgtcacttcagcaccatttacttctagcgcattctctggatcgctgcttgggtttgttctgtgagcatttcacagctcatagtgcttaatgactcatcctc

SEQ ID NO: 5112 - DNA, 119 bp, homo sapiens
ctggatcgctgcttggagtttgttctgtgagcatttcacagctcatagtgcttaatgactcatcctccgaggcaggaaggcagaatctgcagcttctgtggagtttgcagatgtcacaa

SEQ ID NO: 5113 - DNA, 119 bp, homo sapiens
aatgactcatcctccgtaggcaggaaggcagaatctgcagcttctgtggagtttgcagatgtcacaagacatgatttttctgcagtgcaccagcttcttcgacatcttcatgcaaatcc

SEQ ID NO: 5114 - DNA, 119 bp, homo sapiens
ttcctattgcaaaaaaatctttattttggtatgaatacattagagttggttcatttgaaggtaacaaatagttttcatcctgctttaatattataccagaaaaagggaaacaacgttca

SEQ ID NO: 5115 - DNA, 119 bp, homo sapiens
catttgaaggtaacaaataagttttcatcctgctttaatattataccagaaaaagggaaacaacgttcatacaatgcagaaaataggacagaaaatgtataaagctattgttaatattt

SEQ ID NO: 5116 - DNA, 119 bp, homo sapiens
aaagggaaacaacgttcagtacaatgcagaaaataggacagaaaatgtataaagctattgttaatatttagaaagataaaatctcttctcactaaagaaactagatgactttatgcaat

SEQ ID NO: 5117 - DNA, 119 bp, homo sapiens
aagctattgttaatattttagaaagataaaatctcttctcactaaagaaactagatgactttatgcaataacaagcaacgatattttacctaagaataacttgagtttgtgtgatttaa

SEQ ID NO: 5118 - DNA, 119 bp, homo sapiens
tagatgactttatgcaattaacaagcaacgatattttacctaagaataacttgagtttgtgtgatttaatgtgaattaatatattgcacctttttatagtctgttcaagatctaaaact

SEQ ID NO: 5119 - DNA, 119 bp, homo sapiens
tgagtttgtgtgatttaagtgtgaattaatatattgcacctttttatagtctgttcaagatctaaaactgaaacaatagctacttttatttccccacataaactatgaaactattacat

SEQ ID NO: 5120 - DNA, 119 bp, homo sapiens
aatcccatggcatataaactggtctcaacaactaaagaatattggattcttcccatagcttcctaacacgggagttaggcactttaatttctcattacagatataactacattacaata

SEQ ID NO: 5121 - DNA, 119 bp, homo sapiens
ttcttcccatagcttcctaacactgggagttaggcactttaatttctcattacagatataactacattaaatactatatagtattccagtaaattaaagaagtaaatgcactttcttag

SEQ ID NO: 5122 - DNA, 119 bp, homo sapiens
tcattacagatataactacattacaatactatatagtattccagtaaattaaagaagtaaatgcactttttaggtgctagtcttcacaaaggaaatacttaattcacttggtggaacgg

SEQ ID NO: 5123 - DNA, 119 bp, homo sapiens
aattaaagaagtaaatgcactttcttaggtgctagtcttcacaaaggaaatacttaattcacttggtggacggttggttcccttgatgtgcatacatgtgtttacctgatgactgaaat

SEQ ID NO: 5124 - DNA, 119 bp, homo sapiens
tcatttcccttccataactcgattgtgtaatcacaaaaaatcacttcaatgaaaaacaatctttgtgtacaaaaatattttaggtccaaaatattaagtagcccacttattgtaaggaa

SEQ ID NO: 5125 - DNA, 119 bp, homo sapiens
atctttgtgtagcaaaaatattttaggtccaaaatattaagtagcccacttattgtaaggaagaatcagaaaacaaagctctgataaaacaatctggatagttctttacagtctatgat

SEQ ID NO: 5126 - DNA, 119 bp, homo sapiens
ggaagaatcaggaaaacaaagctctgataaaacaatctggatagttctttacagtctatgatgtttgaactagcctatgatagaataattactacaatttacattttagtctttagcct

SEQ ID NO: 5127 - DNA, 119 bp, homo sapiens
tgatgtttgaacctagcctatgatagaataattactacaatttacattttagtctttagcctgttttgcatacccaacgtattaaatttaatgttgaaatgatcatgaaaacctttaag

SEQ ID NO: 5128 - DNA, 119 bp, homo sapiens
gcctgttttgcaatacccaacgtattaaatttaatgttgaaatgatcatgaaaacctttaagttgaatatacttcagaatactttttaaataagtcatggtaatcaaaaaataactatc

SEQ ID NO: 5129 - DNA, 119 bp, homo sapiens
caccctatatatttatattagaatacatatattagaattatattgcccaaatactttgacgtattttccagcagtggtaatgggtttgcactaatccatttgaattctcgcctagtcct

SEQ ID NO: 5130 - DNA, 119 bp, homo sapiens
ttatattgcccaaatactttgacgtattttccaagcagtggtaatgggtttgcactaatccatttgaatctcgcctagtcctccttgcaatcaaatgtaaaatattagaatgctatcgg

SEQ ID NO: 5131 - DNA, 119 bp, homo sapiens
ctggcataacaaaatacttccacatgttgaatagttttgtccttcctgctaagagcaatggcttcttcatttcaaggatctggtcttgccacactggactgtcacttacaatgtcactg

SEQ ID NO: 5132 - DNA, 119 bp, homo sapiens
ataacaaaatacttccacatgttgaatagttttgtccttcctgctaagagcaatggcttcttcattttcaggatctggtcttgccacactggactgtcacttacaatgtcactgttttc

SEQ ID NO: 5133 - DNA, 119 bp, homo sapiens
cggctgccgtcggggacagggctttccatagccatggcccagcagtggagcctccaaaggctcgcaggcgccatccgcaggacagctatgaggacagcacccagtccagcatcttcacc

SEQ ID NO: 5134 - DNA, 119 bp, homo sapiens
ccatagccatggcccagcagtggagcctccaaaggctcgcaggccgccatccgcaggacagctatgaggcagcacccagtccagcatcttcacctacaccaacagcaactccaccagag

SEQ ID NO: 5135 - DNA, 119 bp, homo sapiens
gccccttcgaaggcccgaattaccacatcgctcccagatgggtgtaccacctcaccagtgtctggatgactttgtggtcactgcatccgtcttcacaaatgggcttgtgctggcggcca

SEQ ID NO: 5136 - DNA, 119 bp, homo sapiens
gtctggatgatctttgtggtcactgcatccgtcttcacaaatgggcttgtgctggcggccaccatgaagtcaagaagctgcgccacccgctgaactggatcctggtgaacctggcggtc

SEQ ID NO: 5137 - DNA, 119 bp, homo sapiens
caccatgaagttcaagaagctgcgccacccgctgaactggatcctggtgaacctggcggtcgctgacctgcagagaccgtcatcgccagcactatcagcattgtgaaccaggtctctgg

SEQ ID NO: 5138 - DNA, 119 bp, homo sapiens
tcgctgacctagcagagaccgtcatcgccagcactatcagcattgtgaaccaggtctctggctacttcggctgggccaccctatgtgtgtcctggagggctacaccgtctccctgtgtg

SEQ ID NO: 5139 - DNA, 119 bp, homo sapiens
ggatcacaggtctctggtctctggccatcatttcctgggagaggtggctggtggtgtgcaagccctttgcaatgtgagatttgatgccaagctggccatcgtgggcattgccttctcct

SEQ ID NO: 5140 - DNA, 119 bp, homo sapiens
ggtggtgtgcaagccctttggcaatgtgagatttgatgccaagctggccatcgtgggcattgccttctctggatctggtctgctgtgtggacagccccgcccatctttggttggagcag

SEQ ID NO: 5141 - DNA, 119 bp, homo sapiens
gtactggccccacggcctgaagacttcatgcggcccagacgtgttcagcggcagctcgtaccccggggtcagtcttacatgattgtcctcatggtcacctgctgcatcatcccactcgc

SEQ ID NO: 5142 - DNA, 119 bp, homo sapiens
agcggcagctcgtaccccggggtgcagtcttacatgattgtcctcatggtcacctgctgcatcatcccatcgctatcatcatgctctgctacctccaagtgtggctggccatccgagcg

SEQ ID NO: 5143 - DNA, 119 bp, homo sapiens
gtggcaaagcagcagaaagagtctgaatccacccagaaggcagagaaggaagtgacgcgcatggtggtgtgatgatctttgcgtactgcgtctgctggggaccctacaccttcttcgca

SEQ ID NO: 5144 - DNA, 119 bp, homo sapiens
atggtggtggtgatgatctttgcgtactgcgtctgctggggaccctacaccttcttcgcatgctttgctctgccaaccctggttacgccttccaccctttgatggctgccctgccggcc

SEQ ID NO: 5145 - DNA, 119 bp, homo sapiens
tgctttgctgctgccaaccctggttacgccttccaccctttgatggctgccctgccggcctactttgccaaagtgccactatctacaaccccgttatctatgtctttatgaaccggcag

SEQ ID NO: 5146 - DNA, 119 bp, homo sapiens
tttcgaaactgcatcttgcagcttttcgggaagaaggttgacgatggctctgaactctccagcgcctccaaacggaggtctcatctgtgtcctcggtatcgcctgcatgaggtctgcct

SEQ ID NO: 5147 - DNA, 119 bp, homo sapiens
tctgaactctccagcgcctccaaaacggaggtctcatctgtgtcctcggtatcgcctgcatgaggtctgctcctacccatcccgcccaccggggctttggccacctctcctttccccct

SEQ ID NO: 5148 - DNA, 119 bp, homo sapiens
gtatcgcctgcatgaggtctgcctcctacccatcccgcccaccggggctttggccacctctcctttcccctccttctccatccctgtaaaataaatgtaatttatctttgccaaaacca

SEQ ID NO: 5149 - DNA, 119 bp, homo sapiens
cccactggccggtataaagcaccgtgaccctcaggtgacgcaccagggccggctgccgtcggggacaggctttccatagccatggcccagcagtggagcctccaaaggctcgcaggccg

SEQ ID NO: 5150 - DNA, 119 bp, homo sapiens
acgcaccagggccggctgccgtcggggacagggctttccatagccatggcccagcagtggagcctccaaggctcgcaggccgccatccgcaggacagctatgaggacagcacccagtcc

SEQ ID NO: 5151 - DNA, 119 bp, homo sapiens; identical to SEQ ID NO: 5134

SEQ ID NO: 5152 - DNA, 119 bp, homo sapiens
gccccttcgaaggcccgaattaccacatcgctcccagatgggtgtaccacctcaccagtgtctggatgactttgtggtcattgcatccgtcttcacaaatgggcttgtgctggcggcca

SEQ ID NO: 5153 - DNA, 119 bp, homo sapiens
gtctggatgatctttgtggtcattgcatccgtcttcacaaatgggcttgtgctggcggccaccatgaagtcaagaagctgcgccacccgctgaactggatcctggtgaacctggcggtc

SEQ ID NO: 5154 - DNA, 119 bp, homo sapiens
caccatgaagttcaagaagctgcgccacccgctgaactggatcctggtgaacctggcggtcgctgacctgcagagaccgtcatcgccagcactatcagcgttgtgaaccaggtctatgg

SEQ ID NO: 5155 - DNA, 119 bp, homo sapiens
tcgctgacctggcagagaccgtcatcgccagcactatcagcgttgtgaaccaggtctatggctacttcggctgggccaccctatgtgtgtcctggagggctacaccgtctccctgtgtg

SEQ ID NO: 5156 - DNA, 119 bp, homo sapiens
ggatcacaggtctctggtctctggccatcatttcctgggagagatggatggtggtctgcaagccctttgcaatgtgagatttgatgccaagctggccatcgtgggcattgccttctcct

SEQ ID NO: 5157 - DNA, 119 bp, homo sapiens
ggtggtctgcaagccctttggcaatgtgagatttgatgccaagctggccatcgtgggcattgccttctctggatctgggctgctgtgtggacagccccgcccatctttggttggagcag

SEQ ID NO: 5158 - DNA, 119 bp, homo sapiens
gtactggccccacggcctgaagacttcatgcggcccagacgtgttcagcggcagctcgtaccccggggtcagtcttacatgattgtcctcatggtcacctgctgcatcaccccactcag

SEQ ID NO: 5159 - DNA, 119 bp, homo sapiens
agcggcagctcgtaccccggggtgcagtcttacatgattgtcctcatggtcacctgctgcatcaccccatcagcatcatcgtgctctgctacctccaagtgtggctggccatccgagcg

SEQ ID NO: 5160 - DNA, 119 bp, homo sapiens
gtggcaaagcagcagaaagagtctgaatccacccagaaggcagagaaggaagtgacgcgcatggtggtgtgatggtcctggcattctgcttctgctggggaccatacgccttcttcgca

SEQ ID NO: 5161 - DNA, 119 bp, homo sapiens
atggtggtggtgatggtcctggcattctgcttctgctggggaccatacgccttcttcgcatgctttgctctgccaaccctggctaccccttccaccctttgatggctgccctgccggcc

SEQ ID NO: 5162 - DNA, 119 bp, homo sapiens
tgctttgctgctgccaaccctggctaccccttccaccctttgatggctgccctgccggccttctttgccaaagtgccactatctacaaccccgttatctatgtctttatgaaccggcag

SEQ ID NO: 5163 - DNA, 119 bp, homo sapiens; identical to SEQ ID NO: 5146

SEQ ID NO: 5164 - DNA, 119 bp, homo sapiens
ccagcgcctccaaaacggaggtctcatctgtgtcctcggtatcgcctgcatgaggtctgcctcctaccctcccgcccaccggggctttggccacctctcctttccccctccttctccat

SEQ ID NO: 5165 - DNA, 119 bp, homo sapiens
gcctcctacccatcccgcccaccggggctttggccacctctcctttccccctccttctccatccctgtaaataaatgtaatttatctttgccaaaaccaacaaagtcacagaggctttc

SEQ ID NO: 5166 - DNA, 119 bp, homo sapiens
ccatccctgtaaaataaatgtaatttatctttgccaaaaccaacaaagtcacagaggctttcactgcaggtgggaccacctgagcctctgcgtgtgcaggcactgggtctcgagagggt

SEQ ID NO: 5167 - DNA, 119 bp, homo sapiens
tttcactgcagtgtgggaccacctgagcctctgcgtgtgcaggcactgggtctcgagagggtgcaaggggataaagaggagagagcgcttcatagactttaagttttcccgagcctcat

SEQ ID NO: 5168 - DNA, 119 bp, homo sapiens
gggtgcaagggggataaagaggagagagcgcttcatagactttaagttttcccgagcctcatgtctaccatggcgtgaaaggatcctggcaaaacagaagtgtgaggcaggtgggcgtc

SEQ ID NO: 5169 - DNA, 119 bp, homo sapiens
tcatgtctaccgatggcgtgaaaggatcctggcaaaacagaagtgtgaggcaggtgggcgtctatatcctttcaccaggctggtggttacataatcggcaagcaagagctgtggagggg

SEQ ID NO: 5170 - DNA, 119 bp, homo sapiens
cgtctatatccatttcaccaggctggtggttacataatcggcaagcaagagctgtggaggggcttgctgatgccctcagcacccaggaggagggagggagctagcaagctaaggcaggt

SEQ ID NO: 5171 - DNA, 119 bp, homo sapiens
ggggcttgctggatgccctcagcacccaggaggagggagggagctagcaagctaaggcaggtggccctctggccccttaaggtccatctgctggaggcccagagtccttggagtacagt

SEQ ID NO: 5172 - DNA, 119 bp, homo sapiens
aggtggccctcctggccccttaaggtccatctgctggaggcccagagtccttggagtacagtctacaccggaggggacccattcctgccagtctgtggcagggatggcgcgccacctct

SEQ ID NO: 5173 - DNA, 119 bp, homo sapiens
cagtctacacctggaggggacccattcctgccagtctgtggcagggatggcgcgccacctctgccaggcaggaccccaagcccgatcagcatcagcatggtgcaggtgcacaggcgtga

SEQ ID NO: 5174 - DNA, 119 bp, homo sapiens
ctctgccaggccaggaccccaagcccgatcagcatcagcatggtgcaggtgcacaggcgtgagctgatcgtgacgaggggcaggcacacaaggtggagacaaagaccaagaggacggtt

SEQ ID NO: 5175 - DNA, 119 bp, homo sapiens
gtgagctgatcagtgacgaggggcaggcacacaaggtggagacaaagaccaagaggacggttgccagtggaggcgcggactcaggaacttgaacaacatctgcgggggacggctttgga

SEQ ID NO: 5176 - DNA, 119 bp, homo sapiens
ggttgccagtgagaggcgcggactcaggaacttgaacaacatctgcgggggacggctttggaggtgctcgctgcctccagttgggtgacttgctgtagcatctccagcttggatattcg

SEQ ID NO: 5177 - DNA, 119 bp, homo sapiens
tggaggtgctccgctgcctccagttgggtgacttgctgtagcatctccagcttggatattcggctcttgaggtctccgtgatctcctgcaggagacgaaaatgcacgcaccagaagtca

SEQ ID NO: 5178 - DNA, 119 bp, homo sapiens; identical to SEQ ID NO: 5149

SEQ ID NO: 5179 - DNA, 119 bp, homo sapiens; identical to SEQ ID NO: 5150

SEQ ID NO: 5180 - DNA, 119 bp, homo sapiens; identical to SEQ ID NO: 5134

SEQ ID NO: 5181 - DNA, 119 bp, homo sapiens; identical to SEQ ID NO: 5152

SEQ ID NO: 5182 - DNA, 119 bp, homo sapiens; identical to SEQ ID NO: 5153

SEQ ID NO: 5183 - DNA, 119 bp, homo sapiens; identical to SEQ ID NO: 5154

SEQ ID NO: 5184 - DNA, 119 bp, homo sapiens; identical to SEQ ID NO: 5155

SEQ ID NO: 5185 - DNA, 119 bp, homo sapiens; identical to SEQ ID NO: 5156

SEQ ID NO: 5186 - DNA, 119 bp, homo sapiens; identical to SEQ ID NO: 5157

SEQ ID NO: 5187 - DNA, 119 bp, homo sapiens; identical to SEQ ID NO: 5158

SEQ ID NO: 5188 - DNA, 119 bp, homo sapiens; identical to SEQ ID NO: 5159

SEQ ID NO: 5189 - DNA, 119 bp, homo sapiens
gtggcaaagcagcagaaagagtctgaatccacccagaaggcagagaaggaagtgacgcgcatggtggtgtgatggtcctggcattctgcttctgctggggaccctacgccttcttcgca

SEQ ID NO: 5190 - DNA, 119 bp, homo sapiens
atggtggtggtgatggtcctggcattctgcttctgctggggaccctacgccttcttcgcatgctttgctctgccaaccctggctaccccttccaccctttgatggctgccctgccggcc

SEQ ID NO: 5191 - DNA, 119 bp, homo sapiens; identical to SEQ ID NO: 5162

SEQ ID NO: 5192 - DNA, 119 bp, homo sapiens; identical to SEQ ID NO: 5146

SEQ ID NO: 5193 - DNA, 119 bp, homo sapiens; identical to SEQ ID NO: 5164

SEQ ID NO: 5194 - DNA, 119 bp, homo sapiens; identical to SEQ ID NO: 5165

SEQ ID NO: 5195 - DNA, 119 bp, homo sapiens
ccatccctgtaaaataaatgtaatttatctttgccaaaaccaacaaagtcacagaggctttcactgcaggtgggacgacctgagcctctgcgtgtgcaggcactgggtctcgagagggt

SEQ ID NO: 5196 - DNA, 119 bp, homo sapiens
tttcactgcagtgtgggacgacctgagcctctgcgtgtgcaggcactgggtctcgagagggtgcaaggggataaagaggagagagcgcttcatagactttaagttttcccgagcctcat

SEQ ID NO: 5197 - DNA, 119 bp, homo sapiens; identical to SEQ ID NO: 5168

SEQ ID NO: 5198 - DNA, 119 bp, homo sapiens; identical to SEQ ID NO: 5169

SEQ ID NO: 5199 - DNA, 119 bp, homo sapiens; identical to SEQ ID NO: 5170

SEQ ID NO: 5200 - DNA, 119 bp, homo sapiens; identical to SEQ ID NO: 5171

SEQ ID NO: 5201 - DNA, 119 bp, homo sapiens; identical to SEQ ID NO: 5172

SEQ ID NO: 5202 - DNA, 119 bp, homo sapiens; identical to SEQ ID NO: 5173

SEQ ID NO: 5203 - DNA, 119 bp, homo sapiens; identical to SEQ ID NO: 5174

SEQ ID NO: 5204 - DNA, 119 bp, homo sapiens; identical to SEQ ID NO: 5175

SEQ ID NO: 5205 - DNA, 119 bp, homo sapiens; identical to SEQ ID NO: 5176

SEQ ID NO: 5206 - DNA, 119 bp, homo sapiens; identical to SEQ ID NO: 5177

SEQ ID NO: 5207 - DNA, 119 bp, homo sapiens
ttatcaaggaacagtttattttaatacataaaatgtttccttacgagcagtaaaccttttcccagaaagctatattcagaaagcatacaatttgaatgctgattattttaacatgaaaa

SEQ ID NO: 5208 - DNA, 119 bp, homo sapiens
tcccagaaagtctatattcagaaagcatacaatttgaatgctgattattttaacatgaaaagtgattacagaaaaacaaactgtgtttagcctcaggagaattgacagttaaacagtac

SEQ ID NO: 5209 - DNA, 119 bp, homo sapiens
aagtgattacaagaaaaacaaactgtgtttagcctcaggagaattgacagttaaacagtacagtcaatttaggtggatgtgtgtcttttcctatgtatagcaggaagggtttttaaaca

SEQ ID NO: 5210 - DNA, 119 bp, homo sapiens
acagtcaattttaggtggatgtgtgtcttttcctatgtatagcaggaagggtttttaaacatacgtattttctggaggggaatcttgagtaagttatctcacatctttctacattttgt

SEQ ID NO: 5211 - DNA, 119 bp, homo sapiens
catacgtatttttctggaggggaatcttgagtaagttatctcacatctttctacattttgtccttgggggaaaggacacacagaggaggtcatggtgttccaacattcgcttgaattag

SEQ ID NO: 5212 - DNA, 119 bp, homo sapiens
gtccttggggagaaaggacacacagaggaggtcatggtgttccaacattcgcttgaattagagtgttaggtcaaggtctattccactgtgtctctgtagcatctccagggtaagcacct

SEQ ID NO: 5213 - DNA, 119 bp, homo sapiens
agagtgttagtgtcaaggtctattccactgtgtctctgtagcatctccagggtaagcaccttttcttctcaaacagtggggtcagggtagttttatgactaatgggttgtgatggatga

SEQ ID NO: 5214 - DNA, 119 bp, homo sapiens
cttttcttcttcaaacagtggggtcagggtagttttatgactaatgggttgtgatggatgaagtttccttagtcttcgagcaatagatggatgtctattaattccatcccaccaccaca

SEQ ID NO: 5215 - DNA, 119 bp, homo sapiens
gaagtttcctttagtcttcgagcaatagatggatgtctattaattccatcccaccaccacatgagccacaggagataacacatcccaacagtgcaggacacaaccatcattgggaagcc

SEQ ID NO: 5216 - DNA, 119 bp, homo sapiens
ctccatcagaacaaagagcgctgcaaaaaacagaagggttgcccattccactctgtgtagaattatctcaaatcatgaatatcagctaaaattagcaaccagatggcacccagaatagc

SEQ ID NO: 5217 - DNA, 119 bp, homo sapiens
gaacaaagagcgctgcaaaaaacagaagggttgcccattccactctgtgtagaattatctcaaaatcataatatcagctaaaattagcaaccagatggcacccagaatagcaatccatc

SEQ ID NO: 5218 - DNA, 119 bp, homo sapiens
ctgtggaaggtgtgcagcctccgggcgagcaggtgctccagtgccagcaccttccccagcagcaggcgggcacagctgtctcctcgcggctggccgggctgatgcgctgagcagtcagg

SEQ ID NO: 5219 - DNA, 119 bp, homo sapiens
gcaggtgctccagtgccagcaccttccccagcagcaggcggcgcacagctgtctcctcgcggctggccggctgatgcgctgagcagtcaggcgccagacgtgaatctcgtgcttcagtt

SEQ ID NO: 5220 - DNA, 119 bp, homo sapiens
caacaatctcactgggttccttgttataaagctttctgttccagtaaaggagtctgaggagcggaaagcgaccaggagaacaaggcaaatcccaatgaacatgtgtgcagtgaatccgg

SEQ ID NO: 5221 - DNA, 119 bp, homo sapiens
gggttccttgttataaagctttctgttccagtaaaggagtctgaggagcggaaagcagaccaggagaacaggcaaatcccaatgaacatgtgtgcagtgaatccggcaaagtccaggcc

SEQ ID NO: 5222 - DNA, 119 bp, homo sapiens
catcttcctcagctcttggttggaaacaataatgacatttggagggtccccgatggcagtggcagctccccaatgtttgtgaagatcacttctgcaatcaggacttgtcttggatcaag

SEQ ID NO: 5223 - DNA, 119 bp, homo sapiens
ttggaaacaataatgacatttggagggtccccgatggcagtggcagctcctccaatgtttgtgaagatccttctgcaatcaggacttgtcttggatcaaggttgagcacctcacacaac

SEQ ID NO: 5224 - DNA, 119 bp, homo sapiens
cttatggtcacaggcgtgaagaggagcatggtggtgacgttgtccaagaaggcagagaggacggccgcgtgagacagagcatgatgatcatggcccacacccgtccccgggagagccgg

SEQ ID NO: 5225 - DNA, 119 bp, homo sapiens
ggtcacaggcgtgaagaggagcatggtggtgacgttgtccaagaaggcagagaggacggccgcgatgagcagagcatgatgatcatggcccacacccgtccccgggagagccggtatgc

SEQ ID NO: 5226 - DNA, 119 bp, homo sapiens
ctcaaatatgatcagcgcgtagacgcccgcgaggatggccgtcgcgatggtcacctgggtttctacactccgcggaggtactgatgagccatcaaaagagggacagcctgggtctgctg

SEQ ID NO: 5227 - DNA, 119 bp, homo sapiens
atggccgtcgcgatggtcacctgggtttctacacttccgcggaggtactgatgagccatcaaaagagggcagcctgggtctgctgcagggaggcccggatgctgatggacaccgtctct

SEQ ID NO: 5228 - DNA, 119 bp, homo sapiens
ctgctgtggccgccgccacctggagcccaaagcgtcagcctgggtcagctccaccacgatgtgctcttcctcccaggacgactcggcccactggccactagggcccctgccaggtccac

SEQ ID NO: 5229 - DNA, 119 bp, homo sapiens
gggtcagctccaccacgatgtgctcttccctcccaggacgactcggcccactggccactagggcccctgcaggtccacctgcagcagcgtggagtccacgtggctgctaaggttcacgg

SEQ ID NO: 5230 - DNA, 119 bp, homo sapiens
ctcagcttggaaagacggagtcggatgtgcgggctgtccagaaggtctcccttctcggaggaggcagatcagacagaccagacacctccctgcttagcaggtatcttcgctcccagtca

SEQ ID NO: 5231 - DNA, 119 bp, homo sapiens
tgtccagaaggtctcccttctcggaggaggcagatgcagacagaccagacacctccctgcttagcaggttcttcgctcccagtcagcagagctgtcttcccaagactcttcagcagtga

SEQ ID NO: 5232 - DNA, 119 bp, homo sapiens
tgcagacagaccagacacctccctgcttagcaggtatcttcgctcccagtcagcagagctgtcttcccagactcttcagcagtgatgaactctggatggtaaacaggtatgcaccgtga

SEQ ID NO: 5233 - DNA, 119 bp, homo sapiens
ctcccttttgtgaggaatgaagcaaactcctggcctgcaggagcccaagagctctgcccggcagccccctggggcaggagtgcgaggggtcagctccaccggctccccgaggaagcctg

SEQ ID NO: 5234 - DNA, 119 bp, homo sapiens
gcccaagagctctgcccggcagcccccctggggcaggagtgcgaggggtcagctccaccggctccccgagaagcctgcgcttgccggccacaagttcagcgagtccgctgggcacggac

SEQ ID NO: 5235 - DNA, 119 bp, homo sapiens
gaggggtcagctccaccggctccccgaggaagcctgcgcttgccggccacaagttcagcgagtccgctggcacggacgtctgcaggagctccaccgccggcgcgccggggtaccgcctg

SEQ ID NO: 5236 - DNA, 119 bp, homo sapiens
ccggccacaagttcagcgagtccgctgggcacggacgtctgcaggagctccaccgccggcgcgccggggaccgcctgccgtctctgccctccagatgcatgctccactgccagtcttct

SEQ ID NO: 5237 - DNA, 119 bp, homo sapiens
aaaatgcatattggatactttatttttgcacattaacaaaactctaggtcaccctaaattattagagtagatgtttgatataattgtgtactttttttcccattgtgtagtttaaaata

SEQ ID NO: 5238 - DNA, 119 bp, homo sapiens
ccctaaattattagagtatgatgtttgatataattgtgtactttttttcccattgtgtagtttaaaataaacattaaaacagaaaacaaagaccccataaaaacatatttgtggctcct

SEQ ID NO: 5239 - DNA, 119 bp, homo sapiens
attgtgtagtttaaaataaaacattaaaacagaaaacaaagaccccataaaaacatatttgtggctcctcccacttattgtgcctcacaattttatttttcttctttccacccctccct

SEQ ID NO: 5240 - DNA, 119 bp, homo sapiens
aacatatttgtggctccttcccacttattgtgcctcacaattttatttttcttctttccacccctccctttttcatgtttgctttctctttagtttctctttcttacacagttgcttac

SEQ ID NO: 5241 - DNA, 119 bp, homo sapiens
tagttgcttacttcttaagtgacctaatggtgacttcagtgctcgagggcacttcctaggctatttggtgccctcagtaataaagagattgtataatcttgtatactgattagccaatt

SEQ ID NO: 5242 - DNA, 119 bp, homo sapiens
gctatttggtggccctcagtaataaagagattgtataatcttgtatactgattagccaatttatcttcgtacagtatcatcactttcatttgatactactgcaactgaaaaaactaagc

SEQ ID NO: 5243 - DNA, 119 bp, homo sapiens
tttatcttcgttacagtatcatcactttcatttgatactactgcaactgaaaaaactaagcctactaactatgctaacaaaatactacttttagtgcattaaattgtaaatcaagtctg

SEQ ID NO: 5244 - DNA, 119 bp, homo sapiens
gcctactaacatatgctaacaaaatactacttttagtgcattaaattgtaaatcaagtctgaatttccaaattttttaaggaaaatgtttttagaaattgatgatgtttagatggccaa

SEQ ID NO: 5245 - DNA, 119 bp, homo sapiens
tgaatttccaaaattttttaaggaaaatgtttttagaaattgatgatgtttagatggccaagatgacaccattagtggttctgactgttaaaaaaaaaaattaaagaaacaaaacagac

SEQ ID NO: 5246 - DNA, 119 bp, homo sapiens
aagatgacacccattagtggttctgactgttaaaaaaaaaaattaaagaaacaaaacagactagcattcgtttctgtggaagctttctctttcttaacctttttttcttctgctgtcat

SEQ ID NO: 5247 - DNA, 119 bp, homo sapiens
actagcattcagtttctgtggaagctttctctttcttaacctttttttcttctgctgtcattccagacaaattactaagctgcttacactactggcatgtccagatctgtctaactttc

SEQ ID NO: 5248 - DNA, 119 bp, homo sapiens
attccagacacaattactaagctgcttacactactggcatgtccagatctgtctaactttccctgaatgatttcacattcctaggatgtccatgtaaactttttgacctgagagatggg

SEQ ID NO: 5249 - DNA, 119 bp, homo sapiens
tccctgaatggatttcacattcctaggatgtccatgtaaactttttgacctgagagatgggaatcccaagtttgatctggcttcacagacagtaagttttccatcccatttctgtcagt

SEQ ID NO: 5250 - DNA, 119 bp, homo sapiens
ggaatcccaaagtttgatctggcttcacagacagtaagttttccatcccatttctgtcagtaatggttaggacaagcgagggattcgaggaattgcttcagcgacatggtgttcatctt

SEQ ID NO: 5251 - DNA, 119 bp, homo sapiens
gtaatggttagggacaagcgagggattcgaggaattgcttcagcgacatggtgttcatcttgcatatctcaaactgctctttatgctcagcttgcactgcagcttccgacacaatgtaa

SEQ ID NO: 5252 - DNA, 119 bp, homo sapiens
ttgcatatctgcaaactgctctttatgctcagcttgcactgcagcttccgacacaatgtaaggaatatcgtgctatgagagcgcgtgatcttttgaacttggcattgccattccgtcgt

SEQ ID NO: 5253 - DNA, 119 bp, homo sapiens
aaggaatatctgtgctatgagagcgcgtgatcttttgaacttggcattgccattccgtcgtcaattgctgtccgtgattgaactgtactctacatcctggttaaccccaccgaccagct

SEQ ID NO: 5254 - DNA, 119 bp, homo sapiens
gtcaattgctggtccgtgattgaactgtactctacatcctggttaaccccaccgaccagctttcttcccgggaatagacgaagcttctggacttcattgttttacaagcattgatcgtt

SEQ ID NO: 5255 - DNA, 119 bp, homo sapiens
ctttcttccccgggaatagacgaagcttctggacttcattgttttacaagcattgatcgtttcatcgggaaatagcgtgtaattttggtttcttccaggggataggaaatagtgccttc

SEQ ID NO: 5256 - DNA, 119 bp, homo sapiens
tttcatcggggaaatagcgtgtaattttggtttcttccaggggataggaaatagtgccttctatatttgcgtttccactgttagctgagtgttttgaacatctgatttgtcctgtccat

SEQ ID NO: 5257 - DNA, 119 bp, homo sapiens
tctatatttgtcgtttccactgttagctgagtgttttgaacatctgatttgtcctgtccatgtatcacactgttttatttaaacttggggaaatagtttcttcttttttagagtctgtc

SEQ ID NO: 5258 - DNA, 119 bp, homo sapiens
atgtatcacatctgttttatttaaacttggggaaatagtttcttcttttttagagtctgtctgtctttctcatcttcctttgaaatcccaatatctggacctaattttgactcttcagc

SEQ ID NO: 5259 - DNA, 119 bp, homo sapiens
tctgtctttcatcatcttcctttgaaatcccaatatctggacctaattttgactcttcagcgttctttagtcatctactgcaaggtgactgccatctggggttgctgatgtgcttgtgc

SEQ ID NO: 5260 - DNA, 119 bp, homo sapiens
gcgttctttaagtcatctactgcaaggtgactgccatctggggttgctgatgtgcttgtgcccagtgaaggtgaagactgttctgacattctgggactaggtgcgttttcacgtccttc

SEQ ID NO: 5261 - DNA, 119 bp, homo sapiens
gcccagtgaaaggtgaagactgttctgacattctgggactaggtgcgttttcacgtccttctcttccttatacggaaggaacaggtttttttcctgactcctgtccctggtgacgtgga

SEQ ID NO: 5262 - DNA, 119 bp, homo sapiens
tctcttcctttatacggaaggaacaggtttttttcctgactcctgtccctggtgacgtggagagagatgatcctcaaataataactcttctccgttaaaatgatatcgatacaagctgt

SEQ ID NO: 5263 - DNA, 119 bp, homo sapiens
gagagagatgtatcctcaaataataactcttctccgttaaaatgatatcgatacaagctgtagccatcacgctattgatgctgctttgccggagaagatacgttgcctcacattcagaa

SEQ ID NO: 5264 - DNA, 119 bp, homo sapiens
gtagccatcagcgctattgatgctgctttgccggagaagatacgttgcctcacattcagaagaagcccggaccgtgcctggatcaggtcagacctgtcgattcccgcaagattttcaag

SEQ ID NO: 5265 - DNA, 119 bp, homo sapiens
aagaagcccgggaccgtgcctggatcaggtcagacctgtcgattcccgcaagattttcaagagcattcacattctgttagataattcttctagctgagcaagtcgaaggtcaacagtct

SEQ ID NO: 5266 - DNA, 119 bp, homo sapiens
agagcattcaccattctgttagataattcttctagctgagcaagtcgaaggtcaacagtctgcagggaattttcataaaagtttctctttcattgatttcttccaacctcattgacata

SEQ ID NO: 5267 - DNA, 119 bp, homo sapiens
ctttcagaagtgacccggatgcgctcgtcgctggacgactgctgctcatcctccttctcccggaagtgccctgcacgcactgctcctcgaactcatgcagcctctttagctcctcgtcg

SEQ ID NO: 5268 - DNA, 119 bp, homo sapiens
cccggatgcgctcgtcgctggacgactgctgctcatcctccttctcccggaagtgctcctgcacgcactctcctcgaactcatgcagcctctttagctcctcgtcgctaaggaagagct

SEQ ID NO: 5269 - DNA, 119 bp, homo sapiens
tcaatccacgatcccgttcctcttggtccccttctctctttttcctgcagcggccgctgagacgcataagatgatgtagatgtggcttaaaatgatcatcggtgggggcaggactggcc

SEQ ID NO: 5270 - DNA, 119 bp, homo sapiens
ttcctgcagcggccgctgagacgcataatgatgatgtagatgtggcttaaaatgatcatcggtgggggcggactggcctgtcatgaaatgtcataatcagctgatatcgctggaacttc

SEQ ID NO: 5271 - DNA, 119 bp, homo sapiens
gtggcttaaaatgatcatcggtgggggcaggactggcctgtcatgaaatgtcataatcagctgatatcgtggaacttccacacctggttggatattgattttacttcaaagaaggtatt

SEQ ID NO: 5272 - DNA, 119 bp, homo sapiens
ttgaacacagcaatcagcaggttcaccagcaggatgttggcgaccagtagatagcacgccatgagtgctgagtgagccaggcgccggggatacagggaggaagccgcttgccctcctca

SEQ ID NO: 5273 - DNA, 119 bp, homo sapiens
ccagcaggatgttggcgaccagtagatagcacgccatgagtgctggagtgagccaggcgccggggatacgggaggaagccgcttgccctcctcatcatataggttctcaccacaaggag

SEQ ID NO: 5274 - DNA, 119 bp, homo sapiens
ggtctatctggtctgcaaacacctctccatagatcatccagtagggcatgtagaagatgtttcgggccatttccaagagggcttctcctctggatgcagaatggcttgacgggctactc

SEQ ID NO: 5275 - DNA, 119 bp, homo sapiens
gatgtttcgggccagtttccaagagggcttctcctctggatgcagaatggcttgacgggctactccgaactcatgagcacgaccagcatgatgaccacaaagtacagcatgtcgatcat

SEQ ID NO: 5276 - DNA, 119 bp, homo sapiens
catctttccaatcatcatcacgtatggccccagatacttgttgacaccaaagatgtccaggacacggattaccagaagatgatatccacacagtagatcacccggccatagcccatgta

SEQ ID NO: 5277 - DNA, 119 bp, homo sapiens
caccaaagatgtccaggacacggatgtaccagaagatgatatccacacagtagatcacccggccatagccatgtagggctggttctgtaggcgaagaattgctccaatcatgaatgtgg

SEQ ID NO: 5278 - DNA, 119 bp, homo sapiens
acacagtagatcacccggccatagcccatgtagggctggttctgtaggcgaagaattgctccaatcatgatgtggaaatggccacgagatctgtgatgttccagtactcctgaagccaa

SEQ ID NO: 5279 - DNA, 119 bp, homo sapiens
taggcgaagaattgctccaatcatgaatgtggaaatggccacgagatctgtgatgttccagtactcctgagccaaactttgattttctggctgagtttgcctggttctgacatgaggat

SEQ ID NO: 5280 - DNA, 119 bp, homo sapiens
ctctcgtatcttctctaacgccaggctcacgatgtaggagatgacgatccactcctggagggacggccaccatccatccgcaccaggatgacgtagttaaacagcagcaggtagcccaa

SEQ ID NO: 5281 - DNA, 119 bp, homo sapiens
cttctctaacgccaggctcacgatgtaggagatgacgatccactcctggagggacggccagccatccatcgcaccaggatgacgtagttaaacagcagcaggtagcccaagtatgatat

SEQ ID NO: 5282 - DNA, 119 bp, homo sapiens
tgtgtaaaaccagaacttgacaatgggcgcgttatagaattcacagatctttgttccgatgggaatactctctgttttttgtgctcgttctcctcatccccctttcttgagccagcatc

SEQ ID NO: 5283 - DNA, 119 bp, homo sapiens
gaacttgacaatgggcgcgttatagaattcacagatctttgttccgatgggaatacttctctgtttttttgctcgttctcctcatccccctttcttgagccagcatctgcatttgcatc

SEQ ID NO: 5284 - DNA, 119 bp, homo sapiens
cgtattttcctcttctttttctttgccatcctcattttccttggatgtttgatacgagaaatcatcatagtgcgaaattccaaaaacaagatggtggggggtagaagaatccccatgat

SEQ ID NO: 5285 - DNA, 119 bp, homo sapiens
attttcctcttctttttctttgccatcctcattttccttggatgtttgatacgagaaatcatcatatgtcgaaattccaaaaacaagatggtggggggtagaagaatccccatgataac

SEQ ID NO: 5286 - DNA, 119 bp, homo sapiens
cttcaggccggggttcttccgcatccgcagtcttcccatccacatatcggtcagcagcatctggctgcagtgtgagcaatgaagtcccggtgtttggctgccacggccagtttgaggca

SEQ ID NO: 5287 - DNA, 119 bp, homo sapiens
cagcatctggctgcaggtgtgagcaatgaagtcccggtgtttggctgccacggccagtttgaggcaggtgagttgctccagtttttcagctcgtaggtcaggagtttcatagcgatctg

SEQ ID NO: 5288 - DNA, 119 bp, homo sapiens
cagtttgaggcaggtcgagttgctccagtttttcagctcgtaggtcaggagtttcatagcgatctgctctcatgcttataggactggtctaataactccaaagcaagctggccgaagtc

SEQ ID NO: 5289 - DNA, 119 bp, homo sapiens
ttggaattgttatccaagtcctgggagatgtcatccaccagatcactctcggaggactcgtgggccatgccttgtagagcttgcaggccaccagggccttggccatgctctcttcccct

SEQ ID NO: 5290 - DNA, 119 bp, homo sapiens
tcgtgggccatggccttgtagagcttgcaggccaccagggccttggccatgctctcttcccctcgctgcagaggaacactgccattttctggcgtttcatcagcactgcccacaccatc

SEQ ID NO: 5291 - DNA, 119 bp, homo sapiens
tcccctcgctgccagaggaacactgccattttctggcgtttcatcagcactgcccacaccatcagctcgggaagggatactggaaccgactcacggcagggtcgtccacatcaatgtcg

SEQ ID NO: 5292 - DNA, 119 bp, homo sapiens
cctctttggtccaaacaagttgttgtaaagggtccgaaagtttttccgagtgtagttgcagcggtaggccctcccatgaggtactccagcacgagcccgatgtctatgaggctgatgtg

SEQ ID NO: 5293 - DNA, 119 bp, homo sapiens
gttgtaaagggtccgaaagtttttccgagtgtagttgcagcggtaggctcctcccatgaggtactccagacgagcccgatgtctatgaggctgatgtggtaatcaggcggaaggttgct

SEQ ID NO: 5294 - DNA, 119 bp, homo sapiens
tgtgttataaagctcctccagcctcggaatggtcagaaagtgttgcatgttcactccgttttcaatcagagcttcacaaagtcgacacgatctaagactaaagcatctagcatcgcttg

SEQ ID NO: 5295 - DNA, 119 bp, homo sapiens
ctccagcctcggaatggtcagaaagtgttgcatgttcactccgttttcaatcaggagcttcacaaagtcacacgatctaagactaaagcatctagcatcgcttgctccaaagcattcac

SEQ ID NO: 5296 - DNA, 119 bp, homo sapiens
gccatgggtggcttcttctccttctccgtggctttgctgtccgtcgggggtgccaggcttcccaggggcgcagtccacagcaatcagagttgggaaatggtactaaggctctttcttgt

SEQ ID NO: 5297 - DNA, 119 bp, homo sapiens
gagttctttcttcttcatgcactccattataattgcaaacagctgatgtgattgtgccttattataattaatgttttctgaatggtaactagaagctgctccctgagggactcatttat

SEQ ID NO: 5298 - DNA, 119 bp, homo sapiens
tctttcttcttcatgcactccattataattgcaaacagctgatgtgattgtgccttattataattaaatttttctgaatggtaactagaagctgctccctgagggactcatttattatt

SEQ ID NO: 5299 - DNA, 119 bp, homo sapiens
ccgccttcttcacagtacttgtgcgcaaaggacaggatgtccgaggcacgtccgctgccatcacaaatcccacagggatgggaggctcttcttgcaggtattccaagacgatggacacc

SEQ ID NO: 5300 - DNA, 119 bp, homo sapiens
tgccatcacaaatcaccacagggatgggaggctcttcttgcaggtattccaagacgatggacaccacgtagggcccccctccaccacgagacccacgaggggcacgccctgccccagtc

SEQ ID NO: 5301 - DNA, 119 bp, homo sapiens
ttgtgttgatcttctgcagggagatgtgcttttccagcagccttcgcagcttcacctcggcgccatactgcccagggtgccattgtcagccaggatgaagtgggtgtgggagttgttga

SEQ ID NO: 5302 - DNA, 119 bp, homo sapiens
cacctcggcgccatacttgcccagggtgccattgtcagccaggatgaagtgggtgtgggagttgttgagacagagagcttacttagagggttggacatggtctggtacactcttgttac

SEQ ID NO: 5303 - DNA, 119 bp, homo sapiens
atcctttccaaccaggtcttccttattctccacgatgccccatggagcaattcctatagcacaaacccgcctctggacttggaggagtggtctttcaaggcatcccctacgtggctgat

SEQ ID NO: 5304 - DNA, 119 bp, homo sapiens
ttccaaccaggtcttccttattctccacgatgccccatggagcaattcctatagcacaaacccggcctcggacttggaggagtggtctttcaaggcatcccctacgtggctgataacac

SEQ ID NO: 5305 - DNA, 119 bp, homo sapiens
ctgtgctgacacccccggtgaagatccaggccccggtggtcatagcagccttgatcaggcctttcccaagacttgtttcagcttgggctgcatctcaaagttctggaggcctccatgca

SEQ ID NO: 5306 - DNA, 119 bp, homo sapiens
gccttgatcaggcctttcccaaagacttgtttcagcttgggctgcatctcaaagttctggaggcctccagcacagatattaagagcttggggagttccagctgccaatctttcaccatg

SEQ ID NO: 5307 - DNA, 119 bp, homo sapiens
ctcaaagttctggaggcctccatgcacagatattaagagcttggggagttccagctgccaatctttcacatgagatggagcagtgagtctggcttggtgtcataggatacacggatata

SEQ ID NO: 5308 - DNA, 119 bp, homo sapiens
tttggaacacagctaaattttattttaacaatgatgttgggccagtgaaataaaatgaaattgcaaaaatctgtgactgggcatgtaggagtgtaattcagagtgagctggaacggatc

SEQ ID NO: 5309 - DNA, 119 bp, homo sapiens
attgcaaaaagtctgtgactgggcatgtaggagtgtaattcagagtgagctggaacggatcacagagctaagcctcccccacgctggcagggctcactggaagggcagagggcactccc

SEQ ID NO: 5310 - DNA, 119 bp, homo sapiens
tcacagagctgaagcctcccccacgctggcagggctcactggaagggcagagggcactccctgtttacagcaaatgtgagggaccttggtccttctcgggccagctgagcgcaggccca

SEQ ID NO: 5311 - DNA, 119 bp, homo sapiens
cctgtttacatgcaaatgtgagggaccttggtccttctcgggccagctgagcgcaggcccagggaagcttggacagacctcagaggaaaatatttccaaagactctcaacacatctaag

SEQ ID NO: 5312 - DNA, 119 bp, homo sapiens
cagggaagctgtggacagacctcagaggaaaatatttccaaagactctcaacacatctaagggggctgcggtccacagttattagaaaaatgaatttgtcttcctttactgaagatgga

SEQ ID NO: 5313 - DNA, 119 bp, homo sapiens
agggggctgcaggtccacagttattagaaaaatgaatttgtcttcctttactgaagatggagcaatggatgtgtttgcagggttgggccagagcctggtttgtggattcagagctttgg

SEQ ID NO: 5314 - DNA, 119 bp, homo sapiens
gagcaatggagtgtgtttgcagggttgggccagagcctggtttgtggattcagagctttggtatggattacgggacactagatgttctttacagtggtgtccagtttccaagcctcatg

SEQ ID NO: 5315 - DNA, 119 bp, homo sapiens
ggtatggatttacgggacactagatgttctttacagtggtgtccagtttccaagcctcatggctaaaagcatgtgcacagatatatctcttggtttttcaatgaaatatctaggaagat

SEQ ID NO: 5316 - DNA, 119 bp, homo sapiens
tggctaaaagccatgtgcacagatatatctcttggtttttcaatgaaatatctaggaagattgagccacgccatgaagaagaccaggtatctgcagtttggggctgggagactggccgc

SEQ ID NO: 5317 - DNA, 119 bp, homo sapiens
attgagccacagccatgaagaagaccaggtatctgcagtttggggctgggagactggccgccaatgaaactgtgatcctagtggcaccatgtctgaatgcctttctcaccatggcttta

SEQ ID NO: 5318 - DNA, 119 bp, homo sapiens
gccaatgaaagctgtgatcctagtggcaccatgtctgaatgcctttctcaccatggctttattggaataccgccaccctggaattcaagaactccataggaatctgttgggtagctctg

SEQ ID NO: 5319 - DNA, 119 bp, homo sapiens
tattggaatatccgccaccctggaattcaagaactccataggaatctgttgggtagctctgggtgtgctggcaacagaccatttctcaggctgagtctccacctgtttgctttcctctt

SEQ ID NO: 5320 - DNA, 119 bp, homo sapiens
tgggtgtgcttggcaacagaccatttctcaggctgagtctccacctgtttgctttcctcttcatttttgtgggtgttgcacttggcagaggggggatatgctggttggtgaactggcca

SEQ ID NO: 5321 - DNA, 119 bp, homo sapiens
cttctgcgaccctgatgtggagctcttgagcgagccccgcttgaaggagctcatctctctcagtgagccgtgagccaccctgctgactccctcgggtggccaggccagtggcacagggg

SEQ ID NO: 5322 - DNA, 119 bp, homo sapiens
ctcatctctctcagtgagcctgtgagccaccctgctgactccctcgggtggccaggccagtggcacagggctgccctccctgggtgggcaggagcggagccacacactcggcggcagcc

SEQ ID NO: 5323 - DNA, 119 bp, homo sapiens
ggccaggccagtggcacaggggctgccctccctgggtgggcaggagcggagccacacactcggcggcagcccacactcggcggcagccccacgcactgggcgagggggccgagatcctg

SEQ ID NO: 5324 - DNA, 119 bp, homo sapiens
agccacacactcggcggcagccccacactcggcggcagccccacgcactgggcgagggggccgagatccggggcgaggccggccggaggctggttcagcctaggaggagcatgtgctgg

SEQ ID NO: 5325 - DNA, 119 bp, homo sapiens
gggcgagggggccgagatcctggggcgaggccggccggaggctggttcagcctaggaggagcatgtgctgcttttggtggcccctcctgcccgactcctgctaccacccccaacatctg

SEQ ID NO: 5326 - DNA, 119 bp, homo sapiens
gcctaggaggagcatgtgctggcttttggtggcccctcctgcccgactcctgctaccacccccaacatcgtaatcaggcttaatccctccatccccaaaaggtttagagggaagagatt

SEQ ID NO: 5327 - DNA, 119 bp, homo sapiens
cccttcacacccgaccctgccttgaattaggattccataggagagctgggggcaggagaatggggtgttcctgctgtccagcttcagacccactctttgagatattggattctgacaag

SEQ ID NO: 5328 - DNA, 119 bp, homo sapiens
agagctgggggcaggagaatggggtgttccctgctgtccagcttcagacccactctttgagatattggatctgacaagtttccagagctgagaagacagccagatgtcaaggtctgaag

SEQ ID NO: 5329 - DNA, 119 bp, homo sapiens
ggttgtggataccccctggctgggcttcatggagaaatcttctctgatcaccaacctgaatcccagagtgcctccatcttaggacagaatgagaggccttctgtaaccagatataactg

SEQ ID NO: 5330 - DNA, 119 bp, homo sapiens
atcccagagtagcctccatcttaggacagaatgagaggccttctgtaaccagatataactggccagcatgggaaattgatcaggatggggccgcaagagaggtggttactccggacaaa

SEQ ID NO: 5331 - DNA, 119 bp, homo sapiens
tggccagcatggggaaattgatcaggatggggccgcaagagaggtggttactccggacaaagcggcttcttggagtcgcctcctcttcttactgggaatgttgatcatcggttctactt

SEQ ID NO: 5332 - DNA, 119 bp, homo sapiens
aagcggcttcattggagtcgcctcctcttcttactgggaatgttgatcatcggttctacttatcagcacttaggagaccccggggcctttcctcattgtgggcagcagtctcttctcat

SEQ ID NO: 5333 - DNA, 119 bp, homo sapiens
ttatcagcaccttaggagaccccggggcctttcctcattgtgggcagcagtctcttctcatcagcctataaactggccagtcgggacctctccagtgaagagatgatgatgatgagcag

SEQ ID NO: 5334 - DNA, 119 bp, homo sapiens
atcagcctataaaactggccagtcgggacctctccagtgaagagatgatgatgatgagcagcagcccttaaaacctagctccgaaatggggggtaagatgctggtaccccaagcctcag

SEQ ID NO: 5335 - DNA, 119 bp, homo sapiens
agcagcccttcaaaacctagctccgaaatggggggtaagatgctggtaccccaagcctcagtgggcagtatgaagcaacactgagcatgacagtggagaatatccccagtatgcctaaa

SEQ ID NO: 5336 - DNA, 119 bp, homo sapiens
agtgggcagtgatgaagcaacactgagcatgacagtggagaatatccccagtatgcctaaaagaacagcaagatgatcccaacaacaaccaagaataattacagcccaacagcagcagg

SEQ ID NO: 5337 - DNA, 119 bp, homo sapiens
aaagaacagccaagatgatcccaacaacaaccaagaataattacagcccaacagcagcaggtacagaaaaaggaaggaagacaccccaacatccagtagaacactgacttactacacct

SEQ ID NO: 5338 - DNA, 119 bp, homo sapiens
ggtacagaaagaaggaaggaagacaccccaacatccagtagaacactgacttactacacctcaacttcagcagacaaatagtaaaaaagtataccccaacacccaggggagaaatgaag

SEQ ID NO: 5339 - DNA, 119 bp, homo sapiens
ctcaacttcaagcagacaaatagtaaaaaagtataccccaacacccaggggagaaatgaagagctacagccaactcaagtgagggaaaaggtgaagtatactccttccccacgtggtag

SEQ ID NO: 5340 - DNA, 119 bp, homo sapiens
agagctacagcccaactcaagtgagggaaaaggtgaagtatactccttccccacgtggtagaagagtagcacttacgtgccgtccacattcatgacaatggaaacaagccatgcgatca

SEQ ID NO: 5341 - DNA, 119 bp, homo sapiens
agaagagtaggcacttacgtgccgtccacattcatgacaatggaaacaagccatgcgatcacccccaggcaacagtgaaagacagtgacattacagcaacctataaaatactcgaaacc

SEQ ID NO: 5342 - DNA, 119 bp, homo sapiens
cacccccaggacaacagtgaaagacagtgacattacagcaacctataaaatactcgaaaccaactctctaagagaataatggaggaaaccaccccaaccactctcaagggaatgtttga

SEQ ID NO: 5343 - DNA, 119 bp, homo sapiens
ccaactctcttaagagaataatggaggaaaccaccccaaccactctcaagggaatgtttgatagcacccaacttttctgacacatgaggtagaagcaaacgtcttgacttctccaagga

SEQ ID NO: 5344 - DNA, 119 bp, homo sapiens
gatagcaccccaacttttctgacacatgaggtagaagcaaacgtcttgacttctccaaggagcgtcatgaaaaaaacaacctgtttccccccagaagagtggaaagtaacagctcagcc

SEQ ID NO: 5345 - DNA, 119 bp, homo sapiens
gagcgtcatggaaaaaaacaacctgtttccccccagaagagtggaaagtaacagctcagcccatccctggggttagtgggaaagagcaacccgaagactccccagggaacagtcctgtt

SEQ ID NO: 5346 - DNA, 119 bp, homo sapiens
cccatccctgggggttagtgggaaagagcaacccgaagactccccagggaacagtcctgttgcatacccagccacctctgaggggcaggtgacaataagcaccatgacaggcagcagcc

SEQ ID NO: 5347 - DNA, 119 bp, homo sapiens
ttgcataccccagccacctctgaggggcaggtgacaataagcaccatgacaggcagcagcccagcagaaccaaagccttcactgctgcctggagtcttaggaatccttcacccaggacc

SEQ ID NO: 5348 - DNA, 119 bp, homo sapiens
cccagcagaaaccaaagccttcactgctgcctggagtcttaggaatccttcacccaggaccagtgtatcgccatcaaaacagccccagccatagtctggaggctggcaaagaaaccttc

SEQ ID NO: 5349 - DNA, 119 bp, homo sapiens
ccagtgtatcagccatcaaaacagccccagccatagtctggaggctggcaaagaaaccttccacagcaccagcacctcaacaacccctacggtcagggcaaagctgaccatgcaggtcc

SEQ ID NO: 5350 - DNA, 119 bp, homo sapiens
tccacagcacccagcacctcaacaacccctacggtcagggcaaagctgaccatgcaggtccatcactgttggttgtgaagccaaccccagccatgctcaccactccctccccaagcctc

SEQ ID NO: 5351 - DNA, 119 bp, homo sapiens
ccatcactgtgtggttgtgaagccaaccccagccatgctcaccactccctccccaagcctcacaacagcctgctcccagaggagctcagtcctagtccctcagtgctgcctcccagctt

SEQ ID NO: 5352 - DNA, 119 bp, homo sapiens
tcacaacagccctgctcccagaggagctcagtcctagtccctcagtgctgcctcccagcttgccagaccccaccccaagggagagtaccccccagatctgttcagtgtggaggagcggc

SEQ ID NO: 5353 - DNA, 119 bp, homo sapiens
ttgccagacctccaccccaagggagagtaccccccagatctgttcagtgtggaggagcggcggcagggcgggtggtcctgcacgtttttggcatgatgtatgtgtttgtggccttggcc

SEQ ID NO: 5354 - DNA, 119 bp, homo sapiens
gcggcagggctgggtggtcctgcacgtttttggcatgatgtatgtgtttgtggccttggccattgtttggacgagtacttcgttccagccctgggtgtcatcacagacaagctgcagat

SEQ ID NO: 5355 - DNA, 119 bp, homo sapiens
ccattgtttgcgacgagtacttcgttccagccctgggtgtcatcacagacaagctgcagatctccgaggtgtggcaggcgccacattcatggctgctggaggctctgctcctgagctct

SEQ ID NO: 5356 - DNA, 119 bp, homo sapiens
atctccgaggatgtggcaggcgccacattcatggctgctggaggctctgctcctgagctcttcacctcctcatcggtgtcttcatttcccacagcaacgtgggcattggtaccattgtg

SEQ ID NO: 5357 - DNA, 119 bp, homo sapiens
cttcacctccctcatcggtgtcttcatttcccacagcaacgtgggcattggtaccattgtgggctctgcgtgttcaacattctctttgtcattggcacttgttccctcttctcccgaga

SEQ ID NO: 5358 - DNA, 119 bp, homo sapiens
tgggctctgctgtgttcaacattctctttgtcattggcacttgttccctcttctcccgagagatcctcacctcacctggtggcccttattccgtgatgtctccttctacatccttgacc

SEQ ID NO: 5359 - DNA, 119 bp, homo sapiens
gagatcctcaacctcacctggtggcccttattccgtgatgtctccttctacatccttgacctgataatgtcatcctcttcttcctggacagcctcattgcctggtgggagagcctgctg

SEQ ID NO: 5360 - DNA, 119 bp, homo sapiens
cctgataatgctcatcctcttcttcctggacagcctcattgcctggtgggagagcctgctgctgctgctgcctatgccttctatgtgttcaccatgaagtggaacaagcatatcgaggt

SEQ ID NO: 5361 - DNA, 119 bp, homo sapiens
tgctgctgctggcctatgccttctatgtgttcaccatgaagtggaacaagcatatcgaggtctgggtgaggagcagctcagcaggaggccagtggccaaggtcatggccttagaagacc

SEQ ID NO: 5362 - DNA, 119 bp, homo sapiens
atccacgcagaagatggtgaaatgaaaggtaatgaaggtgaaactgaaagccaggaactcagtgctgaaatcacggtgaagccaaaaatgatgagaaaggtgtagaagatggaggggga

SEQ ID NO: 5363 - DNA, 119 bp, homo sapiens
gaaatgaaaggtaatgaaggtgaaactgaaagccaggaactcagtgctgaaaatcacggtgaagccaaaatgatgagaaaggtgtagaagatggagggggaagtgatggaggggatagc

SEQ ID NO: 5364 - DNA, 119 bp, homo sapiens
gaggaagaggaggagaagggaaatgaagagcctctgtccctggactggcctgaaaccaggcagaagcagccatttacctcttccttctgcccatcgtgttcccactgtggctgacagtc

SEQ ID NO: 5365 - DNA, 119 bp, homo sapiens
cagaagcaggccatttacctcttccttctgcccatcgtgttcccactgtggctgacagtccccgacgtcgaaggcaggtgagtgtgcccatctgtatctcagactctttatccccagca

SEQ ID NO: 5366 - DNA, 119 bp, homo sapiens
cccgacgtccgaaggcaggtgagtgtgcccatctgtatctcagactctttatccccagcagggctgtgggtctctcggcatgcggggctcacactcaagaggaggaagaggccagggac

SEQ ID NO: 5367 - DNA, 119 bp, homo sapiens
gttggtgaaacaatagggatttctgaagagatcatgggcctgacaatccttgcagcaggcacatcaattctgacctcatcaccagtgtgattgtcgctcgaaaaggcctgggagacatg

SEQ ID NO: 5368 - DNA, 119 bp, homo sapiens
ccttgcagcaggcacatcaattcctgacctcatcaccagtgtgattgtcgctcgaaaaggcctgggagaatggctgtgtcaagctctgtgggcagtaacatatttgatatcactgtggg

SEQ ID NO: 5369 - DNA, 119 bp, homo sapiens
cttgcctgttccttggttgcttttctctcttatcaatggattacagccagttccagtcagcagcaatggttgttttgtgcaattgttttgctttttctcatgcttctgtttgtgatctc

SEQ ID NO: 5370 - DNA, 119 bp, homo sapiens
cagcagcaatggcttgttttgtgcaattgttttgctttttctcatgcttctgtttgtgatctcttcaatgcgtcatgtaaatggagaatgaacaagatcctgggcttcacaatgttcct

SEQ ID NO: 5371 - DNA, 119 bp, homo sapiens
gatctcttcaattgcgtcatgtaaatggagaatgaacaagatcctgggcttcacaatgttcctcctttatttgtattcctgataatcagtgtgatgttagaagatcgaatcatatcctg

SEQ ID NO: 5372 - DNA, 119 bp, homo sapiens
gttcctcctttactttgtattcctgataatcagtgtgatgttagaagatcgaatcatatcctgtcctgttctgtctgaatcagtcactcttgctcacaatgggcatggatcagaagacc

SEQ ID NO: 5373 - DNA, 119 bp, homo sapiens
atcctgtcctgtatctgtctgaatcagtcactcttgctcacaatgggcatggatcagaagaccatgcagagttactgtatctcttgtgaccctaatgaaagaatgtatatgatcctgga

SEQ ID NO: 5374 - DNA, 119 bp, homo sapiens
aagaccatgcagaagttactgtatctcttgtgaccctaatgaaagaatgtatatgatcctggaaagtgactgggtgacctaggacctctgatatgaatgtgatctgagactaaagtttg

SEQ ID NO: 5375 - DNA, 119 bp, homo sapiens
cctggaaagtgaactgggtgacctaggacctctgatatgaatgtgatctgagactaaagtttgtccttgaaacacctgcagctcattgtggattaagaacctcacccctggaggggtgg

SEQ ID NO: 5376 - DNA, 119 bp, homo sapiens
agtttgtccttggaaacacctgcagctcattgtggattaagaacctcacccctggaggggtggagtttcacccctgactcatgcagacatctattacatggaggcagtagaaggacccc

SEQ ID NO: 5377 - DNA, 119 bp, homo sapiens
gggtggagtttctacccctgactcatgcagacatctattacatggaggcagtagaaggacccctggagcagagggttttctaaatgagataactgggggcaaaggttgggataggcgca

SEQ ID NO: 5378 - DNA, 119 bp, homo sapiens
gacccctggagccagagggttttctaaatgagataactgggggcaaaggttgggataggcgcagcagcttaagacaagctcctacgctcactgttccctgatcattccaaaggctgctg

SEQ ID NO: 5379 - DNA, 119 bp, homo sapiens
ggcgcagcagctataagacaagctcctacgctcactgttccctgatcattccaaaggctgctggcccaaagatgcagatgtggtctacatctcagccttcctgacctctgccccaaaca

SEQ ID NO: 5380 - DNA, 119 bp, homo sapiens
ctgctggcccaaaagatgcagatgtggtctacatctcagccttcctgacctctgccccaaacacacgctcaattttgtctcctccttttctgttcaaattgtgaggttctatcaggttt

SEQ ID NO: 5381 - DNA, 119 bp, homo sapiens
caaacacacgctgcaattttgtctcctccttttctgttcaaattgtgaggttctatcaggtttgtaatcctgtagcttcagttattggtgagtctaaggatccaaggctacagaaaaaa

SEQ ID NO: 5382 - DNA, 119 bp, homo sapiens
aggtttgtaatcactgtagcttcagttattggtgagtctaaggatccaaggctacagaaaaaaaagaaaataacaggaattaatgatcattccacgttttgtagcccactgcatctgga

SEQ ID NO: 5383 - DNA, 119 bp, homo sapiens
gcccttgaattggaaggaatggagattagggaaggaaaactactctagaggccatttaaaagtatgtattattagaacatgcaaattcatgttgtctccatcagtggtcaccttgaggg

SEQ ID NO: 5384 - DNA, 119 bp, homo sapiens
agaggccatttaaaagtatgtatttattagaacatgcaaattcatgttgtctccatcagtggtcaccttagggattagacattctaatggaatgtcctggctccaccctccagcatgtt

SEQ ID NO: 5385 - DNA, 119 bp, homo sapiens
ttgtctccatcagtggtcaccttgagggattagacattctaatggaatgtcctggctccaccctccagctgttctcacccaacaatgacagttgagtggagtgggaagggaagtcattc

SEQ ID NO: 5386 - DNA, 119 bp, homo sapiens
cttgagtttttaaaactgtggttaaatgttttatgtggaatttgatgagtttgtatattaaataccactcttgctgcttttactagaatcaagttaagggacacgttagaaatagaaca

SEQ ID NO: 5387 - DNA, 119 bp, homo sapiens
ttaaataccactgcttgctgcttttactagaatcaagttaagggacacgttagaaatagaacagcttaaatcactggcttcagagcaaaatgagctcgggtgactgcagattatgatgg

SEQ ID NO: 5388 - DNA, 119 bp, homo sapiens
agaacagcttaatatcactggcttcagagcaaaatgagctcgggtgactgcagattatgatggtaaataggctttaattacaaacatgaggaatgattcactgaagatgaaaagatagg

SEQ ID NO: 5389 - DNA, 119 bp, homo sapiens
tgatggtaaatatggctttaattacaaacatgaggaatgattcactgaagatgaaaagataggacggattgatatgaaaaaaacccaaacattttggcattgaatgatggctaaggtgt

SEQ ID NO: 5390 - DNA, 119 bp, homo sapiens
gataggacggatgtgatatgaaaaaaacccaaacattttggcattgaatgatggctaaggtgttccaagattccatcttttaagatgaattgcttaattaattgcctcgctaccccagg

SEQ ID NO: 5391 - DNA, 119 bp, homo sapiens
aggtgttccaagtattccatcttttaagatgaattgcttaattaattgcctcgctaccccaggattctcttctttggaaataatttttattaaatttcaataaactgtgaatcccaatg

SEQ ID NO: 5392 - DNA, 119 bp, homo sapiens
cccaggattctcattctttggaaataatttttattaaatttcaataaactgtgaatcccaatggtatttactttacaacatggatgggctcatccttatctttaggtcatttggtcaga

SEQ ID NO: 5393 - DNA, 119 bp, homo sapiens
ccaatggtattttactttacaacatggatgggctcatccttatctttaggtcatttggtcagaatcctccgagaagactgatgaagagtatggaatcatgttccaattctatattctta

SEQ ID NO: 5394 - DNA, 119 bp, homo sapiens
gtcagaatcctcccgagaagactgatgaagagtatggaatcatgttccaattctatattcttaattatcttattcctgatgctactgcattgctgggtttccatagccaaggcctaaga

SEQ ID NO: 5395 - DNA, 119 bp, homo sapiens
ttcttaattatccttattcctgatgctactgcattgctgggtttccatagccaaggcctaagaacaggagagaaggcaatgcttgtgggagggaggtcccaataccaaaattctgggca

SEQ ID NO: 5396 - DNA, 119 bp, homo sapiens
ctaagaacaggaggagaaggcaatgcttgtgggagggaggtcccaataccaaaattctgggcactaaccggtgtctgcagcccgttcccgttagcctcggggatgtcacctcacccaca

SEQ ID NO: 5397 - DNA, 119 bp, homo sapiens
tgggcactaacctggtgtctgcagcccgttcccgttagcctcggggatgtcacctcacccacagcctggatctgacgttcttcctcagactggagtaaggagtgatggaccgtaaaatg

SEQ ID NO: 5398 - DNA, 119 bp, homo sapiens
cccacagcctgggatctgacgttcttcctcagactggagtaaggagtgatggaccgtaaaatgctgtgtatgataaaaggctgaaatatccactgaatgattaaaaccaactctaataa

SEQ ID NO: 5399 - DNA, 119 bp, homo sapiens
agaaatctcctcaagccagagcctgtgctgtgaggggcttcgggaccttggggcagctcctgagttcagcagagttcaggaagggagacaggggcacagagagacagaggttcatggac

SEQ ID NO: 5400 - DNA, 119 bp, homo sapiens
ttggggcagctcctgagttcagacagagttcaggaagggagacaggggcacagagagacagaggttcatgactgaggcaaaggctgggccaggctcagcaacccaggcctcccgcaggc

SEQ ID NO: 5401 - DNA, 119 bp, homo sapiens
gcacagagagacagaggttcatggactgaggcaaaggctgggccaggctcagcaacccaggcctcccgcggcaggcagaggctgccctgtaacccatggagaccagaccaacagctctg

SEQ ID NO: 5402 - DNA, 119 bp, homo sapiens
ctcagcaacccaggcctcccgcaggcaggcagaggctgccctgtaacccatggagaccagaccaacagcctgatgagctccacagtggctgcagctgcgcctgcagctggggctgcctc

SEQ ID NO: 5403 - DNA, 119 bp, homo sapiens
ccatggagaccagaccaacagctctgatgagctccacagtggctgcagctgcgcctgcagctggggctgctccaggaaggagtctccaggcagatggggcctgggggaggatcccacag

SEQ ID NO: 5404 - DNA, 119 bp, homo sapiens
gcgtgagcccctcgctccagtgccgcgtgtgcggagacagcagcagcgggaagcactatggcatctatgctgcaacggctgcagcggcttcttcaagaggagcgtacggcggaggctca

SEQ ID NO: 5405 - DNA, 119 bp, homo sapiens
cccctcgctccagtgccgcgtgtgcggagacagcagcagcgggaagcactatggcatctatgcctgcaaggctgcagcggcttcttcaagaggagcgtacggcggaggctcatctacag

SEQ ID NO: 5406 - DNA, 119 bp, homo sapiens
ccgtgcagaacgagcgccagccgcgaagcacagcccaggtccacctggacagcatggagtccaacactggtcccggccggagtccctggtggctcccccggccccggcagggcgcagcc

SEQ ID NO: 5407 - DNA, 119 bp, homo sapiens
gcatggagtccaacactgagtcccggccggagtccctggtggctcccccggccccggcagggcgcagccacggggccccacacccatgtctgcagccagagccctgggccaccacttca

SEQ ID NO: 5408 - DNA, 119 bp, homo sapiens
ccccggcagggcgcagcccacggggccccacacccatgtctgcagccagagccctgggccaccacttcaggccagccttataacagctgaaacctgtgctaagctggagccagaggatg

SEQ ID NO: 5409 - DNA, 119 bp, homo sapiens
ctgatgagaatattgatgtcaccagcaatgaccctgagttcccctcctctccatactcctcttcctcccctgcggcctggacagcatccatgagacctcggctcgcctactcttcatgg

SEQ ID NO: 5410 - DNA, 119 bp, homo sapiens
tcctcttcctccccctgcggcctggacagcatccatgagacctcggctcgcctactcttcatggccgtcagtgggccaagaacctgcctgtgttctccagcctgcccttccgggatcag

SEQ ID NO: 5411 - DNA, 119 bp, homo sapiens
gtgatcctgctggaagaggcgtggagtgaactctttctcctcggggccatccagtggtctctgcctctgacagctgtcctctgctggcaccgcccgaggcctctgctgccggtggtgcc

SEQ ID NO: 5412 - DNA, 119 bp, homo sapiens
tcggggccatccagtggtctctgcctctggacagctgtcctctgctggcaccgcccgaggcctctgctgcggtggtgcccagggccggctcacgctggccagcatggagacgcgtgtcc

SEQ ID NO: 5413 - DNA, 119 bp, homo sapiens
tctgctggcaccgcccgaggcctctgctgccggtggtgcccagggccggctcacgctggccagcatggaacgcgtgtcctgcaggaaactatctctcggttccgggcattggcggtgga

SEQ ID NO: 5414 - DNA, 119 bp, homo sapiens
agacgcggggcctgaaggatcctgagcacgtagaggccttgcaggaccagtcccaagtgatgctgagccgcacagcaaggcccaccaccccagccagcccgtgaggtgacctgagcatg

SEQ ID NO: 5415 - DNA, 119 bp, homo sapiens
tgatgctgagccagcacagcaaggcccaccaccccagccagcccgtgaggtgacctgagcatgcgcccaccactcatctgtccctgacctctaacctttctctgcctctcccacactct

SEQ ID NO: 5416 - DNA, 119 bp, homo sapiens
agcatgcgcccacccactcatctgtccctgacctctaacctttctctgcctctcccacactctcccagactcactgattagacagcacaagggtctcagttcaacagcatacagccaac

SEQ ID NO: 5417 - DNA, 119 bp, homo sapiens
cactctcccagagctcactgattagacagcacaagggtctcagttcaacagcatacagccaacatctatgtgtcccaggcacagtgccaggccccgggagtggggaccaagatgtacat

SEQ ID NO: 5418 - DNA, 119 bp, homo sapiens
gccaacatctatggtgtcccaggcacagtgccaggccccgggagtggggaccaagatgtacataagacaagctactgccttctagagacaaccggcagtgacctcactgaagacaaaaa

SEQ ID NO: 5419 - DNA, 119 bp, homo sapiens
gtacataagacaaagctactgccttctagagacaaccggcagtgacctcactgaagacaaaaactgcccagccaggtactgagggttgcatgaatctgcaggagacagagatccccttg

SEQ ID NO: 5420 - DNA, 119 bp, homo sapiens
caaaaactgccctagccaggtactgagggttgcatgaatctgcaggagacagagatccccttgcatgggaacataaagcagaattgggagggactttgtggagacagggctggacttga

SEQ ID NO: 5421 - DNA, 119 bp, homo sapiens
gtcatacacagggctggacctcacgcagactggcatggccatgggtccagaggatactactgggaagggatggcagctactgccaccttccagatggttccatggagttctgatctttg

SEQ ID NO: 5422 - DNA, 119 bp, homo sapiens
gaggatactactgggaaggggatggcagctactgccaccttccagatggttccatggagttctgatcttgggcatggccaggggaagcagaagggagactctaggagttgaaatgggtc

SEQ ID NO: 5423 - DNA, 119 bp, homo sapiens
ttccatggagttctgatctttgggcatggccaggggaagcagaagggagactctaggagttgaaatgggcagacccggtgtttgggtgaaggtaaggaatgagggaagaggagctcttt

SEQ ID NO: 5424 - DNA, 119 bp, homo sapiens
gtttgggaaattgctcctgctcctcccgtctttgaggtttatcactgcggaacgcatcgagctcctcttttccgcaagaccatagggaatactccaatggagaagctcctttgtgatat

SEQ ID NO: 5425 - DNA, 119 bp, homo sapiens
tgctcctcccgtctttgaggtttatcactgcggaacgcatcgagctcctctttttccgcaagaccataggaatactccaatggagaagctcctttgtgatatgttcaaaaactagtggg

SEQ ID NO: 5426 - DNA, 119 bp, homo sapiens
gtctgggaaaccgccgacttccggccgcgcagcggtgggctgagctaaaatggctgaggagagagtcgcacggtgagcgccgagattctctttagttgcccggccgcagggcaaggcaa

SEQ ID NO: 5427 - DNA, 119 bp, homo sapiens
ctgaggagagagtcgcgacggtgagcgccgagattctctttagttgcccggccgcagggcaaggcaagcggcgggtggcttttgtcccatgcagcggttcctggagagaggcggagctg

SEQ ID NO: 5428 - DNA, 119 bp, homo sapiens
gcagggcaaggcaagctggcgggtggcttttgtcccatgcagcggttcctggagagaggcggagctggggccgagcgtctcagggtgggcggggcgacacggtcccctttttactgtcc

SEQ ID NO: 5429 - DNA, 119 bp, homo sapiens
gagaggcggagctgggtgccgagcgtctcagggtgggcggggcgacacggtcccctttttactgtcccggaactggtcgcctggggcaagtctggatacttagcagcacaggtcctgtt

SEQ ID NO: 5430 - DNA, 119 bp, homo sapiens
cctttttactgtcccgggaactggtcgcctggggcaagtctggatacttagcagcacaggtcctgttctggactgtagtccctcttggggtgcgctggacggagaagggagacttttca

SEQ ID NO: 5431 - DNA, 119 bp, homo sapiens
gcacaggtcctgttctaggactgtagtccctcttggggtgcgctggacggagaagggagacttttcaccgtaatggctcttaccgtagtgccatctttttctgtctcgggggtttggaa

SEQ ID NO: 5432 - DNA, 119 bp, homo sapiens
gcacaagaccagttgcacaatgccctgaatcttaataggcacgatctgacttatataatgctggggaagtccacttgctggagggagacttggacaaggccattgaagtctacaagaaa

SEQ ID NO: 5433 - DNA, 119 bp, homo sapiens
ccagttgcacaatgccctgaatcttaataggcacgatctgacttatataatgctggggaagatccacttctggagggagacttggacaaggccattgaagtctacaagaaagcagtgga

SEQ ID NO: 5434 - DNA, 119 bp, homo sapiens
gccatcttggcagcaggcagcatgatgcagacccacggggactttgatgttgccctcaccaaatacagattgtggcttgtgctgttccagaaagtcctccactctggaataacattgga

SEQ ID NO: 5435 - DNA, 119 bp, homo sapiens
cacggggactttgatgttgccctcaccaaatacagagttgtggcttgtgctgttccagaaagtcctccatctggaataacattggaatgtgtttctttggcaagaagaaatatgtggcg

SEQ ID NO: 5436 - DNA, 119 bp, homo sapiens
gccatcagctgcctgaaacgagccaactacttggcaccctttgattggaagattctgtataatttgggcttgtccatttgaccatgcagcagtatgcatcagcttttcattttctcagt

SEQ ID NO: 5437 - DNA, 119 bp, homo sapiens
ttctgtataatttgggccttgtccatttgaccatgcagcagtatgcatcagcttttcattttctcagtgggccatcaacttccagccaaagatgggggagctctacatgctcttggcag

SEQ ID NO: 5438 - DNA, 119 bp, homo sapiens
gtgtaaccctttagtaaacctgaactatgctgtgctgctgtacaaccagggcgagaagaagaacgccctgcccaatatcaggagatggagaagaaagtcagcctactcaaggacaatag

SEQ ID NO: 5439 - DNA, 119 bp, homo sapiens
aactatgctgtgctgctgtacaaccagggcgagaagaagaacgccctggcccaatatcaggagatggagagaaagtcagcctactcaaggacaatagctctctggaatttgactctgag

SEQ ID NO: 5440 - DNA, 119 bp, homo sapiens
atggtggagatggctcagaagttgggagctgctctccaggttggggaggcactggtctggaccaaaccattaaagatcccaaatcaaagcaccagaccacttcaaccagcaaacctgcc

SEQ ID NO: 5441 - DNA, 119 bp, homo sapiens
tggggaggcactggtctggaccaaaccagttaaagatcccaaatcaaagcaccagaccacttcaaccagaaacctgccagtttccagcagcctctgggctctaatcaagctctaggaca

SEQ ID NO: 5442 - DNA, 119 bp, homo sapiens
aatcaaagcaccagaccacttcaaccagcaaacctgccagtttccagcagcctctgggctctaatcaagtctaggacaggcaatgtcttcagcagctgcatacaggacgctcccctcag

SEQ ID NO: 5443 - DNA, 119 bp, homo sapiens
gtgctggaggaacatcccagttcacaaagcccccatctcttcctctggagccagagcctgcggtggaataagtccaactgaaacatcagaacaaataagagagaaataagaatagaatg

SEQ ID NO: 5444 - DNA, 119 bp, homo sapiens
tgcggtggaatcaagtccaactgaaacatcagaacaaataagagagaaataagaatagaatgaatgacccaaaatagggttttcttgggcgaggatgtgctggattaggaaaggtgaca

SEQ ID NO: 5445 - DNA, 119 bp, homo sapiens
aatgaatgaccccaaaatagggttttcttgggcgaggatgtgctggattaggaaaggtgacatgacacagcagagcagagtggcacccaccacagaatacagtgtgtgttattacgagg

SEQ ID NO: 5446 - DNA, 119 bp, homo sapiens
gacatgacacaggcagagcagagtggcacccaccacagaatacagtgtgtgttattacgaggagccagcgttgagcctaaggtccttctacctacctggtattggcatttgaggtcgga

SEQ ID NO: 5447 - DNA, 119 bp, homo sapiens
gaggagccagcagttgagcctaaggtccttctacctacctggtattggcatttgaggtcggaaaccctcactgccccataagccaggaaaagtgaaaagagaacacagttcctttaaga

SEQ ID NO: 5448 - DNA, 119 bp, homo sapiens
cggaaaccctctactgccccataagccaggaaaagtgaaaagagaacacagttcctttaagaactggcacaaggcttgaggccttatgtatgtagctgagtcagcaaggtacatgatgc

SEQ ID NO: 5449 - DNA, 119 bp, homo sapiens
aagaactggcagcaaggcttgaggccttatgtatgtagctgagtcagcaaggtacatgatgctgtctgcttcaaaaggacttttctctcctagctgactgactccttccttagttcaag

SEQ ID NO: 5450 - DNA, 119 bp, homo sapiens
atgctgtctgctttcaaaaggacttttctctcctagctgactgactccttccttagttcaaggaacagcgagacagacctctgctgagtagctctgtgatgacaaagccttggtttaac

SEQ ID NO: 5451 - DNA, 119 bp, homo sapiens
caaggaacagctgagacagacctctgctgagtagctctgtgatgacaaagccttggtttaactgaggtgtcctcaggttgtgaggtttattagtccccaaggcaaacacaaatattaga

SEQ ID NO: 5452 - DNA, 119 bp, homo sapiens
taactgaggtgatcctcaggttgtgaggtttattagtccccaaggcaaacacaaatattagattaataaccaactttaatagtatacatttaaaagaaaaaaaacaaaagccctggaag

SEQ ID NO: 5453 - DNA, 119 bp, homo sapiens
tagattaataatccaactttaatagtatacatttaaaagaaaaaaaacaaaagccctggaagttgaggcaagcctgctgagtattgcagctgcatttgcccaaagggaatccagaacaa

SEQ ID NO: 5454 - DNA, 119 bp, homo sapiens
gaagttgaggccaagcctgctgagtattgcagctgcatttgcccaaagggaatccagaacaagtccctcctgtattttgttcttgagaggggtcagtctagaagctagatcctatcagg

SEQ ID NO: 5455 - DNA, 119 bp, homo sapiens
acaagtccctccctgtattttgttcttgagaggggtcagtctagaagctagatcctatcaggatgaggacagcagcccagggcttgtctggatcagcaccaacgattttaaagaaaaaa

SEQ ID NO: 5456 - DNA, 119 bp, homo sapiens
caggatgaggagcagcagcccagggcttgtctggatcagcaccaacgattttaaagaaaaaaggaagagttcttagatgagtaattgttattgaagatagtcagtgataaccactgacc

SEQ ID NO: 5457 - DNA, 119 bp, homo sapiens
aaaaggaagagtttcttagatgagtaattgttattgaagatagtcagtgataaccactgaccagatgcttcaatacactatgtgtcctttttagaataaagattacatatcatcattcc

SEQ ID NO: 5458 - DNA, 119 bp, homo sapiens
gaccagatgctatcaatacactatgtgtcctttttagaataaagattacatatcatcattcctttggggaaattgttattcaggtataaaaacaagagatcataataaaaacctaaaag

SEQ ID NO: 5459 - DNA, 119 bp, homo sapiens
tatcctctctcttttatcttcttttattgcattttgggggcgaatagggggatattttaacccgggctcttgcctgttttcacagactctaagtcgtaaaactctgttacaaaggaaat

SEQ ID NO: 5460 - DNA, 119 bp, homo sapiens
taacccgggctccttgcctgttttcacagactctaagtcgtaaaactctgttacaaaggaaatgactgaaaaatgaattcgagtctttgaaatacaaccttacacaaaaatcactgtct

SEQ ID NO: 5461 - DNA, 119 bp, homo sapiens
ggaaatgactgagaaaatgaattcgagtctttgaaatacaaccttacacaaaaatcactgtcttaaagctcaagggcaggtggaaatataactatccccagttcttcttgttcaaggga

SEQ ID NO: 5462 - DNA, 119 bp, homo sapiens
ctgtcttaaagcttcaagggcaggtggaaatataactatccccagttcttcttgttcaagggaattcccctcctttattacccatcccccaacttgagaacagggtgacacctgagctc

SEQ ID NO: 5463 - DNA, 119 bp, homo sapiens
aagggaattccccctcctttattacccatcccccaacttgagaacagggtgacacctgagctcactcggcttagggagtctaaggggggaccacagtcatctcaagcagccctttccta

SEQ ID NO: 5464 - DNA, 119 bp, homo sapiens
gagctcactcgggcttagggagtctaaggggggaccacagtcatctcaagcagccctttcctagccttggtccaggacagttgaggagaggcccagagattctaactacagttcagctg

SEQ ID NO: 5465 - DNA, 119 bp, homo sapiens
ttcctagccttgggtccaggacagttgaggagaggcccagagattctaactacagttcagctggcaggaatgttttcagaaggctgtgttctcagcttgggcctgggggccaaagagct

SEQ ID NO: 5466 - DNA, 119 bp, homo sapiens
cagctggcaggagatgttttcagaaggctgtgttctcagcttgggcctgggggccaaagagctgctcagaacggccttgccatcatacttgggcagcgtgcccccgaagtcagagggca

SEQ ID NO: 5467 - DNA, 119 bp, homo sapiens
agagctgctcagcaacggccttgccatcatacttgggcagcgtgcccccgaagtcagagggcaggatgtctcatcgatctcctggtagaaaccagaaaggtcatccccgtggacaaaga

SEQ ID NO: 5468 - DNA, 119 bp, homo sapiens
ctggagcatgtccaccatcttcctgagatctgaagtccggagactagcagcctgctgcatggtaaagccttgaagttctcaatgatgcagaagccattgatttgagtttcctcattctc

SEQ ID NO: 5469 - DNA, 119 bp, homo sapiens
gagactagcagcctgctgcatggtaaagcccttgaagttctcaatgatgcagaagccattgatttgagttcctcattctccagcagcttctccaggatgaagcaatatgcctgcaagat

SEQ ID NO: 5470 - DNA, 119 bp, homo sapiens
ctcatcaaaggtgatttcttgactttgccagttctcaatgttgaagagcatgaccactcggccatactttcccgactagagaggacaccagggtagccagcttcaatggtgcagcggac

SEQ ID NO: 5471 - DNA, 119 bp, homo sapiens
ggccatacttgtcccgactagagaggacaccagggtagccagcttcaatggtgcagcggacagcctctgggacaggctgtcaaagagctcagggtactgcagccggaaattcacatagc

SEQ ID NO: 5472 - DNA, 119 bp, homo sapiens
ctctgagcagctcataggcacggcccacgttgaacttccgtgcgcggatgaagcgcaggaagaagccgcgtccttctcttgcaccctctccgccacggccaccgccagctcctcccccg

SEQ ID NO: 5473 - DNA, 119 bp, homo sapiens
cgcggatgaagcgcaggaagaagccgctgtccttctcttgcaccctctccgccacggccaccgccagctctcccccgaggccgcctgcgcctgcaccatctcctgcagctctcgcactg

SEQ ID NO: 5474 - DNA, 119 bp, homo sapiens
ccctctccgccacggccaccgccagctcctcccccgaggccgcctgcgcctgcaccatctcctgcagcttcgcactgcctcctcccgggtctcctctctctcgttcagctcatccttgg

SEQ ID NO: 5475 - DNA, 119 bp, homo sapiens
cttctgcaaggtgtggcggggcagctggctgcacgggccaaagacaggtccatggtccttggttgtgagtgctccagttgggcacggagctcctgttcctcttcaggtaccatgcggaa

SEQ ID NO: 5476 - DNA, 119 bp, homo sapiens
ggtgtggcggggcagctggctgcacgggccaaagacaggtccatggtccttggttgtgagctgctccagtgggcacggagctcctgttcctcttcaggtaccatgcggaacgtgcccac

SEQ ID NO: 5477 - DNA, 119 bp, homo sapiens
ctgccaggtcggcagctcctccttggggctacctggtacctgaatgtcctggagctctagaggttccctcgctggaggcgtggtccggtcagcaggttgggattagtgtgtcataagga

SEQ ID NO: 5478 - DNA, 119 bp, homo sapiens
acctgaatgtcctggagctctagaggttccctccgctggaggcgtggtccggtcagcaggttgggattatgtgtcataaggaacttctcaccgcccacagtttccgttaaatcgggctc

SEQ ID NO: 5479 - DNA, 119 bp, homo sapiens
gtaagaatatgaaaactcaaccacccttgagcaggatgaaccgggaggaattggaggacagtttctttcacttcgcgaagatcacatgttggtgaaggagctttcttggaagcaacagg

SEQ ID NO: 5480 - DNA, 119 bp, homo sapiens
aactcaaccacccttgagcaggatgaaccgggaggaattggaggacagtttctttcgacttcgcgaagacacatgttggtgaaggagctttcttggaagcaacaggatgagatcaaaag

SEQ ID NO: 5481 - DNA, 119 bp, homo sapiens
gctgaggaccaccttgctgcggttgaccgctgctggccgggacctgcgggtcgcggaggaggcggcgccctctcggagaccgcaaggcgcgggcagaaggcgggatggcggcagcgcct

SEQ ID NO: 5482 - DNA, 119 bp, homo sapiens
tcgcggaggaggcggcgccgctctcggagaccgcaaggcgcgggcagaaggcgggatggcggcagcgccctccatgcaccagcgcccccagatgcaccgactgcaagggcatttccact

SEQ ID NO: 5483 - DNA, 119 bp, homo sapiens
gcgggatggcggcagcgcctctccatgcaccagcgcccccagatgcaccgactgcaagggcatttccacgcgtcggccctgccagcccccgccgcgcccagcctcgcgtccaagtggga

SEQ ID NO: 5484 - DNA, 119 bp, homo sapiens
actgcaagggcatttccactgcgtcggccctgccagcccccgccgcgcccagcctcgcgtccaagtgggcacagacagctccacacagccggtgcaccggtgccggagaaacccaagag

SEQ ID NO: 5485 - DNA, 119 bp, homo sapiens
tgtttctggttctaacagcataatttctttcagcagtgtcataagtatggctaaacccattggtctatgatgcctaacagtgcccacatcatggccagcaataccatgcaagtggaaga

SEQ ID NO: 5486 - DNA, 119 bp, homo sapiens
atggctaaacccattggtctatgcatgcctaacagtgcccacatcatggccagcaataccatgcaagtgaagagccacccaagtctcctgagaaaatgtggcctaaagatgaaaatttt

SEQ ID NO: 5487 - DNA, 119 bp, homo sapiens
tggccagcaataccatgcaagtggaagagccacccaagtctcctgagaaaatgtggcctaaagatgaaattttgaacagagaagctcattggagtgtgctcagaaggctgcagagcttc

SEQ ID NO: 5488 - DNA, 119 bp, homo sapiens
aatcagggaatcctgagtgcagcccatgaggccctcctcaagcaagtgaatgagctcagggcagagctgaggaagaaagcaagaaggctgtgagcttgaagagccaactggaagatgtg

SEQ ID NO: 5489 - DNA, 119 bp, homo sapiens
gaggccctcctcaagcaagtgaatgagctcagggcagagctgaaggaagaaagcaagaaggctgtgagctgaagagccaactggaagatgtgtctatcttgcagatgactctgaaggag

SEQ ID NO: 5490 - DNA, 119 bp, homo sapiens
catgctggacagcagtgacagctccagtcagccccactggagcaacgagctcatagcggaacagctacacagcaagtctctcagctgcaggatcagctggatgctgagctggaggacaa

SEQ ID NO: 5491 - DNA, 119 bp, homo sapiens
actggagcaacgagctcatagcggaacagctacagcagcaagtctctcagctgcaggatcagctggatgtgagctggaggacaagagaaaagttttacttgagctgtccagggagaaag

SEQ ID NO: 5492 - DNA, 119 bp, homo sapiens
cccaaaatgaggatctgaagcttgaagtcaccaacatacttcagaagcataaacaggaagtagagctccccaaaatgcagccacaatttcccaacctcctgacaggcaatctgaaccag

SEQ ID NO: 5493 - DNA, 119 bp, homo sapiens
cagaagcataaacaggaagtagagctcctccaaaatgcagccacaatttcccaacctcctgacaggcaactgaaccagccactcacccagctgtattgcaagagaacactcagatcgag

SEQ ID NO: 5494 - DNA, 119 bp, homo sapiens
ccaagtgaacccaaaaaccaagaagaaaagaaactgtcccaggtgctaaatgagttgcaagtatcacaccagagaccacattggaactagaaaagaccagggacatgcttattctgcag

SEQ ID NO: 5495 - DNA, 119 bp, homo sapiens
gaaaagaaactgtcccaggtgctaaatgagttgcaagtatcacacgcagagaccacattggaactagaaagaccagggacatgcttattctgcagcgcaaaatcaacgtgtgttatcag

SEQ ID NO: 5496 - DNA, 119 bp, homo sapiens
gaggaactggaggcaatgatgacaaaagctgacaatgataatagagatcacaaagaaaagctggagaggtgactcgactactagacctcaagaataaccgtatcaagcagctggaaggt

SEQ ID NO: 5497 - DNA, 119 bp, homo sapiens
acaatgataatagagatcacaaagaaaagctggagaggttgactcgactactagacctcaagaataacctatcaagcagctggaaggtattttaagaagccatgaccttccaacatctg

SEQ ID NO: 5498 - DNA, 119 bp, homo sapiens
aacagctcaaagatgttgcttatggcacccgaccgttgtcgttatgtttggaaacactgccagcccatgagatgaggataaagtggatatttctctgctgcatcagggtgagaatcttt

SEQ ID NO: 5499 - DNA, 119 bp, homo sapiens
actgccagcccatggagatgaggataaagtggatatttctctgctgcatcagggtgagaatctttttgactgcacatccaccaggccttcctgacatctgccgccctagctcaggctgg

SEQ ID NO: 5500 - DNA, 119 bp, homo sapiens
gagaatctttttgaactgcacatccaccaggccttcctgacatctgccgccctagctcaggctggagatcccaacctaccactttctgcacctattccttctatgactttgaaacccac

SEQ ID NO: 5501 - DNA, 119 bp, homo sapiens
ctcaggctggagatacccaacctaccactttctgcacctattccttctatgactttgaaacccactgtacccattatctgtggggccacagcccctctatgacttcacctcccagtatg

SEQ ID NO: 5502 - DNA, 119 bp, homo sapiens
tgaaacccactgtaccccattatctgtggggccacagcccctctatgacttcacctcccagtatgtgatgagacagattcgcttttcttacactaccttcaagaggcttcagcccggct

SEQ ID NO: 5503 - DNA, 119 bp, homo sapiens
tcccagtatgtgatggagacagattcgcttttcttacactaccttcaagaggcttcagcccggcttgactacaccaggccatggccagtgaacacagcactcttgctgcaggatggatt

SEQ ID NO: 5504 - DNA, 119 bp, homo sapiens
cagcccggcttgacatacaccaggccatggccagtgaacacagcactcttgctgcaggatggatttgcttgacagggtgctagagactgtggagaaagtccatggcttggccacactga

SEQ ID NO: 5505 - DNA, 119 bp, homo sapiens
gagctggtggagaagagttcggggttctagagtactggatgaggctgcgtttccccataaaacccagccacaggcgtgcaataaacgaaagaaagcccaggtctacctgtcaaccgatg

SEQ ID NO: 5506 - DNA, 119 bp, homo sapiens
tactggatgaggctgcgtttccccataaaacccagcctacaggcgtgcaataaacgaaagaaagcccagtctacctgtcaaccgatgtgcttggaggccggaaggcccaggaagaggag

SEQ ID NO: 5507 - DNA, 119 bp, homo sapiens
ttcagatcggagtcttgggaacctcagaacgagctgtggattgaaatcaccaagtgctgtggcctccgggtcgatggctgggaactcaacccagtccatatgctgtgtaccgcttcttc

SEQ ID NO: 5508 - DNA, 119 bp, homo sapiens
gctgtggcctccggagtcgatggctgggaactcaacccagtccatatgctgtgtaccgcttcttcacctttctgaccatgacactgccatcattccagccagtaacaacccctacttta

SEQ ID NO: 5509 - DNA, 119 bp, homo sapiens
ccgcttcttcaccttttctgaccatgacactgccatcattccagccagtaacaacccctactttagagacaggctcgattcccagtgcttgtgacctctgacctggaccattatctgag

SEQ ID NO: 5510 - DNA, 119 bp, homo sapiens
ccctactttagagaccaggctcgattcccagtgcttgtgacctctgacctggaccattatctgagacggaggccttgtctatacatgtttttgatgatgaagacttagagcctggctcg

SEQ ID NO: 5511 - DNA, 119 bp, homo sapiens
attatctgagacgggaggccttgtctatacatgtttttgatgatgaagacttagagcctggctcgtatctggccgagcccgagtgcctttactgcctcttgcaaaaaatgaatctatca

SEQ ID NO: 5512 - DNA, 119 bp, homo sapiens
gtgattttaacctcactgaccctgcagagaaacccaacggatctattcaagtgcaactggattggaagttccctacataccccctgagagcttcctgaaaccagaagctcagactaagg

SEQ ID NO: 5513 - DNA, 119 bp, homo sapiens
cccaacggatctattcaagtgcaactggattggaagtttccctacataccccctgagagcttcctgaaacagaagctcagactaaggggaaggataccaaggacagttcaaagatctca

SEQ ID NO: 5514 - DNA, 119 bp, homo sapiens
gaagtttccctacataccccctgagagcttcctgaaaccagaagctcagactaaggggaaggataccaagacagttcaaagatctcatctgaagaggaaaaggcttcatttccttccca

SEQ ID NO: 5515 - DNA, 119 bp, homo sapiens
gatcagatggcatctcctgaggttcccattgaagctggccagtatcgatctaagagaaaacctcctcatggggagaaagaaaggagaaggagcaccaggttgtgagctactcaagaaga

SEQ ID NO: 5516 - DNA, 119 bp, homo sapiens
tatcgatctaagagaaaacctcctcatgggggagaaagaaaggagaaggagcaccaggttgtgagctaccaagaagaaaacatggcaaaagaataggtgttcaaggaaagaatagaatg

SEQ ID NO: 5517 - DNA, 119 bp, homo sapiens
gagaaggagcaccaggttgtgagctactcaagaagaaaacatggcaaaagaataggtgttcaaggaaagatagaatggagtatcttagccttaacatcttaaatggaaatacaccagag

SEQ ID NO: 5518 - DNA, 119 bp, homo sapiens
caggtgaattacactgagtggaagttctcagagactaacagcttcataggtgatggctttaaaaatcagacgaggaagaggaaatgacattatcccattcagcactgaaacagaaggaa

SEQ ID NO: 5519 - DNA, 119 bp, homo sapiens
ggaagttctcagagactaacagcttcataggtgatggctttaaaaatcagcacgaggaagaggaaatgaattatcccattcagcactgaaacagaaggaacctctacatcctgtaaatg

SEQ ID NO: 5520 - DNA, 119 bp, homo sapiens
gattcagagaagatgtgcattgaaattgtctccctggccttctacccagaggcagaagtgatgtctgatagaacataaaacaggtgtatgtggagtacaaattctacgacctacccttg

SEQ ID NO: 5521 - DNA, 119 bp, homo sapiens
gccttctacccagaggcagaagtgatgtctgatgagaacataaaacaggtgtatgtggagtacaaattcacgacctacccttgtcggagacagagactccagtgtccctaaggaagcct

SEQ ID NO: 5522 - DNA, 119 bp, homo sapiens
aacataaaacaggtgtatgtggagtacaaattctacgacctacccttgtcggagacagagactccagtgccctaaggaagcctagggcaggagaagaaatccactttcactttagcaag

SEQ ID NO: 5523 - DNA, 119 bp, homo sapiens
tttaaagtttacagtggtaagtgatcctctggatgaagaaaagaaagaatgtgaagaagtgggatatgctatcttcaactgtggcagatcctggagtcaggaagagatattctagagca

SEQ ID NO: 5524 - DNA, 119 bp, homo sapiens
cagtggtaagtgatcctctggatgaagaaaagaaagaatgtgaagaagtgggatatgcatatcttcaacgtggcagatcctggagtcaggaagagatattctagagcaagagctagaca

SEQ ID NO: 5525 - DNA, 119 bp, homo sapiens
ttgttagccctgaagatctggctaccccaataggaaggctgaaggtttcccttcaagcagctgctgtccccatgctatttacaaggagatgactgaagatttgttttcatgaaggaaca

SEQ ID NO: 5526 - DNA, 119 bp, homo sapiens
tgaaggtttcccttcaagcagctgctgtcctccatgctatttacaaggagatgactgaagatttgttttatgaaggaacaagtgctattccaatctaaaagtctctgagggaaccatag

SEQ ID NO: 5527 - DNA, 119 bp, homo sapiens
tttacaaggagatgactgaagatttgttttcatgaaggaacaagtgctattccaatctaaaagtctctggggaaccatagtaaaaagtctcttataaagttagcttgctataacatgaa

SEQ ID NO: 5528 - DNA, 119 bp, homo sapiens
taaagaatgaacacttcttaaattgcaagaacatttagcttattgcattagaattctgcctggacttcagtttaattcacaaaagctgcactctctcagcaaattgtcatcccaggaga

SEQ ID NO: 5529 - DNA, 119 bp, homo sapiens
gaattctgcctggacttcaagtttaattcacaaaagctgcactctctcagcaaattgtcatcccaggagagtctcacctcagccctcagagaggtgggaggtggcaggagcaccctgtg

SEQ ID NO: 5530 - DNA, 119 bp, homo sapiens
caaattgtcatcccaggagaagtctcacctcagccctcagagaggtgggaggtggcaggagcaccctgtcaggtctggaggcccagacagcctggagggagctgccgaggacccacgta

SEQ ID NO: 5531 - DNA, 119 bp, homo sapiens
ggtggcaggagcaccctgtgcaggtctggaggcccagacagcctggagggagctgccgaggacccacgttgtgctcacagagaagccaggcttcctcgcctgggctgtgcatcccctgc

SEQ ID NO: 5532 - DNA, 119 bp, homo sapiens
agctgccgaggacccacgtatgtgctcacagagaagccaggcttcctcgcctgggctgtgcatcccctgctaggctgcagctgggaaactgcagcaggataggaggtgcctttggcgag

SEQ ID NO: 5533 - DNA, 119 bp, homo sapiens
ctgggctgtgcatcccctgcctaggctgcagctgggaaactgcagcaggataggaggtgcctttggcgaattgtcttggggacttcttggggagaccaccgggacttccatactgggga

SEQ ID NO: 5534 - DNA, 119 bp, homo sapiens
ccaacccacaccaacaacccccagagctcactcttcaggcctttgctgctctgagccctgaaggccacaggttgggcagggaaaaagcatctcggatagaggtcctaatctatctagtt

SEQ ID NO: 5535 - DNA, 119 bp, homo sapiens
ctgaaggccacagggttgggcagggaaaaagcatctcggatagaggtcctaatctatctagttgttggaattgaaatcttgaaaattctgtagtgctaaaatggggaggttacaagctt

SEQ ID NO: 5536 - DNA, 119 bp, homo sapiens
ctagttgttggatattgaaatcttgaaaattctgtagtgctaaaatggggaggttacaagcttcagaataaaatacagcctcattgctaattacagctttaatgtgttacaggttgaaa

SEQ ID NO: 5537 - DNA, 119 bp, homo sapiens
aagcttcagaatgaaaatacagcctcattgctaattacagctttaatgtgttacaggttgaaaaccctgattaaaaactaaactgaggtgggagctgcaaccctcctccacctcccatt

SEQ ID NO: 5538 - DNA, 119 bp, homo sapiens
ttgaaaaccctgaattaaaaactaaactgaggtgggagctgcaaccctcctccacctcccattcactgttcaccacacttccaccccccagtgcctggcactggtccctgcagagctca

SEQ ID NO: 5539 - DNA, 119 bp, homo sapiens
cccattcactgtgtcaccacacttccaccccccagtgcctggcactggtccctgcagagctcagcgtgcagtcatgtgggctgggtttctgtgttcgtaaggggaggggacccctctcc

SEQ ID NO: 5540 - DNA, 119 bp, homo sapiens
agctcagcgtgctagtcatgtgggctgggtttctgtgttcgtaaggggaggggacccctctccagaaaagaccagcatctaaattcgggcatgacttgaggacccaaaagctttgggga

SEQ ID NO: 5541 - DNA, 119 bp, homo sapiens
ctctccagaaaatgaccagcatctaaattcgggcatgacttgaggacccaaaagctttggggatatttggcggtcatacagggcgtggctaggaccagaaggcgctctggtaacgatgc

SEQ ID NO: 5542 - DNA, 119 bp, homo sapiens
tggggatatttgcgcggtcatacagggcgtggctaggaccagaaggcgctctggtaacgatgcagagaacgtgcagccgcctcctgggcggagccaccccacccagcccccactacacc

SEQ ID NO: 5543 - DNA, 119 bp, homo sapiens
cgatgcagagaaccgtgcagccgcctcctgggcggagccaccccacccagcccccactacaccacaagggctctgaacggctcagaggaagaggtgggaggggtccccggacccggggc

SEQ ID NO: 5544 - DNA, 119 bp, homo sapiens
tacaccacaaggtgctctgaacggctcagaggaagaggtgggaggggtccccggacccggggccgctcgggttagccggtcacagcgagccttgtagagatcgcgctcccgggccaggc

SEQ ID NO: 5545 - DNA, 119 bp, homo sapiens
cggggccgctcgaggttagccggtcacagcgagccttgtagagatcgcgctcccgggccaggcgggccactcggcccgcagcgcgtccagctgggcggccaggcgggcgcgctcggcct

SEQ ID NO: 5546 - DNA, 119 bp, homo sapiens
ccaggcgggccacctcggcccgcagcgcgtccagctgggcggccaggcgggcgcgctcggcctccagccgcgccgctgctgcagccgcttggagcgacaggcctgcgcgtagccgcggt

SEQ ID NO: 5547 - DNA, 119 bp, homo sapiens
cggcctccagcccgcgccgctgctgcagccgcttggagcgacaggcctgcgcgtagccgcggttcttcacgtgcggcgcctctgcttcagccgcagcgcctcgtcgcgcccgcagcccc

SEQ ID NO: 5548 - DNA, 119 bp, homo sapiens
cgcggttcttcagcgtgcggcgcctctgcttcagccgcagcgcctcgtcgcgcccgcagccccgcagctccggtttagctcccgcacagacatcgagaccagcgccgcgtcggaaaacc

SEQ ID NO: 5549 - DNA, 119 bp, homo sapiens
ctggacgtgctgggctcctgtctcctctgggctccctgggtagtagccatggggcccatcaacagggacgggccctgaccctgcagcagctccatggcctcttcaggactcagccccaa

SEQ ID NO: 5550 - DNA, 119 bp, homo sapiens
atcaacagggactgggccctgaccctgcagcagctccatggcctcttcaggactcagccccaatgcctcccagcccccagctgctgctgcagggtagccagccagtacagctcctccag

SEQ ID NO: 5551 - DNA, 119 bp, homo sapiens
ccccaatgcctccccagcccccagctgctgctgcagggtagccagccagtacagctcctccaggcctggcgggtgccctcggttgcccccaccatgcctggttcactgaaggtgggtga

SEQ ID NO: 5552 - DNA, 119 bp, homo sapiens
ctccaggcctggccgggtgccctcggttgcccccaccatgcctggttcactgaaggtgggtgaaggaggactgagctgtaaggtgtggagcccagtgaggctgtaggggggccaggtcg

SEQ ID NO: 5553 - DNA, 119 bp, homo sapiens
gggtgaaggaggcactgagctgtaaggtgtggagcccagtgaggctgtaggggggccaggtcggccctcgagggttcccgctttacctcaaacttcatcaagtcaaagtcattgacata

SEQ ID NO: 5554 - DNA, 119 bp, homo sapiens
aggtcggccctcagagggttcccgctttacctcaaacttcatcaagtcaaagtcattgacatattccatgccagggggctggggggcagggccattctggagctgggctgggaggagtg

SEQ ID NO: 5555 - DNA, 119 bp, homo sapiens
gactacatctcccagcaggctgtgctctgacagctcttggatttaaataggattctgggctctgctcaggtcaggctgctgctcagcacccaggacggagaggagcagagaagcagcag

SEQ ID NO: 5556 - DNA, 119 bp, homo sapiens
tgggctctgctcagagtcaggctgctgctcagcacccaggacggagaggagcagagaagcagcagaagcgccaagagctggagccagaccaggaacctgagccagagctggggttgaag

SEQ ID NO: 5557 - DNA, 119 bp, homo sapiens
gaagcagcagaagcagccaagagctggagccagaccaggaacctgagccagagctggggttgaagctgggcagcagcaaaagcaacagcagctacagaagttggaacgatgctggtcac

SEQ ID NO: 5558 - DNA, 119 bp, homo sapiens
ggggttgaagctggagcagcagcaaaagcaacagcagctacagaagttggaacgatgctggtcaccttggactgctcacctccttcttctcgttcctgtatatggtagctccatccatc

SEQ ID NO: 5559 - DNA, 119 bp, homo sapiens
gagcccgagtctatattgcctgcagagatgtactgaagggggagtctgctgccagtgaaatccgagtggtacaaagaactcccaggtgctggtgcggaaattggacctatccgacacca

SEQ ID NO: 5560 - DNA, 119 bp, homo sapiens
agggggagtctgctgccagtgaaatccgagtggatacaaagaactcccaggtgctggtgcggaaattggcctatccgacaccaaatctatccgagcctttgctgagggctttctggcag

SEQ ID NO: 5561 - DNA, 119 bp, homo sapiens
gccacttcctcctcacctacctgctcctggagcggctaaaggtgtctgcccctgcacgggtggttaatggtcctcggtggctcaccacattggcaagattcccttccacgacctccaga

SEQ ID NO: 5562 - DNA, 119 bp, homo sapiens
ctgcccctgcacgggtggttaatgtgtcctcggtggctcaccacattggcaagattcccttccacgaccccagagcgagaagcgctacagcaggggttttgcctattgccacagcaagc

SEQ ID NO: 5563 - DNA, 119 bp, homo sapiens
ttggcaagattcccttccacgacctccagagcgagaagcgctacagcaggggttttgcctattgccacacaagctggccaatgtgctttttactcgtgagctggccaagaggctccaag

SEQ ID NO: 5564 - DNA, 119 bp, homo sapiens
gcaccggggtcaccacctacgcagtgcacccaggcgtcgtccgctctgagctggtccggcactcctcccgctctgcctgctctggcggctcttctccccctttgtcaagacggcacggg

SEQ ID NO: 5565 - DNA, 119 bp, homo sapiens
gtcgtccgctctgagctggtccggcactcctccctgctctgcctgctctggcggctcttctcccccttttcaagacggcacgggagggggcgcagaccagcctgcactgcgccctggct

SEQ ID NO: 5566 - DNA, 119 bp, homo sapiens
gctctgcctgctctggcggctcttctccccctttgtcaagacggcacgggagggggcgcagaccagcctcactgcgccctggctgagggcctggagcccctgagtggcaagtacttcag

SEQ ID NO: 5567 - DNA, 119 bp, homo sapiens
tgactgcaagaggacctgggtgtctccaagggcccgaaataacaaaacagctgagcgcctatggaatgtagctgtgagcttctaggaatccggtgggagtagctggtggaagagctgca

SEQ ID NO: 5568 - DNA, 119 bp, homo sapiens
ctatggaatgtcagctgtgagcttctaggaatccggtgggagtagctggtggaagagctgcagctttataggcccaatccatgccataatgaacagggaccaaggagaaggccaaccct

SEQ ID NO: 5569 - DNA, 119 bp, homo sapiens
tgcagctttatcaggcccaatccatgccataatgaacagggaccaaggagaaggccaaccctaaaggatgtcctcttggccagctggtgctgcgaatcctgcctgctctgatcctcttg

SEQ ID NO: 5570 - DNA, 119 bp, homo sapiens
ccctaaaggattgtcctcttggccagctggtgctgcgaatcctgcctgctctgatcctcttgacccttcgggaatgtttgcacacctgacactcttgtgagactggcttatggcatgag

SEQ ID NO: 5571 - DNA, 119 bp, homo sapiens
cttgacccttctgggaatgtttgcacacctgacactcttgtgagactggcttatggcatgagttgtggaacctatagagtgttcttctctaagacctggaaagtcagcaaccctctggg

SEQ ID NO: 5572 - DNA, 119 bp, homo sapiens
tgagttgtggacacctatagagtgttcttctctaagacctggaaagtcagcaaccctctgggggcagcagactgggcagatcccaggctgggcatgggggtggcagaagagcccgagaa

SEQ ID NO: 5573 - DNA, 119 bp, homo sapiens
tgggggcagcaggactgggcagatcccaggctgggcatgggggtggcagaagagcccgagaaattgggtagttccctcatcagcaccagaggctcagctgaggcaagaagagcaccatc

SEQ ID NO: 5574 - DNA, 119 bp, homo sapiens
agaaattgggtcagttccctcatcagcaccagaggctcagctgaggcaagaagagcaccatcactgccttttctaggggctatacactccaactcttggttgatctctttctttttaaa

SEQ ID NO: 5575 - DNA, 119 bp, homo sapiens
catcactgcctatttctaggggctatacactccaactcttggttgatctctttctttttaaaaatatttccaccaccctggagtctagaccaacacacaaagatcctggctaaccctgg

SEQ ID NO: 5576 - DNA, 119 bp, homo sapiens
taaaaatatttgccaccaccctggagtctagaccaacacacaaagatcctggctaaccctggcctatttgattccttcctctcacctggaccttcccatttcaatcatgcagatggttt

SEQ ID NO: 5577 - DNA, 119 bp, homo sapiens
ctggcctatttagattccttcctctcacctggaccttcccatttcaatcatgcagatggtttctttttgaaagagttccgtttgcctttcaatttttagagaaaataaagactgcattc

SEQ ID NO: 5578 - DNA, 119 bp, homo sapiens
acaatagcgactcactggacccagcccttagcaacggcctggcaacggtttccctgctgctgcagccccgtcggctcctcttttccagtcctccactgccggggctgggcccggccgcg

SEQ ID NO: 5579 - DNA, 119 bp, homo sapiens
cctggcaacggtttccctgctgctgcagcccccgtcggctcctcttttccagtcctccactgccggggcgggcccggccgcgggaaggaccgaaggggatacagcgtgtccctgcggcg

SEQ ID NO: 5580 - DNA, 119 bp, homo sapiens
gctcctcttttccagtcctccactgccggggctgggcccggccgcgggaaggaccgaaggggatacagctgtccctgcggcggctgcaagaggactaagcatggatggcagccggagag

SEQ ID NO: 5581 - DNA, 119 bp, homo sapiens
atgcagaccaacaacgaagagagaaactcaaaaaggaattagcacaatgtgaaaaagagttcaaattaataaaactgcaatgcgagccaattataaaaataattccaagtcacttttta

SEQ ID NO: 5582 - DNA, 119 bp, homo sapiens
cgaagagagaaactcaaaaaggaattagcacaatgtgaaaaagagttcaaattaactaaaactgcaatggagccaattataaaaataattccaagtcactttttaataccttacaaaag

SEQ ID NO: 5583 - DNA, 119 bp, homo sapiens
ccctcaggcgaaccgcaaattgaggatgacatgttaaaagaagaaatgaatggattttcatcctttgcaggtcactagtaccctcttcagagagactacacctaagtctacataaatcc

SEQ ID NO: 5584 - DNA, 119 bp, homo sapiens
catcctttgcaaggtcactagtaccctcttcagagagactacacctaagtctacataaatccagtaaagcatcacaaatggtcctgagaagaactccagttcctccccgtccagtgtgg

SEQ ID NO: 5585 - DNA, 119 bp, homo sapiens
atccagtaaagtcatcacaaatggtcctgagaagaactccagttcctccccgtccagtgtggattatgcgcctccgggccccggaaactgagctctggagccctgtatggcagaaggcc

SEQ ID NO: 5586 - DNA, 119 bp, homo sapiens
gtggattatgcagcctccgggccccggaaactgagctctggagccctgtatggcagaaggcccagaagccattcccaaattcccaccggtttcagttagtcatttcgaaagcacccagt

SEQ ID NO: 5587 - DNA, 119 bp, homo sapiens
ggcccagaagcacattcccaaattcccaccggtttcagttagtcatttcgaaagcacccagtggggatctttggataaacattctgaactcttttctaacaaacaattgccattcactc

SEQ ID NO: 5588 - DNA, 119 bp, homo sapiens
cagtggggatcttttggataaacattctgaactcttttctaacaaacaattgccattcactcctcgcacttaaaaacagaagcaaaatctttcctgtcacagtatcgctattatacacc

SEQ ID NO: 5589 - DNA, 119 bp, homo sapiens
actcctcgcactttaaaaacagaagcaaaatctttcctgtcacagtatcgctattatacacctgccaaagaaaaaaggattttacagatcaacggatagaagctgaaacccagactgaa

SEQ ID NO: 5590 - DNA, 119 bp, homo sapiens
gaaaaaatgcgccacctgctgcatgtcctgaaagtagacttaggctgcacatcggaggaaaactcggtaagcaaaatgatgttgatatgttgaatgtatttgattttgaaaaggctggg

SEQ ID NO: 5591 - DNA, 119 bp, homo sapiens
aggaaaactcggtaaagcaaaatgatgttgatatgttgaatgtatttgattttgaaaaggctgggaattagaaccaaatgaattaaaaaatgaaagtgaagtaacaattcagcaggaac

SEQ ID NO: 5592 - DNA, 119 bp, homo sapiens
aaaggctgggaattcagaaccaaatgaattaaaaaatgaaagtgaagtaacaattcagcaggaacgtcacaataccaaaaggctttggatatgttattgtcggcaccaaaggatgagaa

SEQ ID NO: 5593 - DNA, 119 bp, homo sapiens
cagcaggaacgtcaacaataccaaaaggctttggatatgttattgtcggcaccaaaggatgagaacgagtattcccttcaccaactgaatttttcatgcctatttataaatcaaagcat

SEQ ID NO: 5594 - DNA, 119 bp, homo sapiens
aggatgagaacgagatattcccttcaccaactgaatttttcatgcctatttataaatcaaagcattcagaggggttataattcaacaggtgaatgatgaaacaaatcttgaaacttcaa

SEQ ID NO: 5595 - DNA, 119 bp, homo sapiens
atcaaagcattcagaaggggttataattcaacaggtgaatgatgaaacaaatcttgaaacttcaactttgatgaaaatcatccaagtatttcagacagtttaacagatcgggaaacttc

SEQ ID NO: 5596 - DNA, 119 bp, homo sapiens
gaaacttcaactttggatgaaaatcatccaagtatttcagacagtttaacagatcgggaaacttctgtgatgtcattgaaggtgatagtgaccctgaaaaggttgagatttcaaatgga

SEQ ID NO: 5597 - DNA, 119 bp, homo sapiens
gggaaacttctgtgaatgtcattgaaggtgatagtgaccctgaaaaggttgagatttcaaatggattattggtcttaacacatcaccctcccaatctgttcagttctccagtgtcaaag

SEQ ID NO: 5598 - DNA, 119 bp, homo sapiens
ttcaaatggattatgtggtcttaacacatcaccctcccaatctgttcagttctccagtgtcaaaggcgaaataatcatgacatggagttatcaactcttaaaatcatggaaatgagcat

SEQ ID NO: 5599 - DNA, 119 bp, homo sapiens
agtgtcaaaggcgacaataatcatgacatggagttatcaactcttaaaatcatggaaatgagcattgagactgccctttggatgtttaatcttcattaataaatacctcaaatggccag

SEQ ID NO: 5600 - DNA, 119 bp, homo sapiens
gacgccgccagctcttcactccacgcccacctctctcctggagcgctgggccttcgctggccgcaccggagccatgagctcggagatggagccgctgctcctggcctggagctatttta

SEQ ID NO: 5601 - DNA, 119 bp, homo sapiens
ctcctggagcgctgggccttcgctggccgcaccggcagccatgagctcggagatggagccgctgctcctgcctggagctattttaggcgcaggaagttccagctctgcgccgatctatg

SEQ ID NO: 5602 - DNA, 119 bp, homo sapiens
gcagccatgagctcggagatggagccgctgctcctggcctggagctattttaggcgcaggaagttccagtctgcgccgatctatgcacgcagatgctggagaagtccccttatgaccag

SEQ ID NO: 5603 - DNA, 119 bp, homo sapiens
gccaatcacacaagctggaagacccattacaggtttcctcaggcccagcacgcagagtggaaggccaggactatggaacaggctatcagaacacccagaaccgcctacacagcccgccc

SEQ ID NO: 5604 - DNA, 119 bp, homo sapiens
aggcccagcacgcagagtggaaggccaggcactatggaacaggctatcagaacacccagaaccgcctaccagcccgccctatcaccagctcctccggaagatttgtcaggctgggaacg

SEQ ID NO: 5605 - DNA, 119 bp, homo sapiens
gaaatgaacaatatgtcatcagcagcagaatattacaaagaagttttgaaacaagacaatactcatgtgaagccatcgcatgcattggaagcaaccacttctattctgatcagccagaa

SEQ ID NO: 5606 - DNA, 119 bp, homo sapiens
agcagcagaatattacaaagaagttttgaaacaagacaatactcatgtggaagccatcgcatgcattggagcaaccacttctattctgatcagccagaaatagctctccggttttacag

SEQ ID NO: 5607 - DNA, 119 bp, homo sapiens
gcggctgctgcagatgggcatttataacggccagctttttaacaatctggggctgtgttgcttctatgccagcagtatgatatgactctgacctcatttgaacgtgccctttctttggc

SEQ ID NO: 5608 - DNA, 119 bp, homo sapiens
tgttgcttctatgcccagcagtatgatatgactctgacctcatttgaacgtgccctttctttggctgaaatgaagaagaggcagctgatgtctggtacaacttgggacatgtagctgtg

SEQ ID NO: 5609 - DNA, 119 bp, homo sapiens
ggaataggagatacaaatttggcccatcagtgcttcaggctggctctggtcaacaacaacaaccacgccaggcctacaacaacctggctgtgctggagatgcggaagggccacgttgaa

SEQ ID NO: 5610 - DNA, 119 bp, homo sapiens
ataggagatacaaatttggcccatcagtgcttcaggctggctctggtcaacaacaacaaccacgccgagcctacaacaacctggctgtgctggagatgcggaagggccacgttgaacag

SEQ ID NO: 5611 - DNA, 119 bp, homo sapiens
attggagatctgcagagaagctatgttgctgcgcagaagtctgaagcagcatttccagaccatgtggaccacaacatttaattaaacaattaaggcagcattttgctatgctctgattg

SEQ ID NO: 5612 - DNA, 119 bp, homo sapiens
gcagcatttccagaccatgtggacacacaacatttaattaaacaattaaggcagcattttgctatgctcgattgttccttagaccacatatgttcttatgaagcagcattatgcaaggg

SEQ ID NO: 5613 - DNA, 119 bp, homo sapiens
ttaaggcagcattttgctatgctctgattgttccttagaccacatatgttcttatgaagcagcattatgaaggggaaaaaagcactatgtctgtgtatgtatgtatatagtgtaatacg

SEQ ID NO: 5614 - DNA, 119 bp, homo sapiens
atgttcttatgaagcagcattatgcaaggggaaaaaagcactatgtctgtgtatgtatgtatatagtgtatacgtatattttaacaaacctgtccttgatattagttaaggtgacacat

SEQ ID NO: 5615 - DNA, 119 bp, homo sapiens
tctgtgtatgtatgtatatagtgtaatacgtatattttaacaaacctgtccttgatattagttaaggtgcacataagggtgacacagaatgtgtaatgcaaatttcatagtaatagtaa

SEQ ID NO: 5616 - DNA, 119 bp, homo sapiens
caggatttaaacctttctaaatagatcctgaaactgtctctcacattatatagtagatgtttgtttatatgtttacaaaacattttggtgaatttcctcaatgttttataaatgtacat

SEQ ID NO: 5617 - DNA, 119 bp, homo sapiens
ctcacattatatagtagatgtttgtttataatgtttacaaaacattttggtgaatttcctcaatgtttttaaatgtacattttttaagtccttaagctgactcttagccatcatgtagc

SEQ ID NO: 5618 - DNA, 119 bp, homo sapiens
aaacattttggtgaatttcctcaatgttttataaatgtacattttttaagtccttaagctgactcttagcatcatgtagcttaaggagtctgaaatctgccattaaaactgcaccttta

SEQ ID NO: 5619 - DNA, 119 bp, homo sapiens
tctcttcaaatatttaatcagtttggagacctctgcattccaatccaattgggtaaaaattctaaagaagcaagattaaggggtcctcaaagaaaacactgggctaaaatggagaggag

SEQ ID NO: 5620 - DNA, 119 bp, homo sapiens
aattctaaagaaagcaagattaaggggtcctcaaagaaaacactgggctaaaatggagaggagactgggttgggaagacagaacatagcatgtgtctgaaggcctttcgaaggaattct

SEQ ID NO: 5621 - DNA, 119 bp, homo sapiens
gaggagactgggtttgggaagacagaacatagcatgtgtctgaaggcctttcgaaggaattctacgacaattttttaaaaatactcaaaatgaacaagacagaattaaaccgttataca

SEQ ID NO: 5622 - DNA, 119 bp, homo sapiens
aattctacgacatattttttaaaaatactcaaaatgaacaagacagaattaaaccgttatacaaatttaggacaactgaaacttcttttatggttgaaaataccaggcatggttttgaa

SEQ ID NO: 5623 - DNA, 119 bp, homo sapiens
tatacaaatttaaggacaactgaaacttcttttatggttgaaaataccaggcatggttttgaaacacatctctaaaaacccttcgatcctgctgtggtttgtttacatagccttctctg

SEQ ID NO: 5624 - DNA, 119 bp, homo sapiens
tttgaaacacattctctaaaaacccttcgatcctgctgtggtttgtttacatagccttctctgtgtacgaaaaagcaaactagctactcccagggttccccgccagctcccgggtcttt

SEQ ID NO: 5625 - DNA, 119 bp, homo sapiens
tctctgtgtacgcaaaaagcaaactagctactcccagggttccccgccagctcccgggtctttgcaaagagtaacacagtgagagaaggagtggaagaggtgaagaagtgacagcaagc

SEQ ID NO: 5626 - DNA, 119 bp, homo sapiens
gtctttgcaaagcagtaacacagtgagagaaggagtggaagaggtgaagaagtgacagcaagctgttcaagtctttgaacatagactcagacccccgcaaacctaatctattttctttg

SEQ ID NO: 5627 - DNA, 119 bp, homo sapiens
gcaagctgttcacagtctttgaacatagactcagacccccgcaaacctaatctattttctttgaaaatatggaaataaactgaaggccttgaaaattcaccaacaatcttctatcaggg

SEQ ID NO: 5628 - DNA, 119 bp, homo sapiens
tctttgaaaatagtggaaataaactgaaggccttgaaaattcaccaacaatcttctatcaggggagcaagataatactttttgataactgtgtcataggaactgggggtggcaagtcct

SEQ ID NO: 5629 - DNA, 119 bp, homo sapiens
tcaggggagcaatgataatactttttgataactgtgtcataggaactgggggtggcaagtcctgcaggggacaggtctgcaatagtacaggtgagagtcaggaagtcggggctgactct

SEQ ID NO: 5630 - DNA, 119 bp, homo sapiens
agtcctgcagggtgacaggtctgcaatagtacaggtgagagtcaggaagtcggggctgactcttcggggaacgttcagcaggaaatgcctaacgtctgtgtcgctctcattctctctgt

SEQ ID NO: 5631 - DNA, 119 bp, homo sapiens
gactcttcggggaaacgttcagcaggaaatgcctaacgtctgtgtcgctctcattctctctgttatttctctcttctcctgtcccttggtgccaatgagaggcagcgtcggaggctcca

SEQ ID NO: 5632 - DNA, 119 bp, homo sapiens
ctctgttatttcctctcttctcctgtcccttggtgccaatgagaggcagcgtcggaggctccagcccgagctcagaatgggtactgcgacacatatatccgcagtcggatcacggagct

SEQ ID NO: 5633 - DNA, 119 bp, homo sapiens
gctccagcccgaggctcagaatgggtactgcgacacatatatccgcagtcggatcacggagctgcctctaagttgatgacagtgttgacagtgatcatttccaagtccagctggatttc

SEQ ID NO: 5634 - DNA, 119 bp, homo sapiens
ggagctgcctctgaagttgatgacagtgttgacagtgatcatttccaagtccagctggatttcccggggcctttgatggggcgtgtcatcaccagggtggcactgatggggcccgtttg

SEQ ID NO: 5635 - DNA, 119 bp, homo sapiens
ccgcatgtaaaattctctgccctcattcccagatttgatctggaaaatgtaataggccccagggtagcggtcgtggcttgcatttggaagatgtcagcgggaacggagcgtcctgacac

SEQ ID NO: 5636 - DNA, 119 bp, homo sapiens
tctggaaaatgtaataggccccagggtagcgggtcgtggcttgcatttggaagatgtcagcgggaacgggcgtcctgacaccacgtccatgtcccggtacaagatggtaaagggctggt

SEQ ID NO: 5637 - DNA, 119 bp, homo sapiens
gcttgcatttggaagatgtcagcgggaacggagcgtcctgacaccacgtccatgtcccggtacaagatgtaaagggctggtctctgcagccagggttctcagcaggacacatacagcgg

SEQ ID NO: 5638 - DNA, 119 bp, homo sapiens
ttatcactgatcctcagataaggctcctcacagcggatggggtcaatgcatttgaagcccccttgtaaatgtagcacgtctgctgcaggttgcacgtgtggttcctgtgctcacattcg

SEQ ID NO: 5639 - DNA, 119 bp, homo sapiens
tgatcctcagataaggctcctcacagcggatggggtcaatgcatttgaagcccccttgtaaattgtagccgtctgctgcaggttgcacgtgtggttcctgtgctcacattcgttgatgt

SEQ ID NO: 5640 - DNA, 119 bp, homo sapiens
cttggcagcttcggttgtcatccagcaggatgtagcctggagggcaggagcagaagtatgtgccgggctgttcacacactcatgttggcagaggaactcagagaagctgcactcgtcca

SEQ ID NO: 5641 - DNA, 119 bp, homo sapiens
ggcagcttcggttgtcatccagcaggatgtagcctggagggcaggagcagaagtatgtgccgggctggtcacacactcatgttggcagaggaactcagagaagctgcactcgtccatat

SEQ ID NO: 5642 - DNA, 119 bp, homo sapiens
ctaagcactggccttccagaagccaatatccgtcggtgcaggagcaggtgtacccgccttcagtattgagcagatctgggtggggttgcactggtgggaatctgttgcacactcgtcca

SEQ ID NO: 5643 - DNA, 119 bp, homo sapiens
agcactggccttccagaagccaatatccgtcggtgcaggagcaggtgtacccgccttcagtattgatgcgatctgggtggggttgcactggtgggaatctgttgcacactcgtccacat

SEQ ID NO: 5644 - DNA, 119 bp, homo sapiens
ctggtgcattgaatggcaactaacaacccatttgtggtgagcatgccagatacagacgatgtcttcaccaagcacagcggagaggaacaaaaggccgggctactcacccacacattggt

SEQ ID NO: 5645 - DNA, 119 bp, homo sapiens
gtcttcaccaaagcacagcggagaggaacaaaaggccgggctactcacccacacattggttgctttcatcatctggtatccaaagcggcatataagaggcctggagatcgtgggatagt

SEQ ID NO: 5646 - DNA, 119 bp, homo sapiens
tgctttcatccatctggtatccaaagcggcatataagaggcctggagatcgtgggatagtttggagctggagtggtggggcagctgctgggtacggacctgagtagggggtcgagtagg

SEQ ID NO: 5647 - DNA, 119 bp, homo sapiens
agtaggggttcgagtagggccctcgatacacagggtttgtccggggaatgcataaatacccgccattttgttaacacacatcatgtctcctcggcaggcctcggggatggttcggcatt

SEQ ID NO: 5648 - DNA, 119 bp, homo sapiens
cgccattttggttaacacacatcatgtctcctcggcaggcctcggggatggttcggcattcatcaatattgaaaggcacagaaagggcgagcattagtggcaccccaactgccttgtgt

SEQ ID NO: 5649 - DNA, 119 bp, homo sapiens
catcaatatctgaaaggcacagaaagggcgagcattagtggcaccccaactgccttgtgtccggtgcattttaagcagaactcggtaccaggcgtggaggaagcactcccaaacaccta

SEQ ID NO: 5650 - DNA, 119 bp, homo sapiens
ctttttattcctggcatgtccaagacgcgcgaggaggagatgcgaaggcgagaagaaagctcgcgggcggacccccggaggagctcgggcacgtcggcctcctctgggccctcggggct

SEQ ID NO: 5651 - DNA, 119 bp, homo sapiens
aagaaagctcgcgggcgggacccccggaggagctcgggcacgtcggcctcctctgggccctcggggctccgggtgttttattccagaggggccgagcgagtcgtggagaggacacgggg

SEQ ID NO: 5652 - DNA, 119 bp, homo sapiens
ctgggccctcggggctcgcgggtgttttattccagaggggccgagcgagtcgtggagaggacacggggaagcgccggggtcctcccagccactgcagagccctcagcgcaagcacctgg

SEQ ID NO: 5653 - DNA, 119 bp, homo sapiens
tggagaggacacggggagagcgccggggtcctcccagccactgcagagccctcagcgcaagcacctggtttgcttagccctcttcagtaattcagcattaaaccaattggaggaggaat

SEQ ID NO: 5654 - DNA, 119 bp, homo sapiens
cagcgcaagcacctggttttgcttagccctcttcagtaattcagcattaaaccaattggaggaggaatgtaaaaatgaacacttcattttctaagtatgttaaacaatgcaaatggggc

SEQ ID NO: 5655 - DNA, 119 bp, homo sapiens
caattggaggaggaatgttaaaaatgaacacttcattttctaagtatgttaaacaatgcaaatggggcccagtctggacacagctggttcagattacagcgctcaccaactggctagac

SEQ ID NO: 5656 - DNA, 119 bp, homo sapiens
acaatgcaaatggggcctcagtctggacacagctggttcagattacagcgctcaccaactggctagactctcacaacaatcttggggcgtctgccagggcccagtgctcggcgctggga

SEQ ID NO: 5657 - DNA, 119 bp, homo sapiens
caccaactggctagactcctcacaacaatcttggggcgtctgccagggcccagtgctcggcgctgggagagagcccttccccggccgcgctcggctgcgagcgcccgggcagaaggcga

SEQ ID NO: 5658 - DNA, 119 bp, homo sapiens
caggatgacaagccatcaggaggtcaacaacacaagcacagacagagggaaagaggccaaactgctgaagtcagcggcctgtctggaggggctgaggcttcggcctcgggaggctgaag

SEQ ID NO: 5659 - DNA, 119 bp, homo sapiens
caaactgctgaatgtcagcggcctgtctggaggggctgaggcttcggcctcgggaggctgaagcaggagcagggaaacggtcaggcatacaggtcctcccgatccgcagagtaaacctc

SEQ ID NO: 5660 - DNA, 119 bp, homo sapiens
ctgaagcaggaggcagggaaacggtcaggcatacaggtcctcccgatccgcagagtaaacctccccctctgcaggagagcaaagttgaggaagtgagagggcctgtgcacctcgtggta

SEQ ID NO: 5661 - DNA, 119 bp, homo sapiens
aacctccccctcctgcaggagagcaaagttgaggaagtgagagggcctgtgcacctcgtggtagaactcttggggttcgccagctgtagctcatatttcatgttggggtcatgccgaac

SEQ ID NO: 5662 - DNA, 119 bp, homo sapiens
ccatgaagttgtagttccacgaggactgggcagggaccatgaagaagccaaggaaacggtccgacagcacatctgcaccctctcatagtgtgaaggcaggtagcccttggggttgttgc

SEQ ID NO: 5663 - DNA, 119 bp, homo sapiens
aagaagccaaggaaacggtccgacagcagcatctgcaccctctcatagtgtgaaggcaggtagcccttgggttgttgcccttgtctgtgttctggcggccccattcgtagccactgggg

SEQ ID NO: 5664 - DNA, 119 bp, homo sapiens
ctcatagtgtgaaggcaggtagcccttggggttgttgcccttgtctgtgttctggcggccccattcgtaccactgggggtcagcttgtaggccgtcagtgtacaggagcctggcgtgaa

SEQ ID NO: 5665 - DNA, 119 bp, homo sapiens
ctgcatgtgatgataatggtcttctcgccatcccaagatgggttgtcagccatgatcttggcatgggtgtgacatcctggggtgataactgcggggactcattgggctgagtgtggatc

SEQ ID NO: 5666 - DNA, 119 bp, homo sapiens
cttctcgccatcccaagatgggttgtcagccatgatcttggcatgggtggtgacatcctggggtgataatgcggggactcattgggctgagtgtggatccaacctaagggttccatctc

SEQ ID NO: 5667 - DNA, 119 bp, homo sapiens
cttgaggtactcatgctggggcagctggccaggcaggtgcacggtctggtgagtgccccactgcggcacatcacaatgcagcggatctccttcacctgggggttatctggtgggctcac

SEQ ID NO: 5668 - DNA, 119 bp, homo sapiens
cagctggccaggcaggtgcacggtctggtgagtgccccactgcggcaccatcacaatgcagcggatctcttcacctgggggttatctggtgggctcaccccatataggtatcctgcaat

SEQ ID NO: 5669 - DNA, 119 bp, homo sapiens
ttgggcccgaaggtcagatatgcagatgaacttcttaagcacattcttgggaaggatgtaggtgtagccgtctccttgatgtcgtcagatgaaacatagatgtgattggtccttaggtg

SEQ ID NO: 5670 - DNA, 119 bp, homo sapiens
cagatgaacttcttaagcacattcttgggaaggatgtaggtgtagccagtctccttgatgtcgtcagataaacatagatgtgattggtccttaggtgcaggttggcagcagagatggcc

SEQ ID NO: 5671 - DNA, 119 bp, homo sapiens
ctgaccctccactcagtcttggatgagaaagtctgggtctcatagttgctggtggtggaggtgatgatccatcgccatgcttgttgacagtgcgagtctgtgttgccgtcagctgcgat

SEQ ID NO: 5672 - DNA, 119 bp, homo sapiens
gtgatgatctcatcgccatgcttgttgacagtgcgagtctgtgttgccgtcagctgcgattgttccttgtctgcttctcgatctcagcgatctgctgccgctgctgtgacggtgccgag

SEQ ID NO: 5673 - DNA, 119 bp, homo sapiens
tgttccttggtctgcttctcgatctcagcgatctgctgccgctgctgtgacggtgccgagatctccataccaggatgatgtctcgaatttctgattgtgtcagtgatgccacgttcaca

SEQ ID NO: 5674 - DNA, 119 bp, homo sapiens
ttgtttttcttgccgtagtcagccaagatcagatccttgagctgcacctcgaccttgatccattcttcgcagtcagagtgggccagatgtggtgtggttctgtaatagtagtcttgtct

SEQ ID NO: 5675 - DNA, 119 bp, homo sapiens
tgagctgcacctcgaccttgatccattcttcgtcagtcagagtgggccagatgtggtgtggttctgtaaagtagtcttgtctggcttcaggatcacttttgcccgatcgttgttcacat

SEQ ID NO: 5676 - DNA, 119 bp, homo sapiens
cagagtgggccagatgtggtgtggttctgtaatagtagtcttgtctggcttcaggatcacttttgcccgtcgttgttcacatgtagggcacgcagaatcaggatgagacgggagaaggc

SEQ ID NO: 5677 - DNA, 119 bp, homo sapiens
cgtgtaagatgaaatagtcttgagccagtcgtcatagaggttgaagagaaccatctggggctcagtggcttaaggatgagatccccgaatttttccaccttgagacacgcctggaaagg

SEQ ID NO: 5678 - DNA, 119 bp, homo sapiens
ctggggctcagtggctttaaggatgagatccccgaatttttccaccttgagacacgcctggaaagggagtggagctccgatcctttgatgacaatattggggaagtccagtaagtgcac

SEQ ID NO: 5679 - DNA, 119 bp, homo sapiens
ctgccccaaacgcttctgtcccgcccacacggacgtgtggattatcttgaggaacagctgccctgtgcggggttgaagatgaagatggctccgttgatgggcttggttgtcaagttccc

SEQ ID NO: 5680 - DNA, 119 bp, homo sapiens
acgcttctgtcccgcccacacggacgtgtggattatcttgaggaacagctgccctgtgcgtgggttgaaatgaagatggctccgttgatgggcttggttgtcaagttcccttcaaaggt

SEQ ID NO: 5681 - DNA, 119 bp, homo sapiens
cttgtgaatagtcactctgtagacgttggtgtcatccacaaaccagataatctggttggagaagagctcccatagttctgagaagacaaataaggctcagtgggttcagatgaatagag

SEQ ID NO: 5682 - DNA, 119 bp, homo sapiens
agaagagctcaccatagttctgagaagacaaataaggctcagtgggttcagatgaatagagctgtagcccttgcggatccgttcacgtaacacatacagggcagggtttgccttcatga

SEQ ID NO: 5683 - DNA, 119 bp, homo sapiens
agctgtagccccttgcggatccgttcacgtaacacatacagggcagggtttgccttcatgatcttggcctggcctgttgtatgagaggcttgctgcctgggaaccagtttccataggca

SEQ ID NO: 5684 - DNA, 119 bp, homo sapiens
ctgtgcaagttataggccaggtcaatggcgatgagtacacctgtgggcgaagggtagatactcatgttgcggtggtgtagtccaggaacttggcccgggcgtagcgctcaatgtcgtgg

SEQ ID NO: 5685 - DNA, 119 bp, homo sapiens
acacctgtgggcgaagggtagatactcatgttgtcggtggtgtagtccaggaacttggcccgggcgtaggctcaatgtcgtgggaatcatagtccccccagcgcaactggatgtcaatc

SEQ ID NO: 5686 - DNA, 119 bp, homo sapiens
gtggtgtagtccaggaacttggcccgggcgtagcgctcaatgtcgtgggaatcatagtccccccagcgcactggatgtcaatccagtatttctgggtggtggtgctgtccatcacatcc

SEQ ID NO: 5687 - DNA, 119 bp, homo sapiens
ttggagtcagccagcaatgagggccgggagacattccacttataggaggcaaagagcaggatatctgcaaggaagagttcatcttatatgactttcggggatggattgtctccttttgt

SEQ ID NO: 5688 - DNA, 119 bp, homo sapiens
ataggaggcaaagagcaggatatctgcacaggaagagttcatcttatatgactttcggggatggattgttccttttgtactgtctcaatttccagtgcatcaagttcctggtcaaacac

SEQ ID NO: 5689 - DNA, 119 bp, homo sapiens
ctgacataagtccataacaatgctctcatggatcttctgccacaagtgagctcggaagatctggatgaggagatcttcagcgtggggatcttgccgtgcatgaagatacccgtcaggtc

SEQ ID NO: 5690 - DNA, 119 bp, homo sapiens
atggatcttctgccacaagtgagctcggaagatctggatgagagagatcttcagcgtggggatcttgcctgcatgaagatacccgtcaggtctagctgcacctgaaagcctacatatac

SEQ ID NO: 5691 - DNA, 119 bp, homo sapiens
attggctcgattaatggtcggggaccaccagagggtgaatctacgattgggaatctggttcagtcctgacgctgagcattagttagcttcttccacttcatagattcctcaaagccact

SEQ ID NO: 5692 - DNA, 119 bp, homo sapiens
ttaatggtcggggaccaccagagggtgaatctacgattgggaatctggttcagtcctgatcgctgagcatagttagcttcttccacttcatagattcctcaaagccactggccttctcc

SEQ ID NO: 5693 - DNA, 119 bp, homo sapiens
cagaaaagcccctcccaggtagggaagtaagtgcccttaaagagtgtgtgttccagaatgccttccacacgcccagggcctggatcatgtctgtacggtagttgttcaggttccagagc

SEQ ID NO: 5694 - DNA, 119 bp, homo sapiens
ttccagaatgccttccacaccgcccagggcctggatcatgtctgtacggtagttgttcaggttccagagttcccatcatgccgctggtgtgtccaccagaacggattctgcttcaaaac

SEQ ID NO: 5695 - DNA, 119 bp, homo sapiens
ctgatactgcttaaagtcagttctgacacgccagcccttatcataagccagtgtgtgccggtccttctgaagagggtattgattcgaggaatgccacgatcccatgaatcttctaggtc

SEQ ID NO: 5696 - DNA, 119 bp, homo sapiens
tcagttctgacacgccagcccttatcataagccagtgtgtgccggtccttctggaagagggtattgattgaggaatgccacgatcccatgaatcttctaggtcttctaaagtcaggcgt

SEQ ID NO: 5697 - DNA, 119 bp, homo sapiens
ctgttctgagcaatggcctcttgcctcttgagtgcgtactcagcccagacccgctgagaatcaatgaaccgctctcccatggctgtatgtagcggtacaagttgggaatgagctggtct

SEQ ID NO: 5698 - DNA, 119 bp, homo sapiens
tcaatgaactcgctctcccatggctgtatgtagcggtacaagttgggaatgagctggtcttcttcatggtcattcctgaacgaaagtgtgtgatacctacatctgtctgtttggaccac

SEQ ID NO: 5699 - DNA, 119 bp, homo sapiens
ctgaggtcggattgggggatgagcacatggcccattgagagcatgccgagtccacccaactccttagggtgtagaacacaaccggggggaaccgacttggcatcttggagttgagtcca

SEQ ID NO: 5700 - DNA, 119 bp, homo sapiens
atgccgagtccacccaactccttaggggtgtagaacacaaccggggggaaccgacttggcatcttggagtgagtccaatcttgatacgtgtctggattttgttctcacacttcaccagt

SEQ ID NO: 5701 - DNA, 119 bp, homo sapiens
ggggggaaccgacttggcatcttggagttgagtccaatcttgatacgtgtctggattttgttctcacactcaccagtaagtccaagagctcttgggtgttcaccacagcctcccgaaag

SEQ ID NO: 5702 - DNA, 119 bp, homo sapiens
atacgtgtctggattttgttctcacacttcaccagtaagtccaagagctcttgggtgttcaccacagcccccgaaagtatgtcataaggccaatgagagctgtattccacttattcaca

SEQ ID NO: 5703 - DNA, 119 bp, homo sapiens
ctcattctgcaggttccagaccccgtccttgtgggtgaactcctcatagctggtgcggcacttaggcagatgcggcactcgaagccacacatgttgaacagcaggttggggttgtcctt

SEQ ID NO: 5704 - DNA, 119 bp, homo sapiens
atagctggtgcggcacttaggcaggatgcggcactcgaagccacacatgttgaacagcaggttggggtttccttactgtacacagacacgaagctgttctcccactgaactgtagtcac

SEQ ID NO: 5705 - DNA, 119 bp, homo sapiens
catgttgaacagcaggttggggttgtccttactgtacacagacacgaagctgttctcccactgaactgtgtcactgaccgtggcaagcggttcttgatgtcccagaataccgcccggcc

SEQ ID NO: 5706 - DNA, 119 bp, homo sapiens
aagttaacatcatgtttcatgaggcgcatgcgggcatctcggggccagcacttcttgttattatagccacgatgttttcattattggggtcagggtgctctgtcaggtaacgttgaatc

SEQ ID NO: 5707 - DNA, 119 bp, homo sapiens
atgcgggcatctcggggccagcacttcttgttattatagccaacgatgttttcattattggggtcaggggctctgtcaggtaacgttgaatcaggtcccgagcctcatctgctgtgaac

SEQ ID NO: 5708 - DNA, 119 bp, homo sapiens
ctgaaaaaaatatggatgcgatcaatgtatctgcagaagagacggatggggtgggcagcctcagtggcttgtcctggaaactgagaaagtcatttggcatctgagggggcccagccatc

SEQ ID NO: 5709 - DNA, 119 bp, homo sapiens
ctcagtggctatgtcctggaaactgagaaagtcatttggcatctgagggggcccagccatctcactggccggtgcaatcccaatacaagcaaatccatcaccaggccataatactgcac

SEQ ID NO: 5710 - DNA, 119 bp, homo sapiens
tctcactggcccggtgcaatcccaatacaagcaaatccatcaccaggccataatactgcacgatgaatgggcaaactgcaggcctctgatgatcccatatgaattcgtatggttcatgt

SEQ ID NO: 5711 - DNA, 119 bp, homo sapiens
cttatagttgatgacgacgttgttcttggctgtcatgtagtcggctatgttgtggtccacgatgaggcgagcagcctgttgagcagagtcaagtcgatcttctcatacatcttctcaaa

SEQ ID NO: 5712 - DNA, 119 bp, homo sapiens
atgtagtcggctatgttgtggtccacgatgaggcgcagcagcctgttgagcagagtcaagtcgatcttccatacatcttctcaaagcgggattccagcatgacattgcactcgccttca

SEQ ID NO: 5713 - DNA, 119 bp, homo sapiens
gcagcagcctgttgagcagagtcaagtcgatcttctcatacatcttctcaaagcgggattccagcatgaattgcactcgccttcactcgtctcccacacgtcctgcaggttattgatgc

SEQ ID NO: 5714 - DNA, 119 bp, homo sapiens
cttgacaccacttgtaaacaagcagcggaggtggttctgtgtctgcaggcttaatccagggtgggaacagcggcgcttgtcggcttcataccacaggtactggtccaggtaagcatcag

SEQ ID NO: 5715 - DNA, 119 bp, homo sapiens
ctgtgtctgcaggcttaatccagggtgggaacaggcggcgcttgtcggcttcataccacaggtactggtcaggtaagcatcagttatcttctccaggggctcaacatcatatactggaa

SEQ ID NO: 5716 - DNA, 119 bp, homo sapiens
ggcgcttgtcggcttcataccacaggtactggtccaggtaagcatcagttatcttctccaggggctcaaatcatatactggaacgaggtggctatacagatccatgaactcaatgccca

SEQ ID NO: 5717 - DNA, 119 bp, homo sapiens
ctctttgaaggctctctgtgtgaggaggtgacgcttgatgcgggacagcgcctcgtgggggttatcgtagcctgctcgatcagacctagctcctccctctgagactggttcaaccgaga

SEQ ID NO: 5718 - DNA, 119 bp, homo sapiens
aaggctctctgtgtgaggaggtgacgcttgatgcgggacagcgcctcgtgggggttatcgtaggcctgccgatcagacctagctcctccctctgagactggttcaaccgagacttcaca

SEQ ID NO: 5719 - DNA, 119 bp, homo sapiens
ctataagcttccttgagccgctccaatgccaagatgagcaacttggtgtcatgcttataggagagtgggggaatgggatgggtgaaaacctgcggctttccaaccaatgcactgtggtg

SEQ ID NO: 5720 - DNA, 119 bp, homo sapiens
ggtgtcatgcttataggagagtggggggaatgggatgggtgaaaacctgcggctttccaaccaatgcacgtggtggtatatactgccactgcttcctccgctgtgatgtaaggcccgtc

SEQ ID NO: 5721 - DNA, 119 bp, homo sapiens
cttcaggtagttgtgctgccgctcctgttctgccttcagatagagccgggtgaggcggcccagattcttttacaaacagtcttgtccacagtggcccctcggcggatccgttctcggtt

SEQ ID NO: 5722 - DNA, 119 bp, homo sapiens
agccgggtgaggcggcccagattctttttacaaacagtcttgtccacagtggcccctcggcggatccgtctcggttgtagtgggcagtgttggtccaccagtcagccttggccttcacg

SEQ ID NO: 5723 - DNA, 119 bp, homo sapiens
ccacagtggcccctcggcggatccgttctcggttgtagtgggcagtgttggtccaccagtcagccttggcttcacgtatcgaaggatcatattctctatgggcgtcggcagcccaggga

SEQ ID NO: 5724 - DNA, 119 bp, homo sapiens
cttccagggaatgttggctttccagcagcgccaggcttcactgaggtgctgcaggattgtccgggccttttctgcttgatcccctcaggcatcatgtccagaatatcatgcatcacagc

SEQ ID NO: 5725 - DNA, 119 bp, homo sapiens
cactgaggtgctgcaggattgtccgggccttgttctgcttgatcccctcaggcatcatgtccagaatatatgcatcacagctgcccgcagctcaaggtcaaaatgtgactccactcgct

SEQ ID NO: 5726 - DNA, 119 bp, homo sapiens
ttgatcccctcaggcatcatgtccagaatatcatgcatcacagctgcccgcagctcaaggtcaaaatgtactccactcgctgctttgttactgtctttgccaccccctttgagtgtcga

SEQ ID NO: 5727 - DNA, 119 bp, homo sapiens
cttcaaactgccgggccaggaggttgccaagccatcgctctaataaaggggtaatgccacgcatgaaaagagccagactcgccaaccggcagcccagaagccacagccaggacccttcc

SEQ ID NO: 5728 - DNA, 119 bp, homo sapiens
ccgggccaggaggttgccaagccatcgctctaataaaggggtaatgccacgcatgaaaaagagccagaccgccaaccggcagcccagaagccacagccaggacccttccctacagggcc

SEQ ID NO: 5729 - DNA, 119 bp, homo sapiens
cgtgttgaaacgataatagatgagatgcttcaggtccttgcacatgcgaatctgtcgcatcagcttgtattgtatcgatacatgcccgtcaactgcccaacatgggcaaatatatactg

SEQ ID NO: 5730 - DNA, 119 bp, homo sapiens
atagatgagatgcttcaggtccttgcacatgcgaatctgtcgcatcagcttgtatttgtatcgatacatcccgtcaactgcccaacatgggcaaatatatactgcaatccatctgccag

SEQ ID NO: 5731 - DNA, 119 bp, homo sapiens
cttggtggtgagcgttttcacaggcttgaggttgaagttgtagtccaggtgcaggtagttgaggtttttcggtgaatgagaaggttgagcatgttgtagccctggcggcaaacctggag

SEQ ID NO: 5732 - DNA, 119 bp, homo sapiens
agttgtagtccaggtgcaggtagttgaggtttttgcggtgaatgagaaggttgagcatgttgtagccctgcggcaaacctggagcccaacctccacccagtccagctttgtggactgaa

SEQ ID NO: 5733 - DNA, 119 bp, homo sapiens
cggtgaatgagaaggttgagcatgttgtagccctggcggcaaacctggagcccaacctccacccagtccgctttgtggactgaaagaatttggtggctttgaaggagcggaacaaatac

SEQ ID NO: 5734 - DNA, 119 bp, homo sapiens
cagttcttgacaaggggtatgtccagggcccgacgggtgcgaccagagcgtaggttgaagggccgcgggcccagagcagggcaatgccattggctgtattgtctgtatagaggggtgtg

SEQ ID NO: 5735 - DNA, 119 bp, homo sapiens
ggtgcgaccagagcgtaggttgaagggccgcggggcccagagcagggcaatgccattggctgtattgtcgtatagaggggtgtgtccttcaggaagggctccacaaactccgggagctc

SEQ ID NO: 5736 - DNA, 119 bp, homo sapiens
cccagagcagggcaatgccattggctgtattgtctgtatagaggggtgtgtccttcaggaagggctccaaaactccgggagctcaaattcctcatcatcatccggcaatggttcctggc

SEQ ID NO: 5737 - DNA, 119 bp, homo sapiens
caggtgaggtggacatggtgtggaagattgttgtacaagtaaggaaaagcaatcttgtactcagtgcggtaggctgccggatgataatcttgttaatatcattgaattcattccagtct

SEQ ID NO: 5738 - DNA, 119 bp, homo sapiens
aggtggacatggtgtggaagattgttgtacaagtaaggaaaagcaatcttgtactcagtgcggataggcgccggatgataatcttgttaatatcattgaattcattccagtcttcatcc

SEQ ID NO: 5739 - DNA, 119 bp, homo sapiens
tgtaggttgatgtctcgaacaagaggttcaaatttggggcctccaggaatggccatattgagtgccttgacgtaaagaaggccttcaaatcaaacaggtagaagtagttgtcatccacc

SEQ ID NO: 5740 - DNA, 119 bp, homo sapiens
gaatggccatattgagtgccttggacgtaaagaaggccttcaaatcaaacaggtagaagtagttgtcatcaccaagtctgtcaggagctgattagccaggcggtagagagtcgacatca

SEQ ID NO: 5741 - DNA, 119 bp, homo sapiens
aaacaggtagaagtagttgtcatccaccaagtctgtcaggagctgattagccaggcggtagagagtcgaatcataggtagtgtgaactgccagcgctggtaagtggagccatttacata

SEQ ID NO: 5742 - DNA, 119 bp, homo sapiens
ttcctgctgtccctcaacggctggtggtcatagaaccagtccaacacaggggcgtcctcctcagggtccgctctagctgaatggcctccagtggctcaacatctaggatgttgtcagca

SEQ ID NO: 5743 - DNA, 119 bp, homo sapiens
gggcgtcctcctcagggtccagctctagctgaatggcctccagtggctcaacatctaggatgttgtcagatagtccaagggcggctcctcatcatcaaaagggggaaaacgcatcctct

SEQ ID NO: 5744 - DNA, 119 bp, homo sapiens
aacatctaggatgttgtcagcatagtccaagggcggctcctcatcatcaaaagggggaaaacgcatcctttgaaatgcctcctatctcttttttctcggcgcatcataatccacattga

SEQ ID NO: 5745 - DNA, 119 bp, homo sapiens
ccccactgggagatgtagacaggttcaatgacccagggaatctcattgacgaaggaaatggctccagtgtgtggtacagcacaggcacatcccgaatctgctcccaaggcataggcatg

SEQ ID NO: 5746 - DNA, 119 bp, homo sapiens
ttgacgaaggaaatggctccagtgatgtggtacagcacaggcacatcccgaatctgctcccaaggcatagcatgttctccaggagtttgaggactgcgtggggcatgtactttagggca

SEQ ID NO: 5747 - DNA, 119 bp, homo sapiens
cccaagtaaacccttttgtcatggcggaacttcctgttggtcatgtctccatggtctcgaatgatcttctgacatgttctgggggcatgtcttccttctgggcatccacaaacccaaac

SEQ ID NO: 5748 - DNA, 119 bp, homo sapiens
catggtctcgaatgatcttcctgacatgttctgggggcatgtcttccttctgggcatccacaaacccaacttccgcttttctgcatagcgcttggcctgcaattgctgccattttcgag

SEQ ID NO: 5749 - DNA, 119 bp, homo sapiens
tcatgcaaatgctgtttattgattttcagattgtagaatcaacctatggacaaagcacagaagatttagtttgcttacagagcagaaggtagatgttaacaacaaggaagatggaaaag

SEQ ID NO: 5750 - DNA, 119 bp, homo sapiens
aaagcacagaagatttagttttgcttacagagcagaaggtagatgttaacaacaaggaagatggaaaagaaagtacatcagaactttagggatacagttagcgctgggggaacccctgc

SEQ ID NO: 5751 - DNA, 119 bp, homo sapiens
acaaggaagatggaaaagtaaagtacatcagaactttagggatacagttagcgctgggggaacccctgcgggtggagacaagctctggggcagaagagaagcccaggaagcccttggca

SEQ ID NO: 5752 - DNA, 119 bp, homo sapiens
cgctgggggaacccctgctgggtggagacaagctctggggcagaagagaagcccaggaagcccttggcattgactacgtggccctgggctggatacttcgtcgcccccctgccccaccc

SEQ ID NO: 5753 - DNA, 119 bp, homo sapiens
cccaggaagcccttggcagttgactacgtggccctgggctggatacttcgtcgcccccctgccccacccacacacctgggtggtgctagaggatgtcgctggcgtgatagcccctcctc

SEQ ID NO: 5754 - DNA, 119 bp, homo sapiens
cgcccccctgccccaccccacacacctgggtggtgctagaggatgtcgctggcgtgatagcccctcctctacccgtcctttagggaggacgaagaggagggagagagttggaaggggaa

SEQ ID NO: 5755 - DNA, 119 bp, homo sapiens
gcgtgatagcccctcctcgtacccgtcctttagggaggacgaagaggagggagagagttggaaggggaagtcccaacgctgccatgctcatcagacacagaaggaggtcaccagactga

SEQ ID NO: 5756 - DNA, 119 bp, homo sapiens
agacccactaaagtcagtgggattctagagagctctaagtgtcctgcgtaaagttacaaaaatcaccgaatgacccccaaatgtaactatccaaaatggggagacagggaggggtatca

SEQ ID NO: 5757 - DNA, 119 bp, homo sapiens
gttacaaaaatcaccgagatgacccccaaatgtaactatccaaaatggggagacagggaggggtatcagcatgagaaaggatcagagcatcaaatcctcatttgtcattgacatggggt

SEQ ID NO: 5758 - DNA, 119 bp, homo sapiens
ttttaaattttaaaaagtgacaccacgatcctggtcaatcgaaccagaagtgaccaggccacttgctcctgcctgggtggctgtgggcctcagggggctcagtgctgcagcgagtgccc

SEQ ID NO: 5759 - DNA, 119 bp, homo sapiens
ttaaaaagtgacaccacgatcctggtcaatcgaaccagaagtgaccaggccacttgctccctgcctgggggctgtgggcctcagggggctcagtgctgcagcgagtgccctggggacgg

SEQ ID NO: 5760 - DNA, 119 bp, homo sapiens
gcgtggcaccctggctcagcatgttccggcagcgcagccgctcctcctcctgcttctccgccatgcggtctccagcagcctcagctccctgcgcaccgccttctgcatggacggctcca

SEQ ID NO: 5761 - DNA, 119 bp, homo sapiens
ctcctgcttctccgccatgcggttctccagcagcctcagctccctgcgcaccgccttctgcatggacggtccagctccagcactttctggaggtccgccttggcctcggcctcattcca

SEQ ID NO: 5762 - DNA, 119 bp, homo sapiens
cgcaccgccttctgcatggacggctccagctccagcactttctggaggtccgccttggcctcggcctcatccacacctctgcgtgagcccgggcacgcacgtagtaggccttcacgatg

SEQ ID NO: 5763 - DNA, 119 bp, homo sapiens
ctgggtggtgccggagaatatcactggtgtgctccagcacctcatagtactcctccttcttcagcaggcctggcagtagttgaggatcagagtattgatcatcttctccagcttcagcc

SEQ ID NO: 5764 - DNA, 119 bp, homo sapiens
actggtgtgctccagcacctcatagtactcctccttcttcagcaggcactggcagtagttgaggatcaggtattgatcatcttctccagcttcagccactgcacctcccatggcttctc

SEQ ID NO: 5765 - DNA, 119 bp, homo sapiens
cttggtctgcaggttccttaggcagatgatggcctcctggtacttggaagaggcctcctcgtagcggccagcttgaagagccgatttccctctccgtggaggacgggcaccgccttcat

SEQ ID NO: 5766 - DNA, 119 bp, homo sapiens
ctcgtagcggcccagcttgaagagccgatttccctctccgtggaggacgggcaccgccttcatcttctctgattgctcaggttccaggtctccctctggtaatcactcggggcatcaac

SEQ ID NO: 5767 - DNA, 119 bp, homo sapiens
ctgcagcagctcgatcacaaagaccagaggctgaggctccttctgcagctcgtccaggtcctcgtagccagcgtgtggtaggcgaacatgttggccagcccgcacgtgtgcacgtgcca

SEQ ID NO: 5768 - DNA, 119 bp, homo sapiens
ggctccttctgcagctcgtccaggtcctcgtagcccagcgtgtggtaggcgaacatgttggccagcccgacgtgtgcacgtgccactctgtggggtccttgccctgggccatctgcctc

SEQ ID NO: 5769 - DNA, 119 bp, homo sapiens
ccagcgtgtggtaggcgaacatgttggccagcccgcacgtgtgcacgtgccactctgtggggtccttgcctgggccatctgcctcaggctccgggataggatggggtagacccccgtgt

SEQ ID NO: 5770 - DNA, 119 bp, homo sapiens
gatggtgtcgcaccagaactcggccacctcgtgcacccgcatggaggtaagcaggatctcccagacctcagcttgaacatgtttccgatgatgatgtgcatgggctggcccacctgccg

SEQ ID NO: 5771 - DNA, 119 bp, homo sapiens
ccagacctcgagcttgaacatgtttccgatgatgatgtgcatgggctggcccacctgccgactgtcgtcatgactgtccgctcctcatcacatttcatggtgcggaaatgaaagatcac

SEQ ID NO: 5772 - DNA, 119 bp, homo sapiens
tcgggatccggtgatgaagtttgggagctcgcccgtgcccccgtgcagaatggttttcttgaccccttcacgttcaggagcagagcggcatccatggctgcaggagaaagggaggtgtc

SEQ ID NO: 5773 - DNA, 119 bp, homo sapiens
tgcccccgtgcagaatggttttcttgaccccttccacgttcaggagcagagcggcatccatggctgcagagaaagggaggtgtccagcacaggcggagataatctcacctccggggaag

SEQ ID NO: 5774 - DNA, 119 bp, homo sapiens
acgttcaggagcagagcggcatccatggctgcaggagaaagggaggtgtccagcacaggcggagataattcacctccggggaagacacttaggcggctgagactctgggatttacccag

SEQ ID NO: 5775 - DNA, 119 bp, homo sapiens
taaaggcaaagaaggtttttatttaagtgacaacatttgagagctaaaaaccagctcacatcaaaatcagacccagttgtaaaaatcttttaactccataatgctgtttttgtcttgtt

SEQ ID NO: 5776 - DNA, 119 bp, homo sapiens
acatcaaaatcaagacccagttgtaaaaatcttttaactccataatgctgtttttgtcttgttagaaattgatatcttacattagcgtttctaacggattttgtacaaggcagccataa

SEQ ID NO: 5777 - DNA, 119 bp, homo sapiens
cttgttagaaatctgatatcttacattagcgtttctaacggattttgtacaaggcagccataaggaataaataaacctttttcaccacagaaccatctgtcacagataatactgaaagt

SEQ ID NO: 5778 - DNA, 119 bp, homo sapiens
ccataaggaatataataaacctttttcaccacagaaccatctgtcacagataatactgaaagttacacattaggaacagtcagaccacagacaaggtcagactggctgccaccaccaag

SEQ ID NO: 5779 - DNA, 119 bp, homo sapiens
gaaagttacacacttaggaacagtcagaccacagacaaggtcagactggctgccaccaccaagtaaacactagaaaaggacagcggggtccaagggtgggggtccctgtgcacgagtcg

SEQ ID NO: 5780 - DNA, 119 bp, homo sapiens
accaagtaaacaactagaaaaggacagcggggtccaagggtgggggtccctgtgcacgagtcgccctccctggcctgccccccctcgggtcacctgtttctcctttgccccaaagaggg

SEQ ID NO: 5781 - DNA, 119 bp, homo sapiens
gagtcgccctcctctggcctgccccccctcgggtcacctgtttctcctttgccccaaagagggtggagtaaatgcagattttcctcccaactgcctgttagtgtctcaacaaggagagc

SEQ ID NO: 5782 - DNA, 119 bp, homo sapiens
agagggtggagtcaaatgcagattttcctcccaactgcctgttagtgtctcaacaaggagagcagagccaggtcaggcctcactgcttggacttaaccctaactatgatttttacgaag

SEQ ID NO: 5783 - DNA, 119 bp, homo sapiens
gagagcagagcccaggtcaggcctcactgcttggacttaaccctaactatgatttttacgaaggtttccccaagcccggaaggaaaggaaggagggaatgtttcttttggctgagccaa

SEQ ID NO: 5784 - DNA, 119 bp, homo sapiens
acgaaggtttcccccaagcccggaaggaaaggaaggagggaatgtttcttttggctgagccaaaagacataggtttccagggcacttggcacccaaaccccccccccccgcccgccgat

SEQ ID NO: 5785 - DNA, 119 bp, homo sapiens
agccaaaagacaataggtttccagggcacttggcacccaaaccccccccccccgcccgccgatgggattggtgggaaagttggttgtttaaggcggggtcagggcacccctcccggggc

SEQ ID NO: 5786 - DNA, 119 bp, homo sapiens
gccgatgggattcggtgggaaagttggttgtttaaggcggggtcagggcacccctcccggggctgcaccgggctaggggggagagtgaggatgcagaggacccacgtgcctcatgaaag

SEQ ID NO: 5787 - DNA, 119 bp, homo sapiens
cggggctgcacctgggctaggggggagagtgaggatgcagaggacccacgtgcctcatgaaagactccaggcacaggtatgggtcccaaaggggtaaaaatacagtttaaaaaccgtga

SEQ ID NO: 5788 - DNA, 119 bp, homo sapiens
tgaaagactccagggcacaggtatgggtcccaaaggggtaaaaatacagtttaaaaaccgtgagatccacctcgcctcttctagacagcccaccgccaggaatctctggaatactggga

SEQ ID NO: 5789 - DNA, 119 bp, homo sapiens
ccgtgagatccagcctcgcctcttctagacagcccaccgccaggaatctctggaatactgggattcaaaacatttgtttgctgtagcccagcacccagacaagagggccgttcatccca

SEQ ID NO: 5790 - DNA, 119 bp, homo sapiens
ctgggattcaaacacatttgtttgctgtagcccagcacccagacaagagggccgttcatcccaatgcataaaggagtctgcttttttaaaaaagaaatattttatggagcccaagggag

SEQ ID NO: 5791 - DNA, 119 bp, homo sapiens
atcccaatgcatgaaaggagtctgcttttttaaaaaagaaatattttatggagcccaagggagccgttggatctttaggaaaaaacccatgatgctggaagagcaggtcctgggctaag

SEQ ID NO: 5792 - DNA, 119 bp, homo sapiens
agggagccgttgagatctttaggaaaaaacccatgatgctggaagagcaggtcctgggctaaggatgcacctgaaccccaacagggcaaatgataaaggaaggtggcaggcaggccctc

SEQ ID NO: 5793 - DNA, 119 bp, homo sapiens
gctaaggatgcaccctgaaccccaacagggcaaatgataaaggaaggtggcaggcaggccctcggctacacagccaccggatcgggaagaacaaacatgccacgcaagaaacaaggagc

SEQ ID NO: 5794 - DNA, 119 bp, homo sapiens
gccctcggctacgacagccaccggatcgggaagaacaaacatgccacgcaagaaacaaggagctttggtaggcaggaagatctgtttccagctgctggagagcaggcataccagaagct

SEQ ID NO: 5795 - DNA, 119 bp, homo sapiens
aggagctttggtcaggcaggaagatctgtttccagctgctggagagcaggcataccagaagctagaaggttctctacaaaacagctggattgggggtcacagaactactcaaggagagg

SEQ ID NO: 5796 - DNA, 119 bp, homo sapiens
gaagctagaaggattctctacaaaacagctggattgggggtcacagaactactcaaggagaggcagcagaccccctccagagaacaacacaacttggttctttctccaacttaaccgga

SEQ ID NO: 5797 - DNA, 119 bp, homo sapiens
gagaggcagcagcaccccctccagagaacaacacaacttggttctttctccaacttaaccggacagacaaactgagcaaaccgctagtgtagaaagagcatatgcattacacagttgcc

SEQ ID NO: 5798 - DNA, 119 bp, homo sapiens
accggacagacaaaactgagcaaaccgctagtgtagaaagagcatatgcattacacagttgccgtgaaacagtactgaaacataccttgtctcgccactaaacagaaccgcaggtacac

SEQ ID NO: 5799 - DNA, 119 bp, homo sapiens
gttgccgtgaaagcagtactgaaacataccttgtctcgccactaaacagaaccgcaggtacacactcaccacgccaactacagctccagttgttgcgttcacaatatctcaccgtacac

SEQ ID NO: 5800 - DNA, 119 bp, homo sapiens
gtacacactcacacacgccaactacagctccagttgttgcgttcacaatatctcaccgtacaccatcagatcttgtgtgtgcatcatcagccaaagccccgatcctcctacctgattgc

SEQ ID NO: 5801 - DNA, 119 bp, homo sapiens
gtacaccatcagcatcttgtgtgtgcatcatcagccaaagccccgatcctcctacctgattgctgcttgaaccagagctgtttccaaaaggaaggggtggtggccctcctgctgggtcc

SEQ ID NO: 5802 - DNA, 119 bp, homo sapiens
gattgctgcttggaaccagagctgtttccaaaaggaaggggtggtggccctcctgctgggtcctgtgtccagctctgaccccagagccacagaaccctggtcacactgacttcaaattc

SEQ ID NO: 5803 - DNA, 119 bp, homo sapiens
gcctagcctggggttctcagggaagagggaatgtaactgggagcaaagtaccccatactaattattttacattttagtgtaaccagtgccttctgcaagaaggagatggtagagttttc

SEQ ID NO: 5804 - DNA, 119 bp, homo sapiens
tactaattattttatcattttagtgtaaccagtgccttctgcaagaaggagatggtagagttttcaagatcagactaagtctgcccaagtttaaatcaggatatttgggggaaggatta

SEQ ID NO: 5805 - DNA, 119 bp, homo sapiens
tagagttttcaagaatcagactaagtctgcccaagtttaaatcaggatatttgggggaaggattagggtggggtggctatgccatatgagctggtgcctttggaaagccaagaactgtg

SEQ ID NO: 5806 - DNA, 119 bp, homo sapiens
ggaaggattagggttggggtggctatgccatatgagctggtgcctttggaaagccaagaactgtgaaatttaaaggggggatgggcacctgtgaaccgccaggagacaggaccatagag

SEQ ID NO: 5807 - DNA, 119 bp, homo sapiens
tccgcactcctccccatagactcgccagcagccctgggcttgagtgcaggatgcagcactggaagtagacagaagagctggcagactgaagacacatttctagtggggagagcagggat

SEQ ID NO: 5808 - DNA, 119 bp, homo sapiens
tggaagtagagcagaagagctggcagactgaagacacatttctagtggggagagcagggatgggggttagagcccagacccctccagccccaggagggcacccaatttgccaggcaatt

SEQ ID NO: 5809 - DNA, 119 bp, homo sapiens
atgggggttaggagcccagacccctccagccccaggagggcacccaatttgccaggcaattcacaacggggtgccagccgcccccaccagcagcgtcactggctgcatgggagccgcga

SEQ ID NO: 5810 - DNA, 119 bp, homo sapiens
ttcacaacggcggtgccagccgcccccaccagcagcgtcactggctgcatgggagccgcgagaggtagaattgagcagaagcgacactgagctgacacaggtgcctgctgtgtatacag

SEQ ID NO: 5811 - DNA, 119 bp, homo sapiens
gagaggtagacattgagcagaagcgacactgagctgacacaggtgcctgctgtgtatacagacgtctggccctggggcagcctggctgaaattgctgggaccggccttgatggcagcct

SEQ ID NO: 5812 - DNA, 119 bp, homo sapiens
agacgtctgggccctggggcagcctggctgaaattgctgggaccggccttgatggcagcctatgggggccagtggccacgtgggcagccccacacagcaggtgtgggcctgggccaggg

SEQ ID NO: 5813 - DNA, 119 bp, homo sapiens
ctatgggggctcagtggccacgtgggcagccccacacagcaggtgtgggcctgggccagggagtcggggtttccaggatgcaggaaagcagtgcccaggccaaggttcagcagcaggag

SEQ ID NO: 5814 - DNA, 119 bp, homo sapiens
ggagtcggggttttccaggatgcaggaaagcagtgcccaggccaaggttcagcagcaggagggcctgagaggctttaggggccccagaagggccaagtcctgccaacctcaggggacta

SEQ ID NO: 5815 - DNA, 119 bp, homo sapiens
agggcctgagcaggctttaggggccccagaagggccaagtcctgccaacctcaggggactacccaggagaggttatgggcacaaactgagcagcaggggaaagggaagagaatacaaca

SEQ ID NO: 5816 - DNA, 119 bp, homo sapiens
tacccaggaggaggttatgggcacaaactgagcagcaggggaaagggaagagaatacaacagttggagcaaacttccaggaacccctagaaccctggaatctcagctctatgcctctgg

SEQ ID NO: 5817 - DNA, 119 bp, homo sapiens
cagttggagccaaacttccaggaacccctagaaccctggaatctcagctctatgcctctgggagccaaaaggataaaagggtcctggcagagctggggttatggggagcccaatcagta

SEQ ID NO: 5818 - DNA, 119 bp, homo sapiens
gggagccaaaaaggataaaagggtcctggcagagctggggttatggggagcccaatcagtaaccttttgcaggagagggaggtgggttgtccctaggacacccagtttgagtgggttgt

SEQ ID NO: 5819 - DNA, 119 bp, homo sapiens
taaccttttggcaggagagggaggtgggttgtccctaggacacccagtttgagtgggttgtccctgggaacgcagtgcaaggcaaaccagctgcacctctccgtggagtagggatccct

SEQ ID NO: 5820 - DNA, 119 bp, homo sapiens
gtccctgggacacgcagtgcaaggcaaaccagctgcacctctccgtggagtagggatcccttcccagccacccagagaggctcctttaagagcccctcctttccagcccacccagaccc

SEQ ID NO: 5821 - DNA, 119 bp, homo sapiens
cttcccagcccacccagagaggctcctttaagagcccctcctttccagcccacccagaccccctctcccggctgtgtgaaaggtgtgggtcacaggacactcggagggacccttaggcc

SEQ ID NO: 5822 - DNA, 119 bp, homo sapiens
cccctctcccaggctgtgtgaaaggtgtgggtcacaggacactcggagggacccttaggcctgaagagctcaatgggccaaactgcaggacatcttgggagtcaaagactcacaccaat

SEQ ID NO: 5823 - DNA, 119 bp, homo sapiens
agggagggcatgaggcagggctccgggaagaggaagccctggcctccagggccacagggaaatggtgagacactgaggacaacgggggttggggacaatggacagctgcaggacagacc

SEQ ID NO: 5824 - DNA, 119 bp, homo sapiens
gggaaatggtgaggacactgaggacaacgggggttggggacaatggacagctgcaggacagaccgtcagaccagaccccacccccgagggctgtggacagagacggcgtaacatgagcc

SEQ ID NO: 5825 - DNA, 119 bp, homo sapiens
gacagaccgtcagcaccagaccccacccccgagggctgtggacagagacggcgtaacatgagcccggggtgtgctctcactcccagaaagtggccatcttgccataagagcgccaaccc

SEQ ID NO: 5826 - DNA, 119 bp, homo sapiens
catgagcccggggatgtgctctcactcccagaaagtggccatcttgccataagagcgccaaccccaaaaggtgacccaaaccacaggaagggcgggcacaaatgccactcacacctcca

SEQ ID NO: 5827 - DNA, 119 bp, homo sapiens
gccaaccccaaaatggtgacccaaaccacaggaagggcgggcacaaatgccactcacacctccacaagaagcccagaggctgtgcctgccagcggcgcttggtgccgaggctggggctg

SEQ ID NO: 5828 - DNA, 119 bp, homo sapiens
cacctccacaagacagcccagaggctgtgcctgccagcggcgcttggtgccgaggctggggctgccccctgagggcctgcctagctcgctgtgaagcctggggacgcaggagggtggtc

SEQ ID NO: 5829 - DNA, 119 bp, homo sapiens
tggggctgcccccttgagggcctgcctagctcgctgtgaagcctggggacgcaggagggtggtcgacttgcccaaacgcttcagccccgggcaagcctgcccccaggatgacacaaaca

SEQ ID NO: 5830 - DNA, 119 bp, homo sapiens
gggtggtcgactttgcccaaacgcttcagccccgggcaagcctgcccccaggatgacacaaacatgaacctgacttgggcttgcggtcgcaggcccgtgggaggcagcagtggctgcac

SEQ ID NO: 5831 - DNA, 119 bp, homo sapiens
cacaaacatgaaccctgacttgggcttgcggtcgcaggcccgtgggaggcagcagtggctgcaccgagaccccggacctcaccccgtcgcagctcagggagccccccgggctcgggcag

SEQ ID NO: 5832 - DNA, 119 bp, homo sapiens
ggctgcaccgagatccccggacctcaccccgtcgcagctcagggagccccccgggctcgggcaggatcctccccgctctggtcggacactgctggacagacacgggagggaaaaagcag

SEQ ID NO: 5833 - DNA, 119 bp, homo sapiens
tcgggcaggatccctccccgctctggtcggacactgctggacagacacgggagggaaaaagcaggaaaagcctgtgtcggggagagggcagccccctcccgtccccgcaggcagcctga

SEQ ID NO: 5834 - DNA, 119 bp, homo sapiens
aaaagcaggaaaacgcctgtgtcggggagagggcagccccctcccgtccccgcaggcagcctgattgggcccccgctccctgctctgagcacagcccacccctcagggcaccgactcga

SEQ ID NO: 5835 - DNA, 119 bp, homo sapiens
cagcctgattgggccccccgctccctgctctgagcacagcccacccctcagggcaccgactcgaacttgggggcccacgcgcccagctgagcgccggcagcggccgctcgtggtctttg

SEQ ID NO: 5836 - DNA, 119 bp, homo sapiens
cgactcgaacttggggggcccacgcgcccagctgagcgccggcagcggccgctcgtggtctttgtccgatcgggctggctctgggcccgctcgggcttggggttggcggcgggcgggtc

SEQ ID NO: 5837 - DNA, 119 bp, homo sapiens
ggtctttgtccgactcgggctggctctgggcccgctcgggcttggggttggcggcgggcgggtcgggctctgcactgacatggttctgcgcaggtggttgcgcttccgcaggaactctg

SEQ ID NO: 5838 - DNA, 119 bp, homo sapiens
ggcgggtcgggctgctgcactgacatggttctgcgcaggtggttgcgcttccgcaggaactctggctgccgtgcagcccgaagctgcccttgcgcaggatcatgcgcgagttgttcttc

SEQ ID NO: 5839 - DNA, 119 bp, homo sapiens
gaactctggctgcgcgtgcagcccgaagctgcccttgcgcaggatcatgcgcgagttgttcttctttggcgtgagcggtggctggcctccagcgcggccaggtgtgcggcgtagccctc

SEQ ID NO: 5840 - DNA, 119 bp, homo sapiens
ctggcactgggtttggtacttcttggtgggccggcccacaatgaagatctgggaggcaggcaggcccagacgctgtagacagagatgtccttcgtggagccataggccgcactgatttt

SEQ ID NO: 5841 - DNA, 119 bp, homo sapiens
ggtttggtacttcttggtgggccggcccacaatgaagatctgggaggcaggcaggcccagcacgctgtaacagagatgtccttcgtggagccataggccgcactgattttgatgaagca

SEQ ID NO: 5842 - DNA, 119 bp, homo sapiens
ctcctgcatgaggttgcgcaggaagatggccttctgccgcagcgggtcatgcaccagcccatcggagaaaagatcatgccctgtgggaagttgtgctgggacagccacgacaccacccg

SEQ ID NO: 5843 - DNA, 119 bp, homo sapiens
tctgccgcagcgggtcatgcaccagcccatcggagaagaagatcatgccctgtgggaagttgtgctgggcagccacgacaccacccgctgcttctgcatgtccggccgtcccgtgatgt

SEQ ID NO: 5844 - DNA, 119 bp, homo sapiens
gagaagaagatcatgccctgtgggaagttgtgctgggacagccacgacaccacccgctgcttctgcatgccggccgtcccgtgatgtaaaggatcatgtagcccaagtcctgccagtgc

SEQ ID NO: 5845 - DNA, 119 bp, homo sapiens
cggacaacatccactgcacccggccggaccttggggtcgcttcccatgatagacacgctggccgcgaagacccatcaatgctgaacactacacactccatgcccctgggcaacaccgtg

SEQ ID NO: 5846 - DNA, 119 bp, homo sapiens
ttggggtcgcttcccatgatagacacgctggccgcgaaggacccatcaatgctgaacactacacactcctgcccctgggcaacaccgtgaggtagctcatggcacaggtctggtcgccc

SEQ ID NO: 5847 - DNA, 119 bp, homo sapiens
ctgacgaccatcttcacaggatagacaccaacccccaggcgccggggccgcggcacattgtatgtgatggaccactgctgttggtgatctctgtgtccaggtgtacccagcggcctgag

SEQ ID NO: 5848 - DNA, 119 bp, homo sapiens
aacccccaggcgccggggccgcggcacattgtatgtgatgcgaccactgctgttggtgatctctgtgtcaggtgtacccagcggcctgaggatggctctgccattactaggatgtccac

SEQ ID NO: 5849 - DNA, 119 bp, homo sapiens
ctgtctcaggatgaaggccaccacgtctgtggactcccagtaactggcgtggaagaggtggggcagggcacggtggggaaggccgtgaggacatcagggcagtacagggcatagtcgat

SEQ ID NO: 5850 - DNA, 119 bp, homo sapiens
tggactcccagtaactggcgtggaagaggtggggcagggccacggtggggaaggccgtgaggacatcaggcagtacagggcatagtcgatcctcttgcttccccaccacttggctgtga

SEQ ID NO: 5851 - DNA, 119 bp, homo sapiens
tgcgggaggcacccacgggtgccatgctgtccgaggactccgagctctcgctgtgggagctcccctcgccatcctccgtcctgggcgctggaacctcgaggcctgagggggcgaggcag

SEQ ID NO: 5852 - DNA, 119 bp, homo sapiens
ctccgagctctcgctgtgggagctcccctcgctcatcctccgtcctgggcgctggaacctcgaggcctggggggcgaggcaggggcatccagaagtggcgggctgtcccgggagctgcc

SEQ ID NO: 5853 - DNA, 119 bp, homo sapiens
ctccgtcctgggcgctggaacctcgaggcctgagggggcgaggcaggggcatccagaagtggcgggctgcccgggagctgccctccaggaagagggggctgtgggtgtgtagggcatca

SEQ ID NO: 5854 - DNA, 119 bp, homo sapiens
cgaggaggagggactgcccatcgcccagtgggaacctctggtagcgaggcacgctgacaggcggcaccagtggaacttgggctccagcagtggctcgagccgtgaggcagaggggtctg

SEQ ID NO: 5855 - DNA, 119 bp, homo sapiens
cgctgacaggcggcaccaggtggaacttgggctccagcagtggctcgagccgtgaggcagaggggtctggcaatggaagaagctgtagacctggctgcaggcaggacgcacctggaagc

SEQ ID NO: 5856 - DNA, 119 bp, homo sapiens
cgtccagcccaggcagcaccgtcctccgcatggccaggaccaggcccagtggcgagccgaagaggaagagtcggacacatcgaagtcaaagcggcccaggctgacctcagggagctgcg

SEQ ID NO: 5857 - DNA, 119 bp, homo sapiens
gagccgaagaggaagaagtcggacacatcgaagtcaaagcggcccaggctgacctcagggagctgcggcccccagccgccggggtctcagactcatcctttagcacgctggagtggatg

SEQ ID NO: 5858 - DNA, 119 bp, homo sapiens
cttgagaggaaggcatggtgctgggtgatggcctcgcagtcataggtggaggagtcgctctgtttccgcgcaacggcctcttgggctcctcatcctccaacccactggagatgtcaatg

SEQ ID NO: 5859 - DNA, 119 bp, homo sapiens
ctcgcagtcataggtggaggagtcgctctgtttccgcggcaacggcctcttgggctcctcatcctccaaccactggagatgtcaatgttgcttttgctgagacgcttgctgctggccag

SEQ ID NO: 5860 - DNA, 119 bp, homo sapiens
tccgcggcaacggcctcttgggctcctcatcctccaacccactggagatgtcaatgttgcttttgctgaacgcttgctgctggccaggctgcaatcttcctccaccgcgactggggtgt

SEQ ID NO: 5861 - DNA, 119 bp, homo sapiens
ctgggtgctgctgatgctccccttccggctgctgctggcagggctgtcccctgagggccccgcactgtacagatggcatcgaaggccaggaggccccccacacagtccccgatgagaca

SEQ ID NO: 5862 - DNA, 119 bp, homo sapiens
ggtgctgctgatgctccccttccggctgctgctggcagggctgtcccctgagggccccgcactgtagcaatggcatcgaaggccaggaggccccccacacagtccccgatgagacacac

SEQ ID NO: 5863 - DNA, 119 bp, homo sapiens
ctgcccactgaagccaatcccatcagaggacttcaggaactctctgtagacctggttggctcgctcgatacggtggcgacagcatcctggtactgcggggaggagatggccaacagggg

SEQ ID NO: 5864 - DNA, 119 bp, homo sapiens
ggaactctctgtagacctggttggctcgctcgatgacggtggcgacagcatcctggtactgcggggagggatggccaacaggggaagggcggccagagggacgtggtcctggctgctgc

SEQ ID NO: 5865 - DNA, 119 bp, homo sapiens
acggtggcgacagcatcctggtactgcggggaggagatggccaacaggggaagggcggccagagggacgggtcctggctgctgctgaggcagccctcatcgtggctgtaggggttcagg

SEQ ID NO: 5866 - DNA, 119 bp, homo sapiens
tgagagacaagcgagaaagcctcagagcagatggcaggacaggggacgaacttgatgaggatgtggcccgggcagcagggaaatgggctcgtgtgaccttctccagcacggagctgaag

SEQ ID NO: 5867 - DNA, 119 bp, homo sapiens
ggatgtggcccagggcagcagggaaatgggctcgtgtgaccttctccagcacggagctgaaggtgtggagtcggctgccttgcaggacgggtccccggcacccgtgtccaggatgtttc

SEQ ID NO: 5868 - DNA, 119 bp, homo sapiens
gaaggtgtggatgtcggctgccttgcaggacgggtccccggcacccgtgtccaggatgtttcccccatgaggaccagcaggaggacatgtgtcttgcaggagcgctgcgggcagccttc

SEQ ID NO: 5869 - DNA, 119 bp, homo sapiens
ctgcacggcccgccttggccatgtcccgggcggcgggctccggcggcgctacgcgcgctcctcgcgcttccgggcccggccccgaccgcctccggccccgaacggactccgagcgccgc

SEQ ID NO: 5870 - DNA, 119 bp, homo sapiens
cggcccgccttggccatgtcccgggcggcgggctccggcggcgctacgcgcgctcctcgcgcttcccggcccggccccgaccgcctccggccccgaacggactccgagcgccgcgcccg

SEQ ID NO: 5871 - DNA, 119 bp, homo sapiens
cagcctgctccgtctgtgttcgcagaagccggcaatgaccgcctgcgcccgccgagcgggtgggcttccgaccccgggctctgcggtcccgcgtggtgggctccgtccctgccccgcct

SEQ ID NO: 5872 - DNA, 119 bp, homo sapiens
tgttcacggtgggggtcctgggcccctgggcttgcgaccccatcttctctcgggctcgcccggacctggcgcccgcctggccgccgcccgcctgaaccgcgaccccggcctggcaggcg

SEQ ID NO: 5873 - DNA, 119 bp, homo sapiens
tcgcccggacctggccgcccgcctggccgccgcccgcctgaaccgcgaccccggcctggcaggcggtcccgcttcgaggtagcgctgctgcccgagccttgccggacgccgggctcgct

SEQ ID NO: 5874 - DNA, 119 bp, homo sapiens
ctggcaggcggtccccgcttcgaggtagcgctgctgcccgagccttgccggacgccgggctcgctggggccgtgtcctccgcgctggcccgcgtgtcgggcctcgtgggtccggtgaac

SEQ ID NO: 5875 - DNA, 119 bp, homo sapiens
cgggctcgctgggggccgtgtcctccgcgctggcccgcgtgtcgggcctcgtgggtccggtgaaccctgggcctgccggccagccgagctgctcgccgaagaagccgggatcgcgctgg

SEQ ID NO: 5876 - DNA, 119 bp, homo sapiens
tccggtgaaccctgcggcctgccggccagccgagctgctcgccgaagaagccgggatcgcgctggtgcctggggctgcccctggacgcaggcggagggcaccacggcccctgccgtgac

SEQ ID NO: 5877 - DNA, 119 bp, homo sapiens
atcgcgctggtgccctggggctgcccctggacgcaggcggagggcaccacggcccctgccgtgacccccccgcggatgccctctacgccctgcttcgcgcattcggctgggcgcgcgtg

SEQ ID NO: 5878 - DNA, 119 bp, homo sapiens
ctgccgtgacccccgccgcggatgccctctacgccctgcttcgcgcattcggctgggcgcgcgtggcccggtcaccgccccccaggacctgtgggtggaggcgggacgctcactgtcca

SEQ ID NO: 5879 - DNA, 119 bp, homo sapiens
ggcgcgcgtggccctggtcaccgccccccaggacctgtgggtggaggcgggacgctcactgtccacggcctcagggcccggggcctgcctgtcgcctccgtgacttccatggagccctt

SEQ ID NO: 5880 - DNA, 119 bp, homo sapiens
tcactgtccacggcactcagggcccggggcctgcctgtcgcctccgtgacttccatggagcccttggactgtctggagcccgggaggccctgaggaaggttcgggacgggcccagggtc

SEQ ID NO: 5881 - DNA, 119 bp, homo sapiens
cagtgatcatggtgatgcactcggtgctgctgggtggcgaggagcagcgctacctcctggaggccgcagggagctgggcctgaccgatggctccctggtcttcctgcccttcgacacga

SEQ ID NO: 5882 - DNA, 119 bp, homo sapiens
gcgctacctcctggaggccgcagaggagctgggcctgaccgatggctccctggtcttcctgcccttcgaacgatccactacgccttgtccccaggcccggaggccttggccgcactcgc

SEQ ID NO: 5883 - DNA, 119 bp, homo sapiens
tccctggtcttcctgcccttcgacacgatccactacgccttgtccccaggcccggaggccttggccgcatcgccaacagctcccagcttcgcagggcccacgatgccgtgctcaccctc

SEQ ID NO: 5884 - DNA, 119 bp, homo sapiens
caggcccggaggccttggccgcactcgccaacagctcccagcttcgcagggcccacgatgccgtgctcacctcacgcgccactgtccctctgaaggcagcgtgctggacagcctgcgca

SEQ ID NO: 5885 - DNA, 119 bp, homo sapiens
cagggcccacgatgccgtgctcaccctcacgcgccactgtccctctgaaggcagcgtgctggacagcctcgcagggctcaagagcgccgcgagctgccctctgacctcaatctgcagca

SEQ ID NO: 5886 - DNA, 119 bp, homo sapiens
gtctccccactctttggcaccatctatgacgcggtcttcttgctggcaaggggcgtggcagaagcgcggctgccgcaggtggcagatgggtgtccggagcagctgtggcccgccacatc

SEQ ID NO: 5887 - DNA, 119 bp, homo sapiens
cagaagcgcgggctgccgcaggtggcagatgggtgtccggagcagctgtggcccgccacatccgggatggcaggtccctggcttctgcggggacctaggaggagacgaggagcccccat

SEQ ID NO: 5888 - DNA, 119 bp, homo sapiens
catccgggatgcgcaggtccctggcttctgcggggacctaggaggagacgaggagcccccattcgtgctctagacacggacgcggcgggagaccggctttttgccacatacatgctgga

SEQ ID NO: 5889 - DNA, 119 bp, homo sapiens
ccattcgtgctgctagacacggacgcggcgggagaccggctttttgccacatacatgctggatcctgccggggctccttcctctccgccggtacccggatgcacttcccgcgtggggga

SEQ ID NO: 5890 - DNA, 119 bp, homo sapiens
tggatcctgcccggggctccttcctctccgccggtacccggatgcacttcccgcgtgggggatcagcaccggacctgacccctcgtgctggttcgatccaaacaacatctgcggtggag

SEQ ID NO: 5891 - DNA, 119 bp, homo sapiens
ctccaggagctccggcatgagaacgtggccctctacctggggcttttcctggctcggggagcagaaggcctgcggccctctgggagggcaacctggctgtggtctcagagcactgcacg

SEQ ID NO: 5892 - DNA, 119 bp, homo sapiens
ttttcctggctcggggagcagaaggccctgcggccctctgggagggcaacctggctgtggtctcagagcctgcacgcggggctctcttcaggacctcctcgctcagagagaaataaagc

SEQ ID NO: 5893 - DNA, 119 bp, homo sapiens
gggcaacctggctgtggtctcagagcactgcacgcggggctctcttcaggacctcctcgctcagagagaataaagctggactggatgttcaagtcctccctcctgctggaccttatcaa

SEQ ID NO: 5894 - DNA, 119 bp, homo sapiens
ggaataaggtatctgcaccatcgaggcgtggctcatgggcggctgaagtcacggaactgcatagtggatgcagattcgtactcaagatcactgaccacggccacgggagactgctggaa

SEQ ID NO: 5895 - DNA, 119 bp, homo sapiens
ggcggctgaagtcacggaactgcatagtggatggcagattcgtactcaagatcactgaccacggccacggagactgctggaagcacagaaggtgctaccggagcctcccagagcggagg

SEQ ID NO: 5896 - DNA, 119 bp, homo sapiens
accagctgtggacagccccggagctgcttagggacccagccctggagcgccggggaacgctggccggcgcgtctttagcttggccatcatcatgcaagaagtagtgtgccgcagtgccc

SEQ ID NO: 5897 - DNA, 119 bp, homo sapiens
gggacccagccctggagcgccggggaacgctggccggcgacgtctttagcttggccatcatcatgcaagagtagtgtgccgcagtgccccttatgccatgctggagctcactcccgagg

SEQ ID NO: 5898 - DNA, 119 bp, homo sapiens
aagtggtgcagagggtgcggagcccccctccactgtgtcggcccttggtgtccatggaccaggcacctgcgagtgtatcctcctgatgaagcagtgctgggcagagcagccggaacttc

SEQ ID NO: 5899 - DNA, 119 bp, homo sapiens
ccactgtgtcggcccttggtgtccatggaccaggcacctgtcgagtgtatcctcctgatgaagcagtgcgggcagagcagccggaacttcggccctccatggaccacaccttcgacctg

SEQ ID NO: 5900 - DNA, 119 bp, homo sapiens
ttcaagaacatcaacaagggccggaagacgaacatcattgactcgatgcttcggatgctggagcagtacctagtaacctggaggatctgatccgggagcgcacggaggagctggagctg

SEQ ID NO: 5901 - DNA, 119 bp, homo sapiens
gatgcttcggatgctggagcagtactctagtaacctggaggatctgatccgggagcgcacggaggagctgagctggaaaagcagaagacagaccggctgcttacacagatgctgcctcc

SEQ ID NO: 5902 - DNA, 119 bp, homo sapiens
gtctgtggctgaggccttgaagacggggacaccagtggagcccgagtactttgagcaagtgacactgtatttagtgacattgtgggcttcaccaccatctctgccatgagtgagcccat

SEQ ID NO: 5903 - DNA, 119 bp, homo sapiens
ggagcccgagtactttgagcaagtgacactgtactttagtgacattgtgggcttcaccaccatctctgcatgagtgagcccattgaggttgtggacctgctcaacgatctctacacact

SEQ ID NO: 5904 - DNA, 119 bp, homo sapiens
tagtgacattgtgggcttcaccaccatctctgccatgagtgagcccattgaggttgtggacctgctcaagatctctacacactctttgatgccatcattggttcccacgatgtctacaa

SEQ ID NO: 5905 - DNA, 119 bp, homo sapiens
gtggagacaataggggacgcctatatggtggcctcggggctgccccagcggaatgggcagcgacacgcgcagagatcgccaacatgtcactggacatcctcagtgccgtgggcactttc

SEQ ID NO: 5906 - DNA, 119 bp, homo sapiens
ggcagcgacacgcggcagagatcgccaacatgtcactggacatcctcagtgccgtgggcactttccgcagcgccatatgcctgaggttcccgtgcgcatccgcataggcctgcactcgg

SEQ ID NO: 5907 - DNA, 119 bp, homo sapiens
ggtctgggccctgctccctgtcccatctgcagtggaccccaggcacccccctttgaggaggtggggtgactgctccttggcagggatttgtgacactgcattgctgggctgtgttcctc

SEQ ID NO: 5908 - DNA, 119 bp, homo sapiens
ccccctttgaggaggtggggtgaactgctccttggcagggatttgtgacactgcattgctgggctgtgtcctcgggctcttctggaccttgcaccgtggataccaggccatgtgccatg

SEQ ID NO: 5909 - DNA, 119 bp, homo sapiens
gacactgcattgctgggctgtgttcctcgggctcttctggaccttgcaccgtggataccaggccatgtgcatggtatttgggtcctgggagggtgggtgaaataaaggcatgctgtctt

SEQ ID NO: 5910 - DNA, 119 bp, homo sapiens
gaacagaaaaggaaaaagtttattgaaaactatatacagttggtccagctcctaccatgggctgcaatccagccagtccctcccacaccttaggcagtgtcttggcccctcatggggag

SEQ ID NO: 5911 - DNA, 119 bp, homo sapiens
atgggctgcaatctcagccagtccctcccacaccttaggcagtgtcttggcccctcatggggagggatgggctaggcctagggcccagactcccttgggtggcttggcagctggagccc

SEQ ID NO: 5912 - DNA, 119 bp, homo sapiens
atggggagggatggggctaggcctagggcccagactcccttgggtggcttggcagctggagcccaccgtgatctttgtaaatttacaactctaaatggcctgaaggtagtgggcagggg

SEQ ID NO: 5913 - DNA, 119 bp, homo sapiens
tggagcccaccgtggatctttgtaaatttacaactctaaatggcctgaaggtagtgggcaggggacaggaatggatccctgcctgatctagtcacagccttgataggggaacactattc

SEQ ID NO: 5914 - DNA, 119 bp, homo sapiens
ggcaggggacagggaatggatccctgcctgatctagtcacagccttgataggggaacactattctgaaattgggcccaagtagggcccagctaagttgtccggaagtcctgactgctcc

SEQ ID NO: 5915 - DNA, 119 bp, homo sapiens
cactattctgaaacttgggcccaagtagggcccagctaagttgtccggaagtcctgactgctcctctcaaggccttcctagacgtggaggcaaacagcctccctacgaccccaccccat

SEQ ID NO: 5916 - DNA, 119 bp, homo sapiens
actgctcctctcacaggccttcctagacgtggaggcaaacagcctccctacgaccccaccccatgtagcggccgcatgggcttcatgggcttgactggggacaccaggtacccttcctc

SEQ ID NO: 5917 - DNA, 119 bp, homo sapiens
caccccatgtagcaggccgcatgggcttcatgggcttgactggggacaccaggtacccttcctcccaacttgactcagggtccggagctcctggagaactccccaagcagaggacttgg

SEQ ID NO: 5918 - DNA, 119 bp, homo sapiens
ccttcctcccaacattgactcagggtccggagctcctggagaactccccaagcagaggacttggggttgggggtgagcgttggggaggtcacagctcccagcccagaactggagcctcc

SEQ ID NO: 5919 - DNA, 119 bp, homo sapiens
ggacttggggttgaggggtgagcgttggggaggtcacagctcccagcccagaactggagcctcctggggcagggcagccgtggggtcagggtgtcccgctgtaggaatagtctgcttta

SEQ ID NO: 5920 - DNA, 119 bp, homo sapiens
gagcctcctggggtcagggcagccgtggggtcagggtgtcccgctgtaggaatagtctgctttattgtgatcaccagccggtcatccacgaagtagaagctgtcagactgggtctcata

SEQ ID NO: 5921 - DNA, 119 bp, homo sapiens
ctgctttattgtgcatcaccagccggtcatccacgaagtagaagctgtcagactgggtctcatacgggtgcggatcatctcgctgactgcaagagaggcccagccaggccgggcaaagg

SEQ ID NO: 5922 - DNA, 119 bp, homo sapiens
gtctcatacgggtggcggatcatctcgctgactgcaagagaggcccagccaggccgggcaaaggtcagggcttgagtcccgccactgcaggggcttcaggactggggtacagggacagc

SEQ ID NO: 5923 - DNA, 119 bp, homo sapiens
ggcaaaggtcaggagcttgagtcccgccactgcaggggcttcaggactggggtacagggacagccaaacgcctgaaatatccccagcctctttctctacggatgatatgggaatggtgg

SEQ ID NO: 5924 - DNA, 119 bp, homo sapiens
gggacagccaaacagcctgaaatatccccagcctctttctctacggatgatatgggaatggtggcagaccagaagagccccagggtggggagaaatgggatcagacccacaagtccctc

SEQ ID NO: 5925 - DNA, 119 bp, homo sapiens
aatggtggcagacacagaagagccccagggtggggagaaatgggatcagacccacaagtccctctccctccgcagctcagtctctagacgcccccacttccccactcccagaagaccct

SEQ ID NO: 5926 - DNA, 119 bp, homo sapiens
agtccctctccctcccgcagctcagtctctagacgcccccacttccccactcccagaagaccctgcccggcactcagctcctcggagagaggggggaagtcgtaaatgtgctcgcaggt

SEQ ID NO: 5927 - DNA, 119 bp, homo sapiens
aagaccctgcccgcgcactcagctcctcggagagaggggggaagtcgtaaatgtgctcgcaggtgttctgctgctggggatgcagaagccaaagtggaagtcgaagcttttgagtagct

SEQ ID NO: 5928 - DNA, 119 bp, homo sapiens
tcgcaggtgttcttgctgctggggatgcagaagccaaagtggaagtcgaagcttttgagtagctggttgggaagtagtgcctctcgatcatgcggaagttgttgacaggcttgtctccc

SEQ ID NO: 5929 - DNA, 119 bp, homo sapiens
caccggtgatccgctgcagccccagcacgtcctccggcccgatcggctgcttcctctgcagcggccccgcctgggccctgggcctgcgtccggctccgactcggacccagattcggatt

SEQ ID NO: 5930 - DNA, 119 bp, homo sapiens
gcagcggccccggcctgggccctgggcctgcgtccggctccgactcggacccagattcggattccgcagcggctgtggtatgggggccacgctctggcccgagggccccggagcggact

SEQ ID NO: 5931 - DNA, 119 bp, homo sapiens
cggattccgcaggcggctgtggtatgggggccacgctctggcccgagggccccggagcggactccgtcgcgtcccggccccaccgccgcccttcttcaccttcatggccttgcggggcc

SEQ ID NO: 5932 - DNA, 119 bp, homo sapiens
cggactccgtcgccgtcccggccccaccgccgcccttcttcaccttcatggccttgcggggccgaggctgcctgctgctgccgccgctgcctgcgccggctggagccgggggaagtggg

SEQ ID NO: 5933 - DNA, 119 bp, homo sapiens
gattgtgcacctgtgcctgcgaaaggctgaccagaagctggtgatcatcaagcagattccagtggaacaatgaccaaggaagagcggcaggcagcccagaatgagtgccaggtcctcaa

SEQ ID NO: 5934 - DNA, 119 bp, homo sapiens
atcatcaagcagattccagtggaacagatgaccaaggaagagcggcaggcagcccagaatgagtgccagtcctcaagctgctcaaccaccccaatgtcattgagtactacgagaacttc

SEQ ID NO: 5935 - DNA, 119 bp, homo sapiens
ggcaggcagcccagaatgagtgccaggtcctcaagctgctcaaccaccccaatgtcattgagtactacggaacttcctggaagacaaagcccttatgatcgccatggaatatgcaccag

SEQ ID NO: 5936 - DNA, 119 bp, homo sapiens
gcggcactctggctgagttcatccaaaagcgctgtaattccctgctggaggaggagaccatcctgcactcttcgtgcagatcctgcttgcactgcatcatgtgcacacccacctcatcc

SEQ ID NO: 5937 - DNA, 119 bp, homo sapiens
accatcctgcacttcttcgtgcagatcctgcttgcactgcatcatgtgcacacccacctcatcctgcacgagacctcaagacccagaacatcctgcttgacaaacaccgcatggtcgtc

SEQ ID NO: 5938 - DNA, 119 bp, homo sapiens
cctcatcctgcaccgagacctcaagacccagaacatcctgcttgacaaacaccgcatggtcgtcaagatggtgatttcggcatctccaagatccttagcagcaagagcaaggcctacac

SEQ ID NO: 5939 - DNA, 119 bp, homo sapiens
gtggtgggtaccccatgctatatctcccctgagctgtgtgagggcaagccctacaaccagaagagtgactctgggccctgggctgtgtcctctacgagctggccagcctcaagagggct

SEQ ID NO: 5940 - DNA, 119 bp, homo sapiens
ccatgctatatctcccctgagctgtgtgagggcaagccctacaaccagaagagtgacatctgggccctggctgtgtcctctacgagctggccagcctcaagagggctttcgaggctgcg

SEQ ID NO: 5941 - DNA, 119 bp, homo sapiens
aacttgccagcactggtgctgaagatcatgagtggcacctttgcacctatctctgaccggtacagccctagcttcgccagctggtcctgagtctactcagcctggagcctgcccagcgg

SEQ ID NO: 5942 - DNA, 119 bp, homo sapiens
acctatctctgaccggtacagccctgagcttcgccagctggtcctgagtctactcagcctggagcctgccagcggccaccactcagccacatcatggcacagcccctctgcatccgtgc

SEQ ID NO: 5943 - DNA, 119 bp, homo sapiens
tgagtctactcagcctggagcctgcccagcggccaccactcagccacatcatggcacagcccctctgcaccgtgccctcctcaacctccacaccgacgtgggcagtgtccgcatgcgga

SEQ ID NO: 5944 - DNA, 119 bp, homo sapiens
gtatcccccggggacctgtgaggccagccatcccaccaccactgtcgtcagtgtatgcctggggtggtggctgggcacccccctgcggctgccaatgctcaacacagaggtggtccagg

SEQ ID NO: 5945 - DNA, 119 bp, homo sapiens
cccaccaccactgtcgtcagtgtatgcctggggtggtgggctgggcacccccctgcggctgccaatgctaacacagaggtggtccaggtggcagctgggcgcacgcagaaagccggcgt

SEQ ID NO: 5946 - DNA, 119 bp, homo sapiens
ggtggtgggctgggcacccccctgcggctgccaatgctcaacacagaggtggtccaggtggcagctggggcacgcagaaagccggcgtcacgcgctctgggcgtctcatcctgtgggag

SEQ ID NO: 5947 - DNA, 119 bp, homo sapiens
gccccacccctaggtgcaggcggaggcagtctccttcctggggcagtggagcagccacagccccagttctctcgcgtttcctggagggccagtcgggtgtgaccatcaagcacgtggcc

SEQ ID NO: 5948 - DNA, 119 bp, homo sapiens
tccttcctggggcagtggagcagccacagccccagttcatctcgcgtttcctggagggccagtcgggtggaccatcaagcacgtggcctgtggggacttcttcactgcctgcctgactg

SEQ ID NO: 5949 - DNA, 119 bp, homo sapiens
gcagactggggctaggcaccagggagtcccacagctgcccccagcaggtgcccatgcccccaggacaggagctcagcgagttgtatgtggtatcgattcctccatgatcctcactgtgc

SEQ ID NO: 5950 - DNA, 119 bp, homo sapiens
cagctgcccccagcaggtgcccatgcccccaggacaggaagctcagcgagttgtatgtggtatcgattctccatgatcctcactgtgcctggccaagccctagcctgtgggagcaacag

SEQ ID NO: 5951 - DNA, 119 bp, homo sapiens
gttcaacaagctgggcctggaccacctctccctgggggaggagcctgtcccccaccagcaagtggaggagccctgagcttcacactactaggctctgcacccctggaccaggagcctct

SEQ ID NO: 5952 - DNA, 119 bp, homo sapiens
ctgtcccccaccagcaagtggaggaggccctgagcttcacactactaggctctgcacccctggaccagggcctctgctgagtatagacctgggcactgctcactcagctgctgtgactg

SEQ ID NO: 5953 - DNA, 119 bp, homo sapiens
cctcgggtgattgctacacttttggcagcaatcagcacggacagttgggcaccaatactcgccgaggcatcgggcaccctgtaaggtccaaggccttgagggcatcaagatggcaatgg

SEQ ID NO: 5954 - DNA, 119 bp, homo sapiens
gacagttgggcaccaatactcgccgaggcagtcgggcaccctgtaaggtccaaggccttgagggcatcagatggcaatggtagcctgtggggatgccttcactgtagctattggggcag

SEQ ID NO: 5955 - DNA, 119 bp, homo sapiens
agagcgaagtgtactcttggggcaaaggggcgcgaggtcgattgggaaggagggatgaggatgccggacccctcggccagtgcagttggatgagacacacccttacacggtgacttccg

SEQ ID NO: 5956 - DNA, 119 bp, homo sapiens
gattgggaaggagggatgaggatgccggactccctcggccagtgcagttggatgagacacacccttacaggtgacttccgtgtcctgttgccatggaaacaccctcctggctgttcgat

SEQ ID NO: 5957 - DNA, 119 bp, homo sapiens
cggtcacagatgagccggtccccccctgaggcacccggattcacctctggaccaccctgatattgcttccctctgaatgctctgaaaagtgcaggtgcccaaggcatgacttgcagctg

SEQ ID NO: 5958 - DNA, 119 bp, homo sapiens
gatattgcttctcctctgaatgctctgaaaagtgcaggtgcccaaggcatgacttgcagctgtctcctgattgtgtcatcatggggtatcagggctggcaaaacccctgctctgctttt

SEQ ID NO: 5959 - DNA, 119 bp, homo sapiens
gctgtctcctggattgtgtcatcatggggtatcagggctggcaaaacccctgctctgcttttggccttgatatggaaacctcaaccactttgttctcctaccacctctttgcccttcct

SEQ ID NO: 5960 - DNA, 119 bp, homo sapiens
ttttggccttggatatggaaacctcaaccactttgttctcctaccacctctttgcccttcctaccccttctcccttcagtcagtgtccccagggtccagcctggctagagttagaaggc

SEQ ID NO: 5961 - DNA, 119 bp, homo sapiens
tcctaccccttcctcccttcagtcagtgtccccagggtccagcctggctagagttagaaggcagacctacctttggaagcagggtggcctccagagccttgccataaaaaggctgaagg

SEQ ID NO: 5962 - DNA, 119 bp, homo sapiens
cgctataaaacccaggccggcaggatcgctgcacccgcggcggcctcctcggtgcgcgacccccggctcgaggactctttgctgtcccgcaagatgcggatgctgctggcgctcctggc

SEQ ID NO: 5963 - DNA, 119 bp, homo sapiens
acccgcggcggcctcctcggtgcgcgacccccggctcagaggactctttgctgtcccgcaagatgcggagctgctggcgctcctggccctctccgcggcgcggccatcggccagtgcag

SEQ ID NO: 5964 - DNA, 119 bp, homo sapiens
tgccagtcaagtggggtggaaactgccagaaggaccgccagtcccccatcaacatcgtcaccaccaaggaaaggtggacaaaaaactgggacgcttcttcttctctggctacgataaga

SEQ ID NO: 5965 - DNA, 119 bp, homo sapiens
gccagtcccccatcaacatcgtcaccaccaaggcaaaggtggacaaaaaactgggacgcttcttcttcttggctacgataagaagcaaacgtggactgtccaaaataacgggcactcag

SEQ ID NO: 5966 - DNA, 119 bp, homo sapiens
tgatgatgttgctggagaacaaggccagcatttctggaggaggactgcctgccccataccaggccaaacgttgcacctgcactggtccgacttgccatataagggctcggagcacagcc

SEQ ID NO: 5967 - DNA, 119 bp, homo sapiens
agcatttctggaggaggactgcctgccccataccaggccaaacagttgcacctgcactggtccgacttgcatataagggctcggagcacagcctcgatggggagcactttgccatggag

SEQ ID NO: 5968 - DNA, 119 bp, homo sapiens
agatgagcactacgatggcagagagcagcctgttggacctgctccccaaggaggagaaactgaggcactcttccgctacctgggctcactcaccacaccgacctgcgatgagaaggtcg

SEQ ID NO: 5969 - DNA, 119 bp, homo sapiens
cccaaggaggagaaactgaggcactacttccgctacctgggctcactcaccacaccgacctgcgatgagaggtcgtctggactgtgttccgggagcccattcagcttcacagagaacag

SEQ ID NO: 5970 - DNA, 119 bp, homo sapiens
atcctggcattctctcagaagctgtactacgacaaggaacagacagtgagcatgaaggacaatgtcaggccctgcagcagctggggcagcgcacggtgataaagtccggggccccgggt

SEQ ID NO: 5971 - DNA, 119 bp, homo sapiens
gcatgaaggacaatgtcaggcccctgcagcagctggggcagcgcacggtgataaagtccggggccccggtcggccgctgccctgggccctgcctgccctgctgggccccatgctggcct

SEQ ID NO: 5972 - DNA, 119 bp, homo sapiens
gataaagtccggggccccgggtcggccgctgccctgggccctgcctgccctgctgggccccatgctggctgcctgctggccggcttcctgcgatgatggctcacttctgcacgcagcct

SEQ ID NO: 5973 - DNA, 119 bp, homo sapiens
ctgctgggccccatgctggcctgcctgctggccggcttcctgcgatgatggctcacttctgcacgcagctctctgttgcctcagctctccaagttccaggcttccggtccttagccttc

SEQ ID NO: 5974 - DNA, 119 bp, homo sapiens
ggctcacttctgcacgcagcctctctgttgcctcagctctccaagttccaggcttccggtccttagcctcccaggtgggactttaggcatgattaaaatatggacatatttttggagaa

SEQ ID NO: 5975 - DNA, 119 bp, homo sapiens
agccgcctccccgtcgacgcccagggctggggcgagccaggctgcctttcgaacttggggggcttctcccttgtctcccactggtgctctggctgtgaatccatccaggggccaggatg

SEQ ID NO: 5976 - DNA, 119 bp, homo sapiens
ttggggggcttctcctcttgtctcccactggtgctctggctgtgaatccatccaggggccaggatgacatccgacaccaaggccagcagtacaggccgaggatggcatttctccaaaag

SEQ ID NO: 5977 - DNA, 119 bp, homo sapiens
gctgttcctggccccgggggcgaggcgctggatcaacatagatggcaaaaccatggacatcacagtgaagggctgaagcacccccaccgctatgtgctggacgccgcacaaacccacat

SEQ ID NO: 5978 - DNA, 119 bp, homo sapiens
gcgaggcgctggatcaacatagatggcaaaaccatggacatcacagtgaaggggctgaagcacccccacgctatgtgctggacgccgcacaaacccacatttacatgctcatgaagaag

SEQ ID NO: 5979 - DNA, 119 bp, homo sapiens
ctccaccctcccttttatgcggcgtcacctgcgctccagcccaagccctgtcatcctgagacagctggagaggaagccaaggcccgagaagcagccaacactgtggacatcacccaggt

SEQ ID NO: 5980 - DNA, 119 bp, homo sapiens
ctgagacagctggaagaggaagccaaggcccgagaagcagccaacactgtggacatcacccaggtcatggcaagctggaccgcaggagccaactccaaaaagagctgcctcctaaataa

SEQ ID NO: 5981 - DNA, 119 bp, homo sapiens
ccgggccagcacatggctcccagcccccatctgaccgtgtacaccgggacctgcatgcccccgtctcctctagccccttctcctcctcctgccgctcccccaggaagcctttcgcctca

SEQ ID NO: 5982 - DNA, 119 bp, homo sapiens
gcatgcccccgtctccttctagccccttctcctcctcctgccgctcccccaggaagcctttcgcctcaccagccgcttcatccggcgacccagcaccaccatctgcccctcacccatca

SEQ ID NO: 5983 - DNA, 119 bp, homo sapiens
gaagcctttcgcctcacccagccgcttcatccggcgacccagcaccaccatctgcccctcacccatcaggtggccttggagagctcatcgggcttggagcagaaaggggagtgcagcgg

SEQ ID NO: 5984 - DNA, 119 bp, homo sapiens
tgcccctcacccatcagagtggccttggagagctcatcgggcttggagcagaaaggggagtgcagcgggccatggccccccgtgggccctctgtcaccgagagcagcgaggcctccctc

SEQ ID NO: 5985 - DNA, 119 bp, homo sapiens
aaggggagtgcagcgggtccatggccccccgtgggccctctgtcaccgagagcagcgaggcctccctcgcacctcctggcctcgcagccggcccagggcccctcctaaggcccgcatgg

SEQ ID NO: 5986 - DNA, 119 bp, homo sapiens
cagcgaggcctccctcgacacctcctggcctcgcagccggcccagggcccctcctaaggcccgcatggcctgtccttcagcaggtttctgagacgaggctgtctggcctcacctgtctt

SEQ ID NO: 5987 - DNA, 119 bp, homo sapiens
cctaaggcccgcatggctctgtccttcagcaggtttctgagacgaggctgtctggcctcacctgtctttccaggctctcacccaagtgccctgctgtgtcccacgggagggtgcagccc

SEQ ID NO: 5988 - DNA, 119 bp, homo sapiens
tggcctcacctgtctttgccaggctctcacccaagtgccctgctgtgtcccacgggagggtgcagccccgggggacgtgggccagcagctgccacgattgaaatccaagagagtagcaa

SEQ ID NO: 5989 - DNA, 119 bp, homo sapiens
ctttttccagatcaaaatggatgtgcccacggggagcgggacctgcttgatggactcggaggatgctggacaggagagtcgggtgaccgggccacagaaaaggaggtcatctgcccctg

SEQ ID NO: 5990 - DNA, 119 bp, homo sapiens
ggactcggaggatgctggaacaggagagtcgggtgaccgggccacagaaaaggaggtcatctgcccctggagagcctgtaaggaaagaggcaggctgagctgggggctctggaccagga

SEQ ID NO: 5991 - DNA, 119 bp, homo sapiens
ggaggtcatctgcccctgggagagcctgtaaggaaagaggcaggctgagctgggggctctggaccaggagatgctctgacagatgccatggtatgggccacaggacacacttgctcgag

SEQ ID NO: 5992 - DNA, 119 bp, homo sapiens
gggggctctggaccaggaagatgctctgacagatgccatggtatgggccacaggacacacttgctcgagaccaaagtgcatttgggtgacatttgaagattggggagacaagatggggt

SEQ ID NO: 5993 - DNA, 119 bp, homo sapiens
aggacacacttgctcgagaaccaaagtgcatttgggtgacatttgaagattggggagacaagatggggtgattgtggcaaagaatgctctggctggttaccaggggccaactccttctc

SEQ ID NO: 5994 - DNA, 119 bp, homo sapiens
ggggagacaagatggggtagattgtggcaaagaatgctctggctggttaccaggggccaactccttctctcttcctgaccctccctcccctgggcagaagaaacgcatgtggaccagaa

SEQ ID NO: 5995 - DNA, 119 bp, homo sapiens
aggggccaactccttctcctcttcctgaccctccctcccctgggcagaagaaacgcatgtggaccagaaactttccctgctgccttaaaaccaataaaaggttaactttaagtttcttg

SEQ ID NO: 5996 - DNA, 119 bp, homo sapiens
acgatactgatagagaacattctctacaaaagtggcaatgagcctgcaggagggattcggggtacagtgtgggagcacagagcctgctccaccccagcaccagaagaaccaggaggggc

SEQ ID NO: 5997 - DNA, 119 bp, homo sapiens
tcggggtacagtggtgggagcacagagcctgctccaccccagcaccagaagaaccaggaggggctgcggagtaaacggacgaggaacaggagagaaggggcagcacctggggctctggg

SEQ ID NO: 5998 - DNA, 119 bp, homo sapiens
ggaggggctgcggcagtaaacggacgaggaacaggagagaaggggcagcacctggggctctgggagaaaaagtcggcacttgggggtggccccaggctcaggcccagagaacagggaga

SEQ ID NO: 5999 - DNA, 119 bp, homo sapiens
gctctgggagaaacaagtcggcacttgggggtggccccaggctcaggcccagagaacagggagaagagcgtggtgggctccagatggcggtggcaggcagccaagccctcagtgtcctg

SEQ ID NO: 6000 - DNA, 119 bp, homo sapiens
cagggagaagagctgtggtgggctccagatggcggtggcaggcagccaagccctcagtgtcctgcagtagacagggaccatctcctccatgccccctactctgggcacatgtgtgggaa

SEQ ID NO: 6001 - DNA, 119 bp, homo sapiens
gtgtcctgcagtaggacagggaccatctcctccatgccccctactctgggcacatgtgtgggaatgggacccccagacagaccagaaagaggcctttgagggctctctttcccctgccc

SEQ ID NO: 6002 - DNA, 119 bp, homo sapiens
tgtgggaatgggaacccccagacagaccagaaagaggcctttgagggctctctttcccctgccccagcctgggggccccaggagatgctgggggctgaggccatgctcccagcaggagc

SEQ ID NO: 6003 - DNA, 119 bp, homo sapiens
ccctgccccagccatgggggccccaggagatgctgggggctgaggccatgctcccagcaggagctgcttccaagctgaggtcagggatggggggccatggctgagaaaggaggagagca

SEQ ID NO: 6004 - DNA, 119 bp, homo sapiens
gcaggagctgcttcccaagctgaggtcagggatggggggccatggctgagaaaggaggagagcacctctcatggggtgcaaaggggcgcacacgtgtcagcgggctcatcagggactct

SEQ ID NO: 6005 - DNA, 119 bp, homo sapiens
ggagagcacctctgcatggggtgcaaaggggcgcacacgtgtcagcgggctcatcagggactctcccactctgtgacctcagtctggctggagagctttgggggcatacgtcagaggac

SEQ ID NO: 6006 - DNA, 119 bp, homo sapiens
gggactctcccacatctgtgacctcagtctggctggagagctttgggggcatacgtcagaggacacatgtgtgaccaccctctgagctggcctttcccctggtctcaccaccatcagag

SEQ ID NO: 6007 - DNA, 119 bp, homo sapiens
cagaggacacatgctgtgaccaccctctgagctggcctttcccctggtctcaccaccatcagagggctggacacaggtgagctctcttacccccgatccacgcagaatcacgcaacagc

SEQ ID NO: 6008 - DNA, 119 bp, homo sapiens
catcagagggctgggacacaggtgagctctcttacccccgatccacgcagaatcacgcaacagcccagtcctaccagacctggagggaaacctaccaaacaccacccaacgtgagtgtg

SEQ ID NO: 6009 - DNA, 119 bp, homo sapiens
gccctggtgacctggggacaatctgcagtttagaggatccactttctccagtgtccacatcgcaggactacccaccccaggcctgacacccagccacaccctgttctgcctgtcccagg

SEQ ID NO: 6010 - DNA, 119 bp, homo sapiens
catcgcaggacttacccaccccaggcctgacacccagccacaccctgttctgcctgtcccaggcctggggactgaggaggttggcggacacctttctctagcccagcgcatgcctgcca

SEQ ID NO: 6011 - DNA, 119 bp, homo sapiens
cccaggcctgggagactgaggaggttggcggacacctttctctagcccagcgcatgcctgccaggcctggggctataatactgcagcccattggtctagcaccttgcatctagcgccct

SEQ ID NO: 6012 - DNA, 119 bp, homo sapiens
ctgccaggcctgggggctataatactgcagcccattggtctagcaccttgcatctagcgccctggcccttggggtccctggggggccaggctgcacaacgaaaaagggggaggttggag

SEQ ID NO: 6013 - DNA, 119 bp, homo sapiens
cgccctggccctctggggtccctggggggccaggctgcacaacgaaaaagggggaggttggaggaagacggccaggctccacccctggatgagctgggaagggcgtcagtacccccacc

SEQ ID NO: 6014 - DNA, 119 bp, homo sapiens
ttggaggaagacaggccaggctccacccctggatgagctgggaagggcgtcagtacccccaccccacccaacccggctttccagctccgggccttgaccactaggtgaaggagggggag

SEQ ID NO: 6015 - DNA, 119 bp, homo sapiens
cccaccccaccccaacccggctttccagctccgggccttgaccactaggtgaaggagggggagctggcttgcttgggatggggtacagactgaaagttggggcatttggctgaagagtc

SEQ ID NO: 6016 - DNA, 119 bp, homo sapiens
ggggagctggctatgcttgggatggggtacagactgaaagttggggcatttggctgaagagtctggctgggaacttcccctctggggtggacgggaggaggggaggcagcccaaactct

SEQ ID NO: 6017 - DNA, 119 bp, homo sapiens
agagtctggctgaggaacttcccctctggggtggacgggaggaggggaggcagcccaaactcttcccttacaacaatgcaggaagtgagcaagtctctggcctgagcacaagagaacaa

SEQ ID NO: 6018 - DNA, 119 bp, homo sapiens
aactcttcccttcacaacaatgcaggaagtgagcaagtctctggcctgagcacaagagaacaagaccataggggaggggtgggagaggcctacggcgcccgggacaggtgcaccctccc

SEQ ID NO: 6019 - DNA, 119 bp, homo sapiens
gaacaagaccatcaggggaggggtgggagaggcctacggcgcccgggacaggtgcaccctcccgcatcccctcccacactctcatccagttccgatgcccctgccctccctctggggca

SEQ ID NO: 6020 - DNA, 119 bp, homo sapiens
cctcccgcatccacctcccacactctcatccagttccgatgcccctgccctccctctggggcaggcctccccaagtctacatgtcctttacggctgctcagaatgggtggctcagggcc

SEQ ID NO: 6021 - DNA, 119 bp, homo sapiens
ggggcaggcctcccccaagtctacatgtcctttacggctgctcagaatgggtggctcagggccttcaagcccctcagaactggagttccggaacattctcttgcccctctggtgcctcc

SEQ ID NO: 6022 - DNA, 119 bp, homo sapiens
agggccttcaagacccctcagaactggagttccggaacattctcttgcccctctggtgcctccaggccaaccctcagcttcaaggtgcagacagactttcaaaggagtcgccccaactg

SEQ ID NO: 6023 - DNA, 119 bp, homo sapiens
gcctccaggccacaccctcagcttcaaggtgcagacagactttcaaaggagtcgccccaactggtccttctcctggggaagggggctgcagggctggcaactgtgaggacctcgagacc

SEQ ID NO: 6024 - DNA, 119 bp, homo sapiens
caactggtccttgctcctggggaagggggctgcagggctggcaactgtgaggacctcgagaccccaccaaggttgtggcaacttgcaattcattttggtctggggagaggagcccccgg

SEQ ID NO: 6025 - DNA, 119 bp, homo sapiens
agctctgtgtcctccagggccggcgggcgctccatcgcctgccgccgcctcctcacggcccccaagatctctttcggggccccagtgggacgctgatgctgcggaggtcgaggtcagag

SEQ ID NO: 6026 - DNA, 119 bp, homo sapiens
gcccccaagatcttctttcggggccccagtgggacgctgatgctgcggaggtcgaggtcagagcacagctcaaagcctcgaggtcgatcttctcctgccgcaggagggcggcaaagtcc

SEQ ID NO: 6027 - DNA, 119 bp, homo sapiens
tcagagcacagcatcaaagcctcgaggtcgatcttctcctgccgcaggagggcggcaaagtcctccatggcagagaggccaggaaggtctccagcgggctagtctcgggctccaggtcc

SEQ ID NO: 6028 - DNA, 119 bp, homo sapiens
aagtcctccatgtgcagagaggccaggaaggtctccagcgggctagtctcgggctccaggtcctcgtccagcctaaatcgagctcatcccagggcagctcctccccacagctgcggtcc

SEQ ID NO: 6029 - DNA, 119 bp, homo sapiens
aggtcctcgtccaagcctaaatcgagctcatcccagggcagctcctccccacagctgcggtcctgcaggtgttggcactgcccaggctgtcatcgtccaggctgggggagctctgcagc

SEQ ID NO: 6030 - DNA, 119 bp, homo sapiens
cggtcctgcaggctgttggcactgcccaggctgtcatcgtccaggctgggggagctctgcagccgacccgcggcgctcccaccccatccagacccccatcctcgcggcccagtccgtgc

SEQ ID NO: 6031 - DNA, 119 bp, homo sapiens
tgcagccgaccccgcggcgctcccaccccatccagacccccatcctcgcggcccagtccgtgcagcccatgctcaagtaatttctgcggaacaccatggtgcccaggccggggcgggta

SEQ ID NO: 6032 - DNA, 119 bp, homo sapiens
ccgtgcagcccactgctcaagtaatttctgcggaacaccatggtgcccaggccggggcgggtaaacaggagtcgtggcctgagtcggtgctgacctccgagtgggcaggctcggccgcc

SEQ ID NO: 6033 - DNA, 119 bp, homo sapiens
cgggtaaacagggagtcgtggcctgagtcggtgctgacctccgagtgggcaggctcggccgccagcgtgcacgggagacgctgtcctcgtccgagaggaacatgtcccggagcggggct

SEQ ID NO: 6034 - DNA, 119 bp, homo sapiens
gccgccagcgtggcacgggagacgctgtcctcgtccgagaggaacatgtcccggagcggggctcggcccactccttgggattggcgtaggtgccctggcgcacgaacatcacgtcgctg

SEQ ID NO: 6035 - DNA, 119 bp, homo sapiens
ggggctcggccccactccttgggattggcgtaggtgccctggcgcacgaacatcacgtcgctgcccagcgcaggcccgagagcgagcgggcgctcttgcgcccatcctcggagaccttg

SEQ ID NO: 6036 - DNA, 119 bp, homo sapiens
tcgctgcccagctgcaggcccgagagcgagcgggcgctcttgcgcccatcctcggagaccttgaaggtgcttcgccgccctgcttgcgccgctccagcttcttctgcatcttggtcttg

SEQ ID NO: 6037 - DNA, 119 bp, homo sapiens
accttgaaggtgccttcgccgccctgcttgcgccgctccagcttcttctgcatcttggtcttgcccctgccgtgccgtgcagcgtggcctgagagtacggcaggtggctgcccagcgcc

SEQ ID NO: 6038 - DNA, 119 bp, homo sapiens
gtcttgcccctggccgtgccgtgcagcgtggcctgagagtacggcaggtggctgcccagcgccagatgcgcagccggcggctcagggtgctggacgtgaggctggagaagctgagggtg

SEQ ID NO: 6039 - DNA, 119 bp, homo sapiens
agcgccagatgctgcagccggcggctcagggtgctggacgtgaggctggagaagctgagggtgtcggaagctcggccagctcgcgccggtatcgccgctccatgcgttcgtggtgcctc

SEQ ID NO: 6040 - DNA, 119 bp, homo sapiens
agggtgtcggaacgctcggccagctcgcgccggtatcgccgctccatgcgttcgtggtgcctccgctgcgcttggcgcactcgcggatgcgccgctccgcctcgcggaaggccttgtcc

SEQ ID NO: 6041 - DNA, 119 bp, homo sapiens
tgcctccgctgcagcttggcgcactcgcggatgcgccgctccgcctcgcggaaggccttgtccttcagctacccaccagcttggggttgaggctgctctgcttggccgcgatggagtcc

SEQ ID NO: 6042 - DNA, 119 bp, homo sapiens
ttgtccttcagcttacccaccagcttggggttgaggctgctctgcttggccgcgatggagtccaggtaggcacgcattccatgtggcccttcatggcagccatgtccagcggcgtgtgg

SEQ ID NO: 6043 - DNA, 119 bp, homo sapiens
gagtccaggtagcgcacgcattccatgtggcccttcatggcagccatgtccagcggcgtgtggtagtcgtgtctaggcaccagatgttggctccgaaggacaccaggaaggacaggcag

SEQ ID NO: 6044 - DNA, 119 bp, homo sapiens
gtgtggtagtcgttgtctaggcaccagatgttggctccgaaggacaccaggaaggacaggcagtgcaagggccattggaagctgccagatgcaggggtgtgttgccccagatgtcacac

SEQ ID NO: 6045 - DNA, 119 bp, homo sapiens
ccgcggctcacaatgagacgcagcgactcgaggttgccatggtaggcagcccagagagtgggggtcatgcatcctcgtcgggggcattcagctcctttcgggtggcctccttgaggagc

SEQ ID NO: 6046 - DNA, 119 bp, homo sapiens
cagcccagagagtgggggtcatgccatcctcgtcgggggcattcagctcctttcgggtggcctccttgagagctccaggtagccatcccgggctgcccggtggtactggtcgttcatgg

SEQ ID NO: 6047 - DNA, 119 bp, homo sapiens
ctcctttcgggtggcctccttgaggagctccaggtagccatcccgggctgcccggtggtactggtcgttatggcgcccgaagtggacggggcgggcgggggacacggagaaaggccccc

SEQ ID NO: 6048 - DNA, 119 bp, homo sapiens
gctgcccggtggtactggtcgttcatggcgcccgaagtggacggggcgggcgggggacacggagaaaggcccccgcaggggagggcggcggtattagggctgaggcatgaggttggagg

SEQ ID NO: 6049 - DNA, 119 bp, homo sapiens
atagacagggccgactgccggccaggaggagggtggggtggggaaagccctcggccctcggagctgaggtgagacccaggcatgtggtcccgccgacctgctgcccagcagcccggatc

SEQ ID NO: 6050 - DNA, 119 bp, homo sapiens
gaaagccctcggccctcggagctgagggtgagacccaggcatgtggtcccgccgacctgctgcccagcacccggatcccccggggctgccctggtggccaaggcaggtggagctagcgg

SEQ ID NO: 6051 - DNA, 119 bp, homo sapiens
gtggtcccgccgacctgctgcccagcagcccggatcccccggggctgccctggtggccaaggcaggtgggctagcggtcgaggtttctggactgaggcccctcccccagtgcggtcatc

SEQ ID NO: 6052 - DNA, 119 bp, homo sapiens
ggctgccctggtggccaaggcaggtggagctagcggtcgaggtttctggactgaggcccctcccccagtcggtcatcccacccagaacttcgctctgcccctgcccattctaggacagc

SEQ ID NO: 6053 - DNA, 119 bp, homo sapiens
aggacagacggcagtggctcctgagagctggctggggccattttggcccctcgcctgtggccttctgcaacttggcctgggaggggatggggcagctgcgccatgtgcaccaccctttt

SEQ ID NO: 6054 - DNA, 119 bp, homo sapiens
tggccttctgcagacttggcctgggaggggatggggcagctgcgccatgtgcaccacccttttcctgctagcaccctggccatgctctggcgccgccgatttgccaaccgagtccaacc

SEQ ID NO: 6055 - DNA, 119 bp, homo sapiens
gcaacggacagcttgtcctccgaatgtgttttctgtatgtgtgcaagcgcgtgtgttccaaacgggcagagcgtgtgggaaggaaaaagcctgacacttgtttttatcaatttgctgat

SEQ ID NO: 6056 - DNA, 119 bp, homo sapiens
aaacgggcagtagcgtgtgggaaggaaaaagcctgacacttgtttttatcaatttgctgatgctcagtccggcggctgcctcctttgcccccagctgctctgccatttctctcttttca

SEQ ID NO: 6057 - DNA, 119 bp, homo sapiens
atgctcagtcccggcggctgcctcctttgcccccagctgctctgccatttctctcttttcaatcctgcagatcctgagcagagataaaagcagatttccgcttctgctcccagatccag

SEQ ID NO: 6058 - DNA, 119 bp, homo sapiens
caatcctgcatgatcctgagcagagataaaagcagatttccgcttctgctcccagatccaggagcagacctgcaggcagctgctcctgatgtctcacagctattagtcttcaaaaaccc

SEQ ID NO: 6059 - DNA, 119 bp, homo sapiens
aggagcagaccctgcaggcagctgctcctgatgtctcacagctattagtcttcaaaaaccccccgtgccctgtgcacacgcgtctctcctccccagccagcccccctcccagcccagcg

SEQ ID NO: 6060 - DNA, 119 bp, homo sapiens
cccccgtgcctctgtgcacacgcgtctctcctccccagccagcccccctcccagcccagcggcgatgtcctgcctggctggcccgtgcccttgacttccaggcagtagaagatggagtt

SEQ ID NO: 6061 - DNA, 119 bp, homo sapiens
cggcgatgtctctgcctggctggcccgtgcccttgacttccaggcagtagaagatggagttctctagacgcagcacttcagccgccactctgcctctgaagggaaggaagggaaagggt

SEQ ID NO: 6062 - DNA, 119 bp, homo sapiens
ttctctagacagcagcacttcagccgccactctgcctctgaagggaaggaagggaaagggtgagggatgcgcagagcagagggaaccgctggggaggcgctcagggtgggggaggaggt

SEQ ID NO: 6063 - DNA, 119 bp, homo sapiens
gtgagggatgccgcagagcagagggaaccgctggggaggcgctcagggtgggggaggaggtgcaccccgtggggagggcctgctggtacctcggggagcctggctggggtgtgtgcgaa

SEQ ID NO: 6064 - DNA, 119 bp, homo sapiens
gtgcaccccgctggggagggcctgctggtacctcggggagcctggctggggtgtgtgcgaaggcagttcgtgggagcctctcaaagtagggcaggcaggaggcagggggaaagtcacac

SEQ ID NO: 6065 - DNA, 119 bp, homo sapiens
aaggcagttctgtgggagcctctcaaagtagggcaggcaggaggcagggggaaagtcacactagggaagagcctgcagaggcaaagccagagcgccagcctgacccaggccgtgagccc

SEQ ID NO: 6066 - DNA, 119 bp, homo sapiens
actagggaaggagcctgcagaggcaaagccagagcgccagcctgacccaggccgtgagcccgtgatcgctgtctcagctcctgtcagcctgtctctctctttggaggcatcggccttcc

SEQ ID NO: 6067 - DNA, 119 bp, homo sapiens
ccgtgatcgcctgtctcagctcctgtcagcctgtctctctctttggaggcatcggccttcctggtgacagcctgtcaggctgagggccagagggcactgttcccgggacccagtctgtg

SEQ ID NO: 6068 - DNA, 119 bp, homo sapiens
cctggtgacaggcctgtcaggctgagggccagagggcactgttcccgggacccagtctgtgttccccgacctatctgcatttattctctatttgccatgttcctgtcacctcatccttg

SEQ ID NO: 6069 - DNA, 119 bp, homo sapiens
tgttccccgatcctatctgcatttattctctatttgccatgttcctgtcacctcatccttgctgccattccgagttgctcatctccttccactggtctgaggaattgtcaggccaaggt

SEQ ID NO: 6070 - DNA, 119 bp, homo sapiens
tgctgccatttccgagttgctcatctccttccactggtctgaggaattgtcaggccaaggtcatggagcggctcacggcccagacgcacttccccagggcagcgcccctccacgccact

SEQ ID NO: 6071 - DNA, 119 bp, homo sapiens
gtcatggagctggctcacggcccagacgcacttccccagggcagcgcccctccacgccactgttccgagacctgcgcaggaggtggtggctgctccagggatccatccagaggaagggc

SEQ ID NO: 6072 - DNA, 119 bp, homo sapiens
ctgttccgagaacctgcgcaggaggtggtggctgctccagggatccatccagaggaagggcgggaaaaaagaggaaggggctgctggcggccagcggggctgtggctgcctgggcttgg

SEQ ID NO: 6073 - DNA, 119 bp, homo sapiens
gcgggaaaaagagaggaaggggctgctggcggccagcggggctgtggctgcctgggcttggaggttgccgggcagctggggtgccatgtgggccgggtgggggggctgtctcccccagg

SEQ ID NO: 6074 - DNA, 119 bp, homo sapiens
ggaggttgcctgggcagctggggtgccatgtgggccgggtgggggggctgtctcccccagggagcaggcggctttggtgggagcagattgtgtttacaccttccccgcacacccagccc

SEQ ID NO: 6075 - DNA, 119 bp, homo sapiens
gggagcaggctggctttggtgggagcagattgtgtttacaccttccccgcacacccagcccacgctcgctcttattcccggggcctctcccacccctgggctctctgcgcagtctgcac

SEQ ID NO: 6076 - DNA, 119 bp, homo sapiens
ccacgctcgcctcttattcccggggcctctcccacccctgggctctctgcgcagtctgcacatttgcagtcctgctgcagaaagttacctctctcagcctagagctccccacagaaggc

SEQ ID NO: 6077 - DNA, 119 bp, homo sapiens
acatttgcagctcctgctgcagaaagttacctctctcagcctagagctccccacagaaggctcctgggaccgggtgccccttccttggcccactggctcccatcacagggcttagtgtg

SEQ ID NO: 6078 - DNA, 119 bp, homo sapiens
gctcctgggacccgggtgccccttccttggcccactggctcccatcacagggcttagtgtgaagctcaggcaagggtggacctttaaatgggggaattaaatcctgactatgacactgt

SEQ ID NO: 6079 - DNA, 119 bp, homo sapiens
gcaggcagggggttcgtgacgccggctgggtctgggggctgtgggccagccgagccgacccgggcttctggggaccgcgggggccgtgagcactcagagggcgcatcccaggcccctcc

SEQ ID NO: 6080 - DNA, 119 bp, homo sapiens
gacccgggcttctgggggaccgcgggggccgtgagcactcagagggcgcatcccaggcccctccggggaccggccagcctgaagatgccgacgaacggcctgcaccaggtgctgaagat

SEQ ID NO: 6081 - DNA, 119 bp, homo sapiens
gcccctccggggacccggccagcctgaagatgccgacgaacggcctgcaccaggtgctgaagatccagttggcctcgtcaacgacactgaccgctacctgacagctgagagcttcggct

SEQ ID NO: 6082 - DNA, 119 bp, homo sapiens
ctgaagatccagtttggcctcgtcaacgacactgaccgctacctgacagctgagagcttcggcttcaagtcaatgcctcggcacccagcctcaagaggaagcagacctgggtgctggaa

SEQ ID NO: 6083 - DNA, 119 bp, homo sapiens
cttcggcttcaaggtcaatgcctcggcacccagcctcaagaggaagcagacctgggtgctggaacccgaccaggacaaggcacggctgtgctgctccgcagcagccacctgggccgcta

SEQ ID NO: 6084 - DNA, 119 bp, homo sapiens
tgctggaacccgacccaggacaaggcacggctgtgctgctccgcagcagccacctgggccgctacctgtggcagaagaggacgggcgcgtggcctgtgaggcagagcagccgggccgtg

SEQ ID NO: 6085 - DNA, 119 bp, homo sapiens
ggccgctacctgtcggcagaagaggacgggcgcgtggcctgtgaggcagagcagccgggccgtgactgcgcttcctggtcctgccgcagccagatgggcgctgggtgctgcggtccgag

SEQ ID NO: 6086 - DNA, 119 bp, homo sapiens
gggccgtgactgccgcttcctggtcctgccgcagccagatgggcgctgggtgctgcggtccgagccgcaggccgcttcttcggaggcaccgaggaccagctgtcctgcttcgccacagc

SEQ ID NO: 6087 - DNA, 119 bp, homo sapiens
ggtccgagccgcacggccgcttcttcggaggcaccgaggaccagctgtcctgcttcgccacagccgtttcccggccgagctgtggaccgtgcacctggccatccacccgcaggcccacc

SEQ ID NO: 6088 - DNA, 119 bp, homo sapiens
gccacagccgtttccccggccgagctgtggaccgtgcacctggccatccacccgcaggcccacctgctggcgtgagccggcggcgctacgtgcacctgtgcccgcgggaggacgagatg

SEQ ID NO: 6089 - DNA, 119 bp, homo sapiens
ggcccacctgctgagcgtgagccggcggcgctacgtgcacctgtgcccgcgggaggacgagatggccgcgacggagacaagccctggggcgtggacgccctcctcaccctcatcttccg

SEQ ID NO: 6090 - DNA, 119 bp, homo sapiens
acgagatggccgcagacggagacaagccctggggcgtggacgccctcctcaccctcatcttccggagccacggtactgcctcaagtcctgtgacagccgctacctgcgcagcgacggcc

SEQ ID NO: 6091 - DNA, 119 bp, homo sapiens
atcttccggagccgacggtactgcctcaagtcctgtgacagccgctacctgcgcagcgacggccgtctgtctgggagcctgagccccgtgcctgctacacgctggagttcaaggcgggc

SEQ ID NO: 6092 - DNA, 119 bp, homo sapiens
cgacggccgtctggtctgggagcctgagccccgtgcctgctacacgctggagttcaaggcgggcaagctgccttcaaggactgcgacggccactacctggcacccgtggggcccgcagg

SEQ ID NO: 6093 - DNA, 119 bp, homo sapiens
aggcgggcaagctggccttcaaggactgcgacggccactacctggcacccgtggggcccgcaggcaccccaaggccggccgaaacacgcgacctggcaaggatgagctctttgatctgg

SEQ ID NO: 6094 - DNA, 119 bp, homo sapiens
cccgcaggcaccctcaaggccggccgaaacacgcgacctggcaaggatgagctctttgatctggaggaggtcacccacaggtggtgctggtggctgccaaccaccgctacgtctctgtg

SEQ ID NO: 6095 - DNA, 119 bp, homo sapiens
gggtcaacgtctcagccaatcaggatgatgaactagaccacgagaccttcctgatgcaaattgaccagggacaaagaagtgcaccttctattccagcactgggggctactggaccctgg

SEQ ID NO: 6096 - DNA, 119 bp, homo sapiens
ccacgagaccttcctgatgcaaattgaccaggagacaaagaagtgcaccttctattccagcactgggggtactggaccctggtcacccatgggggcattcacgccacagccacacaagt

SEQ ID NO: 6097 - DNA, 119 bp, homo sapiens
ggcccccaccccgcccggcctggacagggaaggtggcgggaggggcagcgcagcagacgctctccccgcaggcaaggacgaagagttcaccctcaagctcatcaaccggcccatcctgg

SEQ ID NO: 6098 - DNA, 119 bp, homo sapiens
tctccccgccaggcaaggacgaagagttcaccctcaagctcatcaaccggcccatcctggtgctgcgcgcctggacggcttcgtctgccaccaccgcggctccaaccagctggacacca

SEQ ID NO: 6099 - DNA, 119 bp, homo sapiens
tgctgcgcggcctggacggcttcgtctgccaccaccgcggctccaaccagctggacaccaaccgctccgctacgacgtcttccacctgagcttcagcgacggcgcctaccggatccgag

SEQ ID NO: 6100 - DNA, 119 bp, homo sapiens
gccgcgacggagggttctggtacacgggcagccacggcagcgtgtgcagcgacggcgaacgcgccgaggcttcgtcttcgagttccgtgagcgcggccgcctggccatccgcgcccgga

SEQ ID NO: 6101 - DNA, 119 bp, homo sapiens
gcagcgacggcgaacgcgccgaggacttcgtcttcgagttccgtgagcgcggccgcctggccatccgcgccggagcggcaagtacctgcgcggcggcgcctcgggcctgctgcgggccg

SEQ ID NO: 6102 - DNA, 119 bp, homo sapiens
agcgcggccgcctggccatccgcgcccggagcggcaagtacctgcgcggcggcgcctcgggcctgctgcggccgatgccgacgccccggccgggaccgcgctttgggagtactgaggcc

SEQ ID NO: 6103 - DNA, 119 bp, homo sapiens
gcggcggcgcctcgggcctgctgcgggccgatgccgacgccccggccgggaccgcgctttgggagtactaggccgcgcccagaccagcctgtcgcgcattaaaaccgtgtctctcccgc

SEQ ID NO: 6104 - DNA, 119 bp, homo sapiens
ggcaaggacacactaattttattttgaaatagggactgcaagggcaggctgtattgagaaggatggcccctggtgtgatgagcttggggcctcatctgctcaccgtgcacgccctggag

SEQ ID NO: 6105 - DNA, 119 bp, homo sapiens
gaaggatggccccctggtgtgatgagcttggggcctcatctgctcaccgtgcacgccctggagtcctgcacccagcatgtccaaactaagggcacccccctgggaagggatgcagagac

SEQ ID NO: 6106 - DNA, 119 bp, homo sapiens
ctggagtcctgctacccagcatgtccaaactaagggcacccccctgggaagggatgcagagacggggagttctctgtatccccttacaggcaggacagggggctggggtgcagaagcac

SEQ ID NO: 6107 - DNA, 119 bp, homo sapiens
agagacggggagcttctctgtatccccttacaggcaggacagggggctggggtgcagaagcactctgggagacctgccctagctttccagctgggaggaggggacgatctggggtccag

SEQ ID NO: 6108 - DNA, 119 bp, homo sapiens
aagcactctggggagacctgccctagctttccagctgggaggaggggacgatctggggtccagcaggctccgggctggggtccacttcccgttctccctgggagtggagaccgaccaag

SEQ ID NO: 6109 - DNA, 119 bp, homo sapiens
gtccagcaggctcccgggctggggtccacttcccgttctccctgggagtggagaccgaccaagcctctcgtgggcaggactgaggggtgggcctgtatctccagatgttgagcagggcc

SEQ ID NO: 6110 - DNA, 119 bp, homo sapiens
accaagcctctctgtgggcaggactgaggggtgggcctgtatctccagatgttgagcagggcctggccacccctgagggggcatcctagagggaggtggtgggctcctggtgactggta

SEQ ID NO: 6111 - DNA, 119 bp, homo sapiens
agggcctggccagcccctgagggggcatcctagagggaggtggtgggctcctggtgactggtattaatagtagggggagacctgaggttgcagtcccatcctggtgtccaggtgccatc

SEQ ID NO: 6112 - DNA, 119 bp, homo sapiens
ctggtattaatatgtagggggagacctgaggttgcagtcccatcctggtgtccaggtgccatctgggctgggaggcatctcctcaacaggaatcctgagcagggtttagagcacagtgg

SEQ ID NO: 6113 - DNA, 119 bp, homo sapiens
gccatctgggctagggaggcatctcctcaacaggaatcctgagcagggtttagagcacagtgggcaggaggggagggtctggacttcagcagggcctcgtgctagatgatgccatattg

SEQ ID NO: 6114 - DNA, 119 bp, homo sapiens
cagtgggcaggagggggagggtctggacttcagcagggcctcgtgctagatgatgccatattgggccagtcgtgcagctccaggtggttgaaggcctcccaagggcagatgactgtgat

SEQ ID NO: 6115 - DNA, 119 bp, homo sapiens
ccttgaacgcctttctttgggggcttgctcttgaactgcctggtctgtcgctgcttaaatttagggggcctttcctgggggtgacaggtcccccggccaccctggtggctgaccggaac

SEQ ID NO: 6116 - DNA, 119 bp, homo sapiens
gtctgtcgctgcttaaatttagggggccctttcctgggggtgacaggtcccccggccaccctggtggctaccggaactcagccttgggcggttccaggttcatggtgaggctgacggag

SEQ ID NO: 6117 - DNA, 119 bp, homo sapiens
acaggtcccccggccaccctggtggctgaccggaactcagccttgggcggttccaggttcatggtgaggtgacggagacaccgcggcaaccttggctcctggactccctcctgctgcgg

SEQ ID NO: 6118 - DNA, 119 bp, homo sapiens
ggccatgagaagttgctgaggacactttttgaggatgctggctacttaaagaccccagaagaaaatgaaccacccagctggagggaggtcctgacagcttggggtttgagaccctggaa

SEQ ID NO: 6119 - DNA, 119 bp, homo sapiens
ttgctgaggacactttttgaggatgctggctacttaaagaccccagaagaaaatgaacccacccagctgagggaggtcctgacagcttggggtttgagaccctggaaaactgcaggaag

SEQ ID NO: 6120 - DNA, 119 bp, homo sapiens
aaacttccaacttggagcacttgggccacgagacgcccagagccaagtctccagagcagctgcggggtgcccaggactgcgtgggagtttgtgaccttgtggtgggagagcagaggtgg

SEQ ID NO: 6121 - DNA, 119 bp, homo sapiens
gctgcggggtgacccaggactgcgtgggagtttgtgaccttgtggtgggagagcagaggtggacgcggcgagagccctacagagaagctggctggtaggacccgcagggaccagctgac

SEQ ID NO: 6122 - DNA, 119 bp, homo sapiens
gtggacgcggccgagagccctacagagaagctggctggtaggacccgcagggaccagctgaccaggctttgctcagagaagcagacaaaacaaagattcaaggttttaattaattccca

SEQ ID NO: 6123 - DNA, 119 bp, homo sapiens
tgaccaggcttgtgctcagagaagcagacaaaacaaagattcaaggttttaattaattcccatactgataaaataactccatgaattctgtaaaccattgcataaatgctatagtgtaa

SEQ ID NO: 6124 - DNA, 119 bp, homo sapiens
cccatactgataaaaataactccatgaattctgtaaaccattgcataaatgctatagtgtaaaaaaattaaacaagtgttaactttaaacagttcgctacaagtaaatgattataaata

SEQ ID NO: 6125 - DNA, 119 bp, homo sapiens
tccatggataaaatcggcatttattcagaaggcatgatgccaggaagaaactccccaagtgggagacaaggctggcccccctgcaagggaaacaaggcttcagcccttccctactccca

SEQ ID NO: 6126 - DNA, 119 bp, homo sapiens
tgggagacaatggctggcccccctgcaagggaaacaaggcttcagcccttccctactcccagacctgccggaaggctgggagcacagttcatggagggtctctggggtgggcctgggtg

SEQ ID NO: 6127 - DNA, 119 bp, homo sapiens
cagacctgccgggaaggctgggagcacagttcatggagggtctctggggtgggcctgggtgtctgaccttccctctgcccacaggtgaatgtgacctgcgtcctgaggatcccgagtat

SEQ ID NO: 6128 - DNA, 119 bp, homo sapiens
tgtctgacctgtccctctgcccacaggtgaatgtgacctgcgtcctgaggatcccgagtatcaggagagtggcagaggaagtcatgcagaggcaaagccaggagccccgacagggagat

SEQ ID NO: 6129 - DNA, 119 bp, homo sapiens
atcaggagagctggcagaggaagtcatgcagaggcaaagccaggagccccgacagggagatccccagtggtcagagatgcaggtggccgccattgcaaactcccggtgctcatcactgg

SEQ ID NO: 6130 - DNA, 119 bp, homo sapiens
ctccagggcgatgttgtggaaggtgttcacgtaggctgcgcctcccaggagcccctcatacagaatgataggaagacgaggtagatgcttggcagaaagccgaaccacacgtctgccag

SEQ ID NO: 6131 - DNA, 119 bp, homo sapiens
ggtgttcacgtaggctgcgcctcccaggagcccctcatacagaatgatcaggaagacgaggtagatgctggcagaaagccgaaccacacgtctgccagcaggaacaccaggttgaggca

SEQ ID NO: 6132 - DNA, 119 bp, homo sapiens
ctggccagcagcagggcagggatacccagcatggacagcagggtctgctgaggggagaggccggcctggtgaggcccaggtaggacagggcccccagcagcccagctcccccagtccct

SEQ ID NO: 6133 - DNA, 119 bp, homo sapiens
cccagcatggacagcagggtctgctgaggggagaggccggcctgggtgaggcccaggtaggacagggccccagcagcccagctcccccagtccctgaggaccaccaggagatcacggcc

SEQ ID NO: 6134 - DNA, 119 bp, homo sapiens
cctcggaatccgaaaagcgccgccgcgagcctgcacagcctcccatcgcatcaagttcaggtcccccgaggtccagggtcatagagtgtccaaagggggctcccacgggagggatgagg

SEQ ID NO: 6135 - DNA, 119 bp, homo sapiens
aggtcccccgagggtccagggtcatagagtgtccaaagggggctcccacgggagggatgagggtctgcgcaggtgacaaggatcaacgcccgattgccggtcccagctccggcttgtct

SEQ ID NO: 6136 - DNA, 119 bp, homo sapiens
gagggtctgcgacaggtgacaaggatcaacgcccgattgccggtcccagctccggcttgtctagggcaccgcgccccgcgatccatcaaggaagctgggggctccatctcgagcgccct

SEQ ID NO: 6137 - DNA, 119 bp, homo sapiens
gtctagggcactcgcgccccgcgatccatcaaggaagctgggggctccatctcgagcgccctacgacccccacgccccacccatcgtactctcccccgccccgtctacagcagggaccc

SEQ ID NO: 6138 - DNA, 119 bp, homo sapiens
ccctacgacccaccacgccccacccatcgtactctcccccgccccgtctacagcagggaccctgaggccgtacctttaagagcagcagaatgttctgcactatgcagaggccgtttgtc

SEQ ID NO: 6139 - DNA, 119 bp, homo sapiens
accctgaggcctgtacctttaagagcagcagaatgttctgcactatgcagaggccgtttgtcggatcactgacagcacccgcgtgttcccccatcacgtgctcagaggttttccctact

SEQ ID NO: 6140 - DNA, 119 bp, homo sapiens
tgtcggatcacgtgacagcacccgcgtgttcccccatcacgtgctcagaggttttccctacttccgggtctctctgtcttcgctttgggccttctcggcttcggagcgtgaaaaaggga

SEQ ID NO: 6141 - DNA, 119 bp, homo sapiens
tacttccgggtcctctctgtcttcgctttgggccttctcggcttcggagcgtgaaaaagggaggggctgagaaccctggaaccgcaggttttaaactggagcgggtgggagcagcaagc

SEQ ID NO: 6142 - DNA, 119 bp, homo sapiens
gggaggggctggagaaccctggaaccgcaggttttaaactggagcgggtgggagcagcaagcagagccggaccttagatcagtggcgcccaagaccgagacagtagcctgccagcacca

SEQ ID NO: 6143 - DNA, 119 bp, homo sapiens
tattttaaaactagatatctttaatatgacagtaaacaatgtgacagaaacatggctgtttctctcatctgtctgagatatacattccatacaggtgactgggtcccataagttttcta

SEQ ID NO: 6144 - DNA, 119 bp, homo sapiens
tttctctcatcttgtctgagatatacattccatacaggtgactgggtcccataagttttctaagaaaaattttcctttccacttaatgatcctaagaagtcagtgcaatctggttcttc

SEQ ID NO: 6145 - DNA, 119 bp, homo sapiens
tctaagaaaaacttttcctttccacttaatgatcctaagaagtcagtgcaatctggttcttctccctgcgaagggttatttagtttgggatgtaacattttacaacaataatacaaacc

SEQ ID NO: 6146 - DNA, 119 bp, homo sapiens
cttctccctgcagaagggttatttagtttgggatgtaacattttacaacaataatacaaacctcctggggaataccacaataaatgtctcaaaaaccactcagttaatcccagggtata

SEQ ID NO: 6147 - DNA, 119 bp, homo sapiens
aacctcctgggagaataccacaataaatgtctcaaaaaccactcagttaatcccagggtataatctggcgttttaaattactgcagggaatattatgggccttaatgacactgtaactg

SEQ ID NO: 6148 - DNA, 119 bp, homo sapiens
tataatctggctgttttaaattactgcagggaatattatgggccttaatgacactgtaactgcataaagcaaagaaagctagaaaaaggggccaaaaaaatgagctcagagccagccga

SEQ ID NO: 6149 - DNA, 119 bp, homo sapiens
actgcataaagccaaagaaagctagaaaaaggggccaaaaaaatgagctcagagccagccgaagtgacacaaacatgtggttgtttactaggactggagaggtttagtctgcagatgtt

SEQ ID NO: 6150 - DNA, 119 bp, homo sapiens
ccgaagtgacaacaaacatgtggttgtttactaggactggagaggtttagtctgcagatgtttgtggtcccagaaggttccagaggaacgagttgttatgaagatttgcagagttggat

SEQ ID NO: 6151 - DNA, 119 bp, homo sapiens
tgtttgtggtctccagaaggttccagaggaacgagttgttatgaagatttgcagagttggatgagagcagattcttctcggagatggcaggccccaggacagggaggcccagtggtata

SEQ ID NO: 6152 - DNA, 119 bp, homo sapiens
ggatgagagcaagattcttctcggagatggcaggccccaggacagggaggcccagtggtatagacagaattatagatttctgtggtcagatcatactctactggtcccacaatgtacat

SEQ ID NO: 6153 - DNA, 119 bp, homo sapiens
tatagacagaatttatagatttctgtggtcagatcatactctactggtcccacaatgtacatcaacaaataatattgtacggatgtcatttcaaagccttctaaagacgagagtcatta

SEQ ID NO: 6154 - DNA, 119 bp, homo sapiens
acatcaacaaattaatattgtacggatgtcatttcaaagccttctaaagacgagagtcattattgaagcattagagcacagatggttcaaactatatgcagatattcatacttgcattt

SEQ ID NO: 6155 - DNA, 119 bp, homo sapiens
attattgaagccattagagcacagatggttcaaactatatgcagatattcatacttgcatttttgcatttagctgctttttttttctattgaactgtaatgaattgtctcataatctat

SEQ ID NO: 6156 - DNA, 119 bp, homo sapiens
atttttgcattatagctgctttttttttctattgaactgtaatgaattgtctcataatctattccatctcttgccattagcaggctttgaatgttcacaaataggagcaaagaactcat

SEQ ID NO: 6157 - DNA, 119 bp, homo sapiens
ctattccatcttcttgccattagcaggctttgaatgttcacaaataggagcaaagaactcattttccaggctttaatcacacaaagagggaatgcctaattctctaaatgaaatggtct

SEQ ID NO: 6158 - DNA, 119 bp, homo sapiens
tcattttccagagctttaatcacacaaagagggaatgcctaattctctaaatgaaatggtctgtgatcatgaagcagagatttaatatatcacggcaaattaggtagattttaataaat

SEQ ID NO: 6159 - DNA, 119 bp, homo sapiens
gtctgtgatcactgaagcagagatttaatatatcacggcaaattaggtagattttaataaattacttattccctgaatactttacatatgcttaagaaggaacatagcctgtttgcaaa

SEQ ID NO: 6160 - DNA, 119 bp, homo sapiens
aaattacttatctccctgaatactttacatatgcttaagaaggaacatagcctgtttgcaaacagtgaaacccacagcctataaaaatcctttgaagaaaatgacaaataaaaaagtaa

SEQ ID NO: 6161 - DNA, 119 bp, homo sapiens
caaacagtgaaaacccacagcctataaaaatcctttgaagaaaatgacaaataaaaaagtaaattaaaaatgaaatgcattatatcctagacctctagagacaattcctttgcagcatt

SEQ ID NO: 6162 - DNA, 119 bp, homo sapiens
gtaaattaaaaaatgaaatgcattatatcctagacctctagagacaattcctttgcagcattgattcacgctccattaaaaatatcaattaaatccttcagtgagattgggtaaaagct

SEQ ID NO: 6163 - DNA, 119 bp, homo sapiens
cattgattcacagctccattaaaaatatcaattaaatccttcagtgagattgggtaaaagctagaaaataactttcagagctgcttttcgaggatctggttacccagatacaccctggc

SEQ ID NO: 6164 - DNA, 119 bp, homo sapiens
agctagaaaattaactttcagagctgcttttcgaggatctggttacccagatacaccctggcactgtacggcttgatgtaaatttaaaaaatgataaaaagatactcctttcacgtcta

SEQ ID NO: 6165 - DNA, 119 bp, homo sapiens
tggcactgtactggcttgatgtaaatttaaaaaatgataaaaagatactcctttcacgtctaactaagctatcagaatttgagttatacttttcataatttctttctgtgtcatatact

SEQ ID NO: 6166 - DNA, 119 bp, homo sapiens
tctaactaagcatatcagaatttgagttatacttttcataatttctttctgtgtcatatactaagttttaacgtgtaaatttcacatctatctatataactatctcctttttatatata

SEQ ID NO: 6167 - DNA, 119 bp, homo sapiens
tactaagttttcaacgtgtaaatttcacatctatctatataactatctcctttttatatatacatccctggtcaccattacaaatgtatgaaaataatacaaatagaatgaacttttaa

SEQ ID NO: 6168 - DNA, 119 bp, homo sapiens
tatacatccctgggtcaccattacaaatgtatgaaaataatacaaatagaatgaacttttaagaaagaagacaaaaaacttgcagtcattgaataagttggtgctaagtttcattcttt

SEQ ID NO: 6169 - DNA, 119 bp, homo sapiens
ttaagaaagaaagacaaaaaacttgcagtcattgaataagttggtgctaagtttcattctttatatttattgatagaaactgcatgcatcaaagaaaatgcatactgagctttaatgtg

SEQ ID NO: 6170 - DNA, 119 bp, homo sapiens
ctttatatttaattgatagaaactgcatgcatcaaagaaaatgcatactgagctttaatgtgcataaaaggatattagcattttaaagaggaagattaacacattaatccaagtaattt

SEQ ID NO: 6171 - DNA, 119 bp, homo sapiens
tgtgcataaaatggatattagcattttaaagaggaagattaacacattaatccaagtaattttcatatatgcttctaataaaatcttcacagtataaaactcttaatgaagctaatcat

SEQ ID NO: 6172 - DNA, 119 bp, homo sapiens
attttcatatattgcttctaataaaatcttcacagtataaaactcttaatgaagctaatcataggcattcatttagtgggacgattagggataacataaaagtatttctttttcatagg

SEQ ID NO: 6173 - DNA, 119 bp, homo sapiens
tcataggcattccatttagtgggacgattagggataacataaaagtatttctttttcataggttttctagatttatgcttttgcttattaaaaataaaaatgggaattgcatttcggtt

SEQ ID NO: 6174 - DNA, 119 bp, homo sapiens
taggttttctaagatttatgcttttgcttattaaaaataaaaatgggaattgcatttcggttcttcctagaaaatgttgaaaatgcaaatagactttctcacgctatcacgtaggtata

SEQ ID NO: 6175 - DNA, 119 bp, homo sapiens
ggttcttcctaagaaaatgttgaaaatgcaaatagactttctcacgctatcacgtaggtataaattattagaaggtactgcccattatggagaacttaagtcctgaggggtggcagtta

SEQ ID NO: 6176 - DNA, 119 bp, homo sapiens
tataaattattgagaaggtactgcccattatggagaacttaagtcctgaggggtggcagttatgagaagagggaatagagaaataaacaaatgaaaaagtatacaaaacttcaacactt

SEQ ID NO: 6177 - DNA, 119 bp, homo sapiens
gttatgagaaggagggaatagagaaataaacaaatgaaaaagtatacaaaacttcaacacttcaaacccggtctccccgctcccagcttcccatgaattatagattatatacaccagag

SEQ ID NO: 6178 - DNA, 119 bp, homo sapiens
acttcaaacccaggtctccccgctcccagcttcccatgaattatagattatatacaccagagtaattacaaaatctcatgtaggaactttcatgtgagcatttactgaggagtaggaga

SEQ ID NO: 6179 - DNA, 119 bp, homo sapiens
agagtaattacaaaaatctcatgtaggaactttcatgtgagcatttactgaggagtaggagatgcctctgagcatttgctttcaagcctccaagtcatctctgtattgcttgtagacag

SEQ ID NO: 6180 - DNA, 119 bp, homo sapiens
gagatgcctctggagcatttgctttcaagcctccaagtcatctctgtattgcttgtagacagactggaggcatggagagcttcgactgttaccctgagcttgccaataccttcaccatc

SEQ ID NO: 6181 - DNA, 119 bp, homo sapiens
catcgatattttgctcaatgaggtccctcccttcctgaaacatgtcggcaaggtcgacgtgagccacgcaatgtcctcacactccaggtcctgctcgtcctctggagggtcactgacca

SEQ ID NO: 6182 - DNA, 119 bp, homo sapiens
tcaatgaggtccctcccttcctgaaacatgtcggcaaggtcgacgtgagccacgccaatgtcctcacacccaggtcctgctcgtcctctggagggtcactgaccacggtgaagcgaagg

SEQ ID NO: 6183 - DNA, 119 bp, homo sapiens
cattgctatagttatagtagacccactgcccactcttgggttttggaagtgacacgggtgtctcttcagaggaagactgtagaatcgacactcaacaaacagccgttggatagtgtcat

SEQ ID NO: 6184 - DNA, 119 bp, homo sapiens
ctcttgggttttggaagtgacacgggtgtctcttcagcaggaagactgtagaatcgacactcaacaaacgccgttggatagtgtcatccatggttacttgagaatcattaaggcttaga

SEQ ID NO: 6185 - DNA, 119 bp, homo sapiens
ttcagcaggaagactgtagaatcgacactcaacaaacagccgttggatagtgtcatccatggttacttggaatcattaaggcttagagctatgatctcaatccgaattttttctgatgg

SEQ ID NO: 6186 - DNA, 119 bp, homo sapiens
cttctggttccaagtcctctgttatttctgtttcatcttcagaagatgccaagctttgttctgcaagctaccttcagatagtaaagacacatcatcttttccttgctgcattttctcag

SEQ ID NO: 6187 - DNA, 119 bp, homo sapiens
agaagatgccaagctttgttctgcaagctgaccttcagatagtaaagacacatcatcttttccttgctgattttctcagtattctcttttacctcatctacactgccttcttgtgaaac

SEQ ID NO: 6188 - DNA, 119 bp, homo sapiens
taaaactagtgtgctaacagaggatgctggaggaagtctttgaacaacttctggctcttcgctgcgaataaatttcctaagtcttcagttgttattgatccacttggtggaaggtaagc

SEQ ID NO: 6189 - DNA, 119 bp, homo sapiens
gtctttgaacaacttctggctcttcgctgcgaatgaaatttcctaagtcttcagttgttattgatccactggtggaaggtaagcaaatttccatttcaatataacatggatggtgccag

SEQ ID NO: 6190 - DNA, 119 bp, homo sapiens
aaatttcctaagtcttcagttgttattgatccacttggtggaaggtaagcaaatttccatttcaatatacatggatggtgccagcaggatgcttttgatggtctgttaactcaaatatt

SEQ ID NO: 6191 - DNA, 119 bp, homo sapiens
ctgagatacacctgtcatgtgccaacgaaatcagaggcacattgacttttcctatgtaaatattctcctggtatcactatcatcaaaaacataaaaactcagagactctgacttaaggt

SEQ ID NO: 6192 - DNA, 119 bp, homo sapiens
ctatgtaaatattctcctgggtatcactatcatcaaaaacataaaaactcagagactctgacttaaggttcgatccaagtccatattcattggcactgggaaatacatatgatcatcaa

SEQ ID NO: 6193 - DNA, 119 bp, homo sapiens
gagactctgacttaaggtatcgatccaagtccatattcattggcactgggaaatacatatgatcatcaactgtggatcattgctactgggaatgatagctgtatcatggtctgcaaaat

SEQ ID NO: 6194 - DNA, 119 bp, homo sapiens
aatacatatgatcatcaaactgtggatcattgctactgggaatgatagctgtatcatggtctgcaaaataaaaaacttgtacacaacatatgggtgtggctgcaggtggcttgctcggg

SEQ ID NO: 6195 - DNA, 119 bp, homo sapiens
tatcatggtctgcaaaatcaaaaaacttgtacacaacatatgggtgtggctgcaggtggcttgctcgggctgcaggtggttgcaacatcttattgtaatgtgaagttcatttaagttgc

SEQ ID NO: 6196 - DNA, 119 bp, homo sapiens
gcaggtggcttgctcgggactgcaggtggttgcaacatcttattgtaatgtgaagttcatttaagttgcatctgtggaatctgtagaactgagttgagcagttttgggtgcttgctgac

SEQ ID NO: 6197 - DNA, 119 bp, homo sapiens
cgactgcatatgctctggccccttaaaatttgatgttatataccccaaagcctttgccctttctcgataagtcgaattgcttgatccatgggaactcttaatcggaaccagtattccac

SEQ ID NO: 6198 - DNA, 119 bp, homo sapiens
atgttatataccccaaagcctttgccctttctcgataaagtcgaattgcttgatccatgggaactcttatcggaaccagtattccactgtgccaaaatttgggatgtctccttttgttc

SEQ ID NO: 6199 - DNA, 119 bp, homo sapiens
caatcaaacttgctgtacaaaatattcggccgcttttttcaagaatttcgtgaaattttaattgacatgtgcaattgtttcatattctgtgctataagcctggtggacctcaagggtga

SEQ ID NO: 6200 - DNA, 119 bp, homo sapiens
ttttaattgacatgctgcaattgtttcatattctgtgctataagcctggtggacctcaagggtgatagtttcttctgaatatattgcaaaaataagtcattaacatgaacaagatattg

SEQ ID NO: 6201 - DNA, 119 bp, homo sapiens
tcaagggtgatagtattcttctgaatatattgcaaaaataagtcattaacatgaacaagatattgagaatgaagttatattcgggatgaaggcctcgcactacgggagttgtctgtagt

SEQ ID NO: 6202 - DNA, 119 bp, homo sapiens
caagatattgagaagtgaagttatattcgggatgaaggcctcgcactacgggagttgtctgtagttcaaatcatagaaagcataggtacagaaagtgacaggctctttatctccagatg

SEQ ID NO: 6203 - DNA, 119 bp, homo sapiens
tgtctgtagttcaaaatcatagaaagcataggtacagaaagtgacaggctctttatctccagatgcctgaaaacttcagaagaaaaggttactttgttgatatggatttcaaatagatt

SEQ ID NO: 6204 - DNA, 119 bp, homo sapiens
tctccagatgcctgtaaaacttcagaagaaaaggttactttgttgatatggatttcaaatagattttcgctcgttctaagtggatggtttcatcaaattcatcaacagagtcatctggc

SEQ ID NO: 6205 - DNA, 119 bp, homo sapiens
caaatagattttcgcctcgttctaagtggatggtttcatcaaattcatcaacagagtcatctggcatgattctggtttaaatttgtactgcttggtgccataggcaatatcctttaatt

SEQ ID NO: 6206 - DNA, 119 bp, homo sapiens
ctgataatctttattaattttgtgttgcataattagcatgtttcttgtcttttccagctcttgcaccgttctgcatgagttgcttgcagctctctcatagagcgttctagatctttatt

SEQ ID NO: 6207 - DNA, 119 bp, homo sapiens
ttgcaccgtttctgcatgagttgcttgcagctctctcatagagcgttctagatctttattaatttcacttctactttcactaaaaaggaaaggtctccatttttttgttctttttgagc

SEQ ID NO: 6208 - DNA, 119 bp, homo sapiens
ctctttcagtttttaatctgtcaaggatttcagttttgtctgttaagtcagacttcaaggcagtctcgactgagcaatctgcactttcagctgttgctcctttaacttccattgctctt

SEQ ID NO: 6209 - DNA, 119 bp, homo sapiens
tcaaggatttcagttttgtctgttaagtcagacttcaaggcagtctcgagctgagcaatctgcactttcgctgttgctcctttaacttccattgctcttcatgggcagcactgaaggca

SEQ ID NO: 6210 - DNA, 119 bp, homo sapiens
ctcttctattcttctttcagaaaacttcatagaatgtaattgtttctcaagactgcagcattttaaacgtgctctttaagttgcatgtttaattcatccccatttgccatcaaagcatc

SEQ ID NO: 6211 - DNA, 119 bp, homo sapiens
catagaatgtaattgtttctcaagactgcagcattttaaacgctgctctttaagttgcatgtttaattctccccatttgccatcaaagcatcgtggctgattctgagagttctttgctt

SEQ ID NO: 6212 - DNA, 119 bp, homo sapiens
ctttgatctgtagcttgctgttctcgaagctgaagaagagataactcaatttcattttcttttctcctcactgagttttcaggatctcagccaagtgctctaactcctctatctggcct

SEQ ID NO: 6213 - DNA, 119 bp, homo sapiens
cgaagctgaagaagagataactcaatttcattttcttttctcctcaactgagttttcaggatctcagccagtgctctaactcctctatctggcctctttgtgactgaataacgttttct

SEQ ID NO: 6214 - DNA, 119 bp, homo sapiens
ctttcctggggcattcctgtaaaccagcattttcatttgcttttctacgcccagtgttaatacgagatttacattattgtatggagtttgcctgtaaccctgggtttgaagttgctgtt

SEQ ID NO: 6215 - DNA, 119 bp, homo sapiens
atacgagattgtacattattgtatggagtttgcctgtaaccctgggtttgaagttgctgtttggctgaatcagtctgtttttgagggtttcattttgtttttcaagctcatgaactttc

SEQ ID NO: 6216 - DNA, 119 bp, homo sapiens
tttggctgaaatcagtctgtttttgagggtttcattttgtttttcaagctcatgaactttctcttgcagtgctcaatcatttcttccatttccacatctcgtcccagccgcttggggcc

SEQ ID NO: 6217 - DNA, 119 bp, homo sapiens
tctcttgcagctgctcaatcatttcttccatttccacatctcgtcccagccgcttggggccgccaccaaccgctcatatcttttcttgtcattaactagccgtattaacttggtggcca

SEQ ID NO: 6218 - DNA, 119 bp, homo sapiens
cttttaattttatcctcctgcttgcgggcatgctgtttaagtaaaatgttctcatcatgcaaacgcaaaatctgtcttccagttcctcacgactgacacgtgacactgcctggcgagac

SEQ ID NO: 6219 - DNA, 119 bp, homo sapiens
gggcatgctgtttaagtaaaatgttctcatcatgcaaacgcaaaaatctgtcttccagttcctcacgacgacacgtgacactgcctggcgagacttcattgtccgtgttgttgaagttt

SEQ ID NO: 6220 - DNA, 119 bp, homo sapiens
ctgatttggtggtgattttataatcaatcaacacaaagtttaacatctttacattttaatgaaaaagtaataatctatttgaaaagtacaaactcaattgcaatttcaagaaaaaaata

SEQ ID NO: 6221 - DNA, 119 bp, homo sapiens
aatgaaaaagtagataatctatttgaaaagtacaaactcaattgcaatttcaagaaaaaaatatgtattatataccataaataagcaaaattggactctgaagccctaatacttcaaaa

SEQ ID NO: 6222 - DNA, 119 bp, homo sapiens
aaaatatgtatttatataccataaataagcaaaattggactctgaagccctaatacttcaaaagcattctcctattccataaaaacctagtattattcagcaacagtactactactgat

SEQ ID NO: 6223 - DNA, 119 bp, homo sapiens
tcaaaagcattcatcctattccataaaaacctagtattattcagcaacagtactactactgatttaaaatagaaagcaagtctatcttcacatgtagttctttgtctttaatttgtaca

SEQ ID NO: 6224 - DNA, 119 bp, homo sapiens
actgatttaaaaatagaaagcaagtctatcttcacatgtagttctttgtctttaatttgtacaactcacaaggttattttcattcttagcacccggggttcaccagggtgtgatccaaa

SEQ ID NO: 6225 - DNA, 119 bp, homo sapiens
tgtacaactcaccaaggttattttcattcttagcacccggggttcaccagggtgtgatccaaagcaaacagcataggtttttaacagaaaatctttgccaggaacttcatgacctgtat

SEQ ID NO: 6226 - DNA, 119 bp, homo sapiens
tccaaagcaaaccagcataggtttttaacagaaaatctttgccaggaacttcatgacctgtattttcctacctaggaagaagctgtccccactcgcatgattttgaacagtgtgttgat

SEQ ID NO: 6227 - DNA, 119 bp, homo sapiens
ctgtattttcctcacctaggaagaagctgtccccactcgcatgattttgaacagtgtgttgatgttattcttcgaattgcatcccgacaagcagtgatcacctggttctttggttttcc

SEQ ID NO: 6228 - DNA, 119 bp, homo sapiens
cccgcagacgacctgctctttgaattgcttgatttactgctttgaggtttcccaacagctctgtgtgatgttacagcgaattttatatccatttagcaagtctctattaaggtcataga

SEQ ID NO: 6229 - DNA, 119 bp, homo sapiens
tgatttactgctttgaggtttcccaacagctctgtgtgattgttacagcgaattttatatccatttagcagtctctattaaggtcatagagttccatataacgactcttcattgttttc

SEQ ID NO: 6230 - DNA, 119 bp, homo sapiens
cttaactagcacctttcgtaattcctcaaaatagacaggaaaatccgcttctacttgaaggtcttcaatgcaaaaaatgatgccattgactggatgatatcaccagccaaatcaatatc

SEQ ID NO: 6231 - DNA, 119 bp, homo sapiens
taattcctcaaaatagacaggaaaatccgcttctacttgaaggtcttcaatagcaaaaaatgatgccatgactggatgatatcaccagccaaatcaatatcatcagtatttatagtgat

SEQ ID NO: 6232 - DNA, 119 bp, homo sapiens
ctctccactaagttttatttttatatgcaggtggccgccattccgtaaagatgtgaaacacacttgaaaggagcattctgaatgtgagtgtcttctggtaacagaaagttctgaccgag

SEQ ID NO: 6233 - DNA, 119 bp, homo sapiens
ttttatttttatatgcaggtggccgccattccgtaaagatgtgaaacacacttgaaatggagcattctgatgtgagtgtcttctggtaacagaaagttctgaccgagccatacaacaac

SEQ ID NO: 6234 - DNA, 119 bp, homo sapiens
cctctgtgcccgttctgcaatggtaaagttaacataactgattggctcactggcagggtccaggctggtagcgcatacatggagaatcgagggagctgtcttgtcgattcaaatacatg

SEQ ID NO: 6235 - DNA, 119 bp, homo sapiens
cgttctgcaatggtaaagttaacataactgattggctcactggcagggtccaggctggtcagcgcatactggagaatcgagggagctgtcttgtcgattcaaatacatgaaactgggtg

SEQ ID NO: 6236 - DNA, 119 bp, homo sapiens
ctgcttctgtaacccacgaatgccttcaagtgcagatccacagggacatctttgggaggcacaatagggtgcagatggaactggagaggttgtgaatgctgggatgtaccacgtggctt

SEQ ID NO: 6237 - DNA, 119 bp, homo sapiens
tgggaggcacaatagggatgcagatggaactggagaggttgtgaatgctgggatgtaccacgtggctttacctgtaaaaattccttctgcaaaaatcaatactgctcggatgatggtgt

SEQ ID NO: 6238 - DNA, 119 bp, homo sapiens
cattagaagtggaaatgcgtaattctgtatgagcagtttgggtctcattccccaggctgactgagagcgggtgtggagcctggtattggctgggattatgccccgatgcccatcagcct

SEQ ID NO: 6239 - DNA, 119 bp, homo sapiens
tgtatgagcagtttgggtctcattccccaggctgactgagagcgtggtgtggagcctggtattggctggattatgccccgatgcccatcagcctcgttcagtggactggccaattcagc

SEQ ID NO: 6240 - DNA, 119 bp, homo sapiens
cttggcattttcctcatagttacggagttccagcaacagattctgcttcttctgactcagctctcggataggtcctgctctgcactggtgtccatgaggttgcccctcatctcagccgt

SEQ ID NO: 6241 - DNA, 119 bp, homo sapiens
tacggagttccagcaacagattctgcttcttctgactcagctctcggatcaggtcctgctctgcactgggtccatgaggttgcccctcatctcagccgtgccaggcaggtagccccgga

SEQ ID NO: 6242 - DNA, 119 bp, homo sapiens
tttccccatccactgagcagcagattaactgtatgtggccatccatccggtaatctccctctaccacacggcaattgcagaagaaaaattgtccttaaagatgacctccccagttcggt

SEQ ID NO: 6243 - DNA, 119 bp, homo sapiens
gcagcagattaactgtatgtggccatccatccggtaatctccctctaccacaccggcaattgcagaagaaaattgtccttaaagatgacctccccagttcggtcacttcgagcatcaac

SEQ ID NO: 6244 - DNA, 119 bp, homo sapiens
cgtccaaaagagatcacttccttcatgattgaaaccttgcagagcacaattgccaccaataatcgcaagggggaagaaatgtctcccaatgtccccagcacaattgcatttgccccatc

SEQ ID NO: 6245 - DNA, 119 bp, homo sapiens
aaagagatcacttccttcatgattgaaaccttgcagagcacaattgccaccaataatcgcaagaggggagaaatgtctcccaatgtccccagcacaattgcatttgccccatctgctac

SEQ ID NO: 6246 - DNA, 119 bp, homo sapiens
ctctctgtagaacaaatccgaattattgtagacatcataagccaaaagattagtctgtgtccccactaaagggcatcatagccaagctcagggttcaatacgcctgcagtcagacagct

SEQ ID NO: 6247 - DNA, 119 bp, homo sapiens
ctgtgtccccactaaaagggcatcatagccaagctcagggttcaatacgcctgcagtcagacagctgacgcctggttaatgctgagaagagaaacatcagattccagggggctctggaa

SEQ ID NO: 6248 - DNA, 119 bp, homo sapiens
agtcagacagctgactgcctggttaatgctgagaagagaaacatcagattccagggggctctggaagacctggatgcactgacatgctggttccgtgtatgaggattatgaataaaaac

SEQ ID NO: 6249 - DNA, 119 bp, homo sapiens
cttgcccgtttgggtggcggccgccaggcacgggtgagtcccgtcgtagcgccctatggccaccattcggggctgattttgtggcgcagtttcagggtgaacacaggcagcagcatgat

SEQ ID NO: 6250 - DNA, 119 bp, homo sapiens
ggccaccattcgggggctgattttgtggcgcagtttcagggtgaacacaggcagcagcatgatggcggcgcttaggggaggagggctggaagctggagacaagcgcagcggagctggcc

SEQ ID NO: 6251 - DNA, 119 bp, homo sapiens
catgatggcggcggcttaggggaggagggctggaagctggagacaagcgcagcggagctggcctcacgccccgggcaagaagtgcagggacactacctgcgcggccccagccgcctcag

SEQ ID NO: 6252 - DNA, 119 bp, homo sapiens
ctggcctcacgcgcccgggcaagaagtgcagggacactacctgcgcggccccagccgcctcaggccggagcgaaacagcccgggacgaacccgtccaggtaccgcctgctcctcctgcg

SEQ ID NO: 6253 - DNA, 119 bp, homo sapiens
cctcaggccggacgcgaaacagcccgggacgaacccgtccaggtaccgcctgctcctcctgcggcggcgagacccgtccgctctttttgcggctgcgcggtggagcctcggcgccttct

SEQ ID NO: 6254 - DNA, 119 bp, homo sapiens
gggtaaaataataaggtcaatcatcactatattcaatgtgatgattacccggatcacgtgacaagccataactagacaaatctgtttctgactctggggtttggaaatgcttagaccag

SEQ ID NO: 6255 - DNA, 119 bp, homo sapiens
gatcacgtgacaagccatcaactagacaaatctgtttctgactctggggtttggaaatgcttagaccagctggggactcccacattctttcatttttccacagtggaaatgaatgttgt

SEQ ID NO: 6256 - DNA, 119 bp, homo sapiens
tggaaatgcttagaccagcctggggactcccacattctttcatttttccacagtggaaatgaatgttgttttagtggatggacaaatacatacagacatttgcaaaccttcaaaggcct

SEQ ID NO: 6257 - DNA, 119 bp, homo sapiens
agtggaaatgaatgttgtttttagtggatggacaaatacatacagacatttgcaaaccttcaaaggccttgagcagctcacattttcctgtaattttatataaaatgggcaggacctat

SEQ ID NO: 6258 - DNA, 119 bp, homo sapiens
gcaaaccttcaaaggcctctgagcagctcacattttcctgtaattttatataaaatgggcaggacctatggaattccaggtcctttatgttcactgttgcaggtggaaacaaatggcct

SEQ ID NO: 6259 - DNA, 119 bp, homo sapiens
aaaatgggcaggacctattggaattccaggtcctttatgttcactgttgcaggtggaaacaaatggcctatactagaatactagattttgtttttaatcactcactcccccaagagcca

SEQ ID NO: 6260 - DNA, 119 bp, homo sapiens
ggtggaaacaaatggcctaatactagaatactagattttgtttttaatcactcactcccccaagagccattggtatgcaaataaaatcctcttgataaatattcattccctgaatgacc

SEQ ID NO: 6261 - DNA, 119 bp, homo sapiens
gtctgaatcataaaagcaacatgacacgatctggaaagctttagggaatgtaagtgctgtcatcagctggagatttcattttctaggattaattgaagttgctgccaccatctctacag

SEQ ID NO: 6262 - DNA, 119 bp, homo sapiens
agtgctgtcatcagctgggagatttcattttctaggattaattgaagttgctgccaccatctctacagcagagtgtcaaaagtgagtaacggactgatccctgctggcgaatggggttt

SEQ ID NO: 6263 - DNA, 119 bp, homo sapiens
gccaccatctctacagcgagagtgtcaaaagtgagtaacggactgatccctgctggcgaatggggtttccaggatgacaggcagaggatgctcctaccgggctgttcctcctggcagag

SEQ ID NO: 6264 - DNA, 119 bp, homo sapiens
ctggcgaatggggtttctcaggatgacaggcagaggatgctcctaccgggctgttcctcctggcagaggagaaacgctagcagctcctggccagtaagtccatttcccttctatctgtt

SEQ ID NO: 6265 - DNA, 119 bp, homo sapiens
gttcctcctggcagaggcagaaacgctagcagctcctggccagtaagtccatttcccttctatctgttcgagataatggcattgcattggaattgaatagagtctggggaagataagca

SEQ ID NO: 6266 - DNA, 119 bp, homo sapiens
ttcccttctatctgttctgagataatggcattgcattggaattgaatagagtctggggaagataagcacaactaccttaatgggcatctagccccctactgtgattgcccgcaaaggaa

SEQ ID NO: 6267 - DNA, 119 bp, homo sapiens
ctggggaagataagcactaactaccttaatgggcatctagccccctactgtgattgcccgcaaaggaaaccgcgtcccaagctcagctcagaaccatggcaattctcagctgaacagct

SEQ ID NO: 6268 - DNA, 119 bp, homo sapiens
attgcccgcaaaggaaaaccgcgtcccaagctcagctcagaaccatggcaattctcagctgaacagctcggctgccctcctttctttgtttttttgtttgtgtacgttgttgttgtttg

SEQ ID NO: 6269 - DNA, 119 bp, homo sapiens
agtgaagtattttctatccttgaaatgtgttagacaaattcctgaggggaaaccccacacattcaataaactttactttttcagcaaagcttcccatgtattggagcctcattttatcc

SEQ ID NO: 6270 - DNA, 119 bp, homo sapiens
acacattcaataacactttactttttcagcaaagcttcccatgtattggagcctcattttatccctcaccatgaactttaaaagtggaaaatcattttgttcttaaaaagaggaacagt

SEQ ID NO: 6271 - DNA, 119 bp, homo sapiens
ttttatccctcacccatgaactttaaaagtggaaaatcattttgttcttaaaaagaggaacagtcaggaaaggtagggctctcaaatgatagtgagagctcagggactcgaacacttga

SEQ ID NO: 6272 - DNA, 119 bp, homo sapiens
ggaacagtcaggaaaaggtagggctctcaaatgatagtgagagctcagggactcgaacacttgatgcaattgtcgagctcaggcccagccccgcgaggagctgagtcggggctggcgtg

SEQ ID NO: 6273 - DNA, 119 bp, homo sapiens
acacttgatgcaacttgtcgagctcaggcccagccccgcgaggagctgagtcggggctggcgtgctggcggacggtcagagctgcagccactgaggtcacgactacggaaaagcatctt

SEQ ID NO: 6274 - DNA, 119 bp, homo sapiens
ctggcgtgctggcgggacggtcagagctgcagccactgaggtcacgactacggaaaagcatcttctcttagccgtgggggaaggtggggcgctggggcgcaggggcgcagcgggcgctg

SEQ ID NO: 6275 - DNA, 119 bp, homo sapiens
agcatcttctcttgagccgtgggggaaggtggggcgctggggcgcaggggcgcagcgggcgctggggaccacctgctggaactgcgcgcgggatccgcctcaccccaccttactccgcc

SEQ ID NO: 6276 - DNA, 119 bp, homo sapiens
gggcgctggggacacacctgctggaactgcgcgcgggatccgcctcaccccaccttactccgccttctctccctttcctccggcatcttcaccgacaggatctgctctcccggctccgg

SEQ ID NO: 6277 - DNA, 119 bp, homo sapiens
actccgccttctcctccctttcctccggcatcttcaccgacaggatctgctctcccggctccgggcccggctcatgcagatcctcaccgagtgctcttcgggctcggccggcccctcct

SEQ ID NO: 6278 - DNA, 119 bp, homo sapiens
ggctccgggcccgggctcatgcagatcctcaccgagtgctcttcgggctcggccggcccctcctcctctcctccggcctcccaagggaggcaggcggtggagagctcggtggagacccc

SEQ ID NO: 6279 - DNA, 119 bp, homo sapiens
cccctcctcctctccctccggcctcccaagggaggcaggcggtggagagctcggtggagaccccgggggtcggggggcgtccggggcgcgggtgggtcggtggcggcctcctttgggtg

SEQ ID NO: 6280 - DNA, 119 bp, homo sapiens
gagaccccgggggctcggggggcgtccggggcgcgggtgggtcggtggcggcctcctttgggtgcgtgtctggtctggggcggcggagccttcctctcccttgacgtcttgcgagctct

SEQ ID NO: 6281 - DNA, 119 bp, homo sapiens
ctgttccaccaactcttgctgctttgcagccgcctccagcgcggccagttctttgagccgggcccggagtgagcaagtttgccgccttttgcccccttgccacccatctttcctgtcat

SEQ ID NO: 6282 - DNA, 119 bp, homo sapiens
ctttgagccgggcccggaggtgagcaagtttgccgccttttgcccccttgccacccatctttcctgtcaagcgagggcagcgttgaagagctttggggtgcccgcccggggtggaagga

SEQ ID NO: 6283 - DNA, 119 bp, homo sapiens
ccacccatctttcctgtcatagcgagggcagcgttgaagagctttggggtgcccgcccggggtggaaggtcagcacgctcttctcctccttgggcttattgttgcttctcagcatgcgc

SEQ ID NO: 6284 - DNA, 119 bp, homo sapiens
ctggctttcttccggagtaacttctgagactcaggataatgcaccaaaatctcattcaggtccttcttaccaggatgaagaggttggtaaacccgtgcgccaccacgttggccgtgcgc

SEQ ID NO: 6285 - DNA, 119 bp, homo sapiens
gactcaggataatgcaccaaaatctcattcaggtccttcttatccaggatgaagaggttggtaaacccggcgccaccacgttggccgtgcgccggttcccgcccccaacagccagcaag

SEQ ID NO: 6286 - DNA, 119 bp, homo sapiens
ccagcatgccttgcgagtgccaggtgtactcgtaccaggtcttgacgcggttctgcacggacttggggacttgtagaaattcatgtacttcaccgtgctgtccatgcagctgcggtagt

SEQ ID NO: 6287 - DNA, 119 bp, homo sapiens
cttgacgcggttctgcacggacttggggatcttgtagaaattcatgtacttcaccgtgctgtccatgcactgcggtagtaggtctgtccggcggtggcggcccctaccacatctctcat

SEQ ID NO: 6288 - DNA, 119 bp, homo sapiens
ctgtccgatcatcacagagaaagcaaagacgcccgtgaaataattcagcagctggaagacaatttcaaaagtgtcttggggtcaggcagccccccgatggtgatgagggtcttcacagc

SEQ ID NO: 6289 - DNA, 119 bp, homo sapiens
gcaaagacgcccgtgaaataattcagcagctggaagacaatttcaaagagtgtcttggggtcaggcagcccccgatggtgatgagggtcttcacagcaaagtagtaacagcgaatataa

SEQ ID NO: 6290 - DNA, 119 bp, homo sapiens
ctgtttcccacgccatcgtaaacccagtgagtggagccgaggccctgataggccgatgcccagtaataagacaggaattcaaatgcaggctgtagagaaggtaggctgtggtcctgatg

SEQ ID NO: 6291 - DNA, 119 bp, homo sapiens
tttcccacgccatcgtaaacccagtgagtggagccgaggccctgataggccgatgcccagtaataaagaaggaattcaaatgcaggctgtagagaaggtaggctgtggtcctgatgacc

SEQ ID NO: 6292 - DNA, 119 bp, homo sapiens
aatgatgtccccgcctctgacaaactgcaggcgtgtctggaacacggtgatgtccaggaagtagatgagtcgcataggtaatccatcagcagccagtggtggatgttgtccggggtctg

SEQ ID NO: 6293 - DNA, 119 bp, homo sapiens
cggtgatgtccaggaagtagatgaggtcgcataggtaatccatcagcagccagtggtggatgttgtccgggtctggtaggggaaggcccagcgcacgggaatcagccaacagttccaat

SEQ ID NO: 6294 - DNA, 119 bp, homo sapiens
agcagccagtggtggatgttgtccggggtctggtaggggaaggcccagcgcacgggaatcagccaacagtccaattccaggccatcaccacgaagaacagccataggacatacatcagg

SEQ ID NO: 6295 - DNA, 119 bp, homo sapiens
tggtcagcgggtcaatgctctggggaaactggtacttcttccaggggcggtgtttgaacttgcagcagacatgtcgcaatagtgctcctcttccactggctcggcttcagcgggctttg

SEQ ID NO: 6296 - DNA, 119 bp, homo sapiens
tcttccaggggcggtgtttgaacttgcagcagagcatgtcgcaatagtgctcctcttccactggctcggttcagcgggctttgtgtctggagctggctctggggctttcttggctgggg

SEQ ID NO: 6297 - DNA, 119 bp, homo sapiens
agggcttggggctctcctcatcagaggtgacgtcagggtcaatgagtttctccttcactttctctgtccctccttgaagagcttcaccagctcctggagccggtcgttgatgatggcgc

SEQ ID NO: 6298 - DNA, 119 bp, homo sapiens
tcaatgagtttctccttcactttctctgtccgctccttgaagagcttcaccagctcctggagccggtcgtgatgatggcgctatttgtgctggccgtggaggccgcacggtcctggcca

SEQ ID NO: 6299 - DNA, 119 bp, homo sapiens
ctgtgtgtccccgaggctgagcttgggactataagggtgtctgatttggcaggagacggtggcggcaaccggttgagggtggattctcttctgccatgagggggcagctatcagcatca

SEQ ID NO: 6300 - DNA, 119 bp, homo sapiens
atttggcaggagacggtggcggcaacacggttgagggtggattctcttctgccatgagggggcagctatagcatcagtatcttccacctgcacttctgggtgctgtttcgtggcaggca

SEQ ID NO: 6301 - DNA, 119 bp, homo sapiens
ctgggcatcttctccacagctttgttctcttcttcataagctggaaccacctctgtaccctgtgggctgtactgacatcctggtgggcatcctcccagggcggttcaacctcctctagg

SEQ ID NO: 6302 - DNA, 119 bp, homo sapiens
ctggaaccacctctgtaccctgtgggctggtactgacatcctggtgggcatcctcccagggcggttcaactcctctaggacaaggtcaggctccacttgtcctccaggaaggatgctga

SEQ ID NO: 6303 - DNA, 119 bp, homo sapiens
aatgttaatgaaaacatttgttgctgctcattggtgtccccaagccttggaaggagagagtgtggccagcctagggagaacctcttctgggaaaaactgtatcctgtcgaggtgctgac

SEQ ID NO: 6304 - DNA, 119 bp, homo sapiens
ccaagccttggaaggagagagtgtggccaggcctagggagaacctcttctgggaaaaactgtatcctgtgaggtgctgacggtgccaggtaccacactgggggctgtgcacgcgtcctc

SEQ ID NO: 6305 - DNA, 119 bp, homo sapiens
gaacctcttctgggaaaaactgtatcctgtcgaggtgctgacggtgccaggtaccacactgggggctgtcacgcgtcctctcaaagagatgctcaatactgagtcctccatccatgggg

SEQ ID NO: 6306 - DNA, 119 bp, homo sapiens
tatgggccttttccacagccctctgggggtaagtcctgctgtctagcctaaatcttgcaggctgcccatgctggccttccccttgttctggtctgggaggctctggggctggtgcaggt

SEQ ID NO: 6307 - DNA, 119 bp, homo sapiens
aatcttgcaggctgcccatggctggccttccccttgttctggtctgggaggctctggggctggtgcagggactctggctccccttgtcctgcctgggagtgtgtggagagggaggggtt

SEQ ID NO: 6308 - DNA, 119 bp, homo sapiens
gctctggggctggtgcaggtgactctggctccccttgtcctgcctgggagtgtgtggagagggaggggtcgctgttcaaatagggtggggtgtcagtggccacctcccccgggaaggtc

SEQ ID NO: 6309 - DNA, 119 bp, homo sapiens
tgtgtggagagggaggggttcgctgttcaaatagggtggggtgtcagtggccacctcccccgggaaggtttctcttcagggcatccttctttccttccatccatgtgtccatctgagct

SEQ ID NO: 6310 - DNA, 119 bp, homo sapiens
ccacctcccccgggaaggtcttctcttcagggcatccttctttccttccatccatgtgtccatctgagcctcccagattcccttctcccttatttcagagacctccagctcccatcacc

SEQ ID NO: 6311 - DNA, 119 bp, homo sapiens
ctggcagggtccctggttggtggcagggaggaggtctgggcctgggagccgggctggggctctggagctgtgcctccttgggttcctccttgggctgcagggggatgggtgtgggcagg

SEQ ID NO: 6312 - DNA, 119 bp, homo sapiens
gctctggagctggtgcctccttgggttcctccttgggctgcagggggatgggtgtgggcagggagggggctcccgggcctgcagcttgggccccatttcctgggggcgtcctggaggcg

SEQ ID NO: 6313 - DNA, 119 bp, homo sapiens
catggactcggactctgtctcggcctcctcaggattcggttctggttccacctccgcctccatctctggtctggttccacttcctcttcctcctgcatcttggtcttccgaggggtccc

SEQ ID NO: 6314 - DNA, 119 bp, homo sapiens
ccacctccgcctccatctctggctctggttccacttcctcttcctcctgcatcttggtcttccgaggggccctgggggctgaggcagcaccctctggacccagcccaacatcctgatgc

SEQ ID NO: 6315 - DNA, 119 bp, homo sapiens
cccttatcagcacccgcggccccggcagcgccgacgcaggcgcactgcaccgcgccgccgccattttgttctgagcctgtggagcgattaaaccgtgcgcggagctgcttctttggcgg

SEQ ID NO: 6316 - DNA, 119 bp, homo sapiens
gcaggggaaatggaaggtgatgcagtcgaagccattgtggaggagtccgaaacttttattaaaggaaagagagaaagacttaccagagacgccgggaagggggccaggaagaagatgcc

SEQ ID NO: 6317 - DNA, 119 bp, homo sapiens
ttattaaaggaaaggagagaaagacttaccagagacgccgggaagggggccaggaagaagatgcctgcccttaccccagaaccagacggatgggggtgaggtggtccaggatgtcaaca

SEQ ID NO: 6318 - DNA, 119 bp, homo sapiens
agaagatgcctgccacttaccccagaaccagacggatgggggtgaggtggtccaggatgtcaacagcaggtacagatggtgatgatggaacagctggaccccacccttcttcagatgaa

SEQ ID NO: 6319 - DNA, 119 bp, homo sapiens
gatgtcaacagcagtgtacagatggtgatgatggaacagctggaccccacccttcttcagatgaagactaagtaatggagggcacagtggctccagaagcagaggctgctgtggacgat

SEQ ID NO: 6320 - DNA, 119 bp, homo sapiens
ttcagatgaagactgaagtaatggagggcacagtggctccagaagcagaggctgctgtggacgatacccgattataactttacaggttgtaaatatggaggaacagcccataaacatag

SEQ ID NO: 6321 - DNA, 119 bp, homo sapiens
tgtggacgatacccagattataactttacaggttgtaaatatggaggaacagcccataaacataggagacttcagcttgttcaagtacctgttcctgtgactgtacctgttgctaccac

SEQ ID NO: 6322 - DNA, 119 bp, homo sapiens
ataaacataggagaacttcagcttgttcaagtacctgttcctgtgactgtacctgttgctaccacttcatagaagaacttcagggggcttatgaaaatgaagtgtctaaagagggcctt

SEQ ID NO: 6323 - DNA, 119 bp, homo sapiens
ttgctaccacttcagtagaagaacttcagggggcttatgaaaatgaagtgtctaaagagggccttgcggaagtgaacccatgatatgccacaccctacctttgcctgaagggtttcagg

SEQ ID NO: 6324 - DNA, 119 bp, homo sapiens
agagggccttgcggaaagtgaacccatgatatgccacaccctacctttgcctgaagggtttcaggtggtaaagtgggggccaatggagaggtggagacactagaacaaggggaacttcc

SEQ ID NO: 6325 - DNA, 119 bp, homo sapiens
gggtttcaggtggttaaagtgggggccaatggagaggtggagacactagaacaaggggaacttccacccaggaagatcctagttggcaaaaagacccagactatcagccaccagccaaa

SEQ ID NO: 6326 - DNA, 119 bp, homo sapiens
gggaacttccaccccaggaagatcctagttggcaaaaagacccagactatcagccaccagccaaaaaaaaaagaaaaccaaaaagagcaaactgcgttatacagaggagggcaaagatg

SEQ ID NO: 6327 - DNA, 119 bp, homo sapiens
accagccaaaaaaacaaagaaaaccaaaaagagcaaactgcgttatacagaggagggcaaagatgtagagtgtctgtctacgattttgaggaagaacagcaggagggtctgctatcaga

SEQ ID NO: 6328 - DNA, 119 bp, homo sapiens
ggcaaagatgtagatgtgtctgtctacgattttgaggaagaacagcaggagggtctgctatcagaggttatgcagagaaagtggttggtaatatgaagcctccaaagccaacaaaaatt

SEQ ID NO: 6329 - DNA, 119 bp, homo sapiens
gtgtaaagaagacattccagtgtgagctttgcagttacacgtgtccacggcgttcaaatttggatcgtccatgaaaagccacactgatgagagaccacacaagtgccatctctgtggca

SEQ ID NO: 6330 - DNA, 119 bp, homo sapiens
gttcaaatttggatcgtcacatgaaaagccacactgatgagagaccacacaagtgccatctctgtggcaggcattcagaacagtcaccctcctgaggaatcaccttaacacacacacag

SEQ ID NO: 6331 - DNA, 119 bp, homo sapiens
gtactcgtcctcacaagtgcccagactgcgacatggcctttgtgaccagtggagaattggttcggcatctcgttacaaacacacccacgagaagccattcaagtgttccatgtgcgatt

SEQ ID NO: 6332 - DNA, 119 bp, homo sapiens
aagtgcccagactgcgacatggcctttgtgaccagtggagaattggttcggcatcgtcgttacaaacaccccacgagaagccattcaagtgttccatgtgcgattacgccagtgtagaa

SEQ ID NO: 6333 - DNA, 119 bp, homo sapiens
gggaaaagccttatgaatgttatatttgtcatgctcggtttacccaaagtggtaccatgaagatgcacatttacagaagcacacagaaaatgtggccaaatttcactgtccccactgtg

SEQ ID NO: 6334 - DNA, 119 bp, homo sapiens
atgctcggtttacccaaagtggtaccatgaagatgcacattttacagaagcacacagaaaatgtggccaatttcactgtccccactgtgacacagtcatagcccgaaaaagtgatttgg

SEQ ID NO: 6335 - DNA, 119 bp, homo sapiens
gtgtccacttgcgaaagcagcattcctatattgagcaaggcaagaaatgccgttactgtgatgctgtgttcatgagcgctatgccctcatccagcatcagaagtcacacaagaatgaga

SEQ ID NO: 6336 - DNA, 119 bp, homo sapiens
aagaaatgccgttactgtgatgctgtgtttcatgagcgctatgccctcatccagcatcagaagtcacacagaatgagaagcgctttaagtgtgaccagtgtgattacgcttgtagacag

SEQ ID NO: 6337 - DNA, 119 bp, homo sapiens
gagaggcacatgatcatgcacaagcgcacccacaccggggagaagccttacgcctgcagccactgcgatagaccttccgccagaagcagcttctcgacatgcacttcaagcgctatcac

SEQ ID NO: 6338 - DNA, 119 bp, homo sapiens
acaccggggagaagccttacgcctgcagccactgcgataagaccttccgccagaagcagcttctcgacagcacttcaagcgctatcacgaccccaacttcgtccctgcggcttttgtct

SEQ ID NO: 6339 - DNA, 119 bp, homo sapiens
ctgcgataagaccttccgccagaagcagcttctcgacatgcacttcaagcgctatcacgaccccaacttgtccctgcggcttttgtctgttctaagtgtgggaaaacatttacacgtcg

SEQ ID NO: 6340 - DNA, 119 bp, homo sapiens
aataccatggcaagacatgctgataattgtgctggcccagatggcgtagagggggaaaatggaggagaacgaagaagagtaaacgtggaagaaaaagaaagatgcgctctaagaaagaa

SEQ ID NO: 6341 - DNA, 119 bp, homo sapiens
atgctgataattgtgctggcccagatggcgtagagggggaaaatggaggagaaacgaagaagagtaaactggaagaaaaagaaagatgcgctctaagaaagaagattcctctgacagtg

SEQ ID NO: 6342 - DNA, 119 bp, homo sapiens
aaaatgctgaaccagatctggacgacaatgaggatgaggaggagcctgccgtagaaattgaacctgagcagagcctcagcctgtgaccccagccccaccacccgccaagaagcggagag

SEQ ID NO: 6343 - DNA, 119 bp, homo sapiens
agcctgccgtagaaattgaacctgagccagagcctcagcctgtgaccccagccccaccacccgccaagagcggagaggacgaccccctggcagaaccaaccagcccaaacagaaccagc

SEQ ID NO: 6344 - DNA, 119 bp, homo sapiens
caacagctatcattcaggttgaagaccagaatacaggtgcaattgagaacattatagttgaagtaaaaaagagccagatgctgagcccgcagagggagaggaagaggaggcccagccag

SEQ ID NO: 6345 - DNA, 119 bp, homo sapiens
gaagtaaaaaaagagccagatgctgagcccgcagagggagaggaagaggaggcccagccagctgccacaatgcccccaacggagacctcacgcccgagatgatcctcagcatgatggac

SEQ ID NO: 6346 - DNA, 119 bp, homo sapiens
agctgccacagatgcccccaacggagacctcacgcccgagatgatcctcagcatgatggaccggtgatgcggagccttgtgcgtcgccaggacttctctgggctgtgtttaaacggccc

SEQ ID NO: 6347 - DNA, 119 bp, homo sapiens
accggtgatggcggagccttgtgcgtcgccaggacttctctgggctgtgtttaaacggcccgcatcttatttttctcccttctttctttttttggctttgggaaaagcatcattttacc

SEQ ID NO: 6348 - DNA, 119 bp, homo sapiens
ccgcatcttaatttttctcccttctttctttttttggctttgggaaaagcatcattttaccaaacatacgagaacgaaaacttcaaggatgatgttagaaaaaaatgtgatttaactag

SEQ ID NO: 6349 - DNA, 119 bp, homo sapiens
ccaaacataccgagaacgaaaacttcaaggatgatgttagaaaaaaatgtgatttaactagaacttgcttctgatgttagcaaatcatggaatgttctgagtccctgagggtttactgt

SEQ ID NO: 6350 - DNA, 119 bp, homo sapiens
agaacttgctgtctgatgttagcaaatcatggaatgttctgagtccctgagggtttactgtgaagtgctaggacagtgttgacaactaactcgttttcctagatggaaacggagacatt

SEQ ID NO: 6351 - DNA, 119 bp, homo sapiens
gtgaagtgctgaggacagtgttgacaactaactcgttttcctagatggaaacggagacattgacccctcctccatgtggtaaaccactccagaatggccaccaggcttcccagagttct

SEQ ID NO: 6352 - DNA, 119 bp, homo sapiens
ttgacccctccctccatgtggtaaaccactccagaatggccaccaggcttcccagagttctatggtcttttcccaagagagtttttaattgtaaatgcatacttgggaaggacttagag

SEQ ID NO: 6353 - DNA, 119 bp, homo sapiens
ctatggtcttcttcccaagagagtttttaattgtaaatgcatacttgggaaggacttagagttttaaacgttttttgcttttgcttttccctgactccctttgcttggagtcagctgca

SEQ ID NO: 6354 - DNA, 119 bp, homo sapiens
agttttaaactgttttttgcttttgcttttccctgactccctttgcttggagtcagctgcacaccagtatatggcatgctacgatcaggttctgtcctgaaagctttgcctctttcttg

SEQ ID NO: 6355 - DNA, 119 bp, homo sapiens
cacaccagtagtatggcatgctacgatcaggttctgtcctgaaagctttgcctctttcttggcaaagttctggtatggtcaagcttgtaaataactttttttacattttaatcttttcc

SEQ ID NO: 6356 - DNA, 119 bp, homo sapiens
tggcaaagtttctggtatggtcaagcttgtaaataactttttttacattttaatcttttccattaattagaggttgaaaagaagtgcagtgtaagaaaacccagcattttaattacttg

SEQ ID NO: 6357 - DNA, 119 bp, homo sapiens
ccattaattaagaggttgaaaagaagtgcagtgtaagaaaacccagcattttaattacttgcaaattaattaccacagactctgtagtgtgtaaatgttgacaaggaattggatcacaa

SEQ ID NO: 6358 - DNA, 119 bp, homo sapiens
tgcaaattaagttaccacagactctgtagtgtgtaaatgttgacaaggaattggatcacaatcatgtagagaatggcacccagaccactgcccaccagtgacggacatgcacgtggcag

SEQ ID NO: 6359 - DNA, 119 bp, homo sapiens
aatcatgtagcagaatggcacccagaccactgcccaccagtgacggacatgcacgtggcagatcatgattccagcccacggagccagcatttgaaccttgtataattaactttcagtta

SEQ ID NO: 6360 - DNA, 119 bp, homo sapiens
agatcatgatttccagcccacggagccagcatttgaaccttgtataattaactttcagttatgatttccatcgacattttctttgccctgtttgtagctgattgttgtgttttataaat

SEQ ID NO: 6361 - DNA, 119 bp, homo sapiens
tatgatttcccatcgacattttctttgccctgtttgtagctgattgttgtgttttataaatcttctgttaggcagaagggtgattatgagtggttcacagcagcccttataagctgggc

SEQ ID NO: 6362 - DNA, 119 bp, homo sapiens
atcttctgttaaggcagaagggtgattatgagtggttcacagcagcccttataagctgggccagaaaattcactaggtcagtaatttaaaccttggatcttcaaaaaataaaataatgt

SEQ ID NO: 6363 - DNA, 119 bp, homo sapiens
gccagaaaatttcactaggtcagtaatttaaaccttggatcttcaaaaaataaaataatgtgaagcaaaccaactaaaaagtgattcttgcacatgaactgtcacatgtttaaaaatgt

SEQ ID NO: 6364 - DNA, 119 bp, homo sapiens
gtgaagcaaaaccaactaaaaagtgattcttgcacatgaactgtcacatgtttaaaaatgtgttttttaagagcctcagtcttactgatttcaaacacttttttcttctgtgtattgct

SEQ ID NO: 6365 - DNA, 119 bp, homo sapiens
gtgttttttagagagcctcagtcttactgatttcaaacacttttttcttctgtgtattgcttttaagaggccatcagttagctatcagactctaggttgatgcattttgtacttagctg

SEQ ID NO: 6366 - DNA, 119 bp, homo sapiens
cttttaagagagccatcagttagctatcagactctaggttgatgcattttgtacttagctgtactgtgtatatttttcattattttaggacgccaacatgagacctgtaataaaatatg

SEQ ID NO: 6367 - DNA, 119 bp, homo sapiens
tgtactgtgtgatatttttcattattttaggacgccaacatgagacctgtaataaaatatgtaatggggtgaaagctggggaggaggatctactgctgtacagctaataaatcataacg

SEQ ID NO: 6368 - DNA, 119 bp, homo sapiens
gaggaagttgtatccaattcagaaacgcggtccttcgggacctgctagttttataccccggaggatcctcccggcgggctggcacgggaggtggagaaagaggcttgggcggccccgct

SEQ ID NO: 6369 - DNA, 119 bp, homo sapiens
accccggaggatcctccccggcgggctggcacgggaggtggagaaagaggcttgggcggccccgctgtaccgcgtgtgggaggacgcacgggcctgcttcaaagctttgggataacagc

SEQ ID NO: 6370 - DNA, 119 bp, homo sapiens
ggcggccccgctgtagccgcgtgtgggaggacgcacgggcctgcttcaaagctttgggataacagcgccccgggggataatgaatgcggagcctccgttttcagtcgacttcagatgtg

SEQ ID NO: 6371 - DNA, 119 bp, homo sapiens
tgggataacagcgcctccgggggataatgaatgcggagcctccgttttcagtcgacttcagatgtgtctcacttttttccgctgtagccgcaaggcaaggaaacatttctcttcccgta

SEQ ID NO: 6372 - DNA, 119 bp, homo sapiens
acttcagatgtgtctccacttttttccgctgtagccgcaaggcaaggaaacatttctcttcccgtactgggaggctgaggagtgcactgggtgttcttttctcctctaacccagaactg

SEQ ID NO: 6373 - DNA, 119 bp, homo sapiens
tctcttcccgtactgaggaggctgaggagtgcactgggtgttcttttctcctctaacccagaactgcgaacagaggctgagtccctgtaaagaacagctccagaaaagccaggagagcg

SEQ ID NO: 6374 - DNA, 119 bp, homo sapiens
aacccagaactgcgagacagaggctgagtccctgtaaagaacagctccagaaaagccaggagagcgcagagggcatccgggaggccaggaggggttcgctggggcctcaaccgcaccca

SEQ ID NO: 6375 - DNA, 119 bp, homo sapiens
gccaggagagcgcaggagggcatccgggaggccaggaggggttcgctggggcctcaaccgcacccacatggtcccacctgcgagggggcgggacctcgtggcgctggaccaatcagcac

SEQ ID NO: 6376 - DNA, 119 bp, homo sapiens
caaccgcacccacatcggtcccacctgcgagggggcgggacctcgtggcgctggaccaatcagcacccactgcgctcacctggcctcctcccgctggctcccgggggctgcggtgctca

SEQ ID NO: 6377 - DNA, 119 bp, homo sapiens
accaatcagcacccacctgcgctcacctggcctcctcccgctggctcccgggggctgcggtgctcaaagggcaagagctgagcggaacaccggcccgccgtcgcggcagctgcttcacc

SEQ ID NO: 6378 - DNA, 119 bp, homo sapiens
ctgcggtgctcaaaggggcaagagctgagcggaacaccggcccgccgtcgcggcagctgcttcaccccttctctgcagccatggggctccctcgtggacctctcgcgtctctcctcctt

SEQ ID NO: 6379 - DNA, 119 bp, homo sapiens
gaaagaaggtcactgaaggaaaggaatccattgaagatcttcccatccaaacgtatcttacgaagacacagagagattgggtggttgctccaatatctgtccctgaaaatggcaagggt

SEQ ID NO: 6380 - DNA, 119 bp, homo sapiens
aatccattgaagatcttcccatccaaacgtatcttacgaagacacaagagagattgggtggttgctccatatctgtccctgaaaatggcaagggtcccttcccccagagactgaatcag

SEQ ID NO: 6381 - DNA, 119 bp, homo sapiens
ctcaagtctaataaagatagagacaccaagattttctacagcatcacggggccgggggcagacagccccctgagggtgtcttcgctgtagagaaggagacaggctggttgttgttgaat

SEQ ID NO: 6382 - DNA, 119 bp, homo sapiens
tacagcatcacggggccgggggcagacagcccccctgagggtgtcttcgctgtagagaaggagacaggcggttgttgttgaataagccactggaccgggaggagattgccaagtatgag

SEQ ID NO: 6383 - DNA, 119 bp, homo sapiens
ctctttggccacgctgtgtcagagaatggtgcctcagtggaggaccccatgaacatctccatcatcgtgccgaccagaatgaccacaagcccaagtttacccaggacaccttccgaggg

SEQ ID NO: 6384 - DNA, 119 bp, homo sapiens
atggtgcctcagtggaggaccccatgaacatctccatcatcgtgaccgaccagaatgaccacaagcccagtttacccaggacaccttccgagggagtgtcttagagggagtcctaccag

SEQ ID NO: 6385 - DNA, 119 bp, homo sapiens
gtacttctgtgatgcaggtgacagccacggatgaggatgatgccatctacacctacaatggggtggttgttactccatccatagccaagaaccaaaggacccacacgacctcatgttca

SEQ ID NO: 6386 - DNA, 119 bp, homo sapiens
aatggggtggttgcttactccatccatagccaagaaccaaaggacccacacgacctcatgttcaccattaccggagcacaggcaccatcagcgtcatctccagtggcctggaccgggaa

SEQ ID NO: 6387 - DNA, 119 bp, homo sapiens
aaagtccctgagtacacactgaccatccaggccacagacatggatggggacggctccaccaccacggcatggcagtagtggagatccttgatgccaatgacaatgctcccatgtttgac

SEQ ID NO: 6388 - DNA, 119 bp, homo sapiens
gagtacacactgaccatccaggccacagacatggatggggacggctccaccaccacggcagtggcagtatggagatccttgatgccaatgacaatgctcccatgtttgacccccagaag

SEQ ID NO: 6389 - DNA, 119 bp, homo sapiens
tacgaggcccatgtgcctgagaatgcagtgggccatgaggtgcagaggctgacggtcactgatctggaccccccaactcaccagcgtggcgtgccacctaccttatcatgggcggtgac

SEQ ID NO: 6390 - DNA, 119 bp, homo sapiens
catgaggtgcagaggctgacggtcactgatctggacgcccccaactcaccagcgtggcgtgccacctacttatcatgggcggtgacgacggggaccattttaccatcaccacccaccct

SEQ ID NO: 6391 - DNA, 119 bp, homo sapiens
gacgcccccaactcaccagcgtggcgtgccacctaccttatcatgggcggtgacgacggggaccattttccatcaccacccaccctgagagcaaccagggcatcctgacaaccaggaag

SEQ ID NO: 6392 - DNA, 119 bp, homo sapiens
ggtttggattttgaggccaaaaaccagcacaccctgtacgttgaagtgaccaacgaggccccttttgtgtgaagctcccaacctccacagccaccatagtggtccacgtggaggatgtg

SEQ ID NO: 6393 - DNA, 119 bp, homo sapiens
ttgaagtgaccaacgaggccccttttgtgctgaagctcccaacctccacagccaccatagtggtccacgggaggatgtgaatgaggcacctgtgtttgtcccaccctccaaagtcgttg

SEQ ID NO: 6394 - DNA, 119 bp, homo sapiens
aacctccacagccaccatagtggtccacgtggaggatgtgaatgaggcacctgtgtttgtcccaccctcaaagtcgttgaggtccaggagggcatccccactggggagcctgtgtgtgt

SEQ ID NO: 6395 - DNA, 119 bp, homo sapiens
aatgaggcacctgtgtttgtcccaccctccaaagtcgttgaggtccaggagggcatccccactggggagctgtgtgtgtctacactgcagaagaccctgacaaggagaatcaaaagatc

SEQ ID NO: 6396 - DNA, 119 bp, homo sapiens
ctaccgcatcctgagagacccagcagggtggctagccatggacccagacagtgggcaggtcacagctgtggcaccctcgaccgtgaggatgagcagtttgtgaggaacaacatctatga

SEQ ID NO: 6397 - DNA, 119 bp, homo sapiens
ggtggctagccatggacccagacagtgggcaggtcacagctgtgggcaccctcgaccgtgaggatgagcgtttgtgaggaacaacatctatgaagtcatggtcttggccatggacaatg

SEQ ID NO: 6398 - DNA, 119 bp, homo sapiens
gaagccctcccaccactggcacgggaacccttctgctaacactgattgatgtcaatgaccatggcccagccctgagccccgtcagatcaccatctgcaaccaaagccctgtgcgccagg

SEQ ID NO: 6399 - DNA, 119 bp, homo sapiens
caatgaccatggcccagtccctgagccccgtcagatcaccatctgcaaccaaagccctgtgcgccaggtctgaacatcacggacaaggacctgtctccccacacctcccctttccaggc

SEQ ID NO: 6400 - DNA, 119 bp, homo sapiens
agccctgtgcgccaggtgctgaacatcacggacaaggacctgtctccccacacctcccctttccaggccagctcacagatgactcagacatctactggacggcagaggtcaacgaggaa

SEQ ID NO: 6401 - DNA, 119 bp, homo sapiens
gtgacacagtggtcttgtccctgaagaagttcctgaagcaggatacatatgacgtgcacctttctctgttgaccatggcaacaaagagcagctgacggtgatcagggccactgtgtgcg

SEQ ID NO: 6402 - DNA, 119 bp, homo sapiens
tacatatgacgtgcacctttctctgtctgaccatggcaacaaagagcagctgacggtgatcagggccacgtgtgcgactgccatggccatgtcgaaacctgccctggaccctggaaggg

SEQ ID NO: 6403 - DNA, 119 bp, homo sapiens
gagcagctgacggtgatcagggccactgtgtgcgactgccatggccatgtcgaaacctgccctggacccggaagggaggtttcatcctccctgtgctgggggctgtcctggctctgctg

SEQ ID NO: 6404 - DNA, 119 bp, homo sapiens
tcctcctgctggtgctgcttttgttggtgagaaagaagcggaagatcaaggagcccctcctactcccagagatgacacccgtgacaacgtcttctactatggcgaagaggggggtggcg

SEQ ID NO: 6405 - DNA, 119 bp, homo sapiens
gtgctgcttttgttggtgagaaagaagcggaagatcaaggagcccctcctactcccagaagatgacaccgtgacaacgtcttctactatggcgaagaggggggtggcgaagaggaccag

SEQ ID NO: 6406 - DNA, 119 bp, homo sapiens
gactatgacatcacccagctccaccgaggtctggaggccaggccggaggtggttctccgcaatgacgtgcaccaaccatcatcccgacacccatgtaccgtcctcggccagccaaccca

SEQ ID NO: 6407 - DNA, 119 bp, homo sapiens
ggtctggaggccaggccggaggtggttctccgcaatgacgtggcaccaaccatcatcccgacacccatgaccgtcctcggccagccaacccagatgaaatcggcaactttataattgag

SEQ ID NO: 6408 - DNA, 119 bp, homo sapiens
aacctgaaggcggctaacacagaccccacagccccgccctacgacaccctcttggtgttcgactatgaggcagcggctccgacgccgcgtccctgagctccctcacctcctccgcctcc

SEQ ID NO: 6409 - DNA, 119 bp, homo sapiens
ttcgactatgagggcagcggctccgacgccgcgtccctgagctccctcacctcctccgcctccgaccaaaccaagattacgattatctgaacgagtggggcagccgcttcaagaagctg

SEQ ID NO: 6410 - DNA, 119 bp, homo sapiens
gcctccgaccaagaccaagattacgattatctgaacgagtggggcagccgcttcaagaagctggcagactgtacggtggcggggaggacgactaggcggcctgcctgcagggctgggga

SEQ ID NO: 6411 - DNA, 119 bp, homo sapiens
aagctggcagacatgtacggtggcggggaggacgactaggcggcctgcctgcagggctggggaccaaactcaggccacagagcatctccaaggggtctcagttcccccttcagctgagg

SEQ ID NO: 6412 - DNA, 119 bp, homo sapiens
tggggaccaaacgtcaggccacagagcatctccaaggggtctcagttcccccttcagctgaggacttcgagcttgtcaggaagtggccgtagcaacttggcggagacaggctatgagtc

SEQ ID NO: 6413 - DNA, 119 bp, homo sapiens
ctgaggacttcggagcttgtcaggaagtggccgtagcaacttggcggagacaggctatgagtctgacgtagagtggtggcttccttagcctttcaggatggaggaatgtgggcagtttg

SEQ ID NO: 6414 - DNA, 119 bp, homo sapiens
tgagtctgacgttagagtggtggcttccttagcctttcaggatggaggaatgtgggcagtttgacttcacactgaaaacctctccacctgggccagggttgcctcagaggccaagtttc

SEQ ID NO: 6415 - DNA, 119 bp, homo sapiens
agtttgacttcagcactgaaaacctctccacctgggccagggttgcctcagaggccaagtttccagaagctcttacctgccgtaaaatgctcaaccctgtgtcctgggcctgggcctgc

SEQ ID NO: 6416 - DNA, 119 bp, homo sapiens
agtttccagaagcctcttacctgccgtaaaatgctcaaccctgtgtcctgggcctgggcctgctgtgacgacctacagtggactttctctctggaatggaaccttcttaggcctcctgg

SEQ ID NO: 6417 - DNA, 119 bp, homo sapiens
gcctgctgtgactgacctacagtggactttctctctggaatggaaccttcttaggcctcctggtgcaactaatttttttttttaatgctatcttcaaaacgttagagaaagttcttcaa

SEQ ID NO: 6418 - DNA, 119 bp, homo sapiens
tcctggtgcaacttaatttttttttttaatgctatcttcaaaacgttagagaaagttcttcaaaagtgcgcccagagctgctgggcccactggccgtcctgcatttctggtttccagac

SEQ ID NO: 6419 - DNA, 119 bp, homo sapiens
cttcaaaagtgcagcccagagctgctgggcccactggccgtcctgcatttctggtttccagaccccaatcctcccattcggatggatctctgcgtttttatactgagtgtgcctaggtt

SEQ ID NO: 6420 - DNA, 119 bp, homo sapiens
ccagaccccaatgcctcccattcggatggatctctgcgtttttatactgagtgtgcctaggttgcccctattttttattttccctgttgcgttgctatagatgaagggtgaggacaatc

SEQ ID NO: 6421 - DNA, 119 bp, homo sapiens
taggttgccccttattttttattttccctgttgcgttgctatagatgaagggtgaggacaatcgtgtattgtactagaacttttttattaaagaaacttttcccagaggtgcctgggga

SEQ ID NO: 6422 - DNA, 119 bp, homo sapiens
tggtttagctttaaaaaaaaaaatctttcttgtgcttactgccgtgtccccactgcctggtgtgcggtgcattgggtgatggcggggcgttggaccacaggactggtgtgtgaggtgcc

SEQ ID NO: 6423 - DNA, 119 bp, homo sapiens
gcctggtgtgcggtgacattgggtgatggcggggcgttggaccacaggactggtgtgtgaggtgccgccagagatggggtgacctggtgatctgggagtgatctggggagcccaggctg

SEQ ID NO: 6424 - DNA, 119 bp, homo sapiens
gtgtgaggtgccgcctagagatggggtgacctggtgatctgggagtgatctggggagcccaggctggagcggggagggtagctactgcagctcctgccctggtgccgcacttctgtccc

SEQ ID NO: 6425 - DNA, 119 bp, homo sapiens
gagcccaggctggagacggggagggtagctactgcagctcctgccctggtgccgcacttctgtcccgggggtggcgctggcccagactgtcccatcccatgcctcagggccccctcctg

SEQ ID NO: 6426 - DNA, 119 bp, homo sapiens
cacttctgtcccgggaggtggcgctggcccagactgtcccatcccatgcctcagggccccctcctgctgactgggccagccgtgcttgccagtcccagcgggttctcggccccgcgaca

SEQ ID NO: 6427 - DNA, 119 bp, homo sapiens
ggccccctcctgctgcactgggccagccgtgcttgccagtcccagcgggttctcggccccgcgacagccccttgctcagagctcttgggcgatgcggctgggttggacagagcagatgc

SEQ ID NO: 6428 - DNA, 119 bp, homo sapiens
ggccccgcgacagcctccttgctcagagctcttgggcgatgcggctgggttggacagagcagatgctggcatgcctccactggggacatgcacagggcctggggtctgtggggacgtga

SEQ ID NO: 6429 - DNA, 119 bp, homo sapiens
cagagcagatgctggccatgcctccactggggacatgcacagggcctggggtctgtggggacgtgaggacggtctgacgatgacgacacacccagcatcagcccgcctccacctggagg

SEQ ID NO: 6430 - DNA, 119 bp, homo sapiens
gtggggacgtgaggaacggtctgacgatgacgacacacccagcatcagcccgcctccacctggaggcccccagcacctggcccgggacccaccctctctccagaacctgtcgctgtgcc

SEQ ID NO: 6431 - DNA, 119 bp, homo sapiens
ctgacagctgtgcccgaggtccagggcacaacggagaggggagtgctcacatggcgagcacacggtgagggagaccaggctcgcgggagctgctgctatttgttatttccaggggactg

SEQ ID NO: 6432 - DNA, 119 bp, homo sapiens
agcacacggtgagaggagaccaggctcgcgggagctgctgctatttgttatttccaggggactgggagctggagagtgggcagctctgctgatggggattaggagaagcagagagattt

SEQ ID NO: 6433 - DNA, 119 bp, homo sapiens
ggggactgggagcctggagagtgggcagctctgctgatggggattaggagaagcagagagatttacactatcttacagagtcagcggtcccgccacccacagcctcgcagccctcgaac

SEQ ID NO: 6434 - DNA, 119 bp, homo sapiens
agagatttacactcatcttacagagtcagcggtcccgccacccacagcctcgcagccctcgaacctcggggcccccacgcccaattaacagacaggagactgaggccccaggaggggag

SEQ ID NO: 6435 - DNA, 119 bp, homo sapiens
cctcgaacctcggaggcccccacgcccaattaacagacaggagactgaggccccaggaggggaggaggtcccgcacctggcctgagaatacttgggtcacctcctgcctgacactgggg

SEQ ID NO: 6436 - DNA, 119 bp, homo sapiens
gaggggaggaggtccccgcacctggcctgagaatacttgggtcacctcctgcctgacactgggggccagccgctgccagcaggacgggtggcgatggggtgggagacgggatgggggca

SEQ ID NO: 6437 - DNA, 119 bp, homo sapiens
cactgggggccagtccgctgccagcaggacgggtggcgatggggtgggagacgggatgggggcagggaaccagcagcctgtctctctggtcccgctccccagtggtggtggcctggcct

SEQ ID NO: 6438 - DNA, 119 bp, homo sapiens
tgggggcagggaacccagcagcctgtctctctggtcccgctccccagtggtggtggcctggcctgaccaggttgctccatgacctcggcctaggccaaggcgtggtggctgtcaccagg

SEQ ID NO: 6439 - DNA, 119 bp, homo sapiens
cctggcctgaccacggttgctccatgacctcggcctaggccaaggcgtggtggctgtcaccagggcacgccccggttctcgggttgggccgaggagggggcccgggagggcggcaggct

SEQ ID NO: 6440 - DNA, 119 bp, homo sapiens
tcaccagggcacgtccccggttctcgggttgggccgaggagggggcccgggagggcggcaggctcaggcggcggccaggccctgtccagagcctgtgcatgttccttggccagcagccg

SEQ ID NO: 6441 - DNA, 119 bp, homo sapiens
ggcaggctcaggctggcggccaggccctgtccagagcctgtgcatgttccttggccagcagccgcagggcgcctcctccagggcgaagccatctgcgaaggtgggagcaaaggcatgag

SEQ ID NO: 6442 - DNA, 119 bp, homo sapiens
agcagccgcagggacgcctcctccagggcgaagccatctgcgaaggtgggagcaaaggcatgaggcccgaggacgcttgcagccccgggcccgggcccaggaggcgggggaggcctggc

SEQ ID NO: 6443 - DNA, 119 bp, homo sapiens
ggcatgaggcccgaaggacgcttgcagccccgggcccgggcccaggaggcgggggaggcctggcacggcggcggtccggggcccaaccagggctccaggggcagcgacatggccggggg

SEQ ID NO: 6444 - DNA, 119 bp, homo sapiens
ggcctggcacggccggcggtccggggcccaaccagggctccaggggcagcgacatggccggggggcggggaacggcagcgctggggcctcggggagtctcggagctgccacggcacccg

SEQ ID NO: 6445 - DNA, 119 bp, homo sapiens
gccggggggcgggcgaacggcagcgctggggcctcggggagtctcggagctgccacggcacccgagcctactccagccgctcctggcggcgccacttggcccggcggttctggaaccac

SEQ ID NO: 6446 - DNA, 119 bp, homo sapiens
ctgcacgcgcacctcaggtaggtgcaccttggctgccagctcctcacggctgtacacatccgggtagtggaggcctcgaacgcccgctccagctggtgcagctggtaggtggtgaaggt

SEQ ID NO: 6447 - DNA, 119 bp, homo sapiens
tacacatccgggtagtgagaggcctcgaacgcccgctccagctggtgcagctggtaggtggtgaaggtgtgcggttcctccggtgcttcttcttgggggcctcctcgcccggccccaga

SEQ ID NO: 6448 - DNA, 119 bp, homo sapiens
ggtaggtggtgaaggtggtgcggttcctccggtgcttcttcttgggggcctcctcgcccggccccagaccccaccctcggttgccggcccctcgcccgggctcaggaacatggctccca

SEQ ID NO: 6449 - DNA, 119 bp, homo sapiens
tgagatataactgaagctttatctggagtgggggaatgggggtgtggtcagttggggcacccaaagacaccatgctctcggtgaaggcgccgaggtcctggcattgtttctggttctct

SEQ ID NO: 6450 - DNA, 119 bp, homo sapiens
aatgggggtgtggtcagttggggcacccaaagacaaccatgctctcggtgaaggcgccgaggtcctggcttgtttctggttctcttcgtcttggcattcgtcctcctcgggccagtgct

SEQ ID NO: 6451 - DNA, 119 bp, homo sapiens
aaccatgctctcggtgaaggcgccgaggtcctggcattgtttctggttctcttcgtcttggcattcgtctcctcgggccagtgctccacccaagtgtccttcccgatgatgtagctgag

SEQ ID NO: 6452 - DNA, 119 bp, homo sapiens
ttgggcttctctccccagaaatcggaggagagaccccacatgaggtagtgtttcttctcctccagcttcgggcttctctgcacttgatggggctgatgaacgtgcgctgctgtccaacc

SEQ ID NO: 6453 - DNA, 119 bp, homo sapiens
agaaatcggaggagagaccccacatgaggtagtgtttcttctcctccagcttcagggcttctctgcactgatggggctgatgaacgtgcgctgctgtccaacctgcacctcatccgagc

SEQ ID NO: 6454 - DNA, 119 bp, homo sapiens
ctcttctgatcgcaggaggctggcagattcccagtggatacggtgggtgatcttggagctgcggctgggagttggagggacacatcaaggttcagttcctggtggtcaggggcgtcctt

SEQ ID NO: 6455 - DNA, 119 bp, homo sapiens
acggtgggtgatcttggagctgcggctgggcagttggagggacacatcaaggttcagttcctggtggtcggggcgtccttttggtattgagccaaggcttggaacaccatgaaggtggc

SEQ ID NO: 6456 - DNA, 119 bp, homo sapiens
ctgggtagagccatagccaccaccgtagtatctctgttcattgagccaacgcacgacgggaggcacaaatcaaagtcttttagctgcagtagggccaagagggcataggatgtggcctc

SEQ ID NO: 6457 - DNA, 119 bp, homo sapiens
gccaacgcacgacgggaggcacaaagtcaaagtcttttagctgcagtagggccaagagggcataggatgggcctccacgttgtagagctgcttaccagggtcctcccagcggttcttat

SEQ ID NO: 6458 - DNA, 119 bp, homo sapiens
ctttggctgtggtcagaaatttgttaagaagaggccccttcagcctgcccatctgggccagagcatagcagcaatggccacagtgtaggatctctgtaggttcatgtagttggcttcaa

SEQ ID NO: 6459 - DNA, 119 bp, homo sapiens
cttcagcctgcccatctgggccagagcatagccagcaatggccacagtgtaggatctctgtaggttcattagttggcttcaaggaagtctcctgctttagtgatgctgcctggcaggct

SEQ ID NO: 6460 - DNA, 119 bp, homo sapiens
aatcatttcttggtgtatcacgggcgcatcctcctggaagaccccgtcgggcttctgcttctccaggatagccatttaacagccccgcagaggacttgggagtcgatggcgatgaggtt

SEQ ID NO: 6461 - DNA, 119 bp, homo sapiens
accccgtcgggcttctgcttctccaggatcagccatttaacagccccgcagaggacttgggagtcgatgcgatgaggttgacagccagagagaagaccttgaccacgtaggcggtcagc

SEQ ID NO: 6462 - DNA, 119 bp, homo sapiens
ccttcttgatgagctccaaggccccctgccgcttctctaggccgaacttctcccactgctccgtttcatcaggtaatgcacagcgatgaccgtgggcgtcatgccgatcatgttctgtt

SEQ ID NO: 6463 - DNA, 119 bp, homo sapiens
cgaacttctcccactgctccgtttcatccaggtaatgcacagcgatgaccgtgggcgtcatgccgatcagttctgttccccgcagcccgagggggtcacaatgaggtgcttcagccgtt

SEQ ID NO: 6464 - DNA, 119 bp, homo sapiens
cgatgaccgtgggcgtcatgccgatcatgttctgttccccgcagcccgagggggtcacaatgaggtgctcagccgttccgcgtcgacggcatcctctgtcatctgggccactggggtcc

SEQ ID NO: 6465 - DNA, 119 bp, homo sapiens
cacgaccttcagggacttcctgacaccgtcactgatgaaatgatggtagacagcagccttgacttccactcctgcaggccggtctttagcggcacgatgacatatggaacggacaacga

SEQ ID NO: 6466 - DNA, 119 bp, homo sapiens
tagacagcagccttgacttccacttcctgcaggccggtctttagcggcacgatgacatatggaacggacacgaggacttgggggggatggttacggtctgctggtgacgcctcttggtg

SEQ ID NO: 6467 - DNA, 119 bp, homo sapiens
gcacgatgacatatggaacggacaacgaggacttgggggggatggttacggtctgctggtgacgcctctggtggtggccaggctgcagaaggctggattgtggagtagttccaccctca

SEQ ID NO: 6468 - DNA, 119 bp, homo sapiens
cttgagctcttggttctgccggtaattgtagagaacggctcggatttccacctgctcgtttcgaacaacgagtagggtagccgcaggtcgatgaagaagtcctgcattactgtgacctc

SEQ ID NO: 6469 - DNA, 119 bp, homo sapiens
aattgtagagaacggctcggatttccacctgctcgtttcgaacaacagagtagggtagccgcaggtcgagaagaagtcctgcattactgtgacctcgaaggggtctgccacacagatcc

SEQ ID NO: 6470 - DNA, 119 bp, homo sapiens
tcctggccaggcccaggtggctggcccgcgcgtgctgccgccgcagctctgtgatgtagttgcagcagtcaggaagaccttcttgcacgcctcgcccagggagatgaaacgggtccggc

SEQ ID NO: 6471 - DNA, 119 bp, homo sapiens
gccgcagctctgtgatgtagttgcagcagtccaggaagaccttcttgcacgcctcgcccagggagatgaacgggtccggcgctggcacgagaacctcatggggttctcccgcatgccgt

SEQ ID NO: 6472 - DNA, 119 bp, homo sapiens
ccttcttgcacgcctcgcccagggagatgaaacgggtccggcgctggcacgagaacctcatggggttctccgcatgccgtcctcgcagcacttgcgcagctccttggggtacttgccga

SEQ ID NO: 6473 - DNA, 119 bp, homo sapiens
ctgccctctgggcggtctgctggccactgctgctcgtgaaggtcagccctgcgtcggagaagacaccgggtaatccttcccactgcccggggtgcagccgatgtctgccttctccacca

SEQ ID NO: 6474 - DNA, 119 bp, homo sapiens
ggcggtctgctggccactgctgctcgtgaaggtcagccctgcgtcggagaagacaccggcgtaatccttccactgcccggggtgcagccgatgtctgccttctccaccacgtcccagat

SEQ ID NO: 6475 - DNA, 119 bp, homo sapiens
cttactctgcgtcagtttgttcttcttattcagcacgaacacgcccttgtccacggccaccagtaccaccgggccccgtggtcaccctctatcttcagggtcatctgctgcccaggtac

SEQ ID NO: 6476 - DNA, 119 bp, homo sapiens
cacgcccttgtccacggccaccagtaccacccgggccccgtggtcaccctctatcttcagggtcatctgtgcccaggtacaggctgccggtcttctgactggccgctttttaccaccag

SEQ ID NO: 6477 - DNA, 119 bp, homo sapiens
cgagcccacgcaggagtccttgacgtccacccacacggagtcggccaccacctccctctggccgctggcccgatcagcgtgtagtacgccaccaggcggaaggaagggatgaagtcggt

SEQ ID NO: 6478 - DNA, 119 bp, homo sapiens
gccaccacctccctctggccgctggcaccgatcagcgtgtagtacgccaccaggcggaaggaagggatgagtcggtggtgatggacaggggcagcaccaccaggtcctggccgggctct

SEQ ID NO: 6479 - DNA, 119 bp, homo sapiens
acgccaccaggcggaaggaagggatgaagtcggtggtgatggacaggggcagcaccaccaggtcctggcgggctctcgcacctggcgtcccgccttcaacagcctgcccttgttcatga

SEQ ID NO: 6480 - DNA, 119 bp, homo sapiens
caggtaggtgtagtagcggatcttggcctcgtgggcgcggtccattcgcaggaggaagttgacgttgaggtctccccgggtctgagctctgtacgtagcactgagagatgcaggtaatt

SEQ ID NO: 6481 - DNA, 119 bp, homo sapiens
tcgcaggaggaagttgacgttgagggtctccccgggtctgagctctgtacgtagcactgagagatgcagtaattgttggagttgcccacggtgctgtagggcagagcctgcatggtcct

SEQ ID NO: 6482 - DNA, 119 bp, homo sapiens
tgtacgtagcactgagagatgcaggtaattgttggagttgcccacggtgctgtagggcagagcctgcatgtcctggtagcctgctctgcctccgagagctcctgcttcttcgtgcgcac

SEQ ID NO: 6483 - DNA, 119 bp, homo sapiens
cgtgatgctcaagggcttctggctggggtgtgtgttgatgctgagtttggccacgccatctccctgggtagagactgcacagtgtcctcgccctggactgccacggggactcggtaggc

SEQ ID NO: 6484 - DNA, 119 bp, homo sapiens
tgtgttgatgctgagtttggccacgccatctccctgggttagagactgcacagtgtcctcgccctggacgccacggggactcggtaggctggagagccatcagggttcgtcacgaacac

SEQ ID NO: 6485 - DNA, 119 bp, homo sapiens
ctgagtgcaagatgacggtggcagacacgtacaaagacttccccaccaggtcttctgctcgggggttctcaccccgtccagcagtaccttccggctcagcacaacctcccccgagccat

SEQ ID NO: 6486 - DNA, 119 bp, homo sapiens
caagatgacggtggcagacacgtacaaagacttccccaccaggtcttctgctcgggggttctgcacccctccagcagtaccttccggctcagcacaacctcccccgagccatcctcaat

SEQ ID NO: 6487 - DNA, 119 bp, homo sapiens
ctgtggagccaggggtgtagatggtcttgtctgtctggatgaagaggtacccgctctgcaggctgaccacaccaccttctccaccacttgggtcccgaaggtggcctgcacggtcacga

SEQ ID NO: 6488 - DNA, 119 bp, homo sapiens
gtacccgctctgcaggctgaccagcaccaccttctccaccacttgggtcccgaaggtggcctgcacggtacgaacttgttgcgccccttttctgacttgaactccctgttggctgggat

SEQ ID NO: 6489 - DNA, 119 bp, homo sapiens
cgtgaaggtgacgttgcccatgtggttggtggcaggggtcagcacagtcttctcactggacagcactagtttttgcctgggaagtcgtggacagtaacagtgactggaacatccccttg

SEQ ID NO: 6490 - DNA, 119 bp, homo sapiens
ggtcagcacagtcttctcactggacagcactagttttttgcctgggaagtcgtggacagtaacagtgacggaacatccccttgcgcgtcgtgggcctccagcaccatggtctcctcgct

SEQ ID NO: 6491 - DNA, 119 bp, homo sapiens
tttgcctgggaagtcgtggacagtaacagtgactggaacatccccttgcgcgtcgtgggcctccagcacatggtctcctcgctctccagccgcaagatgttgggggtgatgatagagta

SEQ ID NO: 6492 - DNA, 119 bp, homo sapiens
atgggactccccagagccagggggaggtgggttagtagcaggagcagcaggctgggacctgaggtgggtccatggtgctgggacagtgcagggtcagagggacagagggacagagggag

SEQ ID NO: 6493 - DNA, 119 bp, homo sapiens
ccagggggaggtgggttagtagcaggagcagcaggctgggacctgaggtgggtcccatggtgctgggacgtgcagggtcagagggacagagggacagagggagaggatggggaggagtg

SEQ ID NO: 6494 - DNA, 119 bp, homo sapiens
ttaaacaaaactttattggtaatagttttcaaatatgtttacaacagcacactgttcaagaggaagtctgtccttcgcagcacacaggttgaatcgcccccgcacccacccggggcccc

SEQ ID NO: 6495 - DNA, 119 bp, homo sapiens
caagaggaagtctcgtccttcgcagcacacaggttgaatcgcccccgcacccacccggggccccaccccggcctgagaactcctcctgggatggggagaagttatgagagggggaaata

SEQ ID NO: 6496 - DNA, 119 bp, homo sapiens
ggggccccaccccaggcctgagaactcctcctgggatggggagaagttatgagagggggaaatacggggtgaatggggtggctccccagcggctccccacttttctattacgagagaaa

SEQ ID NO: 6497 - DNA, 119 bp, homo sapiens
gggaaatacggggatgaatggggtggctccccagcggctccccacttttctattacgagagaaaaaagccaaatgagaaagtgggggagaggtgatggacagctgacagctaagctgga

SEQ ID NO: 6498 - DNA, 119 bp, homo sapiens
gagagaaaaaagcacaaatgagaaagtgggggagaggtgatggacagctgacagctaagctggaggagggcgcccaggatgggggaggcggaagctggtgggtgagtaaaacaggcagc

SEQ ID NO: 6499 - DNA, 119 bp, homo sapiens
aagctggaggaggggcgcccaggatgggggaggcggaagctggtgggtgagtaaaacaggcagcccctcccagcagctctagccttgaaccccgggccgtggcttggggggacttggcc

SEQ ID NO: 6500 - DNA, 119 bp, homo sapiens
caggcagcccctccccagcagctctagccttgaaccccgggccgtggcttggggggacttggcctcttcgttcccttttgcagggatgccctccccactcagctgagggaaggctggac

SEQ ID NO: 6501 - DNA, 119 bp, homo sapiens
acttggcctcttctgttcccttttgcagggatgccctccccactcagctgagggaaggctggacgttaaatctagcggagaataaaattaaggagttggggggaaacgctgctgggagg

SEQ ID NO: 6502 - DNA, 119 bp, homo sapiens
ggctggacgttaaaatctagcggagaataaaattaaggagttggggggaaacgctgctgggaggaaagattgggcttggggctccccctctgtctttttgggggatgactcctctttgg

SEQ ID NO: 6503 - DNA, 119 bp, homo sapiens
ctgggaggaaagacttgggcttggggctccccctctgtctttttgggggatgactcctctttggcaggggaggggcagctgctttgtctggctttcaaagcccaagggtgaagacaggt

SEQ ID NO: 6504 - DNA, 119 bp, homo sapiens
ctctttggcagggagaggggcagctgctttgtctggctttcaaagcccaagggtgaagacaggtctgttgggaaaaagagagcggaggcttcctaaaggggcctagaccctcgcaggat

SEQ ID NO: 6505 - DNA, 119 bp, homo sapiens
agacaggtctgttggggaaaaagagagcggaggcttcctaaaggggcctagaccctcgcaggattggcaagaggattccccggggaggggcccaggggagattagcagcggggaggttc

SEQ ID NO: 6506 - DNA, 119 bp, homo sapiens
cgcaggattggcagagaggattccccggggaggggcccaggggagattagcagcggggaggttcaaacccagcgcctccctttccaaagtcagtctgcttctctttaaaatggatttga

SEQ ID NO: 6507 - DNA, 119 bp, homo sapiens
ggaggttcaaaccccagcgcctccctttccaaagtcagtctgcttctctttaaaatggatttgaggaatgggggacatgggaggggtgggagtagaggaaggagggagggaggcactgg

SEQ ID NO: 6508 - DNA, 119 bp, homo sapiens
ggatttgaggaatggggggacatgggaggggtgggagtagaggaaggagggagggaggcactggtggaattaaataagattttaaattgttgtttttttaaaaaaattctagcaagcaa

SEQ ID NO: 6509 - DNA, 119 bp, homo sapiens
ggcactggtggaacttaaataagattttaaattgttgtttttttaaaaaaattctagcaagcaacccacgaacatgtcactaaaaatctctccttcccaggcaggattactccgaaagg

SEQ ID NO: 6510 - DNA, 119 bp, homo sapiens
gcaagcaacccactgaacatgtcactaaaaatctctccttcccaggcaggattactccgaaaggaaggtggcgcttcgttcatttgcccttagcaagtggggcctgtggttgggtggga

SEQ ID NO: 6511 - DNA, 119 bp, homo sapiens
ccgaaaggaaggttggcgcttcgttcatttgcccttagcaagtggggcctgtggttgggtgggatggggtgtgggtgggggctggagttaagcgtgagcccctctttccataccctgtc

SEQ ID NO: 6512 - DNA, 119 bp, homo sapiens
gggtgggatgggggtgtgggtgggggctggagttaagcgtgagcccctctttccataccctgtccctggtacaccagcaagacctggtctgactggagttgagaaactcgtttaaaaca

SEQ ID NO: 6513 - DNA, 119 bp, homo sapiens
ctggtgtttctgtccctctgattatctgggcttcctgctccccctaaccctggagggtggggtgggggtaaattagatgcaaggaactctggggccctctggctgttcaatccaaccct

SEQ ID NO: 6514 - DNA, 119 bp, homo sapiens
ctctgattatctgggcttcctgctccccctaaccctggagggtggggtgggggtgaaattagatgcaagaactctggggccctctggctgttcaatccaaccctcccacccccccgacc

SEQ ID NO: 6515 - DNA, 119 bp, homo sapiens
cccatgggggcacaggcatgcccctaaaactcagaaaactccttgccacacttctcattgatggagaccggatttcttcttcctcatagtcgtcaaagttactcgtatccccagggcct

SEQ ID NO: 6516 - DNA, 119 bp, homo sapiens
ctcagaaaactccttgccacacttctcattgatggagacccggatttcttcttcctcatagtcgtcaaattactcgtatccccagggcctttaaactttggtatgaagggagcttccac

SEQ ID NO: 6517 - DNA, 119 bp, homo sapiens
cttcctctggtagatggcaatccagtcagttgtggcaaaccacttgtggttcttgatatcgttgaccccttcttgaggttcccaaagcgcttggtgagatctacctgcaggaggttccg

SEQ ID NO: 6518 - DNA, 119 bp, homo sapiens
gtggttcttgatatcgttgaccccattcttgaggttcccaaagcgcttggtgagatctacctgcaggagttccgcagcaggtccttcaagtcagagctgaagtgggaagggaagcgcac

SEQ ID NO: 6519 - DNA, 119 bp, homo sapiens
cttcccagagacgatcttctcatagatctggatgggctggtctgcgaagaagggcgggtagccagcggcatttcatagataagaacccccagggcccaccagtccacggccttgttgta

SEQ ID NO: 6520 - DNA, 119 bp, homo sapiens
cccagagacgatcttctcatagatctggatgggctggtctgcgaagaagggcgggtagccagcggccattcatagataagaacccccagggcccaccagtccacggccttgttgtagcc

SEQ ID NO: 6521 - DNA, 119 bp, homo sapiens
ctgaatgtagccctgctggtcaatgagcagattctccggcttcaggtccctgtagatgagatccagcgatgcagatactcaaaggtcaggacgatctgggccgcgtagaaacgggcatg

SEQ ID NO: 6522 - DNA, 119 bp, homo sapiens
tagccctgctggtcaatgagcagattctccggcttcaggtccctgtagatgagatccagcgagtgcagaactcaaaggtcaggacgatctgggccgcgtagaaacgggcatggggctca

SEQ ID NO: 6523 - DNA, 119 bp, homo sapiens
cttctgtttgtcgaggatcttcatggcatagtggttcccggtctccttgtgtttcaccagcatcacccgccgaaggagcccgtgccgagggtcttgattcgttcaaactgatccaagtg

SEQ ID NO: 6524 - DNA, 119 bp, homo sapiens
gtcgaggatcttcatggcatagtggttcccggtctccttgtgtttcaccagcatcacccgcccgaaggacccgtgccgagggtcttgattcgttcaaactgatccaagtgggctgtgtt

SEQ ID NO: 6525 - DNA, 119 bp, homo sapiens
gggcggcggcggcggcggccctcgggctggctgcgctagctgcggcgccgcgacccccgcccagcccctcttcccgcgtctctccgcgcccgcccgcccgggaacctcagcccaagatc

SEQ ID NO: 6526 - DNA, 119 bp, homo sapiens
ccagcccctgcttcccgcgtctctccgcgcccgcccgcccgggaacctcagcccaagatctctgccgcttctgtgacgcccccgcagcccgccgctcattggcctaggccgccctgact

SEQ ID NO: 6527 - DNA, 119 bp, homo sapiens
tctgccgctgtctgtgacgcccccgcagcccgccgctcattggcctaggccgccctgactgacggctcacgccgcctcccattggccctcccgcgaccttcccgcgccactataggctc

SEQ ID NO: 6528 - DNA, 119 bp, homo sapiens
actagaggtggggttagcgcttggaagcaccgaccaacgtgagcgcaacgcggcagggacacctgacccggcggcgcccagcccctcggattgccagtcactgctcgctttggggcacg

SEQ ID NO: 6529 - DNA, 119 bp, homo sapiens
gcgcaacgcggcagggacacctgaccccggcggcgcccagcccctcggattgccagtcactgctcgcttggggcacggaggtgcccagtcctgcggggcacccgacgtcctgtcgccga

SEQ ID NO: 6530 - DNA, 119 bp, homo sapiens
tctcccgagcgctaacattccagaactcggatggggcgaaggggagggagggatgggccacccacacgtacctccccgcgtggagccccgcctaccactgatccagggggtggcagctc

SEQ ID NO: 6531 - DNA, 119 bp, homo sapiens
acccacacgtgacctccccgcgtggagccccgcctaccactgatccagggggtggcagctccggccgggcgagcggggtgggcgggtcctaggaaaccctacccggccgcccttggcag

SEQ ID NO: 6532 - DNA, 119 bp, homo sapiens
tccggccgggacgagcggggtgggcgggtcctaggaaaccctacccggccgcccttggcagcgcctaagcggagcgcgcggctctgcagcctgcttgccccggagttggcacccacgga

SEQ ID NO: 6533 - DNA, 119 bp, homo sapiens
agcgcctaaggcggagcgcgcggctctgcagcctgcttgccccggagttggcacccacggaggatggggccgcaccctcagcttcgcagggagccaccgtggaggccagggcggtgcag

SEQ ID NO: 6534 - DNA, 119 bp, homo sapiens
gaggatggggaccgcaccctcagcttcgcagggagccaccgtggaggccagggcggtgcagagacacgagtgtgactcggagtgcgcctggggaggatggacgagggagcgggggaccg

SEQ ID NO: 6535 - DNA, 119 bp, homo sapiens
agagacacgacgtgtgactcggagtgcgcctggggaggatggacgagggagcgggggaccgctaacgggctccctctgcgcgccccgtccgcagaggcgcacgtcgagggtcccgggcg

SEQ ID NO: 6536 - DNA, 119 bp, homo sapiens
cgctaacggggctccctctgcgcgccccgtccgcagaggcgcacgtcgagggtcccgggcgggctccgtgacgttggcggtagcgccgagcgagtcacggaccatgaagagcgttcgtg

SEQ ID NO: 6537 - DNA, 119 bp, homo sapiens
cgggctccgtggacgttggcggtagcgccgagcgagtcacggaccatgaagagcgttcgtgccgcgcggccaaggccgggatgggggttagccacatcctgccgcgctgagggggaggc

SEQ ID NO: 6538 - DNA, 119 bp, homo sapiens
agccggagcccaccgcgatggcgagggaggagtgcaaggcgctgctggacgggctcaacaagacgactggtgctaccaccacctggtgctgaccgtcggtggctcggcggactcgcaga

SEQ ID NO: 6539 - DNA, 119 bp, homo sapiens
aagacgactgcgtgctaccaccacctggtgctgaccgtcggtggctcggcggactcgcagaacctgcggaggagctgcaaaagacgcgccagaaggcgcaggagctggcggtgtccacc

SEQ ID NO: 6540 - DNA, 119 bp, homo sapiens
gaacctgcggcaggagctgcaaaagacgcgccagaaggcgcaggagctggcggtgtccacctgcgcccgctgactgctgtgctgcgcgaccggggcctggccgccgacgagcgcgccga

SEQ ID NO: 6541 - DNA, 119 bp, homo sapiens
cctgcgcccggctgactgctgtgctgcgcgaccggggcctggccgccgacgagcgcgccgagttcgagcgctctgggtggccttctcgggctgcctggacctgctggaagcggacatgc

SEQ ID NO: 6542 - DNA, 119 bp, homo sapiens
gagttcgagcggctctgggtggccttctcgggctgcctggacctgctggaagcggacatgcgacgcgcgtggagctgggcgccgcgttcccgctgcacgcgccgcggcggccgctggtg

SEQ ID NO: 6543 - DNA, 119 bp, homo sapiens
gcgacgcgcgctggagctgggcgccgcgttcccgctgcacgcgccgcggcggccgctggtgcgcacagggtggctggcgcctcctccggcgtggcggcgcgcgcgctgagcacccgcag

SEQ ID NO: 6544 - DNA, 119 bp, homo sapiens
tgcgcacaggtgtggctggcgcctcctccggcgtggcggcgcgcgcgctgagcacccgcagcctgcggccgaggcggagggcgacttcgacgtcgcggacctgcgggagctggagcgcg

SEQ ID NO: 6545 - DNA, 119 bp, homo sapiens
agcctgcggctcgaggcggagggcgacttcgacgtcgcggacctgcgggagctggagcgcgaggtccttaggtgggcgagatgatcgacaacatggagatgaaggtcaacgtgccccgc

SEQ ID NO: 6546 - DNA, 119 bp, homo sapiens
cgaggtccttcaggtgggcgagatgatcgacaacatggagatgaaggtcaacgtgccccgctggaccgtcaagcccggcaggcggcgggcgccgagctcctgtccacggtcagcgccgg

SEQ ID NO: 6547 - DNA, 119 bp, homo sapiens
gctggaccgtgcaagcccggcaggcggcgggcgccgagctcctgtccacggtcagcgccggcccctcctggtcgtgtccttgcaggagcgcggggggggttgcgaccccaggaaggccc

SEQ ID NO: 6548 - DNA, 119 bp, homo sapiens
ggcccctcctcggtcgtgtccttgcaggagcgcggggggggttgcgaccccaggaaggccctggccgcctccttttcggcgccgtgctgctggcggctgtggccctagccgtgtgcgtg

SEQ ID NO: 6549 - DNA, 119 bp, homo sapiens
cctggccgccatccttttcggcgccgtgctgctggcggctgtggccctagccgtgtgcgtggcgaagctagctgacggacacccgacggccgcctgctgctgccgctccctcccctgag

SEQ ID NO: 6550 - DNA, 119 bp, homo sapiens
tggcgaagctgagctgacggacacccgacggccgcctgctgctgccgctccctcccctgagaaaagactgggatgggtgtggggtctggcctgtgcaaggggagtggtcctaaaacccc

SEQ ID NO: 6551 - DNA, 119 bp, homo sapiens
agaaaagactcgggatgggtgtggggtctggcctgtgcaaggggagtggtcctaaaaccccgtgtgtgctgggtacacgcgcgtttccagtgcacatctgcctgggcaggacacggttt

SEQ ID NO: 6552 - DNA, 119 bp, homo sapiens
ccgtgtgtgcatgggtacacgcgcgtttccagtgcacatctgcctgggcaggacacggtttcctcttgcggcccgggaggagttaactttgcgccggccgtcagggcattaccgctaac

SEQ ID NO: 6553 - DNA, 119 bp, homo sapiens
ttcctcttgctggcccgggaggagttaactttgcgccggccgtcagggcattaccgctaacgtctgcagagctttattccctattaatagaaaaccgtcacagtgaccctagatccctc

SEQ ID NO: 6554 - DNA, 119 bp, homo sapiens
acgtctgcaggagctttattccctattaatagaaaaccgtcacagtgaccctagatccctccgagttaagagttaacacatgtgctgttggggcgtctttacagggagtccgagttcgg

SEQ ID NO: 6555 - DNA, 119 bp, homo sapiens
tccgagttaatgagttaacacatgtgctgttggggcgtctttacagggagtccgagttcggtgcccaccctgccagcgtcgccccctttctgcgtgggacagtttgaaaaggtgggtgg

SEQ ID NO: 6556 - DNA, 119 bp, homo sapiens
ggtgcccacccctgccagcgtcgccccctttctgcgtgggacagtttgaaaaggtgggtggggtggagtaagtttggagagggacgctgtttggttctatgtggttggtctgtttcccg

SEQ ID NO: 6557 - DNA, 119 bp, homo sapiens
ggggtggagtgaagtttggagagggacgctgtttggttctatgtggttggtctgtttcccggacaagaaaattgcaatcaaatgtcagcagcttttattaccttaatctttcagggcct

SEQ ID NO: 6558 - DNA, 119 bp, homo sapiens
cggacaagaaaaattgcaatcaaatgtcagcagcttttattaccttaatctttcagggcctaaatttagagagtgtcccgagagcagttcatacaaagggctttctctaagacgcgcta

SEQ ID NO: 6559 - DNA, 119 bp, homo sapiens
ctaaatttaggagagtgtcccgagagcagttcatacaaagggctttctctaagacgcgctacagcccttctagcagagtttatccattcgtccccaagagcagctagaagagatttgag

SEQ ID NO: 6560 - DNA, 119 bp, homo sapiens
tacagcccttcctagcagagtttatccattcgtccccaagagcagctagaagagatttgaggtcatgactcccactgccgctcaggggctgaccctatttaggaaaccaaagagggtgg

SEQ ID NO: 6561 - DNA, 119 bp, homo sapiens
aggtcatgacctcccactgccgctcaggggctgaccctatttaggaaaccaaagagggtgggttgaaccactctcacggacttggatccagtgcgcacacttgcctgcggaaaagggct

SEQ ID NO: 6562 - DNA, 119 bp, homo sapiens
gggttgaacctactctcacggacttggatccagtgcgcacacttgcctgcggaaaagggctctccccagcacccggagatgggggtaagaggaagagcagaggcttggggtagggccac

SEQ ID NO: 6563 - DNA, 119 bp, homo sapiens
ctctccccagccacccggagatgggggtaagaggaagagcagaggcttggggtagggccacctggtgttaaacaggcactttctccttctctggggcttatttttgttcagaactagac

SEQ ID NO: 6564 - DNA, 119 bp, homo sapiens
acctggtgtttaaacaggcactttctccttctctggggcttatttttgttcagaactagaccagagtgttgaacctcctttgcaggagggctgggaatcctctttagagcacttaatcc

SEQ ID NO: 6565 - DNA, 119 bp, homo sapiens
accagagtgtttgaacctcctttgcaggagggctgggaatcctctttagagcacttaatcctatttatccctggaatgtgcgtgctggccagtaggagggctggctttggcagctccct

SEQ ID NO: 6566 - DNA, 119 bp, homo sapiens
cctatttatcccctggaatgtgcgtgctggccagtaggagggctggctttggcagctccctgacccccggctgcccgcccctccggggtaatgtggcattactggcccacagaggtttt

SEQ ID NO: 6567 - DNA, 119 bp, homo sapiens
ctgacccccgcgctgcccgcccctccggggtaatgtggcattactggcccacagaggttttgagccaatagctctgagactgggttagaatgtaacagctttaacttgggatttaagaa

SEQ ID NO: 6568 - DNA, 119 bp, homo sapiens
ttgagccaatcagctctgagactgggttagaatgtaacagctttaacttgggatttaagaagcttttaaaggtaataatactctgaaagaaaaatgacgtaaccacagcgtgtactatg

SEQ ID NO: 6569 - DNA, 119 bp, homo sapiens
aagcttttaaaaggtaataatactctgaaagaaaaatgacgtaaccacagcgtgtactatgaaagctgtattttaataaagaacgctgggccatgaactcatacctgccaatgagtcaa

SEQ ID NO: 6570 - DNA, 119 bp, homo sapiens
tgaaagctgttattttaataaagaacgctgggccatgaactcatacctgccaatgagtcaaacatagtactttatgtagatacttagattactaaatatatatttcatctacttctgaa

SEQ ID NO: 6571 - DNA, 119 bp, homo sapiens
gatgccaggccaaggtggagcaagcggtggagacagagccggagcccgagctgcgccagcagaccgagtgcagagcggccagcgctgggaactggcactgggtcgcttttgggattacc

SEQ ID NO: 6572 - DNA, 119 bp, homo sapiens
agccggagcccgagctgcgccagcagaccgagtggcagagcggccagcgctgggaactggcactgggtccttttgggattacctgcgctgggtgcagacactgtctgagcaggtgcagg

SEQ ID NO: 6573 - DNA, 119 bp, homo sapiens
agagcggccagcgctgggaactggcactgggtcgcttttgggattacctgcgctgggtgcagacactgttgagcaggtgcaggaggagctgctcagctcccaggtcacccaggaactga

SEQ ID NO: 6574 - DNA, 119 bp, homo sapiens
ggcgctgatggacgagaccatgaaggagttgaaggcctacaaatcggaactggaggaacaactgaccccgtggcggaggagacgcgggcacggctgtccaaggagctgcaggcggcgca

SEQ ID NO: 6575 - DNA, 119 bp, homo sapiens
acaactgaccccggtggcggaggagacgcgggcacggctgtccaaggagctgcaggcggcgcaggcccgctgggcgcggacatggaggacgtgtgcggccgcctggtgcagtaccgcgg

SEQ ID NO: 6576 - DNA, 119 bp, homo sapiens
ggcgcaggcccggctgggcgcggacatggaggacgtgtgcggccgcctggtgcagtaccgcggcgaggtcaggccatgctcggccagagcaccgaggagctgcgggtgcgcctcgcctc

SEQ ID NO: 6577 - DNA, 119 bp, homo sapiens
ccgcggcgaggtgcaggccatgctcggccagagcaccgaggagctgcgggtgcgcctcgcctcccacctcgcaagctgcgtaagcggctcctccgcgatgccgatgacctgcagaagcg

SEQ ID NO: 6578 - DNA, 119 bp, homo sapiens
cgcctcccacctgcgcaagctgcgtaagcggctcctccgcgatgccgatgacctgcagaagcgcctggcgtgtaccaggccggggcccgcgagggcgccgagcgcggcctcagcgccat

SEQ ID NO: 6579 - DNA, 119 bp, homo sapiens
gaagcgcctggcagtgtaccaggccggggcccgcgagggcgccgagcgcggcctcagcgccatccgcgacgcctggggcccctggtggaacagggccgcgtgcgggccgccactgtggg

SEQ ID NO: 6580 - DNA, 119 bp, homo sapiens
cgccatccgcgagcgcctggggcccctggtggaacagggccgcgtgcgggccgccactgtgggctccctgccggccagccgctacaggagcgggcccaggcctggggcgagcggctgcg

SEQ ID NO: 6581 - DNA, 119 bp, homo sapiens
tgtgggctccctggccggccagccgctacaggagcgggcccaggcctggggcgagcggctgcgcgcgcgatggaggagatgggcagccggacccgcgaccgcctggacgaggtgaagga

SEQ ID NO: 6582 - DNA, 119 bp, homo sapiens
gctgcgcgcgcggatggaggagatgggcagccggacccgcgaccgcctggacgaggtgaaggagcaggtgcggaggtgcgcgccaagctggaggagcaggcccagcagatacgcctgca

SEQ ID NO: 6583 - DNA, 119 bp, homo sapiens
gaaggagcaggtggcggaggtgcgcgccaagctggaggagcaggcccagcagatacgcctgcaggccgagccttccaggcccgcctcaagagctggttcgagcccctggtggaagacat

SEQ ID NO: 6584 - DNA, 119 bp, homo sapiens
cctgcaggccgaggccttccaggcccgcctcaagagctggttcgagcccctggtggaagacatgcagcgcagtgggccgggctggtggagaaggtgcaggctgccgtgggcaccagcgc

SEQ ID NO: 6585 - DNA, 119 bp, homo sapiens
agacatgcagcgccagtgggccgggctggtggagaaggtgcaggctgccgtgggcaccagcgccgccccgtgcccagcgacaatcactgaacgccgaagcctgcagccatgcgacccca

SEQ ID NO: 6586 - DNA, 119 bp, homo sapiens
cagcgccgcccctgtgcccagcgacaatcactgaacgccgaagcctgcagccatgcgaccccacgccacccgtgcctcctgcctccgcgcagcctgcagcgggagaccctgtccccgcc

SEQ ID NO: 6587 - DNA, 119 bp, homo sapiens
accccacgccaccccgtgcctcctgcctccgcgcagcctgcagcgggagaccctgtccccgccccagcctcctcctggggtggaccctagtttaataaagattcaccaagtttcacgca

SEQ ID NO: 6588 - DNA, 119 bp, homo sapiens
ttaagatctttaccccagagctcctttaattagaaaacgctgacagtcgatttataaagtagcattcaggtcacagagctcatccacgcccccttcagttgtcgggtgggtaggtcata

SEQ ID NO: 6589 - DNA, 119 bp, homo sapiens
gtagcattcagagtcacagagctcatccacgcccccttcagttgtcgggtgggtaggtcatatggcctgtggaataccccgcttggacagggggacctctgggctgagggacaggtagt

SEQ ID NO: 6590 - DNA, 119 bp, homo sapiens
catatggcctggtggaataccccgcttggacagggggacctctgggctgagggacaggtagtccccctgaggaggcctttgcgtgaaggagggcggaggaggacctggaccagtccaaa

SEQ ID NO: 6591 - DNA, 119 bp, homo sapiens
tagtccccctggaggaggcctttgcgtgaaggagggcggaggaggacctggaccagtccaaaggcaggaggaagggcgatccctgcgtaccgtgaggggcagatttggagggaagttgg

SEQ ID NO: 6592 - DNA, 119 bp, homo sapiens
caaaggcaggaaggaagggcgatccctgcgtaccgtgaggggcagatttggagggaagttgggcgaactacgatgacttaggtagtaaagggacaggccggtccctagcaaaggcaact

SEQ ID NO: 6593 - DNA, 119 bp, homo sapiens
ttgggcgaactgacgatgacttaggtagtaaagggacaggccggtccctagcaaaggcaactgaagaggcagcgagggaggaccggataaaaggacagtagcagtaggtccaggactgg

SEQ ID NO: 6594 - DNA, 119 bp, homo sapiens
aactgaagaggacagcgagggaggaccggataaaaggacagtagcagtaggtccaggactggggactgggaccaagtgactgagcctgaaagccagaatggactagccctggtcaagac

SEQ ID NO: 6595 - DNA, 119 bp, homo sapiens
ctggggactggtgaccaagtgactgagcctgaaagccagaatggactagccctggtcaagaccggttttcctcccaaaaggccacgtcctgctggaacagaccacagaatgccgggctg

SEQ ID NO: 6596 - DNA, 119 bp, homo sapiens
agaccggtttttcctcccaaaaggccacgtcctgctggaacagaccacagaatgccgggctgggaggcgttccctggaagacccagcatagccatgccagtggggtgcgccataggtgg

SEQ ID NO: 6597 - DNA, 119 bp, homo sapiens
gctgggaggcgtttccctggaagacccagcatagccatgccagtggggtgcgccataggtggaagaagagggggttatgttggatcgatccactcagggaggggaggatgtcaatgaca

SEQ ID NO: 6598 - DNA, 119 bp, homo sapiens
gtggaagaagaggggggttatgttggatcgatccactcagggaggggaggatgtcaatgacaggtactagatggattaaggtcaggagccgcagggtggtgactcattggagctaacgc

SEQ ID NO: 6599 - DNA, 119 bp, homo sapiens
gacaggtactaagatggattaaggtcaggagccgcagggtggtgactcattggagctaacgcagtccagattcacccccacctttccccctaagactgaggtagatggaagggggcggg

SEQ ID NO: 6600 - DNA, 119 bp, homo sapiens
acgcagtccaggattcacccccacctttccccctaagactgaggtagatggaagggggcgggtcgggaatccgtaggaactttgtgcatctttacaatggtctgtaccaatgaggagga

SEQ ID NO: 6601 - DNA, 119 bp, homo sapiens
cgggtcgggaagtccgtaggaactttgtgcatctttacaatggtctgtaccaatgaggaggaggtaggtgtgttcggtgcaaaggatgagcgtcctaggggaagggtccactcaggtga

SEQ ID NO: 6602 - DNA, 119 bp, homo sapiens
aggaggtaggtggtgttcggtgcaaaggatgagcgtcctaggggaagggtccactcaggtgagtgaggggcgggtgacagaatgagaggtggctaaatccgggtgcagaattttgtttt

SEQ ID NO: 6603 - DNA, 119 bp, homo sapiens
gtgagtgagggtgcgggtgacagaatgagaggtggctaaatccgggtgcagaattttgttttgccaaaaaggtggacgtcctgctggcctacctagcggtagggaggtggggtctgata

SEQ ID NO: 6604 - DNA, 119 bp, homo sapiens
ttttgccaaaagaggtggacgtcctgctggcctacctagcggtagggaggtggggtctgataaaagacgtgtctttccaaagtgctcaacaaatgcgctggcaggggcggggtgggata

SEQ ID NO: 6605 - DNA, 119 bp, homo sapiens
gataaaagacgctgtctttccaaagtgctcaacaaatgcgctggcaggggcggggtgggatagggcgggtccttcttggaacgttccacctgcaggaggcggagagtcccagtggaagg

SEQ ID NO: 6606 - DNA, 119 bp, homo sapiens
gatagggcggggtccttcttggaacgttccacctgcaggaggcggagagtcccagtggaaggtaccactggcaggttagtagggaggttcgatcagctccagcccaggatctctccggc

SEQ ID NO: 6607 - DNA, 119 bp, homo sapiens
aaggtaccactgggcaggttagtagggaggttcgatcagctccagcccaggatctctccggcgcccccgaggactgggtggtgtcagctgggccggtccaggatgggacagtgcggaga

SEQ ID NO: 6608 - DNA, 119 bp, homo sapiens
cggcgcccccgaaggactgggtggtgtcagctgggccggtccaggatgggacagtgcggagaataggccagacagagacttcgcagtccagacagcagtcacctccaagaccagggccc

SEQ ID NO: 6609 - DNA, 119 bp, homo sapiens
gagaataggccaagacagagacttcgcagtccagacagcagtcacctccaagaccagggccccgagacccctatttctcggacgccggcgcaactgggggtgcaggcggcgggtctcgg

SEQ ID NO: 6610 - DNA, 119 bp, homo sapiens
gccccgagacctcctatttctcggacgccggcgcaactgggggtgcaggcggcgggtctcggaggcagagtgggctcgcacctcctgcagctgagcgcgcagctcctccagggcgagct

SEQ ID NO: 6611 - DNA, 119 bp, homo sapiens
tcggaggcagaggtgggctcgcacctcctgcagctgagcgcgcagctcctccagggcgagctgcgtcgagtcgcctgcacctgcgcctgcaactcctcgagcgccagccccaagtggcc

SEQ ID NO: 6612 - DNA, 119 bp, homo sapiens
agctgcgtcgacgtcgcctgcacctgcgcctgcaactcctcgagcgccagccccaagtggcccacctcgcccgcagcgcctccctggcaacacgtcgctccttttccttgcggcgctgc

SEQ ID NO: 6613 - DNA, 119 bp, homo sapiens
ggcccacctcgccccgcagcgcctccctggcaacacgtcgctccttttccttgcggcgctgctgcaactgtggcgccaatactccagcatcaggcagctgcaggcggtgatgaagatga

SEQ ID NO: 6614 - DNA, 119 bp, homo sapiens
ctgctgcaactggtggcgccaatactccagcatcaggcagctgcaggcggtgatgaagatgatgccctccccagcagctccgcgcccagctcggcggctgcaccctcgttcagcggctt

SEQ ID NO: 6615 - DNA, 119 bp, homo sapiens
atgatgccctcgcccagcagctccgcgcccagctcggcggctgcaccctcgttcagcggcttgatggcacggcattgaaacccatgatgcgcattttggtccgcatctccagccagtgg

SEQ ID NO: 6616 - DNA, 119 bp, homo sapiens
tttatattccattatatattgtgtcacataatatatgaattatacacttttaaaatacatagaattgtaattattgtataaatatgcacacgatggattacataaactctgcttttttt

SEQ ID NO: 6617 - DNA, 119 bp, homo sapiens
cactcagagttgccatgcttctcctctctctgtccacaccgactccagctacaagccattgccactggggacccaagcctgccactcagcaacacagcgaccagcccaggagtagctcc

SEQ ID NO: 6618 - DNA, 119 bp, homo sapiens
caagccattgccactgggggacccaagcctgccactcagcaacacagcgaccagcccaggagtagctcctgagccaatagatcaggttggggcttatgtaaagcccattttctcctggg

SEQ ID NO: 6619 - DNA, 119 bp, homo sapiens
cagcccaggagtagctccgtgagccaatagatcaggttggggcttatgtaaagcccattttctcctgggtggctctcagccattttgcctccctccaggcaatggcctgccctacagag

SEQ ID NO: 6620 - DNA, 119 bp, homo sapiens
agcccattttctcctggggtggctctcagccattttgcctccctccaggcaatggcctgccctacagagaaccaacaagagggacagcagggcctgccaggagatgggaggggcacagc

SEQ ID NO: 6621 - DNA, 119 bp, homo sapiens
atggcctgccctacagagaaaccaacaagagggacagcagggcctgccaggagatgggaggggcacagcctcagggcacctcccagggttttgtgagctgggatgaatgggtttatagt

SEQ ID NO: 6622 - DNA, 119 bp, homo sapiens
agatgggaggggcacagccctcagggcacctcccagggttttgtgagctgggatgaatgggtttatagtctgagtcactccagagggaggattccggattcagcccagcccctgcttcc

SEQ ID NO: 6623 - DNA, 119 bp, homo sapiens
gatgaatgggtttatagtcctgagtcactccagagggaggattccggattcagcccagcccctgcttccaaacaactatggggtggggcagggaacactggaaaagaaatgtacgtgtg

SEQ ID NO: 6624 - DNA, 119 bp, homo sapiens
tttgcgggagacgccctaccaaggacactgggtccatgtcccggtgcgggaccacctcagtgagtttttgagtgaaagaataaataaaggatatttttcctaaggttgacatggacctt

SEQ ID NO: 6625 - DNA, 119 bp, homo sapiens
ccaaggactttttaaatatgaaaaaagaatgcatcaacttgaagataatcagcttcatttacaaatttatctaacccctctccccaaattacaaggtacacagaattctagctagcaga

SEQ ID NO: 6626 - DNA, 119 bp, homo sapiens
aatcagcttcatttacaaatttattctaacccctctccccaaattacaaggtacacagaattctagctacagaacacacgagcagtgaaccatcctctggcctcttgcattttgagagg

SEQ ID NO: 6627 - DNA, 119 bp, homo sapiens
caaggtacacagaattctagctagcagaacacacgagcagtgaaccatcctctggcctcttgcattttggaggacgttctttccacttccacacactctggccacccctgacgccgcag

SEQ ID NO: 6628 - DNA, 119 bp, homo sapiens
atcctctggcctcttgcattttgagaggacgttctttccacttccacacactctggccacccctgacgcgcagtgggggaagtagatggccctgctgcccacgatgactggctgcctgt

SEQ ID NO: 6629 - DNA, 119 bp, homo sapiens
ggcagggctgagtgcgaagtctctgagatgtgagagcagcactccatctgggtcaggacagcgctggggcaggaattggagctcctgcctgtgttcacactcccacctctgtttttttt

SEQ ID NO: 6630 - DNA, 119 bp, homo sapiens
tgagctggcctgggtcactcccagttttaaacacagcccactcaggacccactcggtcagttccctctgtccagcttctccccctcttccagaaggaactgaaatgctgtttcaggcca

SEQ ID NO: 6631 - DNA, 119 bp, homo sapiens
gaagaaaagaaaagtttcagaacctgtttcttggctttctatctgggcagatcttggtccaggccagtttacctctttagagaagggaggtgaggatggaagtcggggaaagcccggcc

SEQ ID NO: 6632 - DNA, 119 bp, homo sapiens
ggtccaggccagttttacctctttagagaagggaggtgaggatggaagtcggggaaagcccggccctccactttcacctgcagcttcccaaaagcgggcccaggtggaatggtcaccca

SEQ ID NO: 6633 - DNA, 119 bp, homo sapiens
aagcccggccctcccactttcacctgcagcttcccaaaagcgggcccaggtggaatggtcacccagtttcacaatgctatgatctctggtgtgatctggggctgctctgagaggggata

SEQ ID NO: 6634 - DNA, 119 bp, homo sapiens
tggtcacccagtttacacaatgctatgatctctggtgtgatctggggctgctctgagaggggatagagaggtctcccactatcaacgccacctctgggatggtctgggcctctgtgtag

SEQ ID NO: 6635 - DNA, 119 bp, homo sapiens
agaggggatagagagggtctcccactatcaacgccacctctgggatggtctgggcctctgtgtagagatgtcaccctcccagcctctgctcagccatcgcctctccctcctcactctgc

SEQ ID NO: 6636 - DNA, 119 bp, homo sapiens
ctctgtgtagagatcgtcaccctcccagcctctgctcagccatcgcctctccctcctcactctgcagctgggtaatccaagcctctcactctgcccctactacttcaccaccctgggca

SEQ ID NO: 6637 - DNA, 119 bp, homo sapiens
catagggtgactcttgggcctctccccatcagaaccctcccagtttccctcctgattttaataagctcttacccattgtggagatccacatggtggttcaggtacagcctcaggatgcc

SEQ ID NO: 6638 - DNA, 119 bp, homo sapiens
tcctgattttaataagctctgtacccattgtggagatccacatggtggttcaggtacagcctcaggatgcttcatcaccttgcagctcctctaatgagagagctacagtcggaaggaca

SEQ ID NO: 6639 - DNA, 119 bp, homo sapiens
tcaggtacagcctcaggatgccttcatcaccttgcagctcctctaatgagagagctacagtcggaaggaagactgcaggctactgggacccaccccctcccgcttcagtggcagatcct

SEQ ID NO: 6640 - DNA, 119 bp, homo sapiens
gagagctacagtcggaaggacagactgcaggctactgggacccaccccctcccgcttcagtggcagatctggaagagaaacccagtagaaaagggtggttcctagactgttcctctcag

SEQ ID NO: 6641 - DNA, 119 bp, homo sapiens
tcccgcttcagtggcagatcctggaagagaaacccagtagaaaagggtggttcctagactgttcctctcgctagcaggaaggccaaatggcccgcggggttggcaggagtcccagggta

SEQ ID NO: 6642 - DNA, 119 bp, homo sapiens
caagcagttaaggccaactgctggcctaattggtaggatgggggtgggaccgggggctatggaggcagggggtactgctacatgaagacaggctgtcgggtcagtccagagctccgagg

SEQ ID NO: 6643 - DNA, 119 bp, homo sapiens
atggaggcaggagggtactgctacatgaagacaggctgtcgggtcagtccagagctccgaggaaagaaacaagagcacacagattaggagacacggatggaagatgaaggatgtgacaa

SEQ ID NO: 6644 - DNA, 119 bp, homo sapiens
gaggaaagaaagcaagagcacacagattaggagacacggatggaagatgaaggatgtgacaattgaatcatgggcttggattcgactgggtccctgagaaatgctactgagcaaggtgg

SEQ ID NO: 6645 - DNA, 119 bp, homo sapiens
acaattgaatccatgggcttggattcgactgggtccctgagaaatgctactgagcaaggtggggaaggcagaaaggacatgccacacagtacaagctccagggactctgaggacaggaa

SEQ ID NO: 6646 - DNA, 119 bp, homo sapiens
gtggggaaggcaagaaaggacatgccacacagtacaagctccagggactctgaggacaggaaaataggggctgaggctgaaggacaggctggattagccctagttaggatcaaatttcc

SEQ ID NO: 6647 - DNA, 119 bp, homo sapiens
ggaaaatagggggctgaggctgaaggacaggctggattagccctagttaggatcaaatttcccaccacgaaaggggggttggaggacattcacagaaaagatcctgtagtgccattcca

SEQ ID NO: 6648 - DNA, 119 bp, homo sapiens
ttcccaccacggaaaggggggttggaggacattcacagaaaagatcctgtagtgccattccagtgggtttgccatagactcaaggatgagggggttctgttggaatagtccacttcggg

SEQ ID NO: 6649 - DNA, 119 bp, homo sapiens
tccagtgggttgtgccatagactcaaggatgagggggttctgttggaatagtccacttcgggtctcaaggaaggtacaatgattccagggattgactgcaggccaggaccttttgtggg

SEQ ID NO: 6650 - DNA, 119 bp, homo sapiens
gcaccgtttttttcctccttaagagagcactgatgctcagctagagctgaccttagaaggtgagggggaaaaaggccactgcaacacactgcatttccttacagtggtctgtgccgatt

SEQ ID NO: 6651 - DNA, 119 bp, homo sapiens
ggtgagggggagaaaaggccactgcaacacactgcatttccttacagtggtctgtgccgattgacaaaagaagaaggtgttccagtgtaacagatgagtgtcccagtaaaggttaacac

SEQ ID NO: 6652 - DNA, 119 bp, homo sapiens
gattgacaaaaagaagaaggtgttccagtgtaacagatgagtgtcccagtaaaggttaacactgatcagtaaaccgggggtgggggtaacaataacacattgattcagctcaagaccag

SEQ ID NO: 6653 - DNA, 119 bp, homo sapiens
acactgatcaggtaaaccgggggtgggggtaacaataacacattgattcagctcaagaccaggttccatttttcatttgccagagtgcccacggtgtcctgctggctgggaccttgcag

SEQ ID NO: 6654 - DNA, 119 bp, homo sapiens
ccaggttccattttttcatttgccagagtgcccacggtgtcctgctggctgggaccttgcaggtcgtccggtttggagtgggggataggaggtgaaggatgatggagggggctatgttg

SEQ ID NO: 6655 - DNA, 119 bp, homo sapiens
gcaggtcgtcctggtttggagtgggggataggaggtgaaggatgatggagggggctatgttgcaacgctcacctgctggtcccagtggcaggtaacggctgctcttatcagcaggggta

SEQ ID NO: 6656 - DNA, 119 bp, homo sapiens
gttgcaacgcttcacctgctggtcccagtggcaggtaacggctgctcttatcagcaggggtaaccaaatccaagttgcatcaagatcctggtggtttccactgggccagcgcaggcaag

SEQ ID NO: 6657 - DNA, 119 bp, homo sapiens
ggtaaccaaatgccaagttgcatcaagatcctggtggtttccactgggccagcgcaggcaagggtggtggggaagaaggccacgttaggtacataggccatgtccaaattcaggttcca

SEQ ID NO: 6658 - DNA, 119 bp, homo sapiens
caagggtggtgcgggaagaaggccacgttaggtacataggccatgtccaaattcaggttccatccagcagctcctatttcttggacgcaggcactgcgtgggaagcggaccggccggga

SEQ ID NO: 6659 - DNA, 119 bp, homo sapiens
tccatccagcaagctcctatttcttggacgcaggcactgcgtgggaagcggaccggccgggattgcagactgggcgcgcacctcttgcagctctgtgcgcagttcctccagggcgccct

SEQ ID NO: 6660 - DNA, 119 bp, homo sapiens
gggattgcagagctgggcgcgcacctcttgcagctctgtgcgcagttcctccagggcgccctgtggcgggccgcctgcacctgcgcctgcagcgcttccagcgccagcgccaggtggcc

SEQ ID NO: 6661 - DNA, 119 bp, homo sapiens
ccctgtggcggcgccgcctgcacctgcgcctgcagcgcttccagcgccagcgccaggtggcccacctcgcccgcagcgcgttccaggcagcacgctgctcctcctccttgtggcgctgc

SEQ ID NO: 6662 - DNA, 119 bp, homo sapiens
ggcccacctcgtcccgcagcgcgttccaggcagcacgctgctcctcctccttgtggcgctgctgcgcctgtggcgccagtactccagcactaggcagccgccgcccacgatgaagatgg

SEQ ID NO: 6663 - DNA, 119 bp, homo sapiens
ctgctgcgcctggtggcgccagtactccagcactaggcagccgccgcccacgatgaagatggtggcttccccagcagctctgcgcccagctcagctgccgcctcctcgttcagcggctt

SEQ ID NO: 6664 - DNA, 119 bp, homo sapiens
atggtggcttcgcccagcagctctgcgcccagctcagctgccgcctcctcgttcagcggcttgatgacctgccccggaagcccatgatgcgcatcttggtccgcatctccacccagtga

SEQ ID NO: 6665 - DNA, 119 bp, homo sapiens
gttgagccggcgggaggcagatataggtcttgaagaactcgcttcggcgggcggcctccttaatacggtggcaagcggcttgctgacctgccggatgcccaagtatagcagcttcgcca

SEQ ID NO: 6666 - DNA, 119 bp, homo sapiens
gcttcggcgggcggcctccttaatacggttggcaagcggcttgctgacctgccggatgcccaagtatagagcttcgccatagggaacgcgcccaccaccatcttggcggtctcacaggg

SEQ ID NO: 6667 - DNA, 119 bp, homo sapiens
ttgctgacctgccggatgcccaagtatagcagcttcgccatagggaacgcgcccaccaccatcttggcgtctcacagggcacgcgcaaccttgctgactgggcggggcgcctcaacctc

SEQ ID NO: 6668 - DNA, 119 bp, homo sapiens
tagggaacgcgcccaccaccatcttggcggtctcacagggcacgcgcaaccttgctgactgggcggggccctcaacctcttcactcctcccccgccctctcgtggccatgcgtgcgtca

SEQ ID NO: 6669 - DNA, 119 bp, homo sapiens
accttggccgggattaccctccgagttccaggccatgacaaatgacatcactcccggcccaggcttaaatctccccatgtgaggggatgtgtttccttcagcctctgctgtctggccgc

SEQ ID NO: 6670 - DNA, 119 bp, homo sapiens
actcccggcccaggcttaaaatctccccatgtgaggggatgtgtttccttcagcctctgctgtctggccctctgtctaggtcctgggccacgggagagccccgtccctcctttctgaag

SEQ ID NO: 6671 - DNA, 119 bp, homo sapiens
gccccctgacttgggcctcagtgtccccgaagatcatgatggcgtatatgaacccggggccccactatttgtcaacgccttggccctaagtggccccagtgtggatctgatgcaccagg

SEQ ID NO: 6672 - DNA, 119 bp, homo sapiens
cctcagtgtccccgaagatcatgatggcgtatatgaacccggggccccactattctgtcaacgccttggcctaagtggccccagtgtggatctgatgcaccaggctgtgccctacccaa

SEQ ID NO: 6673 - DNA, 119 bp, homo sapiens
gcgcccccaggaagcagcggcgggagcgcaccaccttcacccggagccaactggaggagctggaggcacgtttgccaagacccagtacccagacgtctatgcccgtgaggaggtggctc

SEQ ID NO: 6674 - DNA, 119 bp, homo sapiens
accttcacccggagccaactggaggagctggaggcactgtttgccaagacccagtacccagacgtctatcccgtgaggaggtggctctgaagatcaatctgcctgagtccagggttcag

SEQ ID NO: 6675 - DNA, 119 bp, homo sapiens
ccccagggggccaggccaaggcccggcctgccaagaggaaggcgggcacgtccccaagaccctccacagtgtgtgtccagaccctctgggcatctcagattcctacagtccccctctgc

SEQ ID NO: 6676 - DNA, 119 bp, homo sapiens
ccctccacagatgtgtgtccagaccctctgggcatctcagattcctacagtccccctctgcccggcccccaggctccccaaccacggcagtggccactgtgtccatctggagcccagcc

SEQ ID NO: 6677 - DNA, 119 bp, homo sapiens
gcccggcccctcaggctccccaaccacggcagtggccactgtgtccatctggagcccagcctcagagtccctttgcctgaggcgcagcgggctgggctggtggcctcagggccgtctct

SEQ ID NO: 6678 - DNA, 119 bp, homo sapiens
cctcagagtcccctttgcctgaggcgcagcgggctgggctggtggcctcagggccgtctctgacctccgcccctatgccatgacctacgccccggcctccgctttctgctcttccccct

SEQ ID NO: 6679 - DNA, 119 bp, homo sapiens
ctgacctccgccccctatgccatgacctacgccccggcctccgctttctgctcttccccctccgcctatggtctccgagctcctatttcagcggcctagacccctacctttctcccatg

SEQ ID NO: 6680 - DNA, 119 bp, homo sapiens
ctccgcctatgggtctccgagctcctatttcagcggcctagacccctacctttctcccatggtgccccactagggggcccggctcttagccccctctctggcccctccgtgggaccttc

SEQ ID NO: 6681 - DNA, 119 bp, homo sapiens
tggtgccccagctagggggcccggctcttagccccctctctggcccctccgtgggaccttccctggcccgtcccccacctccctatcaggccagagctatggcgcctacagccccgtgg

SEQ ID NO: 6682 - DNA, 119 bp, homo sapiens
tccctggcccagtcccccacctccctatcaggccagagctatggcgcctacagccccgtggatagcttgaattcaaggaccccacgggcacctggaaattcacctacaatcccatggac

SEQ ID NO: 6683 - DNA, 119 bp, homo sapiens
ggatagcttggaattcaaggaccccacgggcacctggaaattcacctacaatcccatggaccctctggatacaaggatcagagtgcctggaagtttcagatcttgtagaggacgcagtc

SEQ ID NO: 6684 - DNA, 119 bp, homo sapiens
accctctggactacaaggatcagagtgcctggaagtttcagatcttgtagaggacgcagtctccatctcctccatcgggcctcgggaccctttctcttctgaatctgcttccctgcagt

SEQ ID NO: 6685 - DNA, 119 bp, homo sapiens
tctccatctctctccatcgggcctcgggaccctttctcttctgaatctgcttccctgcagtttagatccgggatggcattcctgagaaagcaacccgaaccagctgtccttctgacagc

SEQ ID NO: 6686 - DNA, 119 bp, homo sapiens
gtttagatcccgggatggcattcctgagaaagcaacccgaaccagctgtccttctgacagctcggtgttagcttacagagaccacccctttcctccacagggagaggctcctccctctc

SEQ ID NO: 6687 - DNA, 119 bp, homo sapiens
gctcggtgttcagcttacagagaccacccctttcctccacagggagaggctcctccctctcctgggacactcacaggtcctagtgattctctcaaccctaacaccgtctggcacgattg

SEQ ID NO: 6688 - DNA, 119 bp, homo sapiens
tcctgggacagctcacaggtcctagtgattctctcaaccctaacaccgtctggcacgattgtgaccgctaagtacaccacgagctccaggcttcagaaagtggtgctgagaacttgctc

SEQ ID NO: 6689 - DNA, 119 bp, homo sapiens
tgtgaccgctgaagtacaccacgagctccaggcttcagaaagtggtgctgagaacttgctccaagaagagtcaaaccaaacttgcagttgatttggggtcatgtttaggtcagaatcac

SEQ ID NO: 6690 - DNA, 119 bp, homo sapiens
tccaagaagaagtcaaaccaaacttgcagttgatttggggtcatgtttaggtcagaatcaccgtgccctgaacaagcaggtaggggggcttgataacttaactttccacgtggacagaa

SEQ ID NO: 6691 - DNA, 119 bp, homo sapiens
ctacacgtggacacttctttagcatatggttagggacctttctagaaattccaaagacagactttaagagccccgtcgggaaaccttaggccaatgatgtggttacattaaaaataaat

SEQ ID NO: 6692 - DNA, 119 bp, homo sapiens
aagacagactttaagaagccccgtcgggaaaccttaggccaatgatgtggttacattaaaaataaattactgggaatttcacagacttcacaaatgtcaggcttacatggtaggtttag

SEQ ID NO: 6693 - DNA, 119 bp, homo sapiens
cattaaaaataaattatctgggaatttcacagacttcacaaatgtcaggcttacatggtaggtttagggaccgtttgagagacaaagatctacattcatatatgtagctatacatatat

SEQ ID NO: 6694 - DNA, 119 bp, homo sapiens
catggtaggtttaggggaccgtttgagagacaaagatctacattcatatatgtagctatacatatatgtctttttcttcttagtttctttttaaagacattttatcactcattcgctca

SEQ ID NO: 6695 - DNA, 119 bp, homo sapiens
agctatacatatatgtactttttcttcttagtttctttttaaagacattttatcactcattcgctcattgcacattgggaatgtgtgtatttggtagggaaatgaaaggcaccttgcct

SEQ ID NO: 6696 - DNA, 119 bp, homo sapiens
cactcattcgctcattagcacattgggaatgtgtgtatttggtagggaaatgaaaggcaccttgcctgtccatctctactccttttttcttttgttttaggattttctaaaggtgagac

SEQ ID NO: 6697 - DNA, 119 bp, homo sapiens
aaggcaccttgcctgttccatctctactccttttttcttttgttttaggattttctaaaggtgagacacggtggaactggggtagctgcttgggacgtaccacctatagttgtggctat

SEQ ID NO: 6698 - DNA, 119 bp, homo sapiens
tctaaaggtgagacactggtggaactggggtagctgcttgggacgtaccacctatagttgtggctatttacagagaagcagcagctagacagactcccatctgtaaataaacaagagat

SEQ ID NO: 6699 - DNA, 119 bp, homo sapiens
atagttgtggctatttcacagagaagcagcagctagacagactcccatctgtaaataaacaagagatagaagagggggaaatagatttggaggaggcagccctacatttcaaacataca

SEQ ID NO: 6700 - DNA, 119 bp, homo sapiens
ggttttcagttttgatggtgggattggaaaatagagcttggcttgaggacattttcctggggtggcaccttatttcttgaaatagaatcttacttatggtgacactggcaagcacttgt

SEQ ID NO: 6701 - DNA, 119 bp, homo sapiens
tggggtggcaccattatttcttgaaatagaatcttacttatggtgacactggcaagcacttgtgagaactgaagacggattgaggtcatttgatgctcagaagttgggtgctgggtccc

SEQ ID NO: 6702 - DNA, 119 bp, homo sapiens
acttgtgagaacctgaagacggattgaggtcatttgatgctcagaagttgggtgctgggtccctgcctttcagtccgagttctcctttcatttttgggtggggaggcgggttccaagag

SEQ ID NO: 6703 - DNA, 119 bp, homo sapiens
ggtccctgccttctcagtccgagttctcctttcatttttgggtggggaggcgggttccaagagcccttcttggtggagttcacaaggcaaggtgtaaaaaaaaaagtagggcaggaaga

SEQ ID NO: 6704 - DNA, 119 bp, homo sapiens
gccagggtcaggagaaaggcgagatgtgaagagaggccgggaggtatcagatgacgtttccagcactagccagaagaggtgcacacagcctagaccccctgaggggtacaccctgatct

SEQ ID NO: 6705 - DNA, 119 bp, homo sapiens
agatgacgtttccagcactagaccagaagaggtgcacacagcctagaccccctgaggggtacaccctgactctagagcccacaaagaggtttttattcaacataaaacgtgttcatctc

SEQ ID NO: 6706 - DNA, 119 bp, homo sapiens
cccctgaggggtacaccctgatctctagagcccacaaagaggtttttattcaacataaaacgtgttcattctcataggcctgagtcatgctgggttctgggacattaagcccaggagtg

SEQ ID NO: 6707 - DNA, 119 bp, homo sapiens
cccaggagtggctcaagagtccagtgtgggatgaaaatataaacagaggaagacaacatatgtcactgggaggctgggggagctagacaaaattcacacgggaggggcagggatgagac

SEQ ID NO: 6708 - DNA, 119 bp, homo sapiens
aacatatgtcactggggaggctgggggagctagacaaaattcacacgggaggggcagggatgagacaatttgtgccctgggtctgtgcaaacgttgggaccagaatccactataagttt

SEQ ID NO: 6709 - DNA, 119 bp, homo sapiens
cagggatgagacaatattgtgccctgggtctgtgcaaacgttgggaccagaatccactataagtttcatcttcggagacacggaagctctgcactggaggccgggactcaggcgtggaa

SEQ ID NO: 6710 - DNA, 119 bp, homo sapiens
cactataagtttcattcttcggagacacggaagctctgcactggaggccgggactcaggcgtggaagagatcttctccttattcaccggggaggctgtgtcttgtgcaaacaagtcata

SEQ ID NO: 6711 - DNA, 119 bp, homo sapiens
tcaggcgtggaagagaatcttctccttattcaccggggaggctgtgtcttgtgcaaacaagtcatagaacttgatgggagttggggagggactgaaggatgcatgcaaggttctgggaa

SEQ ID NO: 6712 - DNA, 119 bp, homo sapiens
aaacaagtcatagaaacttgatgggagttggggagggactgaaggatgcatgcaaggttctgggaaggatgagaagtagtgaaggccaaggggcccccatcacaggccgatggggtaag

SEQ ID NO: 6713 - DNA, 119 bp, homo sapiens
aggttctgggaaggagtgagaagtagtgaaggccaaggggcccccatcacaggccgatggggtaagactcgagagagcctgatcctggggtcttctgagactccaccaggagccggaga

SEQ ID NO: 6714 - DNA, 119 bp, homo sapiens
cgatggggtaagacttcgagagagcctgatcctggggtcttctgagactccaccaggagccggagagggagggagccaaatccagctaggaggttacagattgcttttcctgggctggg

SEQ ID NO: 6715 - DNA, 119 bp, homo sapiens
aggagccggagagggcagggagccaaatccagctaggaggttacagattgcttttcctgggctgggctctgagtgttggttcttccagctgtgcacaggggatttcaaacgttctacgt

SEQ ID NO: 6716 - DNA, 119 bp, homo sapiens
tcctgggctgggctcctgagtgttggttcttccagctgtgcacaggggatttcaaacgttctacgtcctaagccaggaagagtgacaaggcaggtggggacagaaggaagaagccagga

SEQ ID NO: 6717 - DNA, 119 bp, homo sapiens
aacgttctacgtcctaaagccaggaagagtgacaaggcaggtggggacagaaggaagaagccaggagccccctgagaaggtgtcaccttatctgtcctcctcttccccacacactggcc

SEQ ID NO: 6718 - DNA, 119 bp, homo sapiens
aagaagccaggagcctccctgagaaggtgtcaccttatctgtcctcctcttccccacacactggcctctggtcccccttctctgtccacccacagagtgaaaccaattaaaatgttgga

SEQ ID NO: 6719 - DNA, 119 bp, homo sapiens
tagtttcctgtttccggcttcgcttcggcccacccccacgtccaccccgaatccctgcttaaaggccttctttcttgtctaacgccgcaaccagtcctctgagttgccaacgtctttct

SEQ ID NO: 6720 - DNA, 119 bp, homo sapiens
cctgcttaaaggccttgctttcttgtctaacgccgcaaccagtcctctgagttgccaacgtctttcttctgtctcgacgccccgtcgtccggccacagcgattctctgcttagcaggat

SEQ ID NO: 6721 - DNA, 119 bp, homo sapiens
gccaacgtctttcttcttgtctcgacgccccgtcgtccggccacagcgattctctgcttagcaggatcgtccacagcgggacgtgagtccctttcctcctcgcggcttaccgcctctct

SEQ ID NO: 6722 - DNA, 119 bp, homo sapiens
ctgcttagcaggatcggtccacagcgggacgtgagtccctttcctcctcgcggcttaccgcctctctcccctagtgccaggtgctaataaagttgttgtttcaaatgcggccaggaaca

SEQ ID NO: 6723 - DNA, 119 bp, homo sapiens
cttaccgcctctctccgcctagtgccaggtgctaataaagttgttgtttcaaatgcggccaggaacatccgagcggggaccaatcagagagtagctttgcctctataacggcgcgagag

SEQ ID NO: 6724 - DNA, 119 bp, homo sapiens
tgcggccaggaacatcgcgagcggggaccaatcagagagtagctttgcctctataacggcgcgagagtggacgtcatcggtgagcgactaacgctagaaacagtggtgcgcggagagga

SEQ ID NO: 6725 - DNA, 119 bp, homo sapiens
cgaggatgtgcaggaggagacacagctggatctttccggggattcagtcaagaccatcgccaagctatggatagtaagatggtaagaggacaagaggtgttcctagcagggggctctag

SEQ ID NO: 6726 - DNA, 119 bp, homo sapiens
gcagcagctgtcggaggaggagctggagcggctggaggaggcctgcgacatggcgctggagctgaacgctccaagcaccgcatctacgagtatgtggagtcccggatgtccttcatcgc

SEQ ID NO: 6727 - DNA, 119 bp, homo sapiens
tggcgctggagctgaacgcctccaagcaccgcatctacgagtatgtggagtcccggatgtccttcatcgacccaacctgtccatcattatcggggcatccacggccgccaagatcatgg

SEQ ID NO: 6728 - DNA, 119 bp, homo sapiens
gtgtggccggcggcctgaccaacctctccaagatgcccgcctgcaacatcatgctgctcggggcccagccaagacgctgtcgggcttctcgtctacctcagtgctgccccacaccggct

SEQ ID NO: 6729 - DNA, 119 bp, homo sapiens
gcctgcaacatcatgctgctcggggcccagcgcaagacgctgtcgggcttctcgtctacctcagtgctgcccacaccggctacatctaccacagtgacatcgtgcagtccctgccaccg

SEQ ID NO: 6730 - DNA, 119 bp, homo sapiens
gtgggctacgaactgaaggatgagatcgagcgcaaattcgacaagtggcaggagccgccgcctgtgaagaggtgaagccgctgcctgcgcccctggatggacagcggaagaagcgaggc

SEQ ID NO: 6731 - DNA, 119 bp, homo sapiens
cgaactgaaggatgagatcgagcgcaaattcgacaagtggcaggagccgccgcctgtgaagcaggtgaaccgctgcctgcgcccctggatggacagcggaagaagcgaggcggccgcag

SEQ ID NO: 6732 - DNA, 119 bp, homo sapiens
atcgaggaggacgcctaccaggaggacctgggattcagcctgggccacctgggcaagtcgggcagtggggtgtgcggcagacacaggtaaacgaggccaccaaggccaggatctccaag

SEQ ID NO: 6733 - DNA, 119 bp, homo sapiens
gacgcctaccaggaggacctgggattcagcctgggccacctgggcaagtcgggcagtgggcgtgtgcggagacacaggtaaacgaggccaccaaggccaggatctccaagacgctgcag

SEQ ID NO: 6734 - DNA, 119 bp, homo sapiens
ggcctggagattgtgaacccacaggcggcagagaagaaggtggctgaggccaaccagaagtatttctccgcatggctgagttcctcaaggtcaagggcgagaagagtggccttatgtcc

SEQ ID NO: 6735 - DNA, 119 bp, homo sapiens
agtatttctccagcatggctgagttcctcaaggtcaagggcgagaagagtggccttatgtccacctgaagactgcgtgtgtccaaggtggcttcccactgaagggacacagaggtccag

SEQ ID NO: 6736 - DNA, 119 bp, homo sapiens
gtccacctgaatgactgcgtgtgtccaaggtggcttcccactgaagggacacagaggtccagtccttctaagggctaggatcgggttctggcagggagaacctgccctgccactggccc

SEQ ID NO: 6737 - DNA, 119 bp, homo sapiens
ccagtccttctgaagggctaggatcgggttctggcagggagaacctgccctgccactggccccattgctggactgcccagggaggaggccttggaagagtccggcctggcctcccccag

SEQ ID NO: 6738 - DNA, 119 bp, homo sapiens
gccccattgctgggactgcccagggaggaggccttggaagagtccggcctggcctcccccaggaccgagtcaccgcccagtatgggctagagcaggtcttcatcatgccttgtcttttt

SEQ ID NO: 6739 - DNA, 119 bp, homo sapiens
ccaggaccgagatcaccgcccagtatgggctagagcaggtcttcatcatgccttgtcttttttaactgaaaaggagattttttgaaaagagtacaattaaaaggacattgtcaagatct

SEQ ID NO: 6740 - DNA, 119 bp, homo sapiens
tccctcatgtcaaactgctttattacatcttaaataacagtacagtttaatatagtatctatcttgcatcagcttccttgcagtacactgactttaaaattaaatacaaaaggtggaaa

SEQ ID NO: 6741 - DNA, 119 bp, homo sapiens
tatctatcttgcatccagcttccttgcagtacactgactttaaaattaaatacaaaaggtggaaaggggaagggtgcagagagctctacagagttgttggacggaaagagaaagaaggg

SEQ ID NO: 6742 - DNA, 119 bp, homo sapiens
aaggtggaaaggggtaagggtgcagagagctctacagagttgttggacggaaagagaaagaaggggtttatttgtattctctttgccagatccaggcctaccgcaaggtcacagcacag

SEQ ID NO: 6743 - DNA, 119 bp, homo sapiens
gaaagaaggggtttcatttgtattctctttgccagatccaggcctaccgcaaggtcacagcacagtttttatagaatgttgcagaaaacaggatggagaagccactactgctgctatga

SEQ ID NO: 6744 - DNA, 119 bp, homo sapiens
cacagcacagttttgtatagaatgttgcagaaaacaggatggagaagccactactgctgctatgaaggatgcggggggcggggcggggggtcccacagaacctgctttccaaacgctgc

SEQ ID NO: 6745 - DNA, 119 bp, homo sapiens
gctgctatgaaggagtgcggggggcggggcggggggtcccacagaacctgctttccaaacgctgctgctaacactggccttgaaatgaacaccaggacaatctgtgtgtgatgggaatg

SEQ ID NO: 6746 - DNA, 119 bp, homo sapiens
caaacgctgctgctgaacactggccttgaaatgaacaccaggacaatctgtgtgtgatgggaatgagcccctcagatgtggagggccctgaagaatccatataggagggcaggctcttc

SEQ ID NO: 6747 - DNA, 119 bp, homo sapiens
agaatccaacagcagtcgtttgcaacagaacttttttttttttaaagaaataaagaaaacagtgacttacccgctacccaagcgtgtagagccgcgcgctgtactgcttccgatatgtg

SEQ ID NO: 6748 - DNA, 119 bp, homo sapiens
acagtgacttatcccgctacccaagcgtgtagagccgcgcgctgtactgcttccgatatgtgccacagacagcaacgagaagtggacagagccgcaatggttacaactgtaagaggtta

SEQ ID NO: 6749 - DNA, 119 bp, homo sapiens
tgtgccacagagcagcaacgagaagtggacagagccgcaatggttacaactgtaagaggttatttcttaaagaaaaagaacacctaaggactgagtcccatatgcacttttgagcattt

SEQ ID NO: 6750 - DNA, 119 bp, homo sapiens
gttatttcttaaaagaaaaagaacacctaaggactgagtcccatatgcacttttgagcatttctacagctgcgattctaagagtaaacccacccaatatggcaaacaatcaaaattttt

SEQ ID NO: 6751 - DNA, 119 bp, homo sapiens
atttctacagcatgcgattctaagagtaaacccacccaatatggcaaacaatcaaaatttttaaaatttacttagaaagtctgagatcattattttcaaaacattgatttgtacattgt

SEQ ID NO: 6752 - DNA, 119 bp, homo sapiens
ttttaaaatttaacttagaaagtctgagatcattattttcaaaacattgatttgtacattgtttcataccaaataattgactgactatccaagcacaggacaggcatctctcttgaaaa

SEQ ID NO: 6753 - DNA, 119 bp, homo sapiens
ttgtttcatacacaaataattgactgactatccaagcacaggacaggcatctctcttgaaaacagaggtcctcctagttgggggtggggtagtgttaggctattataaacttccctcca

SEQ ID NO: 6754 - DNA, 119 bp, homo sapiens
aaaacagaggttcctcctagttgggggtggggtagtgttaggctattataaacttccctccaacttcacaggaaacccaaagtgagattaaaaactcaactgagaagatagacaggatg

SEQ ID NO: 6755 - DNA, 119 bp, homo sapiens
tccaacttcacaaggaaacccaaagtgagattaaaaactcaactgagaagatagacaggatgggtcaggggaacatggtgctggatctgagctcacttttcagcaaaggtgaaggattc

SEQ ID NO: 6756 - DNA, 119 bp, homo sapiens
gatgggtcaggaggaacatggtgctggatctgagctcacttttcagcaaaggtgaaggattctctgatccgcatttgagaccgtccccgcatgtgcttggccccatggcttctgaacat

SEQ ID NO: 6757 - DNA, 119 bp, homo sapiens
attctctgatcacgcatttgagaccgtccccgcatgtgcttggccccatggcttctgaacatgttctttctatgccacgtttgtgtgcaacaatgatctgtgacatcagacagaaaatt

SEQ ID NO: 6758 - DNA, 119 bp, homo sapiens
acatgttcttttctatgccacgtttgtgtgcaacaatgatctgtgacatcagacagaaaattaaaaaccgggactgaatttacatcattgacaacatcagagaggctgccctagactct

SEQ ID NO: 6759 - DNA, 119 bp, homo sapiens
aattaaaaaccagggactgaatttacatcattgacaacatcagagaggctgccctagactctctggtttgattaactgttgaacacaaaggaatacattttaaaaaggaaatatgaatg

SEQ ID NO: 6760 - DNA, 119 bp, homo sapiens
ctctctggttttgattaactgttgaacacaaaggaatacattttaaaaaggaaatatgaatgcttccaaatcttgctacaaacatgactgaaatttggacacgatgaccagatgaacaa

SEQ ID NO: 6761 - DNA, 119 bp, homo sapiens
aatgcttccaaaatcttgctacaaacatgactgaaatttggacacgatgaccagatgaacaaagccctcgcatgttttgcatgaatgccacaaaacagggtcactggtctaaaattcaa

SEQ ID NO: 6762 - DNA, 119 bp, homo sapiens
acaaagccctcagcatgttttgcatgaatgccacaaaacagggtcactggtctaaaattcaaatacactgtggaaaagtgtgtctgtctgacaattacactcaagtttaccttctggtt

SEQ ID NO: 6763 - DNA, 119 bp, homo sapiens
tcaaatacactggtggaaaagtgtgtctgtctgacaattacactcaagtttaccttctggttaacattttattatatatttccttttaaaattcattcaagacaaaaaagaaaacaaag

SEQ ID NO: 6764 - DNA, 119 bp, homo sapiens
ggttaacatttttattatatatttccttttaaaattcattcaagacaaaaaagaaaacaaagacgatggcccggaaggaatgcacaatttgttttagtttacagcacagagatctttct

SEQ ID NO: 6765 - DNA, 119 bp, homo sapiens
aaagacgatggccccggaaggaatgcacaatttgttttagtttacagcacagagatctttctctcaatggaattgtgctcttggtttcagcaataagtgaaggaaaaaagatcttgccc

SEQ ID NO: 6766 - DNA, 119 bp, homo sapiens
ttctctcaatgggaattgtgctcttggtttcagcaataagtgaaggaaaaaagatcttgcccttttgaattctgaggggaggtgtagggtgtccacgttagtacggttggataggatat

SEQ ID NO: 6767 - DNA, 119 bp, homo sapiens
gcccttttgaagttctgaggggaggtgtagggtgtccacgttagtacggttggataggatatgctctcaggtaacgcgtccaagttggaatggtcttccagtctccatggcatccacat

SEQ ID NO: 6768 - DNA, 119 bp, homo sapiens
ctgcccggtcggctttgagtgcatcccagacgttgcagttgaagtcgtcgtacccagcaaggaggaggccccgctcttggagaaggagacagaggtgatcccgcagatgatgttgtcat

SEQ ID NO: 6769 - DNA, 119 bp, homo sapiens
cgtacccagcaaggaggaggcgcccgctcttggagaaggagacagaggtgatcccgcagatgatgttgtatgggagtaagtcatgagctcctggtcagcacgaaggtcaaacagcctgc

SEQ ID NO: 6770 - DNA, 119 bp, homo sapiens
tgatcccgcagatgatgttgtcatgggagtaagtcatgagctcctggtcagcacgaaggtcaaacagccgcaggtggcgtcgtctgagccagtggcaaatgcattgccatttggaaaga

SEQ ID NO: 6771 - DNA, 119 bp, homo sapiens
gcaaatggcattgatgtcagactcgtggccagtgaaggtctgccggcacatgccttctcgcacatcccaagtttggctgaagcatcacaagcaccagagacgaacagtctggtgtcagg

SEQ ID NO: 6772 - DNA, 119 bp, homo sapiens
gccggcacatgccttctcgcacatcccagagtttggctgaagcatcacaagcaccagagacgaacagtcggtgtcaggagcaagagaaaggctcatgacatctccagtgtgtccggtaa

SEQ ID NO: 6773 - DNA, 119 bp, homo sapiens
gcatcacaagcaccagagacgaacagtctggtgtcaggagcaagagaaaggctcatgacatctccagtggtccggtaaacgtggtcgtctgctggccggtctcgatgtcccacagggca

SEQ ID NO: 6774 - DNA, 119 bp, homo sapiens
ctgtgtgtcctgccagctcacgactcacgcgcacgttcccctcacgagttttcagattgtaaatggagcaatgttatccaggccaccgcaggccacatagttcccagaaggggcatatg

SEQ ID NO: 6775 - DNA, 119 bp, homo sapiens
acgagttttcagattgtaaatggagcaaatgttatccaggccaccgcaggccacatagttcccagaagggcatatgcacaggtcatgacccaggaggagcgcagagggatggcgtggac

SEQ ID NO: 6776 - DNA, 119 bp, homo sapiens
ctcagcgccctcgtcgcggcctgacgcgcccacaccgccgcctcggccgccgctcggcaggtcgtcgcgtcgggccgcgctgcgcgctccgcgggcgctgcgggcaggtgcgcgccggc

SEQ ID NO: 6777 - DNA, 119 bp, homo sapiens
caggtcgtcgcgctcgggccgcgctgcgcgctccgcgggcgctgcgggcaggtgcgcgccggcgaggctggtccagtcccgccgcggcggctgctccactcccggccccgctccccact

SEQ ID NO: 6778 - DNA, 119 bp, homo sapiens
ttagtaacgtacccacattttgctggagttagtttattaaagatgcctacggtgaactctctggcgcagttaaatgcagttttgaaaacctggaaacatcaaatggaggcgggaaatag

SEQ ID NO: 6779 - DNA, 119 bp, homo sapiens
tctctggcgcaggttaaatgcagttttgaaaacctggaaacatcaaatggaggcgggaaataggctgggccgagctgaggggctgaacacagcagtgaccgtgggtcagcaggtcgcct

SEQ ID NO: 6780 - DNA, 119 bp, homo sapiens
aaataggctggggccgagctgaggggctgaacacagcagtgaccgtgggtcagcaggtcgcctgcccagaggccccccaggagagggctcgggcgcccctggcagcccccataccccca

SEQ ID NO: 6781 - DNA, 119 bp, homo sapiens
tcgcctgcccagcaggccccccaggagagggctcgggcgcccctggcagcccccatacccccaggacctgctcgtgagtgcgtctgggtcaggaagagacctctctgtgcgtctcaggc

SEQ ID NO: 6782 - DNA, 119 bp, homo sapiens
cccccaggacctggctcgtgagtgcgtctgggtcaggaagagacctctctgtgcgtctcaggctgagatcagatttctgttttctaaaactggaagcgaccttgacgtgtattgaaggt

SEQ ID NO: 6783 - DNA, 119 bp, homo sapiens
tcaggctgagatgcagatttctgttttctaaaactggaagcgaccttgacgtgtattgaaggtgtgtgtccaaatgcttccgacggaggtgctggccttggttggtttctctctgcccc

SEQ ID NO: 6784 - DNA, 119 bp, homo sapiens
gaaggtgtgtgtgccaaatgcttccgacggaggtgctggccttggttggtttctctctgccccgtgtggcatcaagtcctgggggatgtgctctgcccagccgccctcggggagagcag

SEQ ID NO: 6785 - DNA, 119 bp, homo sapiens
tgccccgtgtggtcatcaagtcctgggggatgtgctctgcccagccgccctcggggagagcagcgccgctcccatggggccgtggggctgctgttctcactgcactggctgaagcaacc

SEQ ID NO: 6786 - DNA, 119 bp, homo sapiens
gagcagcgccgcctcccatggggccgtggggctgctgttctcactgcactggctgaagcaacccgccagctccgtgccccaccccacccagcacgcactcattcagtccattgccttaa

SEQ ID NO: 6787 - DNA, 119 bp, homo sapiens
gcaacccgccagcctccgtgccccaccccacccagcacgcactcattcagtccattgccttaacacaagctgatggggctgttttctcacaatataaacgaataaagtgtcttctggcc

SEQ ID NO: 6788 - DNA, 119 bp, homo sapiens
ccttaacacaagcctgatggggctgttttctcacaatataaacgaataaagtgtcttctggcctacttcgaattacttctcaactgtatggtttggggaagggagggaaacctaaaatc

SEQ ID NO: 6789 - DNA, 119 bp, homo sapiens
ctggcctacttctgaattacttctcaactgtatggtttggggaagggagggaaacctaaaatcccgtccaataagtgaaattcctgaagaagtggctgagtcctaccaggttggggtta

SEQ ID NO: 6790 - DNA, 119 bp, homo sapiens
aaaatcccgtccaaataagtgaaattcctgaagaagtggctgagtcctaccaggttggggttagggaaagttctgggttcaggcgcccctcccagggctgagaaagcgcagccagggac

SEQ ID NO: 6791 - DNA, 119 bp, homo sapiens
gggttagggaaatgttctgggttcaggcgcccctcccagggctgagaaagcgcagccagggacagcttttgttctctcccagggtggctaggttagtatcttacatgacaaaaaactga

SEQ ID NO: 6792 - DNA, 119 bp, homo sapiens
agggacagctttctgttctctcccagggtggctaggttagtatcttacatgacaaaaaactgagagtgtctaacttctgtgcaagcaaggttaatcctgagactaaatcttggcgttca

SEQ ID NO: 6793 - DNA, 119 bp, homo sapiens
aactgagagtgttctaacttctgtgcaagcaaggttaatcctgagactaaatcttggcgttcagactccgtagaggtcatctgtgtccaggcccacccgggcgccggctcagcggtagt

SEQ ID NO: 6794 - DNA, 119 bp, homo sapiens
cgttcagactcccgtagaggtcatctgtgtccaggcccacccgggcgccggctcagcggtagtgccgaagtagatgagcttctggggagggaacttctcccggcagaggggacactccg

SEQ ID NO: 6795 - DNA, 119 bp, homo sapiens
cttgctgctgcaccacgcggtgatgcactcccagcagaacaggtggccgcagggcgtggctgttgggtgctgcgctcctccaggcacagggtgcacagggggtttctggaaacggctct

SEQ ID NO: 6796 - DNA, 119 bp, homo sapiens
gcggtgatgcactcccagcagaacaggtggccgcagggcgtggctgttgggtgcctgcgctcctccaggacagggtgcacagggggtttctggaaacggctctctcctccaaggaggcc

SEQ ID NO: 6797 - DNA, 119 bp, homo sapiens
ctgcggtgagacaggccgcggtgcagcctccactccttcctggctcgctgccgctgcctgaaaccgtacgctgcagccccatggacagcaccaggtgcagcagtgagatgacccccagc

SEQ ID NO: 6798 - DNA, 119 bp, homo sapiens
tgaaaccgtacagctgcagccccatggacagcaccaggtgcagcagtgagatgacccccagcagcctgtgctaacacgggccctcaggtcctctccgggcaggctgcggacacggagct

SEQ ID NO: 6799 - DNA, 119 bp, homo sapiens
cagcagcctgtagctaacacgggccctcaggtcctctccgggcaggctgcggacacggagctgtaaggcgatggcgccacactcatcaggaccctgaggggatctggcctcagcgcctg

SEQ ID NO: 6800 - DNA, 119 bp, homo sapiens
gtacgtgatccccgtgagcctcttggccaggtggtagaagacaccgtggatgtaaaaccaggcaacatgagccgctggaggcaggcgaggccctgtctgaggacgaagaccgcccgcag

SEQ ID NO: 6801 - DNA, 119 bp, homo sapiens
ccaggcaacatgtagccgctggaggcaggcgaggccctgtctgaggacgaagaccgcccgcagcagcgcctcctctgctgctcagtcagggtggccgtgtggtgacgcatccagcgccg

SEQ ID NO: 6802 - DNA, 119 bp, homo sapiens
ccgcagcagcgccctcctctgctgctcagtcagggtggccgtgtggtgacgcatccagcgccgcgccccgagcagccacgcccacctggccccaggctcccctgcaagggtcgcccact

SEQ ID NO: 6803 - DNA, 119 bp, homo sapiens
gcgccgcgcccctgagcagccacgcccacctggccccaggctcccctgcaagggtcgcccactgtcgggtcagcctgcagctcctgctccagggggagcagggccttgtccagcaggta

SEQ ID NO: 6804 - DNA, 119 bp, homo sapiens
cccactgtcggggtcagcctgcagctcctgctccagggggagcagggccttgtccagcaggtagggcagacggcatgcagtgtcaccagcacgccacggcgcagcgaggagggcacatg

SEQ ID NO: 6805 - DNA, 119 bp, homo sapiens
caggtagggcaggacggcatgcagtgtcaccagcacgccacggcgcagcgaggagggcacatgtatccggatgggtccacctggatgatgctgacgtactcctcccccagggtctggta

SEQ ID NO: 6806 - DNA, 119 bp, homo sapiens
ccgccaggctgtgcagggcgccgcccgccgcgctccgcagcccaccgcggtagtactcgtccttctgcgcgcgcggatcacctccggggggctggcggcggccggggccatggccgcgg

SEQ ID NO: 6807 - DNA, 119 bp, homo sapiens
cgctccgcagcccaccgcggtagtactcgtccttctgcgccgcgcggatcacctccggggggctggcggggccggggccatggccgcgggttcgggtggtcccgagcagccacgccggc

SEQ ID NO: 6808 - DNA, 119 bp, homo sapiens
ccttctgcgccgcgcggatcacctccggggggctggcggcggccggggccatggccgcgggttcgggtgtcccgagcagccacgccggccacgcccacgcccagacgggcgagaactga

SEQ ID NO: 6809 - DNA, 119 bp, homo sapiens
agacgtgtaaaagtttagtattttgttcaacaatttaaaaaacagatataataccagcataaaatattgatagcaaataatagattatgtttgtacaaaatccagtaagaaaaacataa

SEQ ID NO: 6810 - DNA, 119 bp, homo sapiens
taaaatattgcatagcaaataatagattatgtttgtacaaaatccagtaagaaaaacataattttctcattaggatgattcataaaatacattttgagcaacagcgataacgagggtcc

SEQ ID NO: 6811 - DNA, 119 bp, homo sapiens
aattttctcatttaggatgattcataaaatacattttgagcaacagcgataacgagggtcccacatgcgagatggcagcaccagagccagacccaccaccacggagttcgcgctcacgg

SEQ ID NO: 6812 - DNA, 119 bp, homo sapiens
cccacatgcgtagatggcagcaccagagccagacccaccaccacggagttcgcgctcacggaacccaggctgctgggtgtcagcagcagctaagctggatgcaggtactacaaaatgac

SEQ ID NO: 6813 - DNA, 119 bp, homo sapiens
ggaacccaggcctgctgggtgtcagcagcagctaagctggatgcaggtactacaaaatgaccagcgctcgtctctgcttcctcagccaagtgcacaggtcagccaggtgggcactgaag

SEQ ID NO: 6814 - DNA, 119 bp, homo sapiens
accagcgctcggtctctgcttcctcagccaagtgcacaggtcagccaggtgggcactgaagtgaaaggcgcagagaggcggggaggacagcctgcagggcaggaggggcacagacaggc

SEQ ID NO: 6815 - DNA, 119 bp, homo sapiens
agtgaaaggctgcagagaggcggggaggacagcctgcagggcaggaggggcacagacaggccccagctggtgccgcaggaaggacgtcaccctcaagccctcactggtagatgaccttc

SEQ ID NO: 6816 - DNA, 119 bp, homo sapiens
gccccagctgggtgccgcaggaaggacgtcaccctcaagccctcactggtagatgaccttcacgcaaaagcctcttcgtttttgtcctcatggtcattgatgtagatcaggatctcctc

SEQ ID NO: 6817 - DNA, 119 bp, homo sapiens
tcacgcaaaatgcctcttcgtttttgtcctcatggtcattgatgtagatcaggatctcctcctcacccatctctgactaggcgcaaactgcaagccgatggtgtaggtctctccacccc

SEQ ID NO: 6818 - DNA, 119 bp, homo sapiens
ctggaaggagtcctctctgaaccgcagcagctccgggtggtcgctgtgcaggtggaatgtcctccgggagggtaggggttggtgtaggtgatcctcttgttgacacccttcccttcgcc

SEQ ID NO: 6819 - DNA, 119 bp, homo sapiens
cagcagctccgggtggtcgctgtgcaggtggaatgtcctccgggaggggtaggggttggtgtaggtgatctcttgttgacacccttcccttcgcccgcagccaacatgatctcaaaggc

SEQ ID NO: 6820 - DNA, 119 bp, homo sapiens
cttggagatgagcggctggcggcagcagaggcacacgagccaggaggccaccagctggtggcaatccactccaccaggttgagatggacaaagcggctgccggccctaaggggcctcac

SEQ ID NO: 6821 - DNA, 119 bp, homo sapiens
gcaatccacgtccaccaggttgagatggacaaagcggctgccggccctaaggggcctcacgccaacatgaggtcctgcaccccacgaggcggcagcacgaagacacctttggggtctgt

SEQ ID NO: 6822 - DNA, 119 bp, homo sapiens
cttcagctcctggggatgagaggtgaaagctctcactttcctcactgtctgtgtcccccgaaggacaaggacaggcgggtcagctggcctgcgacgcaggagacatccacgcgctgcag

SEQ ID NO: 6823 - DNA, 119 bp, homo sapiens
gtcccccgaaggacaagggacaggcgggtcagctggcctgcgacgcaggagacatccacgcgctgcaggagtggaggtagacctgccacgtctgtgtgggtgtcgccagccagcgatcc

SEQ ID NO: 6824 - DNA, 119 bp, homo sapiens
ctggaaatgtgtgccagggcggcaggcggatggccttcttcaggaaggagagctccgggtgatagaagcgaagacctggtccaccacgtggggctgcagctccacagtcaggcagagca

SEQ ID NO: 6825 - DNA, 119 bp, homo sapiens
cttcaggaaggagagctccgggtgatagaagcggaagacctggtccaccacgtggggctgcagctccacgtcaggcagagcacggcgatgggcttgccaccactcgctcggaacaagac

SEQ ID NO: 6826 - DNA, 119 bp, homo sapiens
ctgcaccatggccagctgccctgcagagaagctctggaacttgaaggggacgtgggcggtctcgtggggcgcaggtagagctggggggccaggctgccacgcaggtggaacatgtcctc

SEQ ID NO: 6827 - DNA, 119 bp, homo sapiens
ctggaacttgaaggggacgtgggcggtctcgtgggggcgcaggtagagctggggggccaggctgccacgaggtggaacatgtcctcctccaccggtgtgtgcaggccagcagcaccctt

SEQ ID NO: 6828 - DNA, 119 bp, homo sapiens
ggggcgcaggtagagctggggggccaggctgccacgcaggtggaacatgtcctcctccaccggtgtgtgaggccagcagcacccttgaagtccctccactcctgactgtccacgatgac

SEQ ID NO: 6829 - DNA, 119 bp, homo sapiens
ctgagctcggggttgtcgatctccacagtcaccgtgtgctgtgtgttgtgggggttcttaagcacaaaccaaagaactcggcgacccccagcgtggcgtggagcgtgtgctccgtggtg

SEQ ID NO: 6830 - DNA, 119 bp, homo sapiens
gttcttaagcacaaactcaaagaactcggcgacccccagcgtggcgtggagcgtgtgctccgtggtgatgccaggctcagcaggctggcgatgctctcggccttcgtgcgttcccggta

SEQ ID NO: 6831 - DNA, 119 bp, homo sapiens
tgtgctccgtggtgatggccaggctcagcaggctggcgatgctctcggccttcgtgcgttcccggtaggggcgatgacctgtaggtcccgcaagtgctgtgtgcggacgctctgctgcg

SEQ ID NO: 6832 - DNA, 119 bp, homo sapiens
caacacgctcgtcccgcgccggcccaagtctcccccggcctcctgcaggcgcacagacctcatccgctcagcttacgcctgcgggtggcatccgactcgcggctgacgtcctggggccc

SEQ ID NO: 6833 - DNA, 119 bp, homo sapiens
tgcaggcgcacagacctcatccgctccagcttacgcctgcgggtggcatccgactcgcggctgacgtccggggccccttgccctgccgggcatgggtcagtagcatggcagccagctca

SEQ ID NO: 6834 - DNA, 119 bp, homo sapiens
tggcatccgactcgcggctgacgtcctggggccccttgccctgccgggcatgggtcagtagcatggcagcagctcactgtccacgtccgccagcttctgtgcttgcaccacgtgttttc

SEQ ID NO: 6835 - DNA, 119 bp, homo sapiens
gccttgagcttccagtcgtgaggaggctgcctccagagaagcggctggctccatcgtttgagatgacccagatctggacggtggcaatgtgctacaacctctcactttctgttcacacg

SEQ ID NO: 6836 - DNA, 119 bp, homo sapiens
agcttccagtcgtgaggaggctgcctccagagaagcggctggctccatcgtttgagatgacccgagatcggacggtggcaatgtgctacaacctctcactttctgttcacacgggtgac

SEQ ID NO: 6837 - DNA, 119 bp, homo sapiens
ccacgttggccaaagtcaggtgcagccggcccttcaccaccgagtggacgccgatgggcttgacgcggcaaaccccagcatgtctccactcaccaccatgttgtcctgctcgtattcag

SEQ ID NO: 6838 - DNA, 119 bp, homo sapiens
ccttcaccaccgagtggacgccgatgggcttgacgcggccaaaccccagcatgtctccactcaccaccagttgtcctgctcgtattcagttgccacgacctcaagctcgtgggaggcct

SEQ ID NO: 6839 - DNA, 119 bp, homo sapiens
tgacgcggccaaaccccagcatgtctccactcaccaccatgttgtcctgctcgtattcagttgccacgactcaagctcgtgggaggcctgcacagccggccggccttggcggaggagat

SEQ ID NO: 6840 - DNA, 119 bp, homo sapiens
cttcatctggacggcagcagatccgatgagcagcagggagtctccgtcccagacgtcaatctgcagggttgcacggccaggtagcgggcaaagcagcgccgctcacctggcttcaggaa

SEQ ID NO: 6841 - DNA, 119 bp, homo sapiens
ctccgtcccagacgtcaatctgcagggtctgcacggccaggtagcgggcaaagcagcgccgctcacctgcttcaggaacccagggcccaccatgtacctcagctggaagccaggagacc

SEQ ID NO: 6842 - DNA, 119 bp, homo sapiens
cagcatcaaaggtgccatctctgctcacaggcacgaggatgtgggtcagggcgccagagctgggctggcggcctcatccagctggaccagctgcagtcgtggcgtcgttgcgggtggga

SEQ ID NO: 6843 - DNA, 119 bp, homo sapiens
gaggatgtgggtcagggcgccagagctgggctggccggcctcatccagctggaccagctgcagtcgtgggtcgttgcgggtgggaagcggtagaactggaaggtgaaatacacagtctt

SEQ ID NO: 6844 - DNA, 119 bp, homo sapiens
ccggcctcatccagctggaccagctgcagtcgtggcgtcgttgcgggtgggaagcggtagaactggaagtgaaatacacagtctttggccatgatgttcctcggcagtcctgggccact

SEQ ID NO: 6845 - DNA, 119 bp, homo sapiens
ctgctaaaggcaagaaactgtagcaccatctcgttgctttgtagacaatctgattcttccttctgagggtaaacgtcacaggttctgtagcgctgacagcctcggctggctgtttattg

SEQ ID NO: 6846 - DNA, 119 bp, homo sapiens
ctttgtagacaatctgattcttccttctgagggttaaacgtcacaggttctgtagcgctgacagcctcgctggctgtttattggcatccagaatctcgggaaagccggaggactgcagg

SEQ ID NO: 6847 - DNA, 119 bp, homo sapiens
aacgtcacaggttctgtagcgctgacagcctcggctggctgtttattggcatccagaatctcgggaaagcggaggactgcaggagcaccatggaggctctcgagggctgccctgcagag

SEQ ID NO: 6848 - DNA, 119 bp, homo sapiens
ctcctggtctgggttcccacaacaataggggcatgcaaaggcgtgaacggcagctcctgtaactgttcgcaatggatgtttccaggaccagggaggtctggctcaggtcggcttccagg

SEQ ID NO: 6849 - DNA, 119 bp, homo sapiens
atgcaaaggcgtgaacggcagctcctgtaactgttcggcaatggatgtttccaggaccagggaggtctgctcaggtcggcttccaggtgggagataccggcctccaacgggaactcctg

SEQ ID NO: 6850 - DNA, 119 bp, homo sapiens
tcgaaggggacgtgggtggtttcctggaaggccgccgctccactttggggccactgacaggctccgtggtgcatccaggtgttcttctgagcccagcgagaactggaaccggagtgtac

SEQ ID NO: 6851 - DNA, 119 bp, homo sapiens
tttcctggaaggccgccgctccactttggggccactgacaggctccgtgggtgcatccaggtgttcttcgagcccagcgagaactggaaccggagtgtacccgactccacctgcttcac

SEQ ID NO: 6852 - DNA, 119 bp, homo sapiens
ctcttcagagctcatgctggctgagggtaccttgtagaccagacagtgcgaggggttgggctggatcccccctgcagaggcagggtcacccttccagaatcagcttccagcaaggggtt

SEQ ID NO: 6853 - DNA, 119 bp, homo sapiens
ttgtagaccagacagtgcgaggggttgggctggatcccaccctgcagaggcagggtcacccttccagaacagcttccagcaaggggttccaaacagcccagcggaccatgtgcatgcat

SEQ ID NO: 6854 - DNA, 119 bp, homo sapiens
ggatcccaccctgcagaggcagggtcacccttccagaatcagcttccagcaaggggttccaaacagcccgcggaccatgtgcatgcatgccaggttggacagagaggtgaccgaagctg

SEQ ID NO: 6855 - DNA, 119 bp, homo sapiens
attgccgtccactcctgcagggctgctgaacacgtactccagctggaagatgaccgcaaatgcagggtgccgaccatctctgggaggcggaggcggcttctcaaaaccagagcttggct

SEQ ID NO: 6856 - DNA, 119 bp, homo sapiens
tccactcctgcagggctgctgaacacgtactccagctggaagatgaccgcaaatgcagggtggccgacctctctgggaggcggaggcggcttctcaaaaccagagcttggctcccggag

SEQ ID NO: 6857 - DNA, 119 bp, homo sapiens
ctggtcttggaagaggagaccactttcctgctgaagctagctgagcgcgtcaaggccacatccatctcagcaccagtacaacgacctgcggcctctgcacgaagcccagaccattgtgc

SEQ ID NO: 6858 - DNA, 119 bp, homo sapiens
tgaagctagctgagcgcgtcaaggccacatccatctcaggcaccagtacaacgacctgcggcctctgcagaagcccagaccattgtgcacgcccacacgcaggcgccgctccaggatct

SEQ ID NO: 6859 - DNA, 119 bp, homo sapiens
catctcaggcaccagtacaacgacctgcggcctctgcacgaagcccagaccattgtgcacgcccacacgaggcgccgctccaggatctccagggcaccaccgtccagtgggccacatcc

SEQ ID NO: 6860 - DNA, 119 bp, homo sapiens
ctcctggaagtggtcctggacgtggagctccagcagctcttcctcaaacttctccagggaggggtacaggtgaagaataagtcatccaagtgccccgtgatgggcttctggaggcgagg

SEQ ID NO: 6861 - DNA, 119 bp, homo sapiens
ggacgtggagctccagcagctcttcctcaaacttctccagggaggggtacagggtgaagaataagtcatcaagtgccccgtgatgggcttctggaggcgaggctttcggagagcgtcgc

SEQ ID NO: 6862 - DNA, 119 bp, homo sapiens
cggattctccatgagctggaagcaggccaggtatctgctgcagaccagacaccagaaggttctcaggaaaaggtggaacgcaggctccagggccgggtgtggcttcagcgtgtactgca

SEQ ID NO: 6863 - DNA, 119 bp, homo sapiens
gctgcagaccagacaccagaaggttctcaggaagaaggtggaacgcaggctccagggccgggtgtggctcagcgtgtactgcaggctgcagttctcaatgagggtcatgtgtctgtttt

SEQ ID NO: 6864 - DNA, 119 bp, homo sapiens
cttttgtcctgggaagcagagataggagagtccggctggttgctgaagatccgaagaattccaaacccaaggacaatgtctggaggctcccatcccgtttcttgccctcagcgaccact

SEQ ID NO: 6865 - DNA, 119 bp, homo sapiens
aagaattccaaacccacaggacaatgtctggaggctcccatcccgtttcttgccctcagcgaccacttcaccacagccacgatatgagggtggtttagggatgtgtgaaaatacaaggg

SEQ ID NO: 6866 - DNA, 119 bp, homo sapiens
ctcattaaagacgatcctggacggcggtctcttcgtcggcttcactgtggttttccacgtcctcccaaaaagtgccggtaggtgacatcaaagaaagacactcgcagatggcattcaac

SEQ ID NO: 6867 - DNA, 119 bp, homo sapiens
cggtctcttcgtcggcttcactgtggttttccacgtcctcccaaagaagtgccggtaggtgacatcaaaaaagacactcgcagatggcattcaacctctgacagtacctccagcacgcc

SEQ ID NO: 6868 - DNA, 119 bp, homo sapiens
ctgcctaattaccggtccgtccagccacttgaggacacactggaatgccgtggattccttccaaggctgcgcgctctctgtgggtggggagggacaagcacgttttgggtgaagatcct

SEQ ID NO: 6869 - DNA, 119 bp, homo sapiens
attccttccaaggctggcgcgctctctgtgggtggggagggacaagcacgttttgggtgaagatcctgtccagtcgttcatcctgcccgcctgagggtcccgtgggcttcccggatgat

SEQ ID NO: 6870 - DNA, 119 bp, homo sapiens
ctaggagaccgacccgccgcggccgcgccggaggccacggagcccacgcttttcagagagtctccactcacggacccagaggcccggcggccggtgctcaacggagccacaagcctgag

SEQ ID NO: 6871 - DNA, 119 bp, homo sapiens
gagagtctccactcgacggacccagaggcccggcggccggtgctcaacggagccacaagcctgaggaccaggactggccgaggggcgcgccccgtccgctgccacccgcgggaggagcc

SEQ ID NO: 6872 - DNA, 119 bp, homo sapiens
caagcctgaggaccgaggactggccgaggggcgcgccccgtccgctgccacccgcgggaggagcctcggaggcggcgcaccgcgccgcacactcagtccaagaacccgcctcgcgtcac

SEQ ID NO: 6873 - DNA, 119 bp, homo sapiens
ggctgacagatgaagagattgatatggccttccagcagtcgggcactgctgccgatgagccttcgtcctgggcccagccacacaggtggttcctgtccagccccctcacctcatatctc

SEQ ID NO: 6874 - DNA, 119 bp, homo sapiens
atgaagagattgatatggccttccagcagtcgggcactgctgccgatgagccttcgtccttgggcccagcacacaggtggttcctgtccagccccctcacctcatatctcagccataca

SEQ ID NO: 6875 - DNA, 119 bp, homo sapiens
gaggcagttccctccatccccatcagccccgaagatcccctcctggcagatcccagtcaagtcaccgtcccctccagccctgcggccgtgaaccaccacagcagcagcgacatctcacc

SEQ ID NO: 6876 - DNA, 119 bp, homo sapiens
atcccagtcaagtcaccgtcaccctccagccctgcggccgtgaaccaccacagcagcagcgacatctcactgtcagcaacgagtccacgtcgtcctcgcctgggaaggagggccacagc

SEQ ID NO: 6877 - DNA, 119 bp, homo sapiens
acagcagcagcgacatctcacctgtcagcaacgagtccacgtcgtcctcgcctgggaaggagggccacaccccgagggctccacggtcacctaccacttgctgggcccccaggaggaag

SEQ ID NO: 6878 - DNA, 119 bp, homo sapiens
gcctgggaaggagggccacagccccgagggctccacggtcacctaccacttgctgggcccccaggaggaggcgagggggtggtggacgtcaagggccaggtgcggatggaggtgcaagg

SEQ ID NO: 6879 - DNA, 119 bp, homo sapiens
tgatgatgtgagccatgtggacgaggaggactgcctgggggtgcagagggaggaccgccggggcggggagggcagatcaacgagcaggtggagaagctgcggcggcccgagggcgccag

SEQ ID NO: 6880 - DNA, 119 bp, homo sapiens
ccgccggggcggggatgggcagatcaacgagcaggtggagaagctgcggcggcccgagggcgccagcaagagagtgagcgggactagggctgcgcctgctgcctccagccctgaggatg

SEQ ID NO: 6881 - DNA, 119 bp, homo sapiens
cgagggcgccagcaacgagagtgagcgggactagggctgcgcctgctgcctccagccctgaggatggcactagtgtgcccgtgcgtggccataccctgcctccctctctggccctggga

SEQ ID NO: 6882 - DNA, 119 bp, homo sapiens
gccctgaggatggcatctagtgtgcccgtgcgtggccataccctgcctccctctctggccctgggagggagcttggagcccaggtagggggcagagctgtcctcagctgcactgcggcc

SEQ ID NO: 6883 - DNA, 119 bp, homo sapiens
ctggccctgggagggcagcttggagcccaggtagggggcagagctgtcctcagctgcactgcggcctggggcagtgtggggagtcacacttctgtccacctggcctcctctcgcctggc

SEQ ID NO: 6884 - DNA, 119 bp, homo sapiens
tgcctttggctttgatctcaagtcaggctgaaggcagcgaagcctcggggcccaagcccctccccagcccctctcccggacagacgccttgcccagggtgtgtttgctgagtgtcttga

SEQ ID NO: 6885 - DNA, 119 bp, homo sapiens
tccccagccccctctcccggacagacgccttgcccagggtgtgtttgctgagtgtcttgactaccgtgaaccacgcatggccagagctagcgtccctactgcctcccgactcctcagtg

SEQ ID NO: 6886 - DNA, 119 bp, homo sapiens
ctaccgtgacaccacgcatggccagagctagcgtccctactgcctcccgactcctcagtggaggaggagtgcggtccctctggtgtctgccatccccctccctccctgggcccggccct

SEQ ID NO: 6887 - DNA, 119 bp, homo sapiens
gaggaggagctgcggtccctctggtgtctgccatccccctccctccctgggcccggccctggacccgtcggtgcctgtccccagccccaaccccactcatgccccgtcgtcctcccaga

SEQ ID NO: 6888 - DNA, 119 bp, homo sapiens
ggacccgtcaggtgcctgtccccagccccaaccccactcatgccccgtcgtcctcccagacaaatgaaacacgctgcgcttccgatgcccccgcttgccgtgtaatggttcagctaatc

SEQ ID NO: 6889 - DNA, 119 bp, homo sapiens
caaatgaaaccacgctgcgcttccgatgcccccgcttgccgtgtaatggttcagctaatcccatggcgaatgggggctcactccggaggaggagccaggcagcagggccttcctgacca

SEQ ID NO: 6890 - DNA, 119 bp, homo sapiens
ccatggcgagatgggggctcactccggaggaggagccaggcagcagggccttcctgaccaacagccagcctgtccttccccccaggaaacacatgttcatttgtgtgatcatgtataga

SEQ ID NO: 6891 - DNA, 119 bp, homo sapiens
acagccagctctgtccttccccccaggaaacacatgttcatttgtgtgatcatgtatagacctcagaacgaagataggactgtatataattgtaataaataccagttgccactatttaa

SEQ ID NO: 6892 - DNA, 119 bp, homo sapiens
cagggttctacccggctgggtccaggcagaagtttttcctccccacctccgggtttgtcctcatcatcgtcactcccattcacagctttaagattctggaggccaagaatttgactccc

SEQ ID NO: 6893 - DNA, 119 bp, homo sapiens
ctccgggtttgtcctcatcatcggtcactcccattcacagctttaagattctggaggccaagaatttgatccccccggatccatggtctgtggataccaatgttccgactggagacggg

SEQ ID NO: 6894 - DNA, 119 bp, homo sapiens
gattctggaggccaagaatttgactccccccggatccatggtctgtggataccaatgttccgactggagcggggagcccgcgagacccgggtctccagggtctgcccaaggaagttgct

SEQ ID NO: 6895 - DNA, 119 bp, homo sapiens
ggataccaatgttccgactggagacggggagcccgcgagacccgggtctccagggtctgcccaaggaagtgctcatgggagcagacctctagagcaggatttgaggccaggccaaagag

SEQ ID NO: 6896 - DNA, 119 bp, homo sapiens
gtgtgcctgctgtgcaaggaggcttgctggacctaaaatcaatgatcgagaaggtgacagggaagaacgcctgacaaactacggcttctacggctgttactgcggctggggcggccgag

SEQ ID NO: 6897 - DNA, 119 bp, homo sapiens
gctggacctaaaatcaatgatcgagaaggtgacagggaagaacgccctgacaaactacggcttctacggtgttactgcggctggggcggccgaggaacccccaaggatggcaccgattg

SEQ ID NO: 6898 - DNA, 119 bp, homo sapiens
agcccgggcccttctgccatgtgaacctctgtgcctgtgaccggaagctcgtctactgcctcaagagaacctacggagctacaacccacagtaccaatactttcccaacatcctctgct

SEQ ID NO: 6899 - DNA, 119 bp, homo sapiens
cctcaagagaaacctacggagctacaacccacagtaccaatactttcccaacatcctctgctcctaggctccccagcgagctcctcccagaccaagacttttgttctgtttttctacaa

SEQ ID NO: 6900 - DNA, 119 bp, homo sapiens
tgctcctaggcctccccagcgagctcctcccagaccaagacttttgttctgtttttctacaacacagagactgactctgcctggttcctgagagaggctcctaagtcacagacctcagt

SEQ ID NO: 6901 - DNA, 119 bp, homo sapiens
acaacacagagtactgactctgcctggttcctgagagaggctcctaagtcacagacctcagtctttctcaagcttggcggacccccagggccacactgtaccctccagcgagtcccagg

SEQ ID NO: 6902 - DNA, 119 bp, homo sapiens
cagtctttctcgaagcttggcggacccccagggccacactgtaccctccagcgagtcccaggagagtgatctggtcataggacttggtagggtcccagggtccctaggcctccacttct

SEQ ID NO: 6903 - DNA, 119 bp, homo sapiens
caggagagtgactctggtcataggacttggtagggtcccagggtccctaggcctccacttctgagggcacccctctggtgccaagagctctcctccaactcagggttggctgtgtctct

SEQ ID NO: 6904 - DNA, 119 bp, homo sapiens
ttctgagggcagcccctctggtgccaagagctctcctccaactcagggttggctgtgtctcttttcttcctgaagacagcgtcctggctccagttggaacactttcctgagatgcactt

SEQ ID NO: 6905 - DNA, 119 bp, homo sapiens
ctcttttcttctctgaagacagcgtcctggctccagttggaacactttcctgagatgcacttacttctcgcttctgcgatcagattatcatcaccaccaccctccagagaatttttacg

SEQ ID NO: 6906 - DNA, 119 bp, homo sapiens
acttacttctcagcttctgcgatcagattatcatcaccaccaccctccagagaatttttacgcaagaaggccaaattgactctctaaatctggtgtatgggtattaaataaaattcatt

SEQ ID NO: 6907 - DNA, 119 bp, homo sapiens
tacgcaagaagagccaaattgactctctaaatctggtgtatgggtattaaataaaattcattctcaaggtaataaaaaccacattggcattttcctctgctgtgggggatcgctggtgc

SEQ ID NO: 6908 - DNA, 119 bp, homo sapiens
cattctcaaggctaataaaaaccacattggcattttcctctgctgtgggggatcgctggtgcctctttcctgccactggggcaataaacccaaagatgtctacattatctccgaaacag

SEQ ID NO: 6909 - DNA, 119 bp, homo sapiens
gtgcctctttctctgccactggggcaataaacccaaagatgtctacattatctccgaaacagaagggaaattagtaaatgcagggttttctgggatgagcttcaggctttctcttgggc

SEQ ID NO: 6910 - DNA, 119 bp, homo sapiens
acagaagggaagattagtaaatgcagggttttctgggatgagcttcaggctttctcttgggctaattttttacaccttggggtcctctccagtattgggtctcattcttcctcgatggg

SEQ ID NO: 6911 - DNA, 119 bp, homo sapiens
tgagaaataaactgtcttgttccttgcaatgtaaaatgagacttctaaagcccaccttgatgctgatatgagaatgctgaggttctaggatttcacacagcaggaatttttttttaata

SEQ ID NO: 6912 - DNA, 119 bp, homo sapiens
ttgttccttgcaatgtaaaatgagacttctaaagcccaccttgatgctgatatggagaatgctgaggtttaggatttcacacagcaggaatttttttttaataggtgtcagctgtgggg

SEQ ID NO: 6913 - DNA, 119 bp, homo sapiens
ccaagaaaggacctatggcttctttattccgacataccccaaaataactgcatgataaataggtctatattaaaaagctctagtgtcgaatgttttcaaaataaaatttaattttatga

SEQ ID NO: 6914 - DNA, 119 bp, homo sapiens
aagaaaggacctatggcttctttattccgacataccccaaaataactgcatgataaataggtctatattaaaaagctctagtgtcgaatgttttcaaaataaaatttaattttatgaga

SEQ ID NO: 6915 - DNA, 119 bp, homo sapiens
actctgcggtggtgtttgaacctgggcatcctagaggtgacagtctacgcattcagcattgagaacttcaacgctccaagagtgaggtagacgggcttatggatctggcccggcagaag

SEQ ID NO: 6916 - DNA, 119 bp, homo sapiens
gggcatcctagaggtgacagtctacgcattcagcattgagaacttcaaacgctccaagagtgaggtagagggcttatggatctggcccggcagaagttcagccgcttgatggaagaaaa

SEQ ID NO: 6917 - DNA, 119 bp, homo sapiens
cagaaggcccgagacatgtatgcagaggagcggaagaggcagcagctggagagggaccaggctacagtgcagagcagctgctgcgagaggggctccaagccagtggggacgcccagctc

SEQ ID NO: 6918 - DNA, 119 bp, homo sapiens
ggctacagtgacagagcagctgctgcgagaggggctccaagccagtggggacgcccagctccgaaggaccgcttgcacaaactctcggccagacgggaagagcgagtccaaggcttcct

SEQ ID NO: 6919 - DNA, 119 bp, homo sapiens
tccgaaggacacgcttgcacaaactctcggccagacgggaagagcgagtccaaggcttcctgcaggcctggaactcaagcgagctgactggctggcccgtctgggcactgcatcagcct

SEQ ID NO: 6920 - DNA, 119 bp, homo sapiens
ctgcaggccttggaactcaagcgagctgactggctggcccgtctgggcactgcatcagcctgaatgaggtggccacctgccactttgccctgccctctgcctccagggctccactcccc

SEQ ID NO: 6921 - DNA, 119 bp, homo sapiens
ctgaatgaggctggccacctgccactttgccctgccctctgcctccagggctccactccccttccttttttggtgaaaggcacctcctttcctgataatgaatggtgttccctttgctt

SEQ ID NO: 6922 - DNA, 119 bp, homo sapiens
ccttccttttcttggtgaaaggcacctcctttcctgataatgaatggtgttccctttgcttggctgggggccccccaggccaggtttgctggccatagatacctttgggctgcctggga

SEQ ID NO: 6923 - DNA, 119 bp, homo sapiens
ttggctggggagccccccaggccaggtttgctggccatagatacctttgggctgcctgggacaggctccgaggaggattgagggtgaaagtctcccacgagtacactaaacctaggtct

SEQ ID NO: 6924 - DNA, 119 bp, homo sapiens
gacaggctcctgaggaggattgagggtgaaagtctcccacgagtacactaaacctaggtctggtcaccatagggtttggagagcaaagggccacaactcatcagctgcctgtctcttag

SEQ ID NO: 6925 - DNA, 119 bp, homo sapiens
ctggtcaccaatagggtttggagagcaaagggccacaactcatcagctgcctgtctcttagatgcacttctttttccaccagcacatccttcaacacacagaatttcagggaagagttc

SEQ ID NO: 6926 - DNA, 119 bp, homo sapiens
agatgcactttctttttccaccagcacatccttcaacacacagaatttcagggaagagttctccccaaaccctagctctttacccttccattttagccttccacccagcttccacaaaa

SEQ ID NO: 6927 - DNA, 119 bp, homo sapiens
tctccccaaaaccctagctctttacccttccattttagccttccacccagcttccacaaaagatttggcctaccttggatctgctagtaaataactaataggcaggcagttatttgggt

SEQ ID NO: 6928 - DNA, 119 bp, homo sapiens
aagatttggctctaccttggatctgctagtaaataactaataggcaggcagttatttgggtaaggaaaaaggggtgggagagacagaaaatttgcccatctgctgctcctcccccttgg

SEQ ID NO: 6929 - DNA, 119 bp, homo sapiens
gtaaggaaaaaaggggtgggagagacagaaaatttgcccatctgctgctcctcccccttggctctccactgggatttgctattgaatctctaccctctcccaccacacagtactgattg

SEQ ID NO: 6930 - DNA, 119 bp, homo sapiens
ggctctccacctgggatttgctattgaatctctaccctctcccaccacacagtactgattgctcactgaagactcagcacccccaatggtgcgcggaagccaggcgggcgattacaatc

SEQ ID NO: 6931 - DNA, 119 bp, homo sapiens
tgctcactgaaagactcagcacccccaatggtgcgcggaagccaggcgggcgattacaatccaattaccattgtcgactcagcccacacaagcttttctcctcctcttgcagggcatgg

SEQ ID NO: 6932 - DNA, 119 bp, homo sapiens
tccaattacctattgtcgactcagcccacacaagcttttctcctcctcttgcagggcatggggccaggcccactcccaaatgagactggccccctccatggttcagggtaacagaaggg

SEQ ID NO: 6933 - DNA, 119 bp, homo sapiens
ggggccaggctccactcccaaatgagactggccccctccatggttcagggtaacagaagggcctgtaggcctggtgaactgaatccagcacaggcctcccctgtaacacaacaggactg

SEQ ID NO: 6934 - DNA, 119 bp, homo sapiens
ggcctgtaggccctggtgaactgaatccagcacaggcctcccctgtaacacaacaggactgagcagaacaaacacttcttccaactgactctgctccctgccctcaccatctcaaactc

SEQ ID NO: 6935 - DNA, 119 bp, homo sapiens
tgagcagaaccaaacacttcttccaactgactctgctccctgccctcaccatctcaaactctgattcccctccactcttcgaggtttctctcagctttttgacctggctccctaagtag

SEQ ID NO: 6936 - DNA, 119 bp, homo sapiens
tctgattcccactccactcttcgaggtttctctcagctttttgacctggctccctaagtaggccctagagatttattcttggcatggcaaagcttgttctaggtcctctgcttgtgagg

SEQ ID NO: 6937 - DNA, 119 bp, homo sapiens
aggccctagatgatttattcttggcatggcaaagcttgttctaggtcctctgcttgtgagggtcaaagcgtgtcctttcccttacctccctctgccaggacttgctgcagagctgctga

SEQ ID NO: 6938 - DNA, 119 bp, homo sapiens
gggtcaaagctgtgtcctttcccttacctccctctgccaggacttgctgcagagctgctgagaggattatgcctttgaagagctgtctgcctgagcaactctatttcaggtgccccaca

SEQ ID NO: 6939 - DNA, 119 bp, homo sapiens
gagaggattagtgcctttgaagagctgtctgcctgagcaactctatttcaggtgccccacaccggcaagaccagccagcaacaccaaccaaatgctactctctttaaagtccattttcc

SEQ ID NO: 6940 - DNA, 119 bp, homo sapiens
agacttcccattttactttctgcaagctgtttccctagcagctccctctaggggagaggtgaaatcttgaagttgtagcaagagcacacaggaaacccctaactttcctataccccacc

SEQ ID NO: 6941 - DNA, 119 bp, homo sapiens
ggtgaaatcttgcaagttgtagcaagagcacacaggaaacccctaactttcctataccccacccgcctctcccctttctgtcccgggatacctggcggcaagagacttcttggctattg

SEQ ID NO: 6942 - DNA, 119 bp, homo sapiens
cccacccgcctcttcccctttctgtcccgggatacctggcggcaagagacttcttggctattgtccatgtcccagaatcaagcataaatgccagacacggcgattgagaagccaatcag

SEQ ID NO: 6943 - DNA, 119 bp, homo sapiens
ctattgtccatgctcccagaatcaagcataaatgccagacacggcgattgagaagccaatcagtgaacctttggcaaagcccccatccacacctggcactcccctctaccaatccctgg

SEQ ID NO: 6944 - DNA, 119 bp, homo sapiens
aatcagtgaaccctttggcaaagcccccatccacacctggcactcccctctaccaatccctggcacaggttcctggagagcaggtgctgtacattttacagctttacaatggggctgtt

SEQ ID NO: 6945 - DNA, 119 bp, homo sapiens
ccctggcacagggttcctggagagcaggtgctgtacattttacagctttacaatggggctgttgacagcataattagggaggcatgaattatgcggctataatgcagagccctacaatt

SEQ ID NO: 6946 - DNA, 119 bp, homo sapiens
gctgttgacagccataattagggaggcatgaattatgcggctataatgcagagccctacaattaaggcggaatgaggggctggaggcagcaaacggaatctgccctatgagcgtggctg

SEQ ID NO: 6947 - DNA, 119 bp, homo sapiens
acaattaaggcgggaatgaggggctggaggcagcaaacggaatctgccctatgagcgtggctgttgagtctgtctcctgggtctgactttccgtaatatgattggggtacagtagaggt

SEQ ID NO: 6948 - DNA, 119 bp, homo sapiens
tggctgttgagtcctgtctcctgggtctgactttccgtaatatgattggggtacagtagaggtgattaaggggctggcatctctctttggcctgaggttctgtattctgggaaaggtac

SEQ ID NO: 6949 - DNA, 119 bp, homo sapiens
agaggtgattaatggggctggcatctctctttggcctgaggttctgtattctgggaaaggtacacagggggagtagggagaagctgccccaggaggcgatgtagtggtggaaagaagag

SEQ ID NO: 6950 - DNA, 119 bp, homo sapiens
aggtacacagggtggagtagggagaagctgccccaggaggcgatgtagtggtggaaagaagaggcagagggtcgtcgtcgtcgcccagcagcaagggctgcaaaatagtagaactcgtg

SEQ ID NO: 6951 - DNA, 119 bp, homo sapiens
gaagaggcagagaggtcgtcgtcgtcgcccagcagcaagggctgcaaaatagtagaactcgtggttgcttggacaggtgtgatttgtgcaagccaggttcaacccttgcctcaagaaat

SEQ ID NO: 6952 - DNA, 119 bp, homo sapiens
ctcgtggttgctttggacaggtgtgatttgtgcaagccaggttcaacccttgcctcaagaaatcagatggaccaatttagtgtccttccacctgtgagccaagcccccatttgaggaca

SEQ ID NO: 6953 - DNA, 119 bp, homo sapiens
agaaatcagatgggaccaatttagtgtccttccacctgtgagccaagcccccatttgaggacatctatctattcttgtgtgctgggtctcaaatagaatttttaaagattcttagatgt

SEQ ID NO: 6954 - DNA, 119 bp, homo sapiens
atttttgtcaatatttatttttaaacaatctctggaagaaaagaaatttaaaaacaaaaggcttaaaattattaatacctcaatgttaataatttaatatttttcccaagtgattgcac

SEQ ID NO: 6955 - DNA, 119 bp, homo sapiens
aaggcttaaaatgtattaatacctcaatgttaataatttaatatttttcccaagtgattgcacaatgctaaatacaattaaacaaaaaagatgcaataaagtataatcctgcaacatta

SEQ ID NO: 6956 - DNA, 119 bp, homo sapiens
ttgcacaatgcttaaatacaattaaacaaaaaagatgcaataaagtataatcctgcaacattatcccatatctgattttagtaaatattacatttttaagcattttatgctgttttttt

SEQ ID NO: 6957 - DNA, 119 bp, homo sapiens
acattatcccataatctgattttagtaaatattacatttttaagcattttatgctgtttttttaaatatgtcactactatatgtacttgcttttatgttacataagcttttaatatata

SEQ ID NO: 6958 - DNA, 119 bp, homo sapiens
ttttttaaatatagtcactactatatgtacttgcttttatgttacataagcttttaatatataacttaactctgagatgttatttggttgagaggcctcagttgattaaacacagattt

SEQ ID NO: 6959 - DNA, 119 bp, homo sapiens
tatataacttaatctctgagatgttatttggttgagaggcctcagttgattaaacacagattttcttatataaaatcagaaataatagtacttgcttgtaataaacggaaaggttaaca

SEQ ID NO: 6960 - DNA, 119 bp, homo sapiens
agattttcttattataaaatcagaaataatagtacttgcttgtaataaacggaaaggttaacattcatagattcataatctttgagcagttacgtatacgcaaaataattactgtaatt

SEQ ID NO: 6961 - DNA, 119 bp, homo sapiens
ttaacattcataagattcataatctttgagcagttacgtatacgcaaaataattactgtaattaatcttgatgatagtccctggtttgagaaaaagtttggtttgacatttagtaatta

SEQ ID NO: 6962 - DNA, 119 bp, homo sapiens
gtaattaatcttagatgatagtccctggtttgagaaaaagtttggtttgacatttagtaattaagccttttgcatgatacttccttgactcagcaaagccacatataatataaatcaag

SEQ ID NO: 6963 - DNA, 119 bp, homo sapiens
taattaagccttattgcatgatacttccttgactcagcaaagccacatataatataaatcaagtgtagagactttggtttttaaatgttaaaaatataattggagcagataggtaccta

SEQ ID NO: 6964 - DNA, 119 bp, homo sapiens
atcaagtgtagaggactttggtttttaaatgttaaaaatataattggagcagataggtacctaaaatatctcttataataggaattaaaagccatttagtaagtccacattcatttcct

SEQ ID NO: 6965 - DNA, 119 bp, homo sapiens
tacctaaaatatgctcttataataggaattaaaagccatttagtaagtccacattcatttcctatttgatgctaaatatttaagagtttttcagttatggcctgtctcacagaggaagt

SEQ ID NO: 6966 - DNA, 119 bp, homo sapiens
tttcctatttgattgctaaatatttaagagtttttcagttatggcctgtctcacagaggaagtatgatttctaaatacgtacttttttttttaaataaaggaattgcttgctcaactca

SEQ ID NO: 6967 - DNA, 119 bp, homo sapiens
ggaagtatgattatctaaatacgtacttttttttttaaataaaggaattgcttgctcaactcagtgcttctgtaaaacattgcaaaattgtgcgcatctgcaagttaaaaccatgacat

SEQ ID NO: 6968 - DNA, 119 bp, homo sapiens
aactcagtgctttctgtaaaacattgcaaaattgtgcgcatctgcaagttaaaaccatgacatatagcagctaaaattgaacagaatttgattgcagacctgaagctgattttctcagt

SEQ ID NO: 6969 - DNA, 119 bp, homo sapiens
tgacatatagcaggctaaaattgaacagaatttgattgcagacctgaagctgattttctcagttttgctccaaaaacatatcttgctggagtatgctcaagattttttgaacagtccat

SEQ ID NO: 6970 - DNA, 119 bp, homo sapiens
ctcagttttgctaccaaaaacatatcttgctggagtatgctcaagattttttgaacagtccatgaaagggacagggatgttaatctccacttcagcccgggcaacttcacttaagtcct

SEQ ID NO: 6971 - DNA, 119 bp, homo sapiens
gtccatgaaaggtgacagggatgttaatctccacttcagcccgggcaacttcacttaagtccttggcatcagaatcaggagataagcaggcttttgtcctgctcctgggctcaccacca

SEQ ID NO: 6972 - DNA, 119 bp, homo sapiens
cttgtcaatattcaaaggaagtacatatctcctaacttcaggttggggagcctttctggcattttttttacctcttcccagttctcacgtaaattggctaaatataagtaattataaac

SEQ ID NO: 6973 - DNA, 119 bp, homo sapiens
ttcaaaggaagtacatatctcctaacttcaggttggggagcctttctggcattttttttcacctcttccagttctcacgtaaattggctaaatataagtaattataaacaaactcaaat

SEQ ID NO: 6974 - DNA, 119 bp, homo sapiens
cctttccagcagcagagatccacaatcagaaacccattgtcttcataggtgttgatgtgatggaagaggtgaaaggagaagttctgtatttattattgaggtactttttcctttttttg

SEQ ID NO: 6975 - DNA, 119 bp, homo sapiens
cacaatcagaaacccattgtcttcataggtgttgatgtgatggaagaggttgaaaggagaagttctgtattattattgaggtactttttcctttttttgtcagcaatatgaagccaaac

SEQ ID NO: 6976 - DNA, 119 bp, homo sapiens
ccccatggtttcattggactcaaaacaatccatgtagttggctccccaaagactccatgaagaaaggaattgaacaggttaattttgactggtgtctccacaaaaacgatatagttggg

SEQ ID NO: 6977 - DNA, 119 bp, homo sapiens
ttggactcaaaacaatccatgtagttggctccccaaagactccatgaagaaaggaacttgaacaggttattttgactggtgtctccacaaaaacgatatagttgggagtcagaccaaaa

SEQ ID NO: 6978 - DNA, 119 bp, homo sapiens
ctgcttgcagtggtgggatctttacaatgttgtaggcaattgaaaaattttttccaaagcaattaccaaattgtaaacggttccatcattttcaatgtgggggtgagcagtggccccat

SEQ ID NO: 6979 - DNA, 119 bp, homo sapiens
gttgtaggcaattgaaaaattttttccaaagcaattaccaatattgtaaacggttccatcattttcaattgggggtgagcagtggccccattgacagagacatagttgcaaagatcaac

SEQ ID NO: 6980 - DNA, 119 bp, homo sapiens
ctgcttaattgtctccaaggtctctggattaatctttgtaataaagttggtctctgtgcaagcgtagtatcttcccccactgggtagacattaacaagggcattgtcagtaacctctac

SEQ ID NO: 6981 - DNA, 119 bp, homo sapiens
tctggattaatctttgtaataaagttggtctctgtgcaagcgtagtaatcttcccccactgggtagacataacaagggcattgtcagtaacctctactcctcgaaagtaagaaaaaaac

SEQ ID NO: 6982 - DNA, 119 bp, homo sapiens
cttctgtggtatgtgacatgtccttctttaaagtcaaacttgtgcaggagggcttgcccatcaaacaggggtaaaatggctcagatccaacttcaaagagtcctggcccacatcgaagg

SEQ ID NO: 6983 - DNA, 119 bp, homo sapiens
agtcaaacttgtgcaggagggcttgcccatcaaacaggtggtaaaatggctcagatccaacttcaaagatcctggcccacatcgaaggagactgccggtgagccagagggggatcctgc

SEQ ID NO: 6984 - DNA, 119 bp, homo sapiens
ttgtgatgagtgcatttgcattttatttttccatgaaaatcacacacaacgcagacacacagacaaacagcagaaaagcagatctgcttgaaatgagagcaatatggaggccaaagctg

SEQ ID NO: 6985 - DNA, 119 bp, homo sapiens
cacagacaaacatgcagaaaagcagatctgcttgaaatgagagcaatatggaggccaaagctgctagtggatggcccggggtttctagttctggggtctggagaaggattttgtatttg

SEQ ID NO: 6986 - DNA, 119 bp, homo sapiens
aagctgctagtgggatggcccggggtttctagttctggggtctggagaaggattttgtatttgtttggttcaccatcaggtgttccaggtgagcaagtcagtttcggtttccttctgaa

SEQ ID NO: 6987 - DNA, 119 bp, homo sapiens
tatttgtttggtttcaccatcaggtgttccaggtgagcaagtcagtttcggtttccttctgaaagaccttttctgaattcgctgcatgctcctcgtgtgtttgttttctgctgcagtgg

SEQ ID NO: 6988 - DNA, 119 bp, homo sapiens
tctgaaagacctctttctgaattcgctgcatgctcctcgtgtgtttgttttctgctgcagtggggtcattacgctggccagtccatttggatgaccatatgggcacaggctcctgcgcc

SEQ ID NO: 6989 - DNA, 119 bp, homo sapiens
cagtggggtcatttacgctggccagtccatttggatgaccatatgggcacaggctcctgcgcctccagcgcccagagttcctttctggctgcaggaacgagcggtgtgaaagatcagtc

SEQ ID NO: 6990 - DNA, 119 bp, homo sapiens
ctggtccagtgtggtctgtgtgactgagtactcctcgatgagcaggctgtccttgtgggagaggaggagtggaagatcctcgccagggaggaggaggagacctggaactggagcatgtt

SEQ ID NO: 6991 - DNA, 119 bp, homo sapiens
aggctgtccttgtgggagaggaggagctggaagatcctcgccagggaggaggaggagacctggaactgggcatgttgtagtgcctctccctctgcacactgcctgggaagttcccctgg

SEQ ID NO: 6992 - DNA, 119 bp, homo sapiens
gggaggaggaggagacctggaactggagcatgttgtagtgcctctccctctgcacactgcctgggaagtcccctggaagaactgctccacagggttcaggtcaggaagcaggtcgtcct

SEQ ID NO: 6993 - DNA, 119 bp, homo sapiens
ctccctctgcacactgcctgggaagttcccctggaagaactgctccacagggttcaggtcaggaagcagtcgtccttcggggatttgatcttcattgtgacgatatagccatctccaaa

SEQ ID NO: 6994 - DNA, 119 bp, homo sapiens
cagcagcaccagcggtgggcagccaatgagtgcgatggctgtggagagtttccgcttgttgcccccacttacgtgccagccaggcagtcggcgtagacagtcaggcccaggctcttaat

SEQ ID NO: 6995 - DNA, 119 bp, homo sapiens
tgggcagccaatgagtgcgatggctgtggagagtttccgcttgttgcccccactgtacgtgccagccagcagtcggcgtagacagtcaggcccaggctcttaatactccagtttgcaac

SEQ ID NO: 6996 - DNA, 119 bp, homo sapiens
cttttcgatttcttctgctggtacacctcgaagccgggcataaaggtaaagatgttctcgtcctgtgagagctcatcaattgcatcaaactgaggacagtagcccatattttgatggac

SEQ ID NO: 6997 - DNA, 119 bp, homo sapiens
acacctcgaagccgggcataaaggtaaagatgttctcgtcctgtgagcagctcatcaattgcatcaaacgaggacagtagcccatattttgatggacttcagaaatattggttaaaata

SEQ ID NO: 6998 - DNA, 119 bp, homo sapiens
cattgggagaggaagaagtggcgctggaccagcagggtcaggaggaagtacaccaccccttccaccacctggcaaacaggttcttcccaatcaggtcccagtggaacggatttgcagag

SEQ ID NO: 6999 - DNA, 119 bp, homo sapiens
ggaagaagtggcgctggaccagcagggtcaggaggaagtacaccaccccttccaccaccatggcaaacagttcttcccaatcaggtcccagtggaacggatttgcagagtgctcctcac

SEQ ID NO: 7000 - DNA, 119 bp, homo sapiens
caaaccgggcatagacatctgtcacagcctggctcagtgcaaggtcaatgaggccccggcccaggcagagtgggggaagacaatgagcagcttcctcagcacggcgttgaacctgagca

SEQ ID NO: 7001 - DNA, 119 bp, homo sapiens
ccgggcatagacatctgtcacagcctggctcagtgcaaggtcaatgaggccccggcccaggcagaagtggggaagacaatgagcagcttcctcagcacggcgttgaacctgagcagcgt

SEQ ID NO: 7002 - DNA, 119 bp, homo sapiens
ccggttattctcaaataattccaagatgaaggtaatagcactgctgttgatgccgatgaacagattagccaagataaagccacataggctgtgctggggacatcaaacaggaaggatgc

SEQ ID NO: 7003 - DNA, 119 bp, homo sapiens
aaggtaatagcactgctgttgatgccgatgaacagattagcacaagataaagccacataggctgtgctgggacatcaaacaggaaggatgctgggtacatcatgggaatgaccgcccat

SEQ ID NO: 7004 - DNA, 119 bp, homo sapiens
gatgtcccagaggaagttggtcacccagtaggtggtggggctcactccactgataaactggaggtgcttgatttgttcacccgctcctggatcaaataaaggacaaagctggctgggac

SEQ ID NO: 7005 - DNA, 119 bp, homo sapiens
tggaggtgcttggatttgttcacccgctcctggatcaaataaaggacaaagctggctgggacgaaggactggagaaaatcacgcagatggcaaccacagcatccactgaagtggtcagc

SEQ ID NO: 7006 - DNA, 119 bp, homo sapiens
actgtaatctctgagagctgctccttggtcaggttcaggggttggctaatgacggtgattccatactcccggggctcctgtccttaggcaggctggcccgtaagatggcgttgtgggcc

SEQ ID NO: 7007 - DNA, 119 bp, homo sapiens
gacggtgattccatactcctcggggctcctgtccttaggcaggctggcccgtaagatggcgttgtgggcacattgagaaagctgaccagggcatgccagcctttgttattaaaccacac

SEQ ID NO: 7008 - DNA, 119 bp, homo sapiens
ctgggggggcgggaggcccccggcaccctcggggcactctggcagcatggtgagcttctccctggtgctcacctgcaggatggtgaagggttgacctgtgtccatttctgcttctggaa

SEQ ID NO: 7009 - DNA, 119 bp, homo sapiens
gcactctggcagcatggtgagcttctccctggtgctgcacctgcaggatggtgaagggttgacctgtgtcatttctgcttctggaacagctgggtgatgtttggggacacagaaggagt

SEQ ID NO: 7010 - DNA, 119 bp, homo sapiens
gctgcacctgcaggatggtgaagggttgacctgtgtccatttctgcttctggaacagctgggtgatgttggggacacagaaggagtcttccagggtgttgagttgccacaggggtactc

SEQ ID NO: 7011 - DNA, 119 bp, homo sapiens
ctgaagaaggtgtactgctgcccatatatccaggggtgaagggtcaaagcggggtattcgccaaaaggaggataacaatagaaagcatcagagccaaaaacacaaaggtagccgggagc

SEQ ID NO: 7012 - DNA, 119 bp, homo sapiens
gaaggtgtactgctgcccatatatccaggggtgaagggtcaaagcggggtattcgccaaaaggagggatacaatagaaagcatcagagccaaaaacacaaaggtagccgggagcacgat

SEQ ID NO: 7013 - DNA, 119 bp, homo sapiens
ctgcgccaggaagtccttgtggctgcggatggtgtgttggaatctcttgaccagcagcgcctgcacatgtggaggaccagctgtgtccccgtgttgagctgcgggcctgggcactctgg

SEQ ID NO: 7014 - DNA, 119 bp, homo sapiens
gaccagcagcgcctgcacatgctggaggaccagctgtgtccccgtgttgagctgcgggcctgggcactcggctctgggggaggctggccctctgggtgagcagccggcgcccctgggga

SEQ ID NO: 7015 - DNA, 119 bp, homo sapiens
gagctgcgggcctgggcactctggctctgggggaggctggccctctgggtgagcagccggcgcccctgggagcagacattggagtcctggggtgtctgtccagccttctctctgggacc

SEQ ID NO: 7016 - DNA, 119 bp, homo sapiens
gtgagcagccggcgcccctggggagcagacattggagtcctggggtgtctgtccagccttctctctgggcccaagcaggggtgtcgggggttgacgttttctcttttctgctgagcgcc

SEQ ID NO: 7017 - DNA, 119 bp, homo sapiens
ctcttccaggggagtgtcagaaattccaaaactgctgagaccaaggtcagccagcgtctcctccagctcctgaaaaggctggcatatgctctgtgcttgaagttcttatttggaagaag

SEQ ID NO: 7018 - DNA, 119 bp, homo sapiens
aggtcagccagcgtctcctccagctctctgaaaaggctggcatatgctctgtgcttgaagttcttatttgaagaaggaagataagttcttgaccaatgcactccaccagctttgcctct

SEQ ID NO: 7019 - DNA, 119 bp, homo sapiens
atgctctgtgcttgaagttcttatttggaagaaggaagataagttcttgaccaatgcactccaccagcttgcctctggaacatggtggagaactacatccatcagctcatttacatccc

SEQ ID NO: 7020 - DNA, 119 bp, homo sapiens
ctcactgcctttcctttggctctggatgtttttcatcttgcgcaccaaggttaagtacaagcctgtgccaagcagttcttcaggaagagtggggtgcctgagcagtagagccttccctg

SEQ ID NO: 7021 - DNA, 119 bp, homo sapiens
ttgcgcaccaaggttaagtacaagcctgtgccaaagcagttcttcaggaagagtggggtgcctgagcagagagccttccctgggcaatgatggcaatgcggtccccaaggaggtcggcc

SEQ ID NO: 7022 - DNA, 119 bp, homo sapiens
agttcttcaggaagagtggggtgcctgagcagtagagccttccctgggcaatgatggcaatgcggtcccaaggaggtcggcctcgtccatgtggtgagtggacatgatgatggttctgc

SEQ ID NO: 7023 - DNA, 119 bp, homo sapiens
ctgagcgatacttcaggagcagatcccagattgagcgtctcgagtaagggtccaccccagaggtgggttgtccagaatcaccaccttggcatctcccacaaaggcaatggcaaccgaca

SEQ ID NO: 7024 - DNA, 119 bp, homo sapiens
gcagatcccagattgagcgtctcgagtaagggtccaccccagaggtgggttcgtccagaatcaccacctggcatctcccacaaaggcaatggcaaccgacagctttctctgcatgccac

SEQ ID NO: 7025 - DNA, 119 bp, homo sapiens
ctgataggtcctgagcctcttcattccgcttgtggtggaggcctgtgtcctccaacatggcttccatctcagctgggcctcctcctgggactttcctttcagctgggcatagaacagca

SEQ ID NO: 7026 - DNA, 119 bp, homo sapiens
tcattccgcttgtggtggaggcctgtgtcctccaacatggcttccatctccagctgggcctcctcctggactttcctttcagctgggcatagaacagcatgtgctcagccaccgtgagg

SEQ ID NO: 7027 - DNA, 119 bp, homo sapiens
tggtggaacaggatgttgtgctgtggacacatgccaaggctctgccggactgcatccaggctggtttcatgtcccttcccccaacgagcacagtcccagaggttggtggcaacagaccc

SEQ ID NO: 7028 - DNA, 119 bp, homo sapiens
atgttgtgctgtggacacatgccaaggctctgccggactgcatccaggctggtttcaatgtcccttccccaacgagcacagtcccagaggttggtggcaacagacccgtcaggatggac

SEQ ID NO: 7029 - DNA, 119 bp, homo sapiens
aaggtggtggttttcccagctccattgtggcccaggaatgcggtgatctggttctcgtagaaggtgatgtcagacggtccacagctggccggccacagggctcaaaaatctttaccaga

SEQ ID NO: 7030 - DNA, 119 bp, homo sapiens
cgtagaaggtgatgttcagacggtccacagctggccggccacagggctcaaaaatctttaccagattctcacgcataccccaggaacccaccctggatgctcacgttcaaagaaggagt

SEQ ID NO: 7031 - DNA, 119 bp, homo sapiens
ctggaaacacctgatcaaggtaccaagcgagtaagccatagacagcagcatcaaggagcatcatctgcaggacagcaggaagctgaattcgtccccttccgtgggactgttcccgatgt

SEQ ID NO: 7032 - DNA, 119 bp, homo sapiens
cagcagcatcaaggagcatcatctgcatggacagcaggaagctgaattcgtccccttccgtgggactgtcccgatgttgctccactgcagccccaggccttgctcttcaaagcgaacca

SEQ ID NO: 7033 - DNA, 119 bp, homo sapiens
tgaattcgtccccttccgtgggactgttcccgatgttgctccactgcagccccaggccttgctcttcaagcgaaccaggtactcagtgccaaatccaaatgccaccggagacagtaagc

SEQ ID NO: 7034 - DNA, 119 bp, homo sapiens
cacagccttcttcagctcagcggtcatgcggtcctgccaggcgaagcacaggatgtgtggcaggtagaggtgaaatagatgacaccactacaggctgctgccagactggccttggagaa

SEQ ID NO: 7035 - DNA, 119 bp, homo sapiens
gatgtgtggcaggtagagggtgaaatagatgacaccactacaggctgctgccagactggccttggagaaaaggtgctgagcagaaagcacagcatgatggtggcagtggagaaagccaa

SEQ ID NO: 7036 - DNA, 119 bp, homo sapiens
cagactggccttggagaagaaggtgctgagcagaaagcacagcatgatggtggcagtggagaaagccaaaagaacaggaagaggatgaatgggtcgctgtaatgtaggattcttccatg

SEQ ID NO: 7037 - DNA, 119 bp, homo sapiens
catgatgaatatcgtcaggaggaagatgctcatcgacatgatggagaagctgtccaggaaccaggtacacaaatcactgcattggagacaccctgatttttcaaggtctccttcagtcg

SEQ ID NO: 7038 - DNA, 119 bp, homo sapiens
gtccaggaaccaggtacaccaaatcactgcattggagacaccctgatttttcaaggtctccttcagtcgaactccttctccaagacgatgctcttcacagtcatggagacagagtagat

SEQ ID NO: 7039 - DNA, 119 bp, homo sapiens
caaggtctccttcagtcgcaactccttctccaagacgatgctcttcacagtcatggagacagagtagatcatgccagcaccatgaagatagggaaacagcggttcaggatgatcatgaa

SEQ ID NO: 7040 - DNA, 119 bp, homo sapiens
gaatcgtccacgaagcaggggtagggcatctgctggaggtagattccaactggagcctccgcctgcaccggctccttgtgatcccctgttcaaccatgtcctgcagataggcaaacccg

SEQ ID NO: 7041 - DNA, 119 bp, homo sapiens
tccgcctgcacctggctccttgtgatcccctgttcaaccatgtcctgcagataggcaaacccgccccagtgtaccggaaatcttccacgggatcagctctgggaccagaatcccaatac

SEQ ID NO: 7042 - DNA, 119 bp, homo sapiens
ctgtctttaatcttattggttttctccaccacgtctatgtccattcggatcttatacttcacgtggggtgtagagagctggtccagggatacatgtcagggaataccactccggcccag

SEQ ID NO: 7043 - DNA, 119 bp, homo sapiens
ttcggatcttatacttcacgtggggtggtagagagctggtccagggatacatgtcagggaataccactcggcccagaacatgttttcctccagtagagagagggcacgttgggtgagct

SEQ ID NO: 7044 - DNA, 119 bp, homo sapiens
gggatacatgtcagggaataccactccggcccagaacatgttttcctccagtagagagagggcacgttggtgagctgagtttcatcattgtagctttcaaacttatccaggaccaagca

SEQ ID NO: 7045 - DNA, 119 bp, homo sapiens
ctccaggtattgattgaccaggcggagggtgcgatcagtgatgttaaatatgtccctccagtcgaagttgccatgtcgtcagcctggctttcccgagggcccttgtagaggaagtttag

SEQ ID NO: 7046 - DNA, 119 bp, homo sapiens
gatgttaaatatgtccctccagtcgaagttggccatgtcgtcagcctggctttcccgagggcccttgtaaggaagtttaggatggcttcagcagtaataccttcttcaccaagctgcct

SEQ ID NO: 7047 - DNA, 119 bp, homo sapiens
gtcagcctggctttcccgagggcccttgtagaggaagtttaggatggcttcagcagtaataccttcttcccaagctgcctattcaaaaagtcttttactgttgggttccccagggtatc

SEQ ID NO: 7048 - DNA, 119 bp, homo sapiens
attcttcagtatccttcgtgctgcaggtgaatcaggagtgtacaggatttttcccatcagcaaaggcttgccgccctccaagcgattttggttaaaggatttgactccaggctctggat

SEQ ID NO: 7049 - DNA, 119 bp, homo sapiens
ctgcaggtgaatcaggagtgtacaggatttttcccatcagcaaaggctttgccgccctccaagcgatttggttaaaggatttgactccaggctctggatcaatgcattacaaaaggatg

SEQ ID NO: 7050 - DNA, 119 bp, homo sapiens
ttgttcttctgtcataagaatagataggatccttccttgtggagtcaatccccagaaaggccttatagtattgtcttcataccagttgaaggagagcacccgagagccacctccctcgg

SEQ ID NO: 7051 - DNA, 119 bp, homo sapiens
ggagtcaatccccagaaaggccttatagttattgtcttcataccagttgaaggagagcacccgagagcccctccctcggggtagccacacaggaggtcagacaggatgcccatcagctt

SEQ ID NO: 7052 - DNA, 119 bp, homo sapiens
taccagttgaaggagagcacccgagagccacctccctcggggtagccacacaggaggtcagacaggatgccatcagctttgtaaaggtctctggaccaccattctgcatgaggggcctg

SEQ ID NO: 7053 - DNA, 119 bp, homo sapiens
ggtagccacacaggaggtcagacaggatgcccatcagctttgtaaaggtctctggaccaccattctgcagaggggcctggtcacccacagcaagtcctgcatactcggccgatggataa

SEQ ID NO: 7054 - DNA, 119 bp, homo sapiens
cacacggaagagcttgaagaagtccacgttggcatacagagtgtcttctatccactgtagggtgccctggagagggagcacagggcatagcgcaccgtctttgccccgcgtctctggct

SEQ ID NO: 7055 - DNA, 119 bp, homo sapiens
agtgtcttctatccactgtagggtgccctgggagagggagcacagggcatagcgcaccgtctttgcccccgtctctggctgaagatgatgaagcgctccaggagggcctcgctgcaggc

SEQ ID NO: 7056 - DNA, 119 bp, homo sapiens
gcacagggcatagcgcaccgtctttgccccgcgtctctggctgaagatgatgaagcgctccaggagggctcgctgcaggcgatgtccttcagcgccaggtccgggactccatgagcgaa

SEQ ID NO: 7057 - DNA, 119 bp, homo sapiens
ctgctctggacggacttgagagttgatcagaaggtagaccactgagtcagacaggccgatgtttttaatagaaatagtgtcagtgtttcttcatctttcaagatatcccttattcgtat

SEQ ID NO: 7058 - DNA, 119 bp, homo sapiens
gacggacttgagagttgatcagaaggtagaccactgagtcagacaggccgatgtttttaatgagaaatatgtcagtgtttcttcatctttcaagatatcccttattcgtattcctcttc

SEQ ID NO: 7059 - DNA, 119 bp, homo sapiens
ctgcaattctctccgggtgagtccggagggtgtccatgaattgggacaagatgtgtagctctgtccaaaacggccaaggtgctggctctctggtgcattcatgaggagttcttgaaaat

SEQ ID NO: 7060 - DNA, 119 bp, homo sapiens
gtccggagggtgtccatgaattgggacaagatgtgtagctctgtccaaatacggccaaggtgctggctcctggtgcattcatgaggagttcttgaaaatctcgatatacccttgccaag

SEQ ID NO: 7061 - DNA, 119 bp, homo sapiens
atggagttgttatagtttgacacaattccaggagattctcctggggtggggctttgaaaacagggattgtcacattgcagaagatcccctggagccacggcagcattcctgctgagggc

SEQ ID NO: 7062 - DNA, 119 bp, homo sapiens
caattccaggagattctcctggggtggggctttgaaaacagggattgttcacattgcagaagatcccctgagccacggcagcattcctgctgagggcatcgccttgttggggaaatggc

SEQ ID NO: 7063 - DNA, 119 bp, homo sapiens
cttttgccttttccgcagggtccagttcttccagagcaaaagctgtatctgtctcacgaagcccatgctatgaccacacgaagaccagattggtcagagctgaggcccctcagacagca

SEQ ID NO: 7064 - DNA, 119 bp, homo sapiens
gtctcacgaagcccatgctaatgaccacacgaagaccagattggtcagagctgaggcccctcagacagcaaggacataaacgccgttaagagcgcctctggctccggacgctgtgtcct

SEQ ID NO: 7065 - DNA, 119 bp, homo sapiens
tccaggtagccaagacttgagtttatttattggattcatatctcccttcttaaaaggacatttacaaaccgatttcaaaaataaaagaaattctttatgacaaatttcactttttaatt

SEQ ID NO: 7066 - DNA, 119 bp, homo sapiens
catttacaaactcgatttcaaaaataaaagaaattctttatgacaaatttcactttttaatttcaatatacaggtatgttcttttgtcataaattatcagttgaaactgttccagtgaa

SEQ ID NO: 7067 - DNA, 119 bp, homo sapiens
aatttcaatattacaggtatgttcttttgtcataaattatcagttgaaactgttccagtgaaatctggttcaattaatttaacactttatataagaaataaaacatttattttcaagtc

SEQ ID NO: 7068 - DNA, 119 bp, homo sapiens
tgaaatctggtatcaattaatttaacactttatataagaaataaaacatttattttcaagtcttacataattacttaaaatagatacaaaattcagtttttaatttttaaattgtattg

SEQ ID NO: 7069 - DNA, 119 bp, homo sapiens
agtcttacatatattacttaaaatagatacaaaattcagtttttaatttttaaattgtattgctatttcagctaccttaaagtaaataccttagtggaaaaaaaagtttagattttcct

SEQ ID NO: 7070 - DNA, 119 bp, homo sapiens
attgctatttcaagctaccttaaagtaaataccttagtggaaaaaaaagtttagattttcctgaatgactaaaacaaatactcttaataacagtccaccatatgttattcatttagcaa

SEQ ID NO: 7071 - DNA, 119 bp, homo sapiens
tcctgaatgacttaaaacaaatactcttaataacagtccaccatatgttattcatttagcaattaggtagtcaaatgatttataaaattatcttgaaaggaaaaaagtaatatttgttg

SEQ ID NO: 7072 - DNA, 119 bp, homo sapiens
gcaattaggtaggtcaaatgatttataaaattatcttgaaaggaaaaaagtaatatttgttgggcaagtaaataattttcgagactgttataatatgcaacttagaatcaaattcaaga

SEQ ID NO: 7073 - DNA, 119 bp, homo sapiens
gttgggcaagtaaaataattttcgagactgttataatatgcaacttagaatcaaattcaagaacttgatgataagaaaatctaacattgcacaaattcataaataattgcttaatttcc

SEQ ID NO: 7074 - DNA, 119 bp, homo sapiens
aagaacttgattgataagaaaatctaacattgcacaaattcataaataattgcttaatttccatctttatattaacctgcattattgaagcacactgaaaacaaggagatgagataacg

SEQ ID NO: 7075 - DNA, 119 bp, homo sapiens
ttccatctttaatattaacctgcattattgaagcacactgaaaacaaggagatgagataacgtagaaaaaagtatacatatgattgtttgcttgacggaggcattgatttgttaatata

SEQ ID NO: 7076 - DNA, 119 bp, homo sapiens
aacgtagaaaaaaagtatacatatgattgtttgcttgacggaggcattgatttgttaatatactttcttcacacatttccctgtccaaaaatataaacttgcttgttttccatatatac

SEQ ID NO: 7077 - DNA, 119 bp, homo sapiens
tatactttcttacacacatttccctgtccaaaaatataaacttgcttgttttccatatatacaagtatctgtgaaatcctggattctgagaagaaaaagtttgaggtatagccttgaat

SEQ ID NO: 7078 - DNA, 119 bp, homo sapiens
atacaagtatcctgtgaaatcctggattctgagaagaaaaagtttgaggtatagccttgaataaagcataaaatgcataatatttttggctgaaattcagcaaaatgactgtcggcaga

SEQ ID NO: 7079 - DNA, 119 bp, homo sapiens
gaataaagcatcaaaatgcataatatttttggctgaaattcagcaaaatgactgtcggcagagaagagtgatcagagtgtgcttccaaaagtcttccagatttttgccctctgagaatt

SEQ ID NO: 7080 - DNA, 119 bp, homo sapiens
cagagaagagttgatcagagtgtgcttccaaaagtcttccagatttttgccctctgagaattttgttgggacatcaaataattgaactcttcaacatcaatatatacaaaggcatttta

SEQ ID NO: 7081 - DNA, 119 bp, homo sapiens
aattttgttggcgacatcaaataattgaactcttcaacatcaatatatacaaaggcattttattattaacaaagaaagggacttagagtcatcagaaattacaactttattttttcata

SEQ ID NO: 7082 - DNA, 119 bp, homo sapiens
tttattattaaccaaagaaagggacttagagtcatcagaaattacaactttattttttcataatacataatttattgccatcagagttctgcaattctcataaaattagagtcagatgg

SEQ ID NO: 7083 - DNA, 119 bp, homo sapiens
cataatacatatatttattgccatcagagttctgcaattctcataaaattagagtcagatggaattcaggacacgtgcaagttttggaaatggacacagataacagtatagaactgtac

SEQ ID NO: 7084 - DNA, 119 bp, homo sapiens
atggaattcagggacacgtgcaagttttggaaatggacacagataacagtatagaactgtacacaaaatattacaatttattaaacacactgttttagtacatcctggatggatgagaa

SEQ ID NO: 7085 - DNA, 119 bp, homo sapiens
gtacacaaaataattacaatttattaaacacactgttttagtacatcctggatggatgagaatgagcacatattttttatgaatatatatttttctttttttgttttctacagcaccaa

SEQ ID NO: 7086 - DNA, 119 bp, homo sapiens
agaatgagcaccatattttttatgaatatatatttttctttttttgttttctacagcaccaaagaaattaaataggaaaaggagagttgagaattgggaatcaagaatcagccctgttt

SEQ ID NO: 7087 - DNA, 119 bp, homo sapiens
ccaaagaaattcaaataggaaaaggagagttgagaattgggaatcaagaatcagccctgtttccatcttgccacaccaacttatatctttatgattttcaaagcttttgccatgtgatt

SEQ ID NO: 7088 - DNA, 119 bp, homo sapiens
gtttccatcttagccacaccaacttatatctttatgattttcaaagcttttgccatgtgattctgccccacaaaggcatcggtatttcctaaatggtacctgtatatgcagcgttgttt

SEQ ID NO: 7089 - DNA, 119 bp, homo sapiens
gattctgcccccacaaaggcatcggtatttcctaaatggtacctgtatatgcagcgttgttttctatacatccttattcaaaacttgcatgtggcacaaaatgggttggtggcaccaag

SEQ ID NO: 7090 - DNA, 119 bp, homo sapiens
gttttctataccatccttattcaaaacttgcatgtggcacaaaatgggttggtggcaccaaggtatatttctgttgatttgatatgttctttgtcttaatcttagccaagaaaacaaac

SEQ ID NO: 7091 - DNA, 119 bp, homo sapiens
caaggtatattttctgttgatttgatatgttctttgtcttaatcttagccaagaaaacaaacaggaccacttcaaatccgaacttctgattctgatcaccaaagtcattgatcatgaca

SEQ ID NO: 7092 - DNA, 119 bp, homo sapiens
aaacaggaccaacttcaaatccgaacttctgattctgatcaccaaagtcattgatcatgacatcaacaaaggtacttgatcaatttttggtgtattgatttcaatgacagtcttttcat

SEQ ID NO: 7093 - DNA, 119 bp, homo sapiens
cgcacaaccatcatacagtgttttgataaaaggattattgtcataggacatctcctcatcatttgatccaggaagcgaagtgctttgtcataacttcctgatgacacatcataccaggc

SEQ ID NO: 7094 - DNA, 119 bp, homo sapiens
atcatttgatcccaggaagcgaagtgctttgtcataacttcctgatgacacatcataccaggctgctgatgatgacagtggtaggtgaaattttgccgagcagaggcagtcagaagttt

SEQ ID NO: 7095 - DNA, 119 bp, homo sapiens
ccaggctgctgactgatgacagtggtaggtgaaattttgccgagcagaggcagtcagaagtttcaggaagtcatttgcaccatattgatggaatttccttcaacatctaagtatgaaag

SEQ ID NO: 7096 - DNA, 119 bp, homo sapiens
catctgggaagtcaggatggctgagttgcaggtctttacaagttcgggctggattggtctgagtacccatggaaatttcatatgctcaatgtcttgtttcagggaattgagggaaccaa

SEQ ID NO: 7097 - DNA, 119 bp, homo sapiens
tcgggctggattggtctgagtacccattggaaatttcatatgctcaatgtcttgtttcagggaattgaggaaccaaatatttcttccattccatccgagtaatcaagaatattatcatc

SEQ ID NO: 7098 - DNA, 119 bp, homo sapiens
tcaatgtcttgtttcagggaattgagggaaccaaatatttcttccattccatccgagtaatcaagaatatatcatctgcatctgcttgcatgccttcagtatgtcttctcgtttttttg

SEQ ID NO: 7099 - DNA, 119 bp, homo sapiens
ccattccatccgagtaatcaagaatattatcatctgcatctgcttgcatgccttcagtatgtcttctcgttttttggaggacaagattggtaaaggctgaatgacttcaccaggtggac

SEQ ID NO: 7100 - DNA, 119 bp, homo sapiens
gcttgtttctgtaatatcagtttctgctggtacacctggaccaaattcttcattaggggggcttgttggttatcttcatattctttatattcataaaaatcatattcgcctaaatctcc

SEQ ID NO: 7101 - DNA, 119 bp, homo sapiens
ttcttcattaggggggcttgttggtttatcttcatattctttatattcataaaaatcatattcgcctaatctccatctaccagaagatcagaatccctgccgtctatttctttgttttc

SEQ ID NO: 7102 - DNA, 119 bp, homo sapiens
ttcataaaaatcatattcgcctaaatctccatctaccagaagatcagaatccctgccgtctatttctttttttcatatagtgtatcctcagaatttttcctctgggaatcataatcctc

SEQ ID NO: 7103 - DNA, 119 bp, homo sapiens
agaatccctgccgtctatttctttgttttcatatagtgtatcctcagaatttttcctctgggaatcatatcctctcccgttagatattcttcagtaaatatttcttcaactggatttgg

SEQ ID NO: 7104 - DNA, 119 bp, homo sapiens
ctttacccctagtttggcttttgctgatgcttgataacttttcttcttcttggatgaaaatttttcagattggggggtgtaaactttttggatttttcctttgatttagtagccactgt

SEQ ID NO: 7105 - DNA, 119 bp, homo sapiens
ataacttttcttcttcttggatgaaaatttttcagatttggggggtgtaaactttttggatttttccttgatttagtagccactgtcctcatcttctttttgaaattggatttcttttt

SEQ ID NO: 7106 - DNA, 119 bp, homo sapiens
ctcatctatctgaggttcctgagcttgagcagccttgggtgctgaagagtcacagtctggactataatgtcacagtagtcatatgctgccttgggatcacctgtgatcaaaaactgctg

SEQ ID NO: 7107 - DNA, 119 bp, homo sapiens
ctgaggttcctgagcttgagcagccttgggtgctgaagagtcacagtctggactataatgctcacagtatcatatgctgccttgggatcacctgtgatcaaaaactgctgaatgtcccc

SEQ ID NO: 7108 - DNA, 119 bp, homo sapiens
ctcaaaaacttcttcatccaaaatccttgttccaaaaaccgtgattccattggtatcaacaattgctcttcacttctatcaagtggtttcgtggttttcttcttacaatcaacaatcat

SEQ ID NO: 7109 - DNA, 119 bp, homo sapiens
attccattggtatcaacaattgctctctcacttctatcaagtggtttcgtggttttcttcttacaatcacaatcattgtcacagttttcttctccacgctgattgctacccgatgccac

SEQ ID NO: 7110 - DNA, 119 bp, homo sapiens
ttcccgtcagcgatgttaacagttctgaagaggggatagtcttctggggcaggttttccagtgtggtctcaaacagaaaaacaggtgatctcccaacctcaacaccaatttgctgaata

SEQ ID NO: 7111 - DNA, 119 bp, homo sapiens
ggcaggttttccagtgtggtcttcaaacagaaaaacaggtgatctcccaacctcaacaccaatttgctgataccatgctcattatatatagataaaaggaaagactgaattcctttttt

SEQ ID NO: 7112 - DNA, 119 bp, homo sapiens
caacctcaacaccaatttgctgaataccatgctcattatatatagataaaaggaaagactgaattccttttttggttttactgtaaatagtattgaaaagtcttctgggaaagttccac

SEQ ID NO: 7113 - DNA, 119 bp, homo sapiens
ctggaaataactgttttgttggggcactgagttgtgcttgctttgaaactctgtaagcagtatctgagctttagaattctttctgtttgtgcaaaatcccgttgtttttgatattccct

SEQ ID NO: 7114 - DNA, 119 bp, homo sapiens
ctctgtaagcagtatctgagcctttagaattctttctgtttgtgcaaaatcccgttgtttttgatattcctctggagaattgtgaaaatctagtgcttttagtacatcaactggagcag

SEQ ID NO: 7115 - DNA, 119 bp, homo sapiens
ctcctctgacctctctagcttggaagaggaaggtcaatgcgagggttgttacggtgaaatcccagagccccgtttcgttttccacctagaggaccacggctccatctccgagccccgca

SEQ ID NO: 7116 - DNA, 119 bp, homo sapiens
acggtgaaatcccagagccaccgtttcgttttccacctagaggaccacggctccatctccgagccccgcctcacaactgtgaactcaacccacgaaattgcgactgcagaccaacttcg

SEQ ID NO: 7117 - DNA, 119 bp, homo sapiens
ctccatctccgagccccgcactcacaactgtgaactcaacccacgaaattgcgactgcagaccaacttctcctttccaaggtatcgccagggatgtttgctacacagccattggggagg

SEQ ID NO: 7118 - DNA, 119 bp, homo sapiens
gcgactgcagaccaacttcgtcctttccaaggtatcgccagggatgtttgctacacagccattggggaggagagggggaaaaagtcaaagggctttttcttctaaatttgatggtttgc

SEQ ID NO: 7119 - DNA, 119 bp, homo sapiens
ctacacagccattggggagggagagggggaaaaagtcaaagggctttttcttctaaatttgatggtttggttcttcgtgtctctagccctttcctctccctctgagttggccccaccgg

SEQ ID NO: 7120 - DNA, 119 bp, homo sapiens
ttctaaatttgatggtttgcgttcttcgtgtctctagccctttcctctccctctgagttggccccaccgccgggaccctccggccgcgaccctctgatccttcctctgccgggccctgc

SEQ ID NO: 7121 - DNA, 119 bp, homo sapiens
ctctgagttggccccaccggccgggaccctccggccgcgaccctctgatccttcctctgccgggccctgcttcagaatgaaggcagatgaggggcttccaccaacaagctgagagtact

SEQ ID NO: 7122 - DNA, 119 bp, homo sapiens
tcatggtatattgactataattttctgtttttaattacccagattccaagcctgtttatagaacttatactgaggaatggtgaggattagaagaggccgcagtccttgaggttttcttt

SEQ ID NO: 7123 - DNA, 119 bp, homo sapiens
tgtttatagaacttatacctgaggaatggtgaggattagaagaggccgcagtccttgaggttttctttgtgataatatctgtaactgcatcaaacacaaatttgacattctgtgtatct

SEQ ID NO: 7124 - DNA, 119 bp, homo sapiens
ccttgaggttttctttgatgataatatctgtaactgcatcaaacacaaatttgacattctgtgtatctgagcacaggtcatgtgactgtagatttctttgacatcttttcgcatattga

SEQ ID NO: 7125 - DNA, 119 bp, homo sapiens
gacattctgtgtatctgtagcacaggtcatgtgactgtagatttctttgacatcttttcgcatattgagtcaaggaactggctctttatgtaattccccgcatcatcataggagttgtt

SEQ ID NO: 7126 - DNA, 119 bp, homo sapiens
catcatactctggaaaacaaatgctgagatggactttcttgattttttcctcaaagaggtccttcttgtgagaaagaggacaatggaagtagccgcaaagaatttgtggttacatatgc

SEQ ID NO: 7127 - DNA, 119 bp, homo sapiens
tttcttgattttttcctcaaagaggtccttcttgttgagaaagaggacaatggaagtagccgcaaagaattgtggttacatatgctgttgaacagatgcaaagactcatgcatacgatt

SEQ ID NO: 7128 - DNA, 119 bp, homo sapiens
cacttcgtcatcttccaccagcaccatatcataggcactgagggctgcacagaaaatgatgcaggtgacccctcgaagcagtggatccacttctttctctcggatctctgccctcccac

SEQ ID NO: 7129 - DNA, 119 bp, homo sapiens
tcttccaccagcaccatatcataggcactgagggctgcacagaaaatgatgcaggtgactccctcgaagagtggatccacttctttctctcggatctctgccctcccacatcaaacatc

SEQ ID NO: 7130 - DNA, 119 bp, homo sapiens
ctgaaattcaagtctttgacggaaaacttggtttcaatgatgcccgtggttttgactctggatcggagccatcttgctcactagggaggtactcagggtctgtaattcgttctaattgg

SEQ ID NO: 7131 - DNA, 119 bp, homo sapiens
aagtctttgacggaaaacttggtttcaatgatgcccgtggttttgactctggatcggagcacatcttgccactagggaggtactcagggtctgtaattcgttctaattggttcaggtag

SEQ ID NO: 7132 - DNA, 119 bp, homo sapiens
taagatgcggagtcattaagctggtattctgcagctctctcgaagcaggcttgcaccccaccatccttcacaacctcctaatgacctccacgagctcaggaggcatggttccctcctca

SEQ ID NO: 7133 - DNA, 119 bp, homo sapiens
ctcgaagcaggcttgcaccccaccatccttccacaacctcctaatgacctccacgagctcaggaggcatgttccctcctcaatggagtcagccaggttgttgagctgtcgcccgtcatc

SEQ ID NO: 7134 - DNA, 119 bp, homo sapiens
cgcacagcttggttcagcataatcgatgcccagtgtggtcatggcccggatgatagccaggatggactgagcacatttccatagatgatagccttgaactccaggcattcttctggtga

SEQ ID NO: 7135 - DNA, 119 bp, homo sapiens
tcgatgcccagtgtggtcatggcccggatgatagccaggatggactgcagcacatttccatagatgataccttgaactccaggcattcttctggtgaatagccatcctggtgaatgatc

SEQ ID NO: 7136 - DNA, 119 bp, homo sapiens
ccagcagtagcagcttgacagtcttggcttccttatcagcatcctcctgcagcttcttttctagctcctggacctcttggccagttctttgtcctcagcactggctccacttcccatat

SEQ ID NO: 7137 - DNA, 119 bp, homo sapiens
cttcttttctagctccttggacctcttggccagttctttgtcctcagcactggctccacttcccatattgccgtcttgtcagctttttcaggcccctaatcctctctcgtaaggtttcc

SEQ ID NO: 7138 - DNA, 119 bp, homo sapiens
gctccacttcccatatttgccgtcttgtcagctttttcaggcccctaatcctctctcgtaaggtttccttatgtgagatggaagagaaggaaaaaagttgggattgagtatcccaactt

SEQ ID NO: 7139 - DNA, 119 bp, homo sapiens
ctctcgtaaggtttcctgtatgtgagatggaagagaaggaaaaaagttgggattgagtatcccaacttgctcccctaaaagctggtctgtacgatggcaggtgagagagcaggctgtag

SEQ ID NO: 7140 - DNA, 119 bp, homo sapiens
ttgagtatcccaacttggctcccctaaaagctggtctgtacgatggcaggtgagagagcaggctgtaggtcttgtactctgcctacattgactgagactccctacttcaactggagacc

SEQ ID NO: 7141 - DNA, 119 bp, homo sapiens
gtgtagtattgagtcctgtttgagctattgttctctttttcctgaaaaatggcactgtcaaagagggagtggatgagctgaaaccatggatagagaagacagtgaagagggtcctgggt

SEQ ID NO: 7142 - DNA, 119 bp, homo sapiens
ttttcctgaaaaatggcactgtcaaagagggagctggatgagctgaaaccatggatagagaagacagtgagagggtcctgggtttctcagagcctacggtggtcacagcagcattgaac

SEQ ID NO: 7143 - DNA, 119 bp, homo sapiens
gatgagctgaaaccatggatagagaagacagtgaagagggtcctgggtttctcagagcctacggtggtccagcagcattgaactgtgtggggaagggcatggacaagaagaaggcagcc

SEQ ID NO: 7144 - DNA, 119 bp, homo sapiens
atcatctgaaaccttttcttgatgattctactctccgatttgtggacaaactgtttgaggctgtggaggaggccgaagctctaggcattccaagtctagcagtgacaggagcagaaaac

SEQ ID NO: 7145 - DNA, 119 bp, homo sapiens
ccttttcttgatgattctactctccgatttgtggacaaactgtttgaggctgtggaggaaggccgaagcctaggcattccaagtctagcagtgacaggagcagaaaacgagagctaaag

SEQ ID NO: 7146 - DNA, 119 bp, homo sapiens
gaggtgtttggtgatgactctgagatctctaaagaatcatcaggagtaaagaagcgacgaataccccgtttgaggaggtggaagaagagccagaggtgatccctgggcctccatcagag

SEQ ID NO: 7147 - DNA, 119 bp, homo sapiens
tctaaagaatcatcaggagtaaagaagcgacgaataccccgttttgaggaggtggaagaagagccagagtgatccctgggcctccatcagagagccctggcatgctgactaagctccag

SEQ ID NO: 7148 - DNA, 119 bp, homo sapiens
ccaaagactccttcttcctcccaaccagaacgacttcctattggcaacactattcagccctcccaggctccactttcatgaatgatgccattgagaaggcaaggaaagcagctgaactg

SEQ ID NO: 7149 - DNA, 119 bp, homo sapiens
tattcagccctcccaggctgccactttcatgaatgatgccattgagaaggcaaggaaagcagctgaactcaagctcgaatccaagcccagctggcactgaagccaggactcatcggcaa

SEQ ID NO: 7150 - DNA, 119 bp, homo sapiens
caaggaaagcagctgaactgcaagctcgaatccaagcccagctggcactgaagccaggactcatcggcatgccaacatggtgggcctggctaatctccatgccatgggcattgctcccc

SEQ ID NO: 7151 - DNA, 119 bp, homo sapiens
gaaggtggagttaaaagaccaaacgaaacctacaccactgatcctggatgagcaagggcgcactgtagagcaacaggcaaggagattgagctgacacaccgcatgcctactctgaaagc

SEQ ID NO: 7152 - DNA, 119 bp, homo sapiens
gatgagcaagggcgcactgtagatgcaacaggcaaggagattgagctgacacaccgcatgcctactctgaagccaatattcgtgctgtgaagagggaacaattcaagcaacaactaaag

SEQ ID NO: 7153 - DNA, 119 bp, homo sapiens
tgacacaccgcatgcctactctgaaagccaatattcgtgctgtgaagagggaacaattcaagcaacaacaaaggaaaagccatcagaagacatggaatccaataccttttttgaccccc

SEQ ID NO: 7154 - DNA, 119 bp, homo sapiens
gagggaacaattcaagcaacaactaaaggaaaagccatcagaagacatggaatccaataccttttttgaccccgagtctccattgccccttcccagcgccagagacgcacttttaaatt

SEQ ID NO: 7155 - DNA, 119 bp, homo sapiens
atggaatccaataccttttttgacccccgagtctccattgccccttcccagcgccagagacgcacttttaattccatgacaagggcaaatttgagaagattgctcagcgattacggaca

SEQ ID NO: 7156 - DNA, 119 bp, homo sapiens
gctcaactggagaagctacaggcagagatttcacaagcagctcgaaaaacaggcatccatacttcgactggcttgccctcattgctcctaagaaggagctaaaggaaggagatattcct

SEQ ID NO: 7157 - DNA, 119 bp, homo sapiens
aacaggcatccatacttcgactaggcttgccctcattgctcctaagaaggagctaaaggaaggagatatcctgaaattgagtggtgggactcttacataatccccaatggctttgatct

SEQ ID NO: 7158 - DNA, 119 bp, homo sapiens
ttgacaatgacacaccagttactctgggagtatatcttaccaagaaggaacagaaaaaacttcggagacaacaaggagggaagcacagaaggaactacaagaaaaagtcaggctgggcc

SEQ ID NO: 7159 - DNA, 119 bp, homo sapiens
tgggagtatatcttaccaagaaggaacagaaaaaacttcggagacaaacaaggagggaagcacagaaggactacaagaaaaagtcaggctgggcctgatgcctcctccagaacccaaag

SEQ ID NO: 7160 - DNA, 119 bp, homo sapiens
ggtacagccaaagaccggagctttggagagatgaagtttaaacagtgtcctacagagaacatggctcgtagcatttcaaaaagcatggggctgaacactactgggaccttgcgctgagt

SEQ ID NO: 7161 - DNA, 119 bp, homo sapiens
agaacatggctcgtgagcatttcaaaaagcatggggctgaacactactgggaccttgcgctgagtgaattgtgttagagtccactgattgagactactgcaagcccttgcctctcctcc

SEQ ID NO: 7162 - DNA, 119 bp, homo sapiens
tgcgctgagtgaatctgtgttagagtccactgattgagactactgcaagcccttgcctctcctcccttgctttgtctcttcagtcctctcacttattctatttcccaaccccctcccac

SEQ ID NO: 7163 - DNA, 119 bp, homo sapiens
cctctcctcccttgcctttgtctcttcagtcctctcacttattctatttcccaaccccctcccacttgttgtgtgatctcagaactgtgccaagcagacactgggacaaagggagaata

SEQ ID NO: 7164 - DNA, 119 bp, homo sapiens
cccctcccacttgtttgtgtgatctcagaactgtgccaagcagacactgggacaaagggagaatatcttctcccctcctgagtcagcctggtgttgccctttattccccttatgtgcat

SEQ ID NO: 7165 - DNA, 119 bp, homo sapiens
agggagaatatcttgctcccctcctgagtcagcctggtgttgccctttattccccttatgtgcatatgataaagagttatttttaaacttggtgtgatatttttcacacattcgtaagt

SEQ ID NO: 7166 - DNA, 119 bp, homo sapiens
ggtgtggcaggggctgaggcactgagagaccggaaagcctggcattccagagggagggaaacgcagcggatccccaggctccaggtaagggagcgggggagctgacagttctgaaggga

SEQ ID NO: 7167 - DNA, 119 bp, homo sapiens
gatctgtcacaactcgagaggtggaaattccggtttccctggcctagagctcccagtgctggctttggctgatgggcacctggagggccgcactcccgttccagccaggctgagccttc

SEQ ID NO: 7168 - DNA, 119 bp, homo sapiens
gctggctttggcatgatgggcacctggagggccgcactcccgttccagccaggctgagccttctgtccctgcctctggggcctgggaaccccccttcttctttctcctgaatggcaccc

SEQ ID NO: 7169 - DNA, 119 bp, homo sapiens
gccttctgtcccctgcctctggggcctgggaaccccccttcttctttctcctgaatggcacccccgcccagaatccagacaccgagtttcccactgtggctggttcaagggtatgtgag

SEQ ID NO: 7170 - DNA, 119 bp, homo sapiens
agctccctggtgacagtctgtggctgagcatggccctcccagccctgggcctggacccctggagcctccgggccttttcctcttccaactgcttcagctgctgctgccgacgacgaccg

SEQ ID NO: 7171 - DNA, 119 bp, homo sapiens
gcctggacccctggagcctcctgggccttttcctcttccaactgcttcagctgctgctgccgacgacgacgcggggggaggcgggcaggggcccatgcccagggtcagatactatgcag

SEQ ID NO: 7172 - DNA, 119 bp, homo sapiens
gggatgaacgtagggcacttagcttcttccaccagaagggcctccaggattttgacactctgctcctgatggtgatggaaatactctctacgtgggggctcgagaagccattctggcct

SEQ ID NO: 7173 - DNA, 119 bp, homo sapiens
ctccaggattttgacactctgctcctgagtggtgatggaaatactctctacgtgggggctcgagaagccttctggccttggatatccaggatccaggggtccccaggctaaagaacatg

SEQ ID NO: 7174 - DNA, 119 bp, homo sapiens
atgacgcctcctttgtggcagccatcccttcgacccaggtcgtctacttcttcttcgaggagacagccacgagtttgacttctttgagaggctccacacatcgcgggtggctagagtct

SEQ ID NO: 7175 - DNA, 119 bp, homo sapiens
gcctcctttgtggcagccatcccttcgacccaggtcgtctacttcttcttcgaggagacagccagcgagttgacttctttgagaggctccacacatcgcgggtggctagagtctgcaag

SEQ ID NO: 7176 - DNA, 119 bp, homo sapiens
aatgacgtgggcggcgaaaagctgctgcagaagaagtggaccaccttcctgaaggcccagctgctctgccccagccggggcagctgcccttcaacgtcatccgccacgcggtcctgctc

SEQ ID NO: 7177 - DNA, 119 bp, homo sapiens
ggcccagctgctctgcacccagccggggcagctgcccttcaacgtcatccgccacgcggtcctgctcccgccgattctcccacagctccccacatctacgcagtcttcacctcccagtg

SEQ ID NO: 7178 - DNA, 119 bp, homo sapiens
gcaggttggcgggaccaggagctctgcggtttgtgccttctctctcttggacattgaacgtgtctttaagggaaatacaaagagttgaacaaagaaacttcacgctggactacttatag

SEQ ID NO: 7179 - DNA, 119 bp, homo sapiens
tgtgccttctctctcttggacattgaacgtgtctttaaggggaaatacaaagagttgaacaaagaaactcacgctggactacttataggggccctgagaccaacccccggccaggcagt

SEQ ID NO: 7180 - DNA, 119 bp, homo sapiens
tgctcagtgggcccctcctctgataaggccctgaccttcatgaaggaccatttcctgatggatgagcaatggtggggacgcccctgctggtgaaatctggcgtggagtatacacggctt

SEQ ID NO: 7181 - DNA, 119 bp, homo sapiens
ctgaccttcatgaaggaccatttcctgatggatgagcaagtggtggggacgcccctgctggtgaaatctgcgtggagtatacacggcttgcagtggagacagcccagggccttgatggg

SEQ ID NO: 7182 - DNA, 119 bp, homo sapiens
gatgagcaagtggtggggacgcccctgctggtgaaatctggcgtggagtatacacggcttgcagtggagcagcccagggccttgatgggcacagccatcttgtcatgtacctgggaacc

SEQ ID NO: 7183 - DNA, 119 bp, homo sapiens
ggtgcagtgtttgtaggcttctcaggaggtgtctggagggtgccccgagccaactgtagtgtctatgaggctgtgtggactgtgtccttgcccgggacccccactgtgcctgggaccct

SEQ ID NO: 7184 - DNA, 119 bp, homo sapiens
ggtgccccgagccaactgtagtgtctatgagagctgtgtggactgtgtccttgcccgggacccccactggcctgggaccctgagtcccgaacctgttgcctcctgtctgcccccaacct

SEQ ID NO: 7185 - DNA, 119 bp, homo sapiens
ttaaagaagtcctggctgtccccaactccatcctggagctcccctgcccccacctgtcagccttggcctttattattggagtcatggcccagcagcagtcccagaagcctcttccactg

SEQ ID NO: 7186 - DNA, 119 bp, homo sapiens
gccttggcctcttattattggagtcatggcccagcagcagtcccagaagcctcttccactgtctacaatgctccctcttgctgatagtgcaggatggagttgggggtctctaccagtgc

SEQ ID NO: 7187 - DNA, 119 bp, homo sapiens
tgtctacaatggctccctcttgctgatagtgcaggatggagttgggggtctctaccagtgctgggcaacgagaatggcttttcataccctgtgatctcctactgggtggacagccagga

SEQ ID NO: 7188 - DNA, 119 bp, homo sapiens
gctgggcaactgagaatggcttttcataccctgtgatctcctactgggtggacagccaggaccagacccggccctggatcctgaactggcaggcatcccccgggagcatgtgaaggtcc

SEQ ID NO: 7189 - DNA, 119 bp, homo sapiens
gaccagaccctggccctggatcctgaactggcaggcatcccccgggagcatgtgaaggtcccgttgaccgggtcagtggtggggccgccctggctgcccagcagtcctactggccccac

SEQ ID NO: 7190 - DNA, 119 bp, homo sapiens
cccgttgaccagggtcagtggtggggccgccctggctgcccagcagtcctactggccccactttgtcacgtcactgtcctctttgccttagtgctttcaggagccctcatcatcctcgt

SEQ ID NO: 7191 - DNA, 119 bp, homo sapiens
actttgtcactgtcactgtcctctttgccttagtgctttcaggagccctcatcatcctcgtggcctcccattgagagcactccgggctcggggcaaggttcagggctgtgagaccctgc

SEQ ID NO: 7192 - DNA, 119 bp, homo sapiens
gtggcctccccattgagagcactccgggctcggggcaaggttcagggctgtgagaccctgcgccctgggagaaggccccgttaagcagagagcaacacctccagtctcccaaggaatgc

SEQ ID NO: 7193 - DNA, 119 bp, homo sapiens
gcgccctggggagaaggccccgttaagcagagagcaacacctccagtctcccaaggaatgcaggacctcgccagtgatgtggacgctgacaacaactgcctaggcactgaggtagctta

SEQ ID NO: 7194 - DNA, 119 bp, homo sapiens
gcaggacctctgccagtgatgtggacgctgacaacaactgcctaggcactgaggtagcttaaactctagcacaggccggggctgcggtgcaggcacctggccatgctggctgggcggcc

SEQ ID NO: 7195 - DNA, 119 bp, homo sapiens
taaactctaggcacaggccggggctgcggtgcaggcacctggccatgctggctgggcggcccaagcacaccctgactaggatgacagcagcacaaaagaccacctttctcccctgagag

SEQ ID NO: 7196 - DNA, 119 bp, homo sapiens
cccaagcacagccctgactaggatgacagcagcacaaaagaccacctttctcccctgagaggagcttctctactctgcatcactgatgacactcagcagggtgatgcacagcagtctgc

SEQ ID NO: 7197 - DNA, 119 bp, homo sapiens
aggagcttctgctactctgcatcactgatgacactcagcagggtgatgcacagcagtctgcctcccctagggactcccttctaccaagcacatgagctctctaacagggtgggggctac

SEQ ID NO: 7198 - DNA, 119 bp, homo sapiens
gcctcccctatgggactcccttctaccaagcacatgagctctctaacagggtgggggctacccccagactgctcctacactgatattgaagaacctggagaggatccttcagttctggc

SEQ ID NO: 7199 - DNA, 119 bp, homo sapiens
acccccagacctgctcctacactgatattgaagaacctggagaggatccttcagttctggccattccaggaccctccagaaacacagtgtttcaagagaccctaaaaaacctgcctgtc

SEQ ID NO: 7200 - DNA, 119 bp, homo sapiens
gccattccagggaccctccagaaacacagtgtttcaagagaccctaaaaaacctgcctgtcccaggacctatggtaatgaacaccaaacatctaaacaatcatatgctaacatgccact

SEQ ID NO: 7201 - DNA, 119 bp, homo sapiens
tcccaggaccctatggtaatgaacaccaaacatctaaacaatcatatgctaacatgccactcctggaaatccactctgaagctgccgctttggacaccaacactcccttctcccagggt

SEQ ID NO: 7202 - DNA, 119 bp, homo sapiens
ctcctggaaactccactctgaagctgccgctttggacaccaacactcccttctcccagggtcatgcaggatctgctccctcctgcttcccttaccagtcgtgcaccgctgactcccagg

SEQ ID NO: 7203 - DNA, 119 bp, homo sapiens
gtcatgcagggatctgctccctcctgcttcccttaccagtcgtgcaccgctgactcccaggaagtctttctgaagtctgaccacctttcttcttgcttcagttggggcagactctgatc

SEQ ID NO: 7204 - DNA, 119 bp, homo sapiens
ggaagtctttcctgaagtctgaccacctttcttcttgcttcagttggggcagactctgatcccttctgcctggcagaatggcaggggtaatctgagccttcttcactcctttaccctag

SEQ ID NO: 7205 - DNA, 119 bp, homo sapiens
tcccttctgccctggcagaatggcaggggtaatctgagccttcttcactcctttaccctagctgacccctcacctctccccctcccttttcctttgttttgggattcagaaaactgctt

SEQ ID NO: 7206 - DNA, 119 bp, homo sapiens
ccaattatcaaaaagtctgtattaattcaattcttaattcatgaagccacccatacaatcacaaatttactaacacatttaattttggaacaaaggagcaactcctttaaagtttgaga

SEQ ID NO: 7207 - DNA, 119 bp, homo sapiens
caatcacaaatttatctaacacatttaattttggaacaaaggagcaactcctttaaagtttgagagtcgataaatatttcatatacagcttaaacctaagctttgtaacgattattttt

SEQ ID NO: 7208 - DNA, 119 bp, homo sapiens
aagtttgagagtcgcataaatatttcatatacagcttaaacctaagctttgtaacgattatttttgagcgcagaaaaggaaggctagagaaatgctagagatgtccttactagtgacac

SEQ ID NO: 7209 - DNA, 119 bp, homo sapiens
gattatttttgagcagcagaaaaggaaggctagagaaatgctagagatgtccttactagtgacacattctgctgaagaacaagttctctggaagtgaaactcaaataggagagaacaag

SEQ ID NO: 7210 - DNA, 119 bp, homo sapiens
ctagtgacacattcttgctgaagaacaagttctctggaagtgaaactcaaataggagagaacaagagatcaggtaggtatcagttctgctagggtcttcagagagaccgagggccccaa

SEQ ID NO: 7211 - DNA, 119 bp, homo sapiens
ccctagagtaccataactccaccacaagtcctggaataattccaaaagtttttggaacaaagtgtgaccgaggtcaacctgctcacattcaatcaaaatcaaaataaaaatgagtgcct

SEQ ID NO: 7212 - DNA, 119 bp, homo sapiens
aagtgtgacctgaggtcaacctgctcacattcaatcaaaatcaaaataaaaatgagtgccttgggaacaagataaagtggactagggcatctatttagattcctggagtaagccctggc

SEQ ID NO: 7213 - DNA, 119 bp, homo sapiens
cttgggaacaaagataaagtggactagggcatctatttagattcctggagtaagccctggctaggctagagaagtgagaatctgtaaaagaaaactggtaggacagaaggcacaaggtt

SEQ ID NO: 7214 - DNA, 119 bp, homo sapiens
gctaggctagcagaagtgagaatctgtaaaagaaaactggtaggacagaaggcacaaggttcatagagagggctcttttgttcttccctcctcctctctatccttgtccagtttttggc

SEQ ID NO: 7215 - DNA, 119 bp, homo sapiens
ttcatagagaagggctcttttgttcttccctcctcctctctatccttgtccagtttttggctggagcttaaggagaaaatagtgacactgaagccccatgactatatcacaagtatacc

SEQ ID NO: 7216 - DNA, 119 bp, homo sapiens
gctggagctttaaggagaaaatagtgacactgaagccccatgactatatcacaagtatacctgtatttttccatctctggcagaacagagacgttttacattcagatctgggctcttcc

SEQ ID NO: 7217 - DNA, 119 bp, homo sapiens
cctgtattttttccatctctggcagaacagagacgttttacattcagatctgggctcttccatgctctgtaaggtataggagttggaatttcccaaatagcctgagaccttgagaacat

SEQ ID NO: 7218 - DNA, 119 bp, homo sapiens
ccatgctctggtaaggtataggagttggaatttcccaaatagcctgagaccttgagaacatttccttcccaccaataccataaaacatgtaaggtcttcaaggggtgaaaagttttaac

SEQ ID NO: 7219 - DNA, 119 bp, homo sapiens
atttccttcctcaccaataccataaaacatgtaaggtcttcaaggggtgaaaagttttaacctcggggcagtgacatgtcagaagctcaaagcgactcataatgcatgtgaatttgctt

SEQ ID NO: 7220 - DNA, 119 bp, homo sapiens
acctcggggcaagtgacatgtcagaagctcaaagcgactcataatgcatgtgaatttgctttggagagattatcttctgagtgaaccaggacagccagctgagctgaccagagtaccta

SEQ ID NO: 7221 - DNA, 119 bp, homo sapiens
tttggagagacttatcttctgagtgaaccaggacagccagctgagctgaccagagtacctaccaacatagtcagccaaggtccgtagacccactgggagccacagaaaaaaagccacgt

SEQ ID NO: 7222 - DNA, 119 bp, homo sapiens
taccaacatatgtcagccaaggtccgtagacccactgggagccacagaaaaaaagccacgtcagcttaagaaaaataatttagaaaacataacaatatattactaacattaataacaat

SEQ ID NO: 7223 - DNA, 119 bp, homo sapiens
gtcagcttaaagaaaaataatttagaaaacataacaatatattactaacattaataacaataatgtaaaggttaaaatataataccacttgaagggctttctacattgaaatactcaag

SEQ ID NO: 7224 - DNA, 119 bp, homo sapiens
ataatgtaaaaggttaaaatataataccacttgaagggctttctacattgaaatactcaagggaacatgggaaagatggccatccagtctcctttgccaactgaggtgcagactgagtt

SEQ ID NO: 7225 - DNA, 119 bp, homo sapiens
agggaacatgaggaaagatggccatccagtctcctttgccaactgaggtgcagactgagttgtggaagggggtgttgatggaacccagcattacaatattgtgtagaactagtctccta

SEQ ID NO: 7226 - DNA, 119 bp, homo sapiens
ttgtggaaggtgggtgttgatggaacccagcattacaatattgtgtagaactagtctcctaatatacctactctgcaacttacggaagctgaggaagatcagaaaaagaccacactcct

SEQ ID NO: 7227 - DNA, 119 bp, homo sapiens
taatatacctcactctgcaacttacggaagctgaggaagatcagaaaaagaccacactcctcactcagatatttattatattctgccccatggggccttgcaggaaaagggacccaagc

SEQ ID NO: 7228 - DNA, 119 bp, homo sapiens
ctcactcagaatatttattatattctgccccatggggccttgcaggaaaagggacccaagctataccccactccttttccaagctactttcctgaaccaagggacaggattctaagaga

SEQ ID NO: 7229 - DNA, 119 bp, homo sapiens
gctatacccctactccttttccaagctactttcctgaaccaagggacaggattctaagagaatcatgtactcaaataagccagaatgtatctggggaagaatagccattaatttcctag

SEQ ID NO: 7230 - DNA, 119 bp, homo sapiens
gaatcatgtatctcaaataagccagaatgtatctggggaagaatagccattaatttcctagacctgacatgggtttatttgtgtctgccaggaagacggggagtcagtgagaatcgtaa

SEQ ID NO: 7231 - DNA, 119 bp, homo sapiens
agacctgacactgggtttatttgtgtctgccaggaagacggggagtcagtgagaatcgtaaatggactaatgaggggaaataggatgggcccttctttatcacagcttgagctcaaaaa

SEQ ID NO: 7232 - DNA, 119 bp, homo sapiens
aaatggactagatgaggggaaataggatgggcccttctttatcacagcttgagctcaaaaaggttgggaaaacaggtgtttaaaaaagagaggaggtaaaagggaggatgggcagggga

SEQ ID NO: 7233 - DNA, 119 bp, homo sapiens
aaggttgggataaacaggtgtttaaaaaagagaggaggtaaaagggaggatgggcaggggatagaggaagtcaggggctgggttcacccatatcacacagcattgtaggaagaagcagg

SEQ ID NO: 7234 - DNA, 119 bp, homo sapiens
gatagaggaaggtcaggggctgggttcacccatatcacacagcattgtaggaagaagcagggtaaccattgagttctcagcctggaacagggaggtgagggctcagcacctagagagag

SEQ ID NO: 7235 - DNA, 119 bp, homo sapiens
gggtaaccatttgagttctcagcctggaacagggaggtgagggctcagcacctagagagaggagaatccaaggcctctctttcaactctattgtgattagatgcaaaagccctttccct

SEQ ID NO: 7236 - DNA, 119 bp, homo sapiens
aggagaatcctaaggcctctctttcaactctattgtgattagatgcaaaagccctttccctttagagaatcagaatggtctgtctgaaggcaagagagcatagtgacagacctgtagcc

SEQ ID NO: 7237 - DNA, 119 bp, homo sapiens
ctttagagaattcagaatggtctgtctgaaggcaagagagcatagtgacagacctgtagccccagcccagctgtttctccccattctcaaaggctctgccaggagaactatagaaatac

SEQ ID NO: 7238 - DNA, 119 bp, homo sapiens
ccccagcccaggctgtttctccccattctcaaaggctctgccaggagaactatagaaatacagagtcccggtctctgcccctcctccccagatccaagagagggagtagagacaaggca

SEQ ID NO: 7239 - DNA, 119 bp, homo sapiens
acagagtcccaggtctctgcccctcctccccagatccaagagagggagtagagacaaggcacaaagacctggacgtaaaggtgaacatcagtgtggccacatataacattattttgaga

SEQ ID NO: 7240 - DNA, 119 bp, homo sapiens
cacaaagaccctggacgtaaaggtgaacatcagtgtggccacatataacattattttgagaaaggaaagaagtgcatgccccaaaagggatgccttccttcaccttgcaggtagctgga

SEQ ID NO: 7241 - DNA, 119 bp, homo sapiens
gaaaggaaagaaagtgcatgccccaaaagggatgccttccttcaccttgcaggtagctggaactttgatgtggcagaaaccacaatggagtagggttcacagaaatggcctgtgaaaca

SEQ ID NO: 7242 - DNA, 119 bp, homo sapiens
gaactttgatagtggcagaaaccacaatggagtagggttcacagaaatggcctgtgaaacagaccctatcctagagagacagaggaaaaacctcagctggtatggcacaatcttgaatg

SEQ ID NO: 7243 - DNA, 119 bp, homo sapiens
cagaccctattcctagagagacagaggaaaaacctcagctggtatggcacaatcttgaatgggatgacaagggcagcgggcagacttctcccgcaggtgacactcctgcctcaggtccc

SEQ ID NO: 7244 - DNA, 119 bp, homo sapiens
tgggatgacagagggcagcgggcagacttctcccgcaggtgacactcctgcctcaggtcccaatggttcgctgactccagatgttccccatagctgggactcagagaggaaaacgtgtt

SEQ ID NO: 7245 - DNA, 119 bp, homo sapiens
ccaatggttctgctgactccagatgttccccatagctgggactcagagaggaaaacgtgttgtgtttcaatgatcagacactgttcaccactggcacctggtgggcccgaaagattgag

SEQ ID NO: 7246 - DNA, 119 bp, homo sapiens
ctgctgcataagatccagcaccatctcaaaacgagccttttgagtggtttcactgtctgtgggggtctcgcctcaaactgctcacatattttgcacatgacgctgtgctgctcctgata

SEQ ID NO: 7247 - DNA, 119 bp, homo sapiens
tgtgggggtctctgcctcaaactgctcacatattttgcacatgacgctgtgctgctcctgatatttttcaactgctctggaggtagagattcccgatgactctgcaaccattctggata

SEQ ID NO: 7248 - DNA, 119 bp, homo sapiens
cttttctgtgatctccttcagtgatgggtacagcacatccttggagagtaggttctgcataatactctgatgatggggaggatgttcccttccccatccccttcgtccatgcctagccc

SEQ ID NO: 7249 - DNA, 119 bp, homo sapiens
ggagagtaggttctgcataatactctgcatgatggggaggatgttcccttccccatccccttcgtccatcctagcccctccatggccttggtcagctcttcttccgacatgctggagtt

SEQ ID NO: 7250 - DNA, 119 bp, homo sapiens
ccactctccctgcagcctctgagagcttttggaactgctccaccaggtggggttcttcctcagccaactcttcattgccttctcgaactccgcagtggcttgggaagccagttcactgt

SEQ ID NO: 7251 - DNA, 119 bp, homo sapiens
gtggggttcttcctcagccaactccttcattgccttctcgaactccgcagtggcttgggaagccagttcctgtcgaatagttcctggaaaaacttctcttgggaagcgaagagggcatc

SEQ ID NO: 7252 - DNA, 119 bp, homo sapiens
gaagccgcatccagacaaaagctgccgcatccctgccctgcccaacccctggagggattcgagtttggtcttgtccccgtctgattctcagcgccaaactttttgctagttcagagatt

SEQ ID NO: 7253 - DNA, 119 bp, homo sapiens
gggattcgagtttggtgcttgtccccgtctgattctcagcgccaaactttttgctagttcagagattccagagtctgatgagttactctgagaggaaaccctctgcctgttgttgagga

SEQ ID NO: 7254 - DNA, 119 bp, homo sapiens
ctagttcagagattccaagagtctgatgagttactctgagaggaaaccctctgcctgttgttgaggaggctgagcacagtgcttaggcgctgagggggaaaaagagggggaaaaaaaag

SEQ ID NO: 7255 - DNA, 119 bp, homo sapiens
cctgttgttgaggaggactgagcacagtgcttaggcgctgagggggaaaaagagggggaaaaaaaagaaatgatttcctgggaagttgtccatacagtattcctgtttgctcttcttta

SEQ ID NO: 7256 - DNA, 119 bp, homo sapiens
gggggaaaaaaaagaaaatgatttcctgggaagttgtccatacagtattcctgtttgctcttctttattttccctagctcaagatgcgagcccccagtcagagatcagagctgaggaaa

SEQ ID NO: 7257 - DNA, 119 bp, homo sapiens
tttgctcttctttattcttccctagctcaagatgcgagcccccagtcagagatcagagctgaggaaattccgagggggcctccacgttggcttttgtgtttgatgtgactggttctatg

SEQ ID NO: 7258 - DNA, 119 bp, homo sapiens
cagagctgaggaaattcccgagggggcctccacgttggcttttgtgtttgatgtgactggttctatgtagatgatttagttcaggtgattgaaggggcttccaaaattttggagacgtc

SEQ ID NO: 7259 - DNA, 119 bp, homo sapiens
tgactggttctatgtatgatgatttagttcaggtgattgaaggggcttccaaaattttggagacgtcttgaaaagacctaaaagacctcttttcaactttgcgttggtgcctttccatg

SEQ ID NO: 7260 - DNA, 119 bp, homo sapiens
ggtggtggtgattgcccagaaatgagtattggagctataaaaattgccttggaaatttctcttcctggtctttcatctatgttttcactgatgctcggtccaaagattaccggctcacc

SEQ ID NO: 7261 - DNA, 119 bp, homo sapiens
aaaattgccttggaaatttctcttcctggttctttcatctatgttttcactgatgctcggtccaaagataccggctcacccatgaggtgctgcaacttatccaacagaaacagtcacaa

SEQ ID NO: 7262 - DNA, 119 bp, homo sapiens
gtcgtatttgttctgactggagattgtgatgacaggacccatattggatataaagtctatgaagaaattcctctacaagttctggtcaagtgttccatctggacaaaaaacaagttaat

SEQ ID NO: 7263 - DNA, 119 bp, homo sapiens
gtatttgttctgactggagattgtgatgacaggacccatattggatataaagtctatgaagaaattgccctacaagttctggtcaagtgttccatctggacaaaaaacaagttaatgag

SEQ ID NO: 7264 - DNA, 119 bp, homo sapiens
gtattaaaatgggtagaagaagcagtacaggcctccaaagttcaccttttatccacagatcatttggaaaggctgtaaatacttggagaattccttttgatcccagcctgaaagaggtc

SEQ ID NO: 7265 - DNA, 119 bp, homo sapiens
ccacagatcatttggaacaggctgtaaatacttggagaattccttttgatcccagcctgaaagaggtcatgtgtctttgagtgggccttctccaatgattgaaattcgcaatcctttag

SEQ ID NO: 7266 - DNA, 119 bp, homo sapiens
gaatacctacctatgtactgctcaatacttctggaatttccactccagctagaatagatcttcttgaactttgagtatctcaggaagttctcttaagactattcctgttaaatattacc

SEQ ID NO: 7267 - DNA, 119 bp, homo sapiens
ctagaatagatcttcttgaacttttgagtatctcaggaagttctcttaagactattcctgttaaatattcccacatcgaaaaccttatggcatatggaatatttctgactttgtaccac

SEQ ID NO: 7268 - DNA, 119 bp, homo sapiens
agactattcctgttaaatattacccacatcgaaaaccttatggcatatggaatatttctgactttgtacaccaaatgaagctttctttctcaaagtaacaggctatgataaagatgatt

SEQ ID NO: 7269 - DNA, 119 bp, homo sapiens
ggaatatttctgactttgtaccaccaaatgaagctttctttctcaaagtaacaggctatgataaagatgttacctcttccagagagtatcaagtgtttccttttctagtattgtcccag

SEQ ID NO: 7270 - DNA, 119 bp, homo sapiens
atgctcccaaagttacgatgcctgagaaaaccccaggatactatctgcagccgggccaaattccctgcttgttgacagtcttttgccctttaccttgagctttgtcagaaatggagtta

SEQ ID NO: 7271 - DNA, 119 bp, homo sapiens
gaaaaccccaggatactatctgcagccgggccaaattccctgctctgttgacagtcttttgccctttacttgagctttgtcagaaatggagttacacttggagtagaccagtatttgaa

SEQ ID NO: 7272 - DNA, 119 bp, homo sapiens
agccccctccggtcatccaagtgcctaacaatgttacagtcactcctggagagagagcagttttaacattctcatcatcagtgcggtggattacaatctaacctggcagaggaatgaca

SEQ ID NO: 7273 - DNA, 119 bp, homo sapiens
gagagcagttttaacatgtctcatcatcagtgcggtggattacaatctaacctggcagaggaatgacaggatgtcagactggcagagccagcgagaattaggaccttggctaatctgtc

SEQ ID NO: 7274 - DNA, 119 bp, homo sapiens
tggcagaggaatgacagagatgtcagactggcagagccagcgagaattaggaccttggctaatctgtcatggagctaaagagtgtgaaattcaacgatgctggagagtatcattgtatg

SEQ ID NO: 7275 - DNA, 119 bp, homo sapiens
ccttggctaatctgtcattggagctaaagagtgtgaaattcaacgatgctggagagtatcattgtatggttctagtgaaggtggatcatcagccgcttcagttttcctcacagtgcaag

SEQ ID NO: 7276 - DNA, 119 bp, homo sapiens
aaccacccaaagtcactgtgatgcccaagaatcagtctttcacaggagggtctgaggtctccatcatgtttctgcaacaggttatcccaaaccaaagattgcctggaccgttaacgata

SEQ ID NO: 7277 - DNA, 119 bp, homo sapiens
gcccaagaatcagtctttcacaggagggtctgaggtctccatcatgtgttctgcaacaggttatcccaaccaaagattgcctggaccgttaacgatatgtttatcgtgggttcacacag

SEQ ID NO: 7278 - DNA, 119 bp, homo sapiens
gtataggatgacctcagatggtaccttatttatcaaaaatgcagctcccaaagatgcagggatctatggtgcctagcaagtaattcagctggaacagataaacagaattctactctcag

SEQ ID NO: 7279 - DNA, 119 bp, homo sapiens
tgacctcagatggtaccttatttatcaaaaatgcagctcccaaagatgcagggatctatggttgcctagaagtaattcagctggaacagataaacagaattctactctcagatacattg

SEQ ID NO: 7280 - DNA, 119 bp, homo sapiens
gagatcttgagttgaggccctcaacattcctcattattgaccctctcttgggacttttgaagattcaagaacacaagatctggatgctggcgattatacctgtgtagccatcaatgagg

SEQ ID NO: 7281 - DNA, 119 bp, homo sapiens
accctctcttgggacttttgaagattcaagaaacacaagatctggatgctggcgattatacctgtgtagcatcaatgaggctggaagagcaactggcaagataactctggatgttggct

SEQ ID NO: 7282 - DNA, 119 bp, homo sapiens
cacctccagttttcatacaagaacctgctgatgtgtctatggaaattggctcaaatgtgacattaccttttatgttcagggttatccagaaccaacaatcaaatggcgaagattagaca

SEQ ID NO: 7283 - DNA, 119 bp, homo sapiens
tatggaaattggctcaaatgtgacattaccttgttatgttcagggttatccagaaccaacaatcaaatgcgaagattagacaacatgccaattttctcaagacctttttcagttagttc

SEQ ID NO: 7284 - DNA, 119 bp, homo sapiens
gttcagggttatccagaaccaacaatcaaatggcgaagattagacaacatgccaattttctcaagaccttttcagttagttccatcagccaactaagaacaggagctctctttatttta

SEQ ID NO: 7285 - DNA, 119 bp, homo sapiens
ttgctccacttattggaatcagcccttcagtggccaatgttattgaaggacagcagcttactttgcccttactctgttagctggaaatcccattccagaacgtcggtggattaagaatt

SEQ ID NO: 7286 - DNA, 119 bp, homo sapiens
cttattggaatcagcccttcagtggccaatgttattgaaggacagcagcttactttgccctgtactctgtagctggaaatcccattccagaacgtcggtggattaagaattcagctatg

SEQ ID NO: 7287 - DNA, 119 bp, homo sapiens
ttgctccaaaatccttacatcactgtgcgcagtgatgggagcctccatattgaaagagttcagcttcagatggtggtgaatatacttgtgtggccagtaacgttgctgggaccaataac

SEQ ID NO: 7288 - DNA, 119 bp, homo sapiens
tgcgcagtgatgggagcctccatattgaaagagttcagcttcaggatggtggtgaatatacttgtgtggcagtaacgttgctgggaccaataacaaaactacctctgtggttgtgcatg

SEQ ID NO: 7289 - DNA, 119 bp, homo sapiens
aaaggagagctgatttcaaccagcagtgctaagttttcagcaggagctgatggtagtctgtatgtggtacacctggaggagaggagagtggggagtatgtctgcactgccaccaataca

SEQ ID NO: 7290 - DNA, 119 bp, homo sapiens
caggagctgatggtagtctgtatgtggtatcacctggaggagaggagagtggggagtatgtctgcactgcaccaatacagccggctacgccaaaaggaaagtgcagctaacagtctatg

SEQ ID NO: 7291 - DNA, 119 bp, homo sapiens
taaggcccagagtgtttggagatcaacgaggactgtcccaggataagcctgttgagatctccgtccttgaggggaagaggtaacacttccatgtgaagtgaagagcttacctccaccca

SEQ ID NO: 7292 - DNA, 119 bp, homo sapiens
tgttgagatctccgtccttgcaggggaagaggtaacacttccatgtgaagtgaagagcttacctccaccataattacttgggccaaagaaacccagctcatctcaccgttctctccaag

SEQ ID NO: 7293 - DNA, 119 bp, homo sapiens
acacacattcctcccttctggttcaatgaagatcactgaaacccgcacttcagatagtgggatgtatcttgtgttgccacaaatattgctgggaatgtgactcaggctgtcaaattaaa

SEQ ID NO: 7294 - DNA, 119 bp, homo sapiens
tcctcccttctggttcaatgaagatcactgaaacccgcacttcagatagtgggatgtatctttgtgttgcacaaatattgctgggaatgtgactcaggctgtcaaattaaatgtccatg

SEQ ID NO: 7295 - DNA, 119 bp, homo sapiens
ttcctccaaagatacagcgtggacctaaacatctcaaagtccaagttggtcaaagagtggatattccattaatgctcaagggactcctcttcctgtaatcacctggtccaaaggtggaa

SEQ ID NO: 7296 - DNA, 119 bp, homo sapiens
aaagagtggatattccatgtaatgctcaagggactcctcttcctgtaatcacctggtccaaaggtggaacactatgctggttgatggagagcaccatgttagcaatccagacggaactt

SEQ ID NO: 7297 - DNA, 119 bp, homo sapiens
cctggtccaaaggtggaagcactatgctggttgatggagagcaccatgttagcaatccagacggaacttaagcatcgaccaagccacgccctcagatgctggcatatatacatgtgttg

SEQ ID NO: 7298 - DNA, 119 bp, homo sapiens
gcaatccagacggaactttaagcatcgaccaagccacgccctcagatgctggcatatatacatgtgttgtactaacatagcaggcactgatgaaacagagataacgctacatgtccaag

SEQ ID NO: 7299 - DNA, 119 bp, homo sapiens
gtacccctaaaccaaccatcaaatggttacacaatggtagagagttgacaggcagagagcctggcattttatcttggaagatggcacattgctggttattgcttctgttacaccctatg

SEQ ID NO: 7300 - DNA, 119 bp, homo sapiens
tagagagttgacaggcagagagcctggcatttctatcttggaagatggcacattgctggttattgcttcgttacaccctatgacaatggggagtacatctgtgtggcagtcaatgaagc

SEQ ID NO: 7301 - DNA, 119 bp, homo sapiens
ttggaagatggcacattgctggttattgcttctgttacaccctatgacaatggggagtacatctgtgtgcagtcaatgaagctggaaccacagaaagaaaatataacctcaaagtccat

SEQ ID NO: 7302 - DNA, 119 bp, homo sapiens
ttcctccagtaattaaagataaagaacaagttacaaatgtgtcggtgttgttaaatcagctgaccaatccttctgtgaagtggaaggcactccatctcccatcattatgtggtataaag

SEQ ID NO: 7303 - DNA, 119 bp, homo sapiens
attaaagataaagaacaagttacaaatgtgtcggtgttgttaaatcagctgaccaatctcttctgtgaatggaaggcactccatctcccatcattatgtggtataaagataatgtccag

SEQ ID NO: 7304 - DNA, 119 bp, homo sapiens
gtgactgaaagcagcactattcagactgtgaacaatgggaagatactgaagctcttcagagccactccaaggatgcaggaagatattcctgcaaagcaattaatattgcaggcacttct

SEQ ID NO: 7305 - DNA, 119 bp, homo sapiens
tgaacaatgggaagatactgaagctcttcagagccactccagaggatgcaggaagatattcctgcaaagaattaatattgcaggcacttctcagaagtactttaacattgatgtgctag

SEQ ID NO: 7306 - DNA, 119 bp, homo sapiens
ttccacccaccataataggtaccaacttcccaaatgaagtctcagttgtcctcaaccgtgacgtcgccctgaatgccaggtcaaaggcactccctttcctgatattcattggttcaaag

SEQ ID NO: 7307 - DNA, 119 bp, homo sapiens
caccataataggtaccaacttcccaaatgaagtctcagttgtcctcaaccgtgacgtcgcccttgaatgcaggtcaaaggcactccctttcctgatattcattggttcaaagatggcaa

SEQ ID NO: 7308 - DNA, 119 bp, homo sapiens
gcctttatttttgggcgatcctaatgttgaacttctagacagaggacaagtcttacatttaaagaatgccggagaaatgacaaggggcgctaccaatgtactgtgtctaatgcagctgg

SEQ ID NO: 7309 - DNA, 119 bp, homo sapiens
tagacagaggacaagtcttacatttaaagaatgcacggagaaatgacaaggggcgctaccaatgtactggtctaatgcagctggcaaacaagccaaggatataaaactgactatctata

SEQ ID NO: 7310 - DNA, 119 bp, homo sapiens
ttccacctagtattaaaggaggaaatgtcaccacagacatatcagtattgatcaacagccttattaaacggaatgtgaaacacggggacttccaatgcctgccattacttggtataagg

SEQ ID NO: 7311 - DNA, 119 bp, homo sapiens
aacagccttattaaactggaatgtgaaacacggggacttccaatgcctgccattacttggtataaggacggcagccaatcatgtccagctcacaagcactttatattgataaaggacaa

SEQ ID NO: 7312 - DNA, 119 bp, homo sapiens
tacttggtataaggacgggcagccaatcatgtccagctcacaagcactttatattgataaaggacaatacttcatattcctcgagcacaggtctctgattcagcaacatatacgtgtca

SEQ ID NO: 7313 - DNA, 119 bp, homo sapiens
ttgataaaggacaatatcttcatattcctcgagcacaggtctctgattcagcaacatatacgtgtcatgagccaatgttgctggaactgctgaaaaatcattccatgtggatgtctatg

SEQ ID NO: 7314 - DNA, 119 bp, homo sapiens
ttcctccaatgattgaaggcaacttggccacgcctttgaataagcaagtagttattgctcattctctgaactggagtgcaaagctgctggaaacccttctcccattctcacctggttga

SEQ ID NO: 7315 - DNA, 119 bp, homo sapiens
ttgctcattctctgacactggagtgcaaagctgctggaaacccttctcccattctcacctggttgaaagtggtgtacctgtgaaagctaatgacaatatccgcatagaagctggtggga

SEQ ID NO: 7316 - DNA, 119 bp, homo sapiens
tcacctggttgaaagatggtgtacctgtgaaagctaatgacaatatccgcatagaagctggtgggaagaactcgaaatcatgagtgcccaagaaattgatcgaggacagtacatatgcg

SEQ ID NO: 7317 - DNA, 119 bp, homo sapiens
aagctggtgggaagaaactcgaaatcatgagtgcccaagaaattgatcgaggacagtacatatgcgtggtaccagtgtggcaggagaaaaggaaatcaaatatgaagttgatgtcttgg

SEQ ID NO: 7318 - DNA, 119 bp, homo sapiens
gtggctgaaggatggccagttaattgatgaaagggatggattcaagattttattaaatggacgcaaactgttattgctcaggctcaagtgtcaaacacaggcctttatcggtgcatggc

SEQ ID NO: 7319 - DNA, 119 bp, homo sapiens
tattaaatggacgcaaactggttattgctcaggctcaagtgtcaaacacaggcctttatcggtgcatggagcaaatactgctggagaccacaagaaggaatttgaagtgactgttcatg

SEQ ID NO: 7320 - DNA, 119 bp, homo sapiens
ttcctccaacaatcaagtcctcaggcctttctgagagagttgtggtaaaatacaagcctgtcgccttgcgtgcatagccaatgggattccaaatccttccattacatggttaaaagatg

SEQ ID NO: 7321 - DNA, 119 bp, homo sapiens
agagttgtggtaaaatacaagcctgtcgccttgcagtgcatagccaatgggattccaaatccttccattcatggttaaaagatgaccagcctgtgaacactgcccaaggaaaccttaaa

SEQ ID NO: 7322 - DNA, 119 bp, homo sapiens
atacagtcttctggtcgagttctacaaattgccaaaaccctgttggaagatgctggcagatacacatgttggctaccaacgcagctggagaaacacaacagcacattcaactgcatgtt

SEQ ID NO: 7323 - DNA, 119 bp, homo sapiens
agtcttctggtcgagttctacaaattgccaaaaccctgttggaagatgctggcagatacacatgtgtggtaccaacgcagctggagaaacacaacagcacattcaactgcatgttcatg

SEQ ID NO: 7324 - DNA, 119 bp, homo sapiens
ttattacatggtacaaagataatcgtctactctcaggttccaccagcatgactttcttgaacagaggacgatcattgatattgaaagtgcccagatctcagatgctggcatatataaat

SEQ ID NO: 7325 - DNA, 119 bp, homo sapiens
tgaacagaggacagatcattgatattgaaagtgcccagatctcagatgctggcatatataaatgcgtggcatcaactcagctggagctacagagttattttacagtctgcaagttcatg

SEQ ID NO: 7326 - DNA, 119 bp, homo sapiens
tggccccatcaatttctggcagcaataacatggtggcagtggtggttaataacccggtgaggttagaattgaagccagaggtattcctgccccaagtctgacctggttgaaagatggga

SEQ ID NO: 7327 - DNA, 119 bp, homo sapiens
gtggcagtggtggttaataacccggtgaggttagaatgtgaagccagaggtattcctgccccaagtctgcctggttgaaagatgggagtcctgtttctagtttttctaatggattacag

SEQ ID NO: 7328 - DNA, 119 bp, homo sapiens
gttctctctggtggtcgaatcctagcattgaccagtgcacaaatcagcgacacaggaaggtacacctgctggcagtgaatgctgctggagaaaagcaaagggacattgacctccgagta

SEQ ID NO: 7329 - DNA, 119 bp, homo sapiens
tctctggtggtcgaatcctagcattgaccagtgcacaaatcagcgacacaggaaggtacacctgcgtggagtgaatgctgctggagaaaagcaaagggacattgacctccgagtatatg

SEQ ID NO: 7330 - DNA, 119 bp, homo sapiens
ttccgccaaatattatgggagaagaacagaatgtctctgtcctcattagccaagctgtggaattactattcaaagtgatgctattcccccacctactcttacttggttaaaagacggcc

SEQ ID NO: 7331 - DNA, 119 bp, homo sapiens
gtggaattactatgtcaaagtgatgctattcccccacctactcttacttggttaaaagacggccacccctgctgaagaaaccaggcctcagtatatctgaaaatagaagtgtgttaaag

SEQ ID NO: 7332 - DNA, 119 bp, homo sapiens
tccccccaaatattggtggttctgatgaacttactcaacttacagtcattgaagggaatctcattagtcgttgtgtgaatcaagtggtattccacccccaaatctcatctggaagaaga

SEQ ID NO: 7333 - DNA, 119 bp, homo sapiens
ccccaaatattggtggttctgatgaacttactcaacttacagtcattgaagggaatctcattagtctgtgtgtgaatcaagtggtattccacccccaaatctcatctggaagaagaaag

SEQ ID NO: 7334 - DNA, 119 bp, homo sapiens
gctctccagtgctgactgattccatggggcgagttagaattttatctgggggcaggcaattacaaatttaattgctgaaaagtctgatgcagcactctattcatgtgtggcgtcgaatg

SEQ ID NO: 7335 - DNA, 119 bp, homo sapiens
tatctgggggcaggcaattacaaatttcaattgctgaaaagtctgatgcagcactctattcatgtgtgggtcgaatgttgctgggactgcaaagaaagaatacaatctgcaagtttaca

SEQ ID NO: 7336 - DNA, 119 bp, homo sapiens
ttagaccaaccataaccaacagtggcagccaccctactgaaattattgtgacccgagggaagagtatctcttggagtgtgaggtgcagggtattccaccaccaacagtgacctggatga

SEQ ID NO: 7337 - DNA, 119 bp, homo sapiens
gagggaagagtatctccttggagtgtgaggtgcagggtattccaccaccaacagtgacctggatgaaagtggccaccccttgatcaaggcaaagggagtagaaatactggatgaaggtc

SEQ ID NO: 7338 - DNA, 119 bp, homo sapiens
tgacctggatgaaagatggccaccccttgatcaaggcaaagggagtagaaatactggatgaaggtcacaccttcagctgaagaacattcatgtatctgacacaggccgttatgtgtgtg

SEQ ID NO: 7339 - DNA, 119 bp, homo sapiens
tggatgaaggtcacatccttcagctgaagaacattcatgtatctgacacaggccgttatgtgtgtgttgtgtgaatgtagcaggaatgactgacaaaaaatatgacttaagtgtccatg

SEQ ID NO: 7340 - DNA, 119 bp, homo sapiens
ctcctccaagcatcataggaaaccacaggtcacctgaaaatattagtgtggtagaaaagaactcagtattttgacttgtgaagcttctggaattcccctgccttccataacctggttca

SEQ ID NO: 7341 - DNA, 119 bp, homo sapiens
tggtagaaaagaactcagtatctttgacttgtgaagcttctggaattcccctgccttccataacctggtcaaagatgggtggcctgtcagccttagcaattctgtgaggattctttcag

SEQ ID NO: 7342 - DNA, 119 bp, homo sapiens
ggaatccagtgccagaaattacatggcacaaagatgggcagcccctccaagaagatgaagcccatcacatatatctggtggccgttttcttcaaattaccaatgtccaggtgccacaca

SEQ ID NO: 7343 - DNA, 119 bp, homo sapiens
ggcagcccctccaagaagatgaagcccatcacattatatctggtggccgttttcttcaaattaccaatgccaggtgccacacactggaagatatacatgtttggcttccagtccagctg

SEQ ID NO: 7344 - DNA, 119 bp, homo sapiens
tatctggtggccgttttcttcaaattaccaatgtccaggtgccacacactggaagatatacatgtttggttccagtccagctggccacaagagcaggagcttcagtcttaatgtatttg

SEQ ID NO: 7345 - DNA, 119 bp, homo sapiens
tatctcctacaattgctggtgtaggtagtgatggcaaccctgaagatgtcactgtcatccttaacagcctacatctttggtctgtgaagcttattcatatcctccagctaccatcacct

SEQ ID NO: 7346 - DNA, 119 bp, homo sapiens
tcatccttaacagccctacatctttggtctgtgaagcttattcatatcctccagctaccatcacctggttaaggatggcactcctttagaatctaaccgaaatattcgtattcttccag

SEQ ID NO: 7347 - DNA, 119 bp, homo sapiens
ttccacccataatcaataaaggggacctttgggggccaggtctttcccctaaagaagtgaagatcaaagaaacaacactctgaccttggaatgtgaagcgtatgcaattccttctgcct

SEQ ID NO: 7348 - DNA, 119 bp, homo sapiens
ctttgggggccaggtctttcccctaaagaagtgaagatcaaagtaaacaacactctgaccttggaatgtaagcgtatgcaattccttctgcctccctcagctggtacaaggatggacag

SEQ ID NO: 7349 - DNA, 119 bp, homo sapiens
ccccttaaatccgatgatcatgttaatattgctgcgaatggacacacacttcaaataaaggaggctcaatatcagacaccggacgatatacttgtgtagcatctaacattgcaggtgaa

SEQ ID NO: 7350 - DNA, 119 bp, homo sapiens
ctgcgaatggacacacacttcaaataaaggaggctcaaatatcagacaccggacgatatacttgtgtagatctaacattgcaggtgaagatgagttggattttgatgtgaatattcaag

SEQ ID NO: 7351 - DNA, 119 bp, homo sapiens
ttcctccaagttttcagaaactctgggaaataggaaacatgctagatactggcaggaatggtgaagccaagatgtgatcatcaacaatcccatttctctttactgtgagacaaatgctg

SEQ ID NO: 7352 - DNA, 119 bp, homo sapiens
catgctagatactggcaggaatggtgaagccaaagatgtgatcatcaacaatcccatttctctttactggagacaaatgctgctccccctcctacactgacatggtacaaagatggcca

SEQ ID NO: 7353 - DNA, 119 bp, homo sapiens
gtgatcatcaacaatcccatttctctttactgtgagacaaatgctgctccccctcctacactgacatggacaaagatggccaccctctgacctcaagtgataaagtattgattttgcca

SEQ ID NO: 7354 - DNA, 119 bp, homo sapiens
tgccgccaattatcaagggagcaaatagtgatctccctgaagaggtcaccgtgctggtgaacaagagtgactgatagagtgtttatccagtggcagcccagcaccaaggaattcctggc

SEQ ID NO: 7355 - DNA, 119 bp, homo sapiens
ccctgaagaggtcaccgtgctggtgaacaagagtgcactgatagagtgtttatccagtggcagcccagcccaaggaattcctggcagaaagatggacagcccttgctagaagatgacca

SEQ ID NO: 7356 - DNA, 119 bp, homo sapiens
gcactgatagagtgtttatccagtggcagcccagcaccaaggaattcctggcagaaagatggacagccctgctagaagatgaccatcataaatttctatctaatggacgaattctgcag

SEQ ID NO: 7357 - DNA, 119 bp, homo sapiens
ttcctccaagtgtcattggtcctaaatctgaaaatcttaccgtcgtggtgaacaatttcatctctttgactgtgaggtctctggttttccacctcctgacctcagctggctcaagaatg

SEQ ID NO: 7358 - DNA, 119 bp, homo sapiens
tcgtggtgaacaatttcatctctttgacctgtgaggtctctggttttccacctcctgacctcagctggccaagaatgaacagcccatcaaactgaacacaaatactctcattgtgcctg

SEQ ID NO: 7359 - DNA, 119 bp, homo sapiens
tgcccccaagcattaaagaccatgacagtgaatctctttctgtagttaatgtaagagagggaacttctggtctttggagtgtgagtcgaacgctgtgccacctccagtcatcacttggt

SEQ ID NO: 7360 - DNA, 119 bp, homo sapiens
gtagttaatgtaagagagggaacttctgtgtctttggagtgtgagtcgaacgctgtgccacctccagtctcacttggtataagaatgggcggatgataacagagtctactcatgtggag

SEQ ID NO: 7361 - DNA, 119 bp, homo sapiens
tgagtcgaacgctgtgccacctccagtcatcacttggtataagaatgggcggatgataacagagtctaccatgtggagattttagctgatggacaaatgctacacattaagaaagctga

SEQ ID NO: 7362 - DNA, 119 bp, homo sapiens
tgccacccagtattgaaggacctgaaagagaagtgattgtggagacgatcagcaatcctgtgacattaaatgtgatgccactgggatcccacctcccacgatagcatggttaaagaacc

SEQ ID NO: 7363 - DNA, 119 bp, homo sapiens
ttgaaggacctgaaagagaagtgattgtggagacgatcagcaatcctgtgacattaacatgtgatgccatgggatcccacctcccacgatagcatggttaaagaaccacaagcgcatag

SEQ ID NO: 7364 - DNA, 119 bp, homo sapiens
aaaattctgactcactggaagttcgtattttgtctggaggtagcaaactccagattgcccggtctcagcttcagatagtggaaactatacatgtattgcttcaaatatggagggaaaag

SEQ ID NO: 7365 - DNA, 119 bp, homo sapiens
tgtctggaggtagcaaactccagattgcccggtctcagcattcagatagtggaaactatacatgtattgttcaaatatggagggaaaagcccagaaatattactttctttcaattcaag

SEQ ID NO: 7366 - DNA, 119 bp, homo sapiens
ttcctccaagtgttgctggtgctgaaattccaagtgatgtcagtgtccttctaggagaaaatgttgagcggtctgcaatgcaaatggcattcctactccacttattcaatggcttaaag

SEQ ID NO: 7367 - DNA, 119 bp, homo sapiens
cagtgtccttctaggagaaaatgttgagctggtctgcaatgcaaatggcattcctactccacttattcatggcttaaagatggaaagcccatagctagtggtgaaacagaaagaatccg

SEQ ID NO: 7368 - DNA, 119 bp, homo sapiens
agtgagtgcaaatggcagcacattaaacatttatggagctcttacatctgacacggggaaatacacatggttgctactaatcccgctggagaagaagaccgaatttttaacttgaatgt

SEQ ID NO: 7369 - DNA, 119 bp, homo sapiens
gtgcaaatggcagcacattaaacatttatggagctcttacatctgacacggggaaatacacatgtgttgtactaatcccgctggagaagaagaccgaatttttaacttgaatgtctatg

SEQ ID NO: 7370 - DNA, 119 bp, homo sapiens
ttacacctacaattaggggtaataaagatgaagcagagaaactaatgactttagtggatacttcaataatattgaatgcagagccacagggacgcctccaccacagataaactggctga

SEQ ID NO: 7371 - DNA, 119 bp, homo sapiens
gcagagaaactaatgactttagtggatacttcaataaatattgaatgcagagccacagggacgcctccacacagataaactggctgaagaatggacttcctctgcctctctcctcccat

SEQ ID NO: 7372 - DNA, 119 bp, homo sapiens
aataaatattgaatgcagagccacagggacgcctccaccacagataaactggctgaagaatggacttccctgcctctctcctcccatatccggttactggcagcaggacaagttatcag

SEQ ID NO: 7373 - DNA, 119 bp, homo sapiens
caccaccaaatatggacaattcaatggggacagaggaaatcacagttctcaaaggtagttccacctctaggcatgcattactgatggaaccccagctcccagtatggcctggcttagag

SEQ ID NO: 7374 - DNA, 119 bp, homo sapiens
ggtagttccacctctatggcatgcattactgatggaaccccagctcccagtatggcctggcttagagatgccagcctctggggcttgatgcccatctgacagtcagcacccatggaatg

SEQ ID NO: 7375 - DNA, 119 bp, homo sapiens
ggcctggcttagagatggccagcctctggggcttgatgcccatctgacagtcagcacccatggaatggtctgcagctcctcaaagcagagactgaagattcgggaaagtacacctgcat

SEQ ID NO: 7376 - DNA, 119 bp, homo sapiens
gcacccatggaatggtcctgcagctcctcaaagcagagactgaagattcgggaaagtacacctgcattgctcaaatgaagctggagaagtcagcaagcactttatcctcaaggtcctag

SEQ ID NO: 7377 - DNA, 119 bp, homo sapiens
aaccacctcacattaatggatctgaagaacatgaagagatatcagtaattgttaataacccacttgaactacctgcattgcttctggaatcccagcccctaaaatgacctggatgaaag

SEQ ID NO: 7378 - DNA, 119 bp, homo sapiens
atatcagtaattgttaataacccacttgaacttacctgcattgcttctggaatcccagcccctaaaatgcctggatgaaagatggccggccccttccacagacggatcaagtgcaaact

SEQ ID NO: 7379 - DNA, 119 bp, homo sapiens
cattgcttctggaatcccagcccctaaaatgacctggatgaaagatggccggccccttccacagacggacaagtgcaaactctaggaggaggagaggttcttcgaatttctactgctca

SEQ ID NO: 7380 - DNA, 119 bp, homo sapiens
tacctcctaatattgctggaactgatgagccccgggatatcactgtgttacggaacagacaagtgacatggaatgcaagtcagatgcagtgcccccacctgtaattacttggctcagaa

SEQ ID NO: 7381 - DNA, 119 bp, homo sapiens
ggaactgatgagccccgggatatcactgtgttacggaacagacaagtgacattggaatgcaagtcagatcagtgcccccacctgtaattacttggctcagaaatggagaacggttacag

SEQ ID NO: 7382 - DNA, 119 bp, homo sapiens
gcaacacctcgagtgcgaatcctatctggagggagatacttgcaaatcaacaatgctgacctaggtgatcagccaattatacctgtgttgccagcaacattgcaggaaagactacaaga

SEQ ID NO: 7383 - DNA, 119 bp, homo sapiens
tatctggagggagatacttgcaaatcaacaatgctgacctaggtgatacagccaattatacctgtgttgcagcaacattgcaggaaagactacaagagaatttattctcactgtaaatg

SEQ ID NO: 7384 - DNA, 119 bp, homo sapiens
ttcctccaaacataaaggggggcccccagagccttgtaattcttttaaataagtcaactgtattggaatcatcgctgaaggtgtgccaactccaaggataacatggagaaaggatggag

SEQ ID NO: 7385 - DNA, 119 bp, homo sapiens
ccagagccttgtaattcttttaaataagtcaactgtattggaatgcatcgctgaaggtgtgccaactccaggataacatggagaaaggatggagctgttctagctgggaatcatgcaag

SEQ ID NO: 7386 - DNA, 119 bp, homo sapiens
atattccatcttggaaaatggattccttcatattcaatcagcacatgtcactgacactggacggtattttgtatggccaccaatgctgctggaacagatcgcaggcgaatagatttaca

SEQ ID NO: 7387 - DNA, 119 bp, homo sapiens
tcttggaaaatggattccttcatattcaatcagcacatgtcactgacactggacggtatttgtgtatggcaccaatgctgctggaacagatcgcaggcgaatagatttacaggtccatg

SEQ ID NO: 7388 - DNA, 119 bp, homo sapiens
ttcctccatctattgctccgggtcctaccaacatgactgtaatagtaaatgttcaaactactctggctttgaggctactgggataccaaaaccatcaatcaattggagaaaaaatgggc

SEQ ID NO: 7389 - DNA, 119 bp, homo sapiens
tgtaatagtaaatgttcaaactactctggcttgtgaggctactgggataccaaaaccatcaatcaattgagaaaaaatgggcatcttcttaatgtggatcaaaatcagaactcatacag

SEQ ID NO: 7390 - DNA, 119 bp, homo sapiens
ttccaccttccatagctgatgagcctacagatttcctagtaaccaaacatgccccagcagtaattacctcactgcttcgggagttccatttccctcaattcactggaccaaaaatggta

SEQ ID NO: 7391 - DNA, 119 bp, homo sapiens
aacatgccccagcagtaattacctgcactgcttcgggagttccatttccctcaattcactggaccaaaatggtataagactgcttcccaggggagatggctatagaattctgtcctcag

SEQ ID NO: 7392 - DNA, 119 bp, homo sapiens
agcctccagtcattcagccccaaccaagtgaactacacgtcattctgaacaatcctattttattaccattgaagcaacagggacacccagtcctttcattacttggcaaaaagaaggca

SEQ ID NO: 7393 - DNA, 119 bp, homo sapiens
cccaaccaagtgaactacacgtcattctgaacaatcctattttattaccatgtgaagcaacagggacaccagtcctttcattacttggcaaaaagaaggcatcaatgttaacacttcag

SEQ ID NO: 7394 - DNA, 119 bp, homo sapiens
gcagaaaccatgcagttcttcctagtggcggcttacagatctccagagctgtccgagaggatgctggcattacatgtgtgtggcccagaacccggctggtacagccttgggcaaaatca

SEQ ID NO: 7395 - DNA, 119 bp, homo sapiens
ttcttcctagtggcggcttacagatctccagagctgtccgagaggatgctggcacttacatgtgtgtggccagaacccggctggtacagccttgggcaaaatcaagttaaatgtccaag

SEQ ID NO: 7396 - DNA, 119 bp, homo sapiens
ttcctccagtcattagccctcatctaaaggaatatgttattgctgtggacaagcccatcacgttatccttgaagcagatggcctccctccgcctgacattacatggcataaagatgggc

SEQ ID NO: 7397 - DNA, 119 bp, homo sapiens
aagcccatcacgttatcctgtgaagcagatggcctccctccgcctgacattacatggcataaagatggggtgcaattgtggaatctatccgccagcgcgtcctcagctctggctctctg

SEQ ID NO: 7398 - DNA, 119 bp, homo sapiens
tacatggcataaagatgggcgtgcaattgtggaatctatccgccagcgcgtcctcagctctggctctctcaaatagcatttgtccagcctggtgatgctggccattacacgtgcatggc

SEQ ID NO: 7399 - DNA, 119 bp, homo sapiens
tcctcagctctggctctctgcaaatagcatttgtccagcctggtgatgctggccattacacgtgcatggagccaatgtagcaggatcaagcagcacaagcaccaagctcaccgtccatg

SEQ ID NO: 7400 - DNA, 119 bp, homo sapiens
taccacccaggatcagaagtacagaaggacactacacggtcaatgagaattcacaagccattcttccatcgtagctgatggaatccccacaccagcaattaactggaaaaaagacaatg

SEQ ID NO: 7401 - DNA, 119 bp, homo sapiens
acggtcaatgagaattcacaagccattcttccatgcgtagctgatggaatccccacaccagcaattaacggaaaaaagacaatgttcttttagctaacttgttaggaaaatacactgct

SEQ ID NO: 7402 - DNA, 119 bp, homo sapiens
cgtagctgatggaatccccacaccagcaattaactggaaaaaagacaatgttcttttagctaacttgttggaaaatacactgctgaaccatatggagaactcattttagaaaatgttgt

SEQ ID NO: 7403 - DNA, 119 bp, homo sapiens
ctggaggattctggcttctatacctgtgttgctaacaatgctgcaggtgaagatacacacactgtcagctgactgtgcatgttctccccacttttactgaacttcctggagacgtgtca

SEQ ID NO: 7404 - DNA, 119 bp, homo sapiens
tgaagatacacacactgtcagcctgactgtgcatgttctccccacttttactgaacttcctggagacgttcattaaataaaggagaacagctacgattaagctgtaaagctactggtat

SEQ ID NO: 7405 - DNA, 119 bp, homo sapiens
ttactgaacttcctggagacgtgtcattaaataaaggagaacagctacgattaagctgtaaagctactgtattccattgcccaaattaacatggaccttcaataacaatattattccag

SEQ ID NO: 7406 - DNA, 119 bp, homo sapiens
cccactttgacagtgtgaatggacacagtgaacttgttattgaaagagtgtcaaaagaggattcaggtattatgtgtgcaccgcagagaacagcgttggctttgtgaaggcaattggat

SEQ ID NO: 7407 - DNA, 119 bp, homo sapiens
tgaatggacacagtgaacttgttattgaaagagtgtcaaaagaggattcaggtacttatgtgtgcaccgagagaacagcgttggctttgtgaaggcaattggatttgtttatgtgaaag

SEQ ID NO: 7408 - DNA, 119 bp, homo sapiens
aacctccagtcttcaaaggtgattatccttctaactggattgaaccacttggtgggaatgcaatcctgattgtgaggtgaaaggagaccccaccccaaccatccagtggaacagaaagg

SEQ ID NO: 7409 - DNA, 119 bp, homo sapiens
tggattgaaccacttggtgggaatgcaatcctgaattgtgaggtgaaaggagaccccaccccaaccatcagtggaacagaaagggagtggatattgaaattagccacagaatccggcaa

SEQ ID NO: 7410 - DNA, 119 bp, homo sapiens
ttgtgaggtgaaaggagaccccaccccaaccatccagtggaacagaaagggagtggatattgaaattagcacagaatccggcaactgggcaatggctccctggccatctatggcactgt

SEQ ID NO: 7411 - DNA, 119 bp, homo sapiens
gtcctcctattatcactcttgagccagtggaaactgttattaatgctggtggcaaaatcatattgaatttcaggcaactggagagcctcaaccaaccattacatggtcccgtcaagggc

SEQ ID NO: 7412 - DNA, 119 bp, homo sapiens
ggcaaaatcatattgaattgtcaggcaactggagagcctcaaccaaccattacatggtcccgtcaagggactctatttcctgggatgaccgggttaacgtgttgtccaacaactcatta

SEQ ID NO: 7413 - DNA, 119 bp, homo sapiens
tacatggtcccgtcaagggcactctatttcctgggatgaccgggttaacgtgttgtccaacaactcatttatattgctgatgctcagaaagaagatacctctgaatttgaatgtgttgc

SEQ ID NO: 7414 - DNA, 119 bp, homo sapiens
tgttgtccaacaactcattatatattgctgatgctcagaaagaagatacctctgaatttgaatgtgttgtcgaaacttaatgggttctgtccttgtcagagtgccagtcatagtccagg

SEQ ID NO: 7415 - DNA, 119 bp, homo sapiens
ttcatggtggattttcccagtggtctgcatggagagcctgcagtgtcacctgtggaaaaggcatccaaagaggagtcgtctgtgcaaccagccccttccagccaatggtgggaagccct

SEQ ID NO: 7416 - DNA, 119 bp, homo sapiens
gtggaaaaggcatccaaaagaggagtcgtctgtgcaaccagccccttccagccaatggtgggaagccctccaaggttcagatttggaaatgcgaaactgtcaaaataagccttgtccag

SEQ ID NO: 7417 - DNA, 119 bp, homo sapiens
tggatggtagctggtcggaatggagtctttgggaagaatgcacaaggagctgtggacgcggcaaccaaacaggaccaggacttgcaataatccatcagttcagcatggtgggcggccat

SEQ ID NO: 7418 - DNA, 119 bp, homo sapiens
gtggacgcggcaaccaaaccaggaccaggacttgcaataatccatcagttcagcatggtgggcggccattgaagggaatgctgtggaaataattatgtgcaacattaggccttgcccag

SEQ ID NO: 7419 - DNA, 119 bp, homo sapiens
ttcatggagcatggagcgcttggcagccttggggaacatgcagcgaaagttgtgggaaaggtactcagaaagagcaagactttgtaataacccaccaccagcgtttggtgggtcctact

SEQ ID NO: 7420 - DNA, 119 bp, homo sapiens
gtgggaaaggtactcagacaagagcaagactttgtaataacccaccaccagcgtttggtgggtcctacttgatggagcagaaacacagatgcaagtttgcaatgaaagaaattgtccaa

SEQ ID NO: 7421 - DNA, 119 bp, homo sapiens
ttcatggcaagtgggcgacttgggccagttggagtgcctgttctgtgtcatgtggaggaggtgccagacgagaacaaggggctgctccgaccctgtgccccagtatggaggaaggaaat

SEQ ID NO: 7422 - DNA, 119 bp, homo sapiens
gtggaggaggtgccagacagagaacaaggggctgctccgaccctgtgccccagtatggaggaaggaaatcgaagggagtgatgtccagagtgatttttgcaacagtgacccttgcccaa

SEQ ID NO: 7423 - DNA, 119 bp, homo sapiens
cccatggtaactggagtccttggagtggctggggaacatgcagccggacgtgtaacggagggcagatgcgcggtaccgcacatgtgataaccctcctccctccaatgggggaagagctt

SEQ ID NO: 7424 - DNA, 119 bp, homo sapiens
gtaacggagggcagatgcggcggtaccgcacatgtgataaccctcctccctccaatgggggaagagctttgggggaccagactcccagatccagaggtgcaacactgacatgtgtcctg

SEQ ID NO: 7425 - DNA, 119 bp, homo sapiens
tggatggaagttggggaagctggcatagttggagccagtgctctgcctcctgtggaggaggtgaaaagatcggaagcggctgtgcgaccatcctgtgccagttaaaggtggccgtccct

SEQ ID NO: 7426 - DNA, 119 bp, homo sapiens
gtggaggaggtgaaaagactcggaagcggctgtgcgaccatcctgtgccagttaaaggtggccgtcccttcccggagacactactcaggtgaccaggtgcaatgtacaagcatgtccag

SEQ ID NO: 7427 - DNA, 119 bp, homo sapiens
gtgggccccagcgagccagaggaagtgttattggaaatattaatgatgttgaatttggaattgctttcctaatgccacaataactgatagccctaactctgatactagaataatacgtg

SEQ ID NO: 7428 - DNA, 119 bp, homo sapiens
ttggaaatattaatgatgttgaatttggaattgctttccttaatgccacaataactgatagccctaacttgatactagaataatacgtgccaaaattaccaatgtacctcgtagtcttg

SEQ ID NO: 7429 - DNA, 119 bp, homo sapiens
gttcagcaatgagaaagatagtttctattctaaatcccatttattggacaacagcaaaggaaataggagagcagtcaatggctttaccctcaccaatgcagtcttcaaaagagaaactc

SEQ ID NO: 7430 - DNA, 119 bp, homo sapiens
tagtttctattctaaatcccatttattggacaacagcaaaggaaataggagaagcagtcaatggctttacctcaccaatgcagtcttcaaaagagaaactcaagtggaatttgcaactg

SEQ ID NO: 7431 - DNA, 119 bp, homo sapiens
gattacacagaggactacattcaaacaggtcctgggcagctgtacgcctactcaacccggctgttcaccttgatggcatcagcatcccatacacatggaaccacaccgttttctatgat

SEQ ID NO: 7432 - DNA, 119 bp, homo sapiens
gctgttcaccattgatggcatcagcatcccatacacatggaaccacaccgttttctatgatcaggcacaggaagaatgcctttcttggttgaaacacttcatgcatcctctgtggaatc

SEQ ID NO: 7433 - DNA, 119 bp, homo sapiens
atcaggcacagggaagaatgcctttcttggttgaaacacttcatgcatcctctgtggaatctgactataccagatagaagagacactgggttttaaaattcatgcttcaatatccaaag

SEQ ID NO: 7434 - DNA, 119 bp, homo sapiens
atattgatgagtgtgctttgggtaggcatacctgccacgctggtcaggactgtgacaatacgattggatttatcgctgtgtggtccgttgtggaagtggctttcgaagaacctctgatg

SEQ ID NO: 7435 - DNA, 119 bp, homo sapiens
ctttgggtaggcatacctgccacgctggtcaggactgtgacaatacgattggatcttatcgctgtgtggccgttgtggaagtggctttcgaagaacctctgatgggctgagttgtcaag

SEQ ID NO: 7436 - DNA, 119 bp, homo sapiens
atgtgaacgagtgtagacaaaatgtatgcagaccagatcagcactgtaagaacacccgtggtggctatagtgcattgatctttgtccaaatggaatgaccaaggcagaaaatggaacct

SEQ ID NO: 7437 - DNA, 119 bp, homo sapiens
acgagtgtagacaaaatgtatgcagaccagatcagcactgtaagaacacccgtggtggctataagtgcatgatctttgtccaaatggaatgaccaaggcagaaaatggaacctgtattg

SEQ ID NO: 7438 - DNA, 119 bp, homo sapiens
atattgatgaatgtaaagatgggacccatcagtgcagatataaccagatatgtgagaatacaagaggcactatcgttgtgtatgcccaagaggttatcggtctcaaggagttggaagac

SEQ ID NO: 7439 - DNA, 119 bp, homo sapiens
aatgtaaagatgggacccatcagtgcagatataaccagatatgtgagaatacaagaggcagctatcgtttgtatgcccaagaggttatcggtctcaaggagttggaagaccctgcatgg

SEQ ID NO: 7440 - DNA, 119 bp, homo sapiens
acattaatgaatgtgaacaagtgcctaaaccttgtgcacatcagtgctccaacacccccggcagcttcagtgtatctgtccaccaggacaacatttattaggggacgggaaatcttgcg

SEQ ID NO: 7441 - DNA, 119 bp, homo sapiens
ccggcagcttcaagtgtatctgtccaccaggacaacatttattaggggacgggaaatcttgcgctggatggagaggctgccaaattatggcactcaatacagtagctataaccttgcac

SEQ ID NO: 7442 - DNA, 119 bp, homo sapiens
cttgcgctggattggagaggctgccaaattatggcactcaatacagtagctataaccttgcacggttctccctgtgagaaacaactatcaacctcaacagcattacagacagtactcac

SEQ ID NO: 7443 - DNA, 119 bp, homo sapiens
ttgcacggttctcccctgtgagaaacaactatcaacctcaacagcattacagacagtactcacatctctcagctcctactcagagtatagaaacagcagaacatctctctccaggacta

SEQ ID NO: 7444 - DNA, 119 bp, homo sapiens
actcacatctctacagctcctactcagagtatagaaacagcagaacatctctctccaggactagaaggatattaggaaaacttgccctgaaggctctgaggcaagccatgacacatgtg

SEQ ID NO: 7445 - DNA, 119 bp, homo sapiens
atatcgatgaatgtctggagcagaatgtgcactgtggacccaatcgcatgtgcttcaacatgagaggaactaccagtgcatcgatacaccctgtccacccaactaccaacgggatcctg

SEQ ID NO: 7446 - DNA, 119 bp, homo sapiens
tgaatgtctggagcagaatgtgcactgtggacccaatcgcatgtgcttcaacatgagaggaagctaccatgcatcgatacaccctgtccacccaactaccaacgggatcctgtttcagg

SEQ ID NO: 7447 - DNA, 119 bp, homo sapiens
gttctgcctcaagaactgtccacccaatgatttggaatgtgccttgagcccatatgccttggaatacaactcgtctccctcccatttggaatagccaccaatcaagatttaatccggct

SEQ ID NO: 7448 - DNA, 119 bp, homo sapiens
tggaatacaaactcgtctccctcccatttggaatagccaccaatcaagatttaatccggctggttgcatcacacaggatggagtgatgcatcccaggacaactttcctcatggtagatg

SEQ ID NO: 7449 - DNA, 119 bp, homo sapiens
ctggttgcatacacacaggatggagtgatgcatcccaggacaactttcctcatggtagatgaggaacagctgttccttttgccttgagggatgaaaacctgaaaggagtggtgtataca

SEQ ID NO: 7450 - DNA, 119 bp, homo sapiens
tgaggaacagactgttccttttgccttgagggatgaaaacctgaaaggagtggtgtatacaacacgaccctacgagaagcagagacctaccgcatgagggtccgagcctcatcctacag

SEQ ID NO: 7451 - DNA, 119 bp, homo sapiens
caacacgaccactacgagaagcagagacctaccgcatgagggtccgagcctcatcctacagtgccaatggaccattgaatatcagaccacattcatagtttatatagctgtgtccgcct

SEQ ID NO: 7452 - DNA, 119 bp, homo sapiens
agtgccaatgggaccattgaatatcagaccacattcatagtttatatagctgtgtccgcctatccatacaaggaactctccaaagcctattccacatatttaaaccgcattaatcatgg

SEQ ID NO: 7453 - DNA, 119 bp, homo sapiens
ctatccatactaaggaactctccaaagcctattccacatatttaaaccgcattaatcatggcaatcaagccccttccagattactgtctcttgaacagttgcaatcttggcagcttgaa

SEQ ID NO: 7454 - DNA, 119 bp, homo sapiens
ggcaatcaagcccccttccagattactgtctcttgaacagttgcaatcttggcagcttgaaaatggtgcacactctgttttgtgtgccttccttggtacttctgaggtattttcatgat

SEQ ID NO: 7455 - DNA, 119 bp, homo sapiens
aaaatggtgctacactctgttttgtgtgccttccttggtacttctgaggtattttcatgatcccaccatgtcatatcttgaagtatggtctagaaaagtcccttattattttatttatt

SEQ ID NO: 7456 - DNA, 119 bp, homo sapiens
atcccaccatggtcatatcttgaagtatggtctagaaaagtcccttattattttatttattacactggacagttacttcccaaagattattctgaacatctaacaggacatatcagtga

SEQ ID NO: 7457 - DNA, 119 bp, homo sapiens
ttacactggagcagttacttcccaaagattattctgaacatctaacaggacatatcagtgatggtttacgtagtgtagtacctaagatcattttcctgaaagccaaaccaaacaacgaa

SEQ ID NO: 7458 - DNA, 119 bp, homo sapiens
gatggtttacagtagtgtagtacctaagatcattttcctgaaagccaaaccaaacaacgaaaaacaagacaactaattcagaatcaaatagagtttttgagcatttgactatttttaga

SEQ ID NO: 7459 - DNA, 119 bp, homo sapiens
aaaaacaagaacaactaattcagaatcaaatagagtttttgagcatttgactatttttagaatcataaattagttactaagtattttgatcaaagcttataaaataacttacggagatt

SEQ ID NO: 7460 - DNA, 119 bp, homo sapiens
gaatcataaaattagttactaagtattttgatcaaagcttataaaataacttacggagatttttgtaagattgatacattataataggacttgcctattttcatttttaagaagaaaaa

SEQ ID NO: 7461 - DNA, 119 bp, homo sapiens
tttttgtaagtattgatacattataataggacttgcctattttcatttttaagaagaaaaacaccactcttttataaaatatagtacagctactataaggcttgtttgatcccaaatgg

SEQ ID NO: 7462 - DNA, 119 bp, homo sapiens
aacaccactcattttataaaatatagtacagctactataaggcttgtttgatcccaaatggtgcttatctgattgaacattcagaacaaggatattattttcagtgattttgtgagatc

SEQ ID NO: 7463 - DNA, 119 bp, homo sapiens
ggtgcttatcttgattgaacattcagaacaaggatattattttcagtgattttgtgagatcagctgaacacttatgataataataataaaaaagactgctttgccctcacgtcagttgt

SEQ ID NO: 7464 - DNA, 119 bp, homo sapiens
tcagctgaaccacttatgataataataataaaaaagactgctttgccctcacgtcagttgtacatggcaggaactttaaaaattttaatataaactttcatccagttagcttcataact

SEQ ID NO: 7465 - DNA, 119 bp, homo sapiens
gtacatggcatggaactttaaaaattttaatataaactttcatccagttagcttcataacttttacgttcagaattttgtttattttcctgtcaatgaaagcaatttttaaagatacca

SEQ ID NO: 7466 - DNA, 119 bp, homo sapiens
cttttacgttccagaattttgtttattttcctgtcaatgaaagcaatttttaaagataccagtgggacaatttggttttttaaaaatctcatgtgttcaaattaacataaatattacac

SEQ ID NO: 7467 - DNA, 119 bp, homo sapiens
cagtgggacagatttggttttttaaaaatctcatgtgttcaaattaacataaatattacacgtcaatacctgtacatggtggtaatagactctaagcaattgccaagatgtattctatt

SEQ ID NO: 7468 - DNA, 119 bp, homo sapiens
acgtcaatacactgtacatggtggtaatagactctaagcaattgccaagatgtattctatttttatgaatgtatatatattaccttagtgtgcattttctatataatatcttgatggac

SEQ ID NO: 7469 - DNA, 119 bp, homo sapiens
acagcattaacatttagtgggagtgcagtgagaattgggtttaacttctggcatttctgggcttgtggctgtggttgattttttatttactttgcaaaagtttctgataggcggagcat

SEQ ID NO: 7470 - DNA, 119 bp, homo sapiens
ggcttgtggcttgtggttgattttttatttactttgcaaaagtttctgataggcggagcatctagtttcacttccttttgcagcaagttctttcctgcactaatcacaattcttggaag

SEQ ID NO: 7471 - DNA, 119 bp, homo sapiens
atctagtttcaacttccttttgcagcaagttctttcctgcactaatcacaattcttggaagaggagaacggacgttgtgaacagagttagctggtaaatgtcctcttaaaagatccaaa

SEQ ID NO: 7472 - DNA, 119 bp, homo sapiens
agaggagaactggacgttgtgaacagagttagctggtaaatgtcctcttaaaagatccaaaaaatgagattctagcaaagattatttgccttatgttatgggctatttgtgtagcagaa

SEQ ID NO: 7473 - DNA, 119 bp, homo sapiens
attgcaatgaacttcctccaagaagaaatacagaaattctgacaggttcctggtctgaccaaacatatcagaaggcacccaggctatctataaatgccgccctggatatagatctcttg

SEQ ID NO: 7474 - DNA, 119 bp, homo sapiens
aaattctgacaggttcctggtctgaccaaacatatccagaaggcacccaggctatctataaatgccgcctggatatagatctcttggaaatgtaataatggtatgcaggaagggagaat

SEQ ID NO: 7475 - DNA, 119 bp, homo sapiens
atccagaaggcacccaggctatctataaatgccgccctggatatagatctcttggaaatgtaataatggatgcaggaagggagaatgggttgctcttaatccattaaggaaatgtcaga

SEQ ID NO: 7476 - DNA, 119 bp, homo sapiens
ttgtgaagtgtttaccagtgacagcaccagagaatggaaaaattgtcagtagtgcaatggaaccagatcggaataccattttggacaagcagtacggtttgtatgtaactcaggctaca

SEQ ID NO: 7477 - DNA, 119 bp, homo sapiens
gaaaaattgtcagtagtgcaatggaaccagatcgggaataccattttggacaagcagtacggtttgtattaactcaggctacaagattgaaggagatgaagaaatgcattgttcagacg

SEQ ID NO: 7478 - DNA, 119 bp, homo sapiens
aataccattttggacaagcagtacggtttgtatgtaactcaggctacaagattgaaggagatgaagaaagcattgttcagacgatggtttttggagtaaagagaaaccaaagtgtgtgg

SEQ ID NO: 7479 - DNA, 119 bp, homo sapiens
aaatttcatgcaaatccccagatgttataaatggatctcctatatctcagaagattatttataaggagatgaacgatttcaatataaatgtaacatgggttatgaatacagtgaaagag

SEQ ID NO: 7480 - DNA, 119 bp, homo sapiens
agattatttataaggagaatgaacgatttcaatataaatgtaacatgggttatgaatacagtgaaagagagatgctgtatgcactgaatctggatggcgtccgttgccttcatgtgaag

SEQ ID NO: 7481 - DNA, 119 bp, homo sapiens
aaaaatcatgtgataatccttatattccaaatggtgactactcacctttaaggattaaacacagaactgagatgaaatcacgtaccagtgtagaaatggtttttatcctgcaacccggg

SEQ ID NO: 7482 - DNA, 119 bp, homo sapiens
ttaaacacagaactggagatgaaatcacgtaccagtgtagaaatggtttttatcctgcaacccggggaatacagcaaaatgcacaagtactggctggatacctgctccgagatgtacct

SEQ ID NO: 7483 - DNA, 119 bp, homo sapiens
tgaaaccttgtgattatccagacattaaacatggaggtctatatcatgagaatatgcgtagaccatacttccagtagctgtaggaaaatattactcctattactgtgatgaacattttg

SEQ ID NO: 7484 - DNA, 119 bp, homo sapiens
tctatatcatgagaatatgcgtagaccatactttccagtagctgtaggaaaatattactcctattactggatgaacattttgagactccgtcaggaagttactgggatcacattcattg

SEQ ID NO: 7485 - DNA, 119 bp, homo sapiens
gtagctgtaggaaaatattactcctattactgtgatgaacattttgagactccgtcaggaagttactggatcacattcattgcacacaagatggatggtcgccagcagtaccatgcctc

SEQ ID NO: 7486 - DNA, 119 bp, homo sapiens
gaaaatgttattttccttatttggaaaatggatataatcaaaatcatggaagaaagtttgtacagggtaatctatagacgttgcctgccatcctggctacgctcttccaaaagcgcaga

SEQ ID NO: 7487 - DNA, 119 bp, homo sapiens
ttgtacagggtaaatctatagacgttgcctgccatcctggctacgctcttccaaaagcgcagaccacagtacatgtatggagaatggctggtctcctactcccagatgcatccgtgtca

SEQ ID NO: 7488 - DNA, 119 bp, homo sapiens
aaacatgttccaaatcaagtatagatattgagaatgggtttatttctgaatctcagtatacatatgcctaaaagaaaaagcgaaatatcaatgcaaactaggatatgtaacagcagatg

SEQ ID NO: 7489 - DNA, 119 bp, homo sapiens
gaatgggtttatttctgaatctcagtatacatatgccttaaaagaaaaagcgaaatatcaatgcaaactggatatgtaacagcagatggtgaaacatcaggatcaattacatgtgggaa

SEQ ID NO: 7490 - DNA, 119 bp, homo sapiens
tatgccttaaaagaaaaagcgaaatatcaatgcaaactaggatatgtaacagcagatggtgaaacatcagatcaattacatgtgggaaagatggatggtcagctcaacccacgtgcatt

SEQ ID NO: 7491 - DNA, 119 bp, homo sapiens
ttaagctgaatgacacattggactatgaatgccatgatggttatgaaagcaatactggaagcaccactgttccatagtgtgtggttacaatggttggtctgatttacccatatgttatg

SEQ ID NO: 7492 - DNA, 119 bp, homo sapiens
gcaccactggttccatagtgtgtggttacaatggttggtctgatttacccatatgttatggtaagtactgtttttcagaaattcattttcaaaatgaaaataaatctgttttccaattt

SEQ ID NO: 7493 - DNA, 119 bp, homo sapiens
gtaagtactggtttttcagaaattcattttcaaaatgaaaataaatctgttttccaattttaaaaatttaattatatagaggaattgttaaggaatgttgattaaaatcaagatatctc

SEQ ID NO: 7494 - DNA, 119 bp, homo sapiens
aaagagaatgcgaacttcctaaaatagatgtacacttagttcctgatcgcaagaaagaccagtataaagtggagaggtgttgaaattctcctgcaaaccaggatttacaatagttggac

SEQ ID NO: 7495 - DNA, 119 bp, homo sapiens
accagtataaagttggagaggtgttgaaattctcctgcaaaccaggatttacaatagttggacctaattcgttcagtgctaccactttggattgtctcctgacctcccaatatgtaaag

SEQ ID NO: 7496 - DNA, 119 bp, homo sapiens
agcaagtacaatcatgtggtccacctcctgaactcctcaatgggaatgttaaggaaaaaacgaaagaagatatggacacagtgaagtggtggaatattattgcaatcctagatttctaa

SEQ ID NO: 7497 - DNA, 119 bp, homo sapiens
actcctcaatgggaatgttaaggaaaaaacgaaagaagaatatggacacagtgaagtggtggaatattatgcaatcctagatttctaatgaagggacctaataaaattcaatgtgttga

SEQ ID NO: 7498 - DNA, 119 bp, homo sapiens
aaagaagaatatggacacagtgaagtggtggaatattattgcaatcctagatttctaatgaagggacctataaaattcaatgtgttgatggagagtggacaactttaccagtgtgtatt

SEQ ID NO: 7499 - DNA, 119 bp, homo sapiens
tggaggagagtacctgtggagatatacctgaacttgaacatggctgggcccagctttcttcccctccttttactatggagattcagtggaattcaattgctcagaatcatttacaatga

SEQ ID NO: 7500 - DNA, 119 bp, homo sapiens
cccctccttattactatggagattcagtggaattcaattgctcagaatcatttacaatgattggacacaatcaattacgtgtattcatggagtatggacccaacttccccagtgtgtgg

SEQ ID NO: 7501 - DNA, 119 bp, homo sapiens
caatagataaacttaagaagtgcaaatcatcaaatttaattatacttgaggaacatttaaaaaacaagaggaattcgatcataattctaacataaggtacagatgtagaggaaaagaag

SEQ ID NO: 7502 - DNA, 119 bp, homo sapiens
taaaaaacaagaaggaattcgatcataattctaacataaggtacagatgtagaggaaaagaaggatggaacacacagtctgcataaatggaagatgggatccagaagtgaactgctcaa

SEQ ID NO: 7503 - DNA, 119 bp, homo sapiens
tggcacaaatacaattatgcccacctccacctcagattcccaattctcacaatatgacaaccacactgattatcgggatggagaaaaagtatctgttctttgccaagaaaattatctaa

SEQ ID NO: 7504 - DNA, 119 bp, homo sapiens
tcagattcccaattctcacaatatgacaaccacactgaattatcgggatggagaaaaagtatctgttcttgccaagaaaattatctaattcaggaaggagaagaaattacatgcaaaga

SEQ ID NO: 7505 - DNA, 119 bp, homo sapiens
acactgaattatcgggatggagaaaaagtatctgttctttgccaagaaaattatctaattcaggaaggaaagaaattacatgcaaagatggaagatggcagtcaataccactctgtgtt

SEQ ID NO: 7506 - DNA, 119 bp, homo sapiens
aaaaaattccatgttcacaaccacctcagatagaacacggaaccattaattcatccaggtcttcacaagaagttatgcacatgggactaaattgagttatacttgtgagggtggtttca

SEQ ID NO: 7507 - DNA, 119 bp, homo sapiens
aacacggaaccattaattcatccaggtcttcacaagaaagttatgcacatgggactaaattgagttatattgtgagggtggtttcaggatatctgaagaaaatgaaacaacatgctaca

SEQ ID NO: 7508 - DNA, 119 bp, homo sapiens
aagaaagttatgcacatgggactaaattgagttatacttgtgagggtggtttcaggatatctgaagaaatgaaacaacatgctacatgggaaaatggagttctccacctcagtgtgaag

SEQ ID NO: 7509 - DNA, 119 bp, homo sapiens
gccttccttgtaaatctccacctgagatttctcatggtgttgtagctcacatgtcagacagttatcagttggagaagaagttacgtacaaatgttttgaaggttttggaattgatgggc

SEQ ID NO: 7510 - DNA, 119 bp, homo sapiens
cagacagttatcagtatggagaagaagttacgtacaaatgttttgaaggttttggaattgatgggcctgaattgcaaaatgcttaggagaaaaatggtctcaccctccatcatgcataa

SEQ ID NO: 7511 - DNA, 119 bp, homo sapiens
aaacagattgtctcagtttacctagctttgaaaatgccatacccatgggagagaagaaggatgtgtataggcgggtgagcaagtgacttacacttgtgcaacatattacaaaatggatg

SEQ ID NO: 7512 - DNA, 119 bp, homo sapiens
aggatgtgtataaggcgggtgagcaagtgacttacacttgtgcaacatattacaaaatggatggagccataatgtaacatgcattaatagcagatggacaggaaggccaacatgcagag

SEQ ID NO: 7513 - DNA, 119 bp, homo sapiens
acacctcctgtgtgaatccgcccacagtacaaaatgcttatatagtgtcgagacagatgagtaaatatcatctggtgagagagtacgttatcaatgtaggagcccttatgaaatgtttg

SEQ ID NO: 7514 - DNA, 119 bp, homo sapiens
tgagtaaatatccatctggtgagagagtacgttatcaatgtaggagcccttatgaaatgtttggggatgagaagtgatgtgtttaaatggaaactggacggaaccacctcaatgcaaag

SEQ ID NO: 7515 - DNA, 119 bp, homo sapiens
attctacaggaaaatgtgggccccctccacctattgacaatggggacattacttcattcccgttgtcagatatgctccagcttcatcagttgagtaccaatgccagaacttgtatcaac

SEQ ID NO: 7516 - DNA, 119 bp, homo sapiens
tattgacaatggggacattacttcattcccgttgtcagtatatgctccagcttcatcagttgagtaccatgccagaacttgtatcaacttgagggtaacaagcgaataacatgtagaaa

SEQ ID NO: 7517 - DNA, 119 bp, homo sapiens
ttgtcagtatatgctccagcttcatcagttgagtaccaatgccagaacttgtatcaacttgagggtaacagcgaataacatgtagaaatggacaatggtcagaaccaccaaaatgctta

SEQ ID NO: 7518 - DNA, 119 bp, homo sapiens
atccgtgtgtaatatcccgagaaattatggaaaattataacatagcattaaggtggacagccaaacagagctttattcgagaacaggtgaatcagttgaatttgtgtgtaaacggggat

SEQ ID NO: 7519 - DNA, 119 bp, homo sapiens
ggacagccaaacagaagctttattcgagaacaggtgaatcagttgaatttgtgtgtaaacggggatatctctttcatcacgttctcacacattgcgaacaacatgttgggatgggaaac

SEQ ID NO: 7520 - DNA, 119 bp, homo sapiens
gtaaacggggatatcgtctttcatcacgttctcacacattgcgaacaacatgttgggatgggaaactgggtatccaacttgtgcaaaaagatagaatcaatcataaagtgcacaccttt

SEQ ID NO: 7521 - DNA, 119 bp, homo sapiens
gggatgggaaactggagtatccaacttgtgcaaaaagatagaatcaatcataaagtgcacacctttattagaactttagtattaaatcagttctcaatttcattttttatgtattgttt

SEQ ID NO: 7522 - DNA, 119 bp, homo sapiens
gtgcacacctttattcagaactttagtattaaatcagttctcaatttcattttttatgtattgttttaccctttttattcatacgtaaaattttggattaatttgtgaaaatgtaatta

SEQ ID NO: 7523 - DNA, 119 bp, homo sapiens
tatgtattgttttactcctttttattcatacgtaaaattttggattaatttgtgaaaatgtaattataactgagaccggtggctctcttcttaaaagcaccatattaaatcctggaaaa

SEQ ID NO: 7524 - DNA, 119 bp, homo sapiens
cctcccgtgtaagtgatgctaagaagcacaaactgcattttgaatctaagtccctgtattttctgtgaagagctgtaagtagggtgggacagagatggcacctgggggttctgaggcac

SEQ ID NO: 7525 - DNA, 119 bp, homo sapiens
ctgtattttctgtgaaggagctgtaagtagggtgggacagagatggcacctgggggttctgaggcacccctcctctctgagacagacagggatcaggagccggactgggaccagaccac

SEQ ID NO: 7526 - DNA, 119 bp, homo sapiens
gggttctgaggcacccgctcctctctgagacagacagggatcaggagccggactgggaccagaccaccacaacacaccagaggatgttctctaaataagaccatggcacttaagaacat

SEQ ID NO: 7527 - DNA, 119 bp, homo sapiens
tgggaccagaccaccagcaacacaccagaggatgttctctaaataagaccatggcacttaagaacattactaccttctcatcttctacctcagtttctcactgcttatctacataaaaa

SEQ ID NO: 7528 - DNA, 119 bp, homo sapiens
attccttttgcaataaaaacaacaccaggtgcctctcaaattcttgccaaaacaattctacatgcaaagtttttcaaaagacaatgattgttcttgttcagacacagccaataatttgg

SEQ ID NO: 7529 - DNA, 119 bp, homo sapiens
ctacatgcaaagatttttcaaaagacaatgattgttcttgttcagacacagccaataatttggacaaagctgtgacaacatgaaagacccttgcttctccaatccctgtcaaggaagtg

SEQ ID NO: 7530 - DNA, 119 bp, homo sapiens
atttggacaaagactgtgacaacatgaaagacccttgcttctccaatccctgtcaaggaagtgccactttgtgaacaccccaggagaaaggagctttctgtgcaaatgtcctcctgggt

SEQ ID NO: 7531 - DNA, 119 bp, homo sapiens
gaagtgccacttgtgtgaacaccccaggagaaaggagctttctgtgcaaatgtcctcctgggtacagtggacaatctgtgaaactaccattggttcctgtggcaagaactcctgccaac

SEQ ID NO: 7532 - DNA, 119 bp, homo sapiens
ctgggtacagtgggacaatctgtgaaactaccattggttcctgtggcaagaactcctgccaacatggagtatttgccatcaggaccctatttatcctgtctgcatctgccctgctggat

SEQ ID NO: 7533 - DNA, 119 bp, homo sapiens
gccaacatggaggtatttgccatcaggaccctatttatcctgtctgcatctgccctgctggatatgctgaagattctgtgagatagatcacgatgagtgtgcttccagcccttgccaaa

SEQ ID NO: 7534 - DNA, 119 bp, homo sapiens
ctggatatgctggaagattctgtgagatagatcacgatgagtgtgcttccagcccttgccaaaatggggcgtgtgccaggatggaattgatggttactcctgcttctgtgtcccaggat

SEQ ID NO: 7535 - DNA, 119 bp, homo sapiens
gccaaaatggggccgtgtgccaggatggaattgatggttactcctgcttctgtgtcccaggatatcaagcagacactgcgacttggaagtggatgaatgtgcttcagatccctgcaaga

SEQ ID NO: 7536 - DNA, 119 bp, homo sapiens
caggatatcaaggcagacactgcgacttggaagtggatgaatgtgcttcagatccctgcaagaacgaggtacatgcctcaatgaaataggaagatatacttgtatctgtccccacaatt

SEQ ID NO: 7537 - DNA, 119 bp, homo sapiens
gtgtaaactgtgaattggaaattgacgaatgttggtcccagccttgtttaaatggtgcaacttgtcaggtgctctgggggcctatttctgcgactgtgcccctggattcctgggggatc

SEQ ID NO: 7538 - DNA, 119 bp, homo sapiens
cagccttgtttaaatggtgcaacttgtcaggatgctctgggggcctatttctgcgactgtgcccctggatcctgggggatcactgtgaactcaacactgatgagtgtgccagtcaacct

SEQ ID NO: 7539 - DNA, 119 bp, homo sapiens
gggggcctatttctgcgactgtgcccctggattcctgggggatcactgtgaactcaacactgatgagtggccagtcaaccttgtctccatggagggctgtgtgtggatggagaaaacag

SEQ ID NO: 7540 - DNA, 119 bp, homo sapiens
atatagctgtaactgcacgggtagtggattcacagggacacactgtgagaccttgatgcctctttgttgtcaaaaccttgtcacaataatgctacatgtgaggacagtgttgacaatta

SEQ ID NO: 7541 - DNA, 119 bp, homo sapiens
gtagtggattcacagggacacactgtgagaccttgatgcctctttgttggtcaaaaccttgtcacaatatgctacatgtgaggacagtgttgacaattacacttgtcactgctggcctg

SEQ ID NO: 7542 - DNA, 119 bp, homo sapiens
gatacacaggtgcccagtgtgagatcgacctcaatgaatgcaatagtaacccctgccagtccaatggggatgtgtggagctgtcctcagagaaacaatatggacgcatcactggactgc

SEQ ID NO: 7543 - DNA, 119 bp, homo sapiens
caatgaatgcaatagtaacccctgccagtccaatggggaatgtgtggagctgtcctcagagaaacaataggacgcatcactggactgccttcttctttcagctaccatgaagcctcagg

SEQ ID NO: 7544 - DNA, 119 bp, homo sapiens
aatggggaatgtgtggagctgtcctcagagaaacaatatggacgcatcactggactgccttcttctttcgctaccatgaagcctcaggttatgtctgtatctgtcagcctggattcaca

SEQ ID NO: 7545 - DNA, 119 bp, homo sapiens
gaatccactgcgaagaagacgtcaatgaatgttcttcaaacccttgccaaaatggtggtacttgtgagacttgcctgggaattatacttgccattgcccatttgataacctttctagaa

SEQ ID NO: 7546 - DNA, 119 bp, homo sapiens
acttgtgagaacttgcctgggaattatacttgccattgcccatttgataacctttctagaactttttatgaggaagggactgttctgatattctcctgggctgtacccatcagcaatgt

SEQ ID NO: 7547 - DNA, 119 bp, homo sapiens
aactttttatggaggaagggactgttctgatattctcctgggctgtacccatcagcaatgtctaaataaggaacatgcatccctcacttccaagatggccagcatggattcagctgcct

SEQ ID NO: 7548 - DNA, 119 bp, homo sapiens
gtctaaataatggaacatgcatccctcacttccaagatggccagcatggattcagctgcctatgtccattggctacaccgggtccctgtgtgaaatcgcaaccacactttcatttgagg

SEQ ID NO: 7549 - DNA, 119 bp, homo sapiens
ctatgtccatctggctacaccgggtccctgtgtgaaatcgcaaccacactttcatttgagggcgatggctcctgtgggtcaaaagtggctcagtgacaaccaagggctcagtttgtaac

SEQ ID NO: 7550 - DNA, 119 bp, homo sapiens
gggcgatggcttcctgtgggtcaaaagtggctcagtgacaaccaagggctcagtttgtaacatagccctaggtttcagactgttcagccaatggctcttctacttttccgaagcaacag

SEQ ID NO: 7551 - DNA, 119 bp, homo sapiens
acatagccctcaggtttcagactgttcagccaatggctcttctacttttccgaagcaacagggatgtgttgtgaagctggagctgctaagtggctacattcacttatcaattcaggtca

SEQ ID NO: 7552 - DNA, 119 bp, homo sapiens
agggatgtgtttgtgaagctggagctgctaagtggctacattcacttatcaattcaggtcaataatcagcaaaggtgcttctgttcatttcccacaacaccagcgatggagagtggcat

SEQ ID NO: 7553 - DNA, 119 bp, homo sapiens
caataatcagtcaaaggtgcttctgttcatttcccacaacaccagcgatggagagtggcatttcgtggagtaatatttgcagaggctgtgacccttaccttaatcgacgactcctgtaa

SEQ ID NO: 7554 - DNA, 119 bp, homo sapiens
atttcgtggaggtaatatttgcagaggctgtgacccttaccttaatcgacgactcctgtaaggagaaatcatcgcgaaagctcctactccacttgaaagtgatcaatcaatatgtgctt

SEQ ID NO: 7555 - DNA, 119 bp, homo sapiens
aaggagaaatgcatcgcgaaagctcctactccacttgaaagtgatcaatcaatatgtgcttttcagaaccctttttgggtggtttaccagtgggaatgaccagcaatggtgttgctctg

SEQ ID NO: 7556 - DNA, 119 bp, homo sapiens
ttttcagaactcctttttgggtggtttaccagtgggaatgaccagcaatggtgttgctctgcttaactttataatatgccatccacaccttcgtttgtaggctgtctccaagacattaa

SEQ ID NO: 7557 - DNA, 119 bp, homo sapiens
tgcttaacttctataatatgccatccacaccttcgtttgtaggctgtctccaagacattaaaattgattgaatcacattaccctggagaacatctcgtctggctcatcattaaatgtca

SEQ ID NO: 7558 - DNA, 119 bp, homo sapiens
aaaattgattggaatcacattaccctggagaacatctcgtctggctcatcattaaatgtcaaggcaggcgtgtgagaaaggattggtgtgaaagccaaccttgtcaaagcagaggacgc

SEQ ID NO: 7559 - DNA, 119 bp, homo sapiens
caaggcaggctgtgtgagaaaggattggtgtgaaagccaaccttgtcaaagcagaggacgctgcatcaattgtggctgagttaccagtgtgactgccacaggccctatgaaggccccaa

SEQ ID NO: 7560 - DNA, 119 bp, homo sapiens
agtatgtggcaggcagatttggccaggatgactccactggttatgtcatctttactcttgatgagagcttggagacaccatcagcctctccatgtttgtccgaacgcttcaaccatcag

SEQ ID NO: 7561 - DNA, 119 bp, homo sapiens
actcttgatgagagctatggagacaccatcagcctctccatgtttgtccgaacgcttcaaccatcaggctacttctagctttggaaaacagcacttatcaatatatccgtgtctggcta

SEQ ID NO: 7562 - DNA, 119 bp, homo sapiens
gcttcaaccatcaggcttacttctagctttggaaaacagcacttatcaatatatccgtgtctggctagacgcggcagactagcaatgctgactccaaactctcccaaattagtagtaaa

SEQ ID NO: 7563 - DNA, 119 bp, homo sapiens
tccgtgtctggctagagcgcggcagactagcaatgctgactccaaactctcccaaattagtagtaaaattgttcttaatgatggaaatgtccacttgatatctttgaaaatcaagccat

SEQ ID NO: 7564 - DNA, 119 bp, homo sapiens
aaattagtagtaaaatttgttcttaatgatggaaatgtccacttgatatctttgaaaatcaagccatataaattgaactgtatcagtcttcacaaaacctaggatttatttctgcttct

SEQ ID NO: 7565 - DNA, 119 bp, homo sapiens
gaaaatcaagccatataaaattgaactgtatcagtcttcacaaaacctaggatttatttctgcttctactggaaaatcgaaaagggagatgtcatctacattggtggcctacctgacaa

SEQ ID NO: 7566 - DNA, 119 bp, homo sapiens
ttatttctgcttctacgtggaaaatcgaaaagggagatgtcatctacattggtggcctacctgacaagcagagactgaacttaatggtggattcttcaaaggctgtatccaagatgtaa

SEQ ID NO: 7567 - DNA, 119 bp, homo sapiens
ggcctacctgacaagcaagagactgaacttaatggtggattcttcaaaggctgtatccaagatgtaagataaacaaccaaaatctggaattctttccaaatccaacaaacaatgcatct

SEQ ID NO: 7568 - DNA, 119 bp, homo sapiens
tatccaagatgtaagactaaacaaccaaaatctggaattctttccaaatccaacaaacaatgcatctctaatccagttcttgtcaatgtaacccaaggctgtgctggagacaacagctg

SEQ ID NO: 7569 - DNA, 119 bp, homo sapiens
tccaacccctgtcacaatggaggtgtttgccattcccggtgggatgacttctcctgttcctgtcctgcctcacaagtgggaaagcctgtgaggaggttcagtggtgtggattcagcccg

SEQ ID NO: 7570 - DNA, 119 bp, homo sapiens
acttctcctgttcctgtcctgccctcacaagtgggaaagcctgtgaggaggttcagtggtgtggattcacccgtgtcctcacggagcccagtgccagccggtgcttcaaggatttgaat

SEQ ID NO: 7571 - DNA, 119 bp, homo sapiens
gtattgcaaatgctgtttttaatggacaaagcggtcaaatattattcagaagcaatgggaatattaccaagaactcaccaatatcacatttggtttcagaacaagggatgcaaatgtaa

SEQ ID NO: 7572 - DNA, 119 bp, homo sapiens
gggaatattaccagagaactcaccaatatcacatttggtttcagaacaagggatgcaaatgtaataatatgcatgcagaaaaagagcctgaatttcttaatattagcattcaagattcc

SEQ ID NO: 7573 - DNA, 119 bp, homo sapiens
aaatgtaataatattgcatgcagaaaaagagcctgaatttcttaatattagcattcaagattccagattttctttcaattgcaaagtggcaacagcttttatatgctaagtctgacaag

SEQ ID NO: 7574 - DNA, 119 bp, homo sapiens
aagattccagattattctttcaattgcaaagtggcaacagcttttatatgctaagtctgacaagtttgcgtcagtgaatgatggcacatggcacgaagtgaccctttccatgacagacc

SEQ ID NO: 7575 - DNA, 119 bp, homo sapiens
ctgacaagtttgcagtcagtgaatgatggcacatggcacgaagtgaccctttccatgacagacccactgcccagacctccaggtggcaaatggaagtggacaacgaaacaccttttgtg

SEQ ID NO: 7576 - DNA, 119 bp, homo sapiens
gacagacccactgtcccagacctccaggtggcaaatggaagtggacaacgaaacaccttttgtgaccagacaattgctactggaagcctcaactttttgaaggataatacagatattta

SEQ ID NO: 7577 - DNA, 119 bp, homo sapiens
cttttgtgaccagcacaattgctactggaagcctcaactttttgaaggataatacagatatttatgtggagacagagctattgacaatataaagggcctgcaagggtgtctaagtacaa

SEQ ID NO: 7578 - DNA, 119 bp, homo sapiens
gatatttatgtgggagacagagctattgacaatataaagggcctgcaagggtgtctaagtacaatagaatcggaggcatttatctctcttactttgaaaatgttcatggtttcattaat

SEQ ID NO: 7579 - DNA, 119 bp, homo sapiens
aagtacaatagaaatcggaggcatttatctctcttactttgaaaatgttcatggtttcattaataaacccaggaagagcaatttctcaaaatctctaccaattcagtggtcactggctg

SEQ ID NO: 7580 - DNA, 119 bp, homo sapiens
tcattaataaacctcaggaagagcaatttctcaaaatctctaccaattcagtggtcactggctgtttgcgttaaatgtctgcaactccaacccctgtttgcatggaggaaactgtgaag

SEQ ID NO: 7581 - DNA, 119 bp, homo sapiens
actggctgtttgcagttaaatgtctgcaactccaacccctgtttgcatggaggaaactgtgaagacatcatagctcttatcattgctcctgtcccttgggatggtcagggaaacactgt

SEQ ID NO: 7582 - DNA, 119 bp, homo sapiens
ctgtgaagacatctatagctcttatcattgctcctgtcccttgggatggtcagggaaacactgtgaactaacatcgatgaatgcttttcaaacccctgtatccatggcaactgctctga

SEQ ID NO: 7583 - DNA, 119 bp, homo sapiens
aacactgtgaactcaacatcgatgaatgcttttcaaacccctgtatccatggcaactgctctgacagagtgcagcctaccactgcacatgtgagcctggatacactggtgtgaactgtg

SEQ ID NO: 7584 - DNA, 119 bp, homo sapiens
tgctctgacagagttgcagcctaccactgcacatgtgagcctggatacactggtgtgaactgtgaagtgatatagacaactgccagagtcaccagtgtgcaaatggagccacctgcatt

SEQ ID NO: 7585 - DNA, 119 bp, homo sapiens
gaactgtgaagtggatatagacaactgccagagtcaccagtgtgcaaatggagccacctgcattagtcaactaatggctattcttgcctctgttttggaaattttacaggaaaattttg

SEQ ID NO: 7586 - DNA, 119 bp, homo sapiens
acagagcagattaccctcaacagtctgtgggaatgagaagacaaatctcacttgctacaatggaggcaatgcacagagttccagactgaattaaaatgtatgtgccggccaggttttac

SEQ ID NO: 7587 - DNA, 119 bp, homo sapiens
attaccctcaacagtctgtgggaatgagaagacaaatctcacttgctacaatggaggcaactgcacagattccagactgaattaaaatgtatgtgccggccaggttttactggagaatg

SEQ ID NO: 7588 - DNA, 119 bp, homo sapiens
gtgtgaaaaggacattgatgagtgtgcctctgatccgtgtgtcaatggaggtctgtgccaggacttactaacaaattccagtgcctctgtgatgttgcctttgctggcgagcgctgcga

SEQ ID NO: 7589 - DNA, 119 bp, homo sapiens
aaggacattgatgagtgtgcctctgatccgtgtgtcaatggaggtctgtgccaggacttactcaacaaatccagtgcctctgtgatgttgcctttgctggcgagcgctgcgaggtggac

SEQ ID NO: 7590 - DNA, 119 bp, homo sapiens
ttggcagatgacttgatctccgacattttcaccactattggctcagtgactgtcgccttgttactgatctcttgctggccattgttgcttctgttgtcacctccaacaaaagggcaact

SEQ ID NO: 7591 - DNA, 119 bp, homo sapiens
cttgttactgatcctcttgctggccattgttgcttctgttgtcacctccaacaaaagggcaactcagggacctacagccccagccgtcaggagaaggagggctcccgagtggaaatgtg

SEQ ID NO: 7592 - DNA, 119 bp, homo sapiens
gggcaactcagggaacctacagccccagccgtcaggagaaggagggctcccgagtggaaatgtggaactgatgccaccccctgcaatggagagactgatttaggagcattgtgtccctt

SEQ ID NO: 7593 - DNA, 119 bp, homo sapiens
gaaatgtggaacttgatgccaccccctgcaatggagagactgatttaggagcattgtgtcccttcgagaggggatccacacactgtgaatgtgatgactgtacttcaggtatctctgac

SEQ ID NO: 7594 - DNA, 119 bp, homo sapiens
tgtcccttcgagatggggatccacacactgtgaatgtgatgactgtacttcaggtatctctgacataccgacaatgttaatctgcaactgggattacactggaactacaggaatgattc

SEQ ID NO: 7595 - DNA, 119 bp, homo sapiens
tctctgacatacctgacaatgttaatctgcaactgggattacactggaactacaggaatgattcctttgccaccttaaaaactttcacagtggttccgctcgacaccattgttttatta

SEQ ID NO: 7596 - DNA, 119 bp, homo sapiens
aatgattcctttgaccaccttaaaaactttcacagtggttccgctcgacaccattgttttattatattaatcagccaattgcaaaaaaagtctgtgccagtaatttcagccttataatt

SEQ ID NO: 7597 - DNA, 119 bp, homo sapiens
ttttattatattatatcagccaattgcaaaaaaagtctgtgccagtaatttcagccttataattagcaaaacatcttccagagaataaagtcttctgtggctttagtggctatcactga

SEQ ID NO: 7598 - DNA, 119 bp, homo sapiens
ttataattagcaaaaacatcttccagagaataaagtcttctgtggctttagtggctatcactgaaactcttcctcttttcaacctgggaacaaattttagttttcattttaggtttctg

SEQ ID NO: 7599 - DNA, 119 bp, homo sapiens
atcactgaaactctttcctcttttcaacctgggaacaaattttagttttcattttaggtttctgtacttctgtagtttctgtgtaaactgccatatgtttacatggaaactacaggaaa

SEQ ID NO: 7600 - DNA, 119 bp, homo sapiens
ggtttctgtactttctgtagtttctgtgtaaactgccatatgtttacatggaaactacaggaaaaaattgctacatttctcacttctcctatcatgtggtcaaagttattgttgtatac

SEQ ID NO: 7601 - DNA, 119 bp, homo sapiens
acaggaaaaaattggctacatttctcacttctcctatcatgtggtcaaagttattgttgtataccagcgtgggatgtatacttttgtccttcattcatggattcagagaaagctctggg

SEQ ID NO: 7602 - DNA, 119 bp, homo sapiens
ttgtataccagcgatgggatgtatacttttgtccttcattcatggattcagagaaagctctgggaatgattatggtccaaaaaagtgacccaatggcaacaaataaaaattgaaatgca

SEQ ID NO: 7603 - DNA, 119 bp, homo sapiens
tagcctgtagtagtctgaggagtgtctaaggagggtggtggattctgtccacatgcctgcggctcgaaggaaggttttcattggcagccagttacttaaacttaagaaagaacaccaca

SEQ ID NO: 7604 - DNA, 119 bp, homo sapiens
gtggtggattctgtccacatgcctgcggctcgaagggaaggttttcattggcagccagttacttaaactaagaaagaacaccacattgaaagcctaaggtcttccttctctttggggag

SEQ ID NO: 7605 - DNA, 119 bp, homo sapiens
gggaaggttttcattggcagccagttacttaaacttaagaaagaacaccacattgaaagcctaaggtctccttctctttggggagaataggtacatgtaaggtgatagggaaggagaaa

SEQ ID NO: 7606 - DNA, 119 bp, homo sapiens
catcctatgattctctgtccagattcaagtgaaaatccaaaaaaacttcaaaagggaagttcaaaaccaatcattcaaaaaaacttttttccactgagggaatacacacttttcccccc

SEQ ID NO: 7607 - DNA, 119 bp, homo sapiens
ttcaaaaccaaatcattcaaaaaaacttttttccactgagggaatacacacttttcccccctgttgatttatctcctccgggtattttatttaggctactattaaggtccacttgcatt

SEQ ID NO: 7608 - DNA, 119 bp, homo sapiens
cctgttgattatatctcctccgggtattttatttaggctactattaaggtccacttgcattttctgcattgtgctggtagttgagggtagacacttccccacccatcccccttacaccc

SEQ ID NO: 7609 - DNA, 119 bp, homo sapiens
ttttctgcatgtgtgctggtagttgagggtagacacttccccacccatcccccttacaccccacttcaacccagagtgtgtgggaaggcctcctggccttccagattttccatgggtga

SEQ ID NO: 7610 - DNA, 119 bp, homo sapiens
cccacttcaaccccagagtgtgtgggaaggcctcctggccttccagattttccatgggtgatccacacatgggtaatccacatgcccatcatcaaggcctaaccatgttagaaaaggga

SEQ ID NO: 7611 - DNA, 119 bp, homo sapiens
gatccacacattgggtaatccacatgcccatcatcaaggcctaaccatgttagaaaagggaaggacaataagctgcaggaagctcttctagaacatttcactcagctgcctcaaggtca

SEQ ID NO: 7612 - DNA, 119 bp, homo sapiens
gaaggacaatgaagctgcaggaagctcttctagaacatttcactcagctgcctcaaggtcagtcaggggttgggcatcactttctggagaaagccagagagcaggtgtgaccagctgca

SEQ ID NO: 7613 - DNA, 119 bp, homo sapiens
cagtcaggggtttgggcatcactttctggagaaagccagagagcaggtgtgaccagctgcagaaagcggaccctggaattgagaaacctgggctctttagggcagcatctgaagtcctt

SEQ ID NO: 7614 - DNA, 119 bp, homo sapiens
cagaaagcggaaccctggaattgagaaacctgggctctttagggcagcatctgaagtccttggagctgacctctggaagaagctgttagggactggccacagcccatgcgatgacattg

SEQ ID NO: 7615 - DNA, 119 bp, homo sapiens
ttggagctgagcctctggaagaagctgttagggactggccacagcccatgcgatgacattgtggcgtgggtaatgagtaacctacctccacccctagctacacttcttggagagcagct

SEQ ID NO: 7616 - DNA, 119 bp, homo sapiens
tgtggcgtggggtaatgagtaacctacctccacccctagctacacttcttggagagcagcttagattctatcccactgccaaggtaagagatggatcaggccacaggtaggtagagatg

SEQ ID NO: 7617 - DNA, 119 bp, homo sapiens
cttagattctcatcccactgccaaggtaagagatggatcaggccacaggtaggtagagatgtagcctttgacctgtcccttcatagcccaggattccaaactcaggaacagacactatt

SEQ ID NO: 7618 - DNA, 119 bp, homo sapiens
tgtagcctttggacctgtcccttcatagcccaggattccaaactcaggaacagacactattcatgcaggacaatctcactgttcatgaggagctggctgcagttaaaggcagaagaagt

SEQ ID NO: 7619 - DNA, 119 bp, homo sapiens
tgtgacccacctgcagtggtgagctcagccagtcactagcaagaaggcataccagccaacaggtccctttcattggggatgggggtaggggggtgaatgggacatccctgaaattgggg

SEQ ID NO: 7620 - DNA, 119 bp, homo sapiens
aggtcccttctcattggggatgggggtaggggggtgaatgggacatccctgaaattggggtgagaacctggtcttgccaaaaggcagggcaactgtccccttttagacagaaccaggag

SEQ ID NO: 7621 - DNA, 119 bp, homo sapiens
tgagaacctaggtcttgccaaaaggcagggcaactgtccccttttagacagaaccaggagatgaggatgggcaatggtctgtcttccaaaaccttgaatctgccagttagggaaggggc

SEQ ID NO: 7622 - DNA, 119 bp, homo sapiens
atgaggatggggcaatggtctgtcttccaaaaccttgaatctgccagttagggaaggggctgctcctgcgactagcgcaggagagggagagggcggtgccgctctacgacctaactcag

SEQ ID NO: 7623 - DNA, 119 bp, homo sapiens
tgctcctgcagactagcgcaggagagggagagggcggtgccgctctacgacctaactcagctttgtggcagaggaagaggatggggcagggagtcgcttcattttatagcagcgtcttg

SEQ ID NO: 7624 - DNA, 119 bp, homo sapiens
ctttgtggccagaggaagaggatggggcagggagtcgcttcattttatagcagcgtcttgggatggggcgcctcttgggtctcctcgtcaggcctaggtggggaggttccagggcccgg

SEQ ID NO: 7625 - DNA, 119 bp, homo sapiens
ggatggggccgcctcttgggtctcctcgtcaggcctaggtggggaggttccagggcccggcgctccggtaccggcctatcattccccctgcagaaggctccgcttctgggcagggaagc

SEQ ID NO: 7626 - DNA, 119 bp, homo sapiens
cgctccggtcaccggcctatcattccccctgcagaaggctccgcttctgggcagggaagcggccggggtagtcggctttgggcgcccggaattcgggcatgctccaggaccgcagtggc

SEQ ID NO: 7627 - DNA, 119 bp, homo sapiens
ggccggggtcagtcggctttgggcgcccggaattcgggcatgctccaggaccgcagtggcggcggtgtgcccgctccacgtcctcggagatggtcctgatgtcgctggcgaagggcgag

SEQ ID NO: 7628 - DNA, 119 bp, homo sapiens
ggcggtgtgtcccgctccacgtcctcggagatggtcctgatgtcgctggcgaagggcgagatgcgcgcggggtcttgaaggtggccaggctgccgcggggccgcaggctccactggcgc

SEQ ID NO: 7629 - DNA, 119 bp, homo sapiens
atgcgcgcgcgggtcttgaaggtggccaggctgccgcggggccgcaggctccactggcgcgtcagcttggggcctcctcttcctgcttcatcctctccaggacctcctgcagcaccgag

SEQ ID NO: 7630 - DNA, 119 bp, homo sapiens
gtcagcttgtgggcctcctcttcctgcttcatcctctccaggacctcctgcagcaccgagcggaagagcgggacacctcctgcacctcgggctcctgctccgccagcagctgccggaac

SEQ ID NO: 7631 - DNA, 119 bp, homo sapiens
ctgaggatagcaggcccacaataggatgggtggatcttaacgcagacatcttccagctgcaaccgctcatggggctgaggtcataggtggaccggggtgtgctggccagccagctgtag

SEQ ID NO: 7632 - DNA, 119 bp, homo sapiens
atcttccagctgcaaccgctcaatggggctgaggtcataggtggaccggggtgtgctggccagccagcttagtccacaccggtgcagacctttctgaccgcattgctgcgctcccgctg

SEQ ID NO: 7633 - DNA, 119 bp, homo sapiens
ggggtgtgctggccagccagctgtagtccacaccggtgcagacctttctgaccgcattgctgcgctcccctgctgcctctcagcctctcgcatctgccccgtcagctccatcataagcg

SEQ ID NO: 7634 - DNA, 119 bp, homo sapiens
ctgaccgcattgctgcgctcccgctgctgcctctcagcctctcgcatctgccccgtcagctccatcatagcgtctccagcaccatctcagcagggctcctggtggacagccgggatggg

SEQ ID NO: 7635 - DNA, 119 bp, homo sapiens
ctgccccgtcagctccatcataagcgtctccagcaccatctcagcagggctcctggtggacagccgggaggggcctcgttccaccgaagccatgagatgagagacatagcccctggccc

SEQ ID NO: 7636 - DNA, 119 bp, homo sapiens
ctctgaggtcagcctctgctcaggtgcagcgtcacagcagggggcctgcgttctgcttcccagtctggggaagagagtgtctggatattttcaggaaaaaaaaagaaagttgagcagcc

SEQ ID NO: 7637 - DNA, 119 bp, homo sapiens
tctgcttcccagtctgggagaagagagtgtctggatattttcaggaaaaaaaaagaaagttgagcagcccagcagggcagggcagtctacatcctcaagtctccctcagcttctctgct

SEQ ID NO: 7638 - DNA, 119 bp, homo sapiens
aaagaaagttgagcagccacagcagggcagggcagtctacatcctcaagtctccctcagcttctctgctctgccggctggcctcaaattttgcctctctttggttctctgagaagtttt

SEQ ID NO: 7639 - DNA, 119 bp, homo sapiens
tccctcagcttctctgctgctgccggctggcctcaaattttgcctctctttggttctctgagaagttttccaagagaagagacaggaggagagatccagcctggactattgtttgtggg

SEQ ID NO: 7640 - DNA, 119 bp, homo sapiens
cccgcgaggctggagccacagcttccctgatgaaccatggaggcgggccagctcctgagctgcggttgcctggagacccacctaagcctctttgcctggagcagcattatctgtagagg

SEQ ID NO: 7641 - DNA, 119 bp, homo sapiens
agctgcggttgccctggagacccacctaagcctctttgcctggagcagcattatctgtagagggagtggtgatctgacacaaaagcctgaggcgacccaggcccaggcagtgagggagc

SEQ ID NO: 7642 - DNA, 119 bp, homo sapiens
tagagggagtggctgatctgacacaaaagcctgaggcgacccaggcccaggcagtgagggagcacttgttccagatggcattctgtccgcttcctcctccagccggtgctcagtgtggc

SEQ ID NO: 7643 - DNA, 119 bp, homo sapiens
gggagcacttgtgtccagatggcattctgtccgcttcctcctccagccggtgctcagtgtggcacaaacgggcaagaccattctcacccaaccctctgctgagccctaggtgtacctgc

SEQ ID NO: 7644 - DNA, 119 bp, homo sapiens
tgtggcacaaactgggcaagaccattctcacccaaccctctgctgagccctaggtgtacctgctgttggaaatgtttccagctgcctggtgggtggctcctggatggagatcccctctt

SEQ ID NO: 7645 - DNA, 119 bp, homo sapiens
acctgctgttggcaaatgtttccagctgcctggtgggtggctcctggatggagatcccctctttctatcgctccctcctacagggaaggggtgattctgggtgctgaggacagggacct

SEQ ID NO: 7646 - DNA, 119 bp, homo sapiens
cctctttctatcagctccctcctacagggaaggggtgattctgggtgctgaggacagggacctgtgaagtacatctccgcctttgccccaccacatcccttgcctgtcttcctctctgc

SEQ ID NO: 7647 - DNA, 119 bp, homo sapiens
ggacctgtgaagatacatctccgcctttgccccaccacatcccttgcctgtcttcctctctgcttatctaattatttccttccctcaaggcaagctcaagagcagacagttctgacttt

SEQ ID NO: 7648 - DNA, 119 bp, homo sapiens
ctctgcttatctaaattatttccttccctcaaggcaagctcaagagcagacagttctgactttcagaagaggggctgtccagggagaagaggaacatggaacagaaagcattgacgttg

SEQ ID NO: 7649 - DNA, 119 bp, homo sapiens
gactttcagaaggaggggctgtccagggagaagaggaacatggaacagaaagcattgacgttgaggtattgagataacatttggggatagcagaagcatcctgttgctgttctgcagca

SEQ ID NO: 7650 - DNA, 119 bp, homo sapiens
acgttgaggtatttgagataacatttggggatagcagaagcatcctgttgctgttctgcagcatcccacctcatgtctgggcctccttcctgtctctgctctctggtcacgctgtcact

SEQ ID NO: 7651 - DNA, 119 bp, homo sapiens
gcagcatcccacactcatgtctgggcctccttcctgtctctgctctctggtcacgctgtcacttgtagatgttctgcctagaagccatgtgtgggccagcttgcacctaacagacatta

SEQ ID NO: 7652 - DNA, 119 bp, homo sapiens
gtcacttgtagactgttctgcctagaagccatgtgtgggccagcttgcacctaacagacattaggtagcctaaaacagatgcacactgccctgtgaggggcatgggaatactgtaatgg

SEQ ID NO: 7653 - DNA, 119 bp, homo sapiens
gccgcgcggcgcgggggaggagaccttcatctgttcacgcggtagcgcggattgcggttcgcggcgcgcccaccggggaaggagcggtgggccgaggggttggaggtggggccccagga

SEQ ID NO: 7654 - DNA, 119 bp, homo sapiens
tcgcggcgcgcgccaccggggaaggagcggtgggccgaggggttggaggtggggccccaggaggacctcggctgtgggccgggagagcggagtcggggagtggggcgggggagcgaggt

SEQ ID NO: 7655 - DNA, 119 bp, homo sapiens
aggaggacctcgggctgtgggccgggagagcggagtcggggagtggggcgggggagcgaggtggcgccgggagcctgggatatggcgcggccagacgatgaggagggggcggcggtggc

SEQ ID NO: 7656 - DNA, 119 bp, homo sapiens
aggtggcgccggggagcctgggatatggcgcggccagacgatgaggagggggcggcggtggcgcccggaacccgctcgcgaaaggatacctcccgttgccgaggggcgcgcccgttggg

SEQ ID NO: 7657 - DNA, 119 bp, homo sapiens
tggcgcccggacacccgctcgcgaaaggatacctcccgttgccgaggggcgcgcccgttgggaaggagacgtggagctgcagaacgggcccaaagcgggcaccttcccggtgaatgggg

SEQ ID NO: 7658 - DNA, 119 bp, homo sapiens
tgggaaggagagcgtggagctgcagaacgggcccaaagcgggcaccttcccggtgaatggggccccccggacagcctcgctgccgcctcgggagttctgggcgggcctcagactccact

SEQ ID NO: 7659 - DNA, 119 bp, homo sapiens
ggggccccccgggacagcctcgctgccgcctcgggagttctgggcgggcctcagactccactggccccaaagaggagacccaggcccggctgctgcctgcgggcgcgggagctgagacc

SEQ ID NO: 7660 - DNA, 119 bp, homo sapiens
cactggccccagaagaggagacccaggcccggctgctgcctgcgggcgcgggagctgagaccccgggggcgagagcagcccgctgccccttacggcgctctccccgcggcgcttcgtgg

SEQ ID NO: 7661 - DNA, 119 bp, homo sapiens
gaccccgggggccgagagcagcccgctgccccttacggcgctctccccgcggcgcttcgtggtgctcctatcttcagcctgtactcgctggtcaacgcctttcagtggatccagtacag

SEQ ID NO: 7662 - DNA, 119 bp, homo sapiens
gtggtgctcctgatcttcagcctgtactcgctggtcaacgcctttcagtggatccagtacagcatcattgcaacgtcttcgagggcttctacggtgtcaccttgctgcacatcgactgg

SEQ ID NO: 7663 - DNA, 119 bp, homo sapiens
acagcatcattagcaacgtcttcgagggcttctacggtgtcaccttgctgcacatcgactggctgtccaggtgtacatgctggcctacgtgcccctcatcttcccggccacctggctgc

SEQ ID NO: 7664 - DNA, 119 bp, homo sapiens
ctggctgtccatggtgtacatgctggcctacgtgcccctcatcttcccggccacctggctgctggacacagaggcctgcggctcaccgccctgctgggctccggcctcaactgcctggg

SEQ ID NO: 7665 - DNA, 119 bp, homo sapiens
ctgctggacaccagaggcctgcggctcaccgccctgctgggctccggcctcaactgcctgggtgcctggtcaagtgcggcagtgtgcagcagcatctcttctgggtcaccatgttgggc

SEQ ID NO: 7666 - DNA, 119 bp, homo sapiens
tgggtgcctggatcaagtgcggcagtgtgcagcagcatctcttctgggtcaccatgttgggccagtgctgtgctcggtggcccaggtgttcatcctgggcttgccctcccgcatcgcct

SEQ ID NO: 7667 - DNA, 119 bp, homo sapiens
gggccagtgcttgtgctcggtggcccaggtgttcatcctgggcttgccctcccgcatcgcctcagtgtgtttgggcccaaagaggtgtccacagcttgtgccaccgccgtgctgggcaa

SEQ ID NO: 7668 - DNA, 119 bp, homo sapiens
cttggaactgcagttggctttttgctaccaccagttttagtacccaacacacagaatgacacaaatctctggcttgtaatatcagcaccatgttttatggaacatcagctgttgccaca

SEQ ID NO: 7669 - DNA, 119 bp, homo sapiens
taccaccagttttagtacccaacacacagaatgacacaaatctcctggcttgtaatatcagcaccatgtttatggaacatcagctgttgccacacttttatttattttaacagcaattg

SEQ ID NO: 7670 - DNA, 119 bp, homo sapiens
ccttcaaagaaaaacctcggtatccaccaagtcaggctcaagcagctcttcaagacagtccccctgaaggtactcctataagaaatcaataagaaacctgtttaaaaacattccttttg

SEQ ID NO: 7671 - DNA, 119 bp, homo sapiens
atccaccaagtcaggctcaagcagctcttcaagacagtccccctgaagagtactcctataagaaatcaaaagaaacctgtttaaaaacattccttttgtccttctgttgatcacttatg

SEQ ID NO: 7672 - DNA, 119 bp, homo sapiens
ataccagctgacagtcccacagaccaagaaccaaaaacggttatgttgtccaagcagtcagaatcagcatttgaagagaaaggcaaagttactgtcctgtagtaattggggacaatgtg

SEQ ID NO: 7673 - DNA, 119 bp, homo sapiens
agaatcagcaatttgaagagaaaggcaaagttactgtcctgtagtaattggggacaatgtgatcatcctggagagagatgtgagcaccaaggctgggtttgtatgtggtgggggaataa

SEQ ID NO: 7674 - DNA, 119 bp, homo sapiens
tgatcatccttggagagagatgtgagcaccaaggctgggtttgtatgtggtgggggaataaacacacttcttgaaaattaccatatgaactctaaatgcataattattattttgcttaa

SEQ ID NO: 7675 - DNA, 119 bp, homo sapiens
aaacacacttacttgaaaattaccatatgaactctaaatgcataattattattttgcttaattgttaaataagggaaattttcttaaaattcttctgtttacatcatgttaacactact

SEQ ID NO: 7676 - DNA, 119 bp, homo sapiens
aattgttaaattaagggaaattttcttaaaattcttctgtttacatcatgttaacactactgtttatctattagtatccggtttttagtctcatattgtatctgaaagtaagcttcttg

SEQ ID NO: 7677 - DNA, 119 bp, homo sapiens
ctgtttatctaattagtatccggtttttagtctcatattgtatctgaaagtaagcttcttgacgtttacttttaaaagtcgatgtttttcttttttgtagaaaatggaagcttagaata

SEQ ID NO: 7678 - DNA, 119 bp, homo sapiens
tgacgtttactttttaaaagtcgatgtttttcttttttgtagaaaatggaagcttagaatactttttaagtgataatatggggtgttcagtccccataagatataatagttcatgcagt

SEQ ID NO: 7679 - DNA, 119 bp, homo sapiens
tactttttaaagtgataatatggggtgttcagtccccataagatataatagttcatgcagtttatatataaagtatccagtggaactaaatgtacaatatattcctaattggctgcctt

SEQ ID NO: 7680 - DNA, 119 bp, homo sapiens
gtttatatattaaagtatccagtggaactaaatgtacaatatattcctaattggctgcctttttcactggctgaccagctgttcaagccacttcagtttgagtacaacataccaacatg

SEQ ID NO: 7681 - DNA, 119 bp, homo sapiens
tttttcactgtgctgaccagctgttcaagccacttcagtttgagtacaacataccaacatgacactactacccacaaaggacagcattgggatcaggctttcagatgacctctaagatt

SEQ ID NO: 7682 - DNA, 119 bp, homo sapiens
tgacactactcacccacaaaggacagcattgggatcaggctttcagatgacctctaagatttttcccattattgtactcttgttacaaagtactttttaacacatgcagtcaatggcta

SEQ ID NO: 7683 - DNA, 119 bp, homo sapiens
tttttcccatttattgtactcttgttacaaagtactttttaacacatgcagtcaatggctataaaaactttctgtgtacagattctacccagactttggtcttagaattatgttctaat

SEQ ID NO: 7684 - DNA, 119 bp, homo sapiens
tataaaaactattctgtgtacagattctacccagactttggtcttagaattatgttctaattaaggagctggttacaggttcattctgtcttgagttcttttctgtgctgcctttctat

SEQ ID NO: 7685 - DNA, 119 bp, homo sapiens
attaaggagcctggttacaggttcattctgtcttgagttcttttctgtgctgcctttctatcatggataatgctaacgctgtattttttcactccaacttgagatagagtagttttgta

SEQ ID NO: 7686 - DNA, 119 bp, homo sapiens
atcatggataaatgctaacgctgtattttttcactccaacttgagatagagtagttttgtacccattgcttttttttcttttaaactctctttttttttttttcctgatgtgtaacttt

SEQ ID NO: 7687 - DNA, 119 bp, homo sapiens
tacccattgccttttttttcttttaaactctctttttttttttttcctgatgtgtaactttctagtaagtaatttcatcatgtatgttactggctatttcatgatttcatgtatcacat

SEQ ID NO: 7688 - DNA, 119 bp, homo sapiens
ttctagtaagataatttcatcatgtatgttactggctatttcatgatttcatgtatcacatcgtatatttgccttgaagattcctgaaataaggaaatctataataacttcagatagcc

SEQ ID NO: 7689 - DNA, 119 bp, homo sapiens
atcgtatattttgccttgaagattcctgaaataaggaaatctataataacttcagatagcctacatgtcccatttagtggagacctcttgaatgctatttgaattctgcagtatcattt

SEQ ID NO: 7690 - DNA, 119 bp, homo sapiens
cctacatgtccccatttagtggagacctcttgaatgctatttgaattctgcagtatcatttttatgaccttctcctttgaggaatactatgcccaggtacatgctctatcagtgtgccg

SEQ ID NO: 7691 - DNA, 119 bp, homo sapiens
ttttatgaccattctcctttgaggaatactatgcccaggtacatgctctatcagtgtgccgggagagtgattcttttcttcactgcagagtcatcacactgttagaatagtctgctctt

SEQ ID NO: 7692 - DNA, 119 bp, homo sapiens
cgggagagtggattcttttcttcactgcagagtcatcacactgttagaatagtctgctcttttacatgccaggtagggaaaataggaccaaatatatttccacagtgcctaccactgtg

SEQ ID NO: 7693 - DNA, 119 bp, homo sapiens
ttttacatgctcaggtagggaaaataggaccaaatatatttccacagtgcctaccactgtgtcatgtttcagtgagagtttaaatattgttgatgtcctgactctgtgagctcataggg

SEQ ID NO: 7694 - DNA, 119 bp, homo sapiens
tgtcatgtttacagtgagagtttaaatattgttgatgtcctgactctgtgagctcatagggagtatcttatagtaatgacatttgatcagccataaaatttacattatgttcatatgca

SEQ ID NO: 7695 - DNA, 119 bp, homo sapiens
ggagtatcttcatagtaatgacatttgatcagccataaaatttacattatgttcatatgcacccaaaaagctagtcaggtaatgaatacccttgaagtgaatagcaattttgatttagg

SEQ ID NO: 7696 - DNA, 119 bp, homo sapiens
atatcaggcagaatatatgcattgatatatattgaaattataacattctctataatcaagtgactgtaattatgtcgaatctgaccctggggaatgtgttatctaaagaatttgactaa

SEQ ID NO: 7697 - DNA, 119 bp, homo sapiens
aaatattaaatgccattaatcatggaatagaccaaattattgtatcacaggaacttgaatccagccagaaaaaattccctggacaattggataaacaaatgtgattgctaccttatgga

SEQ ID NO: 7698 - DNA, 119 bp, homo sapiens
gaatccagccagagaaaaattccctggacaattggataaacaaatgtgattgctaccttatggatacaaggacttttacatttctttttagcctttttagtcagttgagggtaactcaa

SEQ ID NO: 7699 - DNA, 119 bp, homo sapiens
cttatggatacaacggacttttacatttctttttagcctttttagtcagttgagggtaactcaagcagatatgtccaatcattagcttcctttgatatttacattacaggtaaaaacgg

SEQ ID NO: 7700 - DNA, 119 bp, homo sapiens
taactcaagcagagtatgtccaatcattagcttcctttgatatttacattacaggtaaaaacggccaaaatatattttaaggtctctccccaaatgtttttatttttaaactatcaatg

SEQ ID NO: 7701 - DNA, 119 bp, homo sapiens
aaaaacggccaaaaatatattttaaggtctctccccaaatgtttttatttttaaactatcaatgttgttaaaataatcatgtacttgttgagttcctgaggtttggaacaaattacaca

SEQ ID NO: 7702 - DNA, 119 bp, homo sapiens
tatcaatgttgtttaaaataatcatgtacttgttgagttcctgaggtttggaacaaattacacataaaattagaatactttatttctgaaaagcatatacatatatgttatgtttattt

SEQ ID NO: 7703 - DNA, 119 bp, homo sapiens
attacacataaaatttagaatactttatttctgaaaagcatatacatatatgttatgtttatttttcctgttgattagaaaggtgatggaatatgtgacaatgcaaaatgaattgataa

SEQ ID NO: 7704 - DNA, 119 bp, homo sapiens
gtttatttttccttgttgattagaaaggtgatggaatatgtgacaatgcaaaatgaattgataattttttgtattttgagtgaaagttgtctgtaatatgtcaagcaagaatgttataa

SEQ ID NO: 7705 - DNA, 119 bp, homo sapiens
tttcagaaaatggaataggtaatcatcacttgtgtgaattttaatcaaatgacttaggaaagaaactggtgtttcaaaagctgttgcatttattacaaatgtcacaaatacagctcttg

SEQ ID NO: 7706 - DNA, 119 bp, homo sapiens
aggaaagaaactggatgtttcaaaagctgttgcatttattacaaatgtcacaaatacagctcttgcctttgagaatgttggagagatgtctttaaaaaatatgtttgtgtgtaaaaatg

SEQ ID NO: 7707 - DNA, 119 bp, homo sapiens
acagctcttgccttttgagaatgttggagagatgtctttaaaaaatatgtttgtgtgtaaaaatgtgtcgtatgcaatagctagaaaaatgcctgtgtcttaagtcattactcatgttc

SEQ ID NO: 7708 - DNA, 119 bp, homo sapiens
tgtaaaaatgtgtctgtatgcaatagctagaaaaatgcctgtgtcttaagtcattactcatgttctaattttgttctttgtactatttatctgtatgcttgttcttcagtatttcagac

SEQ ID NO: 7709 - DNA, 119 bp, homo sapiens
ggtcacattcaaatatttattaagcaaaccatctttagattagtttacatgatatttgtgcattggaaacaactattcatttgtgacataattaaaagttccttattaatgaattcttc

SEQ ID NO: 7710 - DNA, 119 bp, homo sapiens
atatttgtgcattggaaaccaactattcatttgtgacataattaaaagttccttattaatgaattcttcacttggactatgttttatttaccggtgtgttcatggatgccagcatgatt

SEQ ID NO: 7711 - DNA, 119 bp, homo sapiens
cttattaatgaattcttccacttggactatgttttatttaccggtgtgttcatggatgccagcatgattttacatcagtatatggtaccataacattaatatttgggttccatttagtg

SEQ ID NO: 7712 - DNA, 119 bp, homo sapiens
atggatgccagcatgatttttacatcagtatatggtaccataacattaatatttgggttccatttagtgaaattacagtagattataaacacatttcttagagtgtataaaaacaactg

SEQ ID NO: 7713 - DNA, 119 bp, homo sapiens
tttgggttccatttagtggaaattacagtagattataaacacatttcttagagtgtataaaaacaactgactcttaccaaacagttgatattaagaataacaaaacatggtagttcgta

SEQ ID NO: 7714 - DNA, 119 bp, homo sapiens
agtgtataaaaacaactgtactcttaccaaacagttgatattaagaataacaaaacatggtagttcgtagctgagaatgtggcatgtacaattggtaaaatgtgagtcaggagatttaa

SEQ ID NO: 7715 - DNA, 119 bp, homo sapiens
aaaacatggtagttcgtaagctgagaatgtggcatgtacaattggtaaaatgtgagtcaggagatttaatttaaagaggttcatcaagaactgctcattgtttataagggagaaggggt

SEQ ID NO: 7716 - DNA, 119 bp, homo sapiens
gtgagtcaggagatttaaatttaaagaggttcatcaagaactgctcattgtttataagggagaaggggtagccaaggagcatagtccctgtgcatagcatattattcctgtacatgatt

SEQ ID NO: 7717 - DNA, 119 bp, homo sapiens
tctgcatggtttgtataatagaggcttggcacgcaataccacttaaagtagcaaagcaacatcttagagtcttctctgaaataaatacaagtaaacttagacatgtagcaggggacaga

SEQ ID NO: 7718 - DNA, 119 bp, homo sapiens
aacatcttagagttcttctctgaaataaatacaagtaaacttagacatgtagcaggggacagagttctggcagaagccatacaggcttctgtctgccctaagctatggagtcaaaatgt

SEQ ID NO: 7719 - DNA, 119 bp, homo sapiens
gacagagttctgggcagaagccatacaggcttctgtctgccctaagctatggagtcaaaatgtaaatgatcagctaactgagttcatgtctaattagatgattaaatggataatgatcc

SEQ ID NO: 7720 - DNA, 119 bp, homo sapiens
aaatgtaaatgattcagctaactgagttcatgtctaattagatgattaaatggataatgatccaagataaatcccctgcagttctgtatttttttgtgcgttgttaaaattttatactg

SEQ ID NO: 7721 - DNA, 119 bp, homo sapiens
tgatccaagataaaatcccctgcagttctgtatttttttgtgcgttgttaaaattttatactgtgcttgaaaaatacacagtgataaagatacctggttaatttttcaaaaatcaggat

SEQ ID NO: 7722 - DNA, 119 bp, homo sapiens
atactgtgcttggaaaaatacacagtgataaagatacctggttaatttttcaaaaatcaggataaactcatcttctgaacctagcaaagcatatttgtagactattctttgtgactagc

SEQ ID NO: 7723 - DNA, 119 bp, homo sapiens
caggataaactcaatcttctgaacctagcaaagcatatttgtagactattctttgtgactagcaaactgattcttagaagagtccaccaaggattaggatgcaagtttgtgaccactcc

SEQ ID NO: 7724 - DNA, 119 bp, homo sapiens
actagcaaactgtattcttagaagagtccaccaaggattaggatgcaagtttgtgaccactcctttccttataccttaagtagctcacagaaggtggacacagccttggttaatgctta

SEQ ID NO: 7725 - DNA, 119 bp, homo sapiens
cactcctttcctatataccttaagtagctcacagaaggtggacacagccttggttaatgcttatttgtgcagctttaaacaactttattgtcccagaatcggcatatgggaataaaaac

SEQ ID NO: 7726 - DNA, 119 bp, homo sapiens
tgcttatttgtgccagctttaaacaactttattgtcccagaatcggcatatgggaataaaaaccagtaactagtcaatcctatgttttcatttcagaaagtataaaaacttggcgagaa

SEQ ID NO: 7727 - DNA, 119 bp, homo sapiens
aaaaaccagtaaactagtcaatcctatgttttcatttcagaaagtataaaaacttggcgagaaatatattttcgtattttctacagtcactgccagatgtgcacaattatttcagatgc

SEQ ID NO: 7728 - DNA, 119 bp, homo sapiens
cgagaaatatatatttcgtattttctacagtcactgccagatgtgcacaattatttcagatgcttttgttatagcagttctaataaggtggtagaacttctgcttaatactggcctgtg

SEQ ID NO: 7729 - DNA, 119 bp, homo sapiens
agatgcttttgtttatagcagttctaataaggtggtagaacttctgcttaatactggcctgtgcttttgcacttatggttggcaaactttgtctaggagttggtcagtctgaggagctg

SEQ ID NO: 7730 - DNA, 119 bp, homo sapiens
cctgtgcttttgacacttatggttggcaaactttgtctaggagttggtcagtctgaggagctgctctctacagagctagatgaaatctcaatacccaaaaagtccacaatcttttactg

SEQ ID NO: 7731 - DNA, 119 bp, homo sapiens
gagctgctctctcacagagctagatgaaatctcaatacccaaaaagtccacaatcttttactgttgggcctggggtaatacattgttttcaggcagaataagtaagactatcccttact

SEQ ID NO: 7732 - DNA, 119 bp, homo sapiens
ttactgttgggccctggggtaatacattgttttcaggcagaataagtaagactatcccttactttacaatttttgcctgtctctggttgtagattcacaaaaagtattgtgactattgt

SEQ ID NO: 7733 - DNA, 119 bp, homo sapiens
cttactttacaagtttttgcctgtctctggttgtagattcacaaaaagtattgtgactattgtgtgttaacagagtcaatattttcctggggtcacaaagacctttaaggatgaaggaa

SEQ ID NO: 7734 - DNA, 119 bp, homo sapiens
tattgtgtgttagacagagtcaatattttcctggggtcacaaagacctttaaggatgaaggaagacaagggttttcttactctgttttccatgaagaacaaatttaaatatctgatttt

SEQ ID NO: 7735 - DNA, 119 bp, homo sapiens
aaggaagacaagaggttttcttactctgttttccatgaagaacaaatttaaatatctgattttatgtggtgatttgcaagaaaatttttcttgccataggactttcaccaatgactttg

SEQ ID NO: 7736 - DNA, 119 bp, homo sapiens
gattttatgtggatgatttgcaagaaaatttttcttgccataggactttcaccaatgactttgtaatccactagagcaggtgacagacatttttgaaccgtaattggtactgttgcata

SEQ ID NO: 7737 - DNA, 119 bp, homo sapiens
actttgtaatccaactagagcaggtgacagacatttttgaaccgtaattggtactgttgcatatcatctttcttactgattctgtggctaaaataatggctagttctccaaaaagaagg

SEQ ID NO: 7738 - DNA, 119 bp, homo sapiens
taatgctagaaggaacagatacatttttccttttaaaatttcacgcagcctaatattgcaaatagaacatagtttccatttgaaatgtgctaggttgaagatgtcagtattctctgata

SEQ ID NO: 7739 - DNA, 119 bp, homo sapiens
gcaaatagaacagtagtttccatttgaaatgtgctaggttgaagatgtcagtattctctgatattcagtaattgacagaattttatgagaaactagtttcaaaactataaaatatatga

SEQ ID NO: 7740 - DNA, 119 bp, homo sapiens
ctgatattcagtgaattgacagaattttatgagaaactagtttcaaaactataaaatatatgaaataaaacattggttcaagtagaggtgttcctagtgaaacactttgttttctcctc

SEQ ID NO: 7741 - DNA, 119 bp, homo sapiens
atatgaaataaaaacattggttcaagtagaggtgttcctagtgaaacactttgttttctcctcaaaatgataaataagctgtttactccttagatttttggaaaattcataaatgcaag

SEQ ID NO: 7742 - DNA, 119 bp, homo sapiens
ctcctcaaaatgtataaataagctgtttactccttagatttttggaaaattcataaatgcaagaacagaacatttatgtgtaagttatgtgttgccttgtcaaaaagtttggtgagtaa

SEQ ID NO: 7743 - DNA, 119 bp, homo sapiens
tgcaagaacagagacatttatgtgtaagttatgtgttgccttgtcaaaaagtttggtgagtaaccctattattgtaaataaatagaaccttcagccttgtcaaaaagtttggtaagtaa

SEQ ID NO: 7744 - DNA, 119 bp, homo sapiens
gagtaaccctatgtattgtaaataaatagaaccttcagccttgtcaaaaagtttggtaagtaaccctattatggtaaataaatagaaccttcagaaaagtttgtcgacctggtgcaaag

SEQ ID NO: 7745 - DNA, 119 bp, homo sapiens
aagtaaccctatgtatggtaaataaatagaaccttcagaaaagtttgtcgacctggtgcaaagtttgggttcatttagcagctgtgatcattagaataactattcttgcaggattgtgt

SEQ ID NO: 7746 - DNA, 119 bp, homo sapiens
gcaaagtttgggattcatttagcagctgtgatcattagaataactattcttgcaggattgtgtcaacccgacagaaatggcagatagaaatgaacagcagtgacatcctttcaacagaa

SEQ ID NO: 7747 - DNA, 119 bp, homo sapiens
ttgtgtcaaccctgacagaaatggcagatagaaatgaacagcagtgacatcctttcaacagaatcattttgagccagtaactaacttactacttctaacaactgtgagccatcttgaaa

SEQ ID NO: 7748 - DNA, 119 bp, homo sapiens
acagaatcatttttgagccagtaactaacttactacttctaacaactgtgagccatcttgaaattgccatgattattcagttaaccaggagcatcactgccaaacagaaccaagtgaca

SEQ ID NO: 7749 - DNA, 119 bp, homo sapiens
ttgaaattgccactgattattcagttaaccaggagcatcactgccaaacagaaccaagtgacaattacaacttctttgtcttctacaaaataagagcaaatcaagtattttcatatgaa

SEQ ID NO: 7750 - DNA, 119 bp, homo sapiens
gtgacaattacatacttctttgtcttctacaaaataagagcaaatcaagtattttcatatgaatattcttctcatttaagatgagaaaaatatcatttcttagacctctattaggaagg

SEQ ID NO: 7751 - DNA, 119 bp, homo sapiens
tatgaatattctctctcatttaagatgagaaaaatatcatttcttagacctctattaggaaggaacacttcaaaaacagtcatcatttctttaaagaattataggataataaacaatgg

SEQ ID NO: 7752 - DNA, 119 bp, homo sapiens
ggaaggaacactttcaaaaacagtcatcatttctttaaagaattataggataataaacaatggcttttcgcatttatgatgtgtgagtgataacccaggaggaaatgggtgcagacctt

SEQ ID NO: 7753 - DNA, 119 bp, homo sapiens
caatggcttttcagcatttatgatgtgtgagtgataacccaggaggaaatgggtgcagaccttgcattcagggttacgtcttctgggtttccatcctttacaggtgggtgtctgtgaat

SEQ ID NO: 7754 - DNA, 119 bp, homo sapiens
gaccttgcattccagggttacgtcttctgggtttccatcctttacaggtgggtgtctgtgaatgtggtggttccttagtcactgagctgaaatccttgatggcgttcatcaggtcctct

SEQ ID NO: 7755 - DNA, 119 bp, homo sapiens
cagtccactgttgtggcccatgatggcttcccacagtgagttgtccatcaagactttcttgtcttgaattccatgagctggctgacgctgcggtgaagagaaccctgggagtaggttag

SEQ ID NO: 7756 - DNA, 119 bp, homo sapiens
gactttcttgtcttgaatgtccatgagctggctgacgctgcggtgaagagaaccctgggagtaggttagctggtttggttttgactcgggatgcgcaggacacatgcactccggttgct

SEQ ID NO: 7757 - DNA, 119 bp, homo sapiens
accctgggagtaggttaggctggtttggttttgactcgggatgcgcaggacacatgcactccggttgctcggatactcacaggtgtcccagaccggggaattttggtatcggctaaccc

SEQ ID NO: 7758 - DNA, 119 bp, homo sapiens
catatggttttcccccggtgggtaaacattcaatggagacatcctcttctgaagaggtaccaagggaggctttctctgatatatggctctttgtggatttttctttgtagtatcaggga

SEQ ID NO: 7759 - DNA, 119 bp, homo sapiens
tcctcttctgaagaggtaccaagggaggtctttctctgatatatggctctttgtggatttttctttgtatatcagggacagaaaaatggccaacaagatcaagcccagcatcgccatta

SEQ ID NO: 7760 - DNA, 119 bp, homo sapiens
tatggctctttgtggatttttctttgtagtatcagggacagaaaaatggccaacaagatcaagcccagctcgccattaacactatgaaccacagctcgctgtagaactctgtgcttttg

SEQ ID NO: 7761 - DNA, 119 bp, homo sapiens
aaaaatggccaacaagatcaagcccagcatcgccattaacactatgaaccacagctcgctgtagaactcgtgcttttgctccgcgatcccttctttttcccaggagttgttaggaccaa

SEQ ID NO: 7762 - DNA, 119 bp, homo sapiens
ttttgtccgccgttctcggtatgtagagggtggtgtccaagccgctgtacacgcgtcgccctccgtcggtaacacgtactccttcagttggccgttcaggaggaaggtgtcactccagt

SEQ ID NO: 7763 - DNA, 119 bp, homo sapiens
gccctccgtcggttaacacgtactccttcagttggccgttcaggaggaaggtgtcactccagttcacaccaccacagacaaattgctgtccaccgaaaatggggctcggtactgaggca

SEQ ID NO: 7764 - DNA, 119 bp, homo sapiens
attctttttgggtggtgaaactgatccactcggaagccgtactgcccacctcgttgtgtgccaccactccagcttgtatgtggtgtagggctggagacccccaaggctggctttctgcc

SEQ ID NO: 7765 - DNA, 119 bp, homo sapiens
cccacctcgttgtgtgccaccactctcagcttgtatgtggtgtagggctggagacccccaaggctggcttctgccccagccccgtgtactttgtttctatttggctgggagtacagggg

SEQ ID NO: 7766 - DNA, 119 bp, homo sapiens
gggctggagacccccaaggctggctttctgccccagccccgtgtactttgtttctatttggctgggagtcaggggagggctgagtcaggagggcaagccacgtggaattggagttcata

SEQ ID NO: 7767 - DNA, 119 bp, homo sapiens
ctgtgaatgacaccattggggaacatggggggactccaccggaaggaggccgtccttgaggccagcgtccgatttgtggagaggacagtcctgagggtggggcaggatgggttctcagt

SEQ ID NO: 7768 - DNA, 119 bp, homo sapiens
ggccagcgtcccgatttgtggagaggacagtcctgagggtggggcaggatgggttctcagttcagctgtggtcctttgctgcaacagttgaagcaggtgcaggcctctactccaataga

SEQ ID NO: 7769 - DNA, 119 bp, homo sapiens
gttcagctgtcggtcctttgctgcaacagttgaagcaggtgcaggcctctactccaatagagtagttaggaaggcttgaaggccatggagagtctgctgggtggccatgccttcggata

SEQ ID NO: 7770 - DNA, 119 bp, homo sapiens
cactgtctcagccccatgggcgctgctggagaacagcctgtagagactgacgatcccgttgggcttcccggggcactgatgttgaccactgcttgggtagaagagatcacatggaacgt

SEQ ID NO: 7771 - DNA, 119 bp, homo sapiens
actgacgatcccgttgggcttcccaggggcactgatgttgaccactgcttgggtagaagagatcacatgaacgtgggggctctgagaccttctggtggggctggcccggttctgcacca

SEQ ID NO: 7772 - DNA, 119 bp, homo sapiens
tgcttgggtagaagagatcacatggaacgtgggggctctgagaccttctggtggggctggcccggttctcaccatgtccagctactgggggcttttcctgcagaattcactgcccagac

SEQ ID NO: 7773 - DNA, 119 bp, homo sapiens
ctgatactcatactctgtgaaaggcaatagttcggaatctataaaagatgttgagcttccgttatagataggactggattggattttctaggctgagttgctatttgtcttctgtataa

SEQ ID NO: 7774 - DNA, 119 bp, homo sapiens
ttgagcttccgttatagattaggactggattggattttctaggctgagttgctatttgtcttctgtatattcgtaatacaaaacttttccatttggctgcagcggtcctgtccacaaaa

SEQ ID NO: 7775 - DNA, 119 bp, homo sapiens
gctatttgtcttctgtataattcgtaatacaaaacttttccatttggctgcagcggtcctgtccacaaagagaaacagttggctggaatcctcctggagccatttgtacctccagatgt

SEQ ID NO: 7776 - DNA, 119 bp, homo sapiens
cagcggtcctgtccacaaaagagaaacagttggctggaatcctcctggagccatttgtacctccagatgggagggggttgcatcaaaggtgcaatctcaggggtctgtatgaatgtcca

SEQ ID NO: 7777 - DNA, 119 bp, homo sapiens
ccatttgtacctccagatgtggagggggttgcatcaaaggtgcaatctcaggggtctgtatgaatgtccgtcacttgatgcacatcccagggtggtgcacgcttgaattcgtatttcat

SEQ ID NO: 7778 - DNA, 119 bp, homo sapiens
ctgtgaaatggcttcagctggtttactatatatgactgcataccaaaagaattatgagttgtgtttatggtatgattttagtttctctttcaaatagttcacggatgaagagggtataa

SEQ ID NO: 7779 - DNA, 119 bp, homo sapiens
gttgtgtttatgtgtatgattttagtttctctttcaaatagttcacggatgaagagggtataattgatgtatcaccatttgttctcactggagggtcccagttcactaagatctcctga

SEQ ID NO: 7780 - DNA, 119 bp, homo sapiens
gtataattgatgatatcaccatttgttctcactggagggtcccagttcactaagatctcctgaggaccctggcctgcaattttggaggttccatccctgagggtgctgaggggctggtt

SEQ ID NO: 7781 - DNA, 119 bp, homo sapiens
tcctgaggacccctggcctgcaattttggaggttccatccctgagggtgctgaggggctggttcgatcttgacaagaggactcaaaatacccccttggctgttgctggcagttactgtg

SEQ ID NO: 7782 - DNA, 119 bp, homo sapiens
ctggttcgatctttgacaagaggactcaaaatacccccttggctgttgctggcagttactgtgtagctaactccacacctggggtgagagtaaaatcacgatagcgtgtttccaagcct

SEQ ID NO: 7783 - DNA, 119 bp, homo sapiens
actgtgtagctatactccacacctggggtgagagtaaaatcacgatagcgtgtttccaagcctgtatatcaatggttccatccctcctaagttcataacttctgatctggccatttggg

SEQ ID NO: 7784 - DNA, 119 bp, homo sapiens
aagcctgtatatacaatggttccatccctcctaagttcataacttctgatctggccatttgggtttcttgaggtttccaggtgatttctattgattctgagcctgtgacttgcaatgtt

SEQ ID NO: 7785 - DNA, 119 bp, homo sapiens
tttgggtttcttggaggtttccaggtgatttctattgattctgagcctgtgacttgcaatgttggagagccatgttctctggcagggcctccattgtccaggcagattttgacacacta

SEQ ID NO: 7786 - DNA, 119 bp, homo sapiens
aatgttggagagtccatgttctctggcagggcctccattgtccaggcagattttgacacactagctgtgaacctccattcgtgcaggctacaagggagaagttatactgagagtaaggc

SEQ ID NO: 7787 - DNA, 119 bp, homo sapiens
acactagctgtgcaacctccattcgtgcaggctacaagggagaagttatactgagagtaaggctgcagggggaaaccagcaggcacaggccctggccagcaagggactctttattatca

SEQ ID NO: 7788 - DNA, 119 bp, homo sapiens
taaggctgcaggtgggaaaccagcaggcacaggccctggccagcaagggactctttattatcatatctactaaatatttagtaatctttccattttgcactgtgggcggtgaccaacat

SEQ ID NO: 7789 - DNA, 119 bp, homo sapiens
ttatcatatctaactaaatatttagtaatctttccattttgcactgtgggcggtgaccaacatacattctttgagtggcactgacggcccaaagatctggagggctgacttctgatgga

SEQ ID NO: 7790 - DNA, 119 bp, homo sapiens
caacatacattcatttgagtggcactgacggcccaaagatctggagggctgacttctgatggagcagccccagagttgtgatgctggtgggtttgctggtggagcatcctccactcgtg

SEQ ID NO: 7791 - DNA, 119 bp, homo sapiens
gatggagcagcctccagagttgtgatgctggtgggtttgctggtggagcatcctccactcgtgcaggctggagtgcatagctataggtggaaaaaggaagaagctcttcatcagtgtaa

SEQ ID NO: 7792 - DNA, 119 bp, homo sapiens
ctcgtgcaggcttggagtgcatagctataggtggaaaaaggaagaagctcttcatcagtgtaattgaaatcacaggatcaaagctaaaaggatagagcatttcattcctttgaagccta

SEQ ID NO: 7793 - DNA, 119 bp, homo sapiens
gtgtaattgaaagtcacaggatcaaagctaaaaggatagagcatttcattcctttgaagcctataggacggataataccattagactgttctggtgggatccaggaaatcagcagtttt

SEQ ID NO: 7794 - DNA, 119 bp, homo sapiens
ctggaggtgcttgcaatgtcctcaccacattccaagagctacaggtatgcccagctgaattccaagtgtgattttatattcacactgcgtccatggttgcaaacctgtgtcattataca

SEQ ID NO: 7795 - DNA, 119 bp, homo sapiens
gctgaattccaagtgtagattttatattcacactgcgtccatggttgcaaacctgtgtcattatacataatgtattcctttcagtgttatattctgtgaaaacaattttctcgtcggcc

SEQ ID NO: 7796 - DNA, 119 bp, homo sapiens
tgtgtcattatacataaatgtattcctttcagtgttatattctgtgaaaacaattttctcgtcggcctgattgtctgatttccccaagcttttccctcgaagcatctgcgaatcacttc

SEQ ID NO: 7797 - DNA, 119 bp, homo sapiens
ttttctcgtcggcctggattgtctgatttccccaagcttttccctcgaagcatctgcgaatcacttcatgcgaattatttttccatttgggttaacaggctcagaccagctcagctcaa

SEQ ID NO: 7798 - DNA, 119 bp, homo sapiens
ctgcgaatcacttcatagcgaattatttttccatttgggttaacaggctcagaccagctcagctcaacatggtggacttcacagagtggacagtaggagccagctgagagtctggaggg

SEQ ID NO: 7799 - DNA, 119 bp, homo sapiens
ccagctcagctcaacactggtggacttcacagagtggacagtaggagccagctgagagtctggaggggctcatctgtccacagaggctgaggcgccgagtgtgcacaacctgctctggt

SEQ ID NO: 7800 - DNA, 119 bp, homo sapiens
gagagtctggaggggcttcatctgtccacagaggctgaggcgccgagtgtgcacaacctgctctggtgcggcctccagggtcagtgtgtagagagtgaaaggatccaggcggcggaaga

SEQ ID NO: 7801 - DNA, 119 bp, homo sapiens
caacctgctctggtgcaggcctccagggtcagtgtgtagagagtgaaaggatccaggcggcggaagagaactgacgattcaaaccagagtactccaggaacccgtcactgaagatgttg

SEQ ID NO: 7802 - DNA, 119 bp, homo sapiens
cttaatcacaccattggttctcataggttctgaccactgtagtagcaatgcccggccattctctttctgtctactataaagtttctcagtccacttggggaagattctaaggtttgaat

SEQ ID NO: 7803 - DNA, 119 bp, homo sapiens
gccattctctttctgttctactataaagtttctcagtccacttggggaagattctaaggtttgaatcaggtccaagggcttaaaatttctcctgcatggtttgcagccacaacaccaat

SEQ ID NO: 7804 - DNA, 119 bp, homo sapiens
taaggtttgaatcagagtccaagggcttaaaatttctcctgcatggtttgcagccacaacaccaatgcgtatgttgtgaatggttctaacccgtacaggtgggcttgatggcttgttcc

SEQ ID NO: 7805 - DNA, 119 bp, homo sapiens
cttcactgtgaaagcatgcacggtagggctgttaaatgtaggatcgtcgggtctctcctggtagaccaccggtaatgggagataatgccattgggagattctggctttgtccaattcaa

SEQ ID NO: 7806 - DNA, 119 bp, homo sapiens
tggtagaccacacggtaatgggagataatgccattgggagattctggctttgtccaattcaacagaactaatgagcactcgtggcttgagcccaaggagctggaaaatcttgaggtgga

SEQ ID NO: 7807 - DNA, 119 bp, homo sapiens
tcaacagaactgaatgagcactcgtggcttgagcccaaggagctggaaaatcttgaggtggagcttccaagtttgtgttaatgaccacagactctccactgaacccttggagttacagg

SEQ ID NO: 7808 - DNA, 119 bp, homo sapiens
tggagcttccagagtttgtgttaatgaccacagactctccactgaacccttggagttacaggctctgaccgatattcgtagagtgtgaaaggcctcagggtgtctccttcatccataaa

SEQ ID NO: 7809 - DNA, 119 bp, homo sapiens
caggctctgacccgatattcgtagagtgtgaaaggcctcagggtgtctccttcatccataaattcaaggctccttctgaccagacaaataaaacagactcctcttcaatgccagcaggg

SEQ ID NO: 7810 - DNA, 119 bp, homo sapiens
ctgtaaataaagtagttgatgatgattccatttggtttttcaggtggcatccacttaatctctatgcaactgaccccagtgccttaagaacaggagaattaagatccattggggctgct

SEQ ID NO: 7811 - DNA, 119 bp, homo sapiens
gtggcatccacttaatctctatgcaagctgaccccagtgccttaagaacaggagaattaagatccattgggctgcttcaggtgttttgacaaacatcctactgctaactccacaacttc

SEQ ID NO: 7812 - DNA, 119 bp, homo sapiens
cattttgacatgcttgtatccttatctcatactgtgtgaatggagtcaaattttccagaagggtggattatgatgaccaacggagaaggccagaggtgttacacttccatcattgagta

SEQ ID NO: 7813 - DNA, 119 bp, homo sapiens
atggagtcaaattttccagaagggtggattgatgatgaccaacggagaaggccagaggtgttacacttcatcattgagtaagacattgtactccacaggaatttcggggatgaggatcc

SEQ ID NO: 7814 - DNA, 119 bp, homo sapiens
ctggtggtatccaagctacaaatatagaataaggcccaattactgtgatattatatggaggatagatttttctggtgttgacataggtgtttgaacaatgtaatcatcactagcactgc

SEQ ID NO: 7815 - DNA, 119 bp, homo sapiens
attactgtgatattatatggaggatagatttcttctggtgttgacataggtgtttgaacaatgtaatcacactagcactgctgccacctccagttttgacttctaacttgtaagtgtat

SEQ ID NO: 7816 - DNA, 119 bp, homo sapiens
ctgctattgggctccaggtttttatcagtgaaattctgctcctcactgccacccaggaaaagcaagtttcattacgactcaattgatattgagaaacgaggccattgggcttttctggc

SEQ ID NO: 7817 - DNA, 119 bp, homo sapiens
attctgctcctcactgccacccaggaaaagcaagtttccattacgactcaattgatattgagaaacgagccattgggcttttctggcagactccaatataattccactgttgtagaatt

SEQ ID NO: 7818 - DNA, 119 bp, homo sapiens
agtttccattacgactcaattgatattgagaaacgaggccattgggcttttctggcagactccaatatattccactgttgtagaattgatgataatgtgtcgaggtgtcacccaaactc

SEQ ID NO: 7819 - DNA, 119 bp, homo sapiens
ctgtgaccgtatgctgtctcctgtcagtggtgtcagtgtggatgagacctttcccaacctgcctgatctgtactctttaatgacgccgtttgatttctcagggacactccagctcagat

SEQ ID NO: 7820 - DNA, 119 bp, homo sapiens
ggatgagacctttcccaacctgcctgatctggtactctttaatgacgccgtttgatttctcagggacacccagctcagatgcagagccactgcacttagggctgtgatgcttggtggca

SEQ ID NO: 7821 - DNA, 119 bp, homo sapiens
taatgacgccgtttgatttctcagggacactccagctcagatgcagagccactgcacttagggctgtgagcttggtggcaggatgctctccggaactccttgggtagtagctgcaacta

SEQ ID NO: 7822 - DNA, 119 bp, homo sapiens
cttgctactggtggcacagccagcaaccgtgcaagctttcagctgatatgaatattcctgaaatggttgattccctctttatcagagaagctcagtgatgttccccgaaaacgttcaat

SEQ ID NO: 7823 - DNA, 119 bp, homo sapiens
ctttcagctgatatgaatattcctgaaatggttgaattccctctttatcagagaagctcagtgatgttcccgaaaacgttcaattccatttcgaagaaggatgtagtaaataataggac

SEQ ID NO: 7824 - DNA, 119 bp, homo sapiens
catttgattgtataggttttctccagtttaagacaattgtatcttcaagattgtctattttggtccacgagggggactcactccttgaggcacatcttcttttgttctggctctcacag

SEQ ID NO: 7825 - DNA, 119 bp, homo sapiens
tatcttcaagattgtctattttggtccacgtagggggactcactccttgaggcacatcttcttttgttcggctctcacagctttgctgagtcctcgcccatagctgttccaggcagaaa

SEQ ID NO: 7826 - DNA, 119 bp, homo sapiens
tcactccttgaggcacatcttcttttgttctggctctcacagctttgctgagtcctcgcccatagctgtccaggcagaaatcctgtactcatatgtcatgtagggcttgaggttcacat

SEQ ID NO: 7827 - DNA, 119 bp, homo sapiens
ctgtgtaagagtacgtgtttacactccctgtatgaatggtttcttcggcagatgaacacatttcttcaatgatgccttccctgtggaattgtgagaccctcttatcacagtgcaaatgt

SEQ ID NO: 7828 - DNA, 119 bp, homo sapiens
cttcggcagatgaacacatttcttcaattgatgccttccctgtggaattgtgagaccctcttatcacaggcaaatgtggctggtaaagttgaagtcacacctgccacaatgttctgtgg

SEQ ID NO: 7829 - DNA, 119 bp, homo sapiens
tggaattgtgagaccctcttatcacagtgcaaatgtggctggtaaagttgaagtcacacctgccacaatttctgtggcttccatagatgctgggcagaggatcctgcactctttggttt

SEQ ID NO: 7830 - DNA, 119 bp, homo sapiens
cttcatcatcattccagttgaaatcttgtcagagcaaacatatttcaaaggattatatccaactccattcagcatttctggctctttggaataagttcagtctcacagcattttactgg

SEQ ID NO: 7831 - DNA, 119 bp, homo sapiens
ttatatccaactccattacagcatttctggctctttggaataagttcagtctcacagcattttactggcccgggtcattctttttaatatgtgctttagactctccactggaagctgag

SEQ ID NO: 7832 - DNA, 119 bp, homo sapiens
cacagcattttactggcaccgggtcattctttttaatatgtgctttagactctccactggaagctgagcgcatatggtatctgacatattcacataatcctgcccacaacagaacatac

SEQ ID NO: 7833 - DNA, 119 bp, homo sapiens
ctggaaggcgattgtacaccactccttcttctccaccacaacactctaaatcgttgctcacaatctgtcgccacagcacttctggccatggccatcatgaagcctcccagcacagcaaa

SEQ ID NO: 7834 - DNA, 119 bp, homo sapiens
atcgttgctcacaatctgtctgccacagcacttctggccatggccatcatgaagcctcccagcacagcaatctggtttcctgaggtggagtacggcattctgccacagcaggaatcacc

SEQ ID NO: 7835 - DNA, 119 bp, homo sapiens
tgaagcctcccagcacagcaaatctggtttcctgaggtggagtacggcattctgccacagcaggaatcacaatgccaacagaaacccgattgtgctgttcatctggacagcatacttca

SEQ ID NO: 7836 - DNA, 119 bp, homo sapiens
ctggtagaattctagcgtaatacccagagcagcactgatgatttggttgtgcctcctgtattcggccacacaacaaactccagtagaattcagaacaaacgggatatacttttcttcac

SEQ ID NO: 7837 - DNA, 119 bp, homo sapiens
tgcctcctgtattcggccaccacaacaaactccagtagaattcagaacaaacgggatatacttttcttccaacagcgatgtccaggcttggggttatagagcactccgttacaacaaac

SEQ ID NO: 7838 - DNA, 119 bp, homo sapiens
cttagcttcagaagaatagcaaatgtgtccacagatagattcaggtttttgacacctcactgccttgcaagctcatcactctgatcctgcactaacttttgagttttagcgcatggata

SEQ ID NO: 7839 - DNA, 119 bp, homo sapiens
ttcaggtttttgacacctcactgccttgcagagctcatcactctgatcctgcactaacttttgagttttgcgcatggataccatgttttccataggagatcatatccaagaatgatgcc

SEQ ID NO: 7840 - DNA, 119 bp, homo sapiens
actctgatcctgcactaacttttgagttttagcgcatggataccatgttttccataggagatcatatccagaatgatgccatttggcttccgtggagacacccaatcaatttgaagaga

SEQ ID NO: 7841 - DNA, 119 bp, homo sapiens
ctgaatgtcatagatagtgaagggagacaggtctctcagaataaacgacccaggcacattcattccagtttgtagagcttattatttacatagatagaatactcagtgacaacaccatt

SEQ ID NO: 7842 - DNA, 119 bp, homo sapiens
taaacgacccaggcacattcattccagtcttgtagagcttattatttacatagatagaatactcagtgaaacaccatttgggtttgaaggagatgtccagatgacacgtacagctgtac

SEQ ID NO: 7843 - DNA, 119 bp, homo sapiens
ttatttacatagatagaatactcagtgacaacaccatttgggtttgaaggagatgtccagatgacacgtcagctgtactgttgatgatgacaacctctggaggaagcatgccctgaggc

SEQ ID NO: 7844 - DNA, 119 bp, homo sapiens
ccccatcgcaagtggttgcatgaagtcctgcactgttgatgctgtggactccattgaagacagagataagatccaatactctgtgtttggctttaggtggccaatgacatgagagttta

SEQ ID NO: 7845 - DNA, 119 bp, homo sapiens
ggactccattgaagacagagataaagatccaatactctgtgtttggctttaggtggccaatgacatgaggtttacatctggcaagatttttagagagtcgtttgaggtagcagaactcc

SEQ ID NO: 7846 - DNA, 119 bp, homo sapiens
gctttaggtggccaatgacatgagagtttacatctggcaagatttttagagagtcgtttgaggtagcagactccaaaaaagtgtgtaatattcaacttcaccttgtaggtcttgaacag

SEQ ID NO: 7847 - DNA, 119 bp, homo sapiens
ttggtttagcccacctcacgtcgatggctgtgtggttaaggacactcgcagtgagattggctcctctcttggaagaccagctaacgttgtcacagtcacttctcggctcggtgtaaaac

SEQ ID NO: 7848 - DNA, 119 bp, homo sapiens
ctcgcagtgagattggctcctctctctggaagaccagctaacgttgtcacagtcacttctcggctcggttaaaacccacactgttgtgtacgaagagcatatattcataggttgtaaac

SEQ ID NO: 7849 - DNA, 119 bp, homo sapiens
ctgctaagacccttatcttcataaagccactgagttcctgaataaatattgtgccaccgatttaaatctctgggggatttgatgcaagtggctgctggattttacgtctcagaagctca

SEQ ID NO: 7850 - DNA, 119 bp, homo sapiens
ctaagacccttatcttcataaagccactgagttcctgaataaatattgtgccaccgatttaaatcttctggggatttgatgcaagtggctgctggattttacgtctcagaagctcatat

SEQ ID NO: 7851 - DNA, 119 bp, homo sapiens
ctcaaattaggtccatttggcttggatggtggttgccaagaaatcacaacatatgattcacttagtggatcacagacaatgggccaacattctgaggtacggtggggtgagtggtaaca

SEQ ID NO: 7852 - DNA, 119 bp, homo sapiens
tgattcacttagtggaatcacagacaatgggccaacattctgaggtacggtggggtgagtggtaacatagtaggtaaactctctgtgcaccctccaaggtacccattaccccctgagca

SEQ ID NO: 7853 - DNA, 119 bp, homo sapiens
ggtgagtggtaacataggtaggtaaactctctgtgcaccctccaaggtacccattaccccctgagcaagaacaatggtgacagaataattagtgaaaggaatcagatgagtaacttttt

SEQ ID NO: 7854 - DNA, 119 bp, homo sapiens
ttaccccctgagcaagcaacaatggtgacagaataattagtgaaaggaatcagatgagtaactttttgattaacactgcggaagtcacattggttaaagtgatgtgagggtcaggcatg

SEQ ID NO: 7855 - DNA, 119 bp, homo sapiens
atgagtaactttttgacttaacactgcggaagtcacattggttaaagtgatgtgagggtcaggcatgtgatctcatagctaagtatgtctccgttctggatgagtgggggtttccaagt

SEQ ID NO: 7856 - DNA, 119 bp, homo sapiens
ctggactgcatcgggttccagcactgtcaccacaggtggctgcaccccagcaggtcgtgagggtcttgtgtaacttctacccaagcactgctgtttgtgcctccatgaagagtgctcat

SEQ ID NO: 7857 - DNA, 119 bp, homo sapiens
gtgagggtcttgtggtaacttctacccaagcactgctgtttgtgcctccatgaagagtgctcatcagtaccgatattcatattttgtccatgggctaagagcagaagtcttgtcaataa

SEQ ID NO: 7858 - DNA, 119 bp, homo sapiens
gtgctcatcagtacccgatattcatattttgtccatgggctaagagcagaagtcttgtcaataaacctctggaatgactcctcgggagagtcaccagggtagtaacttcttcctttcct

SEQ ID NO: 7859 - DNA, 119 bp, homo sapiens
gtcaataaacctcatggaatgactcctcgggagagtcaccagggtagtaacttcttcctttcctttgaccttctctcaattgtgaaattctccaccaagccattggggtgggtaggggg

SEQ ID NO: 7860 - DNA, 119 bp, homo sapiens
cctttcctttgactcttctctcaattgtgaaattctccaccaagccattggggtgggtagggggttgccagatataatcacagatgttggagtatcagagaacagctctggacttggga

SEQ ID NO: 7861 - DNA, 119 bp, homo sapiens
gtagggggttgccaagatataatcacagatgttggagtatcagagaacagctctggacttgggatccctccggtgcccctgggagtgtccatacagtctgggactctggtgaaagggaa

SEQ ID NO: 7862 - DNA, 119 bp, homo sapiens
acttgggatcccttccggtgcccctgggagtgtccatacagtctgggactctggtgaaagggaacatcctttgaagtgcaggcttctacctgaaacttataggcagtgtatgggtgtaa

SEQ ID NO: 7863 - DNA, 119 bp, homo sapiens
aaagggaacatccttttgaagtgcaggcttctacctgaaacttataggcagtgtatgggtgtaaatgcacactgtgcaattagtgacatttccaggagttctcaagtatagacggccat

SEQ ID NO: 7864 - DNA, 119 bp, homo sapiens
gggtgtaaatgcatcactgtgcaattagtgacatttccaggagttctcaagtatagacggccatgtagaaaatgttataatgggtaataaccccattggattttctaggatgctgccag

SEQ ID NO: 7865 - DNA, 119 bp, homo sapiens
acggccatgtagataaatgttataatgggtaataaccccattggattttctaggatgctgccaggtgacaacatcattcttgacttcacatccagaagaatcggaggaactacaggtcc

SEQ ID NO: 7866 - DNA, 119 bp, homo sapiens
tgtcctctgcggtcatgaatggaatccaagaactatgtgcactgccaaatccattggaggcaaccaaccaaacatatactctgtgtacggttggagatcactcacttcatagcttaacg

SEQ ID NO: 7867 - DNA, 119 bp, homo sapiens
atccaagaactatgtgcactgccaaatccattggaggcaaccaaccgaaacatatactctgtgtacggtggagatcactcacttcatagcttaacgatgcagaaggattggaaaataac

SEQ ID NO: 7868 - DNA, 119 bp, homo sapiens
tctagaaatccatgggtggagtcgccagacctcatctggagttggtatctgggagagccaggagcgttatacgagctggtgtagaccagacaacctgaagactggttggagtggcagat

SEQ ID NO: 7869 - DNA, 119 bp, homo sapiens
tcatctggagttggtatctgggagagccaggagcgttattacgagctggtgtagaccagacaacctgaaactggttggagtggcagatgaaagcctgggaggcagcacgccatctggag

SEQ ID NO: 7870 - DNA, 119 bp, homo sapiens
ctcctggaggcattgcaattgttataggatcagttatcaagctgccttggctatttgaaatattcactttacagtatagttggtaaaaggaaccagcccatcgatgagcacccaaaggt

SEQ ID NO: 7871 - DNA, 119 bp, homo sapiens
tattcacttgtacagtatagttggtaaaaggaaccagcccatcgatgagcacccaaaggtttgtctctttccgctgtacatgacttttgtgacattcagaagggtgtagttattaccta

SEQ ID NO: 7872 - DNA, 119 bp, homo sapiens
ctgggtctacatagaatatcccagtgaaaaggactgagtgtgttaagagtccattagggcgaaaaggtgttcccacctcacgtgggctttccgggatccctgtgttttgacaaacacat

SEQ ID NO: 7873 - DNA, 119 bp, homo sapiens
taagagtccattagggcgaaaaggtgcttcccacctcacgtgggctttccgggatccctgtgttttgacaacacatttactgttccttcaggaggagcttctagagttcgattttccac

SEQ ID NO: 7874 - DNA, 119 bp, homo sapiens
cagtgggcccagagcacaacctttggccgtgcatgcttggactctgaaggaatgtaaactccaaggagcaatccgtaagcacgatagctgagttctgaggaattgtggattaatatacc

SEQ ID NO: 7875 - DNA, 119 bp, homo sapiens
atgcttggactctgaaggaatgtaaactccaaggagcaaatccgtaagcacgatagctgagttctgaggattgtggattaatataccatctagatataatccataactcgtgataacac

SEQ ID NO: 7876 - DNA, 119 bp, homo sapiens
cattcggatattcaggctcagtccaggagacattaaaggagtcaggtgaatatgagtgggctttgggggtggcacgccttcgggtatgtcctcgtcagttagggcctcactggcctcac

SEQ ID NO: 7877 - DNA, 119 bp, homo sapiens
gacattaaaggagtcaggtgaatatgagtgggctttgggggctggcacgccttcgggtatgtcctcgtcgttagggcctcactggcctcactcactgtgcacccaccacctgtgcaagc

SEQ ID NO: 7878 - DNA, 119 bp, homo sapiens
tcccagcttgatgagatatttattaccaggtaaaacgtattgtagcatatgatcctggaaaagttctgtctgttatagatgacactccaaattgtaaaatcatgtgtatggtttgacat

SEQ ID NO: 7879 - DNA, 119 bp, homo sapiens
tcctggaaaagttctgtactgttatagatgacactccaaattgtaaaatcatgtgtatggtttgacataataatacatagcgttccagaatcccacttatttttcttggttgtttccac

SEQ ID NO: 7880 - DNA, 119 bp, homo sapiens
tgtatgtgtatagttctagaatccaggacagtcagaactggggaatccacgtgttctggtggcagctgtctgtgtacagtaggacccaggaactgtttgtacagcccacatgtgtgcat

SEQ ID NO: 7881 - DNA, 119 bp, homo sapiens
gggaatccacgtgttctggtggcagctgtgctgtgtacagtaggacccaggaactgtttgtacagcccaatgtgtgcatgcacttagtagaaactggtggggtgtaaatactgctaaat

SEQ ID NO: 7882 - DNA, 119 bp, homo sapiens
ctgtgactatgtagttctcctcactgcctgaatagatcagcctcccatccatgtataaacagtactgagtataataccatttgcctttttgggtgggttccaggagagcagcaaagaac

SEQ ID NO: 7883 - DNA, 119 bp, homo sapiens
tcccatccatgtataaacagtactgagttataataccatttgcctttttgggtgggttccaggagagcacaaagaactgggaagggatttggctactggtggctgaacctcttgtgggg

SEQ ID NO: 7884 - DNA, 119 bp, homo sapiens
ctgtgaggttgcttgtattgacaaattcagcactggcagagggcatgcggggtggacgggtgctgtcctactataggctttcagaatgtacttctcaattacacctctgacaacaggtt

SEQ ID NO: 7885 - DNA, 119 bp, homo sapiens
cagagggcatgcggggtggacgggtgctgtcctcactataggctttcagaatgtacttctcaattacactctgacaacaggttcatcccaggtcacctcaatgctgtatccatttaagc

SEQ ID NO: 7886 - DNA, 119 bp, homo sapiens
tataggctttcagaatgtacttctcaattacacctctgacaacaggttcatcccaggtcacctcaatgcgtatccatttaagctgcggactcttgagggagttggcacactttgtggag

SEQ ID NO: 7887 - DNA, 119 bp, homo sapiens
ctgtaaaaggctggagaccaccctcgtaaacactctgctcttttccctggtaaaccaggatggagtcattcccctgcagttaacagcactgtcagttgataggcatccatccagattga

SEQ ID NO: 7888 - DNA, 119 bp, homo sapiens
ttccctggtaaaccaggatggagtcatttcccctgcagttaacagcactgtcagttgataggcatccatcagattgactctgacagcaccgctggacacagatgccaagttaacgacag

SEQ ID NO: 7889 - DNA, 119 bp, homo sapiens
cagcactgtcagttgataggcatccatccagattgactctgacagcaccgctggacacagatgccaagtaacgacagcaccccgtgtaaatttaacatccttcatgcaaccaccgaaac

SEQ ID NO: 7890 - DNA, 119 bp, homo sapiens
cttgttccaaacacaaatgttgataagagttcagcagttcctgtgggattcctcccacataaactggtgattcaccaccagtggctggtctccggactccgatgcatgcttcatcagtc

SEQ ID NO: 7891 - DNA, 119 bp, homo sapiens
ctcccacataaactggtgaattcaccaccagtggctggtctccggactccgatgcatgcttcatcagtcattcacacttgctgatatgaaagagccttcctttttaataatgactttat

SEQ ID NO: 7892 - DNA, 119 bp, homo sapiens
atgcatgcttcatcagtccattcacacttgctgatatgaaagagccttcctttttaataatgactttatccactttccattacaataggatagccccagcaatagatccacttgtgtaa

SEQ ID NO: 7893 - DNA, 119 bp, homo sapiens
ttttaataatgactttattccactttccattacaataggatagccccagcaatagatccacttgtgtaaggcaagactggtatttaaccggaaggtcaatattccacttttcagctcca

SEQ ID NO: 7894 - DNA, 119 bp, homo sapiens
agcaagaaaatcaggtccatctttgttataaacgaaaagaagcaatccatttaattggtcagttctgaattaaaggaaatctcaaagttcattccaccatgaaacatatatggatgaag

SEQ ID NO: 7895 - DNA, 119 bp, homo sapiens
caggtccatctttgttataaacgaaaagaagcaatccatttaattggtcagttctgaacttaaaggaaactcaaagttcattccaccatgaaacatatatggatgaagttccaggaacc

SEQ ID NO: 7896 - DNA, 119 bp, homo sapiens
ctgctcctaggaactgagctccctcatttaatgaagcgggacatccctcccagctgttatacacgttgattgttcttcagaactctgccaatccagaggttcccaaatagctgacggat

SEQ ID NO: 7897 - DNA, 119 bp, homo sapiens
acacgttgatttgttcttcagaactctgccaatccagaggttcccaaatagctgacggattgtaattctcataaaatgtacatccttgagacagcccacaaaacctttttggattatct

SEQ ID NO: 7898 - DNA, 119 bp, homo sapiens
ctgtatatatcccatccagagtgatttggccaaaagcctgatgcctaatagcaattatttcatgccatttccatcactatattgtttgccatgatcattagttgtagttacttccactg

SEQ ID NO: 7899 - DNA, 119 bp, homo sapiens
tatcccatccagagtgatttggccaaaagcctgatgcctaatagcaattatttcatgccattttccatcctatattgtttgccatgatcattagttgtagttacttccactggtgaccc

SEQ ID NO: 7900 - DNA, 119 bp, homo sapiens
ctgaggatcaaaaagaaaataaagacgtcccttcttcaactgaagtgcaaaatactcttcctgattgccggtgatgctgcaaagacaatcaaaccttcaggcacttttgttcgaaagct

SEQ ID NO: 7901 - DNA, 119 bp, homo sapiens
aaagaaaataaagacgtcccttcttcaactgaagtgcaaaatactcttcctgattgccaggtgatgctgaaagacaatcaaaccttcaggcacttttgttcgaaagctggccttaatgc

SEQ ID NO: 7902 - DNA, 119 bp, homo sapiens
ttgccattttaagaatataaagcagaagttgagcatttttagctcaatggttcaatttctaatactctgaatgattttgatgtactgagagagtagttaatcatgcattaatctcaata

SEQ ID NO: 7903 - DNA, 119 bp, homo sapiens
ttctaatactctgcaatgattttgatgtactgagagagtagttaatcatgcattaatctcaatatatctagttagaatataatcatgattcattaccaaggtgcatcagcagccagtct

SEQ ID NO: 7904 - DNA, 119 bp, homo sapiens
tctcaatatatctcagttagaatataatcatgattcattaccaaggtgcatcagcagccagtctcaatgaaagcaaactatttactattttaagtaaaaataaaacaatacaaattttt

SEQ ID NO: 7905 - DNA, 119 bp, homo sapiens
gccagtctcaatgaaaagcaaactatttactattttaagtaaaaataaaacaatacaaatttttatagccgaattccatttcattgtcttcacatatgcaatattttaaagactagcta

SEQ ID NO: 7906 - DNA, 119 bp, homo sapiens
aaatttttatagctcgaattccatttcattgtcttcacatatgcaatattttaaagactagctatttgcccaaaatgactttctcatggatgattaaatgaacatctttatgagtttac

SEQ ID NO: 7907 - DNA, 119 bp, homo sapiens
ggaaaaatggtgtaccataagtagagtttttttacagctatattgaaatcatgctattagaagctgtaatcacagaggtcatgggacttccaaaatattgcggtactagtaaggccagg

SEQ ID NO: 7908 - DNA, 119 bp, homo sapiens
tcatgctattagaagctgtaagtcacagaggtcatgggacttccaaaatattgcggtactagtaaggccggaggagggtaaggccagtgaggcaggattgtgctggtacagagttcaat

SEQ ID NO: 7909 - DNA, 119 bp, homo sapiens
ttagagaagttatcttttccctgggattagttttccccacaatgttcttcatagaacatgagatattaattgtcacagtgaaaaaaagaagaaggaaacagcaagagaaagaaaaagaa

SEQ ID NO: 7910 - DNA, 119 bp, homo sapiens
tgagatattaagttgtcacagtgaaaaaaagaagaaggaaacagcaagagaaagaaaaagaaaacattaatcaaatatctgttaggcatgattagctaagcaaagttgaatagctttct

SEQ ID NO: 7911 - DNA, 119 bp, homo sapiens
agaaaacattacatcaaatatctgttaggcatgattagctaagcaaagttgaatagctttcttacaatgtttttggagtttcagtaacggggtgcatactgagaatctccaatagcatg

SEQ ID NO: 7912 - DNA, 119 bp, homo sapiens
ttcttacaatgctttttggagtttcagtaacggggtgcatactgagaatctccaatagcatgagggcatttgcaaactcatttgctcagagaacacagtgaataatatttcaagaaaca

SEQ ID NO: 7913 - DNA, 119 bp, homo sapiens
catgagggcattttgcaaactcatttgctcagagaacacagtgaataatatttcaagaaacatgtcctgcacatacttcacaaaaagacaaatacaaagcacatactttgatccaataa

SEQ ID NO: 7914 - DNA, 119 bp, homo sapiens
aacatgtcctggcacatacttcacaaaaagacaaatacaaagcacatactttgatccaataaggctgctcttcatcttcatcttttatttttcctttccttcacttacctgactttttt

SEQ ID NO: 7915 - DNA, 119 bp, homo sapiens
ataaggctgcttcttcatcttcatcttttatttttcctttccttcacttacctgacttttttccccagattctaaaaagatggacatgctgaaacaatcaggcaaaagctatcaaaggg

SEQ ID NO: 7916 - DNA, 119 bp, homo sapiens
ttttccccagaattctaaaaagatggacatgctgaaacaatcaggcaaaagctatcaaagggctgaattgtatttctctaagtaggtataataaaaattcattgtaaagggatatgaaa

SEQ ID NO: 7917 - DNA, 119 bp, homo sapiens
agggctgaattagtatttctctaagtaggtataataaaaattcattgtaaagggatatgaaaatatagaaacattttggagcttcgtgtctcctaaataaagcaatgtcaaacacactt

SEQ ID NO: 7918 - DNA, 119 bp, homo sapiens
gaaaatatagaaaacattttggagcttcgtgtctcctaaataaagcaatgtcaaacacacttaccagtgagtctgtattgactgggtgagtggagctgggaaatttacaatacccattt

SEQ ID NO: 7919 - DNA, 119 bp, homo sapiens
acttaccagtgaagtctgtattgactgggtgagtggagctgggaaatttacaatacccatttcctatgaacggattcctttcatcatcgtggtcatcagagctggtagagatgactctc

SEQ ID NO: 7920 - DNA, 119 bp, homo sapiens
atttcctatgaaacggattcctttcatcatcgtggtcatcagagctggtagagatgactctctcctttcagctgatatataggagagggtccattcagttcttcaggtggaaaccacct

SEQ ID NO: 7921 - DNA, 119 bp, homo sapiens
tctctcctttccagctgatatataggagagggtccattcagttcttcaggtggaaaccacctaagatggttgttgtgctgttgattcctttaaccagaggtggcctcagttgtgctggt

SEQ ID NO: 7922 - DNA, 119 bp, homo sapiens
ctgctgctaaagtttgtcctgctcccgaagcactggtcacacaaccaactgaattgcagagagtaatagaaactcatatatcctataaggtttcagtccttctacagtgtaagatagtt

SEQ ID NO: 7923 - DNA, 119 bp, homo sapiens
cgaagcactggtcacacaaccaactgaattgcagagagtaatagtaaactcatatatcctataaggtttagtccttctacagtgtaagatagttcttgggatttagcagtgtgcaacag

SEQ ID NO: 7924 - DNA, 119 bp, homo sapiens
ctgtgaaaacgccatgggaatagactgttgaggtgattgttcagaaagcatattgatgtcataccccacacttttcctcttgtaacattatctgctggcttctcccaggagatattgag

SEQ ID NO: 7925 - DNA, 119 bp, homo sapiens
tattgatgtcataccccacaacttttcctcttgtaacattatctgctggcttctcccaggagatattgaagagtacgaagagaggggaaagactgaaggagggatcatgaatacaggtg

SEQ ID NO: 7926 - DNA, 119 bp, homo sapiens
ctgattctcccgttctttctgagacccaggcagaagacacacttccagccatattcacagctaagactcgaactcatacttggtgtatggctccaagccagtgatggttgtcattgttt

SEQ ID NO: 7927 - DNA, 119 bp, homo sapiens
atattcacagctaagactctgaactcatacttggtgtatggctccaagccagtgatggttgtcattgttgaggaggttttaatgcattttcattggccgattctacaaatgaatgagga

SEQ ID NO: 7928 - DNA, 119 bp, homo sapiens
agtgatggttgtcattgtttgaggaggttttaatgcattttcattggccgattctacaaatgaatgaggctgagccaaccactgctctgaaaaactcgactttcctcagatgtggtttc

SEQ ID NO: 7929 - DNA, 119 bp, homo sapiens
attctacaaatgaatgaggactgagccaaccactgctctgaaaaactcgactttcctcagatgtggttttttagtagatctcagtcttctcatgtatagttcatatcttataattattc

SEQ ID NO: 7930 - DNA, 119 bp, homo sapiens
catttagttccgctggtggagaccattctacatgaagttctgtagaactgattttctgcatcttaggtgacttagtctttggggaggggcctgggctgtggtcactgtaatgggcaagc

SEQ ID NO: 7931 - DNA, 119 bp, homo sapiens
ttctgcatcttaggtggacttagtctttggggaggggcctgggctgtggtcactgtaatgggcaagctggtaaacagcccccgctagtacacgcctgtacagaaaaatcgtacttggca

SEQ ID NO: 7932 - DNA, 119 bp, homo sapiens
tgtaatgggcaagctgtgtaaacagcccccgctagtacacgcctgtacagaaaaatcgtacttggcaaaggaaccagattccagatggtagctgaggtttcatgaccttcgtaggaaac

SEQ ID NO: 7933 - DNA, 119 bp, homo sapiens
aatcgtacttggcaaatggaaccagattccagatggtagctgaggtttcatgaccttcgtaggaaacactggctgaccaccagccaaaggggcacaggacaaaatatatttctctatgg

SEQ ID NO: 7934 - DNA, 119 bp, homo sapiens
ccttcgtaggaaacacatggctgaccaccagccaaaggggcacaggacaaaatatatttctctatgggacagattgatttgagagtgttgtccaggtaagtgtcacagagtctgagcca

SEQ ID NO: 7935 - DNA, 119 bp, homo sapiens
atatttctctatgggaccagattgatttgagagtgttgtccaggtaagtgtcacagagtctgagccaatggaatgatataacttaaagtcaagtttccctctgggacccctggttttgt

SEQ ID NO: 7936 - DNA, 119 bp, homo sapiens
cagagtctgagccaataggaatgatataacttaaagtcaagtttccctctgggacccctggttttgtctgtaagtgacagctacactccttgttgaaccatgcacattggtggtctcaa

SEQ ID NO: 7937 - DNA, 119 bp, homo sapiens
acccctggttttgtcttgtaagtgacagctacactccttgttgaaccatgcacattggtggtctcaatgaataggaatatttggtatatggtaacaggtctgtgtctaagaagtattga

SEQ ID NO: 7938 - DNA, 119 bp, homo sapiens
tgtatgggtattgatcctctgttgtgtagatttcaaaaccatccctgagtaaactgtaagtaagccagtggcatttggagaatcaggtggactccaggagagattgatagcagaagaac

SEQ ID NO: 7939 - DNA, 119 bp, homo sapiens
catccctgagtaaactgtaagtaagccagtgggcatttggagaatcaggtggactccaggagagattgaagcagaagaactttgaacttgtcctctgggcggaggttgctggaatggag

SEQ ID NO: 7940 - DNA, 119 bp, homo sapiens
ttttgctgcaacccaatagattgttgacatccaagtggcttgcactgggaacacaagcatcacactttggccagtgacaaattgtttacagaaacactggcctgtgaccaagtgacagg

SEQ ID NO: 7941 - DNA, 119 bp, homo sapiens
ctgggaacacaagcatcacactttgagccagtgacaaattgtttacagaaacactggcctgtgaccaaggacaggtttcattcaaggctcctgagagatgacaattacaaggctgacat

SEQ ID NO: 7942 - DNA, 119 bp, homo sapiens
cttccagtctgaggatcaaatccaaagtaatggtctttgcattggtcacaacgttgcccagcaatggaacatcttggcaaacacactgaccagtcaggctattacagatgtgattaact

SEQ ID NO: 7943 - DNA, 119 bp, homo sapiens
gtctttgcattggtcacaacgttgcccagcaatggaagcatcttggcaaacacactgaccagtcaggctttacagatgtgattaactgcaccagttgtatggcatgagcatggcaggca

SEQ ID NO: 7944 - DNA, 119 bp, homo sapiens
tggaagcatcttggcaaacacactgaccagtcaggctattacagatgtgattaactgcaccagttgtatgcatgagcatggcaggcagccagtggcattgcctggagaaatataaaaac

SEQ ID NO: 7945 - DNA, 119 bp, homo sapiens
ctggttgacactgattacaccttcttccttgacgattaggcacacacaggcactggccactgattgggtacaaatggtcccaggtaatgtccccaaggaatcacactcacacatctggc

SEQ ID NO: 7946 - DNA, 119 bp, homo sapiens
actgattgggtcacaaatggtcccaggtaatgtccccaaggaatcacactcacacatctggcagtgttgaaattgtcaatggtcaaattgtacctgtgaggctcacactgattacagcg

SEQ ID NO: 7947 - DNA, 119 bp, homo sapiens
tggcagtgttgaaaattgtcaatggtcaaattgtacctgtgaggctcacactgattacagcgaagacctttacccctaatttgcaaggacattgtcctgttgatttgttacacagcaga

SEQ ID NO: 7948 - DNA, 119 bp, homo sapiens
agcgaagacctgttacccctaatttgcaaggacattgtcctgttgatttgttacacagcagagagccattattgtcccagtcttatcacagttgcaaggcagacagaggaaagaattat

SEQ ID NO: 7949 - DNA, 119 bp, homo sapiens
cagagagccatttattgtcccagtcttatcacagttgcaaggcagacagaggaaagaattattttgccgaggtagaagtttccctccaaacatttattgcactgtctcccttcaacatt

SEQ ID NO: 7950 - DNA, 119 bp, homo sapiens
ttattttgccgtaggtagaagtttccctccaaacatttattgcactgtctcccttcaacattgggcttgagatgcactgccctgtcttagcattacagacagtcccagggagggatcca

SEQ ID NO: 7951 - DNA, 119 bp, homo sapiens
cattgggcttgcagatgcactgccctgtcttagcattacagacagtcccagggagggatccagctgtgtacagtcacaggccttacaattggtgacatctaacccataaaagttttctc

SEQ ID NO: 7952 - DNA, 119 bp, homo sapiens
tccagctgtgtcacagtcacaggccttacaattggtgacatctaacccataaaagttttctctgcaggttcacactgaagtcctttggcttcttttttgcactcacactgcccagagtg

SEQ ID NO: 7953 - DNA, 119 bp, homo sapiens
tctctgcaggtgtcacactgaagtcctttggcttcttttttgcactcacactgcccagagtgaggattgagaatttgttcactgagccatggaggttacactggcagggctcacatcca

SEQ ID NO: 7954 - DNA, 119 bp, homo sapiens
agtgaggattgcagaatttgttcactgagccatggaggttacactggcagggctcacatccaacatcataaagcttcggagaaatttaaatccaaaattgcaatgatcacacctaagcc

SEQ ID NO: 7955 - DNA, 119 bp, homo sapiens
caataacgtttgctttgcacttgcactggcctgaattttggtgacaggtaatatctccatccactgtccagaggtattgcagttacagggactgcagccatcaggatccaactcttgta

SEQ ID NO: 7956 - DNA, 119 bp, homo sapiens
tggtgacaggtaatatctccatccactgtcccagaggtattgcagttacagggactgcagccatcaggaccaactcttgtagattgtagaatccattctggcactgattgcactgcctg

SEQ ID NO: 7957 - DNA, 119 bp, homo sapiens
attgcagttacagggactgcagccatcaggatccaactcttgtagattgtagaatccattctggcactgttgcactgcctgccagacacgtgtctcttacaattacactgtcctccaat

SEQ ID NO: 7958 - DNA, 119 bp, homo sapiens
ctgatcacaaagaatgctaccatttctagtgccaactgtatcacagtcacagggtttgcaaacatctatgccgaaggatctgcaccaacttgtcggaaaaagtaatccttgcacagctc

SEQ ID NO: 7959 - DNA, 119 bp, homo sapiens
gaatgctaccatttctagtgccaactgtatcacagtcacagggtttgcaaacatctatggccgaaggattgcaccaacttgtcggaaaaagtaatccttgcacagctcacagttccttc

SEQ ID NO: 7960 - DNA, 119 bp, homo sapiens
ctgtagtgttatgctcacaatcatcacaaactcctcctccccctctgaagtgctcaaaaggaaatgggttacagagatgttgtaatggcagcttttggaatggctgttgcattgacaag

SEQ ID NO: 7961 - DNA, 119 bp, homo sapiens
ccccctctgaagtgctcaaaaggaaatgggtctacagagatgttgtaatggcagcttttggaatggctgtgcattgacaaggtttacaattgaaagcgtaaacttgatcaccttggcgg

SEQ ID NO: 7962 - DNA, 119 bp, homo sapiens
gatgttgtaatggcagcttttggaatggctgttgcattgacaaggtttacaattgaaagcgtaaacttgtcaccttggcggaaaggcttgtcattataaagaggcaagcagcgatcaca

SEQ ID NO: 7963 - DNA, 119 bp, homo sapiens
ctcccactaatggtgatttcgtccactgcataatatctgtgtctgaggttaacagcagtctcagttgtaagtactgcccatgaaaatgaaaccttatttgcgtggcttttacgaactct

SEQ ID NO: 7964 - DNA, 119 bp, homo sapiens
acagcagtctcagttgtatagtactgcccatgaaaatgaaaccttatttgcgtggcttttacgaactctgaagagatggggtattatagaagttattgtatccaggacgataatttggt

SEQ ID NO: 7965 - DNA, 119 bp, homo sapiens
gtggcttttacgaactcttgaagagatggggtattatagaagttattgtatccaggacgataatttggtcaggtgtcaggatgctaaatgtgacattgccacgggaatatggagtaaaa

SEQ ID NO: 7966 - DNA, 119 bp, homo sapiens
ttggaaagctgaagacagttgacagaatcaggtttttccaaatctccattgtttttcattccaaaagcacacaattcctggcaaaatattgccagtcctcccaatctaaactattttcc

SEQ ID NO: 7967 - DNA, 119 bp, homo sapiens
tttttccaaatctccattgtttttcattccaaaagcaccacaattcctggcaaaatattgccagtcctccaatctaaactattttccttcttcctttgaatccttatttccgttggttg

SEQ ID NO: 7968 - DNA, 119 bp, homo sapiens
aagcaccacaattcctggcaaaatattgccagtcctcccaatctaaactattttccttcttcctttgaaccttatttccgttggttgtggactaaagaactgaatgataatataaaaca

SEQ ID NO: 7969 - DNA, 119 bp, homo sapiens
ctgatactgtccattttccaaatcaactgaaatagtcactccttgattaagctgtgtaatgtttgtaaaacatttgaaacccatgaagtaccaacatcattatcattgacaaaagagag

SEQ ID NO: 7970 - DNA, 119 bp, homo sapiens
atgtttgtaaacacatttgaaacccatgaagtaccaacatcattatcattgacaaaagagagaggatggcttcaggattcaaccgtgacactctattatcagctgtgtctcctgcatca

SEQ ID NO: 7971 - DNA, 119 bp, homo sapiens
agagaggatgggcttcaggattcaaccgtgacactctattatcagctgtgtctcctgcatcattaggaagcagtaccgctgtgccaaagggtggacccgcgggtggctgccagggcaac

SEQ ID NO: 7972 - DNA, 119 bp, homo sapiens
atcattaggaatgcagtaccgctgtgccaaagggtggacccgcgggtggctgccagggcaacggcaatggattgggcatgcaatctgagaagatctccagagaagacttccagaatctc

SEQ ID NO: 7973 - DNA, 119 bp, homo sapiens
catttaaactctgtcctatttgcacagtaccagatgcaaaatctgtaattgaaccacttagagttcttgattgaaaggtgtatgatccttctccacgccattgataaagaagctgattt

SEQ ID NO: 7974 - DNA, 119 bp, homo sapiens
tcctatttgcacagtaccagatgcaaaatctgtaattgaaccacttagagttcttgcattgaaaggtgttgatccttctccacgccattgataaagaagctgatttttgtctgatgcac

SEQ ID NO: 7975 - DNA, 119 bp, homo sapiens
ctgcacactaagatgaatccatttcttcacaagaattctccccagtgtcattacttttattggaggttgaaaccatttactgtgcgataataaaacatggtctctttctcagatattgt

SEQ ID NO: 7976 - DNA, 119 bp, homo sapiens
gtcattacttttattggaggttgcaaaccatttactgtgcgataataaaacatggtctctttctcagatttgtaagtttgaacacaatctgcccatctactgtcttttctataacacac

SEQ ID NO: 7977 - DNA, 119 bp, homo sapiens
attacaccttgttgctcaggtttcagccatacagctaaggtaaatgatgccatcagctttggagaaggagagaagaaaagcagctcttgtgatttccaaaaataaaacttgcagaattg

SEQ ID NO: 7978 - DNA, 119 bp, homo sapiens
ctttggagaaggaggagaagaaaagcagctcttgtgatttccaaaaataaaacttgcagaattgctatggcgttaggatgcagatcattcttgtctggtgtgatgcagctactgaggcc

SEQ ID NO: 7979 - DNA, 119 bp, homo sapiens
cagaattgctatgggcgttaggatgcagatcattcttgtctggtgtgatgcagctactgaggcctgctggaaaagggcagtgtaggtagggtgtgaagatctgtatgggcaatcctgaa

SEQ ID NO: 7980 - DNA, 119 bp, homo sapiens
ctgaggcctgctgagaaaagggcagtgtaggtagggtgtgaagatctgtatgggcaatcctgaatacaaaccgctgggtacagaactgaatactttcagcagcagcagagctgtgacaa

SEQ ID NO: 7981 - DNA, 119 bp, homo sapiens
atcctgaatacaaaaccgctgggtacagaactgaatactttcagcagcagcagagctgtgacaaaaagtcttcggtctgggagtccacatactgcttgggttggcacgatggaaacttt

SEQ ID NO: 7982 - DNA, 119 bp, homo sapiens
tgtgacaaaaagtgcttcggtctgggagtccacatactgcttgggttggcacgatggaaactttcttgaagctcccacgttctccagccttgggaaaagacctcgtgactcagtcaagg

SEQ ID NO: 7983 - DNA, 119 bp, homo sapiens
gaaactttcttgaaagctcccacgttctccagccttgggaaaagacctcgtgactcagtcaaggatattaagcaaaataggcaaagatcaacatttcaatgacctgaaacaagaagcca

SEQ ID NO: 7984 - DNA, 119 bp, homo sapiens
agtcaaggatattgaagcaaaataggcaaagatcaacatttcaatgacctgaaacaagaagccagagccaatgaaagaactgggcaattcatgtttacaaaaaagcattctcctcctga

SEQ ID NO: 7985 - DNA, 119 bp, homo sapiens
agaagccagagcccaatgaaagaactgggcaattcatgtttacaaaaaagcattctcctcctgataaagatttctaaataaataatcaggcccacgccacttgccagcaatactttgaa

SEQ ID NO: 7986 - DNA, 119 bp, homo sapiens
cctcctgataaagcatttctaaataaataatcaggcccacgccacttgccagcaatactttgaagcaggtactttaagtgatgttgcgatactccattttctggaaactgcagacacgt

SEQ ID NO: 7987 - DNA, 119 bp, homo sapiens
actttgaagcagggtactttaagtgatgttgcgatactccattttctggaaactgcagacacgttctcaagtaaggtaataccaacgacgttcttagcaatggcgaagacatgagtagc

SEQ ID NO: 7988 - DNA, 119 bp, homo sapiens
catttctttattgcatttcaaccagtcccctcagtgtgacaaatggctcttcaacaggaccgctgtccccgttgcctggcaacgctgctgtaacccctggttactcagcaaataggctg

SEQ ID NO: 7989 - DNA, 119 bp, homo sapiens
cagtgtgacaaatggctcttcaacaggaccgctgtccctcgttgcctggcaacgctgctgtaacccctgttactcagcaaataggctgtagcagcaggaatgctggaaggaagacttgg

SEQ ID NO: 7990 - DNA, 119 bp, homo sapiens
ctgtccctcgttgcctggcaacgctgctgtaacccctggttactcagcaaataggctgtagcagcaggatgctggaaggaagacttgggtgcccaggtaaagtattctgcagagcaaac

SEQ ID NO: 7991 - DNA, 119 bp, homo sapiens
agtgggtgggaagagcccccaagagctctgtgcgggattctaggctcccctgtgacagccgcggcaggagcaggcgggcgctccccggccacaggcctgttgttctcggaagggagaaa

SEQ ID NO: 7992 - DNA, 119 bp, homo sapiens
ccgcggcaggaagcaggcgggcgctccccggccacaggcctgttgttctcggaagggagaaagctggactttccccacgtaactcccagctctgggcctagagtgcgtgcatggcgaag

SEQ ID NO: 7993 - DNA, 119 bp, homo sapiens
gaaagctggacatttccccacgtaactcccagctctgggcctagagtgcgtgcatggcgaagtccccgggaactctaccctggaggagattctggggcagtatcaacggagtctccggg

SEQ ID NO: 7994 - DNA, 119 bp, homo sapiens
aacatgccagcagaagcattcaccaactgacatgtgccctgaaagaaggcgatgtcactattggagaagtgcaccaaatctttcttttagcaccagtgtgggaaatgaggacgccagga

SEQ ID NO: 7995 - DNA, 119 bp, homo sapiens
gtgccctgaaagaaggcgatgtcactattggagaagatgcaccaaatctttcttttagcaccagtgtggaaatgaggacgccaggacagcctggcccgaattacaacagagccatgctg

SEQ ID NO: 7996 - DNA, 119 bp, homo sapiens
gaggaactctctggaatgaaaaataaaatacaagtagttgtgcttgaaaacgaagggctccagcaacagtaaaatctcaaagacaagaggagacactgagggaacaaacacttctggat

SEQ ID NO: 7997 - DNA, 119 bp, homo sapiens
ctctctggaatgaaaaataaaatacaagtagttgtgcttgaaaacgaagggctccagcaacagctaaaactcaaagacaagaggagacactgagggaacaaacacttctggatgcatcc

SEQ ID NO: 7998 - DNA, 119 bp, homo sapiens
ggaaacatgcacaattcttggattacaacaggtgaagattctggggtgggcgaaacctccaaaagaccatttcccatgacaatgcagattttggcaaagctgcatctgctggtgagcag

SEQ ID NO: 7999 - DNA, 119 bp, homo sapiens
cacaattcttggattacaacaggtgaagattctggggtgggcgaaacctccaaaagaccattttcccatacaatgcagattttggcaaagctgcatctgctggtgagcagctagaactg

SEQ ID NO: 8000 - DNA, 119 bp, homo sapiens
gaacgacttagctgaatatcagagaacttgtgaagatcttaaagagcaactaaagcataaagaatttctctggctgctaatacttgtaaccgtgttggtggtctttgtttgaaatgtgc

SEQ ID NO: 8001 - DNA, 119 bp, homo sapiens
gatcttaaagagcaactaaagcataaagaatttcttctggctgctaatacttgtaaccgtgttggtggttttgtttgaaatgtgctcagcatgaagctgttctttcccaaacccatact

SEQ ID NO: 8002 - DNA, 119 bp, homo sapiens
ttctggctgctaatacttgtaaccgtgttggtggtctttgtttgaaatgtgctcagcatgaagctgttcttcccaaacccatactaatgttcatatgcagaccatcgaaagactggtta

SEQ ID NO: 8003 - DNA, 119 bp, homo sapiens
agaaagagatgacttgatgtctgcactagtttccgtaaggagcagcttggcagatacgcagcaaagagagcaagtgcttatgaacaggtgaaacaagttttgcaaatatctgaggaagc

SEQ ID NO: 8004 - DNA, 119 bp, homo sapiens
tctgcactagtttccgtaaggagcagcttggcagatacgcagcaaagagaagcaagtgcttatgaacagtgaaacaagttttgcaaatatctgaggaagccaattttgaaaaaaccaag

SEQ ID NO: 8005 - DNA, 119 bp, homo sapiens
gctttaatccagtgtgaccagttgaggaaggagctggagaggcaggcggagcgacttgaaaaagaacttcatctcagcaagagaaaagggccattgagaaagacatgatgaaaaaggaa

SEQ ID NO: 8006 - DNA, 119 bp, homo sapiens
ctggagaggcaggcggagcgacttgaaaaagaacttgcatctcagcaagagaaaagggccattgagaaaacatgatgaaaaaggaaataacgaaagaaagggagtacatgggatcaaag

SEQ ID NO: 8007 - DNA, 119 bp, homo sapiens
atgttgatcttgtctcagaatattgcccaactggaggcccaggtggaaaaggttacaaaggaaaagattcagctattaatcaactggaggaaattcaaagccagctggcttctcgggaa

SEQ ID NO: 8008 - DNA, 119 bp, homo sapiens
cagaatattgcccaactggaggcccaggtggaaaaggttacaaaggaaaagatttcagctattaatcaatggaggaaattcaaagccagctggcttctcgggaaatggatgtcacaaag

SEQ ID NO: 8009 - DNA, 119 bp, homo sapiens
gaaatagagaaattgagaatagaactggatgaaagcaaacaacacttggaacaggagcagcagaaggcaccctggccagagaggagtgcctgagactaacagaactgctgggcgaatct

SEQ ID NO: 8010 - DNA, 119 bp, homo sapiens
actggatgaaagcaaacaacacttggaacaggagcagcagaaggcagccctggccagagaggagtgcctagactaacagaactgctgggcgaatctgagcaccaactgcacctcaccag

SEQ ID NO: 8011 - DNA, 119 bp, homo sapiens
acaggaaaaagatagcattcagcagagctttagcaaggaagcaaaggcccaagcccttcaggcccagcaagagagcaggagctgacacagaagatacagcaaatggaggcccagcatga

SEQ ID NO: 8012 - DNA, 119 bp, homo sapiens
aagatagcattcagcagagctttagcaaggaagcaaaggcccaagcccttcaggcccagcaaagagagcggagctgacacagaagatacagcaaatggaggcccagcatgacaaaactg

SEQ ID NO: 8013 - DNA, 119 bp, homo sapiens
atctgaaatagctcaactcagtcaagaaaaaaggtatacatatgataaattgggaaagttacagagaagaatgaagaattggaggaacagtgtgtccagcatgggagagtacatgagac

SEQ ID NO: 8014 - DNA, 119 bp, homo sapiens
tcaactcagtcaagaaaaaaggtatacatatgataaattgggaaagttacagagaagaaatgaagaattgaggaacagtgtgtccagcatgggagagtacatgagacgatgaagcaaag

SEQ ID NO: 8015 - DNA, 119 bp, homo sapiens
gctaaggcagctggataagcacagccaggccacagcccagcagctggtgcagctcctcagcaagcagaacagcttctcctggagaggcagagcctgtcggaagaggtggaccggctgcg

SEQ ID NO: 8016 - DNA, 119 bp, homo sapiens
cagctggataagcacagccaggccacagcccagcagctggtgcagctcctcagcaagcagaaccagctttcctggagaggcagagcctgtcggaagaggtggaccggctgcggacccag

SEQ ID NO: 8017 - DNA, 119 bp, homo sapiens
ttacccagcatgccacaatctgattgctgacctggatggaacagagtgaaataaatgatttacaaagagtatttacattcatctggtttagacttaatatgccacaacgcaccacgacc

SEQ ID NO: 8018 - DNA, 119 bp, homo sapiens
atgatttacaaagagatatttacattcatctggtttagacttaatatgccacaacgcaccacgaccttccagggtgacaccgcctcagcctgcagtggggctggtcctcatcaacgcgg

SEQ ID NO: 8019 - DNA, 119 bp, homo sapiens
cgcaccacgaccttcccagggtgacaccgcctcagcctgcagtggggctggtcctcatcaacgcgggcgtgtccccgcacgcagtcgggctggagctggagtctgactctagctgagca

SEQ ID NO: 8020 - DNA, 119 bp, homo sapiens
tcatcaacgcgggcgctgtccccgcacgcagtcgggctggagctggagtctgactctagctgagcagagtcctggtgtatgttttcagaaatggcttgaagttatgtgtttaaatctgc

SEQ ID NO: 8021 - DNA, 119 bp, homo sapiens
tctagctgagcagagctcctggtgtatgttttcagaaatggcttgaagttatgtgtttaaatctgctcatcgtatgctaggttatacatatgattttcaataaatgaactttttaaaga

SEQ ID NO: 8022 - DNA, 119 bp, homo sapiens
tggctttgttagtgtttcctttattataaagcactgaaataagttaaataaacaggtgggaggctgggcgtcccccagccggtttgtccacagcccctgggggcagtggaggtgaatac

SEQ ID NO: 8023 - DNA, 119 bp, homo sapiens
tgggaggctgggcagtcccccagccggtttgtccacagcccctgggggcagtggaggtgaatacagggccttctcactgagctcgtgaagtgcctcagtcaaggcaaggtcccctggtc

SEQ ID NO: 8024 - DNA, 119 bp, homo sapiens
gtgaatacagggcccttctcactgagctcgtgaagtgcctcagtcaaggcaaggtcccctggtccatatggcccccccgcccatggggttgggctggtccttatagtgcctacgttagt

SEQ ID NO: 8025 - DNA, 119 bp, homo sapiens
ccctggtccatatgggcccccccgcccatggggttgggctggtccttatagtgcctacgttagtctgtgggagcccctggccagcgggggagaaaaaggtggcttctggtccgtctgta

SEQ ID NO: 8026 - DNA, 119 bp, homo sapiens
acgttagtctgtgtggagcccctggccagcgggggagaaaaaggtggcttctggtccgtctgtataaaaatggggaagaaggacctagttcaggatgagtctgtgtggacagcccggct

SEQ ID NO: 8027 - DNA, 119 bp, homo sapiens
cgtctgtataaaacatggggaagaaggacctagttcaggatgagtctgtgtggacagcccggctgccagagtccccagggctggtgggccccgagagctcaaaacagagggtgggctat

SEQ ID NO: 8028 - DNA, 119 bp, homo sapiens
gcccggctgccagcagtccccagggctggtgggccccgagagctcaaaacagagggtgggctatgaggtgggcccagccctcagaggcagagagaccaggccctcctgccccaccgtgg

SEQ ID NO: 8029 - DNA, 119 bp, homo sapiens
tgggctatgaggtggggcccagccctcagaggcagagagaccaggccctcctgccccaccgtggccatgaccttctggtggcgcttgtagttgtcccagtggcccgtggtataggcgca

SEQ ID NO: 8030 - DNA, 119 bp, homo sapiens
caccgtggccatgcaccttctggtggcgcttgtagttgtcccagtggcccgtggtataggcgcaggtggacagcggaagggcttctcgcctgtgtgccgcagcatgtgacgtttgaggt

SEQ ID NO: 8031 - DNA, 119 bp, homo sapiens
taggcgcaggtggcacagcggaagggcttctcgcctgtgtgccgcagcatgtgacgtttgaggttcatgtctggttgcagctgtagttgcaaaggctacaccgaaaaggtttgtcacca

SEQ ID NO: 8032 - DNA, 119 bp, homo sapiens
tttgaggttcatgctctggttgcagctgtagttgcaaaggctacaccgaaaaggtttgtcaccagagtgatgcgaccatgacgcttgaggttggccagattgccacaggcataagggca

SEQ ID NO: 8033 - DNA, 119 bp, homo sapiens
tgtcaccagagtggatgcgaccatgacgcttgaggttggccagattgccacaggcataagggcagaggggcacttgtagggcttctctcctgtatggacgcgctggtgccgtttcaggt

SEQ ID NO: 8034 - DNA, 119 bp, homo sapiens
taagggcagagggggcacttgtagggcttctctcctgtatggacgcgctggtgccgtttcaggttatccgatgagcagaggcataaggacagcgggcgcagcggaagggcttctcacca

SEQ ID NO: 8035 - DNA, 119 bp, homo sapiens
tttcaggttatccagatgagcagaggcataaggacagcgggcgcagcggaagggcttctcaccactgtggtcttcatgtgccgggccaggtggttgggatagtgagtggcaaaggggca

SEQ ID NO: 8036 - DNA, 119 bp, homo sapiens
tctcaccactgtgtgtcttcatgtgccgggccaggtggttgggatagtgagtggcaaaggggcagaggcacaggcaaagcctttgtcactggggccctggggccccccactggcacccc

SEQ ID NO: 8037 - DNA, 119 bp, homo sapiens
aaggggcagaggctacaggcaaagcctttgtcactggggccctggggccccccactggcaccccctccacctctcctcgcatgcagcgcccacacatggcagctcccagccgactaccc

SEQ ID NO: 8038 - DNA, 119 bp, homo sapiens
ggcaccccctccagcctctcctcgcatgcagcgcccacacatggcagctcccagccgactaccctcacctcctccagctcttgtccacagccccggcaggtccaagggaatagcagctc

SEQ ID NO: 8039 - DNA, 119 bp, homo sapiens
gactaccctcaccctcctccagctcttgtccacagccccggcaggtccaagggaatagcagctctggcatggttctgatccagtcccgcagaggccctccccttcaccccgcagctgcc

SEQ ID NO: 8040 - DNA, 119 bp, homo sapiens
agcagctctggcagtggttctgatccagtcccgcagaggccctccccttcaccccgcagctgcccacagctggcaggaaactggcaccacctggtggcacatggaggctcaaatctgga

SEQ ID NO: 8041 - DNA, 119 bp, homo sapiens
cttcaggtcgccggggcaccgccccctcctgctctgtgggactgggaggccgggctggtcgtggagtacgcagcggaagccacaggtcgggcagggaggagtggggggccctgcgtggg

SEQ ID NO: 8042 - DNA, 119 bp, homo sapiens
tcgtggagtacagcagcggaagccacaggtcgggcagggaggagtggggggccctgcgtgggtacgctgtgccgcctcaggttgcccaggctgctgcaggcaaaggggcagtggggaca

SEQ ID NO: 8043 - DNA, 119 bp, homo sapiens
tgggtacgctgatgccgcctcaggttgcccaggctgctgcaggcaaaggggcagtggggacagcggtaggcttctcgccagtgtgggtgcgggtatgtcgtgtcaggttgacgagctgg

SEQ ID NO: 8044 - DNA, 119 bp, homo sapiens
gacagcggtagggcttctcgccagtgtgggtgcgggtatgtcgtgtcaggttgacgagctgggctgagggtaggggcagcggccacagcggaacggcttctctccgctgtgtgtctgca

SEQ ID NO: 8045 - DNA, 119 bp, homo sapiens
ctgggctgaggcgtaggggcagcggccacagcggaacggcttctctccgctgtgtgtctgcatgtgccgttcaggtggctcgagtagtgggacacgaaggtgcagaggcggcatgagta

SEQ ID NO: 8046 - DNA, 119 bp, homo sapiens
tgcatgtgccgcttcaggtggctcgagtagtgggacacgaaggtgcagaggcggcatgagtacagtagcgtgggggcagcaggggccccccacccggccctcctgccccacaacacggc

SEQ ID NO: 8047 - DNA, 119 bp, homo sapiens
agtacagtagccgtgggggcagcaggggccccccacccggccctcctgccccacaacacggcccctcactgtcggccccccacacagctggcaggctgggcctggcctctcacccctgg

SEQ ID NO: 8048 - DNA, 119 bp, homo sapiens
cggcccctcacctgtcggccccccacacagctggcaggctgggcctggcctctcacccctggcctccccggacccctggctggctcctcaacttcactctccgcacttagtgcccggcc

SEQ ID NO: 8049 - DNA, 119 bp, homo sapiens
ctggcctcccctggacccctggctggctcctcaacttcactctccgcacttagtgcccggccgcccccaactcatcgtcgctcagcccatagggaagcccaggcctggcccccagagag

SEQ ID NO: 8050 - DNA, 119 bp, homo sapiens
cttccgagtctctctcgaagcccatgagctggtcactgttgccgtcgccttcctcctcttcctcttcctctcaaactccagatcctggcctagtagcaaatcactctccaataccaggg

SEQ ID NO: 8051 - DNA, 119 bp, homo sapiens
ttcctcttcctcctcaaactccagatcctggcctagtagcaaatcactctccaataccagggccccgggccttcgtcgagggagtcttcagtatccactgaagaggggagggggcttgt

SEQ ID NO: 8052 - DNA, 119 bp, homo sapiens
agggccccgggtccttcgtcgagggagtcttcagtatccactgaagaggggagggggcttgtggattctcctcaggaaccagccctcgtggaccacacttcccgtactcgctgacccac

SEQ ID NO: 8053 - DNA, 119 bp, homo sapiens
ttgtggattctccctcaggaaccagccctcgtggaccacacttcccgtactcgctgacccactctgattccttagtgcctcggtgggaagctaggagtctggatcgcccacttcatccc

SEQ ID NO: 8054 - DNA, 119 bp, homo sapiens
ccactctgattcccttagtgcctcggtgggaagctaggagtctggatcgcccacttcatccctcaggagccccctccaccctgacctgagcccactccactgaccccacccccgctcct

SEQ ID NO: 8055 - DNA, 119 bp, homo sapiens
ctttgaccccctcgcatttcacgggctgcgggtggctttgcttccttcggggcatcgtgaccggctccacccgacgcgcctccggcctgcggccgcccgaccccgcccctcctatctcg

SEQ ID NO: 8056 - DNA, 119 bp, homo sapiens
ctgcgggtggctttgcttccttcggggcatcgtgaccggctccagcccgacgcgcctccggcctgcggcgcccgaccccgcccctcctatctcggcccgcctgtctgcccttcctctca

SEQ ID NO: 8057 - DNA, 119 bp, homo sapiens
atgagttgggttcattggcttaataatttttattaaaacaaaaagcagaacaaagaaaaactgtcctccttcccccttgggcaaaggaagtggatttggcccagcaaggataccattct

SEQ ID NO: 8058 - DNA, 119 bp, homo sapiens
actgtcctcccttcccccttgggcaaaggaagtggatttggcccagcaaggataccattcttgggtagagggagatggtgggcgtgagcagcccttgtctgagaagctgtacagctggg

SEQ ID NO: 8059 - DNA, 119 bp, homo sapiens
cttgggtagaagggagatggtgggcgtgagcagcccttgtctgagaagctgtacagctgggtttgcccccctgccaccagcaatgcgtgctccaaggcagactcaagtttgtggaagac

SEQ ID NO: 8060 - DNA, 119 bp, homo sapiens
ggtttgcccctcctgccaccagcaatgcgtgctccaaggcagactcaagtttgtggaagacctggtctcaggaggcaaaactgaccagatgccacaaaactgttccattgtggatttaa

SEQ ID NO: 8061 - DNA, 119 bp, homo sapiens
acctggtctctaggaggcaaaactgaccagatgccacaaaactgttccattgtggatttaattcctttttacaaagtctaattcacatgtaatttgagctaagtctggtagttggtatg

SEQ ID NO: 8062 - DNA, 119 bp, homo sapiens
aattccttttgtacaaagtctaattcacatgtaatttgagctaagtctggtagttggtatggtagccaaaacacatctttgacccgcctgctcctatgtcggctcagcactgcttcacc

SEQ ID NO: 8063 - DNA, 119 bp, homo sapiens
tggtagccaaaaacacatctttgacccgcctgctcctatgtcggctcagcactgcttcacctttgacctattgacccccagcccccagcaccttggcaacccctccccatcttccctgg

SEQ ID NO: 8064 - DNA, 119 bp, homo sapiens
cctttgacctaattgacccccagcccccagcaccttggcaacccctccccatcttccctggagtgggggagctgacttggaattccagtagcctaaggttactgggcaacacaatggtg

SEQ ID NO: 8065 - DNA, 119 bp, homo sapiens
ggagtgggggaagctgacttggaattccagtagcctaaggttactgggcaacacaatggtgtcaccagccactgtcccggctgcctgggtctggtggcagctgggggcttttatgacat

SEQ ID NO: 8066 - DNA, 119 bp, homo sapiens
tgtcaccagctcactgtcccggctgcctgggtctggtggcagctgggggcttttatgacatcgtgtgtgggacctatggcaggagcctcgccctgtcctggcacacgttggccccaagc

SEQ ID NO: 8067 - DNA, 119 bp, homo sapiens
atcgtgtgtggggacctatggcaggagcctcgccctgtcctggcacacgttggccccaagcaaacgtggggtcctccagagggacaaggaggcatcatgggcatctccacagctgatgg

SEQ ID NO: 8068 - DNA, 119 bp, homo sapiens
gcaaacgtggaggtcctccagagggacaaggaggcatcatgggcatctccacagctgatggcaggatccgggtgccctgtaccccttcgtctgctgcctgcaatatggtgggtgggcac

SEQ ID NO: 8069 - DNA, 119 bp, homo sapiens
ggcaggatcccgggtgccctgtaccccttcgtctgctgcctgcaatatggtgggtgggcacttcctgctcttgccagcctagcctggcgagggacaacctctagtctcagacagcctcc

SEQ ID NO: 8070 - DNA, 119 bp, homo sapiens
acttcctgctgcttgccagcctagcctggcgagggacaacctctagtctcagacagcctcctgccatgctgctcacggaaagcaccgttgttcattccggacccttcctgcgtgttctc

SEQ ID NO: 8071 - DNA, 119 bp, homo sapiens
cctgccatgcatgctcacggaaagcaccgttgttcattccggacccttcctgcgtgttctccatgatacgaccccttctgtggtggaataatctgcctggctccctgctgccgctagct

SEQ ID NO: 8072 - DNA, 119 bp, homo sapiens
tccatgatactgaccccttctgtggtggaataatctgcctggctccctgctgccgctagcttgcatggcacagcagggggcactcggccaccctttccactttctacccagccctggac

SEQ ID NO: 8073 - DNA, 119 bp, homo sapiens
cttgcatggccacagcagggggcactcggccaccctttccactttctacccagccctggacttttaagagaggccctttacggaaggaggcctgggctggagactcagccttgcttccc

SEQ ID NO: 8074 - DNA, 119 bp, homo sapiens
acttttaagatgaggccctttacggaaggaggcctgggctggagactcagccttgcttcccctcactgcggagtggctccacttcatatcccggttccagtaatgaaaatgtgtataat

SEQ ID NO: 8075 - DNA, 119 bp, homo sapiens
ccctcactgctggagtggctccacttcatatcccggttccagtaatgaaaatgtgtataattcctggggtccacccctcatggtaccccagtttcacccactgtgtcccactccagtct

SEQ ID NO: 8076 - DNA, 119 bp, homo sapiens
attcctggggttccacccctcatggtaccccagtttcacccactgtgtcccactccagtctccctgcagtggggaacagcttcgtttcctcggacctccaggaatcctgcccctaaatc

SEQ ID NO: 8077 - DNA, 119 bp, homo sapiens
ctccctgcagctggggaacagcttcgtttcctcggacctccaggaatcctgcccctaaatctgagcccagcagggcccactttctgagcagtcccacctgaagccacttacttgtgagc

SEQ ID NO: 8078 - DNA, 119 bp, homo sapiens
tctgagcccaggcagggcccactttctgagcagtcccacctgaagccacttacttgtgagctagacctcaaggccgctcacactgtgtgtctcctgctcactcagctcagtgcccagct

SEQ ID NO: 8079 - DNA, 119 bp, homo sapiens
gctagacctcaaaggccgctcacactgtgtgtctcctgctcactcagctcagtgcccagcttacctaagctcaccccatggtgacccaatggttggtctgcccaaccatttagggagaa

SEQ ID NO: 8080 - DNA, 119 bp, homo sapiens
cttacctaaggctcaccccatggtgacccaatggttggtctgcccaaccatttagggagaatgcccagactctgtcgggcaagtttgctgaacctggtccatcctcacgtgcttacctt

SEQ ID NO: 8081 - DNA, 119 bp, homo sapiens
aatgcccagatctctgtcgggcaagtttgctgaacctggtccatcctcacgtgcttaccttggcccctgcctgcctgggtggctggacttccctgcgttgcctgcagtccaggcagctc

SEQ ID NO: 8082 - DNA, 119 bp, homo sapiens
ttggcccctgccctgcctgggtggctggacttccctgcgttgcctgcagtccaggcagctcctaagtgtcacccagcagtgggtgtggcttggctctagaatcggctggcctgggcact

SEQ ID NO: 8083 - DNA, 119 bp, homo sapiens
tcctaagtgtccacccagcagtgggtgtggcttggctctagaatcggctggcctgggcactgcctgagccttctctgagatgagggcggcaacaggagcaaatgcgagcagacagctgg

SEQ ID NO: 8084 - DNA, 119 bp, homo sapiens
ctgcctgagcacttctctgagatgagggcggcaacaggagcaaatgcgagcagacagctgggtgtgtcctttccagcagaggggtgggttgtggcccctcttggtagtttaatcagctg

SEQ ID NO: 8085 - DNA, 119 bp, homo sapiens
gggtgtgtccctttccagcagaggggtgggttgtggcccctcttggtagtttaatcagctgttctttggtgcctttgaataataattggacaagtcaaggtgggattcatttactcaga

SEQ ID NO: 8086 - DNA, 119 bp, homo sapiens
tgttctttgggtgcctttgaataataattggacaagtcaaggtgggattcatttactcagagtcatagctctctctgggggaggttgctatagtccctagggacccagtttaacaagtt

SEQ ID NO: 8087 - DNA, 119 bp, homo sapiens
gagtcatagcctctctctgggggaggttgctatagtccctagggacccagtttaacaagtttttgagccacagtcccagcaagaatgggtttgaggtctataattaccccaaactttaa

SEQ ID NO: 8088 - DNA, 119 bp, homo sapiens
tttttgagcccacagtcccagcaagaatgggtttgaggtctataattaccccaaactttaaaaatcagcttgcagcagatctggaggatcgtccctttgctgtaccccagtgggtaaga

SEQ ID NO: 8089 - DNA, 119 bp, homo sapiens
aaaaatcagctttgcagcagatctggaggatcgtccctttgctgtaccccagtgggtaagaattcttgtttttgccaacccattgagccggcattgaatcactcaattactgcaaaatc

SEQ ID NO: 8090 - DNA, 119 bp, homo sapiens
gaattcttgtcttttgccaacccattgagccggcattgaatcactcaattactgcaaaatcttttctaatagaacgcacaccacagcctccagtggaagcattccaagatctgcagcaa

SEQ ID NO: 8091 - DNA, 119 bp, homo sapiens
tcttttctaaatagaacgcacaccacagcctccagtggaagcattccaagatctgcagcaaatatctagtcattggcagaagcaggtttttggcatgaacaactgtttttcactttgat

SEQ ID NO: 8092 - DNA, 119 bp, homo sapiens
aaatatctagctcattggcagaagcaggtttttggcatgaacaactgtttttcactttgatttcgactcagcagaagttctgcaagatgacctgggaataaagttggccaagaagcctc

SEQ ID NO: 8093 - DNA, 119 bp, homo sapiens
atttcgactccagcagaagttctgcaagatgacctgggaataaagttggccaagaagcctccgaggggaatcggcgtgtgagtacgtatgcctcacccacgctatcttctgagctccag

SEQ ID NO: 8094 - DNA, 119 bp, homo sapiens
tccgaggggagatcggcgtgtgagtacgtatgcctcacccacgctatcttctgagctccagcacccacgcatgtggagaatgggctgccttgtttgggaggcttggtttaccctactcc

SEQ ID NO: 8095 - DNA, 119 bp, homo sapiens
agcacccacggcatgtggagaatgggctgccttgtttgggaggcttggtttaccctactccgtcgagaacatgtaatgcgtagggcagtgagagcatttgctacatgcttaggccgaga

SEQ ID NO: 8096 - DNA, 119 bp, homo sapiens
ccgtcgagaagcatgtaatgcgtagggcagtgagagcatttgctacatgcttaggccgagaggcagcgtgctggtattgtgagctgtcagctttaagtttacagcattgaaactgagct

SEQ ID NO: 8097 - DNA, 119 bp, homo sapiens
gaggcagcgtggctggtattgtgagctgtcagctttaagtttacagcattgaaactgagcttgggaaggggagaggacagaggacgggtggggctgtgtgttttaatcctggctcactc

SEQ ID NO: 8098 - DNA, 119 bp, homo sapiens
cttgggaaggaggagaggacagaggacgggtggggctgtgtgttttaatcctggctcactcagccttctattttgggagccatgcacttctaaacaaagctctcaatagggactttgtc

SEQ ID NO: 8099 - DNA, 119 bp, homo sapiens
tcagccttctcattttgggagccatgcacttctaaacaaagctctcaatagggactttgtcaatgctgtccgctacttaaccttacaacaaagaagctttgcgaccatttgcgcaccca

SEQ ID NO: 8100 - DNA, 119 bp, homo sapiens
tctcaaggaatgaacccagttaaaaccctatcaagcatgcaactatacattctccaccccccaccccacccaaattaaggccagcacttgaagcattaaatactgtcattgtggggtct

SEQ ID NO: 8101 - DNA, 119 bp, homo sapiens
ccaccccccaccccaccccaaattaaggccagcacttgaagcattaaatactgtcattgtggggtctaaagttctggttaacctttgaaccccaaggcagagcaagatctgggactgaa

SEQ ID NO: 8102 - DNA, 119 bp, homo sapiens
tcattgtggggtctaaaagttctggttaacctttgaaccccaaggcagagcaagatctgggactgaaaaggcgattgtttaaaattcagcagacccactgggcagtgcaccttccaggc

SEQ ID NO: 8103 - DNA, 119 bp, homo sapiens
gatctgggactgaaaacggcgattgtttaaaattcagcagacccactgggcagtgcaccttccaggccttccaggacacctcagtaggagtttggtttgcccatcatctctgggtcagg

SEQ ID NO: 8104 - DNA, 119 bp, homo sapiens
tgcaccttccaggcctttccaggacacctcagtaggagtttggtttgcccatcatctctgggtcaggctgacacttggctgtcacacttggccttctggggtgactgcgtgagtgtggc

SEQ ID NO: 8105 - DNA, 119 bp, homo sapiens
atctctgggtcaggctggacacttggctgtcacacttggccttctggggtgactgcgtgagtgtggcccctcgtcagcctgtcaggacacctcctcttgctggggctgcgcctctggct

SEQ ID NO: 8106 - DNA, 119 bp, homo sapiens
tgcgtgagtgtggccccctcgtcagcctgtcaggacacctcctcttgctggggctgcgcctctggctggatttgtcctggatgtggccggtccgaggctccggttgcagcccgtggccc

SEQ ID NO: 8107 - DNA, 119 bp, homo sapiens
ctgcgcctctggctgggatttgtcctggatgtggccggtccgaggctccggttgcagcccgtggcccagacacagaactctgggggagatgcacgcctggtgccgccctgcagttcagg

SEQ ID NO: 8108 - DNA, 119 bp, homo sapiens
gcagcccgtggcccagcacacagaactctgggggagatgcacgcctggtgccgccctgcagttcaggggacaggggctgctccccggctctgtgtccttcttagggctctcctcgctgc

SEQ ID NO: 8109 - DNA, 119 bp, homo sapiens
ctgttctggccgagctgggattcataagaggtgctggtggggtccaaggtgggaggctgcggtcggccactggctggcggtcagaagctgtcctcctgaggaaaggcagagggttgagg

SEQ ID NO: 8110 - DNA, 119 bp, homo sapiens
cggtcggccacctggctggcggtcagaagctgtcctcctgaggaaaggcagagggttgagggcacacaggctgctctccgctgcgagtctgctctcagccaaggccctgagctgttctt

SEQ ID NO: 8111 - DNA, 119 bp, homo sapiens
gggcacacagagctgctctccgctgcgagtctgctctcagccaaggccctgagctgttcttccagcatttgctgggttcccgagagggcccccagcctctggcggcagcgatggtgggg

SEQ ID NO: 8112 - DNA, 119 bp, homo sapiens
ttccagcattctgctgggttcccgagagggcccccagcctctggcggcagcgatggtggggtcagtggggggctgttgagagtggcggtttagcttcaaacagagaggaggtagctggg

SEQ ID NO: 8113 - DNA, 119 bp, homo sapiens
ggtcagtgggtgggctgttgagagtggcggtttagcttcaaacagagaggaggtagctgggcagaatatgaatgtgtgttcccagacactttggctatgactgcttggctgtcttcaga

SEQ ID NO: 8114 - DNA, 119 bp, homo sapiens
ggcagaatatggaatgtgtgttcccagacactttggctatgactgcttggctgtcttcagagtctcttgttccttgtgctcctgagaaggggacattgggggtgatggggagggaatcg

SEQ ID NO: 8115 - DNA, 119 bp, homo sapiens
gagtctcttgtttccttgtgctcctgagaaggggacattgggggtgatggggagggaatcgagaaagggggcttgcttctgggtgctgggttggggggctggggaccttgcactgagca

SEQ ID NO: 8116 - DNA, 119 bp, homo sapiens
cgagaaaggggggcttgcttctgggtgctgggttggggggctggggaccttgcactgagcaggtgcacttcggggggagggttgggcaacttgggctggtgcggtggggaagttcgccg

SEQ ID NO: 8117 - DNA, 119 bp, homo sapiens
caggtgcactctcggggggagggttgggcaacttgggctggtgcggtggggaagttcgccgctttgtgggggtgggcttagcaccctggggctcacaggtgggctggggggcgtctgca

SEQ ID NO: 8118 - DNA, 119 bp, homo sapiens
cgctttgtggtgggtgggcttagcaccctggggctcacaggtgggctggggggcgtctgcacagcagagggcttggctgggcaggtctgtaagaggagggaaggctccggcgcctcttg

SEQ ID NO: 8119 - DNA, 119 bp, homo sapiens
cacagcagaggggcttggctgggcaggtctgtaagaggagggaaggctccggcgcctcttgtctgcttgggcacccagtgtgtcctcgtgggagaggcctttctgcccacaggggggct

SEQ ID NO: 8120 - DNA, 119 bp, homo sapiens
tgtctgcttgaggcacccagtgtgtcctcgtgggagaggcctttctgcccacaggggggcttctctctcgctctgccttggtctggccaggctggactctgaggtcctgttttgtccag

SEQ ID NO: 8121 - DNA, 119 bp, homo sapiens
cttctctctcggctctgccttggtctggccaggctggactctgaggtcctgttttgtccagatggagggcggagtggtgccaggcgatggccttccggggctgcctgtagaggctggtg

SEQ ID NO: 8122 - DNA, 119 bp, homo sapiens
agatggagggccggagtggtgccaggcgatggccttccggggctgcctgtagaggctggtggccttctcgcctgactccaagtcccacccttcacctcggggctttggctggtggctgg

SEQ ID NO: 8123 - DNA, 119 bp, homo sapiens
tggccttctctgcctgactccaagtcccacccttcacctcggggctttggctggtggctggtgggctgccaggtccagggctggcttcctgggctggcagctgctcctgccactccctg

SEQ ID NO: 8124 - DNA, 119 bp, homo sapiens
ggtgggctgctcaggtccagggctggcttcctgggctggcagctgctcctgccactccctggccctgtgtgtgaggcttggtcaggctggcggtgctcttgctgggcagcaagtccagg

SEQ ID NO: 8125 - DNA, 119 bp, homo sapiens
tggccctgtgctgtgaggcttggtcaggctggcggtgctcttgctgggcagcaagtccagggggctcacgaggccctcagctttggggaagcccatgttctcctggtggggccagcctc

SEQ ID NO: 8126 - DNA, 119 bp, homo sapiens
gggggctcacagaggccctcagctttggggaagcccatgttctcctggtggggccagcctctcccggcctggctcctgggtttccttgggggagttctctgtggacttgctgctttctg

SEQ ID NO: 8127 - DNA, 119 bp, homo sapiens
tctcccggccctggctcctgggtttccttgggggagttctctgtggacttgctgctttctggggactccgagaagcgaatgatttgtccatcagaacttccataggcggtggagggagg

SEQ ID NO: 8128 - DNA, 119 bp, homo sapiens
tggggactccagagaagcgaatgatttgtccatcagaacttccataggcggtggagggaggtgctcgagttcccctccatttcacagctgagctcctcactcttggctgcttctgcttt

SEQ ID NO: 8129 - DNA, 119 bp, homo sapiens
ggtgctcgaggttcccctccatttcacagctgagctcctcactcttggctgcttctgctttaggcagaggggaaagataggtgctaagggcttccagcctatgcccattttgagagatt

SEQ ID NO: 8130 - DNA, 119 bp, homo sapiens
ttaggcagagggggaaagataggtgctaagggcttccagcctatgcccattttgagagattctctgcctatgctggagaaatttggggcttcggatacaaaggggcaagccctgtgtac

SEQ ID NO: 8131 - DNA, 119 bp, homo sapiens
ttctctgcctgatgctggagaaatttggggcttcggatacaaaggggcaagccctgtgtacttgggaaactggggggcatgatgcaattcctgaggcagggacttgccccagcgtcctt

SEQ ID NO: 8132 - DNA, 119 bp, homo sapiens
acttgggaaatctggggggcatgatgcaattcctgaggcagggacttgccccagcgtccttagagtccccagcatcctcagactctccgtgggactgaaagtttcaataagcttcttga

SEQ ID NO: 8133 - DNA, 119 bp, homo sapiens
ttagagtcccccagcatcctcagactctccgtgggactgaaagtttcaataagcttcttgacggatgtttggtgggacagcctctgacattccagtctgtggccttggcagcctcactg

SEQ ID NO: 8134 - DNA, 119 bp, homo sapiens
gacggatgttctggtgggacagcctctgacattccagtctgtggccttggcagcctcactgacctctccgatgggatggcatttggaagcttcccagctttgccttgttcgtcctcagg

SEQ ID NO: 8135 - DNA, 119 bp, homo sapiens
tgacctctcctgatgggatggcatttggaagcttcccagctttgccttgttcgtcctcaggatggggatgcatttctgcaagatgctcttgtcctgactaggcaaaatactgaagttct

SEQ ID NO: 8136 - DNA, 119 bp, homo sapiens
ggatggggattgcatttctgcaagatgctcttgtcctgactaggcaaaatactgaagttcttggtgaggatgccttgagcctgctggtggtgttgcttggactgaccctgcaggtgcca

SEQ ID NO: 8137 - DNA, 119 bp, homo sapiens
cttggtgagggatgccttgagcctgctggtggtgttgcttggactgaccctgcaggtgccattgggccaacggcggctgctctgggctgcagaatttgctcctggctctgcccctgccc

SEQ ID NO: 8138 - DNA, 119 bp, homo sapiens
cattgggccacacggcggctgctctgggctgcagaatttgctcctggctctgcccctgccctttggcaccagggcataaaatgcctccagcttctgactgaggtccctctggacccttc

SEQ ID NO: 8139 - DNA, 119 bp, homo sapiens
cctttggcacccagggcataaaatgcctccagcttctgactgaggtccctctggacccttcgcagctccgaaaggtggggtcctccacgtgactctggagacacgactctgactgggac

SEQ ID NO: 8140 - DNA, 119 bp, homo sapiens
tcgcagctcctgaaaggtggggtcctccacgtgactctggagacacgactctgactgggacctcgtctgctctcaggggccctcctgctgccacttaccgtgctaggtcttggggggac

SEQ ID NO: 8141 - DNA, 119 bp, homo sapiens
acctcgtctgcctctcaggggccctcctgctgccacttaccgtgctaggtcttggggggaccactgtcccccctcctcctcctcagaccagtcctggtgcccacagggcacagggacaa

SEQ ID NO: 8142 - DNA, 119 bp, homo sapiens
accactgtcctcccctcctcctcctcagaccagtcctggtgcccacagggcacagggacaaacttgatctttcgctgattgactccttcatcttcagaatcatttcctgggcctggagg

SEQ ID NO: 8143 - DNA, 119 bp, homo sapiens
aaacttgatcctttcgctgattgactccttcatcttcagaatcatttcctgggcctggaggctcctaagctcctggtgcgggcctgaaatgggctttcccggtcagcaggtgaagattg

SEQ ID NO: 8144 - DNA, 119 bp, homo sapiens
ggctcctaagcctcctggtgcgggcctgaaatgggctttcccggtcagcaggtgaagattgtggccttgatgtggagttttttcctgccaggcacacagactcatgctgctcattttgt

SEQ ID NO: 8145 - DNA, 119 bp, homo sapiens
tgtggccttgaatgtggagttttttcctgccaggcacacagactcatgctgctcattttgtcttcctcccctcctctgggctgctgtcctcgctgtcactaagagatgaagcgtccatc

SEQ ID NO: 8146 - DNA, 119 bp, homo sapiens
gtcttcctcctcctcctctgggctgctgtcctcgctgtcactaagagatgaagcgtccatcggcctggagttttggaaaggtgtggttccacagagaccccaatcccaaaggaatcaca

SEQ ID NO: 8147 - DNA, 119 bp, homo sapiens
tcggcctggaggttttggaaaggtgtggttccacagagaccccaatcccaaaggaatcacatggggtgctgtccccagcttcaaaggtggggaggtgatattttctgggcttgtactgg

SEQ ID NO: 8148 - DNA, 119 bp, homo sapiens
catggggtgcttgtccccagcttcaaaggtggggaggtgatattttctgggcttgtactggagaggcatggctccttgcttcgtcctgtgctcgtggctgaacctttgccataggagcc

SEQ ID NO: 8149 - DNA, 119 bp, homo sapiens
ggagaggcatgggctccttgcttcgtcctgtgctcgtggctgaacctttgccataggagcccctgagagaggcagtcctggggtctgcctgagcccaaacagaatggactttgctgcca

SEQ ID NO: 8150 - DNA, 119 bp, homo sapiens
cccctgagagcaggcagtcctggggtctgcctgagcccaaacagaatggactttgctgccaggtgtgtctgactgcctggcctctgtgtggggtgaagtcaccgacttccattcttcgg

SEQ ID NO: 8151 - DNA, 119 bp, homo sapiens
caggtgtgtcctgactgcctggcctctgtgtggggtgaagtcaccgacttccattcttcgggctctggtcaaggtcccagctggtttgcttgcccagcttgtccaccgactgcacggac

SEQ ID NO: 8152 - DNA, 119 bp, homo sapiens
gggctctggtgcaaggtcccagctggtttgcttgcccagcttgtccaccgactgcacggactcattgtcgcaccaatgccactgtcctcagagcataaggggagaccctgcaccccagg

SEQ ID NO: 8153 - DNA, 119 bp, homo sapiens
actcattgtcagcaccaatgccactgtcctcagagcataaggggagaccctgcaccccagggtcgccacgccactcgccaggctctctagctgcctcagagccctcaggaggcgttcat

SEQ ID NO: 8154 - DNA, 119 bp, homo sapiens
gggtcgccacagccactcgccaggctctctagctgcctcagagccctcaggaggcgttcatccacattctttttgtgctcagcttattttccaagtgggttgcagtggagtggaggtag

SEQ ID NO: 8155 - DNA, 119 bp, homo sapiens
atccacattcctttttgtgctcagcttattttccaagtgggttgcagtggagtggaggtagctgctggaccctccaggaagctgccggtgagcgaggccactgtgccattgagcacctg

SEQ ID NO: 8156 - DNA, 119 bp, homo sapiens
agctgctggagccctccaggaagctgccggtgagcgaggccactgtgccattgagcacctgcagcttgcgactgtgtactgtagcagctgttgcaggagatttggctgctcctggggct

SEQ ID NO: 8157 - DNA, 119 bp, homo sapiens
tgcagcttgctgactgtgtactgtagcagctgttgcaggagatttggctgctcctggggctctcttttctcaaaggccaagccagatcctccctgacttcctgcaggagcacttctcca

SEQ ID NO: 8158 - DNA, 119 bp, homo sapiens
ctctcttttcttcaaaggccaagccagatcctccctgacttcctgcaggagcacttctccatccttggaatctcccccaacagctggctgatctcctcaaagcacagcagcaagaagct

SEQ ID NO: 8159 - DNA, 119 bp, homo sapiens
catccttggagatctcccccaacagctggctgatctcctcaaagcacagcagcaagaagctgaccatggctgcagcagctcccgggtctgggtggcctgatggatgatgcacagaattg

SEQ ID NO: 8160 - DNA, 119 bp, homo sapiens
ctgaccatgggctgcagcagctcccgggtctgggtggcctgatggatgatgcacagaattgcttcatattggagaggctggagtgtagataggtgtaagcctgctggtgggcctttacc

SEQ ID NO: 8161 - DNA, 119 bp, homo sapiens
tgcttcatatttggagaggctggagtgtagataggtgtaagcctgctggtgggcctttaccagaggctcgggaagtccactttgccttcaggctcatgagcagggtggatggtttggta

SEQ ID NO: 8162 - DNA, 119 bp, homo sapiens
ccagaggctccgggaagtccactttgccttcaggctcatgagcagggtggatggtttggtagcagtggcctgtgtgcttgacgtgtgacattttgctgtccttttccatttggaagtat

SEQ ID NO: 8163 - DNA, 119 bp, homo sapiens
tagcagtggctctgtgtgcttgacgtgtgacattttgctgtccttttccatttggaagtatcttgggtatactttcctcactctcatctccagaaaagtctgccccttgtgatccatgg

SEQ ID NO: 8164 - DNA, 119 bp, homo sapiens
atcttgggtactactttcctcactctcatctccagaaaagtctgccccttgtgatccatgggaaccctggtcttgaacggaatatccttagccatgtggctttgtgatttgttcagctg

SEQ ID NO: 8165 - DNA, 119 bp, homo sapiens
gggaaccctgtgtcttgaacggaatatccttagccatgtggctttgtgatttgttcagctgggatgaagggttttggttcctgggatcagtccttccatatctttccttttgcctgaag

SEQ ID NO: 8166 - DNA, 119 bp, homo sapiens
tgggatgaagaggttttggttcctgggatcagtccttccatatctttccttttgcctgaagcaggatctccatgagctgacaaagacctttagctgtggtttggttcctcctgggactt

SEQ ID NO: 8167 - DNA, 119 bp, homo sapiens
agcaggatctcccatgagctgacaaagacctttagctgtggtttggttcctcctgggacttggctgctctctgccaggccctccccagcgtcatagcaggtggagtttttaaccagcaa

SEQ ID NO: 8168 - DNA, 119 bp, homo sapiens
ttggctgctcctctgccaggccctccccagcgtcatagcaggtggagtttttaaccagcaaagggatggacctctttcacttccgccctgacatcctggccgaattgctttgggctttt

SEQ ID NO: 8169 - DNA, 119 bp, homo sapiens
aaagggatggaacctctttcacttccgccctgacatcctggccgaattgctttgggctttttcaagaacgaatgccactctttgcaacgctgtttacaaggtcactgtgtgaaggtgta

SEQ ID NO: 8170 - DNA, 119 bp, homo sapiens
gatacatcaaagtaaagcagtgacattttaaacaaggagacgtataaaatattccatagaattgggtagagggtaatttgcttaagttcactgtcactctggatgccaggaataaaaac

SEQ ID NO: 8171 - DNA, 119 bp, homo sapiens
gaattgggtaggagggtaatttgcttaagttcactgtcactctggatgccaggaataaaaaccatcatcttttcttcctctgtgagcatcaagtacgaagatgagaaattttagttata

SEQ ID NO: 8172 - DNA, 119 bp, homo sapiens
aaaccatcatcattttcttcctctgtgagcatcaagtacgaagatgagaaattttagttataaattagtaagtgttaggatttaaattttacttagaaattaaaacttctccagtgaaa

SEQ ID NO: 8173 - DNA, 119 bp, homo sapiens
tataaattagtgaagtgttaggatttaaattttacttagaaattaaaacttctccagtgaaatacctttatccattttgttctgcatcttgtggaagtcctgaattcagggatgttatt

SEQ ID NO: 8174 - DNA, 119 bp, homo sapiens
gaaataccttttatccattttgttctgcatcttgtggaagtcctgaattcagggatgttattatattttcgagtttgcttcttcaggtcagttccaatgtggtttagaaggaatttatt

SEQ ID NO: 8175 - DNA, 119 bp, homo sapiens
tattatattttccgagtttgcttcttcaggtcagttccaatgtggtttagaaggaatttattttctcattcctccccatagatttctcaatagtataattttctaggggatatctggtt

SEQ ID NO: 8176 - DNA, 119 bp, homo sapiens
tattttctcatatcctccccatagatttctcaatagtataattttctaggggatatctggttcattttggaattctggaaaattttgcttactgttttttacaaaatattcacaatcta

SEQ ID NO: 8177 - DNA, 119 bp, homo sapiens
ggttcattttgggaattctggaaaattttgcttactgttttttacaaaatattcacaatctaaaatttcgacaaaattaaaaataccctacagaaaccagcatattgtacagcaatgat

SEQ ID NO: 8178 - DNA, 119 bp, homo sapiens
tctaaaatttctgacaaaattaaaaataccctacagaaaccagcatattgtacagcaatgatttattacatataataaacaaccacctttaggctggatatgaaaataaaaaccaacac

SEQ ID NO: 8179 - DNA, 119 bp, homo sapiens
tgatttattactatataataaacaaccacctttaggctggatatgaaaataaaaaccaacacaaatatgcagatccccattttctaaagaaatatatctttattgaccttttccatttt

SEQ ID NO: 8180 - DNA, 119 bp, homo sapiens
acacaaatatggcagatccccattttctaaagaaatatatctttattgaccttttccattttcttacaagcagttaaaaactcattcttacccttgcatgctattcaatggttatgatg

SEQ ID NO: 8181 - DNA, 119 bp, homo sapiens
ttttcttacaaagcagttaaaaactcattcttacccttgcatgctattcaatggttatgatggctgcctcttatgagactgttagtggagctctagtaagtttccttaagcaccacaga

SEQ ID NO: 8182 - DNA, 119 bp, homo sapiens
gatggctgcctccttatgagactgttagtggagctctagtaagtttccttaagcaccacagaagatcatattgcttggtcccacttttataggaaagaatccaagtttcaccagatagt

SEQ ID NO: 8183 - DNA, 119 bp, homo sapiens
cagaagatcatcattgcttggtcccacttttataggaaagaatccaagtttcaccagatagtgtatactagctctcttgaagaagaccagtttagtggattaatgtctaatttacatat

SEQ ID NO: 8184 - DNA, 119 bp, homo sapiens
tagtgtatacttagctctcttgaagaagaccagtttagtggattaatgtctaatttacatatagtaataagacaaactttgaatctttacatattaaatgcccactttataccatggtg

SEQ ID NO: 8185 - DNA, 119 bp, homo sapiens
atatagtaataaagacaaactttgaatctttacatattaaatgcccactttataccatggtgtaattgttgaattatgggtgagtgtacagtatagagatgtagatgcactagatatat

SEQ ID NO: 8186 - DNA, 119 bp, homo sapiens
ggtgtaattgtttgaattatgggtgagtgtacagtatagagatgtagatgcactagatatatctataaaaaaatagtgctttaaggtaacaatattctttggctgacttaaatgcctgt

SEQ ID NO: 8187 - DNA, 119 bp, homo sapiens
atatctataaataaaatagtgctttaaggtaacaatattctttggctgacttaaatgcctgtggttgaccttagaaaagactaaaatgaaaatggccccactattattgtcaatcttaa

SEQ ID NO: 8188 - DNA, 119 bp, homo sapiens
ctgtggttgactcttagaaaagactaaaatgaaaatggccccactattattgtcaatcttaacacagagttgtgcggaaggtccctatactgctgactgtcagcatctccaggtccacg

SEQ ID NO: 8189 - DNA, 119 bp, homo sapiens
ttaacacagagcttgtgcggaaggtccctatactgctgactgtcagcatctccaggtccacgatatgtttcttggtcctgataatgacttcacgagcacaagcattgcacttacaggac

SEQ ID NO: 8190 - DNA, 119 bp, homo sapiens
tcgtaggtagaactctccattttcatttccagatttaatccgaaaagtattgatggtgttggcataaatgttgtggcctgtatctggaagatgtctgatggcacagacctatcagatcg

SEQ ID NO: 8191 - DNA, 119 bp, homo sapiens
tccgaaaagtattgatggtgttggcataaatagttgtggcctgtatctggaagatgtctgatggcacagcctatcagatcggatgctcatgtatttgtagactattgactggggcagtt

SEQ ID NO: 8192 - DNA, 119 bp, homo sapiens
gcctgtatctggaagatgtctgatggcacagacctatcagatcggatgctcatgtatttgtagactattactggggcagttctcggcacatggcatttgagactgggcaaacacatcgg

SEQ ID NO: 8193 - DNA, 119 bp, homo sapiens
ttctctggtgttagaatgtagggatcttgacaaggatttcgtggataacaacggaagccgccatgataatccaacacatttcatcctcccggcattcatttgtggtctcacactcattt

SEQ ID NO: 8194 - DNA, 119 bp, homo sapiens
ctggtgttagaatgtagggatcttgacaaggatttcgtggataacaacggaagccgccatgataattccacacatttcatcctcccggcattcatttgtggtctcacactcatttatat

SEQ ID NO: 8195 - DNA, 119 bp, homo sapiens
ctacgcactgctcccctcgcttctgatatccaggagggcactgacatgcaaaggatccccgtaaattgagcacacttggtctgctctacagttgtgcgtccctgcagtgcactcgtcta

SEQ ID NO: 8196 - DNA, 119 bp, homo sapiens
cgcactgctcccctcgcttctgatatccaggagggcactgacatgcaaaggatccccgtaaattgatgccacttggtctgctctacagttgtgcgtccctgcagtgcactcgtctatgt

SEQ ID NO: 8197 - DNA, 119 bp, homo sapiens
cttggcacacgttgtgttcactttgctcgtagcctgctgcacactggatacggtgggaagggttggaggaatgcgctgagggtcagctgggttccgccggatgacaaagttatttcggc

SEQ ID NO: 8198 - DNA, 119 bp, homo sapiens
tgggaagggttggagggaatgcgctgagggtcagctgggttccgccggatgacaaagttatttcggccatctgcatttcagggcctgcgactgcagcagcactggccacaaaaccaccc

SEQ ID NO: 8199 - DNA, 119 bp, homo sapiens
aaagttatttcggccagtctgcatttcagggcctgcgactgcagcagcactggccacaaaaccacccccggcaacactccactggttgccatgctgctggcagctacaaccccggtggt

SEQ ID NO: 8200 - DNA, 119 bp, homo sapiens
ccacaaaaccacccccgggcaacactccactggttgccatgctgctggcagctacaaccccggtggttgccctgaggttccttctgctggttgtgtttcctgctgaggctgttcattat

SEQ ID NO: 8201 - DNA, 119 bp, homo sapiens
acaaccccggtggttgcccctgaggttccttctgctggttgtgtttcctgctgaggctgttcattattgcaataatctgggctgttttcggaaggcagaggtatcctccatagtggttg

SEQ ID NO: 8202 - DNA, 119 bp, homo sapiens
aggctgttcattattgacaataatctgggctgttttcggaaggcagaggtatcctccatagtggttgaccacttcattccacctttacaagcgtctgggacaatgtcacattcatcaat

SEQ ID NO: 8203 - DNA, 119 bp, homo sapiens
tccagggcagttctcgggtactcaacacccctcagctcaccccacctcactctcccgcgcgcggcccaggagtactgggctcgctcggggcgaccccccgttgggggctcctacctgtg

SEQ ID NO: 8204 - DNA, 119 bp, homo sapiens
gcggcccagtgagtactgggctcgctcggggcgaccccccgttgggggctcctacctgtgcggccgcgcgcgctccgggcccgggcagcgaggggagtgcgcaggggagggcagccccg

SEQ ID NO: 8205 - DNA, 119 bp, homo sapiens
cggccgcgctgcgctccgggcccgggcagcgaggggagtgcgcaggggagggcagccccgtgggtctgactggcgaagtccggcagcggccgcggcggcaggaggaggaggagaaaggg

SEQ ID NO: 8206 - DNA, 119 bp, homo sapiens
ctgagggaggcgcgagcgctgagcccagcgttgcgagcccggcggtagagcgcgcagcgcagcgaggtcgcgccccctgctccaggggccctctttgccgcccccgcttgccctccctt

SEQ ID NO: 8207 - DNA, 119 bp, homo sapiens
gcgcagcgaggtccgcgccccctgctccaggggccctctttgccgcccccgcttgccctcccttgccagtcctcgtttcccagactcgcggggaccccacgccagagaggacacgttga

SEQ ID NO: 8208 - DNA, 119 bp, homo sapiens
cctcccttgccagctcctcgtttcccagactcgcggggaccccacgccagagaggacacgttgacatgtatgtcctggatgcgcttcagccttggggatgctcccactctctagtgcgt

SEQ ID NO: 8209 - DNA, 119 bp, homo sapiens
cacgttgacatgtgatgtcctggatgcgcttcagccttggggatgctcccactctctagtgcgttttctcttctctgaggaggggaacacagcatctccctcagagaccagagggttct

SEQ ID NO: 8210 - DNA, 119 bp, homo sapiens
aatagtaaaaagtaatttaacacgaactgtaggaagaaaattacaagtaaacatttgcccctgatggagaaaatgaccttatttttaaatttaaagcataaattgccagtttggaaaca

SEQ ID NO: 8211 - DNA, 119 bp, homo sapiens
cctgatggagaaaaatgaccttatttttaaatttaaagcataaattgccagtttggaaacactgctattcatacacctgtattagttcatccttttaaaatgatgctgattgtttttag

SEQ ID NO: 8212 - DNA, 119 bp, homo sapiens
cactgctattacatacacctgtattagttcatccttttaaaatgatgctgattgtttttagaaaagaaatgtcttatgctatattatctttatgattggcttcaaattttaaaacaaaa

SEQ ID NO: 8213 - DNA, 119 bp, homo sapiens
agaaaagaaaatgtcttatgctatattatctttatgattggcttcaaattttaaaacaaaaatttgcttaagaaaaaaatatagatttataaaatcagattaacactgtacacagagag

SEQ ID NO: 8214 - DNA, 119 bp, homo sapiens
aaatttgcttaaagaaaaaaatatagatttataaaatcagattaacactgtacacagagagataaagtggttggcaataatatgtaaaaagttgaacacaactgggtctagcagtgaag

SEQ ID NO: 8215 - DNA, 119 bp, homo sapiens
agataaagtgtgttggcaataatatgtaaaaagttgaacacaactgggtctagcagtgaagagttaaattgaattactttggagacttgccctagccaagttattatgcacaatttcat

SEQ ID NO: 8216 - DNA, 119 bp, homo sapiens
agagttaaatctgaattactttggagacttgccctagccaagttattatgcacaatttcatcatataaaaaagggatacttgcccctaatttagattataactcacacatgccataatt

SEQ ID NO: 8217 - DNA, 119 bp, homo sapiens
atcatataaaaaaagggatacttgcccctaatttagattataactcacacatgccataattacttccattgtaataatacatagggttaaaaaaactagtataaaaactttcctaataa

SEQ ID NO: 8218 - DNA, 119 bp, homo sapiens
ttacttccatctgtaataatacatagggttaaaaaaactagtataaaaactttcctaataatttacaaacaaaaataatttggactagaactaaggataaaaagaaaaagggatgatgg

SEQ ID NO: 8219 - DNA, 119 bp, homo sapiens
aatttacaaatcaaaaataatttggactagaactaaggataaaaagaaaaagggatgatggtgtagacatttaacagtaaactctcagtgcaaaaataaatgtaaatttgcaagtatcc

SEQ ID NO: 8220 - DNA, 119 bp, homo sapiens
gttttttctatacttttaaaaatggctcagagcagcaaaacaagttagaggatttattctgtgaaatgcctgcagagaaaaagaatgggcaaatagtataattaaaaatagttattgat

SEQ ID NO: 8221 - DNA, 119 bp, homo sapiens
tattctgtgaaatgcactgcagagaaaaagaatgggcaaatagtataattaaaaatagttattgattcaactttccaaaatttttaaaaagtaaaccaccaaagaccaatacttctctc

SEQ ID NO: 8222 - DNA, 119 bp, homo sapiens
atagttattgattcacactttccaaaatttttaaaaagtaaaccaccaaagaccaatacttctctctccttcaatactaagccattttttccagtaaaattaatgaaataatgtatatt

SEQ ID NO: 8223 - DNA, 119 bp, homo sapiens
aatacttctctctcctttcaatactaagccattttttccagtaaaattaatgaaataatgtatattttttaactaatcagtttgtgacagctgtggttctcactttttaaaaatacaaa

SEQ ID NO: 8224 - DNA, 119 bp, homo sapiens
ataatgtatatttttataactaatcagtttgtgacagctgtggttctcactttttaaaaatacaaaatctagttgcaaacagataatacacaatgatttttaaaactgaataggcaaag

SEQ ID NO: 8225 - DNA, 119 bp, homo sapiens
taaaaatacaaaatcatagttgcaaacagataatacacaatgatttttaaaactgaataggcaaagcctactctaactgatcaaatgaccaatcagctggattcaggcttttcaggcta

SEQ ID NO: 8226 - DNA, 119 bp, homo sapiens
gaataggcaaagccttactctaactgatcaaatgaccaatcagctggattcaggcttttcaggctacagtgactttgatcaacagccctgcacatatcagaagcgtccccacagatgtt

SEQ ID NO: 8227 - DNA, 119 bp, homo sapiens
cttttcaggctacagatgactttgatcaacagccctgcacatatcagaagcgtccccacagatgttctaacacaaatgcggctgctgacaccctgacgctgcaaacaacagcaagggca

SEQ ID NO: 8228 - DNA, 119 bp, homo sapiens
cccacagatgttctaaacacaaatgcggctgctgacaccctgacgctgcaaacaacagcaagggcataggaggagaccttgatgattcagtgtgattcttcaacagatttctcttcttc

SEQ ID NO: 8229 - DNA, 119 bp, homo sapiens
acagcaagggcatagagaggagaccttgatgattcagtgtgattcttcaacagatttctcttcttcacttcctcattggcttcatctttttccttgtaagaatcctggctgttggtatc

SEQ ID NO: 8230 - DNA, 119 bp, homo sapiens
tttctcttcttcactttcctcattggcttcatctttttccttgtaagaatcctggctgttggtatcaataaataattttcttccccattctctctttcttctattttttcttcttcatt

SEQ ID NO: 8231 - DNA, 119 bp, homo sapiens
ctttctttgtcttcagtgacacttttcgtctcttgattgttgaagtactcaagtacttttccactttggctttctttgaaacaaactcatcagatattcctagtgcttttagggtatta

SEQ ID NO: 8232 - DNA, 119 bp, homo sapiens
attgttgaagtactcaagtacttttccactttggcctttctttgaaacaaactcatcagatattcctaggcttttagggtattagaataatgcttttctgctgccattcttgcattttt

SEQ ID NO: 8233 - DNA, 119 bp, homo sapiens
ctgagacattttactctggatttagatatttgagctaaactttgatgtgagtcataagccttagcccggttgtcaggagtttctgcaattctttcattctttgcttctgtttagttagg

SEQ ID NO: 8234 - DNA, 119 bp, homo sapiens
gagtcataagccttagcccgggttgtcaggagtttctgcaattctttcattctttgcttctgtttagttggatccgatttctctcttcttccaacattttcttttcctcaagtgatctc

SEQ ID NO: 8235 - DNA, 119 bp, homo sapiens
cttacggcttgttctcgtcctctggaagataccgtgggcacgggagggttgcagttacaaggcacagggttacacctgcacatcttactggtgacttacgccttggagacaaataaggc

SEQ ID NO: 8236 - DNA, 119 bp, homo sapiens
caaggcacagggtttacacctgcacatcttactggtgacttacgccttggagacaaataaggccaacgttttcttttaaattttcttcatctgcttcgatgtctgccaaaattttttct

SEQ ID NO: 8237 - DNA, 119 bp, homo sapiens
taaggccaacgtgtttcttttaaattttcttcatctgcttcgatgtctgccaaaattttttctcttttatagatgcatgtggagatgcatgaagatcaaatggtttacacactgttaag

SEQ ID NO: 8238 - DNA, 119 bp, homo sapiens
ttttctcttttaatagatgcatgtggagatgcatgaagatcaaatggtttacacactgttaagagttttgagacttgtgttctgagaggtgtttctggtatctctcaggaaggtcctca

SEQ ID NO: 8239 - DNA, 119 bp, homo sapiens
gttaagagttttggagacttgtgttctgagaggtgtttctggtatctctcaggaaggtcctcaaaatcagagttgggcacctaaccttgtgtttacacttcaactttacagcctgttca

SEQ ID NO: 8240 - DNA, 119 bp, homo sapiens
tcctcaaaatcaggagttgggcacctaaccttgtgtttacacttcaactttacagcctgttcaggacactggggttcctgcatccacaagctgacctacaaggcagaggagatgagttc

SEQ ID NO: 8241 - DNA, 119 bp, homo sapiens
tgttcaggacacctggggttcctgcatccacaagctgacctacaaggcagaggagatgagttctgtaaagctcctgggctctcagctgtgtcctaaggtttcgatagagctcttcttct

SEQ ID NO: 8242 - DNA, 119 bp, homo sapiens
gagttctgtaaatgctcctgggctctcagctgtgtcctaaggtttcgatagagctcttcttcttttaactgtcattggtagttgaaccataagtagatcgaggaatgggtctggcttta

SEQ ID NO: 8243 - DNA, 119 bp, homo sapiens
tcttcttttaacttgtcattggtagttgaaccataagtagatcgaggaatgggtctggctttaaatcgattgttttctttttatacttaagaaagtctctcagctgcttttcccgggct

SEQ ID NO: 8244 - DNA, 119 bp, homo sapiens
gctttaaatcgatttgttttctttttatacttaagaaagtctctcagctgcttttcccgggctgctcgctctgttcctcccttgctataaatttaaatggcttttgtgaggccaaaaga

SEQ ID NO: 8245 - DNA, 119 bp, homo sapiens
cgggctgctcgcttctgttcctcccttgctataaatttaaatggcttttgtgaggccaaaagagcttcttgcttttctccttcagagaccttctccgttcttctttttgcttgactaaa

SEQ ID NO: 8246 - DNA, 119 bp, homo sapiens
aaaagagcttctttgcttttctccttcagagaccttctccgttcttctttttgcttgactaaatcatggaaagggggagaaagacagatgcaggaactggattggctcggaatttcttc

SEQ ID NO: 8247 - DNA, 119 bp, homo sapiens
actaaatcatggtaaagggggagaaagacagatgcaggaactggattggctcggaatttcttcttatacctggatcctcttcttgttttttgagcgctttatgtaccatttcgatatct

SEQ ID NO: 8248 - DNA, 119 bp, homo sapiens
ttcttcttatactctggatcctcttcttgttttttgagcgctttatgtaccatttcgatatctgatttaatttcatggactcttcttttttcttctgttctcttatcatcatttgaaaa

SEQ ID NO: 8249 - DNA, 119 bp, homo sapiens
atatctgatttagatttcatggactcttcttttttcttctgttctcttatcatcatttgaaaaggctccgtactgtaattgtgggcacccattcttttcgtttcttccttcttttttca

SEQ ID NO: 8250 - DNA, 119 bp, homo sapiens
tgaaaaggctccggtactgtaattgtgggcacccattcttttcgtttcttccttcttttttcagctgcaggaagccagtatctttacagcgaatataatcctcaacacaaaagtctgtc

SEQ ID NO: 8251 - DNA, 119 bp, homo sapiens
ttttcagctgcatggaagccagtatctttacagcgaatataatcctcaacacaaaagtctgtccacatatgttgatgagctccttagcataggtcatcattctgtttttcctaggatac

SEQ ID NO: 8252 - DNA, 119 bp, homo sapiens
tctgtccacatattgttgatgagctccttagcataggtcatcattctgtttttcctaggatactcttttctaggttgggtaactcctcttcagaggaggacacatacaaggaggaagac

SEQ ID NO: 8253 - DNA, 119 bp, homo sapiens
ggatactctttttctaggttgggtaactcctcttcagaggaggacacatacaaggaggaagactggcctaatcaggctctgaaaatgatgtcattaatgagacagggtgataggagttc

SEQ ID NO: 8254 - DNA, 119 bp, homo sapiens
ctggaagagtcactaagagagtcttctctgatgaccactggctgaacttcctttaaatgtaatttatccggtacattttctctaattttgccatagtttctatgtgggcagccttcaac

SEQ ID NO: 8255 - DNA, 119 bp, homo sapiens
taatttatcctggtacattttctctaattttgccatagtttctatgtgggcagccttcaactcttctacttcttgaaatactcctcattagagtggtgaatatcaggaaagttcacaaa

SEQ ID NO: 8256 - DNA, 119 bp, homo sapiens
actcttctactttcttgaaatactcctcattagagtggtgaatatcaggaaagttcacaaagtcctcatgcttatcggtgcatgttcatccaccccagaaaagctggtgttcaaatcag

SEQ ID NO: 8257 - DNA, 119 bp, homo sapiens
cgatgccccagcgggctgagccactttctcctcctcttcgtcctccaagatcgcctccgctgccgccaggcctttaaggggtcttcgcgttcgtactgggcgacccgcgctccagtgat

SEQ ID NO: 8258 - DNA, 119 bp, homo sapiens
tccgctgccgccagggcctttaaggggtcttcgcgttcgtactgggcgacccgcgctccagtgatgggattaccggggtctggagactggaggccaccagcttcgccactcggtgggag

SEQ ID NO: 8259 - DNA, 119 bp, homo sapiens
ctccagtgatgggatttaccggggtctggagactggaggccaccagcttcgccactcggtgggaggtggcatcgccccgcctccgaggcctgagcgcctgcgctggcccgggacgggaa

SEQ ID NO: 8260 - DNA, 119 bp, homo sapiens
tcggtgggaggtggccatcgccccgcctccgaggcctgagcgcctgcgctggcccgggacgggaaagctgtgcggcccctggcaacccgggggcgcctagctagggagccggttgctat

SEQ ID NO: 8261 - DNA, 119 bp, homo sapiens
cctactgccccttttttaaagtacctgggagaacaaagtttaaatattctatttttgtagcacctaattacatacaatttaagacactttcaaaattttacattattgaaaataagtag

SEQ ID NO: 8262 - DNA, 119 bp, homo sapiens
tttgtagcacctaattaacatacaatttaagacactttcaaaattttacattattgaaaataagtaggtgaagacttttacttacgatcactttgctgttatgctgcatgtttttgaaa

SEQ ID NO: 8263 - DNA, 119 bp, homo sapiens
ttgaaaataagtaggttgaagacttttacttacgatcactttgctgttatgctgcatgtttttgaaatataaaactttattttgaaaacaaacactcaactcaaaactcttaactaatt

SEQ ID NO: 8264 - DNA, 119 bp, homo sapiens
gcatgtttttgaaataataaaactttattttgaaaacaaacactcaactcaaaactcttaactaatttaatgattcatactgtctcttgttaaaaatccacacgggggattttaagtct

SEQ ID NO: 8265 - DNA, 119 bp, homo sapiens
actcttaactaatttatatgattcatactgtctcttgttaaaaatccacacgggggattttaagtctgttcaggccatgaaaagtttagatatgaagaaggcagttttctttttttctt

SEQ ID NO: 8266 - DNA, 119 bp, homo sapiens
gggattttaagtctgtatcaggccatgaaaagtttagatatgaagaaggcagttttctttttttcttaagtttacaccagaccaaagtgaatcattttgagagaaccaccatctctgat

SEQ ID NO: 8267 - DNA, 119 bp, homo sapiens
ctgttagaagagccattcagtattctttgttgtaaaatatgtctgtgggttgggcaagagggagggaggtatctggaaatgagtcttctccttgaggtgctaaagacaggccaataaat

SEQ ID NO: 8268 - DNA, 119 bp, homo sapiens
tgtgggttgggcaagagggagggaggttatctggaaatgagtcttctccttgaggtgctaaagacaggcaataaatgcttcatttagcatatcccctctgtccaagggtcccaggagtt

SEQ ID NO: 8269 - DNA, 119 bp, homo sapiens
ctgagcaagtgatggaagaatctccttgcatatttgctgatttgatctctatattccaatatagtggaaccagaagtggtcttgttggagcatagaaggttccaaggcttgtctcaagc

SEQ ID NO: 8270 - DNA, 119 bp, homo sapiens
gcaagtgatggaagaatctccttgcatatttgctgatttgatctctatattccaatatagtggaatccaaagtggtcttgttggagcatagaaggttccaaggcttgtctcaagctgtg

SEQ ID NO: 8271 - DNA, 119 bp, homo sapiens
cttctctctctggagtgagcttctgtctaagaagatggtttacaatggcgctcatgctgataaagcactgtggcccagagtgtcccagttcatgctgctcaggatgtttattgcctcat

SEQ ID NO: 8272 - DNA, 119 bp, homo sapiens
atggtttacaatggcgctcatgctgataaagcactggtggcccagagtgtcccagttcatgctgctcagatgtttattgcctcatagatctcatcacagtgaatgtactggaagatgat

SEQ ID NO: 8273 - DNA, 119 bp, homo sapiens
tggtggcccagagtgtcccagttcatgctgctcaggatgtttattgcctcatagatctcatcacagtgatgtactggaagatgatgtctatcaggcccagctgtcctcgagtgaagacg

SEQ ID NO: 8274 - DNA, 119 bp, homo sapiens
ctagtttaaacaacagcacacccaaaggtcctctttcaaacctgaggaagaggagatcatagatatcacaccttcacccttctgagaaacaacctgaggagctatccattgcatttgaa

SEQ ID NO: 8275 - DNA, 119 bp, homo sapiens
gatcatagatatcactaccttcacccttctgagaaacaacctgaggagctatccattgcatttgaacaaactgctggaggcatcaaataatttactgaattgcagagtctccctgggta

SEQ ID NO: 8276 - DNA, 119 bp, homo sapiens
attgcatttgaacaagactgctggaggcatcaaataatttactgaattgcagagtctccctgggtaagcgtcttcagccaacagttggatgttaataggggatagagccatatcaaaaa

SEQ ID NO: 8277 - DNA, 119 bp, homo sapiens
tctccctgggtaagcggtcttcagccaacagttggatgttaataggggatagagccatatcaaaaatttcaactccccttggttgctgccaactagcagaatggcaccacttgggtggc

SEQ ID NO: 8278 - DNA, 119 bp, homo sapiens
ccatatcaaaaatttgcaactccccttggttgctgccaactagcagaatggcaccacttgggtggcagctattaatgaaggcaaaagttcagtctgtgctaagagagtcactctacggt

SEQ ID NO: 8279 - DNA, 119 bp, homo sapiens
cacttgggtggcagcttattaatgaaggcaaaagttcagtctgtgctaagagagtcactctacggtgagttcataaagaattagcgaagaatcttcacagcccagaatcagtttgtctt

SEQ ID NO: 8280 - DNA, 119 bp, homo sapiens
tcactctacggtgagtttcataaagaattagcgaagaatcttcacagcccagaatcagtttgtcttcagaacattcctgcagcagctgatggcctttgactttagtggtattctggtga

SEQ ID NO: 8281 - DNA, 119 bp, homo sapiens
tcagtttgtcttcagtaacattcctgcagcagctgatggcctttgactttagtggtattctggtgactgcacacactggattttattccgaatgcattcatagatgcagctgtcagcca

SEQ ID NO: 8282 - DNA, 119 bp, homo sapiens
gtattctggtgactgacacacactggattttattccgaatgcattcatagatgcagctgtcagccatggctctttgtctacacttacggagtgctccactgtgaacacctgataaggct

SEQ ID NO: 8283 - DNA, 119 bp, homo sapiens
agctgtcagccatgggctctttgtctacacttacggagtgctccactgtgaacacctgataaggctgttggtgccaaagcgaacatccagtgggtcccattctgtgcggacagaactca

SEQ ID NO: 8284 - DNA, 119 bp, homo sapiens
ctctagtcttccttgagcataacccaggaggagtagattggctctgtccttctcagaagaaatgggggccaaggccaagcatcatcgttgaccagtggccaccagcaaacaactctatc

SEQ ID NO: 8285 - DNA, 119 bp, homo sapiens
attggctctgtccttctcagaagaaatgggggcccaaggccaagcatcatcgttgaccagtggccaccacaaacaactctatcatgaacacagttgatagctagatgtcgctctgttgt

SEQ ID NO: 8286 - DNA, 119 bp, homo sapiens
aggccaagcatcatcgttgaccagtggccaccagcaaacaactctatcatgaacacagttgatagctagtgtcgctctgttgtcttgtttattgggccgggtatttcataatagaaaat

SEQ ID NO: 8287 - DNA, 119 bp, homo sapiens
cttataatccaaggctgagagtttttccagtcttttgtttacatcagaagactccatcttcttggtaaatgaataaaacatagtttgttttgtgccaaaaatgataagatgataaaact

SEQ ID NO: 8288 - DNA, 119 bp, homo sapiens
ctgagagtttttccagtcttttgtttacatcagaagactccatcttcttggtaaactgaataaaacatatttgttttgtgccaaaaatgataagatgataaaactgtctgtgagaagag

SEQ ID NO: 8289 - DNA, 119 bp, homo sapiens
ctgtctcgggagtggggaagaagcgcgactcccggccgctttggagtaggcgtcccagcaaaactctcgctcatcaccagacactaccccgggcagaaggttcctaggctaggtcctcg

SEQ ID NO: 8290 - DNA, 119 bp, homo sapiens
aaaactctcgcctcatcaccagacactaccccgggcagaaggttcctaggctaggtcctcggacccgaggggagcgacacgctcgcttggtctcttgggtctccaggacgccgccgccg

SEQ ID NO: 8291 - DNA, 119 bp, homo sapiens
cggacccgagagggagcgacacgctcgcttggtctcttgggtctccaggacgccgccgccgccgccacatttcctcaggtgctacaaagcagccagggtgtgcgtgcgctcccgcctcg

SEQ ID NO: 8292 - DNA, 119 bp, homo sapiens
cgccgccacagtttcctcaggtgctacaaagcagccagggtgtgcgtgcgctcccgcctcgtcgcttagaacctgagaagctgtccggtcgtcccaacttatcaattcccccgcccctc

SEQ ID NO: 8293 - DNA, 119 bp, homo sapiens
cgtcgcttagcaacctgagaagctgtccggtcgtcccaacttatcaattcccccgcccctccagagtgtaatcgttttttaaaagattttgtttccgggtcgatccagctttacgcagc

SEQ ID NO: 8294 - DNA, 119 bp, homo sapiens
tccagagtgtcaatcgttttttaaaagattttgtttccgggtcgatccagctttacgcagcggaaggtcctttacctcccacgtttaccctcatgggaggatgcagtctcagtcacgcg

SEQ ID NO: 8295 - DNA, 119 bp, homo sapiens
gcggaaggtctctttacctcccacgtttaccctcatgggaggatgcagtctcagtcacgcgcgtggggggatgtcgctaaggggtgattctcccctccctagagttacacacgctatct

SEQ ID NO: 8296 - DNA, 119 bp, homo sapiens
cgcgtgggggtgatgtcgctaaggggtgattctcccctccctagagttacacacgctatctctcccgccattgccgggctccatcaggcaggtcctttcctcctgagcccaaaccatcc

SEQ ID NO: 8297 - DNA, 119 bp, homo sapiens
ctgcagcggcggcggcggcgaacgtggacgacgtagtggtcgtggaggaggtggaggaagaggcggggcggagttggactccgactctcactacgggccccagcatctggaaagtatag

SEQ ID NO: 8298 - DNA, 119 bp, homo sapiens
gaggcggggcgggagttggactccgactctcactacgggccccagcatctggaaagtatagacgacgagaggacgaggaggccaaggcctggctgcaggcgcaccccggcaggattttg

SEQ ID NO: 8299 - DNA, 119 bp, homo sapiens
agacgacgaggaggacgaggaggccaaggcctggctgcaggcgcaccccggcaggattttgcctccgcttcgcccccgcagcaccgctactcggagggcgagcggacctccctggagaa

SEQ ID NO: 8300 - DNA, 119 bp, homo sapiens
attgttccattgacctgtcatgtatggcaacagatagtatatcaaggcaatagtagaacacaaatttctatactaatgtggtctgtttggaaacaacagctcagcggggttctggggat

SEQ ID NO: 8301 - DNA, 119 bp, homo sapiens
ccattgacctgtcatgtatggcaacagatagtatatcaaggcaatagtagaacacaaatttctgatactatgtggtctgtttggaaacaacagctcagcggggttctggggatgatcag

SEQ ID NO: 8302 - DNA, 119 bp, homo sapiens
aaaacagaatcttggcattgtcttcctcaagaaatggactcttcccaaaccttggatacatcccagactggtttaatgtgagaacggaagatactgaagtgacagacttcccctctctg

SEQ ID NO: 8303 - DNA, 119 bp, homo sapiens
ctcttcccaaaccttggatacatcccagactaggtttaatgtgagaacggaagatactgaagtgacagattcccctctctggaggagggcatattgacgcaatcagaaaatcaagtaaa

SEQ ID NO: 8304 - DNA, 119 bp, homo sapiens
atgtgagaacggaagatactgaagtgacagacttcccctctctggaggagggcatattgacgcaatcagaaatcaagtaaaggaacccaacagagatctcttctgttctccactgctag

SEQ ID NO: 8305 - DNA, 119 bp, homo sapiens
gggaattcctgataagtctgaagatactgaatggtcttctcgaccatcggaagttagtgaagctttattcaggctactgcagaagtagcttcagacttagcaagcagtcgctttagtgt

SEQ ID NO: 8306 - DNA, 119 bp, homo sapiens
gaagctttattccaggctactgcagaagtagcttcagacttagcaagcagtcgctttagtgtatctcagacccgcttataggcagcacagctgttgggtctcagtgcccttttttacct

SEQ ID NO: 8307 - DNA, 119 bp, homo sapiens
gtgtatctcagcacccgcttataggcagcacagctgttgggtctcagtgcccttttttaccttctgaacagggaataatgaagagactatttcgtctgttgatgaactgaaaattccca

SEQ ID NO: 8308 - DNA, 119 bp, homo sapiens
accttctgaacaagggaataatgaagagactatttcgtctgttgatgaactgaaaattcccaaagactggatcgttatgatgatctttgttcatatatgtcatggaagacacgaaaaga

SEQ ID NO: 8309 - DNA, 119 bp, homo sapiens
cccaaagactgtgatcgttatgatgatctttgttcatatatgtcatggaagacacgaaaagatacacagggcctgaaaacaatttagctgataaagatcaagtttcagttgcaacttca

SEQ ID NO: 8310 - DNA, 119 bp, homo sapiens
aagatacacagtggcctgaaaacaatttagctgataaagatcaagtttcagttgcaacttcatttgacaaactgatgaaaacatagctactaaaagaagtgaccattttgatgctgctc

SEQ ID NO: 8311 - DNA, 119 bp, homo sapiens
ttcatttgacataactgatgaaaacatagctactaaaagaagtgaccattttgatgctgctcgttcatagggcagtattggacacaggaagattcatctaagcaggcagaaacatattt

SEQ ID NO: 8312 - DNA, 119 bp, homo sapiens
gagacacttctaaaggaggcatagctaaagttactcaatccaacttgaagtcaggcatcactaccactctgttgattcagacattggatctcatttatccttgtcccttgaggacctgt

SEQ ID NO: 8313 - DNA, 119 bp, homo sapiens
actaccactcctgttgattcagacattggatctcatttatccttgtcccttgaggacctgtctcagttgctgtaagttctctagaaactactactggtcaacacactgatactctcaac

SEQ ID NO: 8314 - DNA, 119 bp, homo sapiens
gtctcagttggctgtaagttctctagaaactactactggtcaacacactgatactctcaaccaaaagacttagcagatactcatctaactgaagagactctgaaagtcacagctattcc

SEQ ID NO: 8315 - DNA, 119 bp, homo sapiens
accaaaagacattagcagatactcatctaactgaagagactctgaaagtcacagctattcctgaaccagtgaccagaagactgcaacaccaacagtactctctagttcccactcacata

SEQ ID NO: 8316 - DNA, 119 bp, homo sapiens
cctgaaccagctgaccagaagactgcaacaccaacagtactctctagttcccactcacatagggggaagccagcattttctaccagcagggcttgccagacagtcatctaactgaagag

SEQ ID NO: 8317 - DNA, 119 bp, homo sapiens
tagggggaagcccagcattttctaccagcagggcttgccagacagtcatctaactgaagaggctttgaagtttcagctgctcctggactagctgaccagacaactggcatgtcaactct

SEQ ID NO: 8318 - DNA, 119 bp, homo sapiens
aggctttgaaagtttcagctgctcctggactagctgaccagacaactggcatgtcaactctaacctctattcctactcacatagagagaagcctggtactttttaccaacaagagttac

SEQ ID NO: 8319 - DNA, 119 bp, homo sapiens
ctaacctctacttcctactcacatagagagaagcctggtactttttaccaacaagagttaccagagagtacttaaccgaagagcctttggaagtttcagctgctcctggcccagtggag

SEQ ID NO: 8320 - DNA, 119 bp, homo sapiens
accagagagtaacttaaccgaagagcctttggaagtttcagctgctcctggcccagtggagcagaagacggaatacctacagtatcctctacatcccactcacatgtagaggacctcct

SEQ ID NO: 8321 - DNA, 119 bp, homo sapiens
agcagaagacgggaatacctacagtatcctctacatcccactcacatgtagaggacctcctctttttcttcgacagaccttgccagatggtcatctaactgatcaggctctgaaagtct

SEQ ID NO: 8322 - DNA, 119 bp, homo sapiens
ctctttttctatcgacagaccttgccagatggtcatctaactgatcaggctctgaaagtctcagctgtgctggaccagctgaccagaagactgggacagcaacagtactctctactccc

SEQ ID NO: 8323 - DNA, 119 bp, homo sapiens
ctcagctgtgtctggaccagctgaccagaagactgggacagcaacagtactctctactccccactcacaagagagaagcctggtattttttaccaacaagagttcgcagacagtcatca

SEQ ID NO: 8324 - DNA, 119 bp, homo sapiens
cccactcacatagagagaagcctggtattttttaccaacaagagttcgcagacagtcatcaaactgaaggactcttactaaagtttcagccactcctggaccagctgaccagaagactg

SEQ ID NO: 8325 - DNA, 119 bp, homo sapiens
caaactgaagagactcttactaaagtttcagccactcctggaccagctgaccagaagactgagataccacagtacagtctagttcttactcacaaagagaaaagcctagtattttgtac

SEQ ID NO: 8326 - DNA, 119 bp, homo sapiens
tgagataccagcagtacagtctagttcttactcacaaagagaaaagcctagtattttgtacccacaggattagcagacagtcatctacctgaagagggtctgaaagtttcagctgttgc

SEQ ID NO: 8327 - DNA, 119 bp, homo sapiens
acccacaggacttagcagacagtcatctacctgaagagggtctgaaagtttcagctgttgctggaccagtgaccagaagactggcctaccaacagtaccctctagtgcatactcacaca

SEQ ID NO: 8328 - DNA, 119 bp, homo sapiens
gctggaccagctgaccagaagactggcctaccaacagtaccctctagtgcatactcacacagagagaagtccttgttttctaccaacaggccttgctggacagccatctacccgaagag

SEQ ID NO: 8329 - DNA, 119 bp, homo sapiens
cagagagaagctccttgttttctaccaacaggccttgctggacagccatctacccgaagaggctctgaagtttcagctgtttctggaccagctgacggaaagactgggacaccagctgt

SEQ ID NO: 8330 - DNA, 119 bp, homo sapiens
aggctctgaaagtttcagctgtttctggaccagctgacggaaagactgggacaccagctgtaacctctattcctctgcgtcctcttcacttggagaaaagcccagtgctttctatcagc

SEQ ID NO: 8331 - DNA, 119 bp, homo sapiens
gtaacctctacttcctctgcgtcctcttcacttggagaaaagcccagtgctttctatcagcagaccttaccaatagtcatctaactgaagaggctctgaaagtatcaattgttcctgga

SEQ ID NO: 8332 - DNA, 119 bp, homo sapiens
gcagaccttacccaatagtcatctaactgaagaggctctgaaagtatcaattgttcctggaccaggtgacagaagactgggataccctcagcaccatctagtttctactcacacagaga

SEQ ID NO: 8333 - DNA, 119 bp, homo sapiens
gaccaggtgatcagaagactgggataccctcagcaccatctagtttctactcacacagagagaagcccatattttttcccagcagaccctgccagactttcttttccctgaagaagctc

SEQ ID NO: 8334 - DNA, 119 bp, homo sapiens
gagaagcccattattttttcccagcagaccctgccagactttcttttccctgaagaagctctgaaggttcagctgtttctgtattggctgcccagaagactgggacaccaacagtgtcc

SEQ ID NO: 8335 - DNA, 119 bp, homo sapiens
tctgaaggtttcagctgtttctgtattggctgcccagaagactgggacaccaacagtgtcctctaattccactcacatagcgagaaatctagtgttttctaccagcaagagttgccaga

SEQ ID NO: 8336 - DNA, 119 bp, homo sapiens
cctctaattctcactcacatagcgagaaatctagtgttttctaccagcaagagttgccagacagtgatcacctagagaatctctgaaaatgtctgctattcctggactgactgaccaga

SEQ ID NO: 8337 - DNA, 119 bp, homo sapiens
gacagtgatctacctagagaatctctgaaaatgtctgctattcctggactgactgaccagaagactgtccaacaccaacagtaccttcaggttccttctcacatagagagaagcccagt

SEQ ID NO: 8338 - DNA, 119 bp, homo sapiens
gaagactgtcccaacaccaacagtaccttcaggttccttctcacatagagagaagcccagtattttctacaacaggagtggccagatagttatgcaactgaaaaggctctgaaagtttc

SEQ ID NO: 8339 - DNA, 119 bp, homo sapiens
gtattttctatcaacaggagtggccagatagttatgcaactgaaaaggctctgaaagtttcaactggcctggaccagctgaccagaagactgagataccagcagtacagtctagttctt

SEQ ID NO: 8340 - DNA, 119 bp, homo sapiens
tcaactggccctggaccagctgaccagaagactgagataccagcagtacagtctagttcttacccacaggggagaagcctagtgttttgtacccacaggtgttatcagacagtcatcta

SEQ ID NO: 8341 - DNA, 119 bp, homo sapiens
ttacccacagagggagaagcctagtgttttgtacccacaggtgttatcagacagtcatctacctgaagaagtctgaaagtttcagccttccctggaccagctgaccagatgactgacac

SEQ ID NO: 8342 - DNA, 119 bp, homo sapiens
tacctgaagagagtctgaaagtttcagccttccctggaccagctgaccagatgactgacacaccagcagaccgtctactttctactcacaaagagagaagcctggtattttctaccaac

SEQ ID NO: 8343 - DNA, 119 bp, homo sapiens
acaccagcagtaccgtctactttctactcacaaagagagaagcctggtattttctaccaacagaccttgcagagagtcatctgcctaaagaggctctgaaaatttcagtagctcctgga

SEQ ID NO: 8344 - DNA, 119 bp, homo sapiens
acagaccttgccagagagtcatctgcctaaagaggctctgaaaatttcagtagctcctggactagcagacagaagactggcacaccaactgtaacctcaacttcctactcacaacatag

SEQ ID NO: 8345 - DNA, 119 bp, homo sapiens
gactagcagaccagaagactggcacaccaactgtaacctcaacttcctactcacaacatagagaaaagccagcattttccaccagcaggccttgccaggtactcatatacctgaagagg

SEQ ID NO: 8346 - DNA, 119 bp, homo sapiens
agagaaaagcccagcattttccaccagcaggccttgccaggtactcatatacctgaagaggctcagaaatttcagctgttactggaccaggtaaccagaagacttggataccaagagta

SEQ ID NO: 8347 - DNA, 119 bp, homo sapiens
ggctcagaaagtttcagctgttactggaccaggtaaccagaagacttggataccaagagtactttctacttctactcacaaagagagaaacctggtattttctatcaacagaccttgcc

SEQ ID NO: 8348 - DNA, 119 bp, homo sapiens
tactttctaccttctactcacaaagagagaaacctggtattttctatcaacagaccttgccaggtagtccatacctgaagaggcacagaaagtttcacctgttcttggaccagctgacc

SEQ ID NO: 8349 - DNA, 119 bp, homo sapiens
ccaggtagtcacatacctgaagaggcacagaaagtttcacctgttcttggaccagctgaccagaagactggacaccaactccaacctctgcttcttactcacacacagagaagcctggt

SEQ ID NO: 8350 - DNA, 119 bp, homo sapiens
ccagaagactgggacaccaactccaacctctgcttcttactcacacacagagaagcctggtattttctacaacaggtcttgccagataatcatccaactgaagaggctctgaaaatttc

SEQ ID NO: 8351 - DNA, 119 bp, homo sapiens
gtattttctaccaacaggtcttgccagataatcatccaactgaagaggctctgaaaatttcagttgccttgaaccagttgaccagacaactggcacaccagctgtaacctctacttcct

SEQ ID NO: 8352 - DNA, 119 bp, homo sapiens
tcagttgcctctgaaccagttgaccagacaactggcacaccagctgtaacctctacttcctactcacaaatagagagaagcccagcattttctaccaacagtcgttgccaagtagtcat

SEQ ID NO: 8353 - DNA, 119 bp, homo sapiens
ctactcacaatatagagagaagcccagcattttctaccaacagtcgttgccaagtagtcatctaactgagaggctaagaatgtttcagcggttcctggaccagctgaccagaagactgt

SEQ ID NO: 8354 - DNA, 119 bp, homo sapiens
atctaactgaagaggctaagaatgtttcagcggttcctggaccagctgaccagaagactgtgataccaatttaccctctactttctactcacacacagagaagcctggtgttttctacc

SEQ ID NO: 8355 - DNA, 119 bp, homo sapiens
gtgataccaattttaccctctactttctactcacacacagagaagcctggtgttttctaccaacaggtctgccacatagtcatccaactgaagaggctctgaaaatttcagttgcctct

SEQ ID NO: 8356 - DNA, 119 bp, homo sapiens
ccaacaggtcttgccacatagtcatccaactgaagaggctctgaaaatttcagttgcctctgaaccagtgaccagacaactggcacaccaactgtaacctctacttcttactcacaaca

SEQ ID NO: 8357 - DNA, 119 bp, homo sapiens
ctgaaccagttgaccagacaactggcacaccaactgtaacctctacttcttactcacaacatacagagagccgagtattttctaccaacagtcgttgccaggtagtcatctaactgaag

SEQ ID NO: 8358 - DNA, 119 bp, homo sapiens
catacagagaagccgagtattttctaccaacagtcgttgccaggtagtcatctaactgaagaggctaagacgtttcagcggttcctggaccaggtgaccggaagactgggataccaact

SEQ ID NO: 8359 - DNA, 119 bp, homo sapiens
agaggctaagaacgtttcagcggttcctggaccaggtgaccggaagactgggataccaactttaccctcactttctactcacacacagagaagcctggtagtttctaccaacaggtctt

SEQ ID NO: 8360 - DNA, 119 bp, homo sapiens
ctttaccctctactttctactcacacacagagaagcctggtagtttctaccaacaggtcttgccacatatcatctacctgaagaggctttggaagtttcagttgctcctggaccagttg

SEQ ID NO: 8361 - DNA, 119 bp, homo sapiens
ttgccacatagtcatctacctgaagaggctttggaagtttcagttgctcctggaccagttgaccagacgttggcacaccaactgtaacctccccttccagctcatttggagagaagccc

SEQ ID NO: 8362 - DNA, 119 bp, homo sapiens
tgaccagacgattggcacaccaactgtaacctccccttccagctcatttggagagaagcccattgttattacaaacaggcctttccagagggtcatctacctgaagagtctctgaaagt

SEQ ID NO: 8363 - DNA, 119 bp, homo sapiens
ccattgttatctacaaacaggcctttccagagggtcatctacctgaagagtctctgaaagtttcagttgtcctggaccagttggccagacaactggcgcaccaactataacctctcctt

SEQ ID NO: 8364 - DNA, 119 bp, homo sapiens
gtttcagttgctcctggaccagttggccagacaactggcgcaccaactataacctctccttcctactcaaacatagagcaaagtctggcagtttctaccaactggcattgctaggtagt

SEQ ID NO: 8365 - DNA, 119 bp, homo sapiens
ttcctactcacaacatagagcaaagtctggcagtttctaccaactggcattgctaggtagtcaaataccgaagaggctctcagagtttcttctgctcctggaccagctgaccagacaac

SEQ ID NO: 8366 - DNA, 119 bp, homo sapiens
gtcaaatacctgaagaggctctcagagtttcttctgctcctggaccagctgaccagacaactggcatacaaccataacctctacttcctactcatttggagagaagccgattgttaact

SEQ ID NO: 8367 - DNA, 119 bp, homo sapiens
actggcataccaaccataacctctacttcctactcatttggagagaagccgattgttaactacaaacagcctttccagatggtcatctacctgaagaggctctgaaagtttccattgtt

SEQ ID NO: 8368 - DNA, 119 bp, homo sapiens
ctacaaacaggcctttccagatggtcatctacctgaagaggctctgaaagtttccattgtttctggaccactgaaaaaaagactgacataccagcaggacctttaggttccagtgcact

SEQ ID NO: 8369 - DNA, 119 bp, homo sapiens
tttctggacctactgaaaaaaagactgacataccagcaggacctttaggttccagtgcacttggagagagcccattactttctaccggcaggctctgctagacagtcctctaaataaag

SEQ ID NO: 8370 - DNA, 119 bp, homo sapiens
cttggagagaagcccattactttctaccggcaggctctgctagacagtcctctaaataaagaggttgtgaagtttcagctgctcctggaccagctgaccagaagactgagacattacca

SEQ ID NO: 8371 - DNA, 119 bp, homo sapiens
agaggttgtgaaagtttcagctgctcctggaccagctgaccagaagactgagacattaccagtacattcactagctactcaaatagggggaagcctgtcattttctaccagcagaccct

SEQ ID NO: 8372 - DNA, 119 bp, homo sapiens
cagtacattctactagctactcaaatagggggaagcctgtcattttctaccagcagaccctatcagacatcatttacctgaagaagctctgaaagttccacctgttcctggaccagatg

SEQ ID NO: 8373 - DNA, 119 bp, homo sapiens
ctatcagacagtcatttacctgaagaagctctgaaagttccacctgttcctggaccagatgcccagaagctgagacaccatcagtatcctctagtttatactcatatagagagaagccc

SEQ ID NO: 8374 - DNA, 119 bp, homo sapiens
tgcccagaagactgagacaccatcagtatcctctagtttatactcatatagagagaagcccattgtctttaccaacaggccctgccagacagtgagctaactcaagaagctctgaaagt

SEQ ID NO: 8375 - DNA, 119 bp, homo sapiens
ccattgtcttctaccaacaggccctgccagacagtgagctaactcaagaagctctgaaagtttcagctgtcctcaaccagctgaccagaagactgggttatctactgtaacttcctctt

SEQ ID NO: 8376 - DNA, 119 bp, homo sapiens
gtttcagctgttcctcaaccagctgaccagaagactgggttatctactgtaacttcctctttctattcaatacagagaagcctaatatttcttaccagcaagagttgccagatagtcat

SEQ ID NO: 8377 - DNA, 119 bp, homo sapiens
tttctattcacatacagagaagcctaatatttcttaccagcaagagttgccagatagtcatctaactgagaggctctgaaagtttcaaatgttcctggaccagctgaccagaagactgg

SEQ ID NO: 8378 - DNA, 119 bp, homo sapiens
atctaactgaagaggctctgaaagtttcaaatgttcctggaccagctgaccagaagactggggtatcaaagtaacctctacttcctactcacacagagagaagcccattgtttcctacc

SEQ ID NO: 8379 - DNA, 119 bp, homo sapiens
ggggtatcaacagtaacctctacttcctactcacacagagagaagcccattgtttcctaccagcgagagtgccgcattttactgaagcaggtttgaaaattttaagagttcctggacca

SEQ ID NO: 8380 - DNA, 119 bp, homo sapiens
ccagcgagagttgccgcattttactgaagcaggtttgaaaattttaagagttcctggaccagctgaccaaagactggaataaacatcctgccctctaattcctacccacagagagagca

SEQ ID NO: 8381 - DNA, 119 bp, homo sapiens
cagctgaccagaagactggaataaacatcctgccctctaattcctacccacagagagagcactctgtcattcttatgagcaggagttgccagatcttactgaagtaactttgaaagcaa

SEQ ID NO: 8382 - DNA, 119 bp, homo sapiens
cactctgtcatttcttatgagcaggagttgccagatcttactgaagtaactttgaaagcaataggggttctgggcctgctgaccagaagactgggatacaaatagcatcctctagttcc

SEQ ID NO: 8383 - DNA, 119 bp, homo sapiens
aataggggttcctgggcctgctgaccagaagactgggatacaaatagcatcctctagttcctactcaaaagagagaaggccagtatttttcatcagcaggagttgccagatgttactga

SEQ ID NO: 8384 - DNA, 119 bp, homo sapiens
cctactcaaatagagagaaggccagtatttttcatcagcaggagttgccagatgttactgaagaagcttaaatgtttttgttgttcctggacaaggtgaccggaagactgagataccaa

SEQ ID NO: 8385 - DNA, 119 bp, homo sapiens
gaagaagctttaaatgtttttgttgttcctggacaaggtgaccggaagactgagataccaacagtaccttaagttactactcacgtagagagaagcccagtgttatctctcaacaggag

SEQ ID NO: 8386 - DNA, 119 bp, homo sapiens
aacagtacctttaagttactactcacgtagagagaagcccagtgttatctctcaacaggagttgccagaagtcatctcacagaagaggctctgaaagtttcacctgtttctataccagc

SEQ ID NO: 8387 - DNA, 119 bp, homo sapiens
agttgccagacagtcatctcacagaagaggctctgaaagtttcacctgtttctataccagcagagcagagactgggataccaataggactgtctagttcctactcacattcacataaag

SEQ ID NO: 8388 - DNA, 119 bp, homo sapiens
gcagagcagaagactgggataccaataggactgtctagttcctactcacattcacataaagagaaactcagatttcaactgtgcatataccagatgaccagaaaactgagtttccagca

SEQ ID NO: 8389 - DNA, 119 bp, homo sapiens
agagaaactcaagatttcaactgtgcatataccagatgaccagaaaactgagtttccagcagctaccctagttcctactcacaaatagagaagcccaagatttcaactgtgattggacc

SEQ ID NO: 8390 - DNA, 119 bp, homo sapiens
cagctacccttagttcctactcacaaatagagaagcccaagatttcaactgtgattggaccaaatgaccgaagactccatcccagacagcttttcatagttcctattctcaaacagtaa

SEQ ID NO: 8391 - DNA, 119 bp, homo sapiens
ccaaatgaccagaagactccatcccagacagcttttcatagttcctattctcaaacagtaaagcccaatttttatttcaacagcagttgccagatagagatcaaagtaaaggtattcta

SEQ ID NO: 8392 - DNA, 119 bp, homo sapiens
aaagcccaatattttatttcaacagcagttgccagatagagatcaaagtaaaggtattctaaagatttcgctgtccctgaactaactgatgtgaatactggaaaaccagtatctctctc

SEQ ID NO: 8393 - DNA, 119 bp, homo sapiens
taaagatttcagctgtccctgaactaactgatgtgaatactggaaaaccagtatctctctctagttcttttttcacagagagaaatcgaatattttcagtccacaggaattgccaggta

SEQ ID NO: 8394 - DNA, 119 bp, homo sapiens
tctagttcttattttcacagagagaaatcgaatattttcagtccacaggaattgccaggtagtcatgtactgaagatgtgctgaaggtttcaacaattcctggaccagctggccagaaa

SEQ ID NO: 8395 - DNA, 119 bp, homo sapiens
tagtcatgtaactgaagatgtgctgaaggtttcaacaattcctggaccagctggccagaaaacagtattccaacagctcttcctagttccttttcacatcgagagaaaccagatatttt

SEQ ID NO: 8396 - DNA, 119 bp, homo sapiens
aaacagtattaccaacagctcttcctagttccttttcacatcgagagaaaccagatattttctatcaaaggatttgccagatagacatctaactgaagatgctctaaagatctcaagtg

SEQ ID NO: 8397 - DNA, 119 bp, homo sapiens
ttctatcaaaaggatttgccagatagacatctaactgaagatgctctaaagatctcaagtgctcttgggaagctgatcaaattaccggattacaaacagttccctctggtacttactca

SEQ ID NO: 8398 - DNA, 119 bp, homo sapiens
tgctcttgggcaagctgatcaaattaccggattacaaacagttccctctggtacttactcacatggtgaaatcacaagcttgtttcagaacatgtccaaaggctaatagataatttgaa

SEQ ID NO: 8399 - DNA, 119 bp, homo sapiens
cacatggtgagaatcacaagcttgtttcagaacatgtccaaaggctaatagataatttgaattcttctgctccagtgttagctcaaataatgtgcttttaaattctcaggctgatgaca

SEQ ID NO: 8400 - DNA, 119 bp, homo sapiens
aattcttctgactccagtgttagctcaaataatgtgcttttaaattctcaggctgatgacagagttgtataaataaaccagaatctgcaggttttagagatgttggctctgaagaaatc

SEQ ID NO: 8401 - DNA, 119 bp, homo sapiens
cagagttgtaataaataaaccagaatctgcaggttttagagatgttggctctgaagaaatccaggatgcgaaaatagtgctaaaactcttaaggaaattcggacacttttgatggaggc

SEQ ID NO: 8402 - DNA, 119 bp, homo sapiens
tccaggatgcagaaaatagtgctaaaactcttaaggaaattcggacacttttgatggaggcagaaaataggcactgaaacgatgcaattttcctgctccccttgcccgtttcagagata

SEQ ID NO: 8403 - DNA, 119 bp, homo sapiens
gcagaaaatatggcactgaaacgatgcaattttcctgctccccttgcccgtttcagagatattagtgattttcatttatacaatctaagaaggtggtttgcttcaaagaaccctcttcc

SEQ ID NO: 8404 - DNA, 119 bp, homo sapiens
tattagtgatatttcatttatacaatctaagaaggtggtttgcttcaaagaaccctcttccacgggtgttctaatggtgatttgcttcacagacagccattcacagaggaaagcccaag

SEQ ID NO: 8405 - DNA, 119 bp, homo sapiens
ccacgggtgtatctaatggtgatttgcttcacagacagccattcacagaggaaagcccaagcagcaggtcatacagaaggatattggcacacagacgaatttgaaatgccggagaggca

SEQ ID NO: 8406 - DNA, 119 bp, homo sapiens
agcagcaggtgcatacagaaggatattggcacacagacgaatttgaaatgccggagaggcattgaaaatgggagtttattagttcaactacagttagaagtcctctacaggaagcagag

SEQ ID NO: 8407 - DNA, 119 bp, homo sapiens
cattgaaaattgggagtttattagttcaactacagttagaagtcctctacaggaagcagagagcaaagtagtatggcattagaagaaactcttaggcaatatcaagcagccaaatctgt

SEQ ID NO: 8408 - DNA, 119 bp, homo sapiens
agagcaaagtcagtatggcattagaagaaactcttaggcaatatcaagcagccaaatctgtaatgaggttgaacctgaagggtgtagtggaaccattgggaataaaattattatcccta

SEQ ID NO: 8409 - DNA, 119 bp, homo sapiens
gtaatgaggtctgaacctgaagggtgtagtggaaccattgggaataaaattattatccctatgatgacttcataaaaagtgattcaagtagtgatgccagtgatggaaatggttcctgc

SEQ ID NO: 8410 - DNA, 119 bp, homo sapiens
tatgatgactgtcataaaaagtgattcaagtagtgatgccagtgatggaaatggttcctgctcgtgggaagtaatttaccagagtctttggaatcagtttctgatgttcttctaaactt

SEQ ID NO: 8411 - DNA, 119 bp, homo sapiens
gctcgtgggacagtaatttaccagagtctttggaatcagtttctgatgttcttctaaacttctttccattgtttcacccaagacaagtataacagatagcagggaggaagagggtgtgt

SEQ ID NO: 8412 - DNA, 119 bp, homo sapiens
ttctttccatatgtttcacccaagacaagtataacagatagcagggaggaagagggtgtgtcagagagtaggatggtggtggtagcagtgtagattcactggctgcacatgtgaaaaac

SEQ ID NO: 8413 - DNA, 119 bp, homo sapiens
gtcagagagtgaggatggtggtggtagcagtgtagattcactggctgcacatgtgaaaaaccttctgcatgtgaatcctcactgaatcatgctaaagaaatactcagaaatgcagagga

SEQ ID NO: 8414 - DNA, 119 bp, homo sapiens
cctggaatatgaagttcaatttagcacatgattgtggatactccatttcagaattaaatgaagatgacagaggaaagtagaagagatcaaggcagagttatttggtcatggaagaacaa

SEQ ID NO: 8415 - DNA, 119 bp, homo sapiens
ttcaatttagcacatgattgtggatactccatttcagaattaaatgaagatgacaggaggaaagtagaaagatcaaggcagagttatttggtcatggaagaacaactgacttgtccaag

SEQ ID NO: 8416 - DNA, 119 bp, homo sapiens
ggtttacagagtccacggggaatgggatgcaagccagaagctgtatgtagtcacattattattgagagcatgaaaagggatgtttccggactctaacttctgaacatccacaactagat

SEQ ID NO: 8417 - DNA, 119 bp, homo sapiens
ttattgagagccatgaaaagggatgtttccggactctaacttctgaacatccacaactagatagacaccttgtgctttcagatctgctggaccctcagaaatgaccagaggacggcaga

SEQ ID NO: 8418 - DNA, 119 bp, homo sapiens
agatagacacccttgtgctttcagatctgctggaccctcagaaatgaccagaggacggcagaacccatctcatgcagagccaagcatgtcaacctttctgcatccttagaccagaacaa

SEQ ID NO: 8419 - DNA, 119 bp, homo sapiens
cagaacccatcatcatgcagagccaagcatgtcaacctttctgcatccttagaccagaacaactcccattcaaagtttggaattccttgcagttaaaaagtcattccccatttcagaac

SEQ ID NO: 8420 - DNA, 119 bp, homo sapiens
acaactcccatttcaaagtttggaattccttgcagttaaaaagtcattccccatttcagaactttatactgatgaattcaaaatcagcaaaggtcttcgaatgccattcgatgaaaaga

SEQ ID NO: 8421 - DNA, 119 bp, homo sapiens
gaactttatacctgatgaattcaaaatcagcaaaggtcttcgaatgccattcgatgaaaagatggaccctggctgtcagaattagtagaacctgcttttgtgccacctaaagaagtgga

SEQ ID NO: 8422 - DNA, 119 bp, homo sapiens
aagatggacccttggctgtcagaattagtagaacctgcttttgtgccacctaaagaagtggattttcatcttcatcacaaatgccgtccccagaacccatgaaaaagtttactacctcc

SEQ ID NO: 8423 - DNA, 119 bp, homo sapiens
tggattttcattcttcatcacaaatgccgtccccagaacccatgaaaaagtttactacctccatcacttttcatctcaccgacattctaaatgcatttccaattcctctgttgttaagg

SEQ ID NO: 8424 - DNA, 119 bp, homo sapiens
ctccatcactttttcatctcaccgacattctaaatgcatttccaattcctctgttgttaaggttggtgtactgaaggtagccagtgtactggagcatctgtgggggtatttaattctca

SEQ ID NO: 8425 - DNA, 119 bp, homo sapiens
aaggttggtgttactgaaggtagccagtgtactggagcatctgtgggggtatttaattctcatttcactaagaacaaaatcctcccagagatcttaaacagaaaacctcttccccttca

SEQ ID NO: 8426 - DNA, 119 bp, homo sapiens
ctcatttcactgaagaacaaaatcctcccagagatcttaaacagaaaacctcttccccttcatcatttaaatgcatagtaattcacaagataaagaagtgactattttagcagaaggta

SEQ ID NO: 8427 - DNA, 119 bp, homo sapiens
ttcatcatttaaaatgcatagtaattcacaagataaagaagtgactattttagcagaaggtagaaggcaagccaaaaattacctgttgattttgagcgttcttttcaagaagaaaaacc

SEQ ID NO: 8428 - DNA, 119 bp, homo sapiens
ggtagaaggcaaagccaaaaattacctgttgattttgagcgttcttttcaagaagaaaaacccttagaagatcagattttacaggcagtcattctgagcccagtaccagggcaaattgt

SEQ ID NO: 8429 - DNA, 119 bp, homo sapiens
aacccttagaaagatcagattttacaggcagtcattctgagcccagtaccagggcaaattgtagcaattcaaggaaattcagatttctgataaccatacccttattagcatgggcagac

SEQ ID NO: 8430 - DNA, 119 bp, homo sapiens
ttgtagcaatttcaaggaaattcagatttctgataaccatacccttattagcatgggcagaccaagttcaccctaggagtaaacagatcgagttccagactaggagtaaaagagaagaa

SEQ ID NO: 8431 - DNA, 119 bp, homo sapiens
agaccaagttccaccctaggagtaaacagatcgagttccagactaggagtaaaagagaagaatgtaacttaactccagatcttccttcttgcatttttcttgaacaacgagagctcttt

SEQ ID NO: 8432 - DNA, 119 bp, homo sapiens
agaatgtaactataactccagatcttccttcttgcatttttcttgaacaacgagagctctttgaacaaacaaagccccacgtgcagatgaccatgtgaggaaacaccattctccctctc

SEQ ID NO: 8433 - DNA, 119 bp, homo sapiens
ctttgaacaaagcaaagccccacgtgcagatgaccatgtgaggaaacaccattctccctctcctcaacacaggattatgtagctccagaccttccttcttgcatttttcttgaacaacg

SEQ ID NO: 8434 - DNA, 119 bp, homo sapiens
tctcctcaacatcaggattatgtagctccagaccttccttcttgcatttttcttgaacaacgagaactcttgaacagtgcaaagccccatatgtagatcatcaaatgagagaaaaccat

SEQ ID NO: 8435 - DNA, 119 bp, homo sapiens
aacgagaactctttgaacagtgcaaagccccatatgtagatcatcaaatgagagaaaaccattctcccctcctcaaggtcaggattctatagcttcagaccttccgtctcccatttctc

SEQ ID NO: 8436 - DNA, 119 bp, homo sapiens
ccattctccccttcctcaaggtcaggattctatagcttcagaccttccgtctcccatttctcttgaacatgccaaagcaaagcgccaggtgtagatgaccaaatgaataaacaccattt

SEQ ID NO: 8437 - DNA, 119 bp, homo sapiens
tctcttgaacaatgccaaagcaaagcgccaggtgtagatgaccaaatgaataaacaccattttccccttctcaaggtcaggattgtgtagtggaaaagaataatcaacataagcctaaa

SEQ ID NO: 8438 - DNA, 119 bp, homo sapiens
attttccccttcctcaaggtcaggattgtgtagtggaaaagaataatcaacataagcctaaatcacacattctaatataaatgttgaagccaagttcaatactgtggtctcccagtcag

SEQ ID NO: 8439 - DNA, 119 bp, homo sapiens
taaatcacacatttctaatataaatgttgaagccaagttcaatactgtggtctcccagtcagccccaaacactgtacattagcagcatctgcatctactcctccttcaaatagaaaagc

SEQ ID NO: 8440 - DNA, 119 bp, homo sapiens
tcagccccaaatcactgtacattagcagcatctgcatctactcctccttcaaatagaaaagcactttctgtgttcatataactctttgtcccaagacttcttccaagttggatagtgga

SEQ ID NO: 8441 - DNA, 119 bp, homo sapiens
aagcactttcttgtgttcatataactctttgtcccaagacttcttccaagttggatagtggaactttagtgaaagattccattcattggatgctgcttctaaagcgaggatgaatagtg

SEQ ID NO: 8442 - DNA, 119 bp, homo sapiens
tggaactttagatgaaagattccattcattggatgctgcttctaaagcgaggatgaatagtgagtttaatttgacttacatactgtatcttcgagatcactggaaccaacctccaaatt

SEQ ID NO: 8443 - DNA, 119 bp, homo sapiens
agtgagtttaactttgacttacatactgtatcttcgagatcactggaaccaacctccaaattattgaccgtaaacctgtagcacaggatcaagaatctttaggttttctaggacctaaa

SEQ ID NO: 8444 - DNA, 119 bp, homo sapiens
aattattgaccagtaaacctgtagcacaggatcaagaatctttaggttttctaggacctaaatcttcacggatttccaagtcgtacagccttctcttccagacagtaacactattactc

SEQ ID NO: 8445 - DNA, 119 bp, homo sapiens
taaatcttcactggatttccaagtcgtacagccttctcttccagacagtaacactattactcaggacttaaaaccataccttctcagaatagccagatagtaacctccaggcaaataca

SEQ ID NO: 8446 - DNA, 119 bp, homo sapiens
actcaggacttgaaaaccataccttctcagaatagccagatagtaacctccaggcaaatacaagtgaactttcagatttcgaaggacattccaatccagaggggaccccagtatttgca

SEQ ID NO: 8447 - DNA, 119 bp, homo sapiens
attaccagagaagatgaagaccccactttctgctttctctgaaaaattgtcatctgatgcagtcactcaataacaacagaaagtccagaaaagaccctattttcatctgagatttttat

SEQ ID NO: 8448 - DNA, 119 bp, homo sapiens
gaaaaattgtcatctgatgcagtcactcagataacaacagaaagtccagaaaagaccctattttcatctagatttttattaatgctgaagatcgtggacatgaaattatagagcctggt

SEQ ID NO: 8449 - DNA, 119 bp, homo sapiens
aaagtccagaaaagaccctattttcatctgagatttttattaatgctgaagatcgtggacatgaaattaagagcctggtaaccagaagctacgcaaagctcctgtcaagtttgcctcat

SEQ ID NO: 8450 - DNA, 119 bp, homo sapiens
taatgctgaagatcgtggacatgaaattatagagcctggtaaccagaagctacgcaaagctcctgtcaatttgcctcatcatcttcagtccaacaggttactttttctcgcggcacaga

SEQ ID NO: 8451 - DNA, 119 bp, homo sapiens
gccagcctttattattgccatataagccttctggtagtaccaagatgtattatgttccacaattaagacaattcctccatctccggattccaaatcagataccaccgttgaaagctccc

SEQ ID NO: 8452 - DNA, 119 bp, homo sapiens
ctttattattgccatataagccttctggtagtaccaagatgtattatgttccacaattaagacaaattctccatctccggattccaaatcagataccaccgttgaaagctcccattcag

SEQ ID NO: 8453 - DNA, 119 bp, homo sapiens
gatccaatgatgccattgctccagacttcccagctcaggtgctaggcacaagagatgatgacctctcagcactgttaacattaaacataaagaaggaatctacagtaagagggtagtga

SEQ ID NO: 8454 - DNA, 119 bp, homo sapiens
gagatgatgacctctcagccactgttaacattaaacataaagaaggaatctacagtaagagggtagtgataaggcatccttgccagtgggagaaaaacccttgcagaatgaaaatgcag

SEQ ID NO: 8455 - DNA, 119 bp, homo sapiens
atgcctcagttcaagtgctaatcactggggatgagaacctctcagacaaaaaacagcaagagattcacatacaagggcagtgactgaggctgcccaggctaaagaaaaagaatctttgc

SEQ ID NO: 8456 - DNA, 119 bp, homo sapiens
tgctaatcactggggatgagaacctctcagacaaaaaacagcaagagattcacagtacaagggcagtgatgaggctgcccaggctaaagaaaaagaatctttgcagaaagatactgcag

SEQ ID NO: 8457 - DNA, 119 bp, homo sapiens
attccagtgctgctgctgctgcagagcactcagctcaagtaggagacccagaaatgaagaacttgccagcactaaagccattacacagaaagaggagatccataggaagaagacagttc

SEQ ID NO: 8458 - DNA, 119 bp, homo sapiens
aaatgaagaacttgccagacactaaagccattacacagaaagaggagatccataggaagaagacagttccgaggaagcctggccaaacaataaagaatccctacagatcaatattgaag

SEQ ID NO: 8459 - DNA, 119 bp, homo sapiens
agtccgaatgtcattcagaatttgaaaatactacccgttctgtcttcaggtcagcaaagttttacattctcatcccgtacacctaccaagtgatcaagatatttgccatgaatctttgg

SEQ ID NO: 8460 - DNA, 119 bp, homo sapiens
agttttacattcatcatcccgtacacctaccaagtgatcaagatatttgccatgaatctttgggaaagatgttttcatgagacattcttggaaagatttctttcagcatcatccagaca

SEQ ID NO: 8461 - DNA, 119 bp, homo sapiens
ctttgggaaagagtgttttcatgagacattcttggaaagatttctttcagcatcatccagacaaacataagaacacatgtgtcttcctcttccttatcaaaacatggacaagactaaga

SEQ ID NO: 8462 - DNA, 119 bp, homo sapiens
cagacaaacatagagaacacatgtgtcttcctcttccttatcaaaacatggacaagactaagacagatttaccagaataaagagcctcagcatcaatgtgaatttgggaaacaaagaag

SEQ ID NO: 8463 - DNA, 119 bp, homo sapiens
ctaagacagattataccagaataaagagcctcagcatcaatgtgaatttgggaaacaaagaagtgatggtactactaaaagtcaagttagagattatccaaaacataatggacaaatta

SEQ ID NO: 8464 - DNA, 119 bp, homo sapiens
aagaagtgatggatactactaaaagtcaagttagagattatccaaaacataatggacaaattagtgatcacaaagggatcagaaggtcaccccagagcaaacaactcagcacactgtga

SEQ ID NO: 8465 - DNA, 119 bp, homo sapiens
aaattagtgatccacaaagggatcagaaggtcaccccagagcaaacaactcagcacactgtgagtttgatgaactgtggaacaagtatcgggagcgacagaggcaacagagacagcctg

SEQ ID NO: 8466 - DNA, 119 bp, homo sapiens
ctgtgagtttgaatgaactgtggaacaagtatcgggagcgacagaggcaacagagacagcctgagttggtgacaggaaagaactgtccttggtggaccgacttgatcgtttggctaaaa

SEQ ID NO: 8467 - DNA, 119 bp, homo sapiens
agcctgagttgggtgacaggaaagaactgtccttggtggaccgacttgatcgtttggctaaaattcttcgaatccaatcacacattctctccaggtctcagaaagtacacatgatgata

SEQ ID NO: 8468 - DNA, 119 bp, homo sapiens
ctaaaattcttcagaatccaatcacacattctctccaggtctcagaaagtacacatgatgatagcagagggaacgaagtgtgaaggaatggagtggtagacaacagcagagaaataagc

SEQ ID NO: 8469 - DNA, 119 bp, homo sapiens
atgatagcagaggggaacgaagtgtgaaggaatggagtggtagacaacagcagagaaataagcttcagaaaagaagcggtttaaaagcctagagaaaagccataaaaatacaggcgagc

SEQ ID NO: 8470 - DNA, 119 bp, homo sapiens
ataagcttcagaaaaagaagcggtttaaaagcctagagaaaagccataaaaatacaggcgagcttaaaaaagcaaggtgctttctcatcatcgagctgggaggtctaatcaaattaaaa

SEQ ID NO: 8471 - DNA, 119 bp, homo sapiens
gcgagcttaaaaaaagcaaggtgctttctcatcatcgagctgggaggtctaatcaaattaaaattgaacgattaaatttgataaatatattctgagtaaacagccaggttttaattata

SEQ ID NO: 8472 - DNA, 119 bp, homo sapiens
ttaaaattgaacagattaaatttgataaatatattctgagtaaacagccaggttttaattatataagcacacttcttcggattgtcggccctcagaggagagtgagctgctcacagata

SEQ ID NO: 8473 - DNA, 119 bp, homo sapiens
attatataagcaacacttcttcggattgtcggccctcagaggagagtgagctgctcacagatactaccacaacatcctttccggcaccacttctactgtcgaatcagatatattgaccc

SEQ ID NO: 8474 - DNA, 119 bp, homo sapiens
cagatactaccaccaacatcctttccggcaccacttctactgtcgaatcagatatattgacccaaacagtagagaggtggctctgcacgaaaggagtagctctgtttccactattgaca

SEQ ID NO: 8475 - DNA, 119 bp, homo sapiens
tgacccaaacagatagagaggtggctctgcacgaaaggagtagctctgtttccactattgacactgcccgctgattcaagcttttggccatgaaagagtatgcttgtcacccagacgaa

SEQ ID NO: 8476 - DNA, 119 bp, homo sapiens
ttgacactgcccggctgattcaagcttttggccatgaaagagtatgcttgtcacccagacgaattaaatatatagcagcatcaccaaccaacagaggagataccttgagaagcggagca

SEQ ID NO: 8477 - DNA, 119 bp, homo sapiens
gacgaattaaattatatagcagcatcaccaaccaacagaggagataccttgagaagcggagcaaacacacaagaaagtgctgaatacaggtcatcccctagtgacttctgagcacacca

SEQ ID NO: 8478 - DNA, 119 bp, homo sapiens
gtaacttggagattgtgaacggtgccaaaaaacacactcgagatgttgggataactttcccaactccaattccagcgaggctaaattggaagagaacagtgatgtgacttcttggtcag

SEQ ID NO: 8479 - DNA, 119 bp, homo sapiens
atgttgggataactttcccaactccaagttccagcgaggctaaattggaagagaacagtgatgtgacttttggtcagaagaaaaacgtgaagagaaaatgctctttaccggttatcctg

SEQ ID NO: 8480 - DNA, 119 bp, homo sapiens
aattggaagagaacagtgatgtgacttcttggtcagaagaaaaacgtgaagagaaaatgctctttaccgttatcctgaggacagaaagttaaaaaagaacaagaagaattcccatgaag

SEQ ID NO: 8481 - DNA, 119 bp, homo sapiens
gagtttcctggtttgttcctgtggaaaatgtggagtctagatcaaagaaggaaaacgtgcctaacactttggccctggcatctcctggtttgaaccaataaccaagaccagaccctgga

SEQ ID NO: 8482 - DNA, 119 bp, homo sapiens
atcaaagaaggaaaacgtgcctaacacttgtggccctggcatctcctggtttgaaccaataaccaagacagaccctggagggagccactgcgggagcagaactgtcaggggcagcacct

SEQ ID NO: 8483 - DNA, 119 bp, homo sapiens
atctcctggtttgaaccaataaccaagaccagaccctggagggagccactgcgggagcagaactgtcagggcagcacctggacggtcggggctacctggcaggcccaggcagagaggct

SEQ ID NO: 8484 - DNA, 119 bp, homo sapiens
gggagccactgcgggagcagaactgtcaggggcagcacctggacggtcggggctacctggcaggcccagcagagaggctggcagagacctactgaggccatttgtgagagcaacccttc

SEQ ID NO: 8485 - DNA, 119 bp, homo sapiens
gaatcgcttcagtttcacagacctgacttcatctcccgctctggggagcggataaagcgcctgaagttatagtccaggagaggaagctgcagagcatgttacagaccgagcgggatgca

SEQ ID NO: 8486 - DNA, 119 bp, homo sapiens
ctcccgctctggggagcggataaagcgcctgaagttaatagtccaggagaggaagctgcagagcatgttcagaccgagcgggatgcactattcaacattgacagggaacggcagggcca

SEQ ID NO: 8487 - DNA, 119 bp, homo sapiens
agttaatagtccaggagaggaagctgcagagcatgttacagaccgagcgggatgcactattcaacattgcagggaacggcagggccaccagaatcgcatgtgcccgctgcccaagagag

SEQ ID NO: 8488 - DNA, 119 bp, homo sapiens
agagtgaccaatcaacttctggggagaaaagttccctgggactgacacaagtttattttcctcagagcctggaattctattttatgaacctagagaagcagaatccttacttttgtgag

SEQ ID NO: 8489 - DNA, 119 bp, homo sapiens
tcctcagagccttggaattctattttatgaacctagagaagcagaatccttacttttgtgagtctggttaataaagcttattctttgtccatgtgtattttagaaatagtaacttctaa

SEQ ID NO: 8490 - DNA, 119 bp, homo sapiens
tgagtctggttgaataaagcttattctttgtccatgtgtattttagaaatagtaacttctaaagagtctgaacaaagtggtgattaaaattcctaatggtttgggagcaatactttctg

SEQ ID NO: 8491 - DNA, 119 bp, homo sapiens
ctaaagagtctggaacaaagtggtgattaaaattcctaatggtttgggagcaatactttctgcatagtgccttgtccaatggcctgtgtgttacaatgatatgatcatttctcaagaat

SEQ ID NO: 8492 - DNA, 119 bp, homo sapiens
tctgcatagtggccttgtccaatggcctgtgtgttacaatgatatgatcatttctcaagaataagtcccttttgtatgtgtttttatacttttagaaaataaaaactttagattaactc

SEQ ID NO: 8493 - DNA, 119 bp, homo sapiens
tgaccagacaggattaaattttattgaattacagttacaagtggaaaaaatgactgacttactgcatgggaagtattatgtcaacctgttaaaagctatggaaattaaaatgttcatgt

SEQ ID NO: 8494 - DNA, 119 bp, homo sapiens
tgactgacttactgcatggagaagtattatgtcaacctgttaaaagctatggaaattaaaatgttcatgatatacaaaatataaatgacatgtaaggtaaaattacagtgatcaattta

SEQ ID NO: 8495 - DNA, 119 bp, homo sapiens
ggaaattaaaatgttcatgtatatacaaaatataaatgacatgtaaggtaaaattacagtgatcaatttcaacaaagaaattaacagtagttttccagcttgtttgattaatcaagcag

SEQ ID NO: 8496 - DNA, 119 bp, homo sapiens
aaattacagtgatcaatttacaacaaagaaattaacagtagttttccagcttgtttgattaatcaagcagtttactcttgaatccatagcatttctacaatttaatttggacaaagttc

SEQ ID NO: 8497 - DNA, 119 bp, homo sapiens
ttgtttgattaatcaagcaggtttactcttgaatccatagcatttctacaatttaatttggacaaagtttattccagatcagccaggttttaaaactgaaatgtgttaagggtggattg

SEQ ID NO: 8498 - DNA, 119 bp, homo sapiens
atttaatttggacaaagttctattccagatcagccaggttttaaaactgaaatgtgttaagggtggattttagcttccccaggattggtgtggatgataaatactttttttaaaaatta

SEQ ID NO: 8499 - DNA, 119 bp, homo sapiens
aagaatttatacttaagcataggagatggttctggaaattctaagaaattctgctctcagtaagagtagggtttggagctttacctcttggcagtatcccttggaagggagctctgaga

SEQ ID NO: 8500 - DNA, 119 bp, homo sapiens
cttaagcataggagatggttctggaaattctaagaaattctgctctcagtaagagtagaggtttggagcttacctcttggcagtatcccttggaagggagctctgagattaaatgtaat

SEQ ID NO: 8501 - DNA, 119 bp, homo sapiens
tcatttttctttaaaaaagaaagcacctgcatttgtcatcttgagcaaatatagtaactctaacctcaagttcaagtgatttactcaaggtttaaatcatagttgttttggagaaagta

SEQ ID NO: 8502 - DNA, 119 bp, homo sapiens
taactctaacctcaaggttcaagtgatttactcaaggtttaaatcatagttgttttggagaaagtaagttcagatgcactgtggctgtcagggtcatagtaggcattaaatcaacatgg

SEQ ID NO: 8503 - DNA, 119 bp, homo sapiens
ttggagaaagtaagtgtcagatgcactgtggctgtcagggtcatagtaggcattaaatcaacatggttgtgttcattaaatgtggattgaagataaaatgactgatcttaagtttcatg

SEQ ID NO: 8504 - DNA, 119 bp, homo sapiens
aaatcaacatggttggtgttcattaaatgtggattgaagataaaatgactgatcttaagtttcatgaggataggtttgcttcattgaaactggtttttatcttcccaaatagttttcaa

SEQ ID NO: 8505 - DNA, 119 bp, homo sapiens
ttaagtttcatgaggaataggtttgcttcattgaaactggtttttatcttcccaaatagttttcaatcatcctttaaagtactaggttgattaatattgcaaagttgtaatgtaaaatg

SEQ ID NO: 8506 - DNA, 119 bp, homo sapiens
aatagttttcaatcattcctttaaagtactaggttgattaatattgcaaagttgtaatgtaaaatgtgacttacctctgtctaacctgtattgttcacatgaatgggagtttgactttg

SEQ ID NO: 8507 - DNA, 119 bp, homo sapiens
taatgtaaaatgtgaccttacctctgtctaacctgtattgttcacatgaatgggagtttgactttgggataaacattgaaaatttgcagggaggacccacccaaatgtatcatgaaatg

SEQ ID NO: 8508 - DNA, 119 bp, homo sapiens
agtttgactttgggaataaacattgaaaatttgcagggaggacccacccaaatgtatcatgaaatgtgatccaggtatgaaaaaccagtgatactaatttaaaggatcattttgattta

SEQ ID NO: 8509 - DNA, 119 bp, homo sapiens
tatcatgaaatgtgattccaggtatgaaaaaccagtgatactaatttaaaggatcattttgatttaacagtggtttcaaatttcactttaacaagaactattttattttagaaacattt

SEQ ID NO: 8510 - DNA, 119 bp, homo sapiens
cattttgatttaacatgtggtttcaaatttcactttaacaagaactattttattttagaaacatttatcactcagatgcattggttctttcattaacagagttttggaactggcttttc

SEQ ID NO: 8511 - DNA, 119 bp, homo sapiens
ttagaaacatttatccactcagatgcattggttctttcattaacagagttttggaactggcttttcaattgggaaagccccagtcacacttctggagcaaggcccataatgcagatggt

SEQ ID NO: 8512 - DNA, 119 bp, homo sapiens
tggttcaaacttttcatataacccttaggaaattggatgtgacagggagaaaagataggaccttttcagatttcttaatatgcagaattgccaaatattccaaagatggtctagtgaca

SEQ ID NO: 8513 - DNA, 119 bp, homo sapiens
ccttttcagcatttcttaatatgcagaattgccaaatattccaaagatggtctagtgacataaaagtatttacaagtttgtttgagaacatctatatttaaatctaacctttaaacaat

SEQ ID NO: 8514 - DNA, 119 bp, homo sapiens
taaaagtatattacaagtttgtttgagaacatctatatttaaatctaacctttaaacaattttaaattgtatttgttttaaatatgaattgactattgcccctttatcttagctatggt

SEQ ID NO: 8515 - DNA, 119 bp, homo sapiens
tttaaattgatatttgttttaaatatgaattgactattgcccctttatcttagctatggtttggggaaaaagcatttttttatttccaaagaaatgttagaatttctatgctgaactgc

SEQ ID NO: 8516 - DNA, 119 bp, homo sapiens
accctcccagtgaagactaagccaggctctccatctcccatctgggagaagctgcttcatcctagagggggtctcactgtcagtttctcttcggtatttatccatgtctgtgaagtcat

SEQ ID NO: 8517 - DNA, 119 bp, homo sapiens
gcttcatcctagagggtggtctcactgtcagtttctcttcggtatttatccatgtctgtgaagtcatagctgactccatctctatcttcacctgtggcaccatgaacactgggttccgt

SEQ ID NO: 8518 - DNA, 119 bp, homo sapiens
gtctgtgaagtcatagtctgactccatctctatcttcacctgtggcaccatgaacactgggttccgtgatagctgaaagcaggtgaagctggacaggatattttgaagtgcaaggtgat

SEQ ID NO: 8519 - DNA, 119 bp, homo sapiens
ctcctcatcacagtcctcgtgggcccctttttttctcttcctcttcttgtctgtctcctttttttcctttctgggaggatgttgtcaatccaggccaggtcgtgctgggaaaagatgaa

SEQ ID NO: 8520 - DNA, 119 bp, homo sapiens
cttcctcttcttgtctgtctcctttttttccttctctgggaggatgttgtcaatccaggccaggtcgtgtgggaaaagatgaaatccagaagccttcgaacgatgatgaggcccaggat

SEQ ID NO: 8521 - DNA, 119 bp, homo sapiens
catgaccgggaagatgatggcagccaccgtggatttgaggatccagagcaccgccaggcagaggatctgaccagggtgaagaggtggatccggcgcagcggcacgtgccgcaggaaggc

SEQ ID NO: 8522 - DNA, 119 bp, homo sapiens
caggcagaggatctgcaccagggtgaagaggtggatccggcgcagcggcacgtgccgcaggaaggcatgtccggctggtgcttggctggcatcaggaagagcttgcagcgttcccagaa

SEQ ID NO: 8523 - DNA, 119 bp, homo sapiens
ctgactcccagaaactggggctgctccccaggggcactggtctctgtctccatcttgaggctgtcgatggggcgatggagatgaccgtggcagccacgtaccaggggagccccataaag

SEQ ID NO: 8524 - DNA, 119 bp, homo sapiens
gctgtcgatgtgggcgatggagatgaccgtggcagccacgtaccaggggagccccataaaggagcacaagccatgaggatgcccacccagaacaggtccagatggtagccggcagcctt

SEQ ID NO: 8525 - DNA, 119 bp, homo sapiens
cttcagtttgttctccttccggttgacaatgacggcagtgatctgctggtccatgaagatcaggatggtaccagcagggcgggcaggatgcttgctgggtatacccaccacgggttctt

SEQ ID NO: 8526 - DNA, 119 bp, homo sapiens
ctgctggtccatgaagatcaggatggtcaccagcagggcgggcaggatgcttgctgggtatacccaccagggttcttcccaaagggggccacgaaccagcctcggtcaggccgcgttgg

SEQ ID NO: 8527 - DNA, 119 bp, homo sapiens
cttggtaggaaaatagcggctgaatttgaacttcttcagggtcagggtcatggagtatgtcccaaagaaaggatgaaggacatgagcgccaggtctgggataaacttgcaggaattccc

SEQ ID NO: 8528 - DNA, 119 bp, homo sapiens
gtcagggtcatggagtatgtcccaaagaaaaggatgaaggacatgagcgccaggtctgggataaacttgaggaattcccaagcaggcgcccgccgtagctcagacactccttcttgctc

SEQ ID NO: 8529 - DNA, 119 bp, homo sapiens
acatgagcgccaggtctgggataaacttgcaggaattcccaagcaggcgcccgccgtagctcagacactcttcttgctcagcagggaccagtccaacgctgtgaggttaaggaggttgt

SEQ ID NO: 8530 - DNA, 119 bp, homo sapiens
ctgtgtcaggggcgacacactcgcacttgtaggtagtgatgaagtttggcttgaagtccatattgataggtagtacttgaaggcaccgatcatcttcttgatggcatcgtagatgaaga

SEQ ID NO: 8531 - DNA, 119 bp, homo sapiens
ttgaagtccatattgatagggtagtacttgaaggcaccgatcatcttcttgatggcatcgtagatgaagtgaagctgataagggtggagaagccctcctcggtgaagcgggtgatatat

SEQ ID NO: 8532 - DNA, 119 bp, homo sapiens
gatggcatcgtagatgaagatgaagctgataagggtggagaagccctcctcggtgaagcgggtgatatattgatgataaagctggcatctgtggccactaggataaggcactggacagc

SEQ ID NO: 8533 - DNA, 119 bp, homo sapiens
cggtgaagcgggtgatatatttgatgataaagctggcatctgtggccactaggataaggcactggacagtgagtgtaggccaatccagaggcggaactccatgtagtccaggccattgc

SEQ ID NO: 8534 - DNA, 119 bp, homo sapiens
ttgctgaagtcgaagaggagcttctcaaagatgaggatgggccccgtgctgctgagaatgatgagaggcgtcccgagaagaggcagaacaaggagccagccatggcagtgcccaggaag

SEQ ID NO: 8535 - DNA, 119 bp, homo sapiens
gaggagcttctcaaagatgaggatgggccccgtgctgctgagaatgatgagaggctgtcccgagaagagcagaacaaggagccagccatggcagtgcccaggaagctctccatcactcc

SEQ ID NO: 8536 - DNA, 119 bp, homo sapiens
ctgataattgtcggtggcatcccccagaagcccaccaaaggtgatcgcgttggtgatacagccgaggtaatgaataggatggcagagatggactgaatgtggaagccatcatagaagtc

SEQ ID NO: 8537 - DNA, 119 bp, homo sapiens
atacagccgaggtagatgaataggatggcagagatggactgaatgtggaagccatcatagaagtcacttggaaccagggcaacttcctcttgatatccagacacaggccaccgaagaac

SEQ ID NO: 8538 - DNA, 119 bp, homo sapiens
gggaggcctggggtgggcaccttcctgtccagataagttcctccccgatttcatgcatggctggcatcttccatcatccccgctgcttgttccgccggccccgccactgccagccccgc

SEQ ID NO: 8539 - DNA, 119 bp, homo sapiens
caccaccacctccattgcctcctccaggagctccgccgcctcctcccacagagccattcatctggcccactctgctagggagaacacagatttcctggaagagaagggggatgaaggag

SEQ ID NO: 8540 - DNA, 119 bp, homo sapiens
ctcttgtcagcagagggcaccttcttggggggctcaatccggatatttgggtcccattctccaggaggaggacgatgacctcatccagaaattcatcaattcctgcgatcagatcttcc

SEQ ID NO: 8541 - DNA, 119 bp, homo sapiens
aatccggatatttgggtcccattctccaggaggaaggacgatgacctcatccagaaattcatcaattccgcgatcagatcttcccgattgcgggctttgtaggccacgtcactgaagag

SEQ ID NO: 8542 - DNA, 119 bp, homo sapiens
ctggtggggacaggcacctcggtcactcctcccagcatggccgactggatgaggcgcacgaacgcgatgatggctggtctaggaagtccacctcgcccacgagcacgttggacgcttct

SEQ ID NO: 8543 - DNA, 119 bp, homo sapiens
ggccgactggatgaggcgcacgaacgcgatgaatggctggtctaggaagtccacctcgcccacgagcacttggacgcttctgagtccttggggatcttcttcatgaatttgtttttccg

SEQ ID NO: 8544 - DNA, 119 bp, homo sapiens
ttgtggtggagactgacttcccaatgtcagctaaggagcggtggatgggcttcttggtttggtggcggtcctcctcaggaggacgtaactgaccctctcccggagctctggccgcagga

SEQ ID NO: 8545 - DNA, 119 bp, homo sapiens
aggagcggtggatgggcttcttggtttggtggcggtgcctcctcaggaggacgtaactgaccctctcccgagctctggccgcaggagaccatcctcaatctgcttctcaatgacatcat

SEQ ID NO: 8546 - DNA, 119 bp, homo sapiens
ctatgatctgtggtaaggagccactgtccaaatccagcagcaccgtccccgtctgcaggcaggtacggactcgaagaggctgtgcagggatagtgtggacacgtggggcttgctccagc

SEQ ID NO: 8547 - DNA, 119 bp, homo sapiens
accgtccccgtctgcaggcaggtacggagctcgaagaggctgtgcagggatagtgtggacacgtggggctgctccagcgttcgccgccttcctctaccttttcttcaaactttatccac

SEQ ID NO: 8548 - DNA, 119 bp, homo sapiens
ctggctgactccttccactccatctggtctccgtcatgctgcagagtatccatctctgtaaagagggtgggttgggagcctcatcttcctcccccaggatgtcctggagctgctcagca

SEQ ID NO: 8549 - DNA, 119 bp, homo sapiens
ccttccactccatctggtctccgtcatgctgcagagtatccatctctgtaaagagggtggggttgggagctcatcttcctcccccaggatgtcctggagctgctcagcagctggggacc

SEQ ID NO: 8550 - DNA, 119 bp, homo sapiens
gagtcctgctgataagatccatgctgctgtcctggctgcttgccccactccctgggccagtcagttcctctgtggctggtctggccgcaggccccagtggactttttgcaggcctgaaa

SEQ ID NO: 8551 - DNA, 119 bp, homo sapiens
tgcttgccccactccctgggccagtcagttcctgctgtggctggtctggccgcaggccccagtggacttttgcaggcctgaaagatgtcccttctggtcagtttttctttgagggtaag

SEQ ID NO: 8552 - DNA, 119 bp, homo sapiens
gtggctggtctggccgcaggccccagtggactttttgcaggcctgaaagatgtcccttctggtcagttttctttgagggtaagtgggtactggaagcccaatgtggataggagggcatt

SEQ ID NO: 8553 - DNA, 119 bp, homo sapiens
cacagtatgtgcaatttttggcttccagattgtttgtgccaagctttggcaggtggtacaatattggctccccagattcttgtctgctttagctgtttctgaaccatgtccagggttga

SEQ ID NO: 8554 - DNA, 119 bp, homo sapiens
gtttgtgccaagctttggcaggtggtacaatattggctgccccagattcttgtctgctttagctgtttcgaaccatgtccagggttgagaagggaacatactgtgatggtgtcagcact

SEQ ID NO: 8555 - DNA, 119 bp, homo sapiens
tctggattagaaaacctgtttattaagactgggtcacatccagctagtacatttcagtgccctttctgggctgcctcccaggagcagacactgcaaatttcagaacccccatctagaga

SEQ ID NO: 8556 - DNA, 119 bp, homo sapiens
gccctttctggtgctgcctcccaggagcagacactgcaaatttcagaacccccatctagagaaacccctacctgtgatctagcttccgaggctcagtgttggttcttgtggtagtgctg

SEQ ID NO: 8557 - DNA, 119 bp, homo sapiens
gagaaacccctaacctgtgatctagcttccgaggctcagtgttggttcttgtggtagtgctgatgtgtggtaccactgaggccaggccacagtcgcatgtaccctcctctgggctgact

SEQ ID NO: 8558 - DNA, 119 bp, homo sapiens
gctgatgtgtgggtaccactgaggccaggccacagtcgcatgtaccctcctctgggctgactcacgaggtacaggggacagcacacctaatgagcaggtctgtcctccagacatactca

SEQ ID NO: 8559 - DNA, 119 bp, homo sapiens
gactcacgaggctacaggggacagcacacctaatgagcaggtctgtcctccagacatactcattaacaacacgttcctggctaaaaaataaccagatctttttggccgtgccctcaggt

SEQ ID NO: 8560 - DNA, 119 bp, homo sapiens
ctcattaacaagcacgttcctggctaaaaaataaccagatctttttggccgtgccctcaggttggagaagaaaacttttaatttggaatcactacaaagacaaatggtttctacaaatt

SEQ ID NO: 8561 - DNA, 119 bp, homo sapiens
aggttggagaaagaaaacttttaatttggaatcactacaaagacaaatggtttctacaaattattttatagaatgtcagactcaaaagaactaccaggaacatgcctgaaaatgctata

SEQ ID NO: 8562 - DNA, 119 bp, homo sapiens
aattattttattagaatgtcagactcaaaagaactaccaggaacatgcctgaaaatgctatatatgattatgcttgacccatgacacctgctgtcactggatccagagtgagcaaggga

SEQ ID NO: 8563 - DNA, 119 bp, homo sapiens
tatatatgatttatgcttgacccatgacacctgctgtcactggatccagagtgagcaagggaaaggaagggaggtaggcggggacagcaccagccctggctggccagacctgaggccca

SEQ ID NO: 8564 - DNA, 119 bp, homo sapiens
gggaaaggaagtggaggtaggcggggacagcaccagccctggctggccagacctgaggcccacagacctgtccccacaaccaggattcctacaatgtacacattcctaattcaggctca

SEQ ID NO: 8565 - DNA, 119 bp, homo sapiens
cccacagacctggtccccacaaccaggattcctacaatgtacacattcctaattcaggctcaactctccttacccaaaagtaaatgcctcaggactcaatctgaatcactgtctgtctc

SEQ ID NO: 8566 - DNA, 119 bp, homo sapiens
ctcaactctcctttacccaaaagtaaatgcctcaggactcaatctgaatcactgtctgtctcagcttcttcacatccacgctgaatttgtactcctggtcacatcccatgtaagcgtca

SEQ ID NO: 8567 - DNA, 119 bp, homo sapiens
tctcagcttctttcacatccacgctgaatttgtactcctggtcacatcccatgtaagcgtcactcatgagtacagagtgtagttgtgggcaccagtggctggggccacaaagtccaact

SEQ ID NO: 8568 - DNA, 119 bp, homo sapiens
ctgcggatgctgtccttatctaccacctcataagatagttcgatattagggtagcggttacaaaagcgaccacatctgcaatctggctgtcagtcagctgaagcaacgcgttccgttct

SEQ ID NO: 8569 - DNA, 119 bp, homo sapiens
gatattagggtagcggttacaaaagcgagccacatctgcaatctggctgtcagtcagctgaagcaacgcttccgttcttcatcctccatctccatgatgtcgaaaacactctccactcc

SEQ ID NO: 8570 - DNA, 119 bp, homo sapiens
cttgtctgtgcaacgtttgatatgctcagaggtgaagtgtggcagctgcttcaggtatgagtccttggacacatggcttgggtgaccatctgggccagttccatagctgccagagcagg

SEQ ID NO: 8571 - DNA, 119 bp, homo sapiens
tgagtccttggaccacatggcttgggtgaccatctgggccagttccatagctgccagagcagggctgagcacccattgctggaaaggacatccacgcaggcctggatgagccggattgc

SEQ ID NO: 8572 - DNA, 119 bp, homo sapiens
cttactaaggatttcctccgtatctgactgcaactcagcactcagctgcatgcgagacaagtgagcctgaggagcaggttggtcttgacgtgcggatcattgaacttagggttattcag

SEQ ID NO: 8573 - DNA, 119 bp, homo sapiens
tgactgcaactcagcactcagctgcatgcgagacaagtgagcctgcaggagcaggttggtcttgacgtgggatcattgaacttagggttattcagcttgtgggggaccttctgagccaa

SEQ ID NO: 8574 - DNA, 119 bp, homo sapiens
caatggtggtgtagttgatgtaatagtaggcggcgatcatgcctaggttcagaggcgccacgtccatctgtcctcgatgctgatgcacttggactgctccaggtcactcagggtctgct

SEQ ID NO: 8575 - DNA, 119 bp, homo sapiens
ggttcagaggcgccacgtccatctcgtcctcgatgctgatgcacttggactgctccaggtcactcagggctgctccaccagctctgacaagtggtccgacaagtgacgatgggagatgc

SEQ ID NO: 8576 - DNA, 119 bp, homo sapiens
cctgcaggttgtagtaattggggttctgtgtcatgcggcggtacagaaaggtccaggtgaggtagtccaagcatcctgcttgttctcaatggtcttggtgacgatctcagcattgaagt

SEQ ID NO: 8577 - DNA, 119 bp, homo sapiens
cggcggtacagaaaggtccaggtgaggtagtccacagcatcctgcttgttctcaatggtcttggtgacgtctcagcattgaagtggtcatgcatacagtggtccaggtgagattctact

SEQ ID NO: 8578 - DNA, 119 bp, homo sapiens
agcatcctgcttgttctcaatggtcttggtgacgatctcagcattgaagtggtcatgcatacagtggtcaggtgagattctactggcaatggctcatataagaacttcttgaagaaatc

SEQ ID NO: 8579 - DNA, 119 bp, homo sapiens
ctgagctgaagagctgctccaccaggcgtcgctccatggggctgagcccctcatgcaggtagcccacccatttagcagcgtttccttgagcgtgctgtcacttagcttctccaggtacg

SEQ ID NO: 8580 - DNA, 119 bp, homo sapiens
tccatggggctgagcccctcatgcaggtagcccaccccatttagcagcgtttccttgagcgtgctgtcattagcttctccaggtacggaatcagatccttctcggtgcagtgcaagaac

SEQ ID NO: 8581 - DNA, 119 bp, homo sapiens
ctctgccgttggatgtctgctgcacaggtggtgaggatgtcaatggcagtgaggcgggtctgcttgcgaacggcacaaagacaatgacaggcttcttgggcgagtgcttggtgatagca

SEQ ID NO: 8582 - DNA, 119 bp, homo sapiens
ctgcttgcgagacggcacaaagacaatgacaggcttcttgggcgagtgcttggtgatagcatggtacacggcttggccatggagagcaggcgggtttgtgtatggctgatgttgaagcc

SEQ ID NO: 8583 - DNA, 119 bp, homo sapiens
ctggatgtgcagctccaaggggacgggacgcacattgggatggaagttgaaggtggaggtggcactgcacccagccagtgggccacatccttggcattggagagcgaagagctgagtgc

SEQ ID NO: 8584 - DNA, 119 bp, homo sapiens
gggatggaagttgaaggtggaggtggcactgcagcccagccagtgggccacatccttggcattggagaggaagagctgagtgccacaatgcgaatgggccgctcaatctgggaggagat

SEQ ID NO: 8585 - DNA, 119 bp, homo sapiens
cagccagtgggccacatccttggcattggagagcgaagagctgagtgccacaatgcgaatgggccgctcatctgggaggagatgtagcgcattcgggagcagatcacttctaagacagg

SEQ ID NO: 8586 - DNA, 119 bp, homo sapiens
cccattctcgcccccgataaggtggacctcatccaccacgaagaggttgatgttctgcacgttcttgcgtgcttccatcgccgggaaagtatgtcccacttctcaggggtgctgatgat

SEQ ID NO: 8587 - DNA, 119 bp, homo sapiens
ctgcacgttcttgcgctgcttccatcgccgggaaagtatgtcccacttctcaggggtgctgatgataatttccctttgcccagcagcttcaggtctgtgctggtctcgcctgtcaggag

SEQ ID NO: 8588 - DNA, 119 bp, homo sapiens
ggtgctgatgataatgttccctttgcccagcagcttcaggtctgtgctggtctcgcctgtcaggagtacaccttcttgttgagcctgtcctggaacttctcgtaccagtccatgtatac

SEQ ID NO: 8589 - DNA, 119 bp, homo sapiens
ctgctctgccagggcctccatgggggtgatgtacacacagcgcccctccgagctctgcagcagcattcgaggatggcaaactctgcacaaatagtcttcccgctgcccgtgggggcccc

SEQ ID NO: 8590 - DNA, 119 bp, homo sapiens
gcccctccgagctctgcagcagcattcgcaggatggcaaactctgcacaaatagtcttcccgctgcccggggggcccccacaaacacgttgtcgtcactgttgtatacagtgttaaaca

SEQ ID NO: 8591 - DNA, 119 bp, homo sapiens
cctgggtctggatgggattgaagaaaggaaatttatcttggtaaagactctcaaaggcactgtttctcaagcagacacgggcaagggctgcaggtccaaaagttcggttggaggggggt

SEQ ID NO: 8592 - DNA, 119 bp, homo sapiens
aggcactgtttctcagagcagacacgggcaagggctgcaggtccaaaagttcggttggaggggggtactctccggcaagatcaggtgccggaaggagacaggcagctgggtctcacaag

SEQ ID NO: 8593 - DNA, 119 bp, homo sapiens
agagccagcggtcagacaccactcggatgaagtactgagggggcagcggttcaaagacaggcacgaagatgtaatgaggtgctcgtcctgggcgtacttggccttgaggagaaaatact

SEQ ID NO: 8594 - DNA, 119 bp, homo sapiens
tgagggggcagcggttcaaagacaggcacgaagaatgtaatgaggtgctcgtcctgggcgtacttggcctgaggagaaaatactcatggtgcagaatcacctcgctgtccacatcctcc

SEQ ID NO: 8595 - DNA, 119 bp, homo sapiens
tgtaatgaggtgctcgtcctgggcgtacttggccttgaggagaaaatactcatggtgcagaatcacctcctgtccacatcctccaccagaatccaaaaagcctcggatgaaccatgcac

SEQ ID NO: 8596 - DNA, 119 bp, homo sapiens
cttttcatcccactggaagtctggcgtgatggtcagctccaccttcagggtggagcgtgtgataggctgaggtgcactgacaactccaacttgggaaacagatggacatatttgtggat

SEQ ID NO: 8597 - DNA, 119 bp, homo sapiens
gctccaccttcagggtggagcgtgtgataggctgcaggtgcactgacaactccaacttgggaaacagatgacatatttgtggatggtcttccccatctttggcatgcggataagctccc

SEQ ID NO: 8598 - DNA, 119 bp, homo sapiens
ctctctcactgtgatgttcttgaactcagaggacaatgagaagaccctgaaaagctcaatctcactcaggtgggcttcagcagctggttgtaagtctgcactgtatcattggtgatgta

SEQ ID NO: 8599 - DNA, 119 bp, homo sapiens
caatgagaagaccctgaaaagctcaatctcactcagggtgggcttcagcagctggttgtaagtctgcacgtatcattggtgatgtagtagtggctggctatacggcccagttctgtcac

SEQ ID NO: 8600 - DNA, 119 bp, homo sapiens
ctggaagttgcccgtcttcttgtcgtacttgaccagattgttcttgtccagcatcagggcagctgtatgaccagatctagtcggcgctggtccagcaggggatctcccttgaggtcatc

SEQ ID NO: 8601 - DNA, 119 bp, homo sapiens
gttcttgtccagcatcagggcagctgtatgaaccagatctagtcggcgctggtccagcaggggatctccttgaggtcatcatgagagatgccatagagggttggggatcgcagcattcg

SEQ ID NO: 8602 - DNA, 119 bp, homo sapiens
tagtcggcgctggtccagcaggggatctcccttgaggtcatcatgagagatgccatagagggttggggacgcagcattcggatatagaggtaggcatagcccagccagttcaccgcatc

SEQ ID NO: 8603 - DNA, 119 bp, homo sapiens
cttggcattctggacatttcctagcacgatttctgcattgagcatgtcaggaagctttgaaaccatctgctttcaataggaagttgttgattgaggagggacaggtagtactgtagctc

SEQ ID NO: 8604 - DNA, 119 bp, homo sapiens
gcattgagcatgtcaggaagctttgaaaccatctggctttcaataggaagttgttgattgaggagggacggtagtactgtagctccccatgagatgtgatgagtatgccttcacccttg

SEQ ID NO: 8605 - DNA, 119 bp, homo sapiens
ggctttcaataggaagttgttgattgaggagggacaggtagtactgtagctccccatgagatgtgatgatatgccttcacccttggtgtcatactggggtcttccggcacgtcccagca

SEQ ID NO: 8606 - DNA, 119 bp, homo sapiens
ctgcagaatgtccagtgctcccagttctgtccaacgccccttctctggactgtacacctgggtgcctttatgatgactgtatgtgcagggagattcacaccccaagctagagttgctgt

SEQ ID NO: 8607 - DNA, 119 bp, homo sapiens
cagtgctcccagttctgtccaacgccccttctctggactgtacacctgggtgcctttgatgatgactgttgtgcagggagattcacaccccaagctagagttgctgtggaaactaaaac

SEQ ID NO: 8608 - DNA, 119 bp, homo sapiens
cttgcactgctcagcttctgttcgcaggacttctgtggaggctgagccctccctcagaaacagacccaggtgtccttttctaggcacatgtcccggatggccctggctgtctttccagt

SEQ ID NO: 8609 - DNA, 119 bp, homo sapiens
ttctgtggaggctgagccctccctcagaaacagacccagagtgtccttttctaggcacatgtcccggatgccctggctgtctttccagtctccttccgggagtggacaaacaccagcac

SEQ ID NO: 8610 - DNA, 119 bp, homo sapiens
ctgattttttccagcatgttccatgattttttcatagacgatttcattcatgatctggaaacgcttgatgcttttttctctgtgatacccacatatgtctgttccagaggcactggacg

SEQ ID NO: 8611 - DNA, 119 bp, homo sapiens
ttttttccagcatgttccatgattttttcatagacgatttcattcatgatctggaaacgcttgatagctttttctctgtgatacccacatatgtctgttccagaggcactggacggaag

SEQ ID NO: 8612 - DNA, 119 bp, homo sapiens
ctgttgtcaaagtaaaagagacccttggcagggtcaacacgtagaaaggtggctacatcttcatagttggtagggtggcactgagaccaatgagtcggacatcctcttgggtcatctca

SEQ ID NO: 8613 - DNA, 119 bp, homo sapiens
cacgtagaaaggtggctacatcttcatagttgggtagggtggcactgagaccaatgagtcggacatcctttgggtcatctcaatgtttcggatggccctggccactaaagcttctaaga

SEQ ID NO: 8614 - DNA, 119 bp, homo sapiens
ggtggcactgagaccaatgagtcggacatcctcttgggtcatctcaatgtttcggatggccctggccacaaagcttctaagacaggacctctgtcatcgtggagaagatgaatctcatc

SEQ ID NO: 8615 - DNA, 119 bp, homo sapiens
cagaatgatgagccgcaccagctgggtgtaggtgcgctcaccacccttgcgggtgatgatgtcccactttcgggggtgcagacgatgatctgagtggcactgatctcttctttgcacag

SEQ ID NO: 8616 - DNA, 119 bp, homo sapiens
ggtgatgatgtcccacttctcgggggtgcagacgatgatctgagtggcactgatctcttctttgcacagtggtggtccccagtcagttcagcaacagtgatgccataagtggccaggcg

SEQ ID NO: 8617 - DNA, 119 bp, homo sapiens
ctttccaaagctgcccaccatctcctgcaccaaggagcgcatgggggcaatgtagataatcttgaagtctccacattgatggtgccgtccatgtttatgtgtttcccaatctctcggag

SEQ ID NO: 8618 - DNA, 119 bp, homo sapiens
gcgcatgggggcaatgtagataatcttgaagtcatccacattgatggtgccgtccatgtttatgtgtttccaatctctcggagcatgcacatcagggccacgttggtcttcccagcacc

SEQ ID NO: 8619 - DNA, 119 bp, homo sapiens
agtaggagcacacagcagcagattctcatccgtctcaagggcagcacggtagagcttactctggatccgttcagtgttttgaagccctcaaacccagcctgggcatactttggcagctt

SEQ ID NO: 8620 - DNA, 119 bp, homo sapiens
cagattctcatccgtctcaagggcagcacggtagagcttactctggatccgattcagtgttttgaagcctcaaacccagcctgggcatactttggcagcttttccactggaagcagttg

SEQ ID NO: 8621 - DNA, 119 bp, homo sapiens
ttcttctgagccaaagggcttgggcttcagagcaggcacatgcacctcttcatagcccttacgctggcgcggaaggatccatcaggaagctgacagcgtttattggccataaagtggct

SEQ ID NO: 8622 - DNA, 119 bp, homo sapiens
gcccttacgctggcgacggaaggatccatcaggaagctgacagcgtttattggccataaagtggctccctgggtaaaaaccaggtcctccaagtccagaacctgccgtggagccagtgc

SEQ ID NO: 8623 - DNA, 119 bp, homo sapiens
tcggatcagatcctccttctcggtttcatgaagctggtagaggaacttggatagctctgggtcagcttcatctttcccataatcctttccttttcagcttcactttgtgcactggccag

SEQ ID NO: 8624 - DNA, 119 bp, homo sapiens
tctcggtttcatgaagctggtagaggaacttggatagctctgggtcagcttccatctttcccataatccttccttttcagcttcactttgtgcactggccagcaaggtacagtataaaa

SEQ ID NO: 8625 - DNA, 119 bp, homo sapiens
cttcaaaatctccaatacttcatctgccttcttctgcgacacgatggcatcatcatagaaacgactgagtgccgctgcagccaaaatgcatcaatatcccgagggtgcaaatccttctt

SEQ ID NO: 8626 - DNA, 119 bp, homo sapiens
ctgcgacacgatggcatcatcatagaaacgactgagctgccgctgcagccaaaatgcatcaatatcccggggtgcaaatccttcttcttggaactcatcagttcacctgaggctacgag

SEQ ID NO: 8627 - DNA, 119 bp, homo sapiens
ccatattttggatttccttatctccaccatagtctgtgatctttttgcccaggttcactagcacatggttctggtatcatctgtttgacccagcagcaggtcaatctcctttcgccttt

SEQ ID NO: 8628 - DNA, 119 bp, homo sapiens
tgatctttttgcccaggttcactagcacatggtatctggtatcatctgtttgacccagcagcaggtcaactcctttcgcctttccttgtcccgcagcttttcattctttagaacagcta

SEQ ID NO: 8629 - DNA, 119 bp, homo sapiens
tggtatcatctgtttgacccagcagcaggtcaatctcctttcgcctttccttgtcccgcagcttttcatctttagaacagctagaacttcatcagctgccccacaaaggatatcacgtg

SEQ ID NO: 8630 - DNA, 119 bp, homo sapiens
ctggtccccaagagcagcctggatgaagctgagtagcacctcataggtctcccgagtctctttagttttggcttgtagatgatgcccaccatctcatcaatgccctccgacagcagagt

SEQ ID NO: 8631 - DNA, 119 bp, homo sapiens
cgagtctctttagttttgggcttgtagatgatgcccaccatctcatcaatgccctccgacagcagagtaaacccttcatcttgttgatgtcatgccggtcctcatcacgctttcttcgc

SEQ ID NO: 8632 - DNA, 119 bp, homo sapiens
ttggctcttctttcctcctgcatctgcggtttggtccgttgagccttgtctcccatacgggtgccctccgcttcccaacaagggacagcacctctcctgtgggttcatcccggcgggtc

SEQ ID NO: 8633 - DNA, 119 bp, homo sapiens
cttgtctcccatacgggtgccctccagcttcccaacaagggacagcacctctcctgtgggttcatcccgcgggtccggtcaatgagagaacggtcagcttggagcacaagattcgagtt

SEQ ID NO: 8634 - DNA, 119 bp, homo sapiens
cgccttgtactcgtattgcagactacgggcggttacatccgccatggccgcggctgctcggaggcttcaaccaccacgcctccctaccgcaagctgcaaacggccgcagatctctgctc

SEQ ID NO: 8635 - DNA, 119 bp, homo sapiens
tcggaggcttcagaccaccacgcctccctaccgcaagctgcaaacggccgcagatctctgctcccgccggccggaacgacgcaggaaagacgcactggggaaggaaaagaaacgggttc

SEQ ID NO: 8636 - DNA, 119 bp, homo sapiens
tcctcctggcggcgccggtgctgctggtgctgctgtgggcgctgggggcccggggccagggcagcccccgcagggcacgatcgtgggcatgaggctggcgagctgcaacaagtcgtgtg

SEQ ID NO: 8637 - DNA, 119 bp, homo sapiens
gggcagcccccagcagggcacgatcgtgggcatgaggctggcgagctgcaacaagtcgtgtgggacgaaccggatggcatcatcttcgtgtccgagggcagcaccgtgaacctgaggct

SEQ ID NO: 8638 - DNA, 119 bp, homo sapiens
tgtgggacgaacccggatggcatcatcttcgtgtccgagggcagcaccgtgaacctgaggctgtacggcacagcctgggcaacatctccagcaacctgatctccttcaccgaggtggac

SEQ ID NO: 8639 - DNA, 119 bp, homo sapiens
ggctgtacggctacagcctgggcaacatctccagcaacctgatctccttcaccgaggtggacgatgccggaccctccacaagtccaccagctgcctcgagctcaccaaggacctggtcg

SEQ ID NO: 8640 - DNA, 119 bp, homo sapiens
ggacgatgccgagaccctccacaagtccaccagctgcctcgagctcaccaaggacctggtcgtccagcactggtcaacgtgagccgcgggaacacgtccggcgtgctggtggtgctcac

SEQ ID NO: 8641 - DNA, 119 bp, homo sapiens
gtcgtccagcagctggtcaacgtgagccgcgggaacacgtccggcgtgctggtggtgctcaccaagttctccggaggagcgagagcatgaagctgtatgcactgtgcacccgggcccag

SEQ ID NO: 8642 - DNA, 119 bp, homo sapiens
tcaccaagttcctccggaggagcgagagcatgaagctgtatgcactgtgcacccgggcccagcccgacggccctggctgaagtggacggacaaggactcactgctcttcatggtggagg

SEQ ID NO: 8643 - DNA, 119 bp, homo sapiens
ccagcccgacgggccctggctgaagtggacggacaaggactcactgctcttcatggtggaggagcctggaggttcctgcctctctggctgcacattctcctaattacggtgctgctggt

SEQ ID NO: 8644 - DNA, 119 bp, homo sapiens
gaggagcctgggaggttcctgcctctctggctgcacattctcctaattacggtgctgctggtgctgtcggcatattttctggcctcaacctcgggcttatggccctggaccccatggag

SEQ ID NO: 8645 - DNA, 119 bp, homo sapiens
tggtgctgtcgggcatattttctggcctcaacctcgggcttatggccctggaccccatggagctgcgcacgtgcagaactgtggcaccgagaaggagaggcgctatgcccgcaagattg

SEQ ID NO: 8646 - DNA, 119 bp, homo sapiens
ggagctgcgcatcgtgcagaactgtggcaccgagaaggagaggcgctatgcccgcaagattgagcccatcggcgcaagggcaactaccttctctgctcgttgctcctagggaacgtgct

SEQ ID NO: 8647 - DNA, 119 bp, homo sapiens
attgagcccatccggcgcaagggcaactaccttctctgctcgttgctcctagggaacgtgctggtcaaccctccctcacaatccttctagacaacctcatcgggtccggcctcatggcg

SEQ ID NO: 8648 - DNA, 119 bp, homo sapiens
tgctggtcaacacctccctcacaatccttctagacaacctcatcgggtccggcctcatggcggtggcctctccaccattggcattgtcatctttggggagatcctacctcaggccctgt

SEQ ID NO: 8649 - DNA, 119 bp, homo sapiens
ggcggtggcctcctccaccattggcattgtcatctttggggagatcctacctcaggccctgtgctcccgcatgggctggctgtgggtgccaacaccatccttctcaccaaattctttat

SEQ ID NO: 8650 - DNA, 119 bp, homo sapiens
ctgtgctcccgacatgggctggctgtgggtgccaacaccatccttctcaccaaattctttatgctactcccttccccctcagttttcccattagcaagctcctggacttttttctgggc

SEQ ID NO: 8651 - DNA, 119 bp, homo sapiens
ttatgctactcaccttccccctcagttttcccattagcaagctcctggacttttttctgggccaggagatcgcactgtttacaaccgggagaagctgatggagatgttgaaggtgacgg

SEQ ID NO: 8652 - DNA, 119 bp, homo sapiens
gggccaggagattcgcactgtttacaaccgggagaagctgatggagatgttgaaggtgacggagccctaaatgacctcgtgaaagaggagctcaatatgatccagggtgccctggaact

SEQ ID NO: 8653 - DNA, 119 bp, homo sapiens
acggagccctataatgacctcgtgaaagaggagctcaatatgatccagggtgccctggaactacggaccaaactgtagaggatatcatgacccagctccaggactgcttcatgatccgc

SEQ ID NO: 8654 - DNA, 119 bp, homo sapiens
aactacggaccaaaactgtagaggatatcatgacccagctccaggactgcttcatgatccgcagcgatgcatcctggacttcaacaccatgtcggagataatggaaagcggctatactc

SEQ ID NO: 8655 - DNA, 119 bp, homo sapiens
ccgcagcgatgccatcctggacttcaacaccatgtcggagataatggaaagcggctatactcgcatcccgtgttcgaagacgagcagtccaatattgtagatattctctacgtcaaaga

SEQ ID NO: 8656 - DNA, 119 bp, homo sapiens
actcgcatcccggtgttcgaagacgagcagtccaatattgtagatattctctacgtcaaagacttggccttgtggaccccgatgactgcacccccctcaagactatcactcgcttctat

SEQ ID NO: 8657 - DNA, 119 bp, homo sapiens
aagacttggcctttgtggaccccgatgactgcacccccctcaagactatcactcgcttctataaccaccggtgcactttgtcttccatgacaccaagttggatgccatgctggaggagt

SEQ ID NO: 8658 - DNA, 119 bp, homo sapiens
ggaagtcccacctggccatcgtgcagaaggtaaacaacgagggtgagggtgaccccttctacgaggtccgggcctggtcaccctggaggacgtgatcgaggagatcatcaagtcggaga

SEQ ID NO: 8659 - DNA, 119 bp, homo sapiens
agaaggtaaacaacgagggtgagggtgaccccttctacgaggtcctgggcctggtcaccctggaggacggatcgaggagatcatcaagtcggagatcctggacgagtccgacatgtaca

SEQ ID NO: 8660 - DNA, 119 bp, homo sapiens
ctgacaaccgaagccggaagcgggtgtctgagaagaacaagcgtgacttctctgccttcaaggatgcggcaatgagctcaaagtgaaaatctccccgcagctcctcctggccgctcatc

SEQ ID NO: 8661 - DNA, 119 bp, homo sapiens
ggaagcgggtgtctgagaagaacaagcgtgacttctctgccttcaaggatgcggacaatgagctcaaaggaaaatctccccgcagctcctcctggccgctcatcgcttcctagccacag

SEQ ID NO: 8662 - DNA, 119 bp, homo sapiens
aggtctctcagtttagcccctccctgatatcagagaagatcctgctgcggctactcaagtacccagatgcattcaggaactcaagtttgacgagcacaataagtactacgcccgccatt

SEQ ID NO: 8663 - DNA, 119 bp, homo sapiens
ctactcaagtacccagatgtcattcaggaactcaagtttgacgagcacaataagtactacgcccgccatacctgtacacccgaaataagccggccgactacttcatcctcatcctgcag

SEQ ID NO: 8664 - DNA, 119 bp, homo sapiens
accgttccccagcacaccccaccccactcagccgctcagcctccctcagttacccagaccgcacagacgctcaactgcagcaaccttggcaggcagcagcaaccagtttggcagctctg

SEQ ID NO: 8665 - DNA, 119 bp, homo sapiens
ccgctcagcctccctcagttacccagaccgcacagacgtctcaactgcagcaaccttggcaggcagcagaaccagtttggcagctctgtcctgggccagtacatctctgacttcagcgt

SEQ ID NO: 8666 - DNA, 119 bp, homo sapiens
acagacgtctcaactgcagcaaccttggcaggcagcagcaaccagtttggcagctctgtcctgggccagacatctctgacttcagcgtccgggcactcgtggacttgcagtacatcaag

SEQ ID NO: 8667 - DNA, 119 bp, homo sapiens
atcactcggcagcagtaccagaacgggctgctggcttctcgcatggagaacagccctcagtttcccataacgggtgcaccacccacatggagaacttggccgagaagtctgagctgcct

SEQ ID NO: 8668 - DNA, 119 bp, homo sapiens
cagtttcccatagacgggtgcaccacccacatggagaacttggccgagaagtctgagctgcctgtggtgacgagaccacaactcttctcaacgagcgtaactccttgctgcacaaagcc

SEQ ID NO: 8669 - DNA, 119 bp, homo sapiens
ctgcctgtggtggacgagaccacaactcttctcaacgagcgtaactccttgctgcacaaagcctcccacagaatgccatctgacaggagggcccggggccccctgcccaccctgcgggg

SEQ ID NO: 8670 - DNA, 119 bp, homo sapiens
aaagcctcccacgagaatgccatctgacaggagggcccggggccccctgcccaccctgcgggggcctcccagtgggcccacatgaagagagggaacctgttagtccagaaaggatacgg

SEQ ID NO: 8671 - DNA, 119 bp, homo sapiens
gcgggggcctccccagtgggcccacatgaagagagggaacctgttagtccagaaaggatacggatagatgcctgtctgactgaacagccagatggcccccagcctatgggggatctggc

SEQ ID NO: 8672 - DNA, 119 bp, homo sapiens
atacggatagatagcctgtctgactgaacagccagatggcccccagcctatgggggatctggcctctgcagggacctctgagtagctctgaggtggcactgtccagccctggatagggg

SEQ ID NO: 8673 - DNA, 119 bp, homo sapiens
tctggcctctgccagggacctctgagtagctctgaggtggcactgtccagccctggatagggggggcaggggccagctaccgtaagcaaaggctgttttttactgagagaatttctaaa

SEQ ID NO: 8674 - DNA, 119 bp, homo sapiens
tagggggggcagtgggccagctaccgtaagcaaaggctgttttttactgagagaatttctaaagtaggccatcacttttttttaaatatcattttgggaagggaagacagggttaagga

SEQ ID NO: 8675 - DNA, 119 bp, homo sapiens
ttttttcctaaaaactataaaagaggaagggtttcttgtcccgggaagcaacggacataatctgttcccgccatggccttccagcttgtgtccctgattcagggagctctcccttcctc

SEQ ID NO: 8676 - DNA, 119 bp, homo sapiens
ggaggtgggatcccagagcctgccagtggaggcttatctgttgggaggaagacagctcttcacagaagcaagaacaaaatggcatggagatcagctgcctgagcacctgcgctgtagct

SEQ ID NO: 8677 - DNA, 119 bp, homo sapiens
tcacagaagcaaagaacaaaatggcatggagatcagctgcctgagcacctgcgctgtagcttatctgacacgctgaggccacgagctcctgggtagctgtgatcagggacatgataatc

SEQ ID NO: 8678 - DNA, 119 bp, homo sapiens
cttatctgacaacgctgaggccacgagctcctgggtagctgtgatcagggacatgataatctgagctatcagaggagcacatctgttgtcaactgctgtacccagaaatctagaactct

SEQ ID NO: 8679 - DNA, 119 bp, homo sapiens
tctgagctatgcagaggagcacatctgttgtcaactgctgtacccagaaatctagaactctgccgacagctctcctggtgagtcgggactcagctgaggacacatccccaccctgcctc

SEQ ID NO: 8680 - DNA, 119 bp, homo sapiens
ctgccgacagcctctcctggtgagtcgggactcagctgaggacacatccccaccctgcctcccatctggcctttggacaactggccctttgtgacagggctgactcaagtgttaggcag

SEQ ID NO: 8681 - DNA, 119 bp, homo sapiens
tcccatctggccctttggacaactggccctttgtgacagggctgactcaagtgttaggcagggtctcagcctttgattgctcacccctgctccccaggccctgccctcacttttaccaa

SEQ ID NO: 8682 - DNA, 119 bp, homo sapiens
agggtctcaggcctttgattgctcacccctgctccccaggccctgccctcacttttaccaaaggttctcctcggcgggagggcatctgtgttggaggtgatttgtctgggttcttcctt

SEQ ID NO: 8683 - DNA, 119 bp, homo sapiens
aaaggttctccctcggcgggagggcatctgtgttggaggtgatttgtctgggttcttccttttggttccgaaggaactgtcagtcatcagcatctgcgttgttagcagtcagtaccacc

SEQ ID NO: 8684 - DNA, 119 bp, homo sapiens
ttttggttccagaaggaactgtcagtcatcagcatctgcgttgttagcagtcagtaccacccccgcccccaatgacagtcaaggctgacttgttgactgaagcctttttcccagacccc

SEQ ID NO: 8685 - DNA, 119 bp, homo sapiens
cccccgccccacaatgacagtcaaggctgacttgttgactgaagcctttttcccagaccccttatttcgatccccaagcttcagtccctcttgggggtggagacaagaggacatgtggg

SEQ ID NO: 8686 - DNA, 119 bp, homo sapiens
ccttatttcgaatccccaagcttcagtccctcttgggggtggagacaagaggacatgtgggaagccacgaagcaggttctttatgtcctctcctctgtggctggcaaggctcacctggc

SEQ ID NO: 8687 - DNA, 119 bp, homo sapiens
ggaagccacggaagcaggttctttatgtcctctcctctgtggctggcaaggctcacctggccttatccaccacttatggaacctcaggagaggagggctcctcctaaaggcatgcagct

SEQ ID NO: 8688 - DNA, 119 bp, homo sapiens
gccttatccacccacttatggaacctcaggagaggagggctcctcctaaaggcatgcagcttgcagccctctttctcacacgtgtgatcctagcgtgagaggtcatcctgcccttgctg

SEQ ID NO: 8689 - DNA, 119 bp, homo sapiens
cttgcagcccctctttctcacacgtgtgatcctagcgtgagaggtcatcctgcccttgctgaagttagtgtactgtactaagagctctgccctcatgtgaattcctgccctggcgcctc

SEQ ID NO: 8690 - DNA, 119 bp, homo sapiens
tgaagttagtagtactgtactaagagctctgccctcatgtgaattcctgccctggcgcctcttccctgggctgaatcaggccctgctgcaaaactccaggcttcccagggttggggagg

SEQ ID NO: 8691 - DNA, 119 bp, homo sapiens
tcttccctggggctgaatcaggccctgctgcaaaactccaggcttcccagggttggggaggctgtgggacaaggtccatgttggtccttccactgggtgcagcaggagctgggtcccga

SEQ ID NO: 8692 - DNA, 119 bp, homo sapiens
ggctgtgggaccaaggtccatgttggtccttccactgggtgcagcaggagctgggtcccgagagcctggaggtgaaactctgcaggccttccgcctgattattatttattcactccttt

SEQ ID NO: 8693 - DNA, 119 bp, homo sapiens
gagagcctggcaggtgaaactctgcaggccttccgcctgattattatttattcactcctttcctcacccaagtgccctgctctccaggtgcctagagtatcctaactcttaggaccagg

SEQ ID NO: 8694 - DNA, 119 bp, homo sapiens
ttcctcaccccaagtgccctgctctccaggtgcctagagtatcctaactcttaggaccagggattgtctgcaccaagtatgcctacccctggccagtctgaggtctcctagccatagaa

SEQ ID NO: 8695 - DNA, 119 bp, homo sapiens
gggattgtcttgcaccaagtatgcctacccctggccagtctgaggtctcctagccatagaactgactccggaagcctggagagaaggtggtgacacccatgggttctcaactgtaagga

SEQ ID NO: 8696 - DNA, 119 bp, homo sapiens
aactgactcctggaagcctggagagaaggtggtgacacccatgggttctcaactgtaaggaaaaaagacccagacttttgttccctagtgggggaaagcccttagtcttgtacaggagc

SEQ ID NO: 8697 - DNA, 119 bp, homo sapiens
gaaaaaagacaccagacttttgttccctagtgggggaaagcccttagtcttgtacaggagcagcttgctccaagtccttttggaagctggcagagctatattcctgacagccctgactg

SEQ ID NO: 8698 - DNA, 119 bp, homo sapiens
gcagcttgctcccaagtccttttggaagctggcagagctatattcctgacagccctgactgccaggtaggcaaaagacattggtgggggtatgtgaagcaaaaggggcaggtgcacaca

SEQ ID NO: 8699 - DNA, 119 bp, homo sapiens
tgccaggtagagcaaaagacattggtgggggtatgtgaagcaaaaggggcaggtgcacacacctccacatgacctctgtgcacacggttaccaccaactggctggccctcctcctcttc

SEQ ID NO: 8700 - DNA, 119 bp, homo sapiens
cacctccacagtgacctctgtgcacacggttaccaccaactggctggccctcctcctcttccctggcccttgatcatcccttctcacagagggtcatcattatttccaaatattgtttg

SEQ ID NO: 8701 - DNA, 119 bp, homo sapiens
tccctggcccattgatcatcccttctcacagagggtcatcattatttccaaatattgtttgtctgatgattcctcttcccagtgcaatttttcccttcctatttcaacctctggttcct

SEQ ID NO: 8702 - DNA, 119 bp, homo sapiens
tgtctgatgacttcctcttcccagtgcaatttttcccttcctatttcaacctctggttcctgggatgagcataccctggaactggcccacccactgtgtcttccacgtaagggagacct

SEQ ID NO: 8703 - DNA, 119 bp, homo sapiens
ctgggatgagccataccctggaactggcccacccactgtgtcttccacgtaagggagacctttgcaaaggcatccaaatgggtaggcaggtgacagccgccgtatttattttgcataat

SEQ ID NO: 8704 - DNA, 119 bp, homo sapiens
ctttgcaaagggcatccaaatgggtaggcaggtgacagccgccgtatttattttgcataatattttaattgtatatttttgtgatttattttggcgttatgagtttgactctcggggag

SEQ ID NO: 8705 - DNA, 119 bp, homo sapiens
atattttaatttgtatatttttgtgatttattttggcgttatgagtttgactctcggggagttttgttgtatgactcttgtgtcttttgtcacaaaacaatgatatttgctaaacgata

SEQ ID NO: 8706 - DNA, 119 bp, homo sapiens
agttttgttgttatgactcttgtgtcttttgtcacaaaacaatgatatttgctaaacgatatatggaattatttttgattggtaataaaaaatcaaatatgtataaatcctggtgaatc

SEQ ID NO: 8707 - DNA, 119 bp, homo sapiens
gcttactcatccagtgtggattacactaccagcaaaacatcccaggaaggagtccagggtggccgcccaagttaggagagaacccagaacggaacgacggacttgtttgctttcttgcc

SEQ ID NO: 8708 - DNA, 119 bp, homo sapiens
tccagggtggccgcccacagttaggagagaacccagaacggaacgacggacttgtttgctttcttgccctgactctccccgtcctccctgggagggttggggatgtgaactaatgactt

SEQ ID NO: 8709 - DNA, 119 bp, homo sapiens
tgtttgctttcttgcccctgactctccccgtcctccctgggagggttggggatgtgaactaatgacttcgcctctttcggaccgcctttgaggctccagagcctcaccttactttccca

SEQ ID NO: 8710 - DNA, 119 bp, homo sapiens
tgtgaactaatgacttctgcctctttcggaccgcctttgaggctccagagcctcaccttactttcccacgagagggaggccacaggctccttcagcagtcgccgagcagagtcctgggc

SEQ ID NO: 8711 - DNA, 119 bp, homo sapiens
tcaccttactttcccacggagagggaggccacaggctccttcagcagtcgccgagcagagtcctgggccggagcgcgggggagggagcgagcggaactgcgcctaggaggccgagggag

SEQ ID NO: 8712 - DNA, 119 bp, homo sapiens
gagcagagtcctgggccgggagcgcgggggagggagcgagcggaactgcgcctaggaggccgagggaggggcgctccgcagaccctggcgcgccgcggagaagctcaaactttggcagg

SEQ ID NO: 8713 - DNA, 119 bp, homo sapiens
caatcatctggggggctaaatgtgacaaaccgagaagatggccaagatcaacacccaatactcccaccctccaggacccacctcaaggtaaagacctcagaccgagatctcaatcgcgc

SEQ ID NO: 8714 - DNA, 119 bp, homo sapiens
aatgtgacaaaccgagaagatggccaagatcaacacccaatactcccacccctccaggacccacctcaagtaaagacctcagaccgagatctcaatcgcgctgaaaatggcctcagcag

SEQ ID NO: 8715 - DNA, 119 bp, homo sapiens
gctgtcgcgcctcatcttcttgctgcgcaggtgggctgccaggcatgtgcaccaccaggaccagggaccgactcttttcctgatcgtttccgtggagccgagcttaaggaggtgtccag

SEQ ID NO: 8716 - DNA, 119 bp, homo sapiens
ccagggaccggactcttttcctgatcgtttccgtggagccgagcttaaggaggtgtccagccaagaaagaatgcccaggcaaatgtgggcagccaggagccagcagacagagggagaag

SEQ ID NO: 8717 - DNA, 119 bp, homo sapiens
gttttctcgagcaaggcttaatggtcagtgataccaacaggctgtggcagcattacaagacgaccacgcgttcaagctggatgtgttgtccctggtccccaccgacctggcttacttaa

SEQ ID NO: 8718 - DNA, 119 bp, homo sapiens
acgaccacgcagttcaagctggatgtgttgtccctggtccccaccgacctggcttacttaaaggtgggccaaactacccagaagtgaggttcaaccgcctactgaagttttcccggctc

SEQ ID NO: 8719 - DNA, 119 bp, homo sapiens
aaaggtgggcacaaactacccagaagtgaggttcaaccgcctactgaagttttcccggctctttgaatttttgaccgcacagagacaaggaccaactaccccaatatgttcaggattgg

SEQ ID NO: 8720 - DNA, 119 bp, homo sapiens
tctttgaattctttgaccgcacagagacaaggaccaactaccccaatatgttcaggattgggaacttggcttgtacattctcatcatcatccactggaatgcctgcatctactttgcca

SEQ ID NO: 8721 - DNA, 119 bp, homo sapiens
gggaacttggtcttgtacattctcatcatcatccactggaatgcctgcatctactttgccatttccaagtcattggttttgggacagactcctgggtctacccaaacatctcaatccca

SEQ ID NO: 8722 - DNA, 119 bp, homo sapiens
catttccaagttcattggttttgggacagactcctgggtctacccaaacatctcaatcccagagcatggcgcctctccaggaagtacatttacagtctctactggtccaccttgaccct

SEQ ID NO: 8723 - DNA, 119 bp, homo sapiens
cagagcatgggcgcctctccaggaagtacatttacagtctctactggtccaccttgacccttaccaccatggtgagaccccaccccccgtgaaagatgaggagtatctctttgtggtcg

SEQ ID NO: 8724 - DNA, 119 bp, homo sapiens
cttaccaccattggtgagaccccaccccccgtgaaagatgaggagtatctctttgtggtcgtagacttctggtgggtgttctgatttttgccaccattgtgggcaatgtgggctccatg

SEQ ID NO: 8725 - DNA, 119 bp, homo sapiens
cgtagacttcttggtgggtgttctgatttttgccaccattgtgggcaatgtgggctccatgatctcgaaatgaatgcctcacgggcagagttccaggccaagattgattccatcaagca

SEQ ID NO: 8726 - DNA, 119 bp, homo sapiens
tgatctcgaatatgaatgcctcacgggcagagttccaggccaagattgattccatcaagcagtacatgcgttccgcaaggtcaccaaggacttggagacgcgggttatccggtggtttg

SEQ ID NO: 8727 - DNA, 119 bp, homo sapiens
cagtacatgcagttccgcaaggtcaccaaggacttggagacgcgggttatccggtggtttgactacctggggccaacaagaagacggtggatgagaaggaggtgctcaagagcctccca

SEQ ID NO: 8728 - DNA, 119 bp, homo sapiens
tgactacctgtgggccaacaagaagacggtggatgagaaggaggtgctcaagagcctcccagacaagctaaggctgagatcgccatcaacgtgcacctggacacgctgaagaaggttcg

SEQ ID NO: 8729 - DNA, 119 bp, homo sapiens
cagacaagctgaaggctgagatcgccatcaacgtgcacctggacacgctgaagaaggttcgcatcttccggactgtgaggcagggctgctggtggagctggtgctgaagctgcgaccca

SEQ ID NO: 8730 - DNA, 119 bp, homo sapiens
cgcatcttccaggactgtgaggcagggctgctggtggagctggtgctgaagctgcgacccactgtgttcgccctggggattatatctgcaagaagggagatattgggaaggagatgtac

SEQ ID NO: 8731 - DNA, 119 bp, homo sapiens
cactgtgttcagccctggggattatatctgcaagaagggagatattgggaaggagatgtacatcatcaagagggcaagctggccgtggtggctgatgatggggtcacccagttcgtggt

SEQ ID NO: 8732 - DNA, 119 bp, homo sapiens
acatcatcaacgagggcaagctggccgtggtggctgatgatggggtcacccagttcgtggtcctcagcgtggcagctacttcggggagatcagcattctgaacatcaaggggagcaagt

SEQ ID NO: 8733 - DNA, 119 bp, homo sapiens
gtcctcagcgatggcagctacttcggggagatcagcattctgaacatcaaggggagcaagtcggggaacgcaggacggccaacatccgcagcattggctactcagacctgttctgcctc

SEQ ID NO: 8734 - DNA, 119 bp, homo sapiens
gtcggggaaccgcaggacggccaacatccgcagcattggctactcagacctgttctgcctctcaaaggagatctcatggaggccctcaccgagtaccccgaagccaagaaggccctgga

SEQ ID NO: 8735 - DNA, 119 bp, homo sapiens
tctcaaaggacgatctcatggaggccctcaccgagtaccccgaagccaagaaggccctggaggagaaagacggcagatcctgatgaaagacaacctgatcgatgaggagctggccaggg

SEQ ID NO: 8736 - DNA, 119 bp, homo sapiens
gaggagaaaggacggcagatcctgatgaaagacaacctgatcgatgaggagctggccagggcgggcgcgaccccaaggaccttgaggagaaagtggagcagctggggtcctccctggac

SEQ ID NO: 8737 - DNA, 119 bp, homo sapiens
ggcgggcgcggaccccaaggaccttgaggagaaagtggagcagctggggtcctccctggacaccctgcaaccaggtttgcacgcctcctggctgagtacaacgccacccagatgaagat

SEQ ID NO: 8738 - DNA, 119 bp, homo sapiens
acaccctgcagaccaggtttgcacgcctcctggctgagtacaacgccacccagatgaagatgaagcagctctcagccaactggaaagccaggtgaagggtggtggggacaagcccctgg

SEQ ID NO: 8739 - DNA, 119 bp, homo sapiens
atgaagcagcgtctcagccaactggaaagccaggtgaagggtggtggggacaagcccctggctgatgggaagttcccggggatgctacaaaaacagaggacaaacaacagtgaaaatgc

SEQ ID NO: 8740 - DNA, 119 bp, homo sapiens
ggctgatggggaagttcccggggatgctacaaaaacagaggacaaacaacagtgaaaatgcagcatctgctcctgcttcacagggtcgactgtcagggtgaccgtatgtggccgcagct

SEQ ID NO: 8741 - DNA, 119 bp, homo sapiens
gcagcatctgtctcctgcttcacagggtcgactgtcagggtgaccgtatgtggccgcagctgtgtggcaggaacttggtcagggttgaattccagctctactcaccctttgaaagctgt

SEQ ID NO: 8742 - DNA, 119 bp, homo sapiens
ctgtgtggcatggaacttggtcagggttgaattccagctctactcaccctttgaaagctgtgtgactgctgagagaacctgtttcttcacctaaaaaatgggactttttgtctcagtcc

SEQ ID NO: 8743 - DNA, 119 bp, homo sapiens
gtgtgactgcctgagagaacctgtttcttcacctaaaaaatgggactttttgtctcagtcccagtgaaggccaggtttgattgtgaagtccgcatgaaacactgcaccaggcagggctt

SEQ ID NO: 8744 - DNA, 119 bp, homo sapiens
cccagtgaagtgccaggtttgattgtgaagtccgcatgaaacactgcaccaggcagggctttgcaaagtcaaggtatccccagtccaagtatatgaaaacgtgcacacaggactctcat

SEQ ID NO: 8745 - DNA, 119 bp, homo sapiens
tttgcaaagtgcaaggtatccccagtccaagtatatgaaaacgtgcacacaggactctcattactttttatggaatctgcaaggtgtttttaggctttttaatctgattttcttataaa

SEQ ID NO: 8746 - DNA, 119 bp, homo sapiens
attacttttttatggaatctgcaaggtgtttttaggctttttaatctgattttcttataaatgaaagatatttagtcacctttctcctgtccaacttcaccaccacctgataatgggta

SEQ ID NO: 8747 - DNA, 119 bp, homo sapiens
aatgaaagattatttagtcacctttctcctgtccaacttcaccaccacctgataatgggtatataacagaagctgaaggtacaacatagtgactaaaattcagacttacacaagacagt

SEQ ID NO: 8748 - DNA, 119 bp, homo sapiens
tatataacaggaagctgaaggtacaacatagtgactaaaattcagacttacacaagacagtttgaggcaatttcttaatctggtatcacctcgtgtgttctttggggccctagaaaccc

SEQ ID NO: 8749 - DNA, 119 bp, homo sapiens
gtttgaggcatatttcttaatctggtatcacctcgtgtgttctttggggccctagaaaccctggcttttggagtgctatggcaagtagaagttctgccggatggaaagaggctgcccca

SEQ ID NO: 8750 - DNA, 119 bp, homo sapiens
cctggcttttgggagtgctatggcaagtagaagttctgccggatggaaagaggctgccccatttgaggtatttaaaatctgtgaagcaaatccagactccttgccgttcagccactgtg

SEQ ID NO: 8751 - DNA, 119 bp, homo sapiens
catttgaggtcatttaaaatctgtgaagcaaatccagactccttgccgttcagccactgtgaaaccagatctgcttcacagaaaaaagcatctcagttaggagaagagacatcccctcc

SEQ ID NO: 8752 - DNA, 119 bp, homo sapiens
tgaaaccagaatctgcttcacagaaaaaagcatctcagttaggagaagagacatcccctccttctcactgccaaagagattcaaagacagcccctatcctccattcttgagtcagggcc

SEQ ID NO: 8753 - DNA, 119 bp, homo sapiens
ccttctcacttgccaaagagattcaaagacagcccctatcctccattcttgagtcagggccctaggtgactattctaactcaaggaggagagctatgtacagggagagcattttagatt

SEQ ID NO: 8754 - DNA, 119 bp, homo sapiens
ccctaggtgacctattctaactcaaggaggagagctatgtacagggagagcattttagattgaaggttgaatggtgtactaaaccaaaaaagctgacaactgagagttttagaagatta

SEQ ID NO: 8755 - DNA, 119 bp, homo sapiens
ttgaaggttggaatggtgtactaaaccaaaaaagctgacaactgagagttttagaagattagaccattagaacgtatctttgcaaactgcccattcacccatgaagaggaagcctcaag

SEQ ID NO: 8756 - DNA, 119 bp, homo sapiens
tagaccattaggaacgtatctttgcaaactgcccattcacccatgaagaggaagcctcaagatcccttgaattgcatcccaaggcaaagcttttggctcaccgaaagctcacagattgc

SEQ ID NO: 8757 - DNA, 119 bp, homo sapiens
agatcccttggaattgcatcccaaggcaaagcttttggctcaccgaaagctcacagattgcagaaattacttttttaaaaaacaaaccccagtaaatataatttcattaacattttata

SEQ ID NO: 8758 - DNA, 119 bp, homo sapiens
gcagaaattagcttttttaaaaaacaaaccccagtaaatataatttcattaacattttataacagattttatttttgagttccgtgattgcaaattatgacctcaaattccatccttca

SEQ ID NO: 8759 - DNA, 119 bp, homo sapiens
tctctcctcttttcctcctcaaaatgtatatattttaaaagccttaactgttagttatgcctgcattcaatttgcacaggaaaaataaagacctggatttaaaaataggaatgactctt

SEQ ID NO: 8760 - DNA, 119 bp, homo sapiens
gaataatcataaatttagtttttgacaaaatcttgcttttatagaaatctataccattaacttaagtagtgtttttgaaaaaataaatactgtttaaatttagatataacagtattcct

SEQ ID NO: 8761 - DNA, 119 bp, homo sapiens
ggtctgtagaaagaaaagagtaaaacctaagttgtaaagtgacagtgatttttggttccatcattttatcacgtaatcgtggaggatccatctgattccgtgggaagctgagggctaga

SEQ ID NO: 8762 - DNA, 119 bp, homo sapiens
tccatcattttattcacgtaatcgtggaggatccatctgattccgtgggaagctgagggctagaggctgcactgtcacactgcattctttctcatttcacccaagaagtcataggtctg

SEQ ID NO: 8763 - DNA, 119 bp, homo sapiens
gggctagaggctgccactgtcacactgcattctttctcatttcacccaagaagtcataggtctgctctgaaggtcaaaaggttcatgaactccgtctggtgacagcagagcttggaggg

SEQ ID NO: 8764 - DNA, 119 bp, homo sapiens
taggtctgctctgaaaggtcaaaaggttcatgaactccgtctggtgacagcagagcttggagggcgcccggttttcttggttttgcttaaggaagtcagtgataactttccaccgtgca

SEQ ID NO: 8765 - DNA, 119 bp, homo sapiens
ttggagggcgccctggttttcttggttttgcttaaggaagtcagtgataactttccaccgtgcagtctcgtctcttcttctgcccacctgaatgggggtaggcgtgtggagtggagaag

SEQ ID NO: 8766 - DNA, 119 bp, homo sapiens
accgtgcagtctcagtctcttcttctgcccacctgaatgggggtaggcgtgtggagtggagaagtgggacacgcagtcatggtaaaccaggagaaacgtggacttcaggaactctttgt

SEQ ID NO: 8767 - DNA, 119 bp, homo sapiens
cttattaccatcaaatagacagaggcgtacatgtctgctgagaacctgtatgctcattcctggaagaggatcattttacagctccataatgtcagaatcaatgaaatacgacttggtct

SEQ ID NO: 8768 - DNA, 119 bp, homo sapiens
atcaaatagacagaggcgtacatgtctgctgagaacctgtatgctcattcctggaagaggaatcattttcagctccataatgtcagaatcaatgaaatacgacttggtctcgacctaat

SEQ ID NO: 8769 - DNA, 119 bp, homo sapiens
ttggagcacaggcttagaaaccagaaatatacgtcctctgctctgtacattccatgccctgaaccctgttcagatccattggtgtcttccacagtctccatcctatttcgcatcagaac

SEQ ID NO: 8770 - DNA, 119 bp, homo sapiens
tacattccatgccctgaaccctgtttcagatccattggtgtcttccacagtctccatcctatttcgcatagaactattaggtagcaaaacgagacatgattaacaagacagaagatgcc

SEQ ID NO: 8771 - DNA, 119 bp, homo sapiens
cacagtctccatcctatttcgcatcagaactattaggtagcaaaacgagacatgattaacaagacagaaatgcccgcctctgaaatcgctttctgaacagcactccagtggggatcagt

SEQ ID NO: 8772 - DNA, 119 bp, homo sapiens
ttcagtcttattctacctaccttaaatgtaagatctccaacttgctgagcagtaaaatctccaacagcgtgtattcttcaccggttgaccatttgtgagattcattttcctctttctct

SEQ ID NO: 8773 - DNA, 119 bp, homo sapiens
tcagttatattttctctgcttattgtcacagcaaggccctgcagttgttgggtaagcttgtccaaaagatatgctcctcttcttttctctgattatagtttgcaacaggtgcagattca

SEQ ID NO: 8774 - DNA, 119 bp, homo sapiens
tatattttctctgcttattgtcacagcaaggccctgcagttgttgggtaagcttgtccaaaagagtatgtcctcttcttttctctgattatagtttgcaacaggtgcagattcatcagc

SEQ ID NO: 8775 - DNA, 119 bp, homo sapiens
ctgttgcttcagctcctgattgcggcgccgcagggcctggagaggatctcgctgtcgtctcgccagcattccctggctgcggtgctctgattgctccagttgccagggaaaccaaccgg

SEQ ID NO: 8776 - DNA, 119 bp, homo sapiens
aggatctcgctgtcgtctcgccagcatctccctggctgcggtgctctgattgctccagttgccagggaaccaaccggcggcgccagaaggtgacgccatcgatgtgcgcccgcctccca

SEQ ID NO: 8777 - DNA, 119 bp, homo sapiens
actcactgcccgggccgcccggacagggagcttcgctggcgcgcttggccggcgacaggacaggttcggacgtccatctgtccatccgtccggagagaaattacagatccgcagccccg

SEQ ID NO: 8778 - DNA, 119 bp, homo sapiens
ttcgctggcgcgcttggccggcgacaggacaggttcgggacgtccatctgtccatccgtccggagagaattacagatccgcagccccgggatggggccggccccgctgccgctgctgct

SEQ ID NO: 8779 - DNA, 119 bp, homo sapiens
ggttcgggacgtccatctgtccatccgtccggagagaaattacagatccgcagccccgggatggggccgccccgctgccgctgctgctgggcctcttcctccccgcgctctggcgtaga

SEQ ID NO: 8780 - DNA, 119 bp, homo sapiens
ctatcactgaggcaagggaagaagccaagccttacccgctattcccgggaccttttccagggagcctgcaactgaccacacaccgctgttatcccttcctcacgccagtgggtaccagc

SEQ ID NO: 8781 - DNA, 119 bp, homo sapiens
ccttttccagggagcctgcaaactgaccacacaccgctgttatcccttcctcacgccagtgggtaccagctgccttgatgttttcaccaacccagcctggaagaccacatacaggaaac

SEQ ID NO: 8782 - DNA, 119 bp, homo sapiens
tcacgccagtgggtaccagcctgccttgatgttttcaccaacccagcctggaagaccacatacaggaaagtagccattccccaggtgacctctgtcgaatcaaagcccctaccgcctct

SEQ ID NO: 8783 - DNA, 119 bp, homo sapiens
gaagaccacatacaggaaacgtagccattccccaggtgacctctgtcgaatcaaagcccctaccgcctctgccttcaaacacacagttggacacataatactttctgaacataaaggtg

SEQ ID NO: 8784 - DNA, 119 bp, homo sapiens
tcaaagcccctaccgcctcttgccttcaaacacacagttggacacataatactttctgaacataaaggttcaaatttaattgctcaatcagtgtacctaatatataccaggacaccaca

SEQ ID NO: 8785 - DNA, 119 bp, homo sapiens
actttctgaacataaaggtgtcaaatttaattgctcaatcagtgtacctaatatataccaggacaccacatttcttggtggaaagatgggaaggaattgcttggggcacatcatgcaat

SEQ ID NO: 8786 - DNA, 119 bp, homo sapiens
atatataccaggacaccacaatttcttggtggaaagatgggaaggaattgcttggggcacatcatgcaatacacagttttatccagatgatgaagttacagcaataatcgcttccttca

SEQ ID NO: 8787 - DNA, 119 bp, homo sapiens
gacttcctcactttactaagcagcctgagagcatgaatgtcaccagaaacacagccttcaacctcaccttcaggctgtgggcccgcctgagcccgtcaacattttctgggttcaaaaca

SEQ ID NO: 8788 - DNA, 119 bp, homo sapiens
ccttcaacctcacctgtcaggctgtgggcccgcctgagcccgtcaacattttctgggttcaaaacagtaccgtgttaacgaacagcctgaaaaatccccctccgtgctaactgttccag

SEQ ID NO: 8789 - DNA, 119 bp, homo sapiens
gtcaaggaagctgatccgctgagtaatggctcagtcatgatttttaacacctctgccttaccacatctgaccaaatcaagcagctgcaagccctggctaattacagcattggtgtttcc

SEQ ID NO: 8790 - DNA, 119 bp, homo sapiens
agtcatgatttttaacacctctgccttaccacatctgtaccaaatcaagcagctgcaagccctggctaatacagcattggtgtttcctgcatgaatgaaataggctggtctgcagtgag

SEQ ID NO: 8791 - DNA, 119 bp, homo sapiens
atctgtaccaaatcaagcagctgcaagccctggctaattacagcattggtgtttcctgcatgaatgaaaaggctggtctgcagtgagcccttggattctagccagcacgactgaaggag

SEQ ID NO: 8792 - DNA, 119 bp, homo sapiens
ccccatcagtagcacctttaaatgtcactgtgtttctgaatgaatctagtgataatgtggacatcagatgatgaagcctccgactaagcagcaggatggagaactggtgggctaccgga

SEQ ID NO: 8793 - DNA, 119 bp, homo sapiens
tttctgaatgaatctagtgataatgtggacatcagatggatgaagcctccgactaagcagcaggatggaaactggtgggctaccggatatcccacgtgtggcagagtgcagggatttcc

SEQ ID NO: 8794 - DNA, 119 bp, homo sapiens
aaagagctcttggaggaagttggccagaatggcagccgagctcggatctctgttcaagtccacaatgctcgtgcacagtgaggattgcagccgtcaccagagggggagttgggcccttc

SEQ ID NO: 8795 - DNA, 119 bp, homo sapiens
gccgagctcggatctctgttcaagtccacaatgctacgtgcacagtgaggattgcagccgtcaccagaggggagttgggcccttcagtgatccagtgaaaatatttatccctgcacacg

SEQ ID NO: 8796 - DNA, 119 bp, homo sapiens
gttgggtagattatgccccctcttcaactccggcgcctggcaacgcagatcctgtgctcatcatctttgctgcttttgtggatttattttgattgggttgattttatacatctccttgg

SEQ ID NO: 8797 - DNA, 119 bp, homo sapiens
gcctggcaacgcagatcctgtgctcatcatctttggctgcttttgtggatttattttgattgggttgatttatacatctccttggccatcagaaaaagagtccaggagacaaagtttgg

SEQ ID NO: 8798 - DNA, 119 bp, homo sapiens
gttgcgagatgacatgactgtctgtgttgcggacttcggcctctctaagaagatttacagtggcgattataccgccaaggccgcattgctaagatgcctgttaaatggatcgccataga

SEQ ID NO: 8799 - DNA, 119 bp, homo sapiens
ctctctaagaagatttacagtggcgattattaccgccaaggccgcattgctaagatgcctgttaaatggtcgccatagaaagtcttgcagaccgagtctacacaagtaaaagtgatgtg

SEQ ID NO: 8800 - DNA, 119 bp, homo sapiens
tgggcatttggcgtgaccatgtgggaaatagctacgcggggaatgactccctatcctggggtccagaacatgagatgtatgactatcttctccatggccacaggttgaagcagcccgaa

SEQ ID NO: 8801 - DNA, 119 bp, homo sapiens
catgtgggaaatagctacgcggggaatgactccctatcctggggtccagaaccatgagatgtatgactacttctccatggccacaggttgaagcagcccgaagactgcctggatgaact

SEQ ID NO: 8802 - DNA, 119 bp, homo sapiens
gtatgaaataatgtactcttgctggagaaccgatcccttagaccgccccaccttttcagtattgaggctcagctagaaaaactcttagaaagtttgcctgacgttcggaaccaagcaga

SEQ ID NO: 8803 - DNA, 119 bp, homo sapiens
ttcagtattgaggctgcagctagaaaaactcttagaaagtttgcctgacgttcggaaccaagcagacgtatttacgtcaatacacagttgctggagagctctgagggcctggcccaggg

SEQ ID NO: 8804 - DNA, 119 bp, homo sapiens
gaaccaagcagacgttatttacgtcaatacacagttgctggagagctctgagggcctggcccagggctcacccttgctccactggacttgaacatcgaccctgactctataattgcctc

SEQ ID NO: 8805 - DNA, 119 bp, homo sapiens
cctggcccagggctccacccttgctccactggacttgaacatcgaccctgactctataattgcctcctgactccccgcgctgccatcagtgtggtcacagcagaagttcatgacagcaa

SEQ ID NO: 8806 - DNA, 119 bp, homo sapiens
tataattgcctcctgcactccccgcgctgccatcagtgtggtcacagcagaagttcatgacagcaaacccatgaaggacggtacatcctgaatgggggcagtgaggaatgggaagatct

SEQ ID NO: 8807 - DNA, 119 bp, homo sapiens
tcatgacagcaaacctcatgaaggacggtacatcctgaatgggggcagtgaggaatgggaagatctgactctgccccctctgctgcagtcacagctgaaaagaacagtgttttaccggg

SEQ ID NO: 8808 - DNA, 119 bp, homo sapiens
atgggaagatctgacttctgccccctctgctgcagtcacagctgaaaagaacagtgttttaccgggggaagacttgttaggaatggggtctcctggtcccattcgagcatgctgccctt

SEQ ID NO: 8809 - DNA, 119 bp, homo sapiens
tgttttaccgggggagagacttgttaggaatggggtctcctggtcccattcgagcatgctgcccttgggagctcattgcccgatgaacttttgtttgctgacgactcctcagaaggctc

SEQ ID NO: 8810 - DNA, 119 bp, homo sapiens
catgctgcccttgggaagctcattgcccgatgaacttttgtttgctgacgactcctcagaaggctcagagtcctgatgtgaggagaggtgcggggagacattccaaaaatcaagccaat

SEQ ID NO: 8811 - DNA, 119 bp, homo sapiens
ctcagaaggctcagaagtcctgatgtgaggagaggtgcggggagacattccaaaaatcaagccaattctctgctgtaggagaatccaattgtacctgatgtttttggtatttgtcttcc

SEQ ID NO: 8812 - DNA, 119 bp, homo sapiens
aatcaagccaattcttctgctgtaggagaatccaattgtacctgatgtttttggtatttgtcttccttacaagtgaactccatggccccaaagcaccagatgaatgttgttaagtaagc

SEQ ID NO: 8813 - DNA, 119 bp, homo sapiens
gagaaaaaatatgtgtatatcatggaaaaagacaaggatattttaataaaacattacttatttcatttccttatcttgcatatcttaaaattaagcttcagctgctccttgatattaac

SEQ ID NO: 8814 - DNA, 119 bp, homo sapiens
acattacttatttcatttcacttatcttgcatatcttaaaattaagcttcagctgctccttgatattaaatttgtacagagttgaagttgttttttcaagttcttttctttttcatgac

SEQ ID NO: 8815 - DNA, 119 bp, homo sapiens
agctgctccttgatattaacatttgtacagagttgaagttgttttttcaagttcttttctttttcatgatattaaatgtaaaaatatttgtaaaatgaaatgccatatttgacttggct

SEQ ID NO: 8816 - DNA, 119 bp, homo sapiens
gttcttttctttttcatgactattaaatgtaaaaatatttgtaaaatgaaatgccatatttgacttggctctggtcttgatgtatttgataagaatgattcattcaatgtttaaagttg

SEQ ID NO: 8817 - DNA, 119 bp, homo sapiens
atgccatatttgacttggcttctggtcttgatgtatttgataagaatgattcattcaatgtttaaagtttataactgattaattttctgatatggcttcctaataaaatatgaataagg

SEQ ID NO: 8818 - DNA, 119 bp, homo sapiens
tgacttataaatactgtttattgtaaatgcaaataaaattgaggactgtgtttactacaattttaaggaaattgaaaaagatgtagatgagaaattaaaaataatgctaaggattaagt

SEQ ID NO: 8819 - DNA, 119 bp, homo sapiens
attttaaggaaaattgaaaaagatgtagatgagaaattaaaaataatgctaaggattaagtttagattagttaaatttagtgtaagagagtgaaagcttctatgccagggtgctgttaa

SEQ ID NO: 8820 - DNA, 119 bp, homo sapiens
gtttagattaggttaaatttagtgtaagagagtgaaagcttctatgccagggtgctgttaaacagagctggtaaaccgttgccttcacatggtgtgctttgtgactccctgctgaccaa

SEQ ID NO: 8821 - DNA, 119 bp, homo sapiens
aaacagagctgggtaaaccgttgccttcacatggtgtgctttgtgactccctgctgaccaaaagtatttgtcaccctttaccatcaaatgttacagtgtctgaaattatacctgcagac

SEQ ID NO: 8822 - DNA, 119 bp, homo sapiens
aaaagtatttggtcaccctttaccatcaaatgttacagtgtctgaaattatacctgcagaccaagtctttaggctaaggttaaatatccctaataagggacctatttaaattgaggttt

SEQ ID NO: 8823 - DNA, 119 bp, homo sapiens
accaagtcttctaggctaaggttaaatatccctaataagggacctatttaaattgaggtttcaggacctattatttcttaagaccacaatggccttgaaagcaggaagaatgagctcaa

SEQ ID NO: 8824 - DNA, 119 bp, homo sapiens
ttcaggacctgattatttcttaagaccacaatggccttgaaagcaggaagaatgagctcaagaaaggaagggaaacacacactctacccttttctaaaaaagatttttcaatgaaagtt

SEQ ID NO: 8825 - DNA, 119 bp, homo sapiens
aagaaaggaaagggaaacacacactctacccttttctaaaaaagatttttcaatgaaagttacattttcgtactataccaccacccattaacattacagaatgcagggggagcttaccc

SEQ ID NO: 8826 - DNA, 119 bp, homo sapiens
ttacattttctgtactataccaccacccattaacattacagaatgcagggggagcttaccctgatttgcaaacttaccacatcttttgagttccaagaggaatataaatcatctattta

SEQ ID NO: 8827 - DNA, 119 bp, homo sapiens
tataacaaaaacactttaaaagagaacaatgcattttaaatatatttcctgaaataatattccttagaaagatacagggtatttaattacctagattttaacaaaatattctttataga

SEQ ID NO: 8828 - DNA, 119 bp, homo sapiens
atattccttagaaaagatacagggtatttaattacctagattttaacaaaatattctttatagaaataatatagtctttaccacagagtcaccaaatctgtacccaatcaaaacagagt

SEQ ID NO: 8829 - DNA, 119 bp, homo sapiens
tttatagaaataattatagtctttaccacagagtcaccaaatctgtacccaatcaaaacagagtcaaatgaccagctctcattcaactccattaggaaacaccaatttcacatagtact

SEQ ID NO: 8830 - DNA, 119 bp, homo sapiens
aacagagtcaaatagaccagctctcattcaactccattaggaaacaccaatttcacatagtacttctctgatgtacagcagcaacctctgctggagaaaaaagggtatacttctaataa

SEQ ID NO: 8831 - DNA, 119 bp, homo sapiens
atagtacttctcttgatgtacagcagcaacctctgctggagaaaaaagggtatacttctaataacaaagactgagctcaaacctgttttgaacaggaagaactgaaagttagatttctt

SEQ ID NO: 8832 - DNA, 119 bp, homo sapiens
tctaataacaaagcactgagctcaaacctgttttgaacaggaagaactgaaagttagatttctttcattcctgttaaaccaacacctaagttaaaattattttcaaggtcttaaagacg

SEQ ID NO: 8833 - DNA, 119 bp, homo sapiens
gatttctttcatttcctgttaaaccaacacctaagttaaaattattttcaaggtcttaaagacgcacggccttatcaagtatatcctttctgatttttggataagttggatgtgcttca

SEQ ID NO: 8834 - DNA, 119 bp, homo sapiens
tctattatgacgcaggcaccgttttaacaggtcttctgccatgtcatattttgctgattgaatgtaaattcagcaagtagcagccaactcttctcaaactcttcagcatcaatagcatt

SEQ ID NO: 8835 - DNA, 119 bp, homo sapiens
gctgattgaatgtaaatatcagcaagtagcagccaactcttctcaaactcttcagcatcaatagcattcaattcattttcgcaatacgcttcagctggtttctggctcgtggagtctgt

SEQ ID NO: 8836 - DNA, 119 bp, homo sapiens
cagcatcaatagcattccaattcattttcgcaatacgcttcagctggtttctggctcgtggagtctgttcaagatcatataagccgttgccattcccaagagcgctgggatatgctcct

SEQ ID NO: 8837 - DNA, 119 bp, homo sapiens
ctcagatgctgctatttcagtgaaggtatttaatgcttgttcaacattagatttctgtttggtagccataagcaatagttttccattatgcgaagctgtacgtgaccctgaacagtctg

SEQ ID NO: 8838 - DNA, 119 bp, homo sapiens
gttcaacattagatttctgtttggtagccattaagcaatagttttccattatgcgaagctgtacgtgacctgaacagtctgaggttttagttccttaagaagtttttctgctgttctta

SEQ ID NO: 8839 - DNA, 119 bp, homo sapiens
tagttttccattatgcgaagctgtacgtgaccctgaacagtctgaggttttagttccttaagaagttttctgctgttcttactgccagttgcacagattcttgcttctcagttgaatta

SEQ ID NO: 8840 - DNA, 119 bp, homo sapiens
cccaggtctccatccaggttttcaaatacttcacctccaacagtttcattatctggattcaaacagatcctatcatattataaagggcattttggccccagtcacgatctttccgagct

SEQ ID NO: 8841 - DNA, 119 bp, homo sapiens
gtttcattatctggattcaaacagatctctatcatattataaagggcattttggccccagtcacgatcttccgagctttattaaaatgtcgaagggcatcatttggttctccagtgtac

SEQ ID NO: 8842 - DNA, 119 bp, homo sapiens
caaagatacagtcctttacaatactgaaatcctggttccaattttgctctggagttacgtttctcagccttgagaaaaatcttgggacatcctcgagttttccacatcttcttaggaga

SEQ ID NO: 8843 - DNA, 119 bp, homo sapiens
ctggttccaattttgctctggagttacgtttctcagccattgagaaaaatcttgggacatcctcgagtttccacatcttcttaggagatcaatcaaacgagataatgtcatataattat

SEQ ID NO: 8844 - DNA, 119 bp, homo sapiens
cttattatctgtttcgcagtgaaccagagcctctctataaaacttaattgctttttcatagtctcgctggcaacagaatgttttgcaatctctgcacaaatttcagctgctaaatgttt

SEQ ID NO: 8845 - DNA, 119 bp, homo sapiens
ctataaaacttaattgctttttcatagtctcgctgagcaacagaatgttttgcaatctctgcacaaattcagctgctaaatgtttctgtgcaggaactgcatctggctgttccatctga

SEQ ID NO: 8846 - DNA, 119 bp, homo sapiens
gagcaacagaatgttttgcaatctctgcacaaatttcagctgctaaatgtttctgtgcaggaactgcattggctgttccatctgaacacgttttagtacccgagcttgtaattctcgag

SEQ ID NO: 8847 - DNA, 119 bp, homo sapiens
caggttcatgagccagagcatgctgaagaactttttctgctttgtcataccatttcaattttaataagactcagccaggtcatagcaaagataattcttttgtccagttttcagagcag

SEQ ID NO: 8848 - DNA, 119 bp, homo sapiens
atgctgaagaactttttctgctttgtcataccatttcaattttaataagagctcagccaggtcatagcaagataattcttttgtccagttttcagagcagcttcatagtaagtgattgc

SEQ ID NO: 8849 - DNA, 119 bp, homo sapiens
ctaaaacaagtgatatataacattttatcttttctgtgcttcagataaatatctgccattttttctctgcctctataaaataaggctgttcggctgtaacattctgaaggatgcttaaa

SEQ ID NO: 8850 - DNA, 119 bp, homo sapiens
tttttctctggcctctataaaataaggctgttcggctgtaacattctgaaggatgcttaaagcccgttcatatctccttgggctagagcaaggtctgcattagcaatggtaacccgcac

SEQ ID NO: 8851 - DNA, 119 bp, homo sapiens
aagcccgttcaatatctccttgggctagagcaaggtctgcattagcaatggtaacccgcacttcttcagtgttccagaaaattcatggatggcatcttgtaaaactttggttgcctcat

SEQ ID NO: 8852 - DNA, 119 bp, homo sapiens
ctgctctccatttaagcggtgaacgtctatcaattcaagaaagatcgataaacgatggcttgtatcaactcagtttttctgtcttttgattttgtggaagctccaattcttttcattcc

SEQ ID NO: 8853 - DNA, 119 bp, homo sapiens
cgatggcttgtatcaacttcagtttttctgtcttttgattttgtggaagctccaattcttttcattcctgtaaactcattgccatatgcagtgttttaattgcgtctgctatttctccc

SEQ ID NO: 8854 - DNA, 119 bp, homo sapiens
caattcttttcattcctggtaaactcattgccatatgcagtgttttaattgcgtctgctatttctcccatttcttttgtgactgagcttttatcaaatggtataaaggatagtctctca

SEQ ID NO: 8855 - DNA, 119 bp, homo sapiens
cttaaaatcatagctcagacaaagttcaagagactgagaacacaatttgactttttcttgagacaagtaacctgagctagcagcagatgagcatcagcataagagggattgtgttctaa

SEQ ID NO: 8856 - DNA, 119 bp, homo sapiens
aacacaatttgactttttcttgagacaagtaaacctgagctagcagcagatgagcatcagcataagaggattgtgttctaagcagtgctgaaggttattgaaagctgcttcaatatcac

SEQ ID NO: 8857 - DNA, 119 bp, homo sapiens
ctgacaaatatttcacttttgctattaggaagactgtttgcagaagacctggaacagttcttactacagctccaggactgagatgcaacgcctgagaagtggacaaagaggttgcccag

SEQ ID NO: 8858 - DNA, 119 bp, homo sapiens
tttcacttttgctattaggaagactgtttgcagaagacctggaacagttcttactacagtctccaggacgagatgcaacgcctgagaagtggacaaagaggttgcccaggacttgcagg

SEQ ID NO: 8859 - DNA, 119 bp, homo sapiens
ctgcattggacagaagctcagatactccataacaatttctaacaagaaatcaggatttagcttttcaaatactgtatgccaagaggcaaaccttctaattgtgaaaagtgagtgtccag

SEQ ID NO: 8860 - DNA, 119 bp, homo sapiens
aacaagaaatcaggatttagcttttcaaaatactgtatgccaagaggcaaaccttctaattgtgaaaaggagtgtccaggacatcatttaacaaattaataacttcttcttgtcgttta

SEQ ID NO: 8861 - DNA, 119 bp, homo sapiens
caagaggcaaaccttctaattgtgaaaagtgagtgtccaggacatcatttaacaaattaataacttcttttgtcgtttatttttcttcatggcaagaactgcatgtaaatagattaatt

SEQ ID NO: 8862 - DNA, 119 bp, homo sapiens
caactagggcagacacactagtctcatcaagtgtcatggcggtcttataccacttcagtgcctctttaatcttccttgtaaaatcatttggtatccaagttctgtagcaaattctgatt

SEQ ID NO: 8863 - DNA, 119 bp, homo sapiens
tggcggtcttataccacttcagtgcctctttaactcttccttgtaaaatcatttggtatccaagttctgagcaaattctgattgctgagggtttaaactaaaagctctctcaagtaacg

SEQ ID NO: 8864 - DNA, 119 bp, homo sapiens
ttccttgtaaaatcatttggtatccaagttctgtagcaaattctgattgctgagggtttaaactaaaagtctctcaagtaacgtttgaattttttgaagaataagttgactacgtccac

SEQ ID NO: 8865 - DNA, 119 bp, homo sapiens
ctttgtgctgtctcaactgtctggtcccaatcctgcaaggctagttgtaatttcattttcttaacaaaacaggaaggaagctcggaaaattcacgattatctggttcacagtctccagg

SEQ ID NO: 8866 - DNA, 119 bp, homo sapiens
ggctagttgtaatttcattttcttaacaaaagcaggaaggaagctcggaaaattcacgattatctggttacagtctccagggcacctgaataattctggcgcatctcaaggcattgtgc

SEQ ID NO: 8867 - DNA, 119 bp, homo sapiens
cttacccagcagagcaaaagtatcattcccatcttggagtccctcttcaaaatacttcagtgcttttttgtgtaaggctcttttcctcttgtaatatcaagccatgctttcaaaacgtg

SEQ ID NO: 8868 - DNA, 119 bp, homo sapiens
acccagcagagcaaaagtatcattcccatcttggagtccctcttcaaaatacttcagtgcttttttagttaaggctcttttcctcttgtaatatcaagccatgctttcaaaacgtgtcc

SEQ ID NO: 8869 - DNA, 119 bp, homo sapiens
ctgtttactaccatctgatattttgatcattctgtcaatatattcccttgctttatcatggcgaccaattgccataaaaataagcctgcatggtataaggctttctctccagctccttt

SEQ ID NO: 8870 - DNA, 119 bp, homo sapiens
ttgctttatcatggcgaccaatgtgccataaaaataagcctgcatggtataaggctttctctccagctctttacgttgttccttcactctggcatctgattccagaatagcttctctat

SEQ ID NO: 8871 - DNA, 119 bp, homo sapiens
cttccattaatgtgccataggcatgataaaacctgaagactggatcacttccatacctcttaattccttactggcaaccagtaatacatgatggaaatatctctcttgacaatagtaat

SEQ ID NO: 8872 - DNA, 119 bp, homo sapiens
tgtgccataggcatgataaaacctgaagactggatcacttccatacctcttaattccttcactggcaacagtaatacatgatggaaatatctctcttgacaatagtaattaatcaaagt

SEQ ID NO: 8873 - DNA, 119 bp, homo sapiens
ttcaattcctgcgagtccatggctgccccgaggccgggccgcggggctctggggattgtctcgccgcagctaaaggaagacgcagaattcagctcccctagcctcccggagcgctctag

SEQ ID NO: 8874 - DNA, 119 bp, homo sapiens
ccgggccgcggggctctggggattgtctcgccgcagcctaaaggaagacgcagaattcagctcccctagctcccggagcgctctagcgccccgggccccagcgggaggggcggggtcgc

SEQ ID NO: 8875 - DNA, 119 bp, homo sapiens
aaattacgaggccaaactgaagctctctatatactaacaaaatgtaacagtactcgttttgaatttatattacaaatttggttcctggaagccctagactttttacttctgtgatggca

SEQ ID NO: 8876 - DNA, 119 bp, homo sapiens
aggccaaactgaagctctctatatactaacaaaatgtaacagtactcgttttgaatttatatttacaaattggttcctggaagccctagactttttacttctgtgatggcagtacacag

SEQ ID NO: 8877 - DNA, 119 bp, homo sapiens
agcttatgaaacttctaaaatgtatcgtgattttaaattaagaagtgcactaattcagaacaagcaactagactgttgccacaagaacatgtatatgataaaataaatggagtttggaa

SEQ ID NO: 8878 - DNA, 119 bp, homo sapiens
aaaatgtatcgtgattttaaattaagaagtgcactaattcagaacaagcaactaagactgttgccacaaaacatgtatatgataaaataaatggagtttggaatttatccagtgatcag

SEQ ID NO: 8879 - DNA, 119 bp, homo sapiens
agtggtggatatgttcttggctttaaaatagatcctgtggaaaaactacaagaatcagttaaggaaatcattcacttcacaaagtctattctgccagtcccatatttggagttgattat

SEQ ID NO: 8880 - DNA, 119 bp, homo sapiens
cttggctttaaaatagatcctgtggaaaaactacaagaatcagttaaggaaatcaattcacttcacaaatctattctgccagtcccatatttggagttgattatgagatggaagaaaag

SEQ ID NO: 8881 - DNA, 119 bp, homo sapiens
caacaagatcgtgaacctgtattttcagaagaactggggcttgcaatagagaaattgaaggatggattcccctacagggactttgggaagtaatgagttgattgaccttgagttgagat

SEQ ID NO: 8882 - DNA, 119 bp, homo sapiens
aaggatggattcaccctacagggactttgggaagtaatgagttgattgaccttgagttgagatggattttattaaagatatctctagtttaaagatactagtcacctgccataagtcat

SEQ ID NO: 8883 - DNA, 119 bp, homo sapiens
tgagatggatttctattaaagatatctctagtttaaagatactagtcacctgccataagtcatggaatatttttatatttacagcttttatatttaaaacttgtaagagtttttttaat

SEQ ID NO: 8884 - DNA, 119 bp, homo sapiens
agtcatggaatagtttttatatttacagcttttatatttaaaacttgtaagagtttttttaatgattgagaaaaagtcatttagaaaacttcagttttcggccagcgcgtcgagggagg

SEQ ID NO: 8885 - DNA, 119 bp, homo sapiens
tttaatgattgaggaaaaagtcatttagaaaacttcagttttcggccagcgcgtcgagggaggggccaggacacatggcctagtaaccgtccggccgcggcgctggcttaagccatggc

SEQ ID NO: 8886 - DNA, 119 bp, homo sapiens
gggaggggccagcgacacatggcctagtaaccgtccggccgcggcgctggcttaagccatggctgagggagctggattcctcaggcccgggcgctcctacagcagtgcctgcacgcccg

SEQ ID NO: 8887 - DNA, 119 bp, homo sapiens
catggctgagggtagctggattcctcaggcccgggcgctcctacagcagtgcctgcacgcccggctgcaattcgcccagccaatggggacgttgcggcccagtgggtggaggtccaaag

SEQ ID NO: 8888 - DNA, 119 bp, homo sapiens
cgcccggctgcaaattcgcccagccaatggggacgttgcggcccagtgggtggaggtccaaagaggactgtgatctacgtgtgctttttcaagggagctgataaagaacttcttcccaa

SEQ ID NO: 8889 - DNA, 119 bp, homo sapiens
gtaatcaaaatgtacctagtttataaatgtttattttgtacttaatacctgtaaagtcttagttttcagcattaagtgactgtatcatgttcggtttaataaagaatttatgcagcacc

SEQ ID NO: 8890 - DNA, 119 bp, homo sapiens
taatcaaaatgtacctagtttataaatgtttattttgtacttaatacctgtaaagtcttagttttcagaattaagtgactgtatcatgttcggtttaataaagaatttatgcagcacca

SEQ ID NO: 8891 - DNA, 119 bp, homo sapiens
cagtgaatataaatgagacgacagcaaaattttcatgaaatgtaaaatatttttatagtttgttcatacatatgaggttctattttaaatgactttctggattttaaaaaatttcttta

SEQ ID NO: 8892 - DNA, 119 bp, homo sapiens
gcttatgatctagataattgcagaatatcattttatctgactctgccttcataagagagctgtggccgattttgaacatctgttatagggagtgatcaaattagaaggcaatgtggaaa

SEQ ID NO: 8893 - DNA, 119 bp, homo sapiens
agctgtggccgaattttgaacatctgttatagggagtgatcaaattagaaggcaatgtggaaaaacaatctgggaaagatttctttatatgaagtccctgccactagccagccatccta

SEQ ID NO: 8894 - DNA, 119 bp, homo sapiens
tggaaaaacaattctgggaaagatttctttatatgaagtccctgccactagccagccatcctaattgataaagttatctgttcacaggcctgcagtgatggtgaggaatgttctgagat

SEQ ID NO: 8895 - DNA, 119 bp, homo sapiens
atcctaattgatgaaagttatctgttcacaggcctgcagtgatggtgaggaatgttctgagatttgcgaggcatttgagtagtgaaatgtaagcacaaaacctcctgaacccagagtgt

SEQ ID NO: 8896 - DNA, 119 bp, homo sapiens
tgagatttgcgaaggcatttgagtagtgaaatgtaagcacaaaacctcctgaacccagagtgtgtataccaggaataaactttatgacatttatgtatttttaaaaaactttgtatcgt

SEQ ID NO: 8897 - DNA, 119 bp, homo sapiens
gagtgtgtatacacaggaataaactttatgacatttatgtatttttaaaaaactttgtatcgttataaaaggctagtcattctttcaggagaacatctaggatcatagatgaaaaatca

SEQ ID NO: 8898 - DNA, 119 bp, homo sapiens
tatcgttataaaaaggctagtcattctttcaggagaacatctaggatcatagatgaaaaatcaagccccatttagaactgtcttctccaggatggtctctaaggaaatttacatttggt

SEQ ID NO: 8899 - DNA, 119 bp, homo sapiens
aaatcaagccccgatttagaactgtcttctccaggatggtctctaaggaaatttacatttggttctttctactcagaactactcagaaacaactatatatttcaggttatctgagcaca

SEQ ID NO: 8900 - DNA, 119 bp, homo sapiens
tttggttctttcctactcagaactactcagaaacaactatatatttcaggttatctgagcacagtgaaacagagtactatggttgtccaacacaggcctctcagatacaaggggaacac

SEQ ID NO: 8901 - DNA, 119 bp, homo sapiens
agcacagtgaaagcagagtactatggttgtccaacacaggcctctcagatacaaggggaacacaattactattgggctagattttgcccagttcaaaatagtatttgttatcaacttac

SEQ ID NO: 8902 - DNA, 119 bp, homo sapiens
gaacacaattacatattgggctagattttgcccagttcaaaatagtatttgttatcaacttactttgttcttgtatcatgaattttaaaaccctaccactttaagaagacagggatggg

SEQ ID NO: 8903 - DNA, 119 bp, homo sapiens
acttactttgttacttgtatcatgaattttaaaaccctaccactttaagaagacagggatgggttattctttttggcaggtaggctatataactatgtgattttgaaatttaactgctc

SEQ ID NO: 8904 - DNA, 119 bp, homo sapiens
gatgggttattcttttttggcaggtaggctatataactatgtgattttgaaatttaactgctctggattgggagcagtgaatcaaggcagacttatgaaatctgtattatatttgtaac

SEQ ID NO: 8905 - DNA, 119 bp, homo sapiens
ctgctctggattagggagcagtgaatcaaggcagacttatgaaatctgtattatatttgtaacagaataaggaaatttaacataattgatgagctcaaatcctgaaaaatgaaagaatc

SEQ ID NO: 8906 - DNA, 119 bp, homo sapiens
tgtaacagaatataggaaatttaacataattgatgagctcaaatcctgaaaaatgaaagaatccaaatttttcagaattatctaggttaaatattgatgtattatgatggttgcaaagt

SEQ ID NO: 8907 - DNA, 119 bp, homo sapiens
agaatccaaattatttcagaattatctaggttaaatattgatgtattatgatggttgcaaagttttttttgtgtccaataaacacattgtaaaaaaaagaatttgaattgatatctaaa

SEQ ID NO: 8908 - DNA, 119 bp, homo sapiens
caaagtttttttgtgtgtccaataaacacattgtaaaaaaaagaatttgaattgatatctaaaaacagatttgaattgatatttcatcttgacttttaaagccctagaggctaattgtt

SEQ ID NO: 8909 - DNA, 119 bp, homo sapiens
aggtttaaagcatggccacatttctttatattaaaattctagtttgtacatttcttttagaaacaattaatgttactttggaatcatttcttccatgcttcctccataaagactgataa

SEQ ID NO: 8910 - DNA, 119 bp, homo sapiens
gccacatttctttatattaaaattctagtttgtacatttcttttagaaacaattacatgttactttggatcatttcttccatgcttcctccataaagactgataagtcttggatgcaat

SEQ ID NO: 8911 - DNA, 119 bp, homo sapiens
ctaatatggacctctgatgcaacttccattaagtcaccatctacattccaagggaaacaattttctgaacagtttcatcctcctcctcctctggattatatccaccagtattattcctt

SEQ ID NO: 8912 - DNA, 119 bp, homo sapiens
gaaacaattttctgaagcagtttcatcctcctcctcctctggattatatccaccagtattattccttggtgaacttttacttcctcaacagtgtaagtctcaacaaatggaaaattgaa

SEQ ID NO: 8913 - DNA, 119 bp, homo sapiens
ttaagttttgccagtgccttaacaacagcaaaatctctccgttggttaggggacatccatcgatattttctgccagagccaaagttcttccaccaaagccaaacatggctgagaaccca

SEQ ID NO: 8914 - DNA, 119 bp, homo sapiens
atcgatatttttctgccagagccaaagttcttccaccaaagccaaacatggctgagaacccaaagcgaaaagcttgccagcggtgctgaaggtgcagacgtcgaccagctgtacatgcc

SEQ ID NO: 8915 - DNA, 119 bp, homo sapiens
ctgctggtattaagccaagtggaagctgtgctctgacaggagtcaggattcggtctgtttccatcccagattcttctgagctctcagaagcaaagcatgggctacttcgctagcagatc

SEQ ID NO: 8916 - DNA, 119 bp, homo sapiens
agctgtgctctgacaggagtcaggattcggtctgtttccatcccagcattcttctgagctctcagaagcaagcatgggctacttcgctagcagatccatctccaccaacacagacaaca

SEQ ID NO: 8917 - DNA, 119 bp, homo sapiens
ttgttacatcagtttttattcctgcaagcttcaacagaggttcaaccttctcataataaacctgggtagttcttttttgtgactttgggggttaaggagtatttttaatgacttcggtc

SEQ ID NO: 8918 - DNA, 119 bp, homo sapiens
tttttattcctgcaagcttcaacagaggttcaaccttctcataataaacctgggtagcttcttttttgtactttgggggttaaggagtatttttaatgacttcggtctgtttggaaagc

SEQ ID NO: 8919 - DNA, 119 bp, homo sapiens
ctgccaatattttcttgaactgtctaaaccatatgtcacagtggtcttcacttaaattaataagatcaatgtagaattctttagtttattttgttcctttttcaagcagatgaagagtg

SEQ ID NO: 8920 - DNA, 119 bp, homo sapiens
tggtcttcacttaaattaataagatcaagtgtagaattctttagtttattttgttcctttttcaagcagtgaagagtgtgatacctaataaagtaccacttctctgctgtttaacagaa

SEQ ID NO: 8921 - DNA, 119 bp, homo sapiens
tagtttattttgttcctttttcaagcagatgaagagtgtgatacctaataaagtaccacttctctgctgttaacagaacaacgccgtttcagtttcacagagaatatgtctttgagttc

SEQ ID NO: 8922 - DNA, 119 bp, homo sapiens
tacctaataaagtaccacttctctgctgtttaacagaacaacgccgtttcagtttcacagagaatatgttttgagttcaataaattcttctttacatagcaagtcatacttagaatcac

SEQ ID NO: 8923 - DNA, 119 bp, homo sapiens
ccgccgggcgctcgggctgaatgggccgccaccgcagtgctcgctcgctcagcaccacgtcacaactgtcctcccgatctcgaagatgccccggagcagaatccgctcggccgccgcct

SEQ ID NO: 8924 - DNA, 119 bp, homo sapiens
ccacgtcacaactgtccctcccgatctcgaagatgccccggagcagaatccgctcggccgccgcctccgctgctgcggggacgttaacagcgccggaggcacagcggcagcctccgggg

SEQ ID NO: 8925 - DNA, 119 bp, homo sapiens
cggccgccgcctccgtctgctgcggggacgttaacagcgccggaggcacagcggcagcctccgggggcgctcttcctcccggccgccctccagggcactcacccggttcctgcgcctcc

SEQ ID NO: 8926 - DNA, 119 bp, homo sapiens
cagcctccgggggcgcctcttcctcccggccgccctccagggcactcacccggttcctgcgcctcctccgggcatggcggagtcgcaggctgggcccgagccaggggtccggggaggcc

SEQ ID NO: 8927 - DNA, 119 bp, homo sapiens
tcctgcgcctcctccagggcatggcggagtcgcaggctgggcccgagccaggggtccggggaggcctttgagaaggaggtggagggcgcggcagccccagctctagccgcgtccagcgc

SEQ ID NO: 8928 - DNA, 119 bp, homo sapiens
cagagaattccagaacttctttattgtacataaaaatctgaatttcttaatatggaaaccaaaggtctgaaaatgtactctcctagctcaggatcattatttattcctcttatttttgg

SEQ ID NO: 8929 - DNA, 119 bp, homo sapiens
atttcttaatatggaaaccaaaggtctgcaaaatgtactctcctagctcaggatcattatttattcctctatttttggaatctattcttcttttattcaaggaccaactcaaaggtcag

SEQ ID NO: 8930 - DNA, 119 bp, homo sapiens
cctagctcaggatcattatttattcctcttatttttggaatctattcttcttttattcaaggaccaactaaaggtcagcttttagttaactcttatatccccatacacatatcctaaag

SEQ ID NO: 8931 - DNA, 119 bp, homo sapiens
ctattcttcttttattcaaggaccaactcaaaggtcagcttttagttaactcttatatccccatacacaatcctaaaggcagagttaactgctatatccaagctacttcttggcatatc

SEQ ID NO: 8932 - DNA, 119 bp, homo sapiens
tcctattagtgggctcacactgttagttgctaatctcaaaagatagagttctttaggggcaggaacctgacctcaccttgtgctcctcagagtacatggcccaatatcccaaggccctt

SEQ ID NO: 8933 - DNA, 119 bp, homo sapiens
gggcaggaacctgcacctcaccttgtgctcctcagagtacatggcccaatatcccaaggcccttaacactttgtcattatttcagatttatactatgtggtgtgttaattactgcaccc

SEQ ID NO: 8934 - DNA, 119 bp, homo sapiens
aggcccttaacacatttgtcattatttcagatttatactatgtggtgtgttaattactgcaccccatgaacttgctgtccagcagctcactctgttcttagggttcatgttatgcaaca

SEQ ID NO: 8935 - DNA, 119 bp, homo sapiens
ctgcaccccatgaaacttgctgtccagcagctcactctgttcttagggttcatgttatgcaacataaagacacagcatcacagatgaagtcatatttttttaaaaaatctaatcaaacc

SEQ ID NO: 8936 - DNA, 119 bp, homo sapiens
atgcaacataaagtacacagcatcacagatgaagtcatatttttttaaaaaatctaatcaaaccaccagcctaacctccagtctataggaaattcaggagattgaggaacaaattaagt

SEQ ID NO: 8937 - DNA, 119 bp, homo sapiens
ctctttgtacctggccaagggctctgatcagcaaggtgcccctgtgttatctacccagtgcagtgcttcccaggatggcaataaaagtattttaagtcagtgagtaatgagaaaccatg

SEQ ID NO: 8938 - DNA, 119 bp, homo sapiens
cagtgcttcaccaggatggcaataaaagtattttaagtcagtgagtaatgagaaaccatgatgccctacaattggactggatcagcttgcatgtcaatctagtccactgtaagctggag

SEQ ID NO: 8939 - DNA, 119 bp, homo sapiens
atgccctaccaattggactggatcagcttgcatgtcaatctagtccactgtaagctggagaaagttacagaattctcatcgacggcctcagcaatgtgcctcaagtgtcactgtgagat

SEQ ID NO: 8940 - DNA, 119 bp, homo sapiens
aaagttacatgaattctcatcgacggcctcagcaatgtgcctcaagtgtcactgtgagatcattccctgttcctggagacatgcattagcagtgaacttcttccaaacttccctgtcat

SEQ ID NO: 8941 - DNA, 119 bp, homo sapiens
cattccctgcttcctggagacatgcattagcagtgaacttcttccaaacttccctgtcatcacagtcaacaatttttgagacacaccagaaacaccagggaaaacagagtcctctgtac

SEQ ID NO: 8942 - DNA, 119 bp, homo sapiens
cacagtcaaacaatttttgagacacaccagaaacaccagggaaaacagagtcctctgtacaagtccttatcagggaatactcaatgtttttccctgatgaaggacttgtacagggccac

SEQ ID NO: 8943 - DNA, 119 bp, homo sapiens
aagtccttaatcagggaatactcaatgtttttccctgatgaaggacttgtacagggccactagctgctcggtttatatgcctcctgggtcattacgagatctgaagtctaagttgtact

SEQ ID NO: 8944 - DNA, 119 bp, homo sapiens
tagctgctcaggtttatatgcctcctgggtcattacgagatctgaagtctaagttgtacttcccagaccggaagaatacaaaggcaactatgcccatggcagttacatattatcaatgt

SEQ ID NO: 8945 - DNA, 119 bp, homo sapiens
tcccagacctggaagaatacaaaggcaactatgcccatggcagttacatattatcaatgtagccagcttcccaagtgcattccacagcagctctagccttctttattctctaggatata

SEQ ID NO: 8946 - DNA, 119 bp, homo sapiens
atcccccacattggcagcagctttctcacatttctctttgatgacacggctcaagtgtgctaagccttgctctaacgagcatggcttccctgaagtttgctgacggggaagattatgaa

SEQ ID NO: 8947 - DNA, 119 bp, homo sapiens
gctaagccttggctctaacgagcatggcttccctgaagtttgctgacggggaagattatgaactcctatctgccagcttattgccagattgagaaccattgctggtcacagtgaaagct

SEQ ID NO: 8948 - DNA, 119 bp, homo sapiens
tgaactcctatactgccagcttattgccagattgagaaccattgctggtcacagtgaaagctggaactacaggatgccttcagaattgccagcaaattcacaattctgtgacagcaggg

SEQ ID NO: 8949 - DNA, 119 bp, homo sapiens
agctggaactagcaggatgccttcagaattgccagcaaattcacaattctgtgacagcagggagaatccttttcggcagctccagccttacaaacagcaaaagagattcccagtataat

SEQ ID NO: 8950 - DNA, 119 bp, homo sapiens
agggagaatcccttttcggcagctccagccttacaaacagcaaaagagattcccagtataatgttcactcaaatttagacctattgtcagggtcaactgtctctatcatcaatttgtca

SEQ ID NO: 8951 - DNA, 119 bp, homo sapiens
taatgttcactccaaatttagacctattgtcagggtcaactgtctctatcatcaatttgtcaatcctctctgttctataacattcaggtgcttgctaatcagggcaggctcaatagttt

SEQ ID NO: 8952 - DNA, 119 bp, homo sapiens
gtcaatcctcttctgttctataacattcaggtgcttgctaatcagggcaggctcaatagttttattgattgctcaacagcctttgaaacattttttcccatagctagtcttctcctcaa

SEQ ID NO: 8953 - DNA, 119 bp, homo sapiens
gttttattgatgtgctcaacagcctttgaaacattttttcccatagctagtcttctcctcaacttgagcttagggtctcatatacaacagctgaggtaccattggatatagttctgaag

SEQ ID NO: 8954 - DNA, 119 bp, homo sapiens
tcaacttgagctttagggtctcatatacaacagctgaggtaccattggatatagttctgaagagatcttcccagtgcaggacccatctcaagagggggatttcctggaaaaccagaaac

SEQ ID NO: 8955 - DNA, 119 bp, homo sapiens
gaagagatctttcccagtgcaggacccatctcaagagggggatttcctggaaaaccagaaacctctctgcaaagagctggagaacagagatggtgaatttctactcctatttcttgtca

SEQ ID NO: 8956 - DNA, 119 bp, homo sapiens
aaacctctctgacaaagagctggagaacagagatggtgaatttctactcctatttcttgtcactcagaaaaagggacagaggaaagggtactgcagatgtcaactgggagcccacaagc

SEQ ID NO: 8957 - DNA, 119 bp, homo sapiens
gtcactcagaaaaaagggacagaggaaagggtactgcagatgtcaactgggagcccacaagctcacaggctctcctttattcccctgagccttgccctgctcagcctcttttgctacat

SEQ ID NO: 8958 - DNA, 119 bp, homo sapiens
agtacagattataatgagaagcaactttttagttacttctaggtaaaaaatttaggttatataatttttaaacaaaacatacattccctttttattggtcataatgtagagcatctttc

SEQ ID NO: 8959 - DNA, 119 bp, homo sapiens
cagattataatgagaagcaactttttagttacttctaggtaaaaaatttaggttatataatttttcaaaaaaacatacattccctttttattggtcataatgtagagcatctttcaagc

SEQ ID NO: 8960 - DNA, 119 bp, homo sapiens
catgatactcaatcactaagccagtttcagaaaagacaaacttcatatttcaatttattcagtaaggggggtcaaaaatgaaggcttttttcccttctaccatattcgctaaatttatg

SEQ ID NO: 8961 - DNA, 119 bp, homo sapiens
tttattcagtaaggggaggtcaaaaatgaaggcttttttcccttctaccatattcgctaaatttatgttaaacctgatatatattttataacactatttaagttatggctttttctaaa

SEQ ID NO: 8962 - DNA, 119 bp, homo sapiens
tcgctaaatttatgtttaaacctgatatatattttataacactatttaagttatggctttttctaaaccgtgctttttaaggtaatagttataaatacaactgttttgagaaaatagga

SEQ ID NO: 8963 - DNA, 119 bp, homo sapiens
tggctttttctaaaccagtgctttttaaggtaatagttataaatacaactgttttgagaaaataggaaaaaacactttcacttgctggtttctagttcattattccctttgtcattaag

SEQ ID NO: 8964 - DNA, 119 bp, homo sapiens
ttgagaaaataggaaataaacactttcacttgctggtttctagttcattattccctttgtcattaagatataatgctagacaaattaatgtttagacataaacagcaaacacaatttta

SEQ ID NO: 8965 - DNA, 119 bp, homo sapiens
cctttgtcattaagatgataatgctagacaaattaatgtttagacataaacagcaaacacaattttaactttttcataatattgagagatgtttcagtattatataatcaaaaaatcta

SEQ ID NO: 8966 - DNA, 119 bp, homo sapiens
caaacacaattttaacatttttcataatattgagagatgtttcagtattatataatcaaaaaatctattcaaatacacatgtatacatcttataaaaatacatttaaaaacaaaaatgg

SEQ ID NO: 8967 - DNA, 119 bp, homo sapiens
aatcaaaaaatctattacaaatacacatgtatacatcttataaaaatacatttaaaaacaaaaatgggaaaatactgggtcattattcctccaaaggtgagctggtattatgaagaggc

SEQ ID NO: 8968 - DNA, 119 bp, homo sapiens
aaaaacaaaaatgggacaaatactgggtcattattcctccaaaggtgagctggtattatgaagaggcttgatttctttctctttatcaggatattcttccacctctgaggagaacatta

SEQ ID NO: 8969 - DNA, 119 bp, homo sapiens
ctgtcaaaagctgaaattgtactcagagccaaaagcaagtacagaagactctggaatggatacgctaggtcttgtattgttgcagaaggtttgagaggttggatagctgatctcctgct

SEQ ID NO: 8970 - DNA, 119 bp, homo sapiens
aagtacagaagactctggaatggatacgctagggtcttgtattgttgcagaaggtttgagaggttggatgctgatctcctgctagaacatatatcacaacaatattccacacagcacag

SEQ ID NO: 8971 - DNA, 119 bp, homo sapiens
ttgtattgttgcagaaggtttgagaggttggatagctgatctcctgctagaacatatatcacaacaatatccacacagcacagccagccaagaatccatgagaaaagagaccaatcatc

SEQ ID NO: 8972 - DNA, 119 bp, homo sapiens
ctgaaagcccggtgcactgtaagtgccacatctctggtggtccaggaaggcttcacgtccattgacacactatgttttctgtggtctttatcaactctgaacgatcagcagcctggaat

SEQ ID NO: 8973 - DNA, 119 bp, homo sapiens
aagcccggtgcactgtaagtgccacatctctggtggtccaggaaggcttcacgtccattgacacatctagttttctgtggtctttatcaactctgaacgatcagcagcctggaatctcc

SEQ ID NO: 8974 - DNA, 119 bp, homo sapiens
ggcttttttccacaaatactttgcctacaggctggctaatgccagtgggtgcagtgaatacagactgctttccacagtagtttgctcatcagtgattatgtcttcatcttctactccta

SEQ ID NO: 8975 - DNA, 119 bp, homo sapiens
atgccagtgggtgcagtgaatacagactgctgttccacagtagtttgctcatcagtgattatgtcttcacttctactcctagctcattggcatactgtaattctgctggctgggttttc

SEQ ID NO: 8976 - DNA, 119 bp, homo sapiens
caagaggtagccttgtctttttctgtcttctttgaacaggagcctctgggtgctctttgagttctttagtgatggctcattgccctcagagggccttcgaccagcagtctgagcaaggc

SEQ ID NO: 8977 - DNA, 119 bp, homo sapiens
ttttctgtcttctttgaacaggagcctctgggtgctctttgagttctttagttgatggctcattgccctagagggccttcgaccagcagtctgagcaaggccttccaaagaagcacttg

SEQ ID NO: 8978 - DNA, 119 bp, homo sapiens
caggtggccctcctccagccgagcccccgagtcagtcctcatggtgctctccccgcggggctgccccgggcaaccgccggcggcccgagcccagctccccgcgacgcagcggcctccgg

SEQ ID NO: 8979 - DNA, 119 bp, homo sapiens
cccccgagtcagtcctcatggtgctctccccgcggggctgccccggcgcaaccgccggcggcccgagccagctccccgcgacgcagcggcctccgggacctgtgggacgccggggcttc

SEQ ID NO: 8980 - DNA, 119 bp, homo sapiens
gggcttgtacatatgtaaaactaggcccctgagatttttaggtaacgacatgcctccagtttgttgaaatgtcatgctatctttatcagtttccaaaggaacgtttaaagttagttccg

SEQ ID NO: 8981 - DNA, 119 bp, homo sapiens
agtttgttgaaactgtcatgctatctttatcagtttccaaaggaacgtttaaagttagttccgaagtagcttcctgatcatgtgtgcaagacttcatgaccaagctcccagatgatcca

SEQ ID NO: 8982 - DNA, 119 bp, homo sapiens
gttccgaagtagtcttcctgatcatgtgtgcaagacttcatgaccaagctcccagatgatccaggttaggagctgcacatccagaaaggcagagcagccattcctccctcccagtaatt

SEQ ID NO: 8983 - DNA, 119 bp, homo sapiens
gatccaggttagtgagctgcacatccagaaaggcagagcagccattcctccctcccagtaatttccgcctttttccattgttacttccttttcctcagaggataatggtctttctatag

SEQ ID NO: 8984 - DNA, 119 bp, homo sapiens
gtaatttccgccctttttccattgttacttccttttcctcagaggataatggtctttctatagaaaaccaatccttaacctagaaactgtgatttgaaataagtgaaagaaacaatgaa

SEQ ID NO: 8985 - DNA, 119 bp, homo sapiens
ctatagaaaacctaatccttaacctagaaactgtgatttgaaataagtgaaagaaacaatgaacagtcccccagaaactttctatctcctgcaaaaaagttttggatcacgtttcttat

SEQ ID NO: 8986 - DNA, 119 bp, homo sapiens
aatgaacagtcctcccagaaactttctatctcctgcaaaaaagttttggatcacgtttcttatagattttaaagtgtttattaaataacagtagtttaccaatagttttttttggcatg

SEQ ID NO: 8987 - DNA, 119 bp, homo sapiens
tcttatagatttataaagtgtttattaaataacagtagtttaccaatagttttttttggcatgtgtagggaagtcatatttagttttcaaatgccaaatttattataaacagtaagtat

SEQ ID NO: 8988 - DNA, 119 bp, homo sapiens
ggcatgtgtaggggaagtcatatttagttttcaaatgccaaatttattataaacagtaagtataatatgaactcatctgacttaaatggaaccttagatctcaggttttactcattcac

SEQ ID NO: 8989 - DNA, 119 bp, homo sapiens
aagtataatatgaaactcatctgacttaaatggaaccttagatctcaggttttactcattcacttatgtaccttgggcagcttcacttaacaagcgagagggtgaactgtgtaagtgat

SEQ ID NO: 8990 - DNA, 119 bp, homo sapiens
attcacttatgtcaccttgggcagcttcacttaacaagcgagagggtgaactgtgtaagtgatgtagtgctttaggaaaaaacataccatgtaagtcttcaatactactttattttcaa

SEQ ID NO: 8991 - DNA, 119 bp, homo sapiens
agtgatgtagtgcctttaggaaaaaacataccatgtaagtcttcaatactactttattttcaaaggttagtgaatcttgttaatttattatagaaataagaattcttgctgtctttatg

SEQ ID NO: 8992 - DNA, 119 bp, homo sapiens
tttcaaaggttaggtgaatcttgttaatttattatagaaataagaattcttgctgtctttatgtgttacatagtcttgggttgggaaaatctgttggtctgatttctacttaagaatga

SEQ ID NO: 8993 - DNA, 119 bp, homo sapiens
tttatgtgttacaatagtcttgggttgggaaaatctgttggtctgatttctacttaagaatgaatgtctagattttcaaacagcaaaagttcacaataattaagtttctgtgttcttga

SEQ ID NO: 8994 - DNA, 119 bp, homo sapiens
gaatgaatgtctaagattttcaaacagcaaaagttcacaataattaagtttctgtgttcttgatattctctgctattatcagtcttagaccactccagagttcttctttattttctttt

SEQ ID NO: 8995 - DNA, 119 bp, homo sapiens
tcttgatattcttctgctattatcagtcttagaccactccagagttcttctttattttcttttccttttgtcaaatagtagaaaaatgtgacttgctgctgagccctgctcttcacacc

SEQ ID NO: 8996 - DNA, 119 bp, homo sapiens
tcttttccttttggtcaaatagtagaaaaatgtgacttgctgctgagccctgctcttcacacctgcttgctttactcagctagtatttatttcaagagatgattcctgcctaggtcatc

SEQ ID NO: 8997 - DNA, 119 bp, homo sapiens
cacacctgcttgcctttactcagctagtatttatttcaagagatgattcctgcctaggtcatcaccagtgggaaggttaatctttcatttttcccacagaaacctgaataagggaaatt

SEQ ID NO: 8998 - DNA, 119 bp, homo sapiens
gtcatcaccagtggggaaggttaatctttcatttttcccacagaaacctgaataagggaaatttcagaaagaacagccacaaatctgtttgaaacctgatagggtgacttttttggttt

SEQ ID NO: 8999 - DNA, 119 bp, homo sapiens
gaaatttcagaaaagaacagccacaaatctgtttgaaacctgatagggtgacttttttggtttttgtttgttttaaggacagtttctcttttttttattgaaatgaaaatcatgcaaat

SEQ ID NO: 9000 - DNA, 119 bp, homo sapiens
tggtttttgttttgttttaaggacagtttctcttttttttattgaaatgaaaatcatgcaaatgatcatttaaactggacataagggaaagggctcattttagcatagataaaataaaa

SEQ ID NO: 9001 - DNA, 119 bp, homo sapiens
actgattttgtgtttatagaaaaaactatttgaagttggaaacaggaatttgagtttgaaaatgctttgtgcctaattatcttttgctttatctactgtagatttttttccctactcac

SEQ ID NO: 9002 - DNA, 119 bp, homo sapiens
aaatgctttgttgcctaattatcttttgctttatctactgtagatttttttccctactcactcaagttaatctaagtaaagctttatatctataaagacttaaatatatttttgtattt

SEQ ID NO: 9003 - DNA, 119 bp, homo sapiens
actcaagttatatctaagtaaagctttatatctataaagacttaaatatatttttgtatttatgaattaagccatcatgatgttttatatgatcaaatgaatcatacataggaggggaa

SEQ ID NO: 9004 - DNA, 119 bp, homo sapiens
ttatgaattagagccatcatgatgttttatatgatcaaatgaatcatacataggaggggaatgtttttattaggttgctagaagtcatttagatgaatcaccgtttgattattatggag

SEQ ID NO: 9005 - DNA, 119 bp, homo sapiens
aatgtttttacttaggttgctagaagtcatttagatgaatcaccgtttgattattatggaggacagtttaaaataaaattttgcgtctccttgcaatgcaaaataccaccccacaggtt

SEQ ID NO: 9006 - DNA, 119 bp, homo sapiens
aggacagttttaaaataaaattttgcgtctccttgcaatgcaaaataccaccccacaggttccatttggctggagcttatctgatcaccttctgccacaaataagtgaacatatatgta

SEQ ID NO: 9007 - DNA, 119 bp, homo sapiens
ttccatttgggctggagcttatctgatcaccttctgccacaaataagtgaacatatatgtatgtgttcggtgtcatgttcaaatgcttttaggtttatgtataaatctgtactttgttg

SEQ ID NO: 9008 - DNA, 119 bp, homo sapiens
tatgtgttcgggtgtcatgttcaaatgcttttaggtttatgtataaatctgtactttgttgtttttctcttaatttttgttcttagttgttaaaaattaaggaggtaatacttactcaa

SEQ ID NO: 9009 - DNA, 119 bp, homo sapiens
tgtttttctcgttaatttttgttcttagttgttaaaaattaaggaggtaatacttactcaagtttcatatataaagaaccaaatgaatgatctttgttgtcttgaaaaaaatcccagct

SEQ ID NO: 9010 - DNA, 119 bp, homo sapiens
aagtttcatagtataaagaaccaaatgaatgatctttgttgtcttgaaaaaaatcccagctcttaaaggtattcactaagtatagtgaagtcgtcattccacccagggagctaggtttg

SEQ ID NO: 9011 - DNA, 119 bp, homo sapiens
ctcttaaaggatattcactaagtatagtgaagtcgtcattccacccagggagctaggtttgaaactaaatgttgcttcaatttgcagatgaaaatgagagattaatggttgattttctt

SEQ ID NO: 9012 - DNA, 119 bp, homo sapiens
tgaaactaaactgttgcttcaatttgcagatgaaaatgagagattaatggttgattttcttagagttcattgtgttaaacttcactgtccattttgccttcattactagtatcatacca

SEQ ID NO: 9013 - DNA, 119 bp, homo sapiens
ttagagttcagttgtgttaaacttcactgtccattttgccttcattactagtatcataccacattcttaaaattcaccagcaacatttctgtataagtgtctgtcaagttgagttacat

SEQ ID NO: 9014 - DNA, 119 bp, homo sapiens
cacattcttataaattcaccagcaacatttctgtataagtgtctgtcaagttgagttacattgatttcacaggtaacaaactttgtaatgtagagtgttatgtttccagaatgtgtatt

SEQ ID NO: 9015 - DNA, 119 bp, homo sapiens
attgatttcagcaggtaacaaactttgtaatgtagagtgttatgtttccagaatgtgtattgttagctcgccattcttatgtaggcataggcatgattaccgtgatgtagagagctata

SEQ ID NO: 9016 - DNA, 119 bp, homo sapiens
ttgttagctcagccattcttatgtaggcataggcatgattaccgtgatgtagagagctataattagcatgaaaaaagaaaacatgagatacagtaaagaaaaagtagctgcataactgg

SEQ ID NO: 9017 - DNA, 119 bp, homo sapiens
taattagcattgaaaaaagaaaacatgagatacagtaaagaaaaagtagctgcataactggctgggtgttttaatacattaaaaaatggataagtcttattctgtcagtcctgtttcag

SEQ ID NO: 9018 - DNA, 119 bp, homo sapiens
ggctgggtgtatttaatacattaaaaaatggataagtcttattctgtcagtcctgtttcagagatctgaaattgtcaatgctttgtccattgatgtggatatccaggtcagtcctgttt

SEQ ID NO: 9019 - DNA, 119 bp, homo sapiens
agagatctgaaaattgtcaatgctttgtccattgatgtggatatccaggtcagtcctgtttgggcttttgaaaccagaggagttggaaattcagggacagtcttgtcaaaattctccat

SEQ ID NO: 9020 - DNA, 119 bp, homo sapiens
ttgggcttttagaaaccagaggagttggaaattcagggacagtcttgtcaaaattctccatcttgatttatattcacctttggaacctcgggtcaacagagatgcaaaacagtgatgta

SEQ ID NO: 9021 - DNA, 119 bp, homo sapiens
atcttgatttgatattcacctttggaacctcgggtcaacagagatgcaaaacagtgatgtaacatgattcagacggtaggtaggatgtcctcctttggcatatttctccagtgccctcc

SEQ ID NO: 9022 - DNA, 119 bp, homo sapiens
taacatgatttcagacggtaggtaggatgtcctcctttggcatatttctccagtgccctcctgcattgcgaaaggaatacaactaattcaaagtgagaaggattttcatgctggagcag

SEQ ID NO: 9023 - DNA, 119 bp, homo sapiens
cctgcattgctgaaaggaatacaactaattcaaagtgagaaggattttcatgctggagcagagtagccaaggacttgatggtgtaatggagtgatagtacgttagtggaaagatgaaga

SEQ ID NO: 9024 - DNA, 119 bp, homo sapiens
agagtagccagaggacttgatggtgtaatggagtgatagtacgttagtggaaagatgaagaatggacatcgtcagaactgatgccatcaaggtggaaatccacactggtctggtagagt

SEQ ID NO: 9025 - DNA, 119 bp, homo sapiens
gaatggacattcgtcagaactgatgccatcaaggtggaaatccacactggtctggtagagtttgccatttctctttcctgatagagtacagctgagacccggacactggttagagggct

SEQ ID NO: 9026 - DNA, 119 bp, homo sapiens
gtttgccattttctctttcctgatagagtacagctgagacccggacactggttagagggctaggtcggggttggccacttggaagataagattaggtttgccatccatgtgagctacta

SEQ ID NO: 9027 - DNA, 119 bp, homo sapiens
ctaggtcgggtgttggccacttggaagataagattaggtttgccatccatgtgagctactactgctgtgcagtaaagcgaattgaaaaagctcgattttttggccgggcaatcttcgcc

SEQ ID NO: 9028 - DNA, 119 bp, homo sapiens
ctgtgataaaagcctctagcatgaggcctaggagcatttgtatggcaagtaaggcgattgcacttggacgtcaccactggggaacatggtaccataaccaattgtgagttgtgtctcca

SEQ ID NO: 9029 - DNA, 119 bp, homo sapiens
gcacttggacagtcaccactggggaacatggtaccataaccaattgtgagttgtgtctccagggagaagagaatgcagctgtgaaactggtgatatacttgacacagatagtgtggttt

SEQ ID NO: 9030 - DNA, 119 bp, homo sapiens
cagggagaaggagaatgcagctgtgaaactggtgatatacttgacacagatagtgtggttttcaggtgggcatcatgatctagttccagatcaccattcatctcagccagaacatacca

SEQ ID NO: 9031 - DNA, 119 bp, homo sapiens
tttcaggtggggcatcatgatctagttccagatcaccattcatctcagccagaacataccagagcactgaaagacaagccagtggacaacaaaagaagcagaaaagaccaacatcatcc

SEQ ID NO: 9032 - DNA, 119 bp, homo sapiens
cagagcactgcaaagacaagccagtggacaacaaaagaagcagaaaagaccaacatcatccaacgccaggcatgtccattaggattccccaagcatctcgaagatatgcaagacctctt

SEQ ID NO: 9033 - DNA, 119 bp, homo sapiens
ccaacgccagcgcatgtccattaggattccccaagcatctcgaagatatgcaagacctctttgagcgcctccatttgaagtgtgctgtggccatccttggtgaccatcctccggtatct

SEQ ID NO: 9034 - DNA, 119 bp, homo sapiens
tttgagcgccatccatttgaagtgtgctgtggccatccttggtgaccatcctccggtatctttgacttagagaggagcaataactttgcaattactgctgtccatctcaggctgtattt

SEQ ID NO: 9035 - DNA, 119 bp, homo sapiens
gtcagctgggtgactcatacatctgtgagaccctccgtatggagaccggggcggggggtgttgcttaatcttagaactgctgaaactaccagttcactgtctcagcactaatccaactc

SEQ ID NO: 9036 - DNA, 119 bp, homo sapiens
ttgcttaatgcttagaactgctgaaactaccagttcactgtctcagcactaatccaactctgctccttagtgggatttggcttttagacattgagacctggatgctgggcatcctcgct

SEQ ID NO: 9037 - DNA, 119 bp, homo sapiens
tgctccttaagtgggatttggcttttagacattgagacctggatgctgggcatcctcgctagatcccctcaaattccccacatacgtaggccaggagcctcagcggtgccccttcaggc

SEQ ID NO: 9038 - DNA, 119 bp, homo sapiens
agatcccctacaaattccccacatacgtaggccaggagcctcagcggtgccccttcaggctcatctggcagacggtaccagcttgctcagaacaggggctggctattcatcatctcaga

SEQ ID NO: 9039 - DNA, 119 bp, homo sapiens
tcatctggcaagacggtaccagcttgctcagaacaggggctggctattcatcatctcagagcatagagacctctccttgccacccggcccttcccacctggttggtgacaaatcacaag

SEQ ID NO: 9040 - DNA, 119 bp, homo sapiens
tgtatgtcactctgacctgcgccttccgctatggccaagaggacattgacgtgatcggcttgaccttcccagggacctgtacttctcccgggtccaggtgtatcctcctgtgggggccg

SEQ ID NO: 9041 - DNA, 119 bp, homo sapiens
agaggacattgacgtgatcggcttgaccttccgcagggacctgtacttctcccgggtccaggtgtatcccctgtgggggccgcgagcacccccacaaaactgcaagagagcctgcttaa

SEQ ID NO: 9042 - DNA, 119 bp, homo sapiens
gacctgtacttctcccgggtccaggtgtatcctcctgtgggggccgcgagcacccccacaaaactgcaaagagcctgcttaaaaagctggggagcaacacgtacccctttctcctgacg

SEQ ID NO: 9043 - DNA, 119 bp, homo sapiens
gagctccgtgcgattactgatccgcaaagtacagcatgccccacttgagatgggtccccagccccgagcgaggcggcctggcagttcttcatgtctgacaagcccctgcaccttgcggt

SEQ ID NO: 9044 - DNA, 119 bp, homo sapiens
ctgatccgcaaagtacagcatgccccacttgagatgggtccccagccccgagctgaggcggcctggcagtcttcatgtctgacaagcccctgcaccttgcggtctctctcaacaaagag

SEQ ID NO: 9045 - DNA, 119 bp, homo sapiens
agaaaaagtgccaccaaacagcactttgaccaagacgctgacgctgctgcccttgctggctaacaatcggaaaggagaggcattgccctggatgggaaaatcaagcacgaggacacaaa

SEQ ID NO: 9046 - DNA, 119 bp, homo sapiens
cagcactttgaccaagacgctgacgctgctgcccttgctggctaacaatcgagaaaggagaggcattgcctggatgggaaaatcaagcacgaggacacaaaccttgcctccagcaccat

SEQ ID NO: 9047 - DNA, 119 bp, homo sapiens
ttatcaggatgcaaatttagtttttgaggagtttgctcgccataatctgaaagatgcaggagaagctgagaggggaagagagacaagaatgacgttgatgagtgaagatgtcggctcag

SEQ ID NO: 9048 - DNA, 119 bp, homo sapiens
aatctgaaagatgcaggagaagctgaggaggggaagagagacaagaatgacgttgatgagtgaagatgtggctcaggatgccggaaaatgacctgtagttaccagtgcaacgagcaaag

SEQ ID NO: 9049 - DNA, 119 bp, homo sapiens
agaatgacgttgatgagtgaagatgtcggctcaggatgccggaaaatgacctgtagttaccagtgcaacagcaaagccccacagtttagtcctttggagttatgctgcgtatgaaagga

SEQ ID NO: 9050 - DNA, 119 bp, homo sapiens
aaatgacctgtagttaccagtgcaacgagcaaagccccacagtttagtcctttggagttatgctgcgtagaaaggatgagtcttcttccgagaaataaagcttgtttgttctcccctgg

SEQ ID NO: 9051 - DNA, 119 bp, homo sapiens
agttgattgcaggtcctcctggggccagaagggtgcctgggaggccaggttctggggatcccctccatcagaagaaccacctgctcactctgtcccttcgcctgctgctgggaccatgg

SEQ ID NO: 9052 - DNA, 119 bp, homo sapiens
ctggggatcccctccatccagaagaaccacctgctcactctgtcccttcgcctgctgctgggaccatggggctggggccagtgctgaggagaagcactccagggagctggaaaagaagc

SEQ ID NO: 9053 - DNA, 119 bp, homo sapiens
ctgctgctgggaccatgggggctggggccagtgctgaggagaagcactccagggagctggaaaagaagcgaaagaggacgctgagaaggatgctcgaaccgtgaagctgctgcttctgg

SEQ ID NO: 9054 - DNA, 119 bp, homo sapiens
gattatccaccaggacgggtactcgctggaagagtgcctcgagtttatcgccatcatctacggcaacacttgcagtccatcctggccatcgtacgcgccatgaccacactcaacatcca

SEQ ID NO: 9055 - DNA, 119 bp, homo sapiens
tcgctggaagagtgcctcgagtttatcgccatcatctacggcaacacgttgcagtccatcctggccatctacgcgccatgaccacactcaacatccagtacggagactctgcacgccag

SEQ ID NO: 9056 - DNA, 119 bp, homo sapiens
gacgacgcccggaagctgatgcacatggcagacactatcgaggagggcacgatgcccaaggagatgtcgacatcatccagcggctgtggaaggactccggtatccaggcctgttttgag

SEQ ID NO: 9057 - DNA, 119 bp, homo sapiens
cgaggagggcacgatgcccaaggagatgtcggacatcatccagcggctgtggaaggactccggtatccagcctgttttgagcgcgcctcggagtaccagctcaacgactcggcgggcta

SEQ ID NO: 9058 - DNA, 119 bp, homo sapiens
ctacctctccgacctggagcgcctggtaaccccgggctacgtgcccaccgagcaggacgtgctgcgctccgagtcaagaccactggcatcatcgagacgcagttctccttcaaggatct

SEQ ID NO: 9059 - DNA, 119 bp, homo sapiens
cgacctggagcgcctggtaaccccgggctacgtgcccaccgagcaggacgtgctgcgctcgcgagtcaaaccactggcatcatcgagacgcagttctccttcaaggatctcaacttccg

SEQ ID NO: 9060 - DNA, 119 bp, homo sapiens
gatgttcgatgtgggcgggcagcgctcggagcgcaagaagtggatccactgcttcgagggcgtgacctgatcatcttcatcgcggcgctgagcgcctacgacatggtgctagtggagga

SEQ ID NO: 9061 - DNA, 119 bp, homo sapiens
gtgggcgggcagcgctcggagcgcaagaagtggatccactgcttcgagggcgtgacctgcatcatcttctcgcggcgctgagcgcctacgacatggtgctagtggaggacgacgaagtg

SEQ ID NO: 9062 - DNA, 119 bp, homo sapiens
aaccgcatgcacgagagcctgcacctgttcaacagcatctgcaaccaccgctacttcgccacgacgtcctcgtgctcttccttaacaagaaggacgtcttcttcgagaagatcaagaag

SEQ ID NO: 9063 - DNA, 119 bp, homo sapiens
gcatctgcaaccaccgctacttcgccacgacgtccatcgtgctcttccttaacaagaaggacgtcttctcgagaagatcaagaaggcgcacctcagcatctgtttcccggactacgatg

SEQ ID NO: 9064 - DNA, 119 bp, homo sapiens
gacccaacacctacgaggacgccggcaactacatcaaggtgcagttcctcgagctcaacatgcggcgcgcgtgaaggagatctattcccacatgacgtgcgccaccgacacgcagaacg

SEQ ID NO: 9065 - DNA, 119 bp, homo sapiens
aggtgcagttcctcgagctcaacatgcggcgcgacgtgaaggagatctattcccacatgacgtgcgccacgacacgcagaacgtcaaatttgtcttcgacgctgtcaccgacatcatca

SEQ ID NO: 9066 - DNA, 119 bp, homo sapiens
tgaaggagatctattcccacatgacgtgcgccaccgacacgcagaacgtcaaatttgtcttcgacgctgcaccgacatcatcatcaaggagaacctcaaagactgtggcctcttctgag

SEQ ID NO: 9067 - DNA, 119 bp, homo sapiens
gtgcctgaattcatgcgtgtcagtcaccctgagacctggtagccctagctgccttgcagccccaaacccaggaccctatcagccccctgggactccctggccccaacctgccacctcac

SEQ ID NO: 9068 - DNA, 119 bp, homo sapiens
agccccaaaccccaggaccctatcagccccctgggactccctggccccaacctgccacctcaccaaagcctgagccctgctagccttgaggcgcggaccctcccccatacctcccacag

SEQ ID NO: 9069 - DNA, 119 bp, homo sapiens
cctcaccaaagctctgagccctgctagccttgaggcgcggaccctcccccatacctcccacagtatcccgcgcctcatgcccccaaccccaagccctgcccttcaccgcccggctgcac

SEQ ID NO: 9070 - DNA, 119 bp, homo sapiens
ccacagtatcccagcgcctcatgcccccaaccccaagccctgcccttcaccgcccggctgcactggccttaggactcacagcagccagccccagctaggaacgggcaggacttggggca

SEQ ID NO: 9071 - DNA, 119 bp, homo sapiens
ctgcactggcctctaggactcacagcagccagccccagctaggaacgggcaggacttggggcagctgaactcacggtgactcagcagtgcccaactgaccaatctcccgcagctctcct

SEQ ID NO: 9072 - DNA, 119 bp, homo sapiens
ggggcagctgaagctcacggtgactcagcagtgcccaactgaccaatctcccgcagctctcctgcccctggggcccacgactcacctggtgggcctgggctcagcaaacagccctccct

SEQ ID NO: 9073 - DNA, 119 bp, homo sapiens
tctcctgcccctgggggcccacgactcacctggtgggcctgggctcagcaaacagccctccctcccagttttcatcaaggacagggaatatccctcccacacacaggccagctgctcac

SEQ ID NO: 9074 - DNA, 119 bp, homo sapiens
ctccctcccagtatttcatcaaggacagggaatatccctcccacacacaggccagctgctcaccctgcccctccatgtgacaagtttgacacctgtctacccagagccagtgactgtcc

SEQ ID NO: 9075 - DNA, 119 bp, homo sapiens
gctcaccctgccacctccatgtgacaagtttgacacctgtctacccagagccagtgactgtccctcccacagcctccaaagggtccaaagtccaagctagctctggcctgtgtggcccc

SEQ ID NO: 9076 - DNA, 119 bp, homo sapiens
ctgtccctcccagcagcctccaaagggtccaaagtccaagctagctctggcctgtgtggcccccacataataaattagtggggagggggcagacctgggggcccttgggtgccagagtg

SEQ ID NO: 9077 - DNA, 119 bp, homo sapiens
ggcccccacataaataaattagtggggagggggcagacctgggggcccttgggtgccagagtgagacacgcaggacccttccccaaatactaggctcagagcaacctccagccttctcc

SEQ ID NO: 9078 - DNA, 119 bp, homo sapiens
agagtgagacacagcaggacccttccccaaatactaggctcagagcaacctccagccttctccagcaggtctgctccctgtgtccttggacagcagatccacacaccacttccccaccc

SEQ ID NO: 9079 - DNA, 119 bp, homo sapiens
ttctccagcaggatctgctccctgtgtccttggacagcagatccacacaccacttccccacccacacacgtaccctgggctggttggacaacaggatggtgtgttaaggggttaaggga

SEQ ID NO: 9080 - DNA, 119 bp, homo sapiens
ccacccacacacagtaccctgggctggttggacaacaggatggtgtgttaaggggttaagggagggtacgttgacaccagctatggccaatagctgggctgtcctgaggggtggctggg

SEQ ID NO: 9081 - DNA, 119 bp, homo sapiens
aagggagggtactgttgacaccagctatggccaatagctgggctgtcctgaggggtggctggggacagatccagctcccttggatcagcccagaggattcaggataggacaaaggccct

SEQ ID NO: 9082 - DNA, 119 bp, homo sapiens
gctggggacagagtccagctcccttggatcagcccagaggattcaggataggacaaaggccctggctgtcccaaaagggtctacctcaggtggggttacaagcaaacctgggtgaccct

SEQ ID NO: 9083 - DNA, 119 bp, homo sapiens
ggccctggctgtgcccaaaagggtctacctcaggtggggttacaagcaaacctgggtgaccctcttgtcctaccagcagcttctcttgccccttccattcagggttccctggcagggga

SEQ ID NO: 9084 - DNA, 119 bp, homo sapiens
gaccctcttgtccctaccagcagcttctcttgccccttccattcagggttccctggcaggggaagctgaagccatggctgaactatcagggacaaaggcccatgtccccacatccctgc

SEQ ID NO: 9085 - DNA, 119 bp, homo sapiens
aggggaagctgagagccatggctgaactatcagggacaaaggcccatgtccccacatccctgctccctcttcctcatccagcaccaaatctttgcttatgtccacaggccagggcctgt

SEQ ID NO: 9086 - DNA, 119 bp, homo sapiens
ccctgctccctccttcctcatccagcaccaaatctttgcttatgtccacaggccagggcctgtgctgcatcggggacaaggagcttccgtctggcaaggccggggcacaatttgcactc

SEQ ID NO: 9087 - DNA, 119 bp, homo sapiens
gcctgtgctgcagtcggggacaaggagcttccgtctggcaaggccggggcacaatttgcactcccctcactagacgcacagactcagcaataaacctttgcatcaggctccagctgtcc

SEQ ID NO: 9088 - DNA, 119 bp, homo sapiens
gcactcccctcagctagacgcacagactcagcaataaacctttgcatcaggctccagctgtcctttcttgtggaggacttaattatcacaagtcatgggcatttattaagtgcccagtg

SEQ ID NO: 9089 - DNA, 119 bp, homo sapiens
ctgtcctttcttggtggaggacttaattatcacaagtcatgggcatttattaagtgcccagtgctgggtgggcatgaagtgggaagatggcccctcccaggaagaagtacctggcctga

SEQ ID NO: 9090 - DNA, 119 bp, homo sapiens
ccagtgctgggttgggcatgaagtgggaagatggcccctcccaggaagaagtacctggcctgacaaggtgggcactcttgggggtatgggaccaactcatggcttttcacgggagttga

SEQ ID NO: 9091 - DNA, 119 bp, homo sapiens
gcctgacaaggtggggcactcttgggggtatgggaccaactcatggcttttcacgggagttgaggagagggagctgtggaaaatattcactgggacagtcttggatcaagagggagttt

SEQ ID NO: 9092 - DNA, 119 bp, homo sapiens
agttgaggagagaggagctgtggaaaatattcactgggacagtcttggatcaagagggagttttgaggtgaggctcattctggcagggaccgtagtgtctaccagccccagaaacatgg

SEQ ID NO: 9093 - DNA, 119 bp, homo sapiens
gagttttgaggtggaggctcattctggcagggaccgtagtgtctaccagccccagaaacatgggcttatgccacaggagttcagtggagcaagagcaggggaggagagacgtggacagg

SEQ ID NO: 9094 - DNA, 119 bp, homo sapiens
acatgggcttatggccacaggagttcagtggagcaagagcaggggaggagagacgtggacaggtgcccaagccagtcggagggcctgggctttctcagaaggtgatggagagtcttgga

SEQ ID NO: 9095 - DNA, 119 bp, homo sapiens
aacatttctggagcaatatttatttttagagtccctcgaatacagaagtgaaaatgtactattcaagactgtatttaacttcataaaatttctttcctagatgggtattacctcttatt

SEQ ID NO: 9096 - DNA, 119 bp, homo sapiens
ctattcaagacttgtatttaacttcataaaatttctttcctagatgggtattacctcttattaaacaacaataaaatatgtgctatataatcatacatttaaaacatggaaagacaact

SEQ ID NO: 9097 - DNA, 119 bp, homo sapiens
tattaaacaactaataaaatatgtgctatataatcatacatttaaaacatggaaagacaactaatatctacagtacatgaagacaaacttcaggagacaaacattaaatatatccaaaa

SEQ ID NO: 9098 - DNA, 119 bp, homo sapiens
aactaatatcttacagtacatgaagacaaacttcaggagacaaacattaaatatatccaaaaactaaatgacctggactttgcttacaaattgcttaaatggaaatgaaatttgtgttt

SEQ ID NO: 9099 - DNA, 119 bp, homo sapiens
aaaaactaaatggacctggactttgcttacaaattgcttaaatggaaatgaaatttgtgtttaagaaatttttcactgatggaaaaataaatctaacaaaaccattatgtaaaaacata

SEQ ID NO: 9100 - DNA, 119 bp, homo sapiens
gtttaagaaatgttttcactgatggaaaaataaatctaacaaaaccattatgtaaaaacatactgatttcaaagccaatgtgtctcagttttaatttgtatataccctagatgaggttt

SEQ ID NO: 9101 - DNA, 119 bp, homo sapiens
catactgatttacaaagccaatgtgtctcagttttaatttgtatataccctagatgaggtttatattaatgagaataaaatattaaaagtccatcaatgtgtagaaaagaaatacagct

SEQ ID NO: 9102 - DNA, 119 bp, homo sapiens
gtttatattaaatgagaataaaatattaaaagtccatcaatgtgtagaaaagaaatacagctgctcaagactagatagaacttcatattctttaaatctatttctagaactgaattgac

SEQ ID NO: 9103 - DNA, 119 bp, homo sapiens
caactactccttaaggttattaacaatagcaggaattatgacgacatattatgtcatttgtttctcctatgcttttatctctacattacaatataaaattttcaatccagcattttata

SEQ ID NO: 9104 - DNA, 119 bp, homo sapiens
gtcatttgtttctcctactgcttttatctctacattacaatataaaattttcaatccagcattttatagtctgtgtttaagttaattagtaccttaaaaaaataaaattctaaatataa

SEQ ID NO: 9105 - DNA, 119 bp, homo sapiens
aatccagcattttatagctctgtgtttaagttaattagtaccttaaaaaaataaaattctaaatataaattggtggattaaggctcagtaaacagtaatcaaacaaacaacagatttgt

SEQ ID NO: 9106 - DNA, 119 bp, homo sapiens
aaaattctaaatataaacttggtggattaaggctcagtaaacagtaatcaaacaaacaacagatttgtctcacaaagagaatatgaaagccaaagttttttttcttttgtgatcctgct

SEQ ID NO: 9107 - DNA, 119 bp, homo sapiens
caaacaacagatttgtcctcacaaagagaatatgaaagccaaagttttttttcttttgtgatcctgcttatattattctgttctgtccaatttcttttctgtagggaaacgccaaagag

SEQ ID NO: 9108 - DNA, 119 bp, homo sapiens
cttttgtgatcctgcttcatattattctgttctgtccaatttcttttctgtagggaaacgccaaagagaataaaaaagagatataaaacagtggtgagtggcttccaaatgactgtttg

SEQ ID NO: 9109 - DNA, 119 bp, homo sapiens
gggaaacgccaaagagatataaaaaagagatataaaacagtggtgagtggcttccaaatgactgtttgccttgctttttaagccaaaatcctctaaaaataggtctttaattctggcag

SEQ ID NO: 9110 - DNA, 119 bp, homo sapiens
tccaaatgactgtttgcccttgctttttaagccaaaatcctctaaaaataggtctttaattctggcagcgattaggacaaatgctcaaaaattcatgttttcttcaaaaaatttcaact

SEQ ID NO: 9111 - DNA, 119 bp, homo sapiens
tctttaattctggcagcagattaggacaaatgctcaaaaattcatgttttcttcaaaaaatttcaactgcgagctttcacactgtaagttgtatacttttcacccatgtgctcccgcaa

SEQ ID NO: 9112 - DNA, 119 bp, homo sapiens
ctctctatcaaattcatcctcctcctccaaaagatcatacacctgctctaaaagctgaactcccaggcccgaattacatcagttctcaagacttcaactagtctcctgatcttttcaga

SEQ ID NO: 9113 - DNA, 119 bp, homo sapiens
catcctcctcctccaaaagatcatacacctgctctaaaagctgaactcccaggccacgaattacatcagtctcaagacttcaactagtctcctgatcttttcagaacctggcataatag

SEQ ID NO: 9114 - DNA, 119 bp, homo sapiens
ctgaaggtagctctttaaaatggatttcctctgcctcttctgcaaccttcccatgaagtatcagtgtgtccgatatttccgatgaagtttgaattctgacactgggtttgctaccggga

SEQ ID NO: 9115 - DNA, 119 bp, homo sapiens
aaccttcccatgaagtatcagtgtgtcccgatatttccgatgaagtttgaattctgacactgggtttgcaccgggacatcttcacagctctctttagaatccagtttcagggtctgagt

SEQ ID NO: 9116 - DNA, 119 bp, homo sapiens
agtttgaattctgacactgggtttgctaccgggacatcttcacagctctctttagaatccagtttcaggtctgagtcatcaattgtaccaaggcattaatttcatttgtctgacctttc

SEQ ID NO: 9117 - DNA, 119 bp, homo sapiens
ctttgatgatgacatctcactgctccttgaactgctcacagacccagtgaccactctacgttggttttcgcctctttttgtgttgatgtgacatccactttcccaacaatgggatgaga

SEQ ID NO: 9118 - DNA, 119 bp, homo sapiens
actgctcacagacccagtgaccactctacgttggttttcagcctctttttgtgttgatgtgacatccacttcccaacaatgggatgagaaggcaaaaatcgaggaggcgactcttggaa

SEQ ID NO: 9119 - DNA, 119 bp, homo sapiens
agcaaagagatctctgcggacctgtctcttttcccctctgtgctcagtctgttctctcctcttttgccgcgctgtcgagacagggaaggttcagacccagagttgtgtggctgtaaatc

SEQ ID NO: 9120 - DNA, 119 bp, homo sapiens
ttctctcctcttttgccgtcgctgtcgagacagggaaggttcagacccagagttgtgtggctgtaaatcgggtggattctgccctgtttttctataatacattcaccagcaacttgatc

SEQ ID NO: 9121 - DNA, 119 bp, homo sapiens
ctggtcctttggcttttgttctttgattaggggctgcagaggcttcactggttcattcttttccccagtacaatgtcagaggaccacatgggaatcaggttttcaggctgggcactgga

SEQ ID NO: 9122 - DNA, 119 bp, homo sapiens
cttttccccagtgacaatgtcagaggaccacatgggaatcaggttttcaggctgggcactggatttagtttgtcctgcagcatctcctcttccacttgagaaatactgcatatacctcc

SEQ ID NO: 9123 - DNA, 119 bp, homo sapiens
actggatttagtgttgtcctgcagcatctcctcttccacttgagaaatactgcatatacctcctaactcttagaggcatccaaatatcttggctgattctcctgaacaaagccatcact

SEQ ID NO: 9124 - DNA, 119 bp, homo sapiens
acctcctaactcattagaggcatccaaatatcttggctgattctcctgaacaaagccatcactcactgatccctcccttttgcaggtaagatgtcaatatttacgctactgattgtggc

SEQ ID NO: 9125 - DNA, 119 bp, homo sapiens
atcactcactgaatccctcccttttgcaggtaagatgtcaatatttacgctactgattgtggctagttcgtggtattgctcaagtcctgtttgcaggtatgggctttcagactggcagg

SEQ ID NO: 9126 - DNA, 119 bp, homo sapiens
tgtggctagttctgtggtattgctcaagtcctgtttgcaggtatgggctttcagactggcaggtgacttaagagaccagaggccctgggtttctcctgggacaaacatttgccttcacc

SEQ ID NO: 9127 - DNA, 119 bp, homo sapiens
cattatatatgtctgggagccctcagaagagagtggttgggggtggattacttcatgatttgattctgctctccagaaaccactgtagcaaaaggcttggattgagagtcaccattttt

SEQ ID NO: 9128 - DNA, 119 bp, homo sapiens
tcagaagagagtggttgggggtggattacttcatgatttgattctgcctctccagaaaccactgtagcaaaggcttggattgagagtcaccatttttaatgttatttttggaggttttt

SEQ ID NO: 9129 - DNA, 119 bp, homo sapiens
atctttgtggcctccaaaaagaaggagatttgccgctttatataaggctgcctcaggatgctcctcacaacggcctttcttcaggccttttgctcagcattgttcttatcagttctgcc

SEQ ID NO: 9130 - DNA, 119 bp, homo sapiens
ctttatataaggctgcctcaggatgctcctcacagacggcctttcttcaggccttttgctcagcattgtcttatcagttctgccagctctgggctgtaatctcttggcattggtggcag

SEQ ID NO: 9131 - DNA, 119 bp, homo sapiens
cttatagttgtagggtttgtttgagaacaattcagggctcatgtagtagggtgtgccaatgagggtgctgccatgtcacagtggttctctaacactcgggcaattcctaggtcccctac

SEQ ID NO: 9132 - DNA, 119 bp, homo sapiens
catgtagtagggtgtgccaatgagggtgctagccatgtcacagtggttctctaacactcgggcaattccaggtcccctactttgatgatgtttgttcttgttaggaagacattttgagt

SEQ ID NO: 9133 - DNA, 119 bp, homo sapiens
acagtggttctctaacactcgggcaattcctaggtcccctactttgatgatgtttgttcttgttaggaaacattttgagttttcagatctcgatgaaggatgtgtttttcatgtaaata

SEQ ID NO: 9134 - DNA, 119 bp, homo sapiens
ctgcaaagccatggcgatctgtacaaaccactctaccacctgattctcaggcagaagctgccctttctgtccttgagctttcggtacaaatcacctccttcacagaagcccatgacaat

SEQ ID NO: 9135 - DNA, 119 bp, homo sapiens
ggcagaagctgccctttctgctccttgagctttcggtacaaatcacctccttcacagaagcccatgacatgtagagcagaccatctcctccttcccatgactccttgtaggtgacaatg

SEQ ID NO: 9136 - DNA, 119 bp, homo sapiens
cttcacagaagcccatgacaatgtagagcagaccatctcctccttcccatgactccttgtaggtgacaagttgggatgcttcaactgagacaagagctgggcttcctgttcagcagctc

SEQ ID NO: 9137 - DNA, 119 bp, homo sapiens
tgactccttgtaggtgacaatgttgggatgcttcaactgagacaagagctgggcttcctgttcagcagccgccgctctcggctagaggcatttcggaggttcagttttttgatgacata

SEQ ID NO: 9138 - DNA, 119 bp, homo sapiens
ctgcttgccgtcccgccggtgcttcacaagcgtcacctctccatagctccccttgcccacgacccgcagtagcagtaggcggccaggggcatgttcccagcgctggcccagagtcggga

SEQ ID NO: 9139 - DNA, 119 bp, homo sapiens
acgacccgcaggtagcagtaggcggccaggggcatgttcccagcgctggcccagagtcgggatgcggcgcagcggcgggtagggcagcgggcggcaacaagaagctcggttcatgcccg

SEQ ID NO: 9140 - DNA, 119 bp, homo sapiens
gggatgcggcggcagcggcgggtagggcagcgggcggcaacaagaagctcggttcatgcccgagaggggcagtgggggcggctgttgaggcagccgggcccgggcgggattgctggggc

SEQ ID NO: 9141 - DNA, 119 bp, homo sapiens
cccgagagggggcagtgggggcggctgttgaggcagccgggcccgggcgggattgctggggcccggccccgacgacgccgctgccatagcgatccgggccgggagcagttctgcgcatg

SEQ ID NO: 9142 - DNA, 119 bp, homo sapiens
gaaaaagggtgaaagagaaacttggcgacctcccggaggagttcgcgaagcgaccaggagcgtgttgcctcgtcctcacccggcacccaattccaccacagagtcgggatttcgtcggt

SEQ ID NO: 9143 - DNA, 119 bp, homo sapiens
ccaggagcgtgttgccatcgtcctcacccggcacccaattccaccacagagtcgggatttcgtcggtgacgtgatggggtgcttttatttttctctttgattttcaaaaaatgtctatg

SEQ ID NO: 9144 - DNA, 119 bp, homo sapiens
gggatttcgtcggtgatcgtgatggggtgcttttatttttctctttgattttcaaaaaatgtctatgtgctgtccctatcttaaggggaagttgaaagtgggggcgggggtgctcaatg

SEQ ID NO: 9145 - DNA, 119 bp, homo sapiens
aaaaaatgtctatgtgactgtccctatcttaaggggaagttgaaagtgggggcgggggtgctcaatgagaacgttgccttgtgtgtagttgtttggagcacactgcaaattatattggc

SEQ ID NO: 9146 - DNA, 119 bp, homo sapiens
gggggtgctcaatgagaaacgttgccttgtgtgtagttgtttggagcacactgcaaattatattggcattctttccaaaagtcactttgattcaacttcgatagctttctcgtaaatgg

SEQ ID NO: 9147 - DNA, 119 bp, homo sapiens
caaattatattggcatctctttccaaaagtcactttgattcaacttcgatagctttctcgtaaatggcagtttaggtggtgagaggtggatgaggaaacaggcaccagtgcagctgatt

SEQ ID NO: 9148 - DNA, 119 bp, homo sapiens
tttctcgtaaatggcacgtttaggtggtgagaggtggatgaggaaacaggcaccagtgcagctgatttgcctccagtgggatagatacgattagcaccaggatcgtgtctcattttgaa

SEQ ID NO: 9149 - DNA, 119 bp, homo sapiens
tccacctcggccgccgcaatggcgacggtcggggagcgcaggcctctgcccagtcctgaagtgatgctggacagtcgtggaatctgtgggttgaggcttccaaacttcctgggaaggac

SEQ ID NO: 9150 - DNA, 119 bp, homo sapiens
ccacctcggccgccgcaatggcgacggtcggggagcgcaggcctctgcccagtcctgaagtgatgctggacagtcgtggaatctgtgggttgaggcttccaaacttcctgggaaggacg

SEQ ID NO: 9151 - DNA, 119 bp, homo sapiens
gttttctgttgatctgccaggacctttgtaattcaagtgctttttacagtagtagcaaatgttacataacccaaacatggagcatatttggagttggtgggcagacccaaatcatgatg

SEQ ID NO: 9152 - DNA, 119 bp, homo sapiens
aaatgttacataagcccaaacatggagcatatttggagttggtgggcagacccaaatcatgatgcaagctgcagtagcaagtgtgcaatgaagcacaaccaaattctgtgaatggaagg

SEQ ID NO: 9153 - DNA, 119 bp, homo sapiens
tcatgatgcaagcctgcagtagcaagtgtgcaatgaagcacaaccaaattctgtgaatggaaggtagcagacgcctctccaaagcagcccttctgcgcaggagctgaaagctccactgg

SEQ ID NO: 9154 - DNA, 119 bp, homo sapiens
aaagaagacatagctcatccagcaagccgcctttggccgttcctcccacttcagtattttccttcttccttctctgtccaaaagcaaaggaggcagtgcaagtggaagcaaccgttctt

SEQ ID NO: 9155 - DNA, 119 bp, homo sapiens
cccacttcagtattttccttcttcccttctctgtccaaaagcaaaggaggcagtgcaagtggaagcaacgttcttccagtggaggtgttcttagcgcatcctcatcaagttccaagttg

SEQ ID NO: 9156 - DNA, 119 bp, homo sapiens
aggaggcagtgcaagtggaagcaaccgttcttccagtggaggtgttcttagcgcatcctcatcaagttcaagttgttgaaatcacccaaagagaaactgcagctcagggggaacaccag

SEQ ID NO: 9157 - DNA, 119 bp, homo sapiens
ttcttagcgcatcctcatcaagttccaagttgttgaaatcacccaaagagaaactgcagctcagggggacaccaggccaatgcatcccattcagcaaagtagagttccccatggtagaa

SEQ ID NO: 9158 - DNA, 119 bp, homo sapiens
catgacaccctctgtgaaagtggaaaagattcatccgaaaatggatggcacactactgaaatctgcggtgggccaacctgtcctgctactgtgagttccttagtcaagcctggccttaa

SEQ ID NO: 9159 - DNA, 119 bp, homo sapiens
ggcacactactgaaatctgcggtggggccaacctgtcctgctactgtgagttccttagtcaagcctggcttaactgcccctcaataccaaagccaaccttgccttcacctggacagatt

SEQ ID NO: 9160 - DNA, 119 bp, homo sapiens
tgagttccttagtcaagcctggccttaactgcccctcaataccaaagccaaccttgccttcacctggacgattctgaatggcaaagggcttcctgcaccgcccactctggaaaagaaac

SEQ ID NO: 9161 - DNA, 119 bp, homo sapiens
gccaaccttgccttcacctggacagattctgaatggcaaagggcttcctgcaccgcccactctggaaaaaaacctgaagacaattccaataataggaaatttttaaataagagattatc

SEQ ID NO: 9162 - DNA, 119 bp, homo sapiens
acacattccttaacccagcgcagggctgtccagggtagaagaaaacgatttgatgtgttattagccgagacaaaaacaaaaccagggaaaaggaattgattcgccatccggactctcag

SEQ ID NO: 9163 - DNA, 119 bp, homo sapiens
tttgatgtgttattagccgagcacaaaaacaaaaccagggaaaaggaattgattcgccatccggactctagcaaccaccgcagcctctcagggacccgcatcccgcccctcctagaacg

SEQ ID NO: 9164 - DNA, 119 bp, homo sapiens
ttgattcgccatccggactctcagcaaccaccgcagcctctcagggacccgcatcccgcccctcctagacgtcacaggagccgcaccaaaaccctcacggagtgattccttccgaatca

SEQ ID NO: 9165 - DNA, 119 bp, homo sapiens
ccgcatcccgcccctcctagaacgtcacaggagccgcaccaaaaccctcacggagtgattccttccgaacaaagccttttgtagctagtaaacctaaacctcacacccccagtcttcca

SEQ ID NO: 9166 - DNA, 119 bp, homo sapiens
gcctccaggctgccctgctcagcaaggtgggagtgcccccattgaccctcctccagtccatgaatctcccaccctcccctgcctgccactgagccagcttctcggttatccagtgagga

SEQ ID NO: 9167 - DNA, 119 bp, homo sapiens
cattgaccctcctccagtccatgaatctccacaccctcccctgcctgccactgagccagcttctcggtttccagtgaggagggcgaaggcgatgacaaagaagagtctgttgaaaaact

SEQ ID NO: 9168 - DNA, 119 bp, homo sapiens
cctgcctgccactgagccagcttctcggttatccagtgaggagggcgaaggcgatgacaaagaagagtcgttgaaaaactggactgtcattattcaggtcatcatcctcagccagcatc

SEQ ID NO: 9169 - DNA, 119 bp, homo sapiens
gaaaatcccaccagtgcccagtaccacctcacccatctccacacgtattcctcaccggacaaactctgtccgacatcacaatgtggagtcagctatctggcagcagccaccgtctctac

SEQ ID NO: 9170 - DNA, 119 bp, homo sapiens
gacaaactctgtgccgacatcacaatgtggagtcagctatctggcagcagccaccgtctctacatccccgtcctgctctcatctacctgcatctccccaaatagcaaatcggtaccagc

SEQ ID NO: 9171 - DNA, 119 bp, homo sapiens
ctctacatccccagtcctgctctcatctacctgcatctccccaaatagcaaatcggtaccagctcatggaccacactaaatgcacagcctgctgcttcaggggcgatggatcctgtgtg

SEQ ID NO: 9172 - DNA, 119 bp, homo sapiens
accagctcatggaaccacactaaatgcacagcctgctgcttcaggggcgatggatcctgtgtgcagtatcaatccagacaagtgtcctcttcatcctcatccccttccacgccctctgg

SEQ ID NO: 9173 - DNA, 119 bp, homo sapiens
tgtgtgcagtatgcaatccagacaagtgtcctcttcatcctcatccccttccacgccctctggcctttctcggttccttcctcccccatgtccaggaaacctcagaaattgaaatccag

SEQ ID NO: 9174 - DNA, 119 bp, homo sapiens
ctctggcctttcctcggttccttcctcccccatgtccaggaaacctcagaaattgaaatccagcaaatcttgaggcccaaggagtcttctggtaacagcactaactgtcaaaatgccag

SEQ ID NO: 9175 - DNA, 119 bp, homo sapiens
atccagcaaatctttgaggcccaaggagtcttctggtaacagcactaactgtcaaaatgccagtagcagaccagtggcggctcaggaaagaaacgcaaaaacagttccccactgttggt

SEQ ID NO: 9176 - DNA, 119 bp, homo sapiens
tcattccatggagtcttttaggaaaaactgtgtggctcactctgggcctccctacccctcaacggtaactcttcccatagcatcggcctcaactgtgtgacgaataaagcaaatgcggt

SEQ ID NO: 9177 - DNA, 119 bp, homo sapiens
caacggtaacatcttcccatagcatcggcctcaactgtgtgacgaataaagcaaatgcggtgaacgtccgcatgaccagtcagggaggggcccccccaccgggagccctgctgaatcca

SEQ ID NO: 9178 - DNA, 119 bp, homo sapiens
gtgaacgtccggcatgaccagtcagggaggggcccccccaccgggagccctgctgaatccatcaagaggtgagtgtgatggtgaacagcagtgattctactctttctcttgggccattc

SEQ ID NO: 9179 - DNA, 119 bp, homo sapiens
catcaagaggatgagtgtgatggtgaacagcagtgattctactctttctcttgggccattcattcaccatccaatgaactgcctgtcaactcccacggcagtttttcccactcacacac

SEQ ID NO: 9180 - DNA, 119 bp, homo sapiens
tcattcaccagtccaatgaactgcctgtcaactcccacggcagtttttcccactcacacactcctctagcaaactcataggaaagaaaagaaagtgctcacccagctcgagcagcatca

SEQ ID NO: 9181 - DNA, 119 bp, homo sapiens
actcctctagacaaactcataggaaagaaaagaaagtgctcacccagctcgagcagcatcaacaacagcgcagcaaacccacaaaggttgccaaagtgccagccgtgaacaatgtccac

SEQ ID NO: 9182 - DNA, 119 bp, homo sapiens
caacaacagcagcagcaaacccacaaaggttgccaaagtgccagccgtgaacaatgtccacatgaaacaacaggcaccatcccaggggcacaaggactgatgaacagttccctccttca

SEQ ID NO: 9183 - DNA, 119 bp, homo sapiens
ccaaaggcacgtccctgacagctgaaaatagcacggggaggaataatgcggacacttttgaggacaagtacacctccactcagcactctggactccacgatgcctttgagtctgttttc

SEQ ID NO: 9184 - DNA, 119 bp, homo sapiens
tgaggacaagttacacctccactcagcactctggactccacgatgcctttgagtctgttttcccaacctctgtgggcctcaagggtagaaacctgccgggctgttgttttaacgaggat

SEQ ID NO: 9185 - DNA, 119 bp, homo sapiens
tttcccaacctcctgtgggcctcaagggtagaaacctgccgggctgttgttttaacgaggatttccctgagctatgtctctagcagtgagtactcataaaggacactggatcaagttca

SEQ ID NO: 9186 - DNA, 119 bp, homo sapiens
ggatttccctgaagctatgtctctagcagtgagtactcataaaggacactggatcaagttcagccaccgattgcttttatcagtgttaaagtggtctgaactgcttgctaccaatctgt

SEQ ID NO: 9187 - DNA, 119 bp, homo sapiens
ttcagccaccgaattgcttttatcagtgttaaagtggtctgaactgcttgctaccaatctgtgagaagttttgtttttgttttgttttttaacttgcagtatatcacagagccactctt

SEQ ID NO: 9188 - DNA, 119 bp, homo sapiens
ctgtgagaagtttttgtttttgttttgttttttaacttgcagtatatcacagagccactcttcaagtagttggctgggcaaaagaatgttttggcaagagcgttactgtagacctttct

SEQ ID NO: 9189 - DNA, 119 bp, homo sapiens
tcttcaagtagattggctgggcaaaagaatgttttggcaagagcgttactgtagacctttctccctcctccttttactaccatttttttttaacactgtcatctgtaggtcactctcca

SEQ ID NO: 9190 - DNA, 119 bp, homo sapiens
ttctccctccttccttttactaccatttttttttaacactgtcatctgtaggtcactctccagcagttagcaccttaactggagaccagaaaccttccagagaacacagggctgcatcc

SEQ ID NO: 9191 - DNA, 119 bp, homo sapiens
tccagcagttaggcaccttaactggagaccagaaaccttccagagaacacagggctgcatcccgagcaacctctgaagaagggaattaggctttagattttgatagcaatgttccagga

SEQ ID NO: 9192 - DNA, 119 bp, homo sapiens
atcccgagcaaccctctgaagaagggaattaggctttagattttgatagcaatgttccaggaatgaaattagatgttagcccaagacaccatgacaaaatagcccagccttttgagagt

SEQ ID NO: 9193 - DNA, 119 bp, homo sapiens
aggaatgaaatatagatgttagcccaagacaccatgacaaaatagcccagccttttgagagtaatttggaaaagaagctgtcagaagtttctaacttacaaactggtttgaaatttttg

SEQ ID NO: 9194 - DNA, 119 bp, homo sapiens
gagtaatttgggaaaagaagctgtcagaagtttctaacttacaaactggtttgaaatttttgatgcccaacagcaagtataaatcattttggaggcttacttttcatgatacaaaagca

SEQ ID NO: 9195 - DNA, 119 bp, homo sapiens
tttgatgcccagacagcaagtataaatcattttggaggcttacttttcatgatacaaaagcaattctgttgatttttttttttaagaagaaagaaaatgcaagctagttttgagaaagg

SEQ ID NO: 9196 - DNA, 119 bp, homo sapiens
agcaattctgtgtgatttttttttttaagaagaaagaaaatgcaagctagttttgagaaaggaaggccaattgggtcgggggagggtgggagtgaggaagttaaaatcactatagggag

SEQ ID NO: 9197 - DNA, 119 bp, homo sapiens
aaggaaggccaaattgggtcgggggagggtgggagtgaggaagttaaaatcactatagggagaaaaaactttttcaagatttccaaagagatgaaattttcttaatccttttaagtttt

SEQ ID NO: 9198 - DNA, 119 bp, homo sapiens
ggagaaaaaacttttttcaagatttccaaagagatgaaattttcttaatccttttaagttttcatagtaacagtatggcagattgggttggttgtcctacctggtctatttttaaaagt

SEQ ID NO: 9199 - DNA, 119 bp, homo sapiens
ttttcatagtaaacagtatggcagattgggttggttgtcctacctggtctatttttaaaagtcacctttaaagtgacattattagatacacttaaatgtttccaaggcactctctacat

SEQ ID NO: 9200 - DNA, 119 bp, homo sapiens
aagtcaccttttaaagtgacattattagatacacttaaatgtttccaaggcactctctacattaccctttttttctctttggatactgtcctgggactaagtgtagatttctgcttcaa

SEQ ID NO: 9201 - DNA, 119 bp, homo sapiens
acattacccttgtttttctctttggatactgtcctgggactaagtgtagatttctgcttcaagcacttcggcattgtgtgtttttgtatgcactccccttcatgccacttcagatgttt

SEQ ID NO: 9202 - DNA, 119 bp, homo sapiens
tcaagcacttctggcattgtgtgtttttgtatgcactccccttcatgccacttcagatgtttatttggagtggttggggacgagagcagacaccaaggaaagggagttggagagaatgt

SEQ ID NO: 9203 - DNA, 119 bp, homo sapiens
gtttatttggatgtggttggggacgagagcagacaccaaggaaagggagttggagagaatgtaagtcctacctgaaggtcttttgtgatgcatgtataggattgccctgacacacaccc

SEQ ID NO: 9204 - DNA, 119 bp, homo sapiens
atgtaagtcctgacctgaaggtcttttgtgatgcatgtataggattgccctgacacacaccctcctttctgggattataccagccatcttcctgagagttttggagccctctaggatat

SEQ ID NO: 9205 - DNA, 119 bp, homo sapiens
accctcctttcttgggattataccagccatcttcctgagagttttggagccctctaggatattttttctgtaccccaccccccacccctaaagaaagaccttaatatgttaaaacagca

SEQ ID NO: 9206 - DNA, 119 bp, homo sapiens
atattttttctagtaccccaccccccacccctaaagaaagaccttaatatgttaaaacagcattgcttgagaaggtgtcattgaattccgggacgagccggagcctttaaatgggtgct

SEQ ID NO: 9207 - DNA, 119 bp, homo sapiens
agcattgcttggagaaggtgtcattgaattccgggacgagccggagcctttaaatgggtgcttccaccatacaggctcctgacacgagtaacaggcactgttgcttagaagaacacacg

SEQ ID NO: 9208 - DNA, 119 bp, homo sapiens
tgcttccaccactacaggctcctgacacgagtaacaggcactgttgcttagaagaacacacgaagttgcgaacacagggtaaaatttccaaggcgctgatcgttgccctggccagggcc

SEQ ID NO: 9209 - DNA, 119 bp, homo sapiens
cacgaagttgccgaacacagggtaaaatttccaaggcgctgatcgttgccctggccagggcctgatgaggccagtcagtacattctttttttcctacagttcttgggtttcaaacttca

SEQ ID NO: 9210 - DNA, 119 bp, homo sapiens
ggcctgatgagagccagtcagtacattctttttttcctacagttcttgggtttcaaacttcagtttcaggaatttcaagtcaacaacaggtagaatgaataaacttggttaccagccta

SEQ ID NO: 9211 - DNA, 119 bp, homo sapiens
ttcagtttcagggaatttcaagtcaacaacaggtagaatgaataaacttggttaccagcctaataatgtaattgctacagaattattcttattatgtaagaaaacaaaaactttatgca

SEQ ID NO: 9212 - DNA, 119 bp, homo sapiens
cctaataatgtgaattgctacagaattattcttattatgtaagaaaacaaaaactttatgcagatacttagctataaattgatgtaaaatactgatttttttaaaggaaggagagaaca

SEQ ID NO: 9213 - DNA, 119 bp, homo sapiens
tgcagatactttagctataaattgatgtaaaatactgatttttttaaaggaaggagagaacagtatcttttcaattattatgcaatcaatcagtaaatgtttttaaaatgatactacag

SEQ ID NO: 9214 - DNA, 119 bp, homo sapiens
aacagtatcttgttcaattattatgcaatcaatcagtaaatgtttttaaaatgatactacaggagagctagtaaggagagggcatggatgggccagtttggcatagttgggagaaatca

SEQ ID NO: 9215 - DNA, 119 bp, homo sapiens
acaggagagcttagtaaggagagggcatggatgggccagtttggcatagttgggagaaatcagtctggttccatcccagtcggggaagagagaggtgagagggaatcagaacgtaccta

SEQ ID NO: 9216 - DNA, 119 bp, homo sapiens
atcagtctggtttccatcccagtcggggaagagagaggtgagagggaatcagaacgtacctagttgattcttggtgacaagtgcaatggggtatgggtagaatttattttcagagccaa

SEQ ID NO: 9217 - DNA, 119 bp, homo sapiens
cctagttgattccttggtgacaagtgcaatggggtatgggtagaatttattttcagagccaagaggactgatggttataaataaagttgcctttagcaatggaatttacagatcgatca

SEQ ID NO: 9218 - DNA, 119 bp, homo sapiens
ccaagaggacttgatggttataaataaagttgcctttagcaatggaatttacagatcgatcatgttgttcgaaagatgtgaataggatccacaataacaagttgattcagactaatgta

SEQ ID NO: 9219 - DNA, 119 bp, homo sapiens
atcatgttgttccgaaagatgtgaataggatccacaataacaagttgattcagactaatgtagatatttgattagcaagtattgaacatttgatttcttagactgaggttttaaatgaa

SEQ ID NO: 9220 - DNA, 119 bp, homo sapiens
tgtagatatttagattagcaagtattgaacatttgatttcttagactgaggttttaaatgaatttcatttttctcccggtaatacacagagcatcgggattaggaaattagccattttg

SEQ ID NO: 9221 - DNA, 119 bp, homo sapiens
tgaatttcattatttctcccggtaatacacagagcatcgggattaggaaattagccattttggattctgctgccacaaacagacctattctaaacagtgctattaaattttagactgtt

SEQ ID NO: 9222 - DNA, 119 bp, homo sapiens
tttggattctgtctgccacaaacagacctattctaaacagtgctattaaattttagactgttgttcaaaattttattttctcctaaactactttttatggtgatgaataattaagacca

SEQ ID NO: 9223 - DNA, 119 bp, homo sapiens
tgttgttcaaatattttattttctcctaaactactttttatggtgatgaataattaagaccatttaaaaacgggagtacaagtatttttttgaattaaattaacttgcaaaaaccaaat

SEQ ID NO: 9224 - DNA, 119 bp, homo sapiens
accatttaaaacacgggagtacaagtatttttttgaattaaattaacttgcaaaaaccaaatttgcagtgttgggttgtttctagacagactttggtatcaatttaaaaccaagataat

SEQ ID NO: 9225 - DNA, 119 bp, homo sapiens
aaatttgcagtggttgggttgtttctagacagactttggtatcaatttaaaaccaagataatttttatatctttccaatagaatttcatgacaactcctgcagttttcttaacctacaa

SEQ ID NO: 9226 - DNA, 119 bp, homo sapiens
taatttttatattctttccaatagaatttcatgacaactcctgcagttttcttaacctacaaaaaaaaaaaaaagtgctgcaatgatgaacaaagaattatacaaaacctacttttgta

SEQ ID NO: 9227 - DNA, 119 bp, homo sapiens
acaaaaaaaaaaaaaaagtgctgcaatgatgaacaaagaattatacaaaacctacttttgtatctttatttggaatttcttgttctattataaatatggaagtatccctatttcagaag

SEQ ID NO: 9228 - DNA, 119 bp, homo sapiens
tgtatctttattttggaatttcttgttctattataaatatggaagtatccctatttcagaagacatatttgttaaaaatgaattgtacatatttaaatatgtatttttgcacaggtctt

SEQ ID NO: 9229 - DNA, 119 bp, homo sapiens
gtaaatacctttttataatttgaagtggttcactgccaagccaatagttctagaacctgcctcctttacgttttaagggatgcctctgttctgtgaaaagtctttgtcccttttagtgt

SEQ ID NO: 9230 - DNA, 119 bp, homo sapiens
tgcctcctttacagttttaagggatgcctctgttctgtgaaaagtctttgtcccttttagtgtctcggggtggattcatacagatgaagtgggcattgcttcttcctggttgcctggtt

SEQ ID NO: 9231 - DNA, 119 bp, homo sapiens
tagtgtctcgggagtggattcatacagatgaagtgggcattgcttcttcctggttgcctggtttcccgaagactacatgtaactaagtgacacactgcttttcttttgttagtatttta

SEQ ID NO: 9232 - DNA, 119 bp, homo sapiens
atactcagcacatgtatgttactatgtgatgtggtttaaaactaatggaaaaaactgaaagtgcctgaactagttttaagcttagacagaatctctttaaaaagacttgaatgttcagt

SEQ ID NO: 9233 - DNA, 119 bp, homo sapiens
aaagtgcctgaaactagttttaagcttagacagaatctctttaaaaagacttgaatgttcagttgaactttggagtttgctttttccacctaaatattgtttctaaaattttaggggcg

SEQ ID NO: 9234 - DNA, 119 bp, homo sapiens
ttcagttgaacttttggagtttgctttttccacctaaatattgtttctaaaattttaggggcggagttgaaaccaccaatgctggtaattttataaggtattttaaaattaagacctct

SEQ ID NO: 9235 - DNA, 119 bp, homo sapiens
ggggcggagttgaaaaccaccaatgctggtaattttataaggtattttaaaattaagacctcttggttctagtaattcaattggtgatggattgcctggtggcaccaagggttacagat

SEQ ID NO: 9236 - DNA, 119 bp, homo sapiens
acctcttggttcatagtaattcaattggtgatggattgcctggtggcaccaagggttacagatcttttttcagccagcaacttacacgatgtgtccgttttgttattcactcatgaaat

SEQ ID NO: 9237 - DNA, 119 bp, homo sapiens
gtattccaaaaatataatacaaagaagtacctctgagaacattgaaaaaaatgtataatttgaaaaatgaacttataagggcagctgtcttcctgcaagagttctgttgccaaggaatt

SEQ ID NO: 9238 - DNA, 119 bp, homo sapiens
aaaaatgtataatttgaaaaatgtaacttataagggcagctgtcttcctgcaagagttctgttgccaagaatttcttaatgtcgctcattctgtccagggggtttggggcgattgggct

SEQ ID NO: 9239 - DNA, 119 bp, homo sapiens
cctgcaagagttctgttgccaaggaatttcttaatgtcgctcattctgtccagggggtttggggcgattggctttgaaaaaatattcttaaaagtttgtttagcagaaaataatcactt

SEQ ID NO: 9240 - DNA, 119 bp, homo sapiens
tgtccagggggtttggggcgattgggctttgaaaaaatattcttaaaagtttgtttagcagaaaataatacttttacattttgtgcaaaacattttacattttcagataatttaaatga

SEQ ID NO: 9241 - DNA, 119 bp, homo sapiens
aagtttgtttagcagaaaataatcacttttacattttgtgcaaaacattttacattttcagataatttaatgagcactacatactgtcagtgtgaatgtagggccttgaaagcattttg

SEQ ID NO: 9242 - DNA, 119 bp, homo sapiens
gagcttggttataaaagcaatctcctgtgttaaaaacgtgtgaatagtttgataatttgtacacataataagagcatctcagctggactttgtgttggctgctgtatagaacatgaaca

SEQ ID NO: 9243 - DNA, 119 bp, homo sapiens
tgaatagtttgataatttgtacacataatcaagagcatctcagctggactttgtgttggctgctgtataaacatgaacaaatgtcaagggatagaaaattactttggatatttaaaaga

SEQ ID NO: 9244 - DNA, 119 bp, homo sapiens
cagctggactttgtgttggctgctgtatagaacatgaacaaatgtcaagggatagaaaattactttggaatttaaaagagaagaaatatatagtctatttgttttgtaacaagtttctg

SEQ ID NO: 9245 - DNA, 119 bp, homo sapiens
agcacgtcgacgcggggcttttctttagccgggtcccgctaactcggctacggtgtatctgcgtctttgtcaggttgttccttggctaagagggcagtcgtcgcggacccacgcggtta

SEQ ID NO: 9246 - DNA, 119 bp, homo sapiens
atctgcgtctttggtcaggttgttccttggctaagagggcagtcgtcgcggacccacgcggttagcaagcttagtgctcgggccggccgccttcacttccctcccggcttttcctcccg

SEQ ID NO: 9247 - DNA, 119 bp, homo sapiens
cgcggttagcaaggcttagtgctcgggccggccgccttcacttccctcccggcttttcctcccgacttaccactttaggggcgtctcggagtgccggaggcccccggggaagagcgggg

SEQ ID NO: 9248 - DNA, 119 bp, homo sapiens
tcctcccgacttatccactttaggggcgtctcggagtgccggaggcccccggggaagagcggggtgccgtgtccgctccgggctcggatgggaagtggtgggaggagcgacccgggatg

SEQ ID NO: 9249 - DNA, 119 bp, homo sapiens
gagcggggtgccggtgtccgctccgggctcggatgggaagtggtgggaggagcgacccgggatgttcagctgatggccagttgctgcggctggttcaagcggtggcgggagcctgtcag

SEQ ID NO: 9250 - DNA, 119 bp, homo sapiens
aataccctgaagatgtagctcctactgttggattttcaaaaattaaccttagacaaggaaagtttgaagcaccatctttgacttgggaggtggaataagaattcggggaatctggaaga

SEQ ID NO: 9251 - DNA, 119 bp, homo sapiens
taaccttagacaaggaaagtttgaagtcaccatctttgacttgggaggtggaataagaattcggggaattggaagaattactatgctgaatcctatggggtaatatttgttgtggattc

SEQ ID NO: 9252 - DNA, 119 bp, homo sapiens
ggaggtggaataagaattcggggaatctggaagaattactatgctgaatcctatggggtaatatttgtttggattccagtgatgaagagagaatggaagagacaaaagaggctatgtca

SEQ ID NO: 9253 - DNA, 119 bp, homo sapiens
ctgaatcctatggggtaatatttgttgtggattccagtgatgaagagagaatggaagagacaaaagaggtatgtcagaaatgctaagacatcctaggatatcgggaaagcctatattgg

SEQ ID NO: 9254 - DNA, 119 bp, homo sapiens
gaaccatgttcagcaatctcggggtatggaaagaaaattgacaagtccattaaaaaaggcctttattggtgctacatgttattgcaagagactttgatgccttaaatgaacgcatccaa

SEQ ID NO: 9255 - DNA, 119 bp, homo sapiens
caagtccattaaaaaaggcctttattggctgctacatgttattgcaagagactttgatgccttaaatgacgcatccaaaaagagacaacagagcagcgtgctcttgaggaacaagagaa

SEQ ID NO: 9256 - DNA, 119 bp, homo sapiens
ttgcaagagactttgatgccttaaatgaacgcatccaaaaagagacaacagagcagcgtgctcttgaggacaagagaaacaagaaagagctgaacgagtgcgaaaattacgagaagaaa

SEQ ID NO: 9257 - DNA, 119 bp, homo sapiens
aatgaaggaaaacttgaaagagagaaaaaaaaccaaaaaatggagaaagacagtgatggctgccacctgaacataaaatggagcatgagcaaatagagacacaaggccaggttaatcac

SEQ ID NO: 9258 - DNA, 119 bp, homo sapiens
tgatggctgccacctgaaacataaaatggagcatgagcaaatagagacacaaggccaggttaatcacaaggccaaaaaaataatgaatttggactagtagaaaattataaggaggcatt

SEQ ID NO: 9259 - DNA, 119 bp, homo sapiens
gccaggttaatcacaatggccaaaaaaataatgaatttggactagtagaaaattataaggaggcattaaacagcagttaaagaatgaagatgagacagaccggccatcattggaatcag

SEQ ID NO: 9260 - DNA, 119 bp, homo sapiens
atttctataggaagccactgcctcccctggctgtgccacagcgacctaacagtgatgctcatgatgtgactcataaacaagacgtatggaggagttctcttaatatcagcaaggtgaac

SEQ ID NO: 9261 - DNA, 119 bp, homo sapiens
tgctcatgatgtgatctcataaacaagacgtatggaggagttctcttaatatcagcaaggtgaactgggcattcttctttctcagaagaagaaacatcttgtaaattgatgactggggc

SEQ ID NO: 9262 - DNA, 119 bp, homo sapiens
caaggtgaactgggacattcttctttctcagaagaagaaacatcttgtaaattgatgactggggcaagaaaccataataattttagtgagaagattaatactcaaggacctgacttgat

SEQ ID NO: 9263 - DNA, 119 bp, homo sapiens
tgactggggcaagataaccataataattttagtgagaagattaatactcaaggacctgacttgataattcttatttgtgtttttcatggttaaaaaaataaaagaagcacaatgaccag

SEQ ID NO: 9264 - DNA, 119 bp, homo sapiens
ctgacttgataattacttatttgtgtttttcatggttaaaaaaataaaagaagcacaatgaccagtacagaaatcagcatttggaccaaattagcaagatttactgttgactctggttt

SEQ ID NO: 9265 - DNA, 119 bp, homo sapiens
caatgaccagtacatgaaatcagcatttggaccaaattagcaagatttactgttgactctggtttatactccccactcatgagcatacttctgaaggaaaactttacaaaaagagccaa

SEQ ID NO: 9266 - DNA, 119 bp, homo sapiens
actctggtttatacatccccactcatgagcatacttctgaaggaaaactttacaaaaagagccaatggatcagcactttctttactatttgttcaatagcctatatttctagatattaa

SEQ ID NO: 9267 - DNA, 119 bp, homo sapiens
aaagagccaatggactcagcactttctttactatttgttcaatagcctatatttctagatattaaatatttttgtaagatatatgcacatagaagggggacttctaggaatttataacc

SEQ ID NO: 9268 - DNA, 119 bp, homo sapiens
ctgtgatattgattatacaccttttttatagatgatttgtttaaattatatctggaaaatagagttgattactttcagacatgaactatacaaacaggatatatttatatggcttgagg

SEQ ID NO: 9269 - DNA, 119 bp, homo sapiens
tatctggaaaatagagttgatttactttcagacatgaactatacaaacaggatatatttatatggcttgggtatgttttgtaatagcgttgttctttaagtgtacatcgtaatttgacc

SEQ ID NO: 9270 - DNA, 119 bp, homo sapiens
cgaagtagtagattctcagatctttattctaacaattacatgatttgaaaacagtactcaatgagactgaaataccttttgtacctaaatgttttttaaattaatcaaaatacattctg

SEQ ID NO: 9271 - DNA, 119 bp, homo sapiens
agtactcaatgagactggaaataccttttgtacctaaatgttttttaaattaatcaaaatacattctgtagatactattaaaagtctcagtaaagtcctattttaaaggttagacactt

SEQ ID NO: 9272 - DNA, 119 bp, homo sapiens
atcaaaatacattctgtgagatactattaaaagtctcagtaaagtcctattttaaaggttagacactttagagatcaaggtgctccctatactcccttgttccatcagaagctgcagtg

SEQ ID NO: 9273 - DNA, 119 bp, homo sapiens
taaaggttagacactttcagagatcaaggtgctccctatactcccttgttccatcagaagctgcagtgatcttttaggtgattctaattctttcatgccttgaaattaaactatgaaat

SEQ ID NO: 9274 - DNA, 119 bp, homo sapiens
atcagaagctgcagtgactcttttaggtgattctaattctttcatgccttgaaattaaactatgaaattaaggcagaaaaactggaaaacctactgcaggtccagagacttctgtttta

SEQ ID NO: 9275 - DNA, 119 bp, homo sapiens
aattaaactatgaaattaaaggcagaaaaactggaaaacctactgcaggtccagagacttctgttttacactgggaaacagcttgtgtactaaagtaatgagaataaaaatgttggccc

SEQ ID NO: 9276 - DNA, 119 bp, homo sapiens
gatagcacttctcttgcacttaagaatggcatccataagattctgtatttggcatttagactaacttctgatgtatatttttaataatagattcataatgttacatttaattgaaaaca

SEQ ID NO: 9277 - DNA, 119 bp, homo sapiens
tatttggcatttagactaacttctagatgtatatttttaataatagattcataatgttacatttaattgaaacaaacctttatatccaatgaaaatagtataaacagaatgatttttat

SEQ ID NO: 9278 - DNA, 119 bp, homo sapiens
gattcataatgttacatttaattgaaaacaaacctttatatccaatgaaaatagtataaacagaatgattttataccaccttgttaagattggtgcttttggtaacttgtactgacaca

SEQ ID NO: 9279 - DNA, 119 bp, homo sapiens
tgaaaatagtataaacagaatgatttttataccaccttgttaagattggtgcttttggtaacttgtactacacaacagacatgtgctagtatctgataacattaagtacattttatgtc

SEQ ID NO: 9280 - DNA, 119 bp, homo sapiens
gtacttcagaacatcagattttattcacattttttaactcactgaactttaataatcaggtcacctgtatctagtcagcactgtatatattcttggagtttgtacatgggacttagcaa

SEQ ID NO: 9281 - DNA, 119 bp, homo sapiens
caggtcacctgtactctagtcagcactgtatatattcttggagtttgtacatgggacttagcaaccacatgagtgaggtaaaagcatttgatttcagatctaaaattcgtaacaaccta

SEQ ID NO: 9282 - DNA, 119 bp, homo sapiens
cttagcaaccacactgagtgaggtaaaagcatttgatttcagatctaaaattcgtaacaacctaaatttagaggtggctgaaatgtgatgaaaagcaatacgaaaagacaatgtaaact

SEQ ID NO: 9283 - DNA, 119 bp, homo sapiens
acaacctaaatttgagaggtggctgaaatgtgatgaaaagcaatacgaaaagacaatgtaaactttgaaaggattttagagggaaaattgcatagctttttgtaacatttacttaattt

SEQ ID NO: 9284 - DNA, 119 bp, homo sapiens
tgtaaactttgaaaaggattttagagggaaaattgcatagctttttgtaacatttacttaattttaaaataaactcatacttttgctatctttttaatatttatctcgtttgggagtat

SEQ ID NO: 9285 - DNA, 119 bp, homo sapiens
cttaattttaaaactaaactcatacttttgctatctttttaatatttatctcgtttgggagtatacgtgttttaaaatttgtgttttctatctgtttactatagtgtagctactggctt

SEQ ID NO: 9286 - DNA, 119 bp, homo sapiens
gaattcacattttatatagctctctcaaaaattaatttttattccttaagcattttaaaaacattttaaaaatgttttgtaaatccaggtgtattttaacaattaaatgcctattttgt

SEQ ID NO: 9287 - DNA, 119 bp, homo sapiens
aaacattttaaaaaatgttttgtaaatccaggtgtattttaacaattaaatgcctattttgttatatgtatacttttattcttaattctgaattttgacattttcacacaataaaaata

SEQ ID NO: 9288 - DNA, 119 bp, homo sapiens
ttgttatatgttatacttttattcttaattctgaattttgacattttcacacaataaaaataatttatacaatattctgtttctcttttcaattggtagatttaaatgatttcctttgg

SEQ ID NO: 9289 - DNA, 119 bp, homo sapiens
aataatttatatcaatattctgtttctcttttcaattggtagatttaaatgatttcctttgggtaataaataggtaaagattttaaaatatgattattgaaaaacagtttaaatcagta

SEQ ID NO: 9290 - DNA, 119 bp, homo sapiens
ttgggtaataaaataggtaaagattttaaaatatgattattgaaaaacagtttaaatcagtagattaaataatgcatttttttgatactttacacacaaaacttttttctctctgcaag

SEQ ID NO: 9291 - DNA, 119 bp, homo sapiens
agtagattaaaataatgcatttttttgatactttacacacaaaacttttttctctctgcaagtttttattatgtgggaaagaatttgtgattttaaatgcagctacaaatagcatttca

SEQ ID NO: 9292 - DNA, 119 bp, homo sapiens
caagtttttatgtatgtgggaaagaatttgtgattttaaatgcagctacaaatagcatttcaccatatgtgttagaggatttgatgtctgtcttgcgttaaagctgttggtcaacagat

SEQ ID NO: 9293 - DNA, 119 bp, homo sapiens
ttcaccatatgatgttagaggatttgatgtctgtcttgcgttaaagctgttggtcaacagatatgttttatgtatttaaaagaggctcttgtgtgcctttatgtgtaaaatgcatatta

SEQ ID NO: 9294 - DNA, 119 bp, homo sapiens
agatatgtttttatgtatttaaaagaggctcttgtgtgcctttatgtgtaaaatgcatattacgtagtaacatgatattgtatgtaactgacttcaaatataaaactatgcatagaaac

SEQ ID NO: 9295 - DNA, 119 bp, homo sapiens
gcctgccaaggcgcctgctcagcgactgatgcacagactgctgcagaggctgccggttttcccaacttcagagacggctttgctcattaccaggcatccttcccatgtaggcatcgaga

SEQ ID NO: 9296 - DNA, 119 bp, homo sapiens
cggttttcccaacttctagagacggctttgctcattaccaggcatccttcccatgtaggcatcgagaagaggctgagggaccctcgcaccagatttccatcccggagaccgatacgagt

SEQ ID NO: 9297 - DNA, 119 bp, homo sapiens
tgtaggcatcgagaagaaggctgagggaccctcgcaccagatttccatcccggagaccgatacgagtgctccattcctgttgccagctcctgcgccctccggactaacctcaaaaacca

SEQ ID NO: 9298 - DNA, 119 bp, homo sapiens
ctggtttgtaaatatttgaatcacattatgggattgctagacagactttcagtcttgcttggcctgaagagaaggaggttcatgttttgtgccttgggctagataatagtggcaaaacg

SEQ ID NO: 9299 - DNA, 119 bp, homo sapiens
ggattgctagacagactttcagtcttgcttggcctgaagaagaaggaggttcatgttttgtgccttgggtagataatagtggcaaaacgacgatcattaacaaacttaaaccttcaaat

SEQ ID NO: 9300 - DNA, 119 bp, homo sapiens
atattaaacaccgtcgaattccaatcttattctttgcaaataaaatggatcttagagatgcagtgacattgtaaaagtgtctcagttgctgtgtttagagaacatcaaagataaaccct

SEQ ID NO: 9301 - DNA, 119 bp, homo sapiens
ccgtcgaattccaatcttattctttgcaaataaaatggatcttagagatgcagtgacatctgtaaaagttctcagttgctgtgtttagagaacatcaaagataaaccctggcatatttg

SEQ ID NO: 9302 - DNA, 119 bp, homo sapiens
atcagatccagactgtgaagacatgaaaagataatagttggaaacctcagcaattttcaattcaaggaactatctaagacaaatagaatacattttgtaaaagatgtttatgcatcaaa

SEQ ID NO: 9303 - DNA, 119 bp, homo sapiens
caattttcaattcaaggaatctatctaagacaaatagaatacattttgtaaaagatgtttatgcatcaaaaatataattttctgcttgcatttatggactctgacctttttaagaacat

SEQ ID NO: 9304 - DNA, 119 bp, homo sapiens
aaagatgtttatgcatcaaaaaatataattttctgcttgcatttatggactctgacctttttaagaacaaggacttcaggtatgctaatttggccattaattatttaaaaactaaatat

SEQ ID NO: 9305 - DNA, 119 bp, homo sapiens
tctgacctttttaagaacataggacttcaggtatgctaatttggccattaattatttaaaaactaaatatccctcaaaagggctccctagaattatcaagttcttagtgaaggtctaca

SEQ ID NO: 9306 - DNA, 119 bp, homo sapiens
attatttaaaaactaaatattccctcaaaagggctccctagaattatcaagttcttagtgaaggtctactttgattgtacgtagaatgtttaaaagtcagttataagccatctcatccc

SEQ ID NO: 9307 - DNA, 119 bp, homo sapiens
gtttatgactttgcagtatgaattgtgcttgtgaaaaagaactttaaatatttataagggaccatgggtattaatatatattcaatttttactatgtgtcactgtcaataaaatgtaaa

SEQ ID NO: 9308 - DNA, 119 bp, homo sapiens
gactttgcagtatgaattgtgcttgtgaaaaagaactttaaatatttataagggaccatgggtaattaaatatattcaatttttactatgtgtcactgtcaataaaatgtaaaatataa

SEQ ID NO: 9309 - DNA, 119 bp, homo sapiens
ttcttgaaagtgatgtttattactaatgaaaatagtacagttgtatacataggaaaacatccttatttatcataaagactttaaaatgtttatttctaattatccaataataagactag

SEQ ID NO: 9310 - DNA, 119 bp, homo sapiens
tccttatttattcataaagactttaaaatgtttatttctaattatccaataataagactagaacatttcataaaatagtacagttaacatgaatttatttgattcaaaccctggataaa

SEQ ID NO: 9311 - DNA, 119 bp, homo sapiens
agaacatttcaataaaatagtacagttaacatgaatttatttgattcaaaccctggataaaatgtcatttaaacaaggtgaaaaagaaaagtccttcattatccatactcgatattaaa

SEQ ID NO: 9312 - DNA, 119 bp, homo sapiens
aaatgtcattataaacaaggtgaaaaagaaaagtccttcattatccatactcgatattaaacatatattctgtatgtacactattgcttaagtatcatcacatagtcctgatatatgaa

SEQ ID NO: 9313 - DNA, 119 bp, homo sapiens
aacatatattactgtatgtacactattgcttaagtatcatcacatagtcctgatatatgaaaaattatactgtattctctgataccacaattattttttctatatataatcttaatctt

SEQ ID NO: 9314 - DNA, 119 bp, homo sapiens
aaaaattatacctgtattctctgataccacaattattttttctatatataatcttaatctttaaagaagaattaaacatgagaataaaaacaccaggatgaggaatcatttaacctagg

SEQ ID NO: 9315 - DNA, 119 bp, homo sapiens
tttaaagaagtaattaaacatgagaataaaaacaccaggatgaggaatcatttaacctaggctgtagcttaactgtgtgggctgagagcagtgtttttaaccagtcttactatcctgag

SEQ ID NO: 9316 - DNA, 119 bp, homo sapiens
ggctgtagctataactgtgtgggctgagagcagtgtttttaaccagtcttactatcctgaggggagtggttaacctgtctcttattaactcatagcagtaatgtaaggttttacaaaat

SEQ ID NO: 9317 - DNA, 119 bp, homo sapiens
aggggagtggtttaacctgtctcttattaactcatagcagtaatgtaaggttttacaaaatgcatgactaaggaaatttccaggcaattctttacatcatggtaccctcccatatttcc

SEQ ID NO: 9318 - DNA, 119 bp, homo sapiens
atgcatgactcaaggaaatttccaggcaattctttacatcatggtaccctcccatatttccaccttccgcaggatatcctttgtggaatacaatgcaatggatttgagaatagtgaccg

SEQ ID NO: 9319 - DNA, 119 bp, homo sapiens
ccaccttccgccaggatatcctttgtggaatacaatgcaatggatttgagaatagtgaccgtcacatcattttctgcatttattacacaattgggagaataagctaggatcttgactca

SEQ ID NO: 9320 - DNA, 119 bp, homo sapiens
cgtcacatcatttttctgcatttattacacaattgggagaataagctaggatcttgactcactgcagctgattgtaaatgaggaaggctggccccacccattcctactgggaattgtta

SEQ ID NO: 9321 - DNA, 119 bp, homo sapiens
cactgcagctggattgtaaatgaggaaggctggccccacccattcctactgggaattgttagaaatgtttagaaaaaaataaaacaaaacaacccgtttggggtttgtgtttttgtttt

SEQ ID NO: 9322 - DNA, 119 bp, homo sapiens
tagaaatgttttagaaaaaaataaaacaaaacaacccgtttggggtttgtgtttttgtttttttgctaaacatctcaatttaatagttattctacttcattagctctttcattatggaa

SEQ ID NO: 9323 - DNA, 119 bp, homo sapiens
tttttgctaaaacatctcaatttaatagttattctacttcattagctctttcattatggaataaatatgtgtcttctcttccgttgcaaaatgaaaattcaattcagagacagaaagat

SEQ ID NO: 9324 - DNA, 119 bp, homo sapiens
aataaatatgttgtcttctcttccgttgcaaaatgaaaattcaattcagagacagaaagatgtcaaagtcccattgctgaaaacagaaataacataaagctaccaaaaaaatcatgaaa

SEQ ID NO: 9325 - DNA, 119 bp, homo sapiens
atgtcaaagtacccattgctgaaaacagaaataacataaagctaccaaaaaaatcatgaaatggaagtcaacttataaaacaagcatacaaatgaataattagttcaggtatcatactt

SEQ ID NO: 9326 - DNA, 119 bp, homo sapiens
aatggaagtcaaacttataaaacaagcatacaaatgaataattagttcaggtatcatacttcagccaactacttttagagcctacaaagaatatttgtgcagtttccagctttttgtta

SEQ ID NO: 9327 - DNA, 119 bp, homo sapiens
ttcagccaacctacttttagagcctacaaagaatatttgtgcagtttccagctttttgttagaggtaatttaagtcagagttgttcaaacacattacaatttagtgtggcaaaaaagag

SEQ ID NO: 9328 - DNA, 119 bp, homo sapiens
tagaggtaatattaagtcagagttgttcaaacacattacaatttagtgtggcaaaaaagagagaaaagataaaaaagagaaagtggggaggagccaacccatggtgacagataatgcag

SEQ ID NO: 9329 - DNA, 119 bp, homo sapiens
agagaaaagaataaaaaagagaaagtggggaggagccaacccatggtgacagataatgcagaagaagaaacagaaggtgagaataaaatcaggtaaagcctgcacttgttttattatat

SEQ ID NO: 9330 - DNA, 119 bp, homo sapiens
taataatagtgataaaaatgggacttcaggccacataaacgtgaacaaacacccttaaaccattgcaatgtgaaaatggagccctatttatcaaataaattcccctttatccataaccc

SEQ ID NO: 9331 - DNA, 119 bp, homo sapiens
ccattgcaatggtgaaaatggagccctatttatcaaataaattcccctttatccataacccataaaaaagatagtgtatataattcaattataaaggctacatctgtaaaacaccacag

SEQ ID NO: 9332 - DNA, 119 bp, homo sapiens
ccataaaaaaggatagtgtatataattcaattataaaggctacatctgtaaaacaccacagtatcttacaccttttataataacatttttaaaatggttatttaccatgcattttattg

SEQ ID NO: 9333 - DNA, 119 bp, homo sapiens
agtatcttacaaccttttataataacatttttaaaatggttatttaccatgcattttattgctaactgcttttagtattttcacataaggtgatagtcttgttgaatattatattgcta

SEQ ID NO: 9334 - DNA, 119 bp, homo sapiens
tgctaactgcattttagtattttcacataaggtgatagtcttgttgaatattatattgctaggttaagagaacgttctaatactcagaaaatttcattcctcaattgtgcagtgtaaat

SEQ ID NO: 9335 - DNA, 119 bp, homo sapiens
taggttaagaagaacgttctaatactcagaaaatttcattcctcaattgtgcagtgtaaatgacagttcgcctaagacttttaaatgatgacatgccattaaatcaccttcgaggaagg

SEQ ID NO: 9336 - DNA, 119 bp, homo sapiens
atgacagttcagcctaagacttttaaatgatgacatgccattaaatcaccttcgaggaaggtcttttagaagaagctctttaggggtagttttttccatcaaactaatagctcctttag

SEQ ID NO: 9337 - DNA, 119 bp, homo sapiens
ggtcttttagaaagaagctctttaggggtagttttttccatcaaactaatagctcctttagtgctttgcttgtacatgagtggatggatctttgctgggcaaactgtgttcttcaacct

SEQ ID NO: 9338 - DNA, 119 bp, homo sapiens
agtgctttgctttgtacatgagtggatggatctttgctgggcaaactgtgttcttcaacctttcaacagggttcagctatagcaaaggcaggacaaaagttgtattcctcaactgaggc

SEQ ID NO: 9339 - DNA, 119 bp, homo sapiens
ctttcaacagtggttcagctatagcaaaggcaggacaaaagttgtattcctcaactgaggcctcctgtttttccctgatagttgaggggctcctttactcttccatttcattggtgtgg

SEQ ID NO: 9340 - DNA, 119 bp, homo sapiens
gcctcctgttctttccctgatagttgaggggctcctttactcttccatttcattggtgtggagcagacatcatgaagagctaagtgttttgctcttgcatgaaaaggtcacgcaaaagg

SEQ ID NO: 9341 - DNA, 119 bp, homo sapiens
ggagcagacattcatgaagagctaagtgttttgctcttgcatgaaaaggtcacgcaaaaggaaatcagaatggtgacgtgtgtcagaattcccaaattcccacttcactgcttagtttg

SEQ ID NO: 9342 - DNA, 119 bp, homo sapiens
ggaaatcagagatggtgacgtgtgtcagaattcccaaattcccacttcactgcttagtttgtggaaaacacaaccctcctctggctcagttcgtgcttctcctaagtgttctgcatggt

SEQ ID NO: 9343 - DNA, 119 bp, homo sapiens
tgtggaaaacaacaaccctcctctggctcagttcgtgcttctcctaagtgttctgcatggtgacctgcctagagggatttgtgtccatctggaattcttccagcaagcacacattcaaa

SEQ ID NO: 9344 - DNA, 119 bp, homo sapiens
gtgacctgccctagagggatttgtgtccatctggaattcttccagcaagcacacattcaaagagttgcatctaaggttaatttgtgataaaatacactttcatctaacacgtagtatag

SEQ ID NO: 9345 - DNA, 119 bp, homo sapiens
aagagttgcattctaaggttaatttgtgataaaatacactttcatctaacacgtagtataggaaaacagttacagtcttaaacagaaaactttgaaagttttataaataaaactaagca

SEQ ID NO: 9346 - DNA, 119 bp, homo sapiens
aggaaaacagtttacagtcttaaacagaaaactttgaaagttttataaataaaactaagcacttagtaggacaaatatcattaacacttaaaatgtcttaaaggtaattatcaattact

SEQ ID NO: 9347 - DNA, 119 bp, homo sapiens
cacttagtagtgacaaatatcattaacacttaaaatgtcttaaaggtaattatcaattacttttcaaatggcccagtggaaagtgtctaattatccaatattaagactagaacatgtca

SEQ ID NO: 9348 - DNA, 119 bp, homo sapiens
cttttcaaatgggcccagtggaaagtgtctaattatccaatattaagactagaacatgtcaataaaatatggaaagtgtacctatactgaactgttagaggatccattatgtgagtagg

SEQ ID NO: 9349 - DNA, 119 bp, homo sapiens
caataaaatagtggaaagtgtacctatactgaactgttagaggatccattatgtgagtagggaatgaaagaaatgctaggataagggagccaccttggcgcgggcgcacatgcgcatta

SEQ ID NO: 9350 - DNA, 119 bp, homo sapiens
acctgttatccatacatactttgcaaaatacctggccatcttcaaggctttcactagctttactgtggctgcactgagcccagatatttagtttccggtgtcctcataatgagcagaat

SEQ ID NO: 9351 - DNA, 119 bp, homo sapiens
ctagctttactgtggcatgcactgagcccagatatttagtttccggtgtcctcataatgagcagaattgcagtcatcaagttgagaaaaaaaaaagtgaaccaagtattttatcttatg

SEQ ID NO: 9352 - DNA, 119 bp, homo sapiens
ataatgagcagaattggcagtcatcaagttgagaaaaaaaaaagtgaaccaagtattttatcttatggtagtttatactggttatttatatctggtcagaaataaatcaaaatgttcag

SEQ ID NO: 9353 - DNA, 119 bp, homo sapiens
tattttatcttatggtcagtttatactggttatttatatctggtcagaaataaatcaaaatgttcagaatggttttggcaagcatgaagacatctagcataaagtatctgcattaataa

SEQ ID NO: 9354 - DNA, 119 bp, homo sapiens
atcaaaatgttcagaattggttttggcaagcatgaagacatctagcataaagtatctgcattaataatacctattgcatatgcaatttaatatcatgatgatgatgatttggcctcctc

SEQ ID NO: 9355 - DNA, 119 bp, homo sapiens
atctgcattaataataacctattgcatatgcaatttaatatcatgatgatgatgatttggcctcctccttccccctccaaagcaacccattcaaaaaaaacactagggggaaagaggaa

SEQ ID NO: 9356 - DNA, 119 bp, homo sapiens
gatttggcctcctcctctccccctccaaagcaacccattcaaaaaaaacactagggggaaagaggaaaattccattttctgtcaaaatttatataaggtatggacttcctatctgttca

SEQ ID NO: 9357 - DNA, 119 bp, homo sapiens
gctttgccctgttttgtataagcaggagttaatttagacaggaggtattacacaaaggagaagcaatgaaatgagctcatctatattatgtgaggtagttaagtgctgttttccaaatt

SEQ ID NO: 9358 - DNA, 119 bp, homo sapiens
tacacaaaggagaagcaatgaaaatgagctcatctatattatgtgaggtagttaagtgctgttttccaattaatacaccaggaactagaggagagacaggatttgcccaagacatcttt

SEQ ID NO: 9359 - DNA, 119 bp, homo sapiens
tagttaagtgctgttttccaaattaatacaccaggaactagaggagagacaggatttgcccaagacatcttagatttcagaagcaatcagggaacctcagtccagcaatcaagaaacaa

SEQ ID NO: 9360 - DNA, 119 bp, homo sapiens
acaggatttgcccaagacatctttagatttcagaagcaatcagggaacctcagtccagcaatcaagaaaaaaatatattctcagcactggggtcttgacccgacactcactccctccct

SEQ ID NO: 9361 - DNA, 119 bp, homo sapiens
ctcagtccagcaatcaagaaacaaaatatattctcagcactggggtcttgacccgacactcactccctcctgcccatgtgattaaatttgtctttagattaatgggaatcttctaaact

SEQ ID NO: 9362 - DNA, 119 bp, homo sapiens
gcattcatcctgaaaactaagaaaaaaaggatattaacatagttaacataacaataacatggtcttgataatatgctcaggaaatgcaagacactgatagaagcataaaaatacaaccc

SEQ ID NO: 9363 - DNA, 119 bp, homo sapiens
atggtcttgattaatatgctcaggaaatgcaagacactgatagaagcataaaaatacaacccgaattcttcctgcagcaaaaaagtttgctttttctttagcagtttgatcaaaaaaaa

SEQ ID NO: 9364 - DNA, 119 bp, homo sapiens
acccgaattctatcctgcagcaaaaaagtttgctttttctttagcagtttgatcaaaaaaaagaaagaatttatttagatgaatgcctgattataaactatccattaagactatttcaa

SEQ ID NO: 9365 - DNA, 119 bp, homo sapiens
aaaagaaagaattttatttagatgaatgcctgattataaactatccattaagactatttcaaaggtttcccttctacccaacaataacaaatatgctccaaaatattcccttactaagc

SEQ ID NO: 9366 - DNA, 119 bp, homo sapiens
tcaaaggtttccccttctacccaacaataacaaatatgctccaaaatattcccttactaagccagactttccatggaagagtctcaccttattttcctattgaaaaacccgaggcacag

SEQ ID NO: 9367 - DNA, 119 bp, homo sapiens
aagccagacttctccatggaagagtctcaccttattttcctattgaaaaacccgaggcacagttcttagagacacccccagtgattcagaagcagacagcaactgcagccctaaatcct

SEQ ID NO: 9368 - DNA, 119 bp, homo sapiens
acagttcttaggagacacccccagtgattcagaagcagacagcaactgcagccctaaatcctaggtccactttttcttatagaatactttccagagtttacgtagttttcaatttattt

SEQ ID NO: 9369 - DNA, 119 bp, homo sapiens
tcctaggtccagctttttcttatagaatactttccagagtttacgtagttttcaatttatttaaacacacattcagtctttatagaaataaaaatggtaacatctcttactacattctg

SEQ ID NO: 9370 - DNA, 119 bp, homo sapiens
atttaaacacagcattcagtctttatagaaataaaaatggtaacatctcttactacattctgaaaacttagctgaaaaaaaaacagtgtgccctatatttaattttttcatagaaaact

SEQ ID NO: 9371 - DNA, 119 bp, homo sapiens
tctgaaaacttaagctgaaaaaaaaacagtgtgccctatatttaattttttcatagaaaactcttcttcaacagtgtttaaaatccaggttaattatatgacataagtaacaagtaatc

SEQ ID NO: 9372 - DNA, 119 bp, homo sapiens
aactcttcttccaacagtgtttaaaatccaggttaattatatgacataagtaacaagtaatctccatctctccaggcttctaatcagtttcagaacaggagttttggttaaacctcttc

SEQ ID NO: 9373 - DNA, 119 bp, homo sapiens
ctctctggaaagctcactgctctcatacatctgtctgatttcttctctgctcagcccaccaatcacgtcccgctagcagagctgtagaagggatgctgaggatagggtccctcatactt

SEQ ID NO: 9374 - DNA, 119 bp, homo sapiens
tctgctcagcccaccaatcacgtctccgctagcagagctgtagaagggatgctgaggatagggtccctctacttctcacatccagccctgtgactttcatacacggggttgtacttcac

SEQ ID NO: 9375 - DNA, 119 bp, homo sapiens
gggatgctgaggatagggtccctcatacttctcacatccagccctgtgactttcatacacggggttgtattcacagcattctcaatagatgagaggctgtcaggctgcctgctggagcc

SEQ ID NO: 9376 - DNA, 119 bp, homo sapiens
ctgaagggactctctctttcactcctgtcatggtgtgcttggagagtcctgatgaagaagtagatgatacagaaaagatgacaagaagtccaaccacggaggcaatagtgatgcctatg

SEQ ID NO: 9377 - DNA, 119 bp, homo sapiens
gtgcttggagagtcctgatgaagaagtagatgatagcagaaaagatgacaagaagtccaaccacggaggaatagtgatgcctatgatcacgggctcagacacaaattcctcacagtgct

SEQ ID NO: 9378 - DNA, 119 bp, homo sapiens
agcagaaaagatgacaagaagtccaaccacggaggcaatagtgatgcctatgatcacgggctcagacacaattcctcacagtgcttgcctcggtaccaccagttctcacccacccggca

SEQ ID NO: 9379 - DNA, 119 bp, homo sapiens
ctacaaatggccccgtgcccaggcataatgtcacactttccatcattcaagcagaagtcaggctgtaggcacagagactctgacagggccgttcttccacactcaggtatccagggaag

SEQ ID NO: 9380 - DNA, 119 bp, homo sapiens
ttcaagcagaagtcaggctgtaggtcacagagactctgacagggccgttcttccacactcaggtatccaggaagcatctgcactttgcttctccactccaggggttgaccagacactct

SEQ ID NO: 9381 - DNA, 119 bp, homo sapiens
cgttcttccacactcaggtatccagggaagcatctgcactttgcttctccactccaggggttgaccagaactctgaaaattcattacaggcctgaaacttgcaagggttggcttcatca

SEQ ID NO: 9382 - DNA, 119 bp, homo sapiens
ctgattccacatcaagagagtatttatcaatagccaagttcatggtattgtaggcagtggtacaaaagtttccagaatcatgtacaccgcattgttgacgttaggagggacagaattgg

SEQ ID NO: 9383 - DNA, 119 bp, homo sapiens
taggcagtggtacaaaagtcttccagaatcatgtacaccgcattgttgacgttaggagggacagaattgcaaacttcattcgactgttcaccacaatgctgccatttctgaagttgagg

SEQ ID NO: 9384 - DNA, 119 bp, homo sapiens
gttaggagggacagaattggcaaacttcattcgactgttcaccacaatgctgccatttctgaagttgagatttctaagttctggaaccccgtgagatttgactggagatagggaaccag

SEQ ID NO: 9385 - DNA, 119 bp, homo sapiens
caattctaagaatctttgctccagggctttatactccaaggagtttttattaaacagatcttctgaaaaatcatgttagtcactcggaggctgaagaaaaccaccaaagctcctgaagt

SEQ ID NO: 9386 - DNA, 119 bp, homo sapiens
cttctgaaaacatcatgttagtcactcggaggctgaagaaaaccaccaaagctcctgaagtctgggtatactcaagtcatctcctccttctgtgggccaagccacactaaccatctctg

SEQ ID NO: 9387 - DNA, 119 bp, homo sapiens
gtctgggtataactcaagtcatctcctccttctgtgggccaagccacactaaccatctctgtggagtgacacttgttgacatttccacataactaccaaccttgccattttgctcttgg

SEQ ID NO: 9388 - DNA, 119 bp, homo sapiens
tgtggagtgaacacttgttgacatttccacataactaccaaccttgccattttgctcttggacttgctcggctgatagtaatctgtgcctatccggtccagttctaacgaaatatcctg

SEQ ID NO: 9389 - DNA, 119 bp, homo sapiens
ggacttgctcaggctgatagtaatctgtgcctatccggtccagttctaacgaaatatcctgtacacccaaattacttcatcctctagcagggtggagattgtggttggaggcaatttgg

SEQ ID NO: 9390 - DNA, 119 bp, homo sapiens
tgtacacccataattacttcatcctctagcagggtggagattgtggttggaggcaatttggtagactgttcacagataaccagagcctgtcagcactctgtggtgtacttgccaatatg

SEQ ID NO: 9391 - DNA, 119 bp, homo sapiens
ggtagactgtgtcacagataaccagagcctgtcagcactctgtggtgtacttgccaatatgtctctggaaatttctctagggaagaagttcttgtccaaactctctctgattctggcaa

SEQ ID NO: 9392 - DNA, 119 bp, homo sapiens
tgtctctggacaatttctctagggaagaagttcttgtccaaactctctctgattctggcaatatagtcccaaagtttgcatatctggctttaccattgaaacctcactgtcaaaccatt

SEQ ID NO: 9393 - DNA, 119 bp, homo sapiens
aatatagtccacaaagtttgcatatctggctttaccattgaaacctcactgtcaaaccattcatagttgatgactcagtaatttgttccatatcctcccttaggatggcatctgcctga

SEQ ID NO: 9394 - DNA, 119 bp, homo sapiens
ttcatagttggatgactcagtaatttgttccatatcctcccttaggatggcatctgcctgatctgattttcagtagaggcagagattgctacagatgtcagtataagaggtgctttggt

SEQ ID NO: 9395 - DNA, 119 bp, homo sapiens
gatctgatttatcagtagaggcagagattgctacagatgtcagtataagaggtgctttggtaactgagtatcatcaacaccaggtacttctgatatgtgcttggggagggttagagacg

SEQ ID NO: 9396 - DNA, 119 bp, homo sapiens
gtaactgagtaatcatcaacaccaggtacttctgatatgtgcttggggagggttagagacgcagattcactgcagtatctgcgaagatgggcacagcaggcccactaagaggctcttcc

SEQ ID NO: 9397 - DNA, 119 bp, homo sapiens
cgcagattcagctgcagtatctgcgaagatgggcacagcaggcccactaagaggctcttcctctggaaatgtgtggatctgtcatcatgttcatattttgagtgcttactaatttggtc

SEQ ID NO: 9398 - DNA, 119 bp, homo sapiens
cctctggaaagtgtgtggatctgtcatcatgttcatattttgagtgcttactaatttggtctgtggaatcattttgtcaactaaaactagtttcttgtcttcaatctcagctggcaaaa

SEQ ID NO: 9399 - DNA, 119 bp, homo sapiens
tctgtggaatccattttgtcaactaaaactagtttcttgtcttcaatctcagctggcaaaagtgaatcacatcttcaagccacggcttggacagtggttcagcgctcttctctgatgaa

SEQ ID NO: 9400 - DNA, 119 bp, homo sapiens
aagtgaatcatcatcttcaagccacggcttggacagtggttcagcgctcttctctgatgaagtctcactcatggccaagtaatcagatctaccttttgcccagaccctgaacctaaacc

SEQ ID NO: 9401 - DNA, 119 bp, homo sapiens
aagtctcactccatggccaagtaatcagatctaccttttgcccagaccctgaacctaaaccaccgtcaatattaactctttttccatggatgcatctggcaggaaagggctcactttta

SEQ ID NO: 9402 - DNA, 119 bp, homo sapiens
ccaccgtcaaatattaactctttttccatggatgcatctggcaggaaagggctcacttttaattggtcttgactttggaggtcaaggagtccaagccaaaaggtatagaagaggtcaga

SEQ ID NO: 9403 - DNA, 119 bp, homo sapiens
taattggtctttgactttggaggtcaaggagtccaagccaaaaggtatagaagaggtcagatatggtgagatgttaaggacacatcagagtcttccatggatggtattgtttcttttgg

SEQ ID NO: 9404 - DNA, 119 bp, homo sapiens
gatatggtgaagatgttaaggacacatcagagtcttccatggatggtattgtttcttttggcacaggttagtgaatgaacttgaaggcaatgaatcaatagaaagaaaatcttctgact

SEQ ID NO: 9405 - DNA, 119 bp, homo sapiens
catcttctaccaagtgagatccagaagtcctttcctcagaagccacaggcaagccagtctgaagcactgcggggtgacagaatgaagagtcaagctgctaacctctaaaacctctgggg

SEQ ID NO: 9406 - DNA, 119 bp, homo sapiens
aggcaagccagtctgaagcactgccggggtgacagaatgaagagtcaagctgctaacctctaaaacctcggggaagagctgaggcccatcttcgagggaaaggctaatttgtgtgtaga

SEQ ID NO: 9407 - DNA, 119 bp, homo sapiens
aagctgctaacctctaaaacctctggggaagagctgaggcccatcttcgagggaaaggctaatttgtgttagacactaaatcacccaaaggactttctgaccagagttccctgccagtg

SEQ ID NO: 9408 - DNA, 119 bp, homo sapiens
tcgagggaaaggctaatttgtgtgtagacactaaatcacccaaaggactttctgaccagagttccctgcagtggctgagggaggaccagagctgaaatcaagtggtggaatactgctgg

SEQ ID NO: 9409 - DNA, 119 bp, homo sapiens
actttctgaccagagttccctgccagtggctgagggaggaccagagctgaaatcaagtggtggaatactctggtgatggattcatctgctgagggccatgcagcttgaaaggtattatc

SEQ ID NO: 9410 - DNA, 119 bp, homo sapiens
cattgataagctgcagggaatcaggatctggattcaaggaagagttccccagcaaaaaattctgctgcatgtctcagcaatataatctctgaagttactgattgtataaacaacagtgg

SEQ ID NO: 9411 - DNA, 119 bp, homo sapiens
gagttccccagcaaaaaattctgctgcaatgtctcagcaatataatctctgaagttactgattgtataacaacagtgggtttatcatccagttccacaaggccatggttttccaccttg

SEQ ID NO: 9412 - DNA, 119 bp, homo sapiens
ataatctctgaagttactgattgtataaacaacagtgggtttatcatccagttccacaaggccatggtttccaccttgttggagtgaaggctaatgaggtcccaggtggtattgctgat

SEQ ID NO: 9413 - DNA, 119 bp, homo sapiens
tatcatccagttccacaaggccatggttttccaccttgttggagtgaaggctaatgaggtcccaggtggattgctgatggcctcaccattgaaggtaactgcatagtaaacatctacgc

SEQ ID NO: 9414 - DNA, 119 bp, homo sapiens
ctctgaaataaattcttcttcaaggtgctggtggtgaaagctggaggaatcctgtagttcttccctgtatgcttccccaaaaggtggatactgaattctgcaatctgttcacctgctgg

SEQ ID NO: 9415 - DNA, 119 bp, homo sapiens
ggaggaatcctgtagttcttccctgtactgcttccccaaaaggtggatactgaattctgcaatctgttccctgctggttttgtggcttcttctatcacattctcaatttcattgctaat

SEQ ID NO: 9416 - DNA, 119 bp, homo sapiens
cttcatgattaagcttctatgttccacagattcactaaaatttgtgcccatttcaaatatacttgtgacccatcctcacacaaattcatccagtaatgatattcctcacgcccaggaag

SEQ ID NO: 9417 - DNA, 119 bp, homo sapiens
ccatttcaaatatacttgtgactccatcctcacacaaattcatccagtaatgatattcctcacgcccagaagtcgatcccaaaaagtcctgaaggcttcccagacagcttcctgacaca

SEQ ID NO: 9418 - DNA, 119 bp, homo sapiens
ctcggactttaaaatacttcacatgatttgccacagcctctgcaacactttcatctgggcagattttcatccattaggaaacagaatagatctccgccttctgattaaccactgtcttt

SEQ ID NO: 9419 - DNA, 119 bp, homo sapiens
aacactttcatctgggcagattttcactccattaggaaacagaatagatctccgccttctgattaaccatgtctttcagtttctctgcggtccagaggctgtttctttttggtagctag

SEQ ID NO: 9420 - DNA, 119 bp, homo sapiens
atagatctccgccttctgattaaccactgtctttcagtttctctgcggtccagaggctgtttctttttgtagctagagaaaggtctgttgattcttcaggcaggagaaaagaaactgca

SEQ ID NO: 9421 - DNA, 119 bp, homo sapiens
tgcggtccagaggctgtttctttttggtagctagagaaaggtctgttgattcttcaggcaggagaaaagaactgcactcttgggttcttggatctcctctatagataagtaggtttgtg

SEQ ID NO: 9422 - DNA, 119 bp, homo sapiens
ctgttaatgatggaaagtctccttctatcaggacaaatatcaaaatacccagagaaatcttcccaaaaaaggaaacataatcatttgggccaaaaccaaaggaatgaggagaggacaga

SEQ ID NO: 9423 - DNA, 119 bp, homo sapiens
atcttcccaaaaagaggaaacataatcatttgggccaaaaccaaaggaatgaggagaggacagaatcctaattgagtgtccaaatccttgaaacttccaataacaaagagttataggaa

SEQ ID NO: 9424 - DNA, 119 bp, homo sapiens
aggacagaatccttaattgagtgtccaaatccttgaaacttccaataacaaagagttataggaaagaccaacatttaaaagtctatgtttgagaatgaacaaccacttcaaaaccatta

SEQ ID NO: 9425 - DNA, 119 bp, homo sapiens
tataggaaagacctaacatttaaaagtctatgtttgagaatgaacaaccacttcaaaaccattataaatagcggaaagaaaaatggttgtcctttcaaagtagctctcacttcttttct

SEQ ID NO: 9426 - DNA, 119 bp, homo sapiens
ttttttggtatgcagttccttttagaaataacaaaatagaaaatgagttcaaccattgctttatagaaacagggaaatgtccttcaattgagcatttcttttcctcacattaataaagt

SEQ ID NO: 9427 - DNA, 119 bp, homo sapiens
tcaaccattgctttatagaaaacagggaaatgtccttcaattgagcatttcttttcctcacattaataagtctgcacacacctcctatgttaacaggaaataggaatttcagataacaa

SEQ ID NO: 9428 - DNA, 119 bp, homo sapiens
ttcttttcctcacattaataaagtctgcacacacctcctatgttaacaggaaataggaatttcagataaaaatgtgaaaagttgaaataatcctgacaaatttttcaaatcaattgttg

SEQ ID NO: 9429 - DNA, 119 bp, homo sapiens
gttggaaaacagaagaaaccaaagaaaaacacacttcatgtaaacaacagaacactatgctaagtttagtctacaataaaagccacacaaatctgtgtgtggctaacgatgaggataca

SEQ ID NO: 9430 - DNA, 119 bp, homo sapiens
ctaagtttagttctacaataaaagccacacaaatctgtgtgtggctaacgatgaggatacagagaaaagaaaagaaaattgagagagaggtagaatataactctttgcttactgcaggt

SEQ ID NO: 9431 - DNA, 119 bp, homo sapiens
cagagaaaagaaaaagaaaattgagagagaggtagaatataactctttgcttactgcaggtcttgtctgaggagaacctctggaaaataataagttaggatggccctagtctaccagca

SEQ ID NO: 9432 - DNA, 119 bp, homo sapiens
gtcttgtctggaggagaacctctggaaaataataagttaggatggccctagtctaccagcatgccagagcagaaccaatataatctcctaaaatatgagatttgtgtcaattcttaggg

SEQ ID NO: 9433 - DNA, 119 bp, homo sapiens
catgccagaggcagaaccaatataatctcctaaaatatgagatttgtgtcaattcttagggttactcacaaggtggtttggttccaccaatgaataaattttctaattctatactaagc

SEQ ID NO: 9434 - DNA, 119 bp, homo sapiens
ggttactcactaaggtggtttggttccaccaatgaataaattttctaattctatactaagctcatccttggaacatcaatctcatctccagattcttctccaagcttcttccaccaggg

SEQ ID NO: 9435 - DNA, 119 bp, homo sapiens
gctcatcctttggaacatcaatctcatctccagattcttctccaagcttcttccaccagggtgcttgtagtgcttcagggttgtgagatgggcctgcttggccttggctgccacaggcc

SEQ ID NO: 9436 - DNA, 119 bp, homo sapiens
ggtgcttgtatgtgcttcagggttgtgagatgggcctgcttggccttggctgccacaggcctggatctattaggaagagctcaggttctttcccttctgcctccttcagacttggtgcc

SEQ ID NO: 9437 - DNA, 119 bp, homo sapiens
tcattagctgttcaacgttggtgctgatctgtgctatcagagcttctctgtgctgctgggctcgctctttagggccctgcccataaagtagtgttgcagtcgttcttgagcttgggcat

SEQ ID NO: 9438 - DNA, 119 bp, homo sapiens
cagagcttctctgtgctgctgggctcgctcttctagggccctgcccataaagtagtgttgcagtcgttctgagcttgggcatggagctccctactgaccacatctgacattggagagcc

SEQ ID NO: 9439 - DNA, 119 bp, homo sapiens
caaatgtcttctgacatagtcatccactcgtttcttcagttcaactcggcgtgcatcagtgagttcttgagtcctcgccaaggagcaaatagtttctttttcttacggcacttcgctag

SEQ ID NO: 9440 - DNA, 119 bp, homo sapiens
gacatagtcatccactcgtttcttcagttcaactcggcgtgcatcagtgagttcttggagtcctcgccaggagcaaatagtttctttttcttacggcacttcgctaggaatttaagcgc

SEQ ID NO: 9441 - DNA, 119 bp, homo sapiens
tgctctttgaagtgtgacagctgctttatactctatgagagactgcctctgttggtgaaaatttttccttccctgtaccctctccaatgtttctggataatcagtgctgatttctcttc

SEQ ID NO: 9442 - DNA, 119 bp, homo sapiens
actctatgagagactgcctctgttggtgaaaatttttcctttccctgtaccctctccaatgtttctggaaatcagtgctgatttctcttccatttcccgatagtgtttctccacctgac

SEQ ID NO: 9443 - DNA, 119 bp, homo sapiens
ctggatgaactatttcgagcatactcagctgcaattctcgggaaagtctcatggctctctgtctttgaattgcaattgtaatttgaggtcctcttcttccttctgcctatttatctcca

SEQ ID NO: 9444 - DNA, 119 bp, homo sapiens
ctcagctgcaattctcgggaaagtctcatggctctctgtctttgaagttgcaattgtaatttgaggtcccttcttccttctgcctatttatctccagcaacatctttgatcgtttggat

SEQ ID NO: 9445 - DNA, 119 bp, homo sapiens
ctttgtagcaggtactttgtctcagtaaaatcaaaatttcctgatgggattcagccatcaacagtaggattttgtagcagtacttcttataactggactaggagttgaaaaaagcttga

SEQ ID NO: 9446 - DNA, 119 bp, homo sapiens
aacagtaggagttttgtagcagtacttcttataactggactaggagttgaaaaaagcttgaaaataactcatctaaaattgaatacagggcttttcttcctattctgagtaaatcacca

SEQ ID NO: 9447 - DNA, 119 bp, homo sapiens
cttagctgcattgataaaacatgtttgtaattgtctccccaaaactagaaaattttctgcagctgatggagtaattcattgtaaaattcctctgcatcttctcctggctccaagcccac

SEQ ID NO: 9448 - DNA, 119 bp, homo sapiens
ttgataaaacatgtttgtaattgtctccccaaaactagaaaattttctgcagctgatggaagtaattcatgtaaaattcctctgcatcttctcctggctccaagcccacacagcaatgg

SEQ ID NO: 9449 - DNA, 119 bp, homo sapiens
cttaatatctgtgtaagctgggaaattgtagtccaaccaccctggattcgagaataatcttgactgaggccaagaggcaatattgaatgagatcataacaatatatatcttgtttgatt

SEQ ID NO: 9450 - DNA, 119 bp, homo sapiens
ggattcgagaataatcttgactgaggaccaagaggcaatattgaatgagatcataacaatatatatctttttgattttcttcaactctgagcttcctaaaggtgtgatgtttattattt

SEQ ID NO: 9451 - DNA, 119 bp, homo sapiens
agagtcatccagctggagccctgagtggctgagctcaggccttcgcagcattcttgggtgggagcagcccgggtcagccacaagggccacagccatgaatggcacagaaggccctaact

SEQ ID NO: 9452 - DNA, 119 bp, homo sapiens
ggtgggagcagccacgggtcagccacaagggccacagccatgaatggcacagaaggccctaacttctactgcccttctccaatgcgacgggtgtggtacgcagccccttcgagtaccca

SEQ ID NO: 9453 - DNA, 119 bp, homo sapiens
ccctaacttctacgtgcccttctccaatgcgacgggtgtggtacgcagccccttcgagtacccacagtatacctggctgagccatggcagttctccatgctggccgcctacatgtttct

SEQ ID NO: 9454 - DNA, 119 bp, homo sapiens
agtacccacagtactacctggctgagccatggcagttctccatgctggccgcctacatgtttctgctgacgtgctgggcttccccatcaacttcctcacgctctacgtcaccgtccagc

SEQ ID NO: 9455 - DNA, 119 bp, homo sapiens
atgtttctgctgatcgtgctgggcttccccatcaacttcctcacgctctacgtcaccgtccagcacaagagctgcgcacgcctctcaactacatcctgctcaacctagccgtggctgac

SEQ ID NO: 9456 - DNA, 119 bp, homo sapiens
cgtccagcacaagaagctgcgcacgcctctcaactacatcctgctcaacctagccgtggctgacctcttatggtcctaggtggcttcaccagcaccctctacacctctctgcatggata

SEQ ID NO: 9457 - DNA, 119 bp, homo sapiens
tggctgacctcttcatggtcctaggtggcttcaccagcaccctctacacctctctgcatggatacttcgcttcgggcccacaggatgcaatttggagggcttctttgccaccctgggcg

SEQ ID NO: 9458 - DNA, 119 bp, homo sapiens
gtgaaattgccctgtggtccttggtggtcctggccatcgagcggtacgtggtggtgtgtaagcccatgacaacttccgcttcggggagaaccatgccatcatgggcgttgccttcacct

SEQ ID NO: 9459 - DNA, 119 bp, homo sapiens
ggtggtgtgtaagcccatgagcaacttccgcttcggggagaaccatgccatcatgggcgttgccttcactgggtcatggcgctggcctgcgccgcacccccactcgccggctggtccag

SEQ ID NO: 9460 - DNA, 119 bp, homo sapiens
gtacatccccgagggcctgcagtgctcgtgtggaatcgactactacacgctcaagccggaggtcaacaagagtcttttgtcatctacatgttcgtggtccacttcaccatccccatgat

SEQ ID NO: 9461 - DNA, 119 bp, homo sapiens
acgctcaagccggaggtcaacaacgagtcttttgtcatctacatgttcgtggtccacttcaccatcccctgattatcatctttttctgctatgggcagctcgtcttcaccgtcaaggag

SEQ ID NO: 9462 - DNA, 119 bp, homo sapiens
gccgctgcccagcagcaggagtcagccaccacacagaaggcagagaaggaggtcacccgcatggtcatctcatggtcatcgctttcctgatctgctgggtgccctacgccagcgtggca

SEQ ID NO: 9463 - DNA, 119 bp, homo sapiens
atggtcatcatcatggtcatcgctttcctgatctgctgggtgccctacgccagcgtggcattctacatctcacccaccagggctccaacttcggtcccatcttcatgaccatcccagcg

SEQ ID NO: 9464 - DNA, 119 bp, homo sapiens
ttctacatcttcacccaccagggctccaacttcggtcccatcttcatgaccatcccagcgttctttgccagagcgccgccatctacaaccctgtcatctatatcatgatgaacaagcag

SEQ ID NO: 9465 - DNA, 119 bp, homo sapiens
ttccggaactgcatgctcaccaccatctgctgcggcaagaacccactgggtgacgatgaggcctctgctccgtgtccaagacggagacgagccaggtggccccggcctaagacctgcct

SEQ ID NO: 9466 - DNA, 119 bp, homo sapiens
atgaggcctctgctaccgtgtccaagacggagacgagccaggtggccccggcctaagacctgcctaggatctgtggccgactataggcgtctcccatcccctacaccttcccccagcca

SEQ ID NO: 9467 - DNA, 119 bp, homo sapiens
agacctgcctaggactctgtggccgactataggcgtctcccatcccctacaccttcccccagccacagcatcccaccaggagcagcgcctgtgcagaatgaacgaagtcacataggctc

SEQ ID NO: 9468 - DNA, 119 bp, homo sapiens
gaggctcctcactcacctgggacagcctgagaagggacatccaccaagacctactgatctggagtcccagttccccaaggccagcgggatgtgtgcccctcctcctcccaactcatctt

SEQ ID NO: 9469 - DNA, 119 bp, homo sapiens
actgatctggagtcccacgttccccaaggccagcgggatgtgtgcccctcctcctcccaactcatctttaggaacacgaggattcttgctttctggaaaagtgtcccagcttagggata

SEQ ID NO: 9470 - DNA, 119 bp, homo sapiens
tctagttaatgttgtgaataacatcaattaatgtaactagttaattactatgattatcacctcctgatatgaacattttgagattgggcattcagatgatggggtttcacccaaccttg

SEQ ID NO: 9471 - DNA, 119 bp, homo sapiens
cacctcctgatagtgaacattttgagattgggcattcagatgatggggtttcacccaaccttggggcagtttttaaaaattagctaggcatcaaggccagaccagggctgggggttggg

SEQ ID NO: 9472 - DNA, 119 bp, homo sapiens
accttggggcaggtttttaaaaattagctaggcatcaaggccagaccagggctgggggttgggctgtagcagggacagtcacaggaatgcagaatgcagtcatcagacctgaaaaaaca

SEQ ID NO: 9473 - DNA, 119 bp, homo sapiens
gttgggctgtaggcagggacagtcacaggaatgcagaatgcagtcatcagacctgaaaaaacaacactggggagggggacggtgaaggccaagttcccaatgagggtgagattgggcct

SEQ ID NO: 9474 - DNA, 119 bp, homo sapiens
aaaacaacactgggggagggggacggtgaaggccaagttcccaatgagggtgagattgggcctggggtccacccctagtgtggggccccaggtcccgtgcctccccttcccaatgtggc

SEQ ID NO: 9475 - DNA, 119 bp, homo sapiens
gggcctggggtctcacccctagtgtggggccccaggtcccgtgcctccccttcccaatgtggcctatgggagacaggcctttctctcagcctctggaagccacctgctcttttgctcta

SEQ ID NO: 9476 - DNA, 119 bp, homo sapiens
tgtggcctatggagagacaggcctttctctcagcctctggaagccacctgctcttttgctctagcacctggtcccagcatctagagcatggagcctctagaagccatgctcacccgccc

SEQ ID NO: 9477 - DNA, 119 bp, homo sapiens
gctctagcacctgggtcccagcatctagagcatggagcctctagaagccatgctcacccgcccacatttattaacagctgagtccctgatgtcatccttatctcgaagagcttagaaac

SEQ ID NO: 9478 - DNA, 119 bp, homo sapiens
ccgcccacatttaattaacagctgagtccctgatgtcatccttatctcgaagagcttagaaacaaagaggggaaattccactgggcctaccttccttggggatgttcatgggccccagt

SEQ ID NO: 9479 - DNA, 119 bp, homo sapiens
agaaacaaagagtgggaaattccactgggcctaccttccttggggatgttcatgggccccagtttccagttcccttgccagacaagcccatcttcagcagttgctagtccattctccat

SEQ ID NO: 9480 - DNA, 119 bp, homo sapiens
cccagtttccagtttcccttgccagacaagcccatcttcagcagttgctagtccattctccattctggaaatctgctccaaaaagctggccacatctctgaggtgtcagaattaagctg

SEQ ID NO: 9481 - DNA, 119 bp, homo sapiens
ctccattctggagaatctgctccaaaaagctggccacatctctgaggtgtcagaattaagctgcctcagaactgctcccccttctccatataagcaaagccagaagctctagctttacc

SEQ ID NO: 9482 - DNA, 119 bp, homo sapiens
aagctgcctcagtaactgctcccccttctccatataagcaaagccagaagctctagctttacccagctcgcctggagactaaggcaaattgggccattaaaagctcagctcctatgttg

SEQ ID NO: 9483 - DNA, 119 bp, homo sapiens
tttacccagctctgcctggagactaaggcaaattgggccattaaaagctcagctcctatgttggtattacggtggtgggttttgttgctttcacactctatccacaggatagattgaaa

SEQ ID NO: 9484 - DNA, 119 bp, homo sapiens
atgttggtattaacggtggtgggttttgttgctttcacactctatccacaggatagattgaaactgccacttccacctgatccctgaccctgggatggctggattgagcaatgagcaga

SEQ ID NO: 9485 - DNA, 119 bp, homo sapiens
ttgaaactgccagcttccacctgatccctgaccctgggatggctggattgagcaatgagcagagccaagagcacagagtcccctggggctagaggtggaggaggcagtcctgggaatgg

SEQ ID NO: 9486 - DNA, 119 bp, homo sapiens
gaacttgaaattgcacttttattttaaaacagtgaagtgtggctattacatatttcacttttacaatcatacatgttaggatcttacaagtattaaattgatgattttattatatataa

SEQ ID NO: 9487 - DNA, 119 bp, homo sapiens
ttttacaatcaatacatgttaggatcttacaagtattaaattgatgattttattatatataaatacacaatggtccaaaacaatatctaaaatgttgcaatatttataaaatccataaa

SEQ ID NO: 9488 - DNA, 119 bp, homo sapiens
ataaatacacaaatggtccaaaacaatatctaaaatgttgcaatatttataaaatccataaaaatatttattttcagtatgaaaatggcatactaatttgagtttgaggtaaatgaaga

SEQ ID NO: 9489 - DNA, 119 bp, homo sapiens
taaaaatatttaattttcagtatgaaaatggcatactaatttgagtttgaggtaaatgaagagacagattaggccatctaagaaggaagataaaggagaatgtcatatctatattttgg

SEQ ID NO: 9490 - DNA, 119 bp, homo sapiens
aagagacagatttaggccatctaagaaggaagataaaggagaatgtcatatctatattttgggaaaagtaaagaatgctaaagagcttgacctgttactgcattaatgacttcagacat

SEQ ID NO: 9491 - DNA, 119 bp, homo sapiens
ttgggaaaagtcaaagaatgctaaagagcttgacctgttactgcattaatgacttcagacattatgcagtacatatactatatagtaataaataatacacaatgtagacagaacagaaa

SEQ ID NO: 9492 - DNA, 119 bp, homo sapiens
acattatgcagatacatatactatatagtaataaataatacacaatgtagacagaacagaaagcagaggactggaccaatctgctcaaggaaaaggtaaagaattttttaaagtgcagc

SEQ ID NO: 9493 - DNA, 119 bp, homo sapiens
gaaagcagagggactggaccaatctgctcaaggaaaaggtaaagaattttttaaagtgcagcaatcaggattcttgtgactaatgtgtttcactgaagacaatttgaatcgttcataaa

SEQ ID NO: 9494 - DNA, 119 bp, homo sapiens
cagcaatcagggattcttgtgactaatgtgtttcactgaagacaatttgaatcgttcataaacattaacctttaatccttgaaactttcctttgaggtagagaattgggccagactact

SEQ ID NO: 9495 - DNA, 119 bp, homo sapiens
taaacattaaccctttaatccttgaaactttcctttgaggtagagaattgggccagactactgctgaaagcaagaggaatggcaaggctaaagtagctcttgagagctcaaaagaatca

SEQ ID NO: 9496 - DNA, 119 bp, homo sapiens
aagattcatggaatttttgaactccttgtcttaactactctgccagctcttgttgaacaaagaccaatcgctcttcatgatttgctcctcatgtcttcttataattctaatgtgtctac

SEQ ID NO: 9497 - DNA, 119 bp, homo sapiens
caaagaccaatccgctcttcatgatttgctcctcatgtcttcttataattctaatgtgtctacatccttgataccatataataggaaaattcttttaaacaactaaaacagacataatc

SEQ ID NO: 9498 - DNA, 119 bp, homo sapiens
gtctacatccttggataccatataataggaaaattcttttaaacaactaaaacagacataatcacaattcaacttaatgtaatccaatacaacttcatacaaatagcagttaaatcaca

SEQ ID NO: 9499 - DNA, 119 bp, homo sapiens
ataatcacaattccaacttaatgtaatccaatacaacttcatacaaatagcagttaaatcacacgtagtaaatttcgtacaacatttttttaaagtttcaaattcaaatgttccaaatg

SEQ ID NO: 9500 - DNA, 119 bp, homo sapiens
atcacacgtagtaaaatttcgtacaacatttttttaaagtttcaaattcaaatgttccaaatgtttaatattttgtcttaaggtacatttgcaaagaattctaactgctgctattacct

SEQ ID NO: 9501 - DNA, 119 bp, homo sapiens
caaatgtttaattattttgtcttaaggtacatttgcaaagaattctaactgctgctattacctttgtcctgctgaaggaaaacattaggagaatgagctgtttttaagctaaacgtgtc

SEQ ID NO: 9502 - DNA, 119 bp, homo sapiens
ttacctttgtccttgctgaaggaaaacattaggagaatgagctgtttttaagctaaacgtgtctccactgatgaatggcgtgaaggagcttttccacccaagagtgatgtttctgcttc

SEQ ID NO: 9503 - DNA, 119 bp, homo sapiens
cgtgtctccacttgatgaatggcgtgaaggagcttttccacccaagagtgatgtttctgcttcttttattccattgcccttttgtataattcagcagctttttcaaaatctcctccttc

SEQ ID NO: 9504 - DNA, 119 bp, homo sapiens
catttggctataaagaacagctaagttcaccaaggcagtagctacactagggtgctttgggccaaaagattctgtcgaatttcaacagccaattcatacaaaggtacagctttgtcaag

SEQ ID NO: 9505 - DNA, 119 bp, homo sapiens
gctataaagaacagctaagttcaccaaggcagtagctacactagggtgctttgggccaaaagatttctgcgaatttcaacagccaattcatacaaaggtacagctttgtcaagtttccc

SEQ ID NO: 9506 - DNA, 119 bp, homo sapiens
cattttcttatacaagatggcaagatgcttcaccgtatatgccaaagaagggtgatcaggagctaatgccgtctccgaatatctaaagctctttcataaagttcttctgctttatcata

SEQ ID NO: 9507 - DNA, 119 bp, homo sapiens
gccaaagaagggtgatcaggagctaatgcacgtctccgaatatctaaagctctttcataaagttcttctctttatcatactgtttcttttcattgcatagagctgccagattattcaaa

SEQ ID NO: 9508 - DNA, 119 bp, homo sapiens
tatctaaagctctttcataaagttcttctgctttatcatactgtttcttttcattgcatagagctgccaattattcaaagactgagcacagtcagggtgatctggtcctagaactcgct

SEQ ID NO: 9509 - DNA, 119 bp, homo sapiens
ctgtttcttttcattgcatagagctgccagattattcaaagactgagcacagtcagggtgatctggtccagaactcgctccctcatttctaaggaacgcttcagaaactggtcagctgt

SEQ ID NO: 9510 - DNA, 119 bp, homo sapiens
tccaggttattttgaagatagtagagaacacccagttcattgagggtccgagcattatcaggtgtgtcctacctaatgtaagctcttctaactgtaaagcccgtctacgtaaaagggca

SEQ ID NO: 9511 - DNA, 119 bp, homo sapiens
attttgaagatagtagagaacacccagttcattgagggtccgagcattatcaggtgtgtccttacctaagtaagctcttctaactgtaaagcccgtctacgtaaaagggcaaatccgta

SEQ ID NO: 9512 - DNA, 119 bp, homo sapiens
ttattttgtttctggtacaaagttgcaagtgcttcaagttcacgagcagtatatggatggtccgcaccaaagcattttctgagatttccaacgcctgtttatacagttgttctgcattg

SEQ ID NO: 9513 - DNA, 119 bp, homo sapiens
cacgagcagtatatggatggtccgcaccataagcattttctgagatttccaacgcctgtttatacagttttctgcattgccaaacttcttccactgcacgtatacacttgctagttggt

SEQ ID NO: 9514 - DNA, 119 bp, homo sapiens
tgagatttccaacgcctgtttatacagttgttctgcattgccaaacttcttccactgcacgtatacactgctagttggtggagggactgggctactcttgggtgatcgggatctaaagc

SEQ ID NO: 9515 - DNA, 119 bp, homo sapiens
ccaaacttcttccactgcacgtatacacttgctagttggtggagggactgggctactcttgggtgatcggatctaaagctgtttctcgaatctctaaagacctctgcaaaggtactatg

SEQ ID NO: 9516 - DNA, 119 bp, homo sapiens
ctgactgagaaggcctagatccttgagaaatcgccccaaggtttcataaagatcagctaagcaactcatttgtcctcgccttcgcagtttttctcatactgcttcaatgaatcgaagta

SEQ ID NO: 9517 - DNA, 119 bp, homo sapiens
ccaaggtttcataaagatcagctaagcaactcatgttgtcctcgccttcgcagtttttctcatactgctcaatgaatcgaagtattctgttgccattgcacttttgtctttgccaacaa

SEQ ID NO: 9518 - DNA, 119 bp, homo sapiens
ttgtcctcgccttcgcagtttttctcatactgcttcaatgaatcgaagtattctgttgccattgcactttgtctttgccaacaaactgccaataactcagcaactcagcaaagtgtccc

SEQ ID NO: 9519 - DNA, 119 bp, homo sapiens
cttttataaaggttttgagacacaaagagattaagaaggcaatcatgcagcttctgtttacttccctgcgctgaaaaagccacgggagttcatctgcacttctccaagtcactctgtcc

SEQ ID NO: 9520 - DNA, 119 bp, homo sapiens
ttataaaggttttgagacacaaagagattaagaaggcaatcatgcagcttctgtttacttccctgctgcgaaaaagccacgggagttcatctgcacttctccaagtcactctgtcctga

SEQ ID NO: 9521 - DNA, 119 bp, homo sapiens
ctgcagatgttgaaacctaagcaagccacatccataagtcaacaaacacattttgtataaactgtgaatagggaggtcaagaaagtccaggacatctcaggatagagttccatcagttc

SEQ ID NO: 9522 - DNA, 119 bp, homo sapiens
acacattttgtataaactgtgaataagggaggtcaagaaagtccaggacatctcaggatagagttccatagttctgattcactcacaccattgtgactaacattgacaaggcagaggat

SEQ ID NO: 9523 - DNA, 119 bp, homo sapiens
ctgcttcattagctctttatccacatcatttgccatggactcccggatagagtgcagaacaagtctataaatgaaagagtatcttgacactggaaacactgatgaaggattttatctaa

SEQ ID NO: 9524 - DNA, 119 bp, homo sapiens
tccacatcatttgccatggactcccggatagagtgcagaacaagtctatataatgaaagagtatcttgaactggaaacactgatgaaggattttatctaaattgcctgctctcccagca

SEQ ID NO: 9525 - DNA, 119 bp, homo sapiens
ctgaacttgatctatagaatcaataacgatgatgatgctgccttgatgacgagcagagagtttttccagcaacgtggaaattcttccagaagcttagcaggatccagtgtcagagcaga

SEQ ID NO: 9526 - DNA, 119 bp, homo sapiens
aacgatgatgatgctgccttgatgacgagcagagagtttttccagccaacgtggaaattcttccagaagttagcaggatccagtgtcagagcagagactgaccaagagtgctgcatcaa

SEQ ID NO: 9527 - DNA, 119 bp, homo sapiens
tttctcaaatcccaactcatgggctgaattagaagcctgctgaaaagtttccatttgctcttgttcatctgtatgtcccacagaacatcaccaaaatcatcttcttctggaatggaatc

SEQ ID NO: 9528 - DNA, 119 bp, homo sapiens
ttgctcttgttcatcatgtatgtcccacagaacatcaccaaaatcatcttcttctggaatggaatcctcctgcccaaatccttagtctccaagtctgtgttctcaaaacccagtatgtc

SEQ ID NO: 9529 - DNA, 119 bp, homo sapiens
cttggctttgctggtcttgtttagattagaaacttgatcaatcaattgctggacagagtcagaactgactttccatcttccaaacgatgaaagattaatcgaggttttccttcagggtt

SEQ ID NO: 9530 - DNA, 119 bp, homo sapiens
tcaatcaattgctggacagagtcagaactgacttttccatcttccaaacgatgaaagattaatcgaggtttccttcagggtttttcagaaaagcttcttcacagtcttccaataaaagg

SEQ ID NO: 9531 - DNA, 119 bp, homo sapiens
cttggtaatgttaagtgaataaataaaataactaaagaacttttctcaatttcccattttcttacagtgggtattgattttcaacatctattggaaaataaacagcatggaaaaaatat

SEQ ID NO: 9532 - DNA, 119 bp, homo sapiens
tttctcaatttcccattttcttacagtgaggtattgattttcaacatctattggaaaataaacagcatgaaaaaatatcccattgtctcgcacattctcttaagtttaggtgaatagtc

SEQ ID NO: 9533 - DNA, 119 bp, homo sapiens
cttaaggaaaagatccatctcaggctgggtttcatctgtataaatgaggtaacatctgacagtgttactcacagagaatgtgaaaacagaggagtaacttgtaataaactagctacagc

SEQ ID NO: 9534 - DNA, 119 bp, homo sapiens
ccatctcaggctgggtttcatctgtataaatgaggtaacatctgacagtgttactccacagagaatgtgaaacagaggagtaacttgtaataaactagctacagcaatatcccagtcat

SEQ ID NO: 9535 - DNA, 119 bp, homo sapiens
ctctattaacatttgcaaagggtccttccacatctatagaactatgggcaaactcagggcctctgaaggctgctgaagctggatcatgcttcctatggaaggttcacttcccaaggctc

SEQ ID NO: 9536 - DNA, 119 bp, homo sapiens
ctatagaactatgggcaaactcagggcctctgaaggactgctgaagctggatcatgcttcctatggaagttcacttcccaaggctccgccagtccaatattcacattgggttccagcag

SEQ ID NO: 9537 - DNA, 119 bp, homo sapiens
cagtgacatctgtacagttgtcatctgaatcagactccccaggatcaaatacttggataccctgagccttagcctctgaagtttgctctccaactccctcttggccctcagtaagtcct

SEQ ID NO: 9538 - DNA, 119 bp, homo sapiens
agactccccaggatcaaatacttggataccctgagcctgtagcctctgaagtttgctctccaactccctttggccctcagtaagtcctgaatttcattttctttggtctccctaaaaat

SEQ ID NO: 9539 - DNA, 119 bp, homo sapiens
cttgaattgccttttaactttatctctgtcatgttcaaatgttgctgctctctccattgcttggtatttgcttctaaagcactttctttttctcgaagtatcttctgatacgttttttg

SEQ ID NO: 9540 - DNA, 119 bp, homo sapiens
ttgccttttaactttatctctgtcatgttcaaatgttgctgctctctccattgcttggtatttcgcttcaaagcactttctttttctcgaagtatcttctgatacgttttttgaagtgc

SEQ ID NO: 9541 - DNA, 119 bp, homo sapiens
ctgcagttcggcccgcagccgcttgttctccgtgtccagcttggcctcgcggcggcccatggacaacaatcctggttcttgctgacgcgaaagatctcgtactccttcctgagccgctc

SEQ ID NO: 9542 - DNA, 119 bp, homo sapiens
tccagcttggcctcgcggcggcccatggacaacaactcctggttcttgctgacgcgaaagatctcgtacccttcctgagccgctcgtactcggccgccgcgtactccagctctggcacc

SEQ ID NO: 9543 - DNA, 119 bp, homo sapiens
actcctggttcttgctgacgcgaaagatctcgtactccttcctgagccgctcgtactcggccgccgcgtctccagctctggcaccgacgagccagtggacttgaagctggcccccagca

SEQ ID NO: 9544 - DNA, 119 bp, homo sapiens
tcggcggaacgagttgcgcagcaggcgggccttgggcttcacctccaccgggatctcgcaggcctcgccccgcccgccccgtacgtgtcctcgatcacttccccgcccgcggggctcac

SEQ ID NO: 9545 - DNA, 119 bp, homo sapiens
ggcttcacctccaccgggatctcgcaggcctcgccgccgcccgccccgtacgtgtcctcgatcacttcccgcccgcggggctcacgagcgacgaggcggtccccatggcgtccgttgcc

SEQ ID NO: 9546 - DNA, 119 bp, homo sapiens
cgccgcccgccccgtacgtgtcctcgatcacttccccgcccgcggggctcacgagcgacgaggcggtcccatggcgtccgttgccgctactacctagtgagtaccagcaggactgggca

SEQ ID NO: 9547 - DNA, 119 bp, homo sapiens
cgggcctcgagccgaggcagcagtgggaacgactcatcctttttccagccctggggcgtggctggggtcgggtcggggtcggggccggtgggggccccgcccccgtctcctggcctgcc

SEQ ID NO: 9548 - DNA, 119 bp, homo sapiens
cgtggctggggtcggggtcggggtcggggccggtgggggccccgcccccgtctcctggcctgcccccttatgggccgcgatgatggcggccctgtacccgagcacggacctctcgggcg

SEQ ID NO: 9549 - DNA, 119 bp, homo sapiens
cctctccatcctcttcctcgccgaacgaggtgatggcgctgaaggatgtgcgggaggtgaaggaggagatacgctgaatgagaagcttttcttgctggcgtgcgacaagggtgagagtt

SEQ ID NO: 9550 - DNA, 119 bp, homo sapiens
gtgactattatatggttaaaaagattttggaggaaaacagttcaggtgacttgaacataaattgcgtagtgtgcttgggagaaatgctgttaccataactattgaaaacgaaaacttgg

SEQ ID NO: 9551 - DNA, 119 bp, homo sapiens
aacagttcaggtgacttgaacataaattgcgtagatgtgcttgggagaaatgctgttaccataactattaaaacgaaaacttggatatactgcagcttcttttggactacggttgtcag

SEQ ID NO: 9552 - DNA, 119 bp, homo sapiens
aaactaatggaacgaattcagaatcctgagtattcaacaactatggatgttgcacctgtcattttagctctcatcgtaacaactatgaaattcttacaatgctcttaaaacaggatgta

SEQ ID NO: 9553 - DNA, 119 bp, homo sapiens
tatggatgttgcacctgtcattttagctgctcatcgtaacaactatgaaattcttacaatgctcttaaacaggatgtatctctacccaagccccatgcagttggctgtgaatgcacatt

SEQ ID NO: 9554 - DNA, 119 bp, homo sapiens
actatgaaattcttacaatgctcttaaaacaggatgtatctctacccaagccccatgcagttggctgtgatgcacattgtgttctgcaaaaaacaaaaaggatagcctccggcattcca

SEQ ID NO: 9555 - DNA, 119 bp, homo sapiens
gtttcgtcttgatatatatcgatgtttggccagtccagctctaataatgttaacagaggaggatccaatctgagagcatttgaacttagtgctgatttaaaagaactaagtcttgtgga

SEQ ID NO: 9556 - DNA, 119 bp, homo sapiens
tatatatcgatgtttggccagtccagctctaataatgttaacagaggaggatccaattctgagagcattgaacttagtgctgatttaaaagaactaagtcttgtggaggtggaattcag

SEQ ID NO: 9557 - DNA, 119 bp, homo sapiens
gaatgattatgaggaactagcccggcaatgtaaaatgtttgctaaggatttacttgcacaagcccggaatctcgtgaattggaagttattctaaaccatacgtctagtgacgagcctct

SEQ ID NO: 9558 - DNA, 119 bp, homo sapiens
ttgctaaggatttacttgcacaagcccggaattctcgtgaattggaagttattctaaaccatacgtctatgacgagcctcttgacaaacggggattattagaagaaagaatgaatttaa

SEQ ID NO: 9559 - DNA, 119 bp, homo sapiens
gaattggaagttattctaaaccatacgtctagtgacgagcctcttgacaaacggggattattagaagaagaatgaatttaagtcgtctaaaacttgctatcaaatataaccagaaagag

SEQ ID NO: 9560 - DNA, 119 bp, homo sapiens
tttgtctcccagtctaactgccagcagttcctgaacactgtttggtttggacagatgtcgggttaccgagcaagcccacctgtaagaagataatgactgttttgacagtaggcatcttt

SEQ ID NO: 9561 - DNA, 119 bp, homo sapiens
atgtcgggttaccgacgcaagcccacctgtaagaagataatgactgttttgacagtaggcatcttttggcagttttgtcactttgttatttgatagctcccaaatctcagtttggcaga

SEQ ID NO: 9562 - DNA, 119 bp, homo sapiens
gtaggcatcttttggccagttttgtcactttgttatttgatagctcccaaatctcagtttggcagaatcttcacacaccttttatgaaatttatcattcatggagcatcatatttcaca

SEQ ID NO: 9563 - DNA, 119 bp, homo sapiens
cagtttggcagaatcattcacacaccttttatgaaatttatcattcatggagcatcatatttcacattttgctgttgcttaatctatactctcttgtctacaatgaggataagaaaaac

SEQ ID NO: 9564 - DNA, 119 bp, homo sapiens
tcatatttcacatttctgctgttgcttaatctatactctcttgtctacaatgaggataagaaaaacacatggggccagcccttgaaagaatagactatcttcttattctgtggattatt

SEQ ID NO: 9565 - DNA, 119 bp, homo sapiens
ggatgatttggtcagacattaaaagactctggtatgaagggttggaagactttttagaagaatctcgtatcaactcagttttgtcatgaattctctttatttggcaacctttgccctca

SEQ ID NO: 9566 - DNA, 119 bp, homo sapiens
aaaagactctggtatgaagggttggaagactttttagaagaatctcgtaatcaactcagttttgtcatgattctctttatttggcaacctttgccctcaaagtggttgctcacaacaag

SEQ ID NO: 9567 - DNA, 119 bp, homo sapiens
tttcatgattttgctgatcggaaggattgggatgcattccatcctacactggtggcagaagggctttttcatttgcaaatgttctaagttatcttcgtctcttttttatgtatacaacc

SEQ ID NO: 9568 - DNA, 119 bp, homo sapiens
gattgggatgcattccatcctacactggtggcagaagggctttttgcatttgcaaatgttctaagttatttcgtctcttttttatgtatacaaccagctctatcttgggtccattacag

SEQ ID NO: 9569 - DNA, 119 bp, homo sapiens
atttcaatgggacagatgttacaagattttggaaaatttcttgggatgtttcttcttgttttgttttcttcacaattggactgacacaactgtatgataaaggatatacttcaaaggag

SEQ ID NO: 9570 - DNA, 119 bp, homo sapiens
tgttttgttttctttcacaattggactgacacaactgtatgataaaggatatacttcaaaggagcagaagactgtgtaggcatcttctgtgaacagcaaagcaatgataccttccattc

SEQ ID NO: 9571 - DNA, 119 bp, homo sapiens
gttcattggcacctgctttgctttgttctggtatattttctccttagcgcatgtggcaatctttgtcacagatttagctatggagaagaactgcagtcctttgtgggagctgtcattgt

SEQ ID NO: 9572 - DNA, 119 bp, homo sapiens
ccttagcgcatgtggcaatctttgtcacaagatttagctatggagaagaactgcagtcctttgtgggagtgtcattgttggtacatacaatgtcgtggttgtgattgtgcttaccaaac

SEQ ID NO: 9573 - DNA, 119 bp, homo sapiens
ggagaagaactgcagtcctttgtgggagctgtcattgttggtacatacaatgtcgtggttgtgattgtgttaccaaactgctggtggcaatgcttcataaaagctttcagttgatagca

SEQ ID NO: 9574 - DNA, 119 bp, homo sapiens
aatcatgaagacaaagaatggaagtttgctcgagcaaaattatggcttagctactttgatgacaaatgtcgttacctccacctttcaacatcattccctcaccaaagactatctgctat

SEQ ID NO: 9575 - DNA, 119 bp, homo sapiens
aattatggcttagctactttgatgacaaatgtacgttacctccacctttcaacatcattccctcaccaagactatctgctatatgattagtagcctcagtaagtggatttgctctcata

SEQ ID NO: 9576 - DNA, 119 bp, homo sapiens
acctccacctttcaacatcattccctcaccaaagactatctgctatatgattagtagcctcagtaagtgatttgctctcatacatcaaaaggcaaggtcaaacggcaaaacagtttaaa

SEQ ID NO: 9577 - DNA, 119 bp, homo sapiens
gaatggaggaatttgaaacagaagagagatgaaaactatcaaaaagtgatgtgctgcctagtgcatcgtacttgacttccatgagacagaagatgcaaagtacagatcaggcaactgtg

SEQ ID NO: 9578 - DNA, 119 bp, homo sapiens
cctagtgcatcgttacttgacttccatgagacagaagatgcaaagtacagatcaggcaactgtggaaaactaaacgaactgcgccaagatctgtcaaaattccgaaatgaaataaggga

SEQ ID NO: 9579 - DNA, 119 bp, homo sapiens
caactgtggaaaatctaaacgaactgcgccaagatctgtcaaaattccgaaatgaaataagggatttactggctttcggacttctaaatatgctatgttttatccaagaaattaaccat

SEQ ID NO: 9580 - DNA, 119 bp, homo sapiens
ataagggatttacttggctttcggacttctaaatatgctatgttttatccaagaaattaaccattttctaatcatggagcgaataattttcaataacagatccaaaagactatattgca

SEQ ID NO: 9581 - DNA, 119 bp, homo sapiens
ttaaccattttctaaatcatggagcgaataattttcaataacagatccaaaagactatattgcataactgcaatgaaattaatgagatatatattgaaataaagaattatgtaaaagcc

SEQ ID NO: 9582 - DNA, 119 bp, homo sapiens
atattgcataacttgcaatgaaattaatgagatatatattgaaataaagaattatgtaaaagccattcttaaaatatttatagcataaatatatgttatgtaaagtgtgtatatagaat

SEQ ID NO: 9583 - DNA, 119 bp, homo sapiens
taaaagccattctttaaaatatttatagcataaatatatgttatgtaaagtgtgtatatagaattagtttttaaaccttctgttagtggctttttgcagaagcaaaacagattaagtag

SEQ ID NO: 9584 - DNA, 119 bp, homo sapiens
tatagaattagttttttaaaccttctgttagtggctttttgcagaagcaaaacagattaagtagatagatttgttagcatgctgcttggttttcttacttagtgctttaaaatgttttt

SEQ ID NO: 9585 - DNA, 119 bp, homo sapiens
ttaagtagatagattttgttagcatgctgcttggttttcttacttagtgctttaaaatgtttttttttagtttaagaggggcagttataaatggacacattgcccagaatgttttgtaa

SEQ ID NO: 9586 - DNA, 119 bp, homo sapiens
atgtttttttttatgtttaagaggggcagttataaatggacacattgcccagaatgttttgtaaaatgagaccagcaaatgtaggctgatctccttcacaggatacacttgaaatatag

SEQ ID NO: 9587 - DNA, 119 bp, homo sapiens
ttttgtaaaatgaagaccagcaaatgtaggctgatctccttcacaggatacacttgaaatatagaagtttgttttaaatatctctgttttaggagttcacatatagttcagcatttatt

SEQ ID NO: 9588 - DNA, 119 bp, homo sapiens
aaatatagaagttatgttttaaatatctctgttttaggagttcacatatagttcagcatttattgtttagagtataattttattttatctaaaataatagtctattttttcttttgtat

SEQ ID NO: 9589 - DNA, 119 bp, homo sapiens
catttattgtttaggagtataattttattttatctaaaataatagtctattttttcttttgtattttgtataatcttaagcaacaaagaaaaaaccctaatatttgaatctatttatgt

SEQ ID NO: 9590 - DNA, 119 bp, homo sapiens
ttttgtattttgttataatcttaagcaacaaagaaaaaaccctaatatttgaatctatttatgtctttcatttaaattcacttcagtttttgttattgtaatatatttacttttacatg

SEQ ID NO: 9591 - DNA, 119 bp, homo sapiens
catttccatgtattgatgtagttagtccacatttaaatttttatagaattatatagtttttgaaaaataagtcagtagatgttttattttttagctattcagttatgtttataagtttg

SEQ ID NO: 9592 - DNA, 119 bp, homo sapiens
ttttgaaaaatacagtcagtagatgttttattttttagctattcagttatgtttataagtttgcatagcacttctcgacatttggtttgttttaatttttttgtatcataatagtccta

SEQ ID NO: 9593 - DNA, 119 bp, homo sapiens
agtttgcatagctacttctcgacatttggtttgttttaatttttttgtatcataatagtcctattttttttcaagttggagtgaatgtttttagttttaagatagataggagacacttt

SEQ ID NO: 9594 - DNA, 119 bp, homo sapiens
gtcctatttttttttcaagttggagtgaatgtttttagttttaagatagataggagacacttttttatccatgtagtcacaacctgttttgtttttgtaaaacataggaagtctcttta

SEQ ID NO: 9595 - DNA, 119 bp, homo sapiens
cacttttttatcacatgtagtcacaacctgttttgtttttgtaaaacataggaagtctctttaatgcaagatttgttttatatttggactaaggttcttgagcttatctcccaaggtac

SEQ ID NO: 9596 - DNA, 119 bp, homo sapiens
tctttaatgcaatgatttgttttatatttggactaaggttcttgagcttatctcccaaggtactttccaaatttaacacagcttctataaaagtgacttcatgcttacttgtggatcat

SEQ ID NO: 9597 - DNA, 119 bp, homo sapiens
aggtactttccataatttaacacagcttctataaaagtgacttcatgcttacttgtggatcattcttgcgcttaagatgaaaagcattggttttttaaaattagagaataaaatatgta

SEQ ID NO: 9598 - DNA, 119 bp, homo sapiens
gatcattcttgctgcttaagatgaaaagcattggttttttaaaattagagaataaaatatgtatttaaattttggtgtgttcacataaagggatgtagctaaaatgttttcataggcta

SEQ ID NO: 9599 - DNA, 119 bp, homo sapiens
tatgtatttaaatttttggtgtgttcacataaagggatgtagctaaaatgttttcataggctattatatttctcgcagcatttccagttaagaggatattaggtatataattctcttct

SEQ ID NO: 9600 - DNA, 119 bp, homo sapiens
aggctattatatattctcgcagcatttccagttaagaggatattaggtatataattctcttcttaaccgatgtcagatggtcttacgccacagggtgcaggtaacccttggtctgtaag

SEQ ID NO: 9601 - DNA, 119 bp, homo sapiens
tcttcttaaccgaatgtcagatggtcttacgccacagggtgcaggtaacccttggtctgtaagcaccacgatccagggatcattgtctaaataggttactattgtttgtttcatcttgc

SEQ ID NO: 9602 - DNA, 119 bp, homo sapiens
tgtaagcaccaccgatccagggatcattgtctaaataggttactattgtttgtttcatcttgcttttgctttttattttttaatttccaaattttaagtgttccctctttggggcaaat

SEQ ID NO: 9603 - DNA, 119 bp, homo sapiens
tcttgcttttgcatttttattttttaatttccaaattttaagtgttccctctttggggcaaattcttataaaatgtttattgtaaagttatatattttgtctacgatgggattatgcac

SEQ ID NO: 9604 - DNA, 119 bp, homo sapiens
gcaaattcttataaaaatgtttattgtaaagttatatattttgtctacgatgggattatgcacttcccattgggattttacatctggatttttagtcattctaaaaaacacctaattat

SEQ ID NO: 9605 - DNA, 119 bp, homo sapiens
agtgcctactgtatgcatgagttgagttgcttctgaggtacattttgaatgacagcatattgtaagaaaaaaaaggtgaataaaatttgacattagattataaatggagtctgttcatt

SEQ ID NO: 9606 - DNA, 119 bp, homo sapiens
tggtgggtttgcctcttagttcctcattagatttttcagcagctgctccaggttttctttctctttctaggaacagagaacgattggagacttgttttctaaagaaaaaagcctggtgt

SEQ ID NO: 9607 - DNA, 119 bp, homo sapiens
tctctttctacggaacagagaacgattggagacttgttttctaaagaaaaaagcctggtgttcgaaggatttttcaaaactccaagaagacagagaggaatccaataagagtgcagggg

SEQ ID NO: 9608 - DNA, 119 bp, homo sapiens
gttcgaaggagtttttcaaaactccaagaagacagagaggaatccaataagagtgcagggggtacctggcttggggacctccaaccaactcctcacgcaggagacggtccttgtcctcc

SEQ ID NO: 9609 - DNA, 119 bp, homo sapiens
gggtacctggccttggggacctccaaccaactcctcacgcaggagacggtccttgtcctcctagcccaccatttccagtgcttttgtactggaccatttcagctaaagacttacagaac

SEQ ID NO: 9610 - DNA, 119 bp, homo sapiens
cctagcccactcatttccagtgcttttgtactggaccatttcagctaaagacttacagaaccgggctctgcctgttaccaaaaaaaaaaaatcccctttgtggctagactgaattgtag

SEQ ID NO: 9611 - DNA, 119 bp, homo sapiens
accgggctctagcctgttaccaaaaaaaaaaaatcccctttgtggctagactgaattgtagtcttctagaattgtccaggtgtatttcctgatttaaggggaaaaaccagcatctggaa

SEQ ID NO: 9612 - DNA, 119 bp, homo sapiens
agtcttctagaaattgtccaggtgtatttcctgatttaaggggaaaaaccagcatctggaaactcggtggttctgatgtctgctggcgaatagcgaattgacaccagagcaagttattt

SEQ ID NO: 9613 - DNA, 119 bp, homo sapiens
aaactcggtgtgttctgatgtctgctggcgaatagcgaattgacaccagagcaagttatttctcaggtaacggttgtttcatccttgtaaatagttccaaagggaaacagtgttttatt

SEQ ID NO: 9614 - DNA, 119 bp, homo sapiens
ttctcaggtatacggttgtttcatccttgtaaatagttccaaagggaaacagtgttttattttaaggagactttcaaacctattatatgagggctgctgagtactcagcacctgtggtc

SEQ ID NO: 9615 - DNA, 119 bp, homo sapiens
ttttaaggagtactttcaaacctattatatgagggctgctgagtactcagcacctgtggtcagaggcctgtgatctgtttgctgtcattctctgctttttccttggtgctttctggagg

SEQ ID NO: 9616 - DNA, 119 bp, homo sapiens
tcagaggcctagtgatctgtttgctgtcattctctgctttttccttggtgctttctggaggacagcaggtgaggatgaaggaagggtcagttccaggctcagctgtggcctttagtcag

SEQ ID NO: 9617 - DNA, 119 bp, homo sapiens
ggacagcaggttgaggatgaaggaagggtcagttccaggctcagctgtggcctttagtcagctgcagataatttgatgggtaattcaggggaaaaaaaaagttgacctgggtcatgctt

SEQ ID NO: 9618 - DNA, 119 bp, homo sapiens
agctgcagatcaatttgatgggtaattcaggggaaaaaaaaagttgacctgggtcatgcttggtgacagcagaacaagaccaagatgatacagtgataccgtcataatcccagatttaa

SEQ ID NO: 9619 - DNA, 119 bp, homo sapiens
ttggtgacagccagaacaagaccaagatgatacagtgataccgtcataatcccagatttaatataatttcataattgcatattagtactcgagacactatagctagaaaaacagcccct

SEQ ID NO: 9620 - DNA, 119 bp, homo sapiens
aatataattttcataattgcatattagtactcgagacactatagctagaaaaacagcccctaataagtcttttgcatcaaatgtactaagcagagatcatttttcatgattcctcagtg

SEQ ID NO: 9621 - DNA, 119 bp, homo sapiens
ctaataagtcattttgcatcaaatgtactaagcagagatcatttttcatgattcctcagtggtcctaacattatgttcattgaaagtactgtcgtgaatgtaattgggactcaggcacg

SEQ ID NO: 9622 - DNA, 119 bp, homo sapiens
tggtcctaacaattatgttcattgaaagtactgtcgtgaatgtaattgggactcaggcacgggaggaaaataccctaagcttggttttttcttcttttcttcttttagagtttgcagat

SEQ ID NO: 9623 - DNA, 119 bp, homo sapiens
cgggaggaaaaataccctaagcttggttttttcttcttttcttcttttagagtttgcagattttgaccacagacatggttaataagactatgcttttttaaagcctatattttatattt

SEQ ID NO: 9624 - DNA, 119 bp, homo sapiens
taagagtatactttaaacaaattttttaaaatgtgtgttgatacattttatagatgttcatttaatacatactgttttaggaaagcgattgcagctcagttttctgaaatctggcaaca

SEQ ID NO: 9625 - DNA, 119 bp, homo sapiens
attttttaaaatgtgtgttgatacattttatagatgttcatttaatacactactgttttaggaaagcgatgcagctcagttttctgaaatctggcaacaaatgtgtggatatattagag

SEQ ID NO: 9626 - DNA, 119 bp, homo sapiens
tatatatatatggagtaacaatttgtcgattctagtcaactgcctttgactacctgggtcaagcaatttccaccagataaaacaacttttcaaagccttccttctgcttcccttacttt

SEQ ID NO: 9627 - DNA, 119 bp, homo sapiens
cctgggtcaagcaatttcccaccagataaaacaacttttcaaagccttccttctgcttcccttactttcagcctgtatccttagtacgtaatttgtaaacattgtcacgaagggtcctg

SEQ ID NO: 9628 - DNA, 119 bp, homo sapiens
ctgcttcccttactttccagcctgtatccttagtacgtaatttgtaaacattgtcacgaagggtcctgagctttaatatatgcagactaaaaggatatgcaaaattaaccacatctaaa

SEQ ID NO: 9629 - DNA, 119 bp, homo sapiens
gtcacgaagggtcctgatgctttaatatatgcagactaaaaggatatgcaaaattaaccacatctaaaatgaccaaagcaagtctactcccttgtaaaattatagaaaggtttgccttt

SEQ ID NO: 9630 - DNA, 119 bp, homo sapiens
attaaccacatctaaaagtgaccaaagcaagtctactcccttgtaaaattatagaaaggtttgcctttcgtacattagatctgcagctacattagttgtttctgcgtctttagattttg

SEQ ID NO: 9631 - DNA, 119 bp, homo sapiens
agaaaggtttgcctttcagtacattagatctgcagctacattagttgtttctgcgtctttagattttgcaaagggaactgaaatccagcaagtcgtattaggagcccattcagaaaatg

SEQ ID NO: 9632 - DNA, 119 bp, homo sapiens
gcgtctttagattttgcaaaagggaactgaaatccagcaagtcgtattaggagcccattcagaaaatgacaaaaaagcaaaagaaaatgacccagaatgaggtggtatatttttcactt

SEQ ID NO: 9633 - DNA, 119 bp, homo sapiens
gcccattcagaaaatgaacaaaaaagcaaaagaaaatgacccagaatgaggtggtatatttttcactttcgttttgtagacataagtcccttctttataatttgcaattttttctgaga

SEQ ID NO: 9634 - DNA, 119 bp, homo sapiens
ggtatatttttcactttgcgttttgtagacataagtcccttctttataatttgcaattttttctgagagtgatggattttcacttcagaggcaaacaatatcatgacaagacagccaca

SEQ ID NO: 9635 - DNA, 119 bp, homo sapiens
ctgaaatgaagctcaaaaggtacagccctaggggaccatgcagagtttcaaaaggttttccaaaagcatgtacatgaagaaggctgtccccaccatggttaacacaataaggatggcag

SEQ ID NO: 9636 - DNA, 119 bp, homo sapiens
caaaagcattgtacatgaagaaggctgtccccaccatggttaacacaataaggatggcagagaagagaagacattgacgtggatgctcactgggattgctttgagcaaatctggaaaaa

SEQ ID NO: 9637 - DNA, 119 bp, homo sapiens
atgagaaccgaaagggccttgctcccaacccacactgcctcacaccctctccgtggaaaagcccgtactcatttcacccataaacttgtccagctcctgccctgaggcattgacgagca

SEQ ID NO: 9638 - DNA, 119 bp, homo sapiens
tggaaaagcccgtactgcatttcacccataaacttgtccagctcctgccctgaggcattgacgagcagactcccgttttgcagaggacagtggctttgatccacaacggtgtccccaag

SEQ ID NO: 9639 - DNA, 119 bp, homo sapiens
ggcattgacgagcagagctcccgttttgcagaggacagtggctttgatccacaacggtgtccccaaggcgtcacaactccgagggcacatgcaaaactgaacactccggccatgcaaaa

SEQ ID NO: 9640 - DNA, 119 bp, homo sapiens
acggtgtccccaaggctgtcacaactccgagggcacatgcaaaactgaacactccggccatgcaaaaaagattttcttctgttggcttggcatgatgagaaacggcttctgtgagggcg

SEQ ID NO: 9641 - DNA, 119 bp, homo sapiens
ccggccatgcaaaaaatgattttcttctgttggcttggcatgatgagaaacggcttctgtgagggcgagttcaaaaacaagacctttgtgagcaatgggaagggactgcctctttgact

SEQ ID NO: 9642 - DNA, 119 bp, homo sapiens
cttctgtgagggcgaggttcaaaaacaagacctttgtgagcaatgggaagggactgcctctttgactgctttattacggaagctgaacggacagctcccagctgaaaaggcaacttcac

SEQ ID NO: 9643 - DNA, 119 bp, homo sapiens
ctgcctctttgactgcatttattacggaagctgaacggacagctcccagctgaaaaggcaacttcaccacgacggttctcgccaggttaaatgtcagtagatgaaggcctcatcatcac

SEQ ID NO: 9644 - DNA, 119 bp, homo sapiens
aaaggcaacttcaccatcgacggttctcgccaggttaaatgtcagtagatgaaggcctcatcatcactctacttggcttttctccttttctgctgcttcttctccctaattggaaatct

SEQ ID NO: 9645 - DNA, 119 bp, homo sapiens
ggcctcatcatcactcatacttggcttttctccttttctgctgcttcttctccctaattggaaatctttgactaagaatctgtaaaacaagtctttcaaactgccttcaagtatctcct

SEQ ID NO: 9646 - DNA, 119 bp, homo sapiens
atttttaaacattttaagcttcttattgaaatataacaatataggaaacacatacacagtacaacttgtagtacactgctcaatcagatttcatctggatcaagaacagaatattccaa

SEQ ID NO: 9647 - DNA, 119 bp, homo sapiens
agtacaacttgtaagtacactgctcaatcagatttcatctggatcaagaacagaatattccaatattccgaaaagaaaagaaacatgttaaaaagaaaagatttttatttaaaaaacct

SEQ ID NO: 9648 - DNA, 119 bp, homo sapiens
ttccaatattccggaaaagaaaagaaacatgttaaaaagaaaagatttttatttaaaaaacctagacatgtaattaaaatgggggttaagagaggtaatctctctatccctttgtgtgt

SEQ ID NO: 9649 - DNA, 119 bp, homo sapiens
aaacctagacatagtaattaaaatgggggttaagagaggtaatctctctatccctttgtgtgtgtgtgttatatatatatatcatacataatcccatatctatgcatctatacccaccc

SEQ ID NO: 9650 - DNA, 119 bp, homo sapiens
gtgtgtgtgtgtatatatatatatatcatacataatcccatatctatgcatctatacccaccctataattaccattttcagaaatgggtttgcagaagactttctaaggggtatttgtt

SEQ ID NO: 9651 - DNA, 119 bp, homo sapiens
ccaccctataatgtaccattttcagaaatgggtttgcagaagactttctaaggggtatttgttttattgttaaaagattatgtggtaataactttgggatacactaaatagagtaatca

SEQ ID NO: 9652 - DNA, 119 bp, homo sapiens
tttgttttattgtttaaaagattatgtggtaataactttgggatacactaaatagagtaatcaaacaagttgtcacccaaggaaattttcacaaattcagacttcagggcctattgact

SEQ ID NO: 9653 - DNA, 119 bp, homo sapiens
taatcaaacaagtttgtcacccaaggaaattttcacaaattcagacttcagggcctattgactgatcatctcaagtcaagagaggaatgaggagaatccttcttgcccattctagatat

SEQ ID NO: 9654 - DNA, 119 bp, homo sapiens
gtggcattttatacatttgtacaaatccatcctcatgtatttttgttctataaataaacttttggaggcttttacaatttagaggtcaaatagaaattaatggtaacatacatttcaaa

SEQ ID NO: 9655 - DNA, 119 bp, homo sapiens
aacttttggaggcattttacaatttagaggtcaaatagaaattaatggtaacatacatttcaaagagtcaatgttttattatcgacattaatatttgttcatgctgaagatttagggat

SEQ ID NO: 9656 - DNA, 119 bp, homo sapiens
atttcaaagagtccaatgttttattatcgacattaatatttgttcatgctgaagatttagggatgaagtatgggcaaaaaactgacatataatcgacactacacaggtatctcttaagt

SEQ ID NO: 9657 - DNA, 119 bp, homo sapiens
ttagggatgaagtaatgggcaaaaaactgacatataatcgacactacacaggtatctcttaagtacatataatattttgctaattattggactaaaaaatataaaagatagaaatacat

SEQ ID NO: 9658 - DNA, 119 bp, homo sapiens
tcttaagtacatagtaatattttgctaattattggactaaaaaatataaaagatagaaatacatcaattctttgtgtttcatctttctgcatgtacttttacactaaatacacagcaag

SEQ ID NO: 9659 - DNA, 119 bp, homo sapiens
aaatacatcaattactttgtgtttcatctttctgcatgtacttttacactaaatacacagcaagtactttactcggttaaagattatgcttttttctttagcaaccaaaacatgcttac

SEQ ID NO: 9660 - DNA, 119 bp, homo sapiens
acagcaagtacttatactcggttaaagattatgcttttttctttagcaaccaaaacatgcttacccttgttaatcagaacgtgtttcaaaagataaaatttcttaaagatacgcatggc

SEQ ID NO: 9661 - DNA, 119 bp, homo sapiens
atgcttacccttggttaatcagaacgtgtttcaaaagataaaatttcttaaagatacgcatggcatttaggctttaaacctatactcttgctggattggctgcttgatgattgctctct

SEQ ID NO: 9662 - DNA, 119 bp, homo sapiens
cgcatggcatttagggctttaaacctatactcttgctggattggctgcttgatgattgctctctttctttgtaatttccatctcaattttggctttgattttctcccaatctatttgga

SEQ ID NO: 9663 - DNA, 119 bp, homo sapiens
accttctgcataatgcaagtatcgtttattagtttcctgtttaccaaatgtctccaaaaacttttgacgtaagcaagaactgtatcaacatgtgttttgtattttacagccaattccag

SEQ ID NO: 9664 - DNA, 119 bp, homo sapiens
tctgcataatgcaagtatcgtttattagtttcctgtttaccaaatgtctccaaaaacttttgacggtaacaagaactgtatcaacatgtgttttgtattttacagccaattccagtgcc

SEQ ID NO: 9665 - DNA, 119 bp, homo sapiens
ctttcccagttgtagagattaatattgatctggattgcttgataaacaaggccagcctgaagaagtacttttcagcctcctgtatgttcccactaaacagtagtatgtgggccattttt

SEQ ID NO: 9666 - DNA, 119 bp, homo sapiens
agcctgaagaagtactatttcagcctcctgtatgttcccactaaacagtagtatgtgggccatttttgatctttagatggaagattttttatagaattgatgtactgaaccttatcaat

SEQ ID NO: 9667 - DNA, 119 bp, homo sapiens
cttaacaaagcgacaaagtctcacagcatcttcccattttgaactgcttacatattcatggagaatagcggatatggtgttatgctgatgtgaaccagggagccatcagctcttctaat

SEQ ID NO: 9668 - DNA, 119 bp, homo sapiens
tattcatggagaatagcaggatatggtgttatgctgatgtgaaccagggagccatcagctcttctaatattacttgatttccaacaaaactcacaatatggggatttttactaaattca

SEQ ID NO: 9669 - DNA, 119 bp, homo sapiens
cttgcatccctttcatataatgttttaggcaaaatgtctctgtccacataaactgtattggggtaatacacactataaatcgagtatcttgaagtccacaaaggatattgcatgtatcg

SEQ ID NO: 9670 - DNA, 119 bp, homo sapiens
gcaaaatgtctctgtccacataaactgtattggggtaataccacactataaatcgagtatcttgaagtcacaaaggatattgcatgtatcgttccatgccaaagtatgcaccattgttc

SEQ ID NO: 9671 - DNA, 119 bp, homo sapiens
caagcttgataatttgttcttccttcccaaatcgtttcacagaagtgatacagagatctctatttttataatgaaagcaatttttctatcattggtaagtcctttttgatccagagcaa

SEQ ID NO: 9672 - DNA, 119 bp, homo sapiens
ttcttccttcccaaatcgtttcacagaagtgatacagagatctctatttttatcaatgaaagcaattttctatcattggtaagtcctttttgatccagagcaatttccaagatttcatt

SEQ ID NO: 9673 - DNA, 119 bp, homo sapiens
ttttttcatcagctttgtctcttattgctatggtatcattactcaaagacacagtctgtgcattcagaaatctgttctcattccaggaaattttggagatgaaataaagcgcccttcat

SEQ ID NO: 9674 - DNA, 119 bp, homo sapiens
aaagacacagtctgtgcattcagaatatctgttctcattccaggaaattttggagatgaaataaagcgccttcatatgaatataaatagatactactaccatctacaagaagaaaatgt

SEQ ID NO: 9675 - DNA, 119 bp, homo sapiens
ctgcatggctcttcttttcgttaatgttacttgaaaatttttccactcccaatgttgttccaccacatggcaaaaacgacatgtccatttccacaggctccagcaatctgagtgccatc

SEQ ID NO: 9676 - DNA, 119 bp, homo sapiens
caccacatgtgcaaaaacgacatgtccatttccacaggctccagcaatctgagtgccatcgatagaccagcaatattaaatatgctgccagtgttgggtttttctaatgcatatgacca

SEQ ID NO: 9677 - DNA, 119 bp, homo sapiens
cccagttttatcacacaagcgtaaagtatgaaacgatccaacagcaaataattctccatctggagcccagcaactgaagtaatgggatgctcatgaggttgtgaattgtacagtgggcg

SEQ ID NO: 9678 - DNA, 119 bp, homo sapiens
gcgtaaagtatgaaacgatccaacagcaaataattctccatctggagcccaggcaactgaagtaatgggtgctcatgaggttgtgaattgtacagtgggcggccgtaactatcccatac

SEQ ID NO: 9679 - DNA, 119 bp, homo sapiens
catcagaacttgtgaggacaaagctttctgcctgggtttgtttctttacacccaaactttttggaaaccgtgaaaatcaatagggtaaatatcatcaggaagctttactatttgagttg

SEQ ID NO: 9680 - DNA, 119 bp, homo sapiens
cccaaactttttggaaaccagtgaaaatcaatagggtaaatatcatcaggaagctttactatttgagtttttcactggttaacaagttccacttcactatctggtgatcatcactacat

SEQ ID NO: 9681 - DNA, 119 bp, homo sapiens
aagctttactatttgagttgtttcactggttaacaagttccacttcactatctggtgatcatcactacagaatacagctcttcagcagtagtccagcccacacagcttactaattcttg

SEQ ID NO: 9682 - DNA, 119 bp, homo sapiens
ttcacagacctgcaataaagtctacaaaggatactttgagcagaattagtctaaatgtctaagaatgatatagtggggcctgtcatatctccttgacacataactggggactcttgctg

SEQ ID NO: 9683 - DNA, 119 bp, homo sapiens
aagaatgatgatagtggggcctgtcatatctccttgacacataactggggactcttgctgacaaaatatgggtcatgtgtttgagaaaatattattaattgccaccttcccatgtgaaa

SEQ ID NO: 9684 - DNA, 119 bp, homo sapiens
acaaaatatagggtcatgtgtttgagaaaatattattaattgccaccttcccatgtgaaataatgaggactgactgctcagatttccccaacttgtccttcactttatcatgaatgtaa

SEQ ID NO: 9685 - DNA, 119 bp, homo sapiens
aacacatgatcttaaatactttaaaacaatttaggtaaacagccactaaaggaatgaaaaaaaaaatctttcttcaactaggatataaaatagagaaacttttaacaatactataatta

SEQ ID NO: 9686 - DNA, 119 bp, homo sapiens
agccactaaaggaatgaaaaaaaaaatctattcttcaactaggatataaaatagagaaacttttaacaaactataattaagaaaatccaataagatttataagcattaaaaggatatgc

SEQ ID NO: 9687 - DNA, 119 bp, homo sapiens
aggatataaaatagagaaacttttaacaatactataattaagaaaatccaataagatttataagcattaaaggatatgctttggttcttttaaaagagatatctttagtctcatgactc

SEQ ID NO: 9688 - DNA, 119 bp, homo sapiens
agaaaatccaataagatttataagcattaaaaggatatgctttggttcttttaaaagagatatctttagctcatgactccacttccagcaaaaatttaagatgccacttgattgtattt

SEQ ID NO: 9689 - DNA, 119 bp, homo sapiens
ctcaagttccaggaaagcggtggcgattgctctcaaatacctggtacctccccgtcaccatagtgactttaagagttacgctcccttcctcttcccgcgatacttctacgcggcacgtc

SEQ ID NO: 9690 - DNA, 119 bp, homo sapiens
gtcaccatagtgacttctaagagttacgctcccttcctcttcccgcgatacttctacgcggcacgtcatcgagtgggcccgagaccccgcctctcggcgagcccgccctcttctgaaga

SEQ ID NO: 9691 - DNA, 119 bp, homo sapiens
ctacgcggcacgtcatccgagtgggcccgagaccccgcctctcggcgagcccgccctcttctgaagagggtttctggaccactgagccccgcctcccactgtgagcggaaccctaccgt

SEQ ID NO: 9692 - DNA, 119 bp, homo sapiens
ccctcttctgaagaggcgtttctggaccactgagccccgcctcccactgtgagcggaaccctaccgttttaaaaaaatctttttcaaaacttgccaggttgtctttccaaatattttta

SEQ ID NO: 9693 - DNA, 119 bp, homo sapiens
cggaaccctaccgtttttaaaaaaatctttttcaaaacttgccaggttgtctttccaaatatttttaatatagtgctgctgctgtagaccacagagaaaagaatccctcgctcttcctt

SEQ ID NO: 9694 - DNA, 119 bp, homo sapiens
tccaaatatttttaataatagtgctgctgctgtagaccacagagaaaagaatccctcgctcttccttttacttagtagaaacttctaccgcgtaggtcccgccaggagttcgcgcatgc

SEQ ID NO: 9695 - DNA, 119 bp, homo sapiens
gtgctgcccgcctagaaagggtgaagtggttgtttccgtgacggactgagtacgggtgcctgtcaggctttgcggaagtccatgcgccattgggagggcctcggccgcggctctgtgcc

SEQ ID NO: 9696 - DNA, 119 bp, homo sapiens
agtacgggtgcctgtcaggctcttgcggaagtccatgcgccattgggagggcctcggccgcggctctgtcccttgctgctgagggccacttcctgggtcattcctggaccgggagccgg

SEQ ID NO: 9697 - DNA, 119 bp, homo sapiens
gggcctcggccgcggctctgtgcccttgctgctgagggccacttcctgggtcattcctggaccgggagcgggctggggctcacacgggggctcccgcgtggccgtctcggcgcctgcgt

SEQ ID NO: 9698 - DNA, 119 bp, homo sapiens
ggtcattcctggaccgggagccgggctggggctcacacgggggctcccgcgtggccgtctcggcgcctggtgacctccccgccggcgggatgtggcgactacgtcgggccgctgtggcc

SEQ ID NO: 9699 - DNA, 119 bp, homo sapiens
tgaggtctgccagtctttagtgaaacacagctctggaataaaaggaagtttaccactacaaaaactacactggtttcacgaagcatttatcattcacatcatcctaccttaaagcttca

SEQ ID NO: 9700 - DNA, 119 bp, homo sapiens
tctgccagtctttagtgaaacacagctctggaataaaaggaagtttaccactacaaaaactacatctggttcacgaagcatttatcattcacatcatcctaccttaaagcttcaacgac

SEQ ID NO: 9701 - DNA, 119 bp, homo sapiens
gacaaaccttcctttacgtaaactgaaattctctccaattaaatatggctaccagcctcgcaggaattttggccagcaagattagctacgagactcttaaaacttcgctatctcatact

SEQ ID NO: 9702 - DNA, 119 bp, homo sapiens
attaaatatggctaccagcctcgcaggaatttttggccagcaagattagctacgagactcttaaaacttgctatctcatactaggatcggctgttgggggtggctacacagccaaaaag

SEQ ID NO: 9703 - DNA, 119 bp, homo sapiens
atggatctgtggatgctgaacgcagtattgttacagacttggtcagtcaaatggaccctcatggaaggaaaccatattcgttttgaccaaagtagacctggcagagaaaaatgtagcca

SEQ ID NO: 9704 - DNA, 119 bp, homo sapiens
gatgctgaacgcagtattgttacagacttggtcagtcaaatggaccctcatggaaggagaaccatattcttttgaccaaagtagacctggcagagaaaaatgtagccagtccaagcagg

SEQ ID NO: 9705 - DNA, 119 bp, homo sapiens
ggaggaaatccttcaacaatctttgtgggaaagagtatcaactcatgtgattgaaaacatctaccttccgctgcgcagaccatgaattcaggaacttttaacaccacagtggatatcaa

SEQ ID NO: 9706 - DNA, 119 bp, homo sapiens
gtgattgaaaacatctaccttccagctgcgcagaccatgaattcaggaacttttaacaccacagtggattcaagcttaaacagtggactgataaacaacttcctaataaagcagtagag

SEQ ID NO: 9707 - DNA, 119 bp, homo sapiens
gttgcttgggagaccctacaagaagaattttcccgctttatgacagaaccgaaagggaaagagcatgatacatatttgataaacttaaagaggctgttaaggaagaaagtattaaacga

SEQ ID NO: 9708 - DNA, 119 bp, homo sapiens
cgctttatgacagaaccgaaagggaaagagcatgatgacatatttgataaacttaaagaggctgttaagaagaaagtattaaacgacacaagtggaatgactttgcggaggacagcttg

SEQ ID NO: 9709 - DNA, 119 bp, homo sapiens
tgtgttcacaatgaaaccaagaatgaattggagaagatgttgaaatgtaatgaggagcacccagcttatttgcaagtgatgaaataaccacagtccggaagaaccttgaatcccgagga

SEQ ID NO: 9710 - DNA, 119 bp, homo sapiens
aatgaattggagaagatgttgaaatgtaatgaggagcacccagcttatcttgcaagtgatgaaataacccagtccggaagaaccttgaatcccgaggagtagaagtagatccaagcttg

SEQ ID NO: 9711 - DNA, 119 bp, homo sapiens
aatcgtactcataatcagctctgcatacatctgaagaacaaaaacatcaacgtcttttgtccagcctcttttcttctgctgttccacctttctaaacatacaataaagtcatgggataa

SEQ ID NO: 9712 - DNA, 119 bp, homo sapiens
ttgtccagcctctttttcttctgctgttccacctttctaaacatacaataaagtcatgggataaaaatatcgatgtatgttacgggcgctttaaccatcagctgcctctcgaatggaag

SEQ ID NO: 9713 - DNA, 119 bp, homo sapiens
tgggataaaaataatcgatgtatgttacgggcgctttaaccatcagctgcctctcgaatggaagaacagggtaatggattaacatcctattttgttgtactaaagtgacaaatcggaat

SEQ ID NO: 9714 - DNA, 119 bp, homo sapiens
aatggaagaacagtggtaatggattaacatcctattttgttgtactaaagtgacaaatcggaataatatattggtatggccattaggttcagtccttgaagataagaaacttgttctct

SEQ ID NO: 9715 - DNA, 119 bp, homo sapiens
atcggaataatataattggtatggccattaggttcagtccttgaagataagaaacttgttctctgtttgtgtcttatttgtggtggcactcgtttaatggattaactgaggttgctcaa

SEQ ID NO: 9716 - DNA, 119 bp, homo sapiens
tgttctctgtttgttgtcttatttgtggtggcactcgtttaatggattaactgaggttgctcaatgttcgtttcttttccagaaatacaatgctaggtgttttgaaataaaacttatat

SEQ ID NO: 9717 - DNA, 119 bp, homo sapiens
ttgctcaatgttcagtttcttttccagaaatacaatgctaggtgttttgaaataaaacttatatagcaatgtttaaagttatcaattgtatataaaatcacagtagcctgctaaatcat

SEQ ID NO: 9718 - DNA, 119 bp, homo sapiens
acttatatagcaattgtttaaagttatcaattgtatataaaatcacagtagcctgctaaatcattgtattgtctgtagtattctattcccagaaactatttgaccatgataattcagtt

SEQ ID NO: 9719 - DNA, 119 bp, homo sapiens
taaatcattgtatgtgtctgtagtattctattcccagaaactatttgaccatgataattcagtttatatcaccacatgaaagaaaaatgggtaacagaagaacccttaaaacaggttaa

SEQ ID NO: 9720 - DNA, 119 bp, homo sapiens
attcagtttatattcaccacatgaaagaaaaatgggtaacagaagaacccttaaaacaggttaatttggttgtaacgttcagtgaaagaaatttcaacccttcatagccagcgaagaaa

SEQ ID NO: 9721 - DNA, 119 bp, homo sapiens
caggttaatttggattgtaacgttcagtgaaagaaatttcaacccttcatagccagcgaagaaatttgcttggaagccaagtcagtaccagcttacctatttgattcagttgctgtttt

SEQ ID NO: 9722 - DNA, 119 bp, homo sapiens
cgaagaaatttgccttggaagccaagtcagtaccagcttacctatttgattcagttgctgttttctcacctctatatccatttgaaattgatttattttagatgttgtatacttacgtt

SEQ ID NO: 9723 - DNA, 119 bp, homo sapiens
gctgttttctcactctctatatccatttgaaattgatttattttagatgttgtatacttacgttaggcttctgttaatagtggtttttctcctgttgacagagccaccggattatgaca

SEQ ID NO: 9724 - DNA, 119 bp, homo sapiens
cttacgttaggctttctgttaatagtggtttttctcctgttgacagagccaccggattatgacacaggagaggaagattaaggataatcaattgactaatttcatttagaatattatca

SEQ ID NO: 9725 - DNA, 119 bp, homo sapiens
ttatgacacaggatgaggaagattaaggataatcaattgactaatttcatttagaatattatcaaacattcaactaggtatcagaaaaaggctttctttcataagactattttaaatag

SEQ ID NO: 9726 - DNA, 119 bp, homo sapiens
tattatcaaacatttcaactaggtatcagaaaaaggctttctttcataagactattttaaatagaaatttttcaacaattaaagtaatgttgaccatccccctctcagctgaataaaga

SEQ ID NO: 9727 - DNA, 119 bp, homo sapiens
ttaaatagaaattatttcaacaattaaagtaatgttgaccatccccctctcagctgaataaagaaaaattagttcaatttattgcaatttaattacaatactaccttcacaacattttc

SEQ ID NO: 9728 - DNA, 119 bp, homo sapiens
ggctaaaggacattcaagcaaagaaatgctttctttacttaaaatgtctatctcatttgctgccttttcctaagcctttactttgttaataaaagtgtccattgtgtgatgtttttgat

SEQ ID NO: 9729 - DNA, 119 bp, homo sapiens
gctgccttttcactaagcctttactttgttaataaaagtgtccattgtgtgatgtttttgattttacagttgctaaatcttattttcttggagttgctttttggtaacagccccattgc

SEQ ID NO: 9730 - DNA, 119 bp, homo sapiens
tgattttacagtttgctaaatcttattttcttggagttgctttttggtaacagccccattgctactcccattttattgttttacatcaatgcatgcttcgttgtgatccctcaagatgt

SEQ ID NO: 9731 - DNA, 119 bp, homo sapiens
ttgctactccccattttattgttttacatcaatgcatgcttcgttgtgatccctcaagatgtaacacttgtatgctcggttgaggatatgaaaaaatacttccgaaaccaggaattcaa

SEQ ID NO: 9732 - DNA, 119 bp, homo sapiens
atgtaacacttggtatgctcggttgaggatatgaaaaaatacttccgaaaccaggaattcaatgtatgttgttttatactgtttgataagaaaagtaggtccagccttaagcagcacag

SEQ ID NO: 9733 - DNA, 119 bp, homo sapiens
tcaatgtatgtttgttttatactgtttgataagaaaagtaggtccagccttaagcagcacagatgcgctgtagatgcatagtcaggaactttttttatttcttttaggtctagggacag

SEQ ID NO: 9734 - DNA, 119 bp, homo sapiens
acagatgcgctggtagatgcatagtcaggaactttttttatttcttttaggtctagggacaggagtgaaagaaagggaggagagctctattatgttctatacacagattaggagatgac

SEQ ID NO: 9735 - DNA, 119 bp, homo sapiens
acaggagtgaatagaaagggaggagagctctattatgttctatacacagattaggagatgaccttactggtacacccctctaaccagtgcttacaggttaatgcatgttaatgaatatt

SEQ ID NO: 9736 - DNA, 119 bp, homo sapiens
tgaccttactgggtacacccctctaaccagtgcttacaggttaatgcatgttaatgaatatttttgcagtgtaaagcataacaattacaactacacatctatttctaaagaataaaaca

SEQ ID NO: 9737 - DNA, 119 bp, homo sapiens
tatttttgcagttgtaaagcataacaattacaactacacatctatttctaaagaataaaacaggaccattttatttacttctgtcaactatagaaagaaagaccttcagctgtatttcc

SEQ ID NO: 9738 - DNA, 119 bp, homo sapiens
aacaggaccatatttatttacttctgtcaactatagaaagaaagaccttcagctgtatttccacagattctcccaaggaaaaggctaatattagtcactactgttatcacatccctttg

SEQ ID NO: 9739 - DNA, 119 bp, homo sapiens
ttccacagatttctcccaaggaaaaggctaatattagtcactactgttatcacatccctttgtataagtttaaaaagagatggagggagatcttcatttctttgaggagatcagtattg

SEQ ID NO: 9740 - DNA, 119 bp, homo sapiens
tttgtataagttttaaaaagagatggagggagatcttcatttctttgaggagatcagtattgtaacgtagtgaatagatgataacaattaatattactaaaagtcccacatgagagtcc

SEQ ID NO: 9741 - DNA, 119 bp, homo sapiens
attgtaacgtatgtgaatagatgataacaattaatattactaaaagtcccacatgagagtcctgacgcctctccatgccccacagtaatgtggcttctttcatgggtttttttttcttc

SEQ ID NO: 9742 - DNA, 119 bp, homo sapiens
gtcctgacgccctctccatgccccacagtaatgtggcttctttcatgggtttttttttcttctttttagtgatctcatcctaagcatgctttatttttccttgaaagctaggtatttat

SEQ ID NO: 9743 - DNA, 119 bp, homo sapiens
cttctttttagctgatctcatcctaagcatgctttatttttccttgaaagctaggtatttatcaactgcgatgttattgaaagaaaataaaattcagtctcaagagtaaaccctgtgtc

SEQ ID NO: 9744 - DNA, 119 bp, homo sapiens
ttatcaactgcagatgttattgaaagaaaataaaattcagtctcaagagtaaaccctgtgtcttgtgtcgtagttcaaaagtcagaaatgattctaatttaaacaaaaagatactaaat

SEQ ID NO: 9745 - DNA, 119 bp, homo sapiens
tgtcttgtgtctgtagttcaaaagtcagaaatgattctaatttaaacaaaaagatactaaatatacagagttaaattcgaactagccacagaatcatttgtttttatgtcagaatttgc

SEQ ID NO: 9746 - DNA, 119 bp, homo sapiens
aaatatacagaagttaaattcgaactagccacagaatcatttgtttttatgtcagaatttgcaaagagtgagtggacaaagctctgtatggaagactgaacaactgtaaatagatgata

SEQ ID NO: 9747 - DNA, 119 bp, homo sapiens
ttgcaaagagtggagtggacaaagctctgtatggaagactgaacaactgtaaatagatgatatccaaactaatttggctaggacttcaattttaaaaatcagtgtacctaggcagtgca

SEQ ID NO: 9748 - DNA, 119 bp, homo sapiens
gatatccaaacttaatttggctaggacttcaattttaaaaatcagtgtacctaggcagtgcacagcacgaataagtggcccttgcagcttccccgtttaacccactgtgctatagttgc

SEQ ID NO: 9749 - DNA, 119 bp, homo sapiens
tgcacagcacgaaataagtggcccttgcagcttccccgtttaacccactgtgctatagttgcgggtggacagtcaacctttctagtagtttatgatattgccctctttgtattcccatt

SEQ ID NO: 9750 - DNA, 119 bp, homo sapiens
ttgcgggtggaacagtcaacctttctagtagtttatgatattgccctctttgtattcccattttctacattttttccgcagacttctttctgcaaattattcagcctccaaatgcaaat

SEQ ID NO: 9751 - DNA, 119 bp, homo sapiens
cattttctacagttttttccgcagacttctttctgcaaattattcagcctccaaatgcaaatgaatgattaaaaataagtagggaacatggcagagagtggtgcttcccagcctcacaa

SEQ ID NO: 9752 - DNA, 119 bp, homo sapiens
aaatgaatgatataaaaataagtagggaacatggcagagagtggtgcttcccagcctcacaatgtgggatttgacataggatgagagtcagagtataggtttaaaagataaaatcttta

SEQ ID NO: 9753 - DNA, 119 bp, homo sapiens
acaatgtgggaatttgacataggatgagagtcagagtataggtttaaaagataaaatctttagttaatattttgtatttatttattctagatgtatgtatctgaggaaagaaatctggt

SEQ ID NO: 9754 - DNA, 119 bp, homo sapiens
tttagttaataattttgtatttatttattctagatgtatgtatctgaggaaagaaatctggtatttttgtttccaataaaggggatcaaagtaatggtttttctctcagttctctaagc

SEQ ID NO: 9755 - DNA, 119 bp, homo sapiens
tggtatttttgctttccaataaaggggatcaaagtaatggtttttctctcagttctctaagctggtctagttatagctctagcagtatggaaatgtgctttaaaatatgcttacctttt

SEQ ID NO: 9756 - DNA, 119 bp, homo sapiens
aagctggtctatgttatagctctagcagtatggaaatgtgctttaaaatatgcttaccttttgaatgatatggctatatgttgttgagatatttgaaacttaccttgttttcacttgtg

SEQ ID NO: 9757 - DNA, 119 bp, homo sapiens
ttttgaatgatcatggctatatgttgttgagatatttgaaacttaccttgttttcacttgtgcactgtgatgaactttgtattatttttttaaaaccttcacattacgtgtagatatta

SEQ ID NO: 9758 - DNA, 119 bp, homo sapiens
tgtgcactgtgaatgaactttgtattatttttttaaaaccttcacattacgtgtagatattattgcaactatattttgcctgagcttgatcaaaggtcatttgtgtagatgagtaatta

SEQ ID NO: 9759 - DNA, 119 bp, homo sapiens
attattgcaacttatattttgcctgagcttgatcaaaggtcatttgtgtagatgagtaattaaaaaatattaaatcacattataattctattattggagagcatcttttaaattttttt

SEQ ID NO: 9760 - DNA, 119 bp, homo sapiens
attaaaaaatatttaaatcacattataattctattattggagagcatcttttaaatttttttctgttttacgagggaaagagaaacctgtatacctagggtcattatttgaccccatag

SEQ ID NO: 9761 - DNA, 119 bp, homo sapiens
ttttctgttttaacgagggaaagagaaacctgtatacctagggtcattatttgaccccatagtataaccgattcatggtctaacaagctctcagtgtggcttttctctgaatgcttgaa

SEQ ID NO: 9762 - DNA, 119 bp, homo sapiens
atagtataaccagattcatggtctaacaagctctcagtgtggcttttctctgaatgcttgaatttcacagccttgcatttcacagttgtactccatggtcaaccggtgctttttttcac

SEQ ID NO: 9763 - DNA, 119 bp, homo sapiens
tgaatttcacatgccttgcatttcacagttgtactccatggtcaaccggtgctttttttcacatcgtggacttgtcaaaacattttgttattttccttggtaaaatatataaaaaaggt

SEQ ID NO: 9764 - DNA, 119 bp, homo sapiens
actaagaaagactttgctgatgacagggtttcctgggagtccatgcgtgcctggagcagcagcgtctccgggacaggcagccaccatgagcctcagtgaggagcaggcccggagctttc

SEQ ID NO: 9765 - DNA, 119 bp, homo sapiens
ttgggaagaaactgagccctgagaatgtggccgcggcctgcgaggacgggtgcccgccggactgcgacacctccgggacctctgccaggtggaggagagcacggcgctgctggagctgg

SEQ ID NO: 9766 - DNA, 119 bp, homo sapiens
ccggactgcgacagcctccgggacctctgccaggtggaggagagcacggcgctgctggagctggtgcagatatgcaggagagcatcaacatggagcgcgtggtcttcaaggtcctgcgg

SEQ ID NO: 9767 - DNA, 119 bp, homo sapiens
ggagctggtgcaggatatgcaggagagcatcaacatggagcgcgtggtcttcaaggtcctgcggcgccttgcaccctcctgcaggccgaccgctgcagcctcttcatgtaccgccagcg

SEQ ID NO: 9768 - DNA, 119 bp, homo sapiens
tcctgcggcgcctctgcaccctcctgcaggccgaccgctgcagcctcttcatgtaccgccagcgcaacgcgtggccgagctggccaccaggcttttcagcgtgcagccggacagcgtcc

SEQ ID NO: 9769 - DNA, 119 bp, homo sapiens
cgccagcgcaacggcgtggccgagctggccaccaggcttttcagcgtgcagccggacagcgtcctggagactgcctggtgccccccgactccgagatcgtcttcccactggacatcggg

SEQ ID NO: 9770 - DNA, 119 bp, homo sapiens
cagcgtcctggaggactgcctggtgccccccgactccgagatcgtcttcccactggacatcggggtcgtggccacgtggctcagaccaaaaagatggtgaacgtcgaggacgtggccga

SEQ ID NO: 9771 - DNA, 119 bp, homo sapiens
tgccctcacttcagctcatttgctgacgagctcactgactacaagacaaagaatatgctggccacaccctcatgaatggcaaagacgtcgtggcggtgatcatggcagtgaacaagctc

SEQ ID NO: 9772 - DNA, 119 bp, homo sapiens
actgactacaagacaaagaatatgctggccacacccatcatgaatggcaaagacgtcgtggcggtgatctggcagtgaacaagctcaacggcccattcttcaccagcgaagacgaagat

SEQ ID NO: 9773 - DNA, 119 bp, homo sapiens
accgcagcggaggagagggagctggcaccatgcggtagaagacccagcggccgccgcgagtgtgaggagcagggcctggtggggcctgggtctgggccttgaccaaggaggcagagaaa

SEQ ID NO: 9774 - DNA, 119 bp, homo sapiens
ggcaccatgcggtagaagacccagcggccgccgcgagtgtgaggaggcagggcctggtggggcctgggttgggccttgaccaaggaggcagagaaaggtggcccaaggagggccctggg

SEQ ID NO: 9775 - DNA, 119 bp, homo sapiens
gtgctgctgtggtcggccaacaaggtgtttgaggagctgacggacatcgagaggcagttccacaaggcctctacacggtgcgggcctacctcaactgcgagcggtactccgtgggcctc

SEQ ID NO: 9776 - DNA, 119 bp, homo sapiens
aaggtgtttgaggagctgacggacatcgagaggcagttccacaaggccttctacacggtgcgggcctactcaactgcgagcggtactccgtgggcctcctggacatgaccaaggagaag

SEQ ID NO: 9777 - DNA, 119 bp, homo sapiens
gaaggggccctggacgactccgggtggctcatcaagaatgtgctgtccatgcccatcgtcaacaagaagaggagattgtgggagtcgccacattttacaacaggaaagacgggaagccc

SEQ ID NO: 9778 - DNA, 119 bp, homo sapiens
atcaagaatgtgctgtccatgcccatcgtcaacaagaaggaggagattgtgggagtcgccacattttacacaggaaagacgggaagccctttgacgaacaggacgaggttctcatggag

SEQ ID NO: 9779 - DNA, 119 bp, homo sapiens
tccctgacacagttcctgggctggtcagtgatgaacaccgacacctacgacaagatgaacaagctggagaccgcaaggacatcgcacaggacatggtcctttaccacgtgaagtgcgac

SEQ ID NO: 9780 - DNA, 119 bp, homo sapiens
tcagtgatgaacaccgacacctacgacaagatgaacaagctggagaaccgcaaggacatcgcacaggactggtcctttaccacgtgaagtgcgacagggacgagatccagctcatcctg

SEQ ID NO: 9781 - DNA, 119 bp, homo sapiens
aaggaggagctgccagggcccaccacatttgacatctacgaattccacttctctgacctggagtgcaccaactggacctggtcaaatgtggcatccagatgtactacgagctgggcgtg

SEQ ID NO: 9782 - DNA, 119 bp, homo sapiens
tttgacatctacgaattccacttctctgacctggagtgcaccgaactggacctggtcaaatgtggcatcagatgtactacgagctgggcgtggtccgaaagttccagatcccccaggag

SEQ ID NO: 9783 - DNA, 119 bp, homo sapiens
gagttctctcgtttccacgaagagatcctgcccatgttcgaccgactgcagaacaataggaaagagtggaggcgctggctgatgagtatgaggccaaagtgaaggctctggaggagaag

SEQ ID NO: 9784 - DNA, 119 bp, homo sapiens
ccatgttcgaccgactgcagaacaataggaaagagtggaaggcgctggctgatgagtatgaggccaaaggaaggctctggaggagaaggaggaggaggagagggtggcagccaagaaag

SEQ ID NO: 9785 - DNA, 119 bp, homo sapiens
taggcacagaaatttgcaatggcggcccagcacccaagtcttcaacctgctgtatcctgtgagcactggcccatggggaccctatggctccctcaatcttcacccactaggatttgggt

SEQ ID NO: 9786 - DNA, 119 bp, homo sapiens
caagtcttcaacctgctgtatcctgtgagcactggtcccatggggaccctatggctccctcaatcttcaccactaggatttgggttctgcctgtggctatttgctacaagaggttagga

SEQ ID NO: 9787 - DNA, 119 bp, homo sapiens
gtcccatggggaccctatggctccctcaatcttcacccactaggatttgggttctgcctgtggctatttctacaagaggttaggaagcccaagaaaatgactgaagatcattctggata

SEQ ID NO: 9788 - DNA, 119 bp, homo sapiens
tgtttttataaactgaagccaactgtgaataaactgtagcctacattactcatccatttttggatagttccactgggagacctttgaaaagggtccatgaactctgaaatcactgagaa

SEQ ID NO: 9789 - DNA, 119 bp, homo sapiens
ttttggatagttaccactgggagacctttgaaaagggtccatgaactctgaaatcactgagaacatttgagccacacatgtacatatgtgtacacaggtagacagatggacacaggccg

SEQ ID NO: 9790 - DNA, 119 bp, homo sapiens
tgagaacatttgcagccacacatgtacatatgtgtacacaggtagacagatggacacaggccgtttctctccagtttaggaaaacacacatgctcaggaattcagaataaaataaacag

SEQ ID NO: 9791 - DNA, 119 bp, homo sapiens
aggccgtttctcatccagtttaggaaaacacacatgctcaggaattcagaataaaataaacagaaaactcttgcccattatctgtggtaaaatgatagcggaagccacactacatttga

SEQ ID NO: 9792 - DNA, 119 bp, homo sapiens
aaacagaaaactacttgcccattatctgtggtaaaatgatagcggaagccacactacatttgacccatcgaaaattctgccagagaggtcaaggccatgagtaaagcggccatccaact

SEQ ID NO: 9793 - DNA, 119 bp, homo sapiens
gtgcagaaggccgcgctagccggctcttcagcagcgagtgcagattgctcccccgcggccgcagatctccgtttgcgccgcgttcagctgctcccgaacaacttttctgccggcccaga

SEQ ID NO: 9794 - DNA, 119 bp, homo sapiens
tgctcccccgcggccgcagatctcccgtttgcgccgcgttcagctgctcccgaacaacttttctgccggccagaggccccagggcgtcgcagcgccgcgtgcggcccactcacgggccg

SEQ ID NO: 9795 - DNA, 119 bp, homo sapiens
gcaggatggactccaacactgctccgctgggcccctcctgcccacagcccccgccagcaccgcagccccggcgcgttcccgactcaatgccacagcctcgttggagcaggagaggagcg

SEQ ID NO: 9796 - DNA, 119 bp, homo sapiens
accgcagccccaggcgcgttcccgactcaatgccacagcctcgttggagcaggagaggagcgaaaggcccgagcacccggaccccaggctggccctggccctggtgttagagacgcagc

SEQ ID NO: 9797 - DNA, 119 bp, homo sapiens
agcgaaaggccccgagcacccggaccccaggctggccctggccctggtgttagagacgcagcggcccccctgaaccccaggcccagcataccaggagccgggaaagagcagacggcacc

SEQ ID NO: 9798 - DNA, 119 bp, homo sapiens
gtggggaagcactacctgcagttggccggcgacacggatgaagaactcaacagctgcaccgctgtggacggctggtcctcgccgcgaagcagggccgtcgcgaggctgtgaagctgctt

SEQ ID NO: 9799 - DNA, 119 bp, homo sapiens
ccggcgacacggatgaagaactcaacagctgcaccgctgtggactggctggtcctcgccgcgaagcaggccgtcgcgaggctgtgaagctgcttcgccggtgcttggcggacagaagag

SEQ ID NO: 9800 - DNA, 119 bp, homo sapiens
gcatcacgtccgagaacgaacgggaggtgaggcagctctcctccgagaccgacctggagagggccgtgccaaggcagccctggtcatgtactggaagctcaaccccaagaagaagaagc

SEQ ID NO: 9801 - DNA, 119 bp, homo sapiens
acctggagagggccgtgcgcaaggcagccctggtcatgtactggaagctcaaccccaagaagaagaagcggtggccgtggcggagctgctggagaatgtcggccaggtcaacgagcacg

SEQ ID NO: 9802 - DNA, 119 bp, homo sapiens
ccaagaactacatcgcgctggatgactttgtggagatcactaagaagtacgccaagggcgtcatccccacagcctgttcctgcaggacgacgaagatgatgacgagctggcggggaaga

SEQ ID NO: 9803 - DNA, 119 bp, homo sapiens
gtggagatcactaagaagtacgccaagggcgtcatccccagcagcctgttcctgcaggacgacgaagatatgacgagctggcggggaagagccctgaggacctgccactgcgtctgaag

SEQ ID NO: 9804 - DNA, 119 bp, homo sapiens
gtggtcaagtaccccctgcacgccatcatggagatcaaggagtacctgattgacatggcctccagggcagcatgcactggctgtccaccatcatccccacgcaccacatcaacgcgctc

SEQ ID NO: 9805 - DNA, 119 bp, homo sapiens
ctccagggcaggcatgcactggctgtccaccatcatccccacgcaccacatcaacgcgctcatcttcttttcatcgtcagcaacctcaccatcgacttcttcgccttcttcatcccgct

SEQ ID NO: 9806 - DNA, 119 bp, homo sapiens
tcatcttcttcttcatcgtcagcaacctcaccatcgacttcttcgccttcttcatcccgctggtcatctctacctgtccttcatctccatggtgatctgcaccctcaaggtgttccagg

SEQ ID NO: 9807 - DNA, 119 bp, homo sapiens
ctggtcatcttctacctgtccttcatctccatggtgatctgcaccctcaaggtgttccaggacagcaagcctgggagaacttccgcaccctcaccgacctgctgctgcgcttcgagccc

SEQ ID NO: 9808 - DNA, 119 bp, homo sapiens
ggacagcaaggcctgggagaacttccgcaccctcaccgacctgctgctgcgcttcgagcccaacctggagtggagcaggccgaggtcaacttcggctggaaccacctggagccctatgc

SEQ ID NO: 9809 - DNA, 119 bp, homo sapiens
ccaacctggatgtggagcaggccgaggtcaacttcggctggaaccacctggagccctatgcccatttccgctctctgtcttcttcgtcatcttctccttccccatcgccagcaaggact

SEQ ID NO: 9810 - DNA, 119 bp, homo sapiens
gcccatttcctgctctctgtcttcttcgtcatcttctccttccccatcgccagcaaggactgcatccccgctcggagctggctgtcatcaccggcttctttaccgtgaccagctacctg

SEQ ID NO: 9811 - DNA, 119 bp, homo sapiens
ctgcatcccctgctcggagctggctgtcatcaccggcttctttaccgtgaccagctacctgagcctgagacccatgcagagccctacacgcgcagggccctggccaccgaggtcaccgc

SEQ ID NO: 9812 - DNA, 119 bp, homo sapiens
tgagcctgagcacccatgcagagccctacacgcgcagggccctggccaccgaggtcaccgccggcctgcatcgctgctgccctccatgcccttgaattggccctacctgaaggtccttg

SEQ ID NO: 9813 - DNA, 119 bp, homo sapiens
gccggcctgctatcgctgctgccctccatgcccttgaattggccctacctgaaggtccttggccagacctcatcaccgtgcctgtcggccacctggtcgtcctcaacgtcagcgtcccg

SEQ ID NO: 9814 - DNA, 119 bp, homo sapiens
tggccagaccttcatcaccgtgcctgtcggccacctggtcgtcctcaacgtcagcgtcccgtgcctgcttatgtctacctgctctatctcttcttccgcatggcacagctgaggaattt

SEQ ID NO: 9815 - DNA, 119 bp, homo sapiens
cgtgcctgctctatgtctacctgctctatctcttcttccgcatggcacagctgaggaatttcaagggcactactgctaccttgtgccctacctggtgtgcttcatgtggtgtgagctct

SEQ ID NO: 9816 - DNA, 119 bp, homo sapiens
ttcaagggcacctactgctaccttgtgccctacctggtgtgcttcatgtggtgtgagctctccgtggtctcctgctggagtccaccggcctggggctgctccgcgcctccatcggctac

SEQ ID NO: 9817 - DNA, 119 bp, homo sapiens
ctccgtggtcatcctgctggagtccaccggcctggggctgctccgcgcctccatcggctacttcctcttctctttgccctccccatcctggtggccggcctggccctggtgggcgtgct

SEQ ID NO: 9818 - DNA, 119 bp, homo sapiens
acttcctcttcctctttgccctccccatcctggtggccggcctggccctggtgggcgtgctgcagttcgccggtggttcacgtctctggagctcaccaagatcgcagtcaccgtggcgg

SEQ ID NO: 9819 - DNA, 119 bp, homo sapiens
ctgcagttcgcccggtggttcacgtctctggagctcaccaagatcgcagtcaccgtggcggtctgtagttgcccctgctgttgcgctggtggaccaaggccagcttctctgtggtgggg

SEQ ID NO: 9820 - DNA, 119 bp, homo sapiens
ggtctgtagtgtgcccctgctgttgcgctggtggaccaaggccagcttctctgtggtggggatggtgaatccctgacgcggagctccatggtcaagctcatcctggtgtggctcacggc

SEQ ID NO: 9821 - DNA, 119 bp, homo sapiens
ggatggtgaagtccctgacgcggagctccatggtcaagctcatcctggtgtggctcacggccatcgtgcgttctgctggttctatgtgtaccgctcagagggcatgaaggtctacaact

SEQ ID NO: 9822 - DNA, 119 bp, homo sapiens
gccatcgtgctgttctgctggttctatgtgtaccgctcagagggcatgaaggtctacaactccacactgcctggcagcagtatggtgcgctgtgcgggccacgcgcctggaaggagacc

SEQ ID NO: 9823 - DNA, 119 bp, homo sapiens
ctccacactgacctggcagcagtatggtgcgctgtgcgggccacgcgcctggaaggagaccaacatggccgcacccagatcctctgcagccacctggagggccacagggtcacgtggac

SEQ ID NO: 9824 - DNA, 119 bp, homo sapiens
ccaacatggcgcgcacccagatcctctgcagccacctggagggccacagggtcacgtggaccggccgctcaagtacgtccgcgtgactgacatcgacaacagcgccgagtctgccatca

SEQ ID NO: 9825 - DNA, 119 bp, homo sapiens
accggccgcttcaagtacgtccgcgtgactgacatcgacaacagcgccgagtctgccatcaacatgctccgttcttcatcggcgactggatgcgctgcctctacggcgaggcctaccct

SEQ ID NO: 9826 - DNA, 119 bp, homo sapiens
caacatgctcccgttcttcatcggcgactggatgcgctgcctctacggcgaggcctaccctgcctgcagcctggcaacacctccacggccgaggaggagctctgtcgccttaagctgct

SEQ ID NO: 9827 - DNA, 119 bp, homo sapiens
ctgcctgcagccctggcaacacctccacggccgaggaggagctctgtcgccttaagctgctggccaagccccctgccacatcaagaagttcgaccgctacaagtttgagattaccgtgg

SEQ ID NO: 9828 - DNA, 119 bp, homo sapiens
ctggccaagcacccctgccacatcaagaagttcgaccgctacaagtttgagattaccgtgggcatgccatcagcagcggcgctgacggctcgcgcagccgcgaggaggacgacgtcacc

SEQ ID NO: 9829 - DNA, 119 bp, homo sapiens
gggcatgccattcagcagcggcgctgacggctcgcgcagccgcgaggaggacgacgtcaccaaggacatgtgctgcgggccagcagcgagttcaagagcgtgctgctcagcctgcgcca

SEQ ID NO: 9830 - DNA, 119 bp, homo sapiens
ccaaggacatcgtgctgcgggccagcagcgagttcaagagcgtgctgctcagcctgcgccagggcagcccatcgagttcagcaccatcctggagggccgcctgggcagcaagtggcctg

SEQ ID NO: 9831 - DNA, 119 bp, homo sapiens
cagggcagcctcatcgagttcagcaccatcctggagggccgcctgggcagcaagtggcctgtcttcgagtcaaggccatcagctgcctcaactgcatggcccagctctcacccaccagg

SEQ ID NO: 9832 - DNA, 119 bp, homo sapiens
tgtcttcgagctcaaggccatcagctgcctcaactgcatggcccagctctcacccaccaggcggcacgtaagatcgagcacgactggcgcagcaccgtgcatggcgccgtgaagttcgc

SEQ ID NO: 9833 - DNA, 119 bp, homo sapiens
ggcggcacgtgaagatcgagcacgactggcgcagcaccgtgcatggcgccgtgaagttcgccttcgactctttttcttcccattcctgtcggcggcctgaggatggtccgccacgagga

SEQ ID NO: 9834 - DNA, 119 bp, homo sapiens
gccttcgacttctttttcttcccattcctgtcggcggcctgaggatggtccgccacgaggagcttccaggcatgttgccatgaggcctttccccagtgtggccccagcccgacaggcat

SEQ ID NO: 9835 - DNA, 119 bp, homo sapiens
gagcttccagtgcatgttgccatgaggcctttccccagtgtggccccagcccgacaggcatgcaccagtccgcctgtgcccacgtgtgcagactgtggctgcagagaccttgcgaccat

SEQ ID NO: 9836 - DNA, 119 bp, homo sapiens
atgcaccagtgccgcctgtgcccacgtgtgcagactgtggctgcagagaccttgcgaccatgtgtagatgcgtggaccccgacaaagggaaggctgctgtgtagctctgtccactctga

SEQ ID NO: 9837 - DNA, 119 bp, homo sapiens
atgtgtagattgcgtggaccccgacaaagggaaggctgctgtgtagctctgtccactctgaataccaaggtgttgggaattgcatgccatctccaccctgagcctgacctttctgagtg

SEQ ID NO: 9838 - DNA, 119 bp, homo sapiens
gaataccaagtgtgttgggaattgcatgccatctccaccctgagcctgacctttctgagtgacatgggttgccaggctagactaggaggttccggtgtctggaaaagcactttacagat

SEQ ID NO: 9839 - DNA, 119 bp, homo sapiens
tgacatgggtgtgccaggctagactaggaggttccggtgtctggaaaagcactttacagatgagattcctctcctcccccaccttcaagcaccctgttccctctttctttcttttgtgt

SEQ ID NO: 9840 - DNA, 119 bp, homo sapiens
atgagattccctctcctcccccaccttcaagcaccctgttccctctttctttcttttgtgttggatttgttaaaaaccaaataagcatctgtgtaacctccacagtagcatttcttatt

SEQ ID NO: 9841 - DNA, 119 bp, homo sapiens
gttggatttgtttaaaaaccaaataagcatctgtgtaacctccacagtagcatttcttatttgtttggtactgctacaccttagcagctcttcccctttcctgggggatgtgcacggca

SEQ ID NO: 9842 - DNA, 119 bp, homo sapiens
tttgtttggtcactgctacaccttagcagctcttcccctttcctgggggatgtgcacggcagcttgagctgtcacgtggtcaaggcccggccccatcagaggctgggggaggcggcaca

SEQ ID NO: 9843 - DNA, 119 bp, homo sapiens
cagcttgagcctgtcacgtggtcaaggcccggccccatcagaggctgggggaggcggcacattggcagttgtcacactgagctgggcaccacaggctgcctcatgaccctcctgtccag

SEQ ID NO: 9844 - DNA, 119 bp, homo sapiens
cattggcagtgtgtcacactgagctgggcaccacaggctgcctcatgaccctcctgtccagcaggtagtggtgaatgtgtgaaggtcttgcctgaatccatcaggacttgggaaacaga

SEQ ID NO: 9845 - DNA, 119 bp, homo sapiens
agcaggtagtgggtgaatgtgtgaaggtcttgcctgaatccatcaggacttgggaaacagagaaccctggggggcggctgtgggggaggtccctgccagtgtttagaagagcctgactg

SEQ ID NO: 9846 - DNA, 119 bp, homo sapiens
gagaaccctgtgggggcggctgtgggggaggtccctgccagtgtttagaagagcctgactgtgttcagtccttggagcagaaagccagggtcctgagtggctgaaataaaagcctctgg

SEQ ID NO: 9847 - DNA, 119 bp, homo sapiens
cttaggaacgggttgctaagctggtgtttttgctccaagacatggctgcagcttcccagggaggagcccggggcatctccaacactcagcctttccctccggacccttttaaaagattc

SEQ ID NO: 9848 - DNA, 119 bp, homo sapiens
aagacatggctgcagcttcccagggaggagcccaggggcatctccaacactcagcctttccctccggaccttttaaaagattcaacagcaccgtctctctccacttccatcctagaatg

SEQ ID NO: 9849 - DNA, 119 bp, homo sapiens
ggcatctccaacactcagcctttccctccggacccttttaaaagattcaacagcaccgtctctctccactccatcctagaatgcagaatctgcaaagtgccttttgtaaagtttcttaa

SEQ ID NO: 9850 - DNA, 119 bp, homo sapiens
ccaccaactgctgtccccaaggaaatggtgtccgaaaaatcccaccttggcaacccccaggagcctgtgaggaggagcccaagacccgcctcctgagtatgacagtccggagaggccca

SEQ ID NO: 9851 - DNA, 119 bp, homo sapiens
caactgctgtccccaaggaaatggtgtccgaaaaatcccaccttggcaacccccaggagcctgtgcaggggagcccaagacccgcctcctgagtatgacagtccggagaggcccacgga

SEQ ID NO: 9852 - DNA, 119 bp, homo sapiens
atacataagttagggagtgttaattagaatggaaattaaatatgcagaaactcaaaggaagatgaaattttagggaagacatatgtgttaacctagtgaggcttgaatcagatgtttgg

SEQ ID NO: 9853 - DNA, 119 bp, homo sapiens
aaggaagatgaaattgttagggaagacatatgtgttaacctagtgaggcttgaatcagatgtttggaagaatgagggaggtttctgaggctcctggtgaccttgccattgaggacacat

SEQ ID NO: 9854 - DNA, 119 bp, homo sapiens
tcagatgtttggaagaaatgagggaggtttctgaggctcctggtgaccttgccattgaggacacatatattctccccctacacacgccttttcttcttccccagtacaatgaacattag

SEQ ID NO: 9855 - DNA, 119 bp, homo sapiens
ttgaggacacatatacttctccccctacacacgccttttcttcttccccagtacaatgaacattaggaatacctgctcattgtagggaaaatgaccacccttcaggcattgcttttcat

SEQ ID NO: 9856 - DNA, 119 bp, homo sapiens
aatgaacattaggaattacctgctcattgtagggaaaatgaccacccttcaggcattgcttttcatgaaagtggattagacaagaggagaagtggttacactttttaattgttacataa

SEQ ID NO: 9857 - DNA, 119 bp, homo sapiens
attgcttttcatgaaaagtggattagacaagaggagaagtggttacactttttaattgttacataattgtagactgttttccctatggcaaagttgggaaataagtaactgttggaaac

SEQ ID NO: 9858 - DNA, 119 bp, homo sapiens
attgttacataattgttagactgttttccctatggcaaagttgggaaataagtaactgttggaaactagggcctttggaagcaagtagactcttagattggaaaaatgtggttctaatc

SEQ ID NO: 9859 - DNA, 119 bp, homo sapiens
actgttggaaactagaggcctttggaagcaagtagactcttagattggaaaaatgtggttctaatctaaagcaatgatacaatgagagctgttatgaattaataaaaacagaaccaaaa

SEQ ID NO: 9860 - DNA, 119 bp, homo sapiens
gttccacctggcttcccttctgcagaagaggcctataacttctttactttcaactttgatcccgaaccaaaggatcagaggaaaaaccaaaagcaagacatagagcgggaactaatcaa

SEQ ID NO: 9861 - DNA, 119 bp, homo sapiens
gatcccgaaccagaaggatcagaggaaaaaccaaaagcaagacatagagcgggaactaatcaagaggagaggaaggggaagaagaagaaccacctgcacaaggaggaggaaaggaaatg

SEQ ID NO: 9862 - DNA, 119 bp, homo sapiens
gatgaggaagaactgcttaatggtgatgatgccgaggacttcctattgggcttagatcacgtggctgacattttgtagcagtcagacctgcagattatgaaagcatccatgatcggctg

SEQ ID NO: 9863 - DNA, 119 bp, homo sapiens
tattgggcttagatcacgtggctgacgattttgtagcagtcagacctgcagattatgaaagcatccatgtcggctgcagatggaaagagaaatgctcttcatacccagtaggcagacag

SEQ ID NO: 9864 - DNA, 119 bp, homo sapiens
tccctacatataaaaagcttcctgagaatgtacagcccaggttcctggaagatgaaggcctttacaccgggtaagaccagaggtggcacgcaccaatcagaacatcatggagaacagat

SEQ ID NO: 9865 - DNA, 119 bp, homo sapiens
cttcctgagaatgtacagcccaggttcctggaagatgaaggcctttacaccggggtaagaccagaggtgcacgcaccaatcagaacatcatggagaacagattgctgatgcaggacccc

SEQ ID NO: 9866 - DNA, 119 bp, homo sapiens
gaaagaagatggtttggagatgacggcaggatcctagctctgccaaaccccatcaagccatttccttcaggccgccagtactaacacaggagcagagcattaaggcagagcttgaaaca

SEQ ID NO: 9867 - DNA, 119 bp, homo sapiens
tttggagatgacggcaggatcctagctctgccaaaccccatcaagccatttccttcaaggccgccagtataacacaggagcagagcattaaggcagagcttgaaacactgtataaaaag

SEQ ID NO: 9868 - DNA, 119 bp, homo sapiens
gctgtaaaatacgttcacagtagtcagcatgtgatcagatctggagaccctcctggaaatttccaactgacattgatatttcagggttaatcttcactcatcatccctgttttagccga

SEQ ID NO: 9869 - DNA, 119 bp, homo sapiens
gaccctcctggaaatttccaactggacattgatatttcagggttaatcttcactcatcatccctgttttgccgagagcatgttttggcagccaagctggcccagttatatgaccagtac

SEQ ID NO: 9870 - DNA, 119 bp, homo sapiens
atcttcactcatcatccctgttttagccgagagcatgttttggcagccaagctggcccagttatatgacagtaccttgcaagacaccagagaaacaaggcgaaatttcttactgataag

SEQ ID NO: 9871 - DNA, 119 bp, homo sapiens
acaaacaagaaaattccgtgatgctgaacaagaaaaagatagaacattgcttaagactatcataaaagttggaaagagatgaaatcccttcgagagttccagagatttacaaatactcc

SEQ ID NO: 9872 - DNA, 119 bp, homo sapiens
tgctgaacaagaaaaagatagaacattgcttaagactatcataaaagtttggaaagagatgaaatccctcgagagttccagagatttacaaatactcccttgaaacttgttttgagaaa

SEQ ID NO: 9873 - DNA, 119 bp, homo sapiens
ggaaaaagctgaccagaaagcagatgaagaagcatatgaagcagaaattcaagctgaaataagtgaactttagaagagcacacggaggagtacgcacagaagatggaagaatacagaac

SEQ ID NO: 9874 - DNA, 119 bp, homo sapiens
gaagcagaaattcaagctgaaataagtgaactgttagaagagcacacggaggagtacgcacagaagatgaagaatacagaacgtcgttacaacagtggaaggcctggaggaaagtgcaa

SEQ ID NO: 9875 - DNA, 119 bp, homo sapiens
agggccaagaagaagaaaaggaaacaagcagcagaagaacatcccggtgatgagattgcagagccgtatccgaggaggaccttgtgaagcccagccctccagagcccactgatcgggca

SEQ ID NO: 9876 - DNA, 119 bp, homo sapiens
agagccgtatcccgaggaggaccttgtgaagcccagccctccagagcccactgatcgggcagtgatagacaggaggtgagggagagagcagcccagagcaggaggaggccttgggagcc

SEQ ID NO: 9877 - DNA, 119 bp, homo sapiens
cagtgatagagcaggaggtgagggagagagcagcccagagcaggaggaggccttgggagcccacgctggcccggagctaagcctggcaggaagcgtaacacccaatgaccagtgcccca

SEQ ID NO: 9878 - DNA, 119 bp, homo sapiens
agcggaggtctcgagaagggaggatgtaaagaagcgctcagtgtacttaaaagtgctgttcaacaacaagaggtgtccaggacagtcagtcggccactaggagcagacttccgagttca

SEQ ID NO: 9879 - DNA, 119 bp, homo sapiens
ttcaacaacaaggaggtgtccaggacagtcagtcggccactaggagcagacttccgagttcactttgggagattttcaatttgcaaatagtcaactggccggagagtttaacacttcag

SEQ ID NO: 9880 - DNA, 119 bp, homo sapiens
gtctatgaaactgtcggacacagtagtcccaccttgctagcagaagtgtttctgcctattcctgagactctgttgtcactggaagggctcctactgaagaagtggagtttagcagtaat

SEQ ID NO: 9881 - DNA, 119 bp, homo sapiens
tagcagaagtgtttctgcctattcctgagactactgttgtcactggaagggctcctactgaagaagtgggtttagcagtaatcagcatgtgacactggaccacgagggagttggaagtg

SEQ ID NO: 9882 - DNA, 119 bp, homo sapiens
gagtgcccttctcatttgaagctgatggcagtaaccagctgactctgatgacctcagggaaagtgtctctagtgtggcatgggccattggagaaaacgggatacctttaattcctccat

SEQ ID NO: 9883 - DNA, 119 bp, homo sapiens
cagtaaccagctgactctgatgacctcagggaaagtgtctcatagtgtggcatgggccattggagaaaagggatacctttaattcctccattgtcacagcagaacatcggatttcggag

SEQ ID NO: 9884 - DNA, 119 bp, homo sapiens
tgctttgaagaaagcagatgccatctcatctattggcacatcaggactgacagacatgaaaaaattggcaagtgggcagcagagtccaagctcgacccaaatgaccccaacaatgcccc

SEQ ID NO: 9885 - DNA, 119 bp, homo sapiens
gccatctcatctattggcacatcaggactgacagacatgaaaaaattggccaagtgggcagcagagtccagctcgacccaaatgaccccaacaatgcccctttgatgcagcttatctcg

SEQ ID NO: 9886 - DNA, 119 bp, homo sapiens
gttgctaccagtggtgaatcctatgtccctgatttctttagactggagcagctgcaacaggagtttaacttgtttcagatcaagaattaaatagatccaaacgatttaggcttcttcat

SEQ ID NO: 9887 - DNA, 119 bp, homo sapiens
ctggagcagctgcaacaggagtttaactttgtttcagatcaagaattaaatagatccaaacgatttaggttcttcatcttagaagccaagaggtgccagaattccgaaattataagcaa

SEQ ID NO: 9888 - DNA, 119 bp, homo sapiens
gaattaaatagatccaaacgatttaggcttcttcatcttagaagccaagaggtgccagaattccgaaatataagcaagttccagtctatgaccgagaaattatggaaaaggtattccag

SEQ ID NO: 9889 - DNA, 119 bp, homo sapiens
cattttgggcctaagccttttcaagctggcagaacaaaagcgaccactgcggccaaggagaaaaggtcgaagaaggtgacagcccaaaacctgtctgatggagacataaagctgctggt

SEQ ID NO: 9890 - DNA, 119 bp, homo sapiens
gcggccaaggagaaaaggtcggaagaaggtgacagcccaaaacctgtctgatggagacataaagctgctgtgaacattgtgcgagcttacgacattccagtgaggaagccggcagtgag

SEQ ID NO: 9891 - DNA, 119 bp, homo sapiens
attgatggaacatttaaaatagatattcccccagttcttctgggctacagtaaggagcgaaatatgattttgagcggggttttgattctgtccgaagcttaagtgaaggctcctacatt

SEQ ID NO: 9892 - DNA, 119 bp, homo sapiens
cgaaatatgattcttgagcggggttttgattctgtccgaagcttaagtgaaggctcctacattaccctcttattaccattgagccccagctggttcctggagagtccattcgagaaaag

SEQ ID NO: 9893 - DNA, 119 bp, homo sapiens
tttgagtctcaggaagatgagaaattacttcaagcaactgagaagtttcaagctgaatgtgccttaaagttccaaatcgtcagtgccttacaacagtaattgatataagcggaaaaact

SEQ ID NO: 9894 - DNA, 119 bp, homo sapiens
aagtttcaagctgaatgtgccttaaagtttccaaatcgtcagtgccttacaacagtaattgatataagcgaaaaactgtttttatcacacgttatctcaaacctttaaaccctcctcag

SEQ ID NO: 9895 - DNA, 119 bp, homo sapiens
tgccttacaacagtaattgatataagcggaaaaactgtttttatcacacgttatctcaaacctttaaacctcctcaggagctccttaatgtctaccccaataatctacaggcaactgca

SEQ ID NO: 9896 - DNA, 119 bp, homo sapiens
ggtccaactgcctatgtgctaacttgggagcaaggtcgttatttaatatggaatccctgcagtggacattttatggacaatttgatacattctgtcccttgaaaaatgtgggctgttta

SEQ ID NO: 9897 - DNA, 119 bp, homo sapiens
gtgctaacttgggagcaaggtcgttatttaatatggaatccctgcagtggacatttttatggacaatttatacattctgtcccttgaaaaatgtgggctgtttaataggtcctgacaat

SEQ ID NO: 9898 - DNA, 119 bp, homo sapiens
atttggtttaatattcaacgatatgaatctccactaaggataaattttgatgtcaccaggcccaagctaggaaatctttcttttcaagaagccttccatatcctggcctttccagtgtt

SEQ ID NO: 9899 - DNA, 119 bp, homo sapiens
tggtttaatattcaacgatatgaatctccactaaggataaattttgatgtcaccaggcccaagctatggaatctttcttttcaagaagccttccatatcctggcctttccagtgttcag

SEQ ID NO: 9900 - DNA, 119 bp, homo sapiens
gattgaaaaaatactaaaagaaaaaatcatggactggaggccacgccatctgactcggtggaataggtatgtacctctactctgcgtcacttcttgcctctgttagaaaaaagtcaagg

SEQ ID NO: 9901 - DNA, 119 bp, homo sapiens
tggaataggtattgtacctctactctgcgtcacttcttgcctctgttagaaaaaagtcaaggagaagattagaagatgaccacagagcagaactgctaaaacagctgggagactacagg

SEQ ID NO: 9902 - DNA, 119 bp, homo sapiens
ttctctggatttcctcttcacatgccttattctgaagtgaagcctttaattgacgctgtgtatagtactgagtacataatattgatgttcctaatgttgaatttgctttagctgtatac

SEQ ID NO: 9903 - DNA, 119 bp, homo sapiens
tgacgctgtgtatagtactggagtacataatattgatgttcctaatgttgaatttgctttagctgtataatacacccataccccaaaaatgttttgtctgtttggatctatgttgcctc

SEQ ID NO: 9904 - DNA, 119 bp, homo sapiens
aatttgctttagctgtatacatacacccataccccaaaaatgttttgtctgtttggatctatgttgccttcttatacgcaacaggtaatttttttcactgtactttctgtatcatgtaa

SEQ ID NO: 9905 - DNA, 119 bp, homo sapiens
gtttggatctatgttgcctctcttatacgcaacaggtaatttttttcactgtactttctgtatcatgtaaaactacacttaggatatgagaaaattttaaattatatgcatcacatcag

SEQ ID NO: 9906 - DNA, 119 bp, homo sapiens
gtactttctgtatcatgtaaaaactacacttaggatatgagaaaattttaaattatatgcatcacatcaaagaacatattattggcaaataataaaattatcaactgttttcaaactgt

SEQ ID NO: 9907 - DNA, 119 bp, homo sapiens
catgttttccaagttcctttttattcaaatgaatcagaactgcaatctgcacatgaaaagacctgggggaatgcctacatctggaatttcattacatcaacgttaaattttgtccgacc

SEQ ID NO: 9908 - DNA, 119 bp, homo sapiens
aaagacctggggggaatgcctacatctggaatttcattacatcaacgttaaattttgtccgaccagttctcattgctgatcacttttgataatgacagatccaacatgaaactcctgaa

SEQ ID NO: 9909 - DNA, 119 bp, homo sapiens
gtccgaccagttcttcattgctgatcacttttgataatgacagatccaacatgaaactcctgaagcaaagaatatttaccttgtgctttcatgcaaatttagggaccaaactcaaaggt

SEQ ID NO: 9910 - DNA, 119 bp, homo sapiens
ctcctgaagcaaatgaatatttaccttgtgctttcatgcaaatttagggaccaaactcaaaggtttcatcatgctggacaccagatctaagaattgtgacaggatcttctcatatttca

SEQ ID NO: 9911 - DNA, 119 bp, homo sapiens
tcaaaggtttcatccatgctggacaccagatctaagaattgtgacaggatcttctcatatttcattttaaacacttgatactagtctgatgatactcatgttagctgcactccaattaa

SEQ ID NO: 9912 - DNA, 119 bp, homo sapiens
atatttcattttagaacacttgatactagtctgatgatactcatgttagctgcactccaattaatgttttcgtaatgcaacagaaaactctgttaaactgtacaccgtaattggcatct

SEQ ID NO: 9913 - DNA, 119 bp, homo sapiens
ccaattaatgtttatcgtaatgcaacagaaaactctgttaaactgtacaccgtaattggcatctgttaaacaactccacttttgaacgaacagcatttctctctcaagatctctctctc

SEQ ID NO: 9914 - DNA, 119 bp, homo sapiens
tggcatctgttaaaacaactccacttttgaacgaacagcatttctctctcaagatctctctctctctttgaatttgtcagatggagttacgcaggtttctctatgattgcttttgcatg

SEQ ID NO: 9915 - DNA, 119 bp, homo sapiens
tctctctctcttttgaatttgtcagatggagttacgcaggtttctctatgattgcttttgcatgccattccaagtggaacatggccaatctttgataaagtataatagatgaaaatctc

SEQ ID NO: 9916 - DNA, 119 bp, homo sapiens
tttgcatgccatttccaagtggaacatggccaatctttgataaagtataatagatgaaaatctctgcgtaagaatatgctgtaggtttcacacacttttagtgaaaatggattattttc

SEQ ID NO: 9917 - DNA, 119 bp, homo sapiens
aaaatctctgcgtgaagaatatgctgtaggtttcacacacttttagtgaaaatggattattttcaacagaccaagaagtcaatggtgacttatttagctcatttagaagaaagtcctat

SEQ ID NO: 9918 - DNA, 119 bp, homo sapiens
ttattttcaacagcaccaagaagtcaatggtgacttatttagctcatttagaagaaagtcctataataccatttgtttaaaaaactctgtggtaacaaaaggtatatacaccgtttact

SEQ ID NO: 9919 - DNA, 119 bp, homo sapiens
agtcctataatactcatttgtttaaaaaactctgtggtaacaaaaggtatatacaccgtttactgtacaaaaatgcatctttcctgtaaactggtgtgtgttcagcacactccacacat

SEQ ID NO: 9920 - DNA, 119 bp, homo sapiens
cgtttactgtacacaaaatgcatctttcctgtaaactggtgtgtgttcagcacactccacacatggcaaatgttagaatctagccatcacatttgatagagttttgatagaaatgcatc

SEQ ID NO: 9921 - DNA, 119 bp, homo sapiens
ccacacatggcaatatgttagaatctagccatcacatttgatagagttttgatagaaatgcatccaatggaacaaacaccccatatgttgtagtgtctaaatagaaactcagtgtaaaa

SEQ ID NO: 9922 - DNA, 119 bp, homo sapiens
aatgcatccaatgggaacaaacaccccatatgttgtagtgtctaaatagaaactcagtgtaaaaaagtaaaaacaaaaatagacaggaagggagggagtcatccttgaatagtgatgga

SEQ ID NO: 9923 - DNA, 119 bp, homo sapiens
gtgtaaaaaagtaaaaaacaaaaatagacaggaagggagggagtcatccttgaatagtgatggaccatgactataacgtgattgtgttcattcttaaagcactacccagagaccaatgg

SEQ ID NO: 9924 - DNA, 119 bp, homo sapiens
gtgatggaccatggactataacgtgattgtgttcattcttaaagcactacccagagaccaatggtgccgtgccttggtgcccgcctgagtcactacgttgccactggcgttgctcctgg

SEQ ID NO: 9925 - DNA, 119 bp, homo sapiens
accaatggtgccgttgccttggtgcccgcctgagtcactacgttgccactggcgttgctcctggatttgaaagtccttgtagacccagaaactaccaaaaatctgtgatcctttccact

SEQ ID NO: 9926 - DNA, 119 bp, homo sapiens
ctgagccaagtagctgtcataattcattctgtctattccacaagcagcaaaatcctgaaggttttttctcctgctgcacccaacagaaagatattaagatttaccttcagactttccaa

SEQ ID NO: 9927 - DNA, 119 bp, homo sapiens
cattctgtctattccacaagcagcaaaatcctgaaggttttttcttcctgctgcacccaacagaaagatttaagatttaccttcagactttccaattcactgcttatgcttccagtatg

SEQ ID NO: 9928 - DNA, 119 bp, homo sapiens
ccggaataattccttgctcgtgtaaggttcacagatcagtttttccacatttgcaccaaagacaaaggtagaaccacaatgatcatcaatatccagcaaaagaggaaacttaatccaac

SEQ ID NO: 9929 - DNA, 119 bp, homo sapiens
aataattccttgctcgtgtaaggttcacagatcagtttttccacatttgcaccaaagacaaaggtaagaccacaatgatcatcaatatccagcaaaagaggaaacttaatccaactcca

SEQ ID NO: 9930 - DNA, 119 bp, homo sapiens
accatgaggaagacgcctccggtgttggagacacagcctcgggtggtcggggtggcatgcctgtcatagcgcacacgccacacagtaagcccaggtagtaaaaaatcacgatgagggtc

SEQ ID NO: 9931 - DNA, 119 bp, homo sapiens
cagcctcgggtggtcggggtggcatgcctgtcatagccgcacacgccacacagtaagcccaggtagtaaaaatcacgatgagggtcagcagagagcagatgaccaggccacccagccac

SEQ ID NO: 9932 - DNA, 119 bp, homo sapiens
cagtatgaatcatactcttccaatgtaggtaaatttctgtggatgtaactttcagtgttattaacataacagagaatgctgagagtatatcctgaataggaagacgctgagttacattg

SEQ ID NO: 9933 - DNA, 119 bp, homo sapiens
ggatgtaactttcagtgttattaacataaacagagaatgctgagagtatatcctgaataggaagacgctagttacattgtcgatatctgaaccaatggaattcaagacccttttgatac

SEQ ID NO: 9934 - DNA, 119 bp, homo sapiens
ctgcctcagttcagggttgctattcagctggcttagagacaatctgatgctgttgcaggtttcacttgaggatgcaccaagcacagagggtcattgagagatgaccgcaggctagtttt

SEQ ID NO: 9935 - DNA, 119 bp, homo sapiens
ctgttgcaggtttcacttgatggatgcaccaagcacagagggtcattgagagatgaccgcaggctagtttcacgctggtcagactgctgctaagctgtgtactttgttggtgcaagctc

SEQ ID NO: 9936 - DNA, 119 bp, homo sapiens
gagatgaccgcaggctagttttcacgctggtcagactgctgctaagctgtgtactttgttggtgcaagccttcaaggtgctgttcatgttctccaacgcctctttggtctccttgatcg

SEQ ID NO: 9937 - DNA, 119 bp, homo sapiens
cttattattatacaaatcaccaacagggagattgcaaagcatttcctcaggaagggcccattttccttcgtcgctggtgcatttctccaccacatttgttacagcaacgacacatacaa

SEQ ID NO: 9938 - DNA, 119 bp, homo sapiens
tcctcaggaagggcccattttccttctgtcgctggtgcatttctccaccacatttgttacagcaacgaccatacaaaagaaataccccaccagaggcatcagaataataaacagcagcc

SEQ ID NO: 9939 - DNA, 119 bp, homo sapiens
tccaccacatttgttacagcaacgacacatacaaaagaaataccccaccagaggcatcagaataataaaagcagccccaggacacagcatagaataatccctgcttcatagtagacaat

SEQ ID NO: 9940 - DNA, 119 bp, homo sapiens
cttctgggaaatcacgcggctgtaccacatagagaaagatatgcactagttcaaagagaatgccaatggtccagctttatgggagtcttgggtctcataatttgttgcaggcaattcat

SEQ ID NO: 9941 - DNA, 119 bp, homo sapiens
aaagagaatgccaatgggtccagctttatgggagtcttgggtctcataatttgttgcaggcaattcatattccaagccttaggagcatctgtggatgaaggctgccctcctgaaaagga

SEQ ID NO: 9942 - DNA, 119 bp, homo sapiens
gttgcaggcaattcataattccaagccttaggagcatctgtggatgaaggctgccctcctgaaaaggagtcccgcacagccccagcagcaacagggagccgagtacgagggccatagct

SEQ ID NO: 9943 - DNA, 119 bp, homo sapiens
gccctcctgaaaaggagttcccgcacagccccagcagcaacagggagccgagtacgagggccatagctacaagatcctccaaacatgaggtagaacttggtgcctcctgcctcagagct

SEQ ID NO: 9944 - DNA, 119 bp, homo sapiens
tacgagggccatagctagcaagatcctccaaacatgaggtagaacttggtgcctcctgcctcagagctttggaagccttggggaaggcaagcgtgttcctgggcagaagaggagcagga

SEQ ID NO: 9945 - DNA, 119 bp, homo sapiens
ctcctgcctcagagcttctggaagccttggggaaggcaagcgtgttcctgggcagaagaggagcaggaacactggatctgctgaatcttcagttttctgtctgaggctggcttgaggcg

SEQ ID NO: 9946 - DNA, 119 bp, homo sapiens
cagaagaggagcaggaagcactggatctgctgaatcttcagttttctgtctgaggctggcttgaggcgaggatgcggaagaatgttctccaagggggtcattcactcaaggcaccatcc

SEQ ID NO: 9947 - DNA, 119 bp, homo sapiens
cgtgcacccggctcccgctcctgctcccgccctagtcaccgctgccgccgcccttcccttagctcgccaaccctggctcgtgaattatttatgacccggcttctgggaccaccgcgacg

SEQ ID NO: 9948 - DNA, 119 bp, homo sapiens
gccgcccttcccttagctcgccagaccctggctcgtgaattatttatgacccggcttctgggaccaccggacggctttcggagagcccgcctcccactgccggccgcggaggggctcag

SEQ ID NO: 9949 - DNA, 119 bp, homo sapiens
tgacccggcttctgggaccaccgcgacggctttcggagagcccgcctcccactgccggccgcggaggggtcaggcggcgctgcggccggaccctcggacgtggcgggaggcaggagaaa

SEQ ID NO: 9950 - DNA, 119 bp, homo sapiens
tcccactgccggccgcggaggggctcaggcggcgctgcggccggaccctcggacgtggcgggaggcagggaaaggcccgggtgcccggggggacccgttgcggcttcctctgtcccgga

SEQ ID NO: 9951 - DNA, 119 bp, homo sapiens
cctcggacgtggcgggaggcaggagaaaggcccgggtgcccggggggacccgttgcggcttcctctgtccggacggggacctaggtatggggccgccgtaatggaaaggattccttaaa

SEQ ID NO: 9952 - DNA, 119 bp, homo sapiens
ggcccggcccctcgaggcaccgcctttcaattagcactcgctgattggtcgctgctcgcgcggtctcctggtgacgggaacgcggtagcctgcttggtggagaccgggtgcgcctgcgt

SEQ ID NO: 9953 - DNA, 119 bp, homo sapiens
ctgattggtcgctgctcgcgcggtctcctgggtgacgggaacgcggtagcctgcttggtggagaccggggcgcctgcgtacttcatagttcgcgtagcggctcgagcgtggagatgaag

SEQ ID NO: 9954 - DNA, 119 bp, homo sapiens
taactgtgttgccatggattgggataaagatggagatgtcctagcagtgattgctgagaaatctagctgatttatctttgggatgccaacacaaataagaccagccagttagacaatgg

SEQ ID NO: 9955 - DNA, 119 bp, homo sapiens
tgttgccatggattgggataaagatggagatgtcctagcagtgattgctgagaaatctagctgcatttactttgggatgccaacacaaataagaccagccagttagacaatggcatgag

SEQ ID NO: 9956 - DNA, 119 bp, homo sapiens
gtatggtgatggccgcatcatgattggtttttcatgtggacattttgtggtcatttctactcatactgggagcttggtcaagagatatttcaggctcgtaaccataaagataatctaac

SEQ ID NO: 9957 - DNA, 119 bp, homo sapiens
ttctactcatactggagagcttggtcaagagatatttcaggctcgtaaccataaagataatctaaccagattgcagtatcacagactcttaacaaagttgctacatgtggagataactg

SEQ ID NO: 9958 - DNA, 119 bp, homo sapiens
gattgggtaccttgtcctggactgatgatggccagttgctagcactctctacccaaaggggctcacttctgttttcctgaccaagcttcccatacttggggatgcctgcagcacaagga

SEQ ID NO: 9959 - DNA, 119 bp, homo sapiens
caaaggggctcacttcatgttttcctgaccaagcttcccatacttggggatgcctgcagcacaaggattcctatctcacctccctccttgaagtcaccgtagccaaccctgttgaagga

SEQ ID NO: 9960 - DNA, 119 bp, homo sapiens
atagaaagcgaaatcttggatgctcaagaagaacgtgagactcggcttttcccagcagtggatgataaggccgtatcttatgccatgccttaactagtgatttcctcatctatggtaca

SEQ ID NO: 9961 - DNA, 119 bp, homo sapiens
gaaagcgaaatcttggatgctcaagaagaacgtgagactcggcttttcccagcagtggatgataagtgcgtatcttatgccatgccttaactagtgatttcctcatctatggtacagat

SEQ ID NO: 9962 - DNA, 119 bp, homo sapiens
actggtgtcgttcagtatttctacattgaagactggcaattcgttaatgattatcgacatcctgtcagttgaaaaagatttttcccgacccaaatgggaccagattagttttcattgat

SEQ ID NO: 9963 - DNA, 119 bp, homo sapiens
gactggcaattcgttaatgattatcgacatcctgtcagtgtgaaaaagatttttcccgacccaaatgggccagattagttttcattgatgaaaaaagtgatggatttgtttactgtcca

SEQ ID NO: 9964 - DNA, 119 bp, homo sapiens
gtcaatgacgctacctatgagattccagatttttcaccaaccattaaaggtgttctttgggaaaactggcaatggataaaggtgtatttattgcttatgatgatgataaggtgtacact

SEQ ID NO: 9965 - DNA, 119 bp, homo sapiens
atttttcaccaaccattaaaggtgttctttgggaaaactggccaatggataaaggtgtatttattgctttgatgatgataaggtgtacacttatgtctttcacaaggacactatacaag

SEQ ID NO: 9966 - DNA, 119 bp, homo sapiens
gagccaaggttattttggctggtagcaccaaagttccttttgctcataaacctttgctgctatataatgagagctgacctgccaaacacagagtggaaaagtaaacaacatctacctta

SEQ ID NO: 9967 - DNA, 119 bp, homo sapiens
ctcataaacctttgctgctatataatggagagctgacctgccaaacacagagtggaaaagtaaacaacactaccttagcacccatggctttctcagcaacttaaaagatacggggcctg

SEQ ID NO: 9968 - DNA, 119 bp, homo sapiens
aaacacagagtggaaaagtaaacaacatctaccttagcacccatggctttctcagcaacttaaaagataggggcctgacgaactgagaccaatgctggcacagaatttaatgctaaaga

SEQ ID NO: 9969 - DNA, 119 bp, homo sapiens
gttttctgatgcttgggaaatgtgcaggattctgaatgatgaggctgcctggaatgagttggccagagctgtctacatcacatggaagtggagtttgcaatccgtgtttatcggagaat

SEQ ID NO: 9970 - DNA, 119 bp, homo sapiens
gaggctgcctggaatgagttggccagagcttgtctacatcacatggaagtggagtttgcaatccgtgttatcggagaattggaaatgttggcatagtgatgtccttggaacaaataaag

SEQ ID NO: 9971 - DNA, 119 bp, homo sapiens
gaacatgatgaagcttgtctggctggagtggcccagatgtccataagaatgggagacatacgtcgagggttaaccaagccctcaagcatcccagcagggtccttaaaagagactgtgga

SEQ ID NO: 9972 - DNA, 119 bp, homo sapiens
gctggagtggcccagatgtccataagaatgggagacatacgtcgaggggttaaccaagccctcaagcatccagcagggtccttaaaagagactgtggagccatattggagaatatgaag

SEQ ID NO: 9973 - DNA, 119 bp, homo sapiens
atacaaagaagctgttgtagcttatgaaaatgcaaaacagtggcaaagtgtaatccgcatctatctggacacctcaataatcctgaaaaagctgtcaatattgttagagagacccagtc

SEQ ID NO: 9974 - DNA, 119 bp, homo sapiens
aaatgcaaaacagtggcaaagtgtaatccgcatctatctggatcacctcaataatcctgaaaaagctgtaatattgttagagagacccagtctctggatggagccaaaatggtagccag

SEQ ID NO: 9975 - DNA, 119 bp, homo sapiens
gttttttctacagcttggtgactatgggtctgccatccagtttcttgtcatgtccaaatgcaacaatgagctttcacactggctcagcaacacaacaaaatggaaatctatgcagatat

SEQ ID NO: 9976 - DNA, 119 bp, homo sapiens
ttctacagcttggtgactatgggtctgccatccagtttcttgtcatgtccaaatgcaacaatgaagcttcacactggctcagcaacacaacaaaatggaaatctatgcagatattattg

SEQ ID NO: 9977 - DNA, 119 bp, homo sapiens
gcaactaccggaatgcacacgatgttctcttcagtatgtatgcagaactgaaatcccagaagatcaaaatccctccgagatggccaccaacctcatgattctgcacagctatatactag

SEQ ID NO: 9978 - DNA, 119 bp, homo sapiens
taccggaatgcacacgatgttctcttcagtatgtatgcagaactgaaatcccagaagatcaaaattcccccgagatggccaccaacctcatgattctgcacagctatatactagtaaag

SEQ ID NO: 9979 - DNA, 119 bp, homo sapiens
acattgtacccatcctgacgtcaactgtgattgagtgtcacagggcaggcctgaagaactctgctttcacttcgcagctatgttgatgaggcctgaataccgcagcaaaatagatgcca

SEQ ID NO: 9980 - DNA, 119 bp, homo sapiens
tgagtgtcacagggcaggcctgaagaactctgctttcagcttcgcagctatgttgatgaggcctgaatacgcagcaaaatagatgccaaatacaaaaagaagatcgagggaatggtcag

SEQ ID NO: 9981 - DNA, 119 bp, homo sapiens
gagacccgatatatctgagatagaagaggccacgactccatgtccattctgcaaatttcttctcccagatgtgaactcctctgtcctggatgtaaaaacagtatcccatattgcattgc

SEQ ID NO: 9982 - DNA, 119 bp, homo sapiens
cccgatatatctgagatagaagaggccacgactccatgtccattctgcaaatttcttctcccagagtgtaactcctctgtcctggatgtaaaaacagtatcccatattgcattgcaaca

SEQ ID NO: 9983 - DNA, 119 bp, homo sapiens
catgctaaacactgaaagcacatgtcctatgtgttcagaaagattaaacgctgctcagctgaaaaagattcagactgtacccagtacctgcgaacggaggaggaactgtgattggcacg

SEQ ID NO: 9984 - DNA, 119 bp, homo sapiens
taaacactgaaagcacatgtcctatgtgttcagaaagattaaacgctgctcagctgaaaaagatttcagctgtacccagtacctgcgaacggaggaggaactgtgattggcacgtgcag

SEQ ID NO: 9985 - DNA, 119 bp, homo sapiens
atacaatgctcctgagaagacagcattttccacaggaggctgtttcctcccctggtggatttaagagacgtcctttctggatacagagaaatgaaacaacggtgacctctccaggtcgg

SEQ ID NO: 9986 - DNA, 119 bp, homo sapiens
ctggtggatttaagagacggtcctttctggatacagagaaatgaaacaacggtgacctctccaggtcggactttccacttctgtacggtggcaaaacgatgacatgtaaccttgctgtt

SEQ ID NO: 9987 - DNA, 119 bp, homo sapiens
gtgacctctccaggtcggcactttccacttctgtacggtggcaaaacgatgacatgtaaccttgctgttattgtactttgtatattatttcctcttcaaagtctttcttacacactcta

SEQ ID NO: 9988 - DNA, 119 bp, homo sapiens
acatgtaaccttgctgtttattgtactttgtatattatttcctcttcaaagtctttcttacacactctacctctgcactgttaatagtaacctatgacataattgtaaatattcagctt

SEQ ID NO: 9989 - DNA, 119 bp, homo sapiens
tctttcttacacactctatcctctgcactgttaatagtaacctatgacataattgtaaatattcagcttttgctaacttttgtattttgaaaaactttaaaataaaattgttgactaga

SEQ ID NO: 9990 - DNA, 119 bp, homo sapiens
agttacttcaaatacgcttcactcaacaatggaaatggcatgaaagtgagggctacttattcatttttagaagaatattacataaaatgagcgtatgtgaaaaaatcagaaaatacaga

SEQ ID NO: 9991 - DNA, 119 bp, homo sapiens
ttcatttttatgaagaatattacataaaatgagcgtatgtgaaaaaatcagaaaatacagacactgacagttaatcagtttatatctttgcacattatcagttgtgaaaaatcccaaga

SEQ ID NO: 9992 - DNA, 119 bp, homo sapiens
gacactgacaagttaatcagtttatatctttgcacattatcagttgtgaaaaatcccaagatataaagctttttaatcatagtatctctcagagagggtgtgggccttgtaccttgcac

SEQ ID NO: 9993 - DNA, 119 bp, homo sapiens
gatataaagcttttttaatcatagtatctctcagagagggtgtgggccttgtaccttgcaccaaagcacttttcctcatggaaaaatttcccaactgagtcttcctcttcttttaaatt

SEQ ID NO: 9994 - DNA, 119 bp, homo sapiens
accaaagcacattttcctcatggaaaaatttcccaactgagtcttcctcttcttttaaattttagttgagtcagtcataggatcaaaaggatcatgaggcatgtccctgttaatgacca

SEQ ID NO: 9995 - DNA, 119 bp, homo sapiens
ttttagttgatgtcagtcataggatcaaaaggatcatgaggcatgtccctgttaatgaccagcttttcgttctatgtagagtcgatgggcccactttccgctccaggtccctcaatact

SEQ ID NO: 9996 - DNA, 119 bp, homo sapiens
cagcttttcggttctatgtagagtcgatgggcccactttccgctccaggtccctcaatacttgaaaatttgtgtcaataagcggtttcagaaatttctcaaccttggttaatctttgtt

SEQ ID NO: 9997 - DNA, 119 bp, homo sapiens
cttgaaaattctgtgtcaataagcggtttcagaaatttctcaaccttggttaatctttgtttcagtttcgctgcatggactcatactcagccaagattcgggcaaacctggtttgcagg

SEQ ID NO: 9998 - DNA, 119 bp, homo sapiens
tttcagtttctgctgcatggactcatactcagccaagattcgggcaaacctggtttgcaggaggtctacgacccctccattcgagtaaccttctcttcaagatctttaggatcactgcc

SEQ ID NO: 9999 - DNA, 119 bp, homo sapiens
ggaggtctactgacccctccattcgagtaaccttctcttcaagatctttaggatcactgccagcatttgaatgtttagatccagtagaccatctttcattaaaatctgcttccctttct

SEQ ID NO: 10000 - DNA, 119 bp, homo sapiens
ccagcatttgcaatgtttagatccagtagaccatctttcattaaaatctgcttccctttctcttccagctagttttggcatctgggtactcagttagagcttccatgaggtcatctttt

SEQ ID NO: 10001 - DNA, 119 bp, homo sapiens
ctcttccagcatagttttggcatctgggtactcagttagagcttccatgaggtcatcttttgagagacaaacaggtctgagtagccaatacttttaatattggccgttcttcgattgcc

SEQ ID NO: 10002 - DNA, 119 bp, homo sapiens
ttgagagacagaacaggtctgagtagccaatacttttaatattggccgttcttcgattgccagctttgcccctttaatgttaagaatgctgatctcaccgaagtagctgccatcgctca

SEQ ID NO: 10003 - DNA, 119 bp, homo sapiens
ccagctttgctccctttaatgttaagaatgctgatctcaccgaagtagctgccatcgctcaataccacaactgagtgactccatcatctgccaccacagcgagtttgccttccttgata

SEQ ID NO: 10004 - DNA, 119 bp, homo sapiens
caataccacaaactgagtgactccatcatctgccaccacagcgagtttgccttccttgataatgtacattctcgtccgatatcccctttcttgcaaatataatctccaggactgtagac

SEQ ID NO: 10005 - DNA, 119 bp, homo sapiens
taatgtacatctctcgtccgatatcccctttcttgcaaatataatctccaggactgtagacttggggttcaatttcaagaccaactccaccaacagaccagcttcacaatcagcaaaaa

SEQ ID NO: 10006 - DNA, 119 bp, homo sapiens
acttggggttgcaatttcaagaccaactccaccaacagaccagcttcacaatcagcaaaaatgcgtacctttttaatgtgtctaagtgaacgttgatggcaatttctgctcttagttta

SEQ ID NO: 10007 - DNA, 119 bp, homo sapiens
aatgcgtaccttttttaatgtgtctaagtgaacgttgatggcaatttctgctcttagtttatcaggtagtactttaagacttctttctcatcaactgtttttttgttggtccacaggta

SEQ ID NO: 10008 - DNA, 119 bp, homo sapiens
tatcaggtagatactttaagacttctttctcatcaactgtttttttgttggtccacaggtagtcaaacctttaataaccctcttttccatatctttgcttacatttcgaaaatgcatat

SEQ ID NO: 10009 - DNA, 119 bp, homo sapiens
tagtcaaaccatttaataaccctcttttccatatctttgcttacatttcgaaaatgcatatattgcttgtagcatcaattcttgcttgaaattctgctctggctgcattcatgttggaa

SEQ ID NO: 10010 - DNA, 119 bp, homo sapiens
atattgcttgatagcatcaattcttgcttgaaattctgctctggctgcattcatgttggaaatcatagacctatgttaccaacgatggtagcaaaaattaacactccaattaggaaatc

SEQ ID NO: 10011 - DNA, 119 bp, homo sapiens
aaatcatagaacctatgttaccaacgatggtagcaaaaattaacactccaattaggaaatcaaccaccaaaagacatactcagaatccctcacgggagggggtgtttcaccaatggtag

SEQ ID NO: 10012 - DNA, 119 bp, homo sapiens
tcaaccaccacaaagacatactcagaatccctcacgggagggggtgtttcaccaatggtagtcaaagtcgtgtagaccagtaaaggctgtatacgtattttctagccaaacggccaaat

SEQ ID NO: 10013 - DNA, 119 bp, homo sapiens
agtcaaagtcagtgtagaccagtaaaggctgtatacgtattttctagccaaacggccaaattcaggatcttaatatcagggtagacccatgtatcatttccaaatccaatagctttaga

SEQ ID NO: 10014 - DNA, 119 bp, homo sapiens
attcaggatcattaatatcagggtagacccatgtatcatttccaaatccaatagctttagaaatagagtgaacacacatgcattccagtggataatgatgacgatatacataacaaggt

SEQ ID NO: 10015 - DNA, 119 bp, homo sapiens
gaaatagagtagaacacacatgcattccagtggataatgatgacgatatacataacaaggttggaaatctgaagatgtttggatagtttgtccttgtttctgttctctggaagaactca

SEQ ID NO: 10016 - DNA, 119 bp, homo sapiens
gttggaaatcctgaagatgtttggatagtttgtccttgtttctgttctctggaagaactcaaacatacggagaaccgtaacaacctgtttaatctaatttctggatagttccaccctaa

SEQ ID NO: 10017 - DNA, 119 bp, homo sapiens
caaacatacgagagaaccgtaacaacctgtttaatctaatttctggatagttccaccctaacttaaaatcagcaaatcagttggtatcagtgacagaacatcaagtttaaattgcaagt

SEQ ID NO: 10018 - DNA, 119 bp, homo sapiens
aacttaaaatacagcaaatcagttggtatcagtgacagaacatcaagtttaaattgcaagttggatttaatttatttatgagtttaagttcttcctttaccagcagtccttgttctagg

SEQ ID NO: 10019 - DNA, 119 bp, homo sapiens
gagcacatcacatgaaaagcaaagcaaaagctgaaactttaaagagtcaaaacagaagtataagcattttgaaaaatataactctaattatcgttatcactgggttcttacctttggtt

SEQ ID NO: 10020 - DNA, 119 bp, homo sapiens
taagcatttgtgaaaaatataactctaattatcgttatcactgggttcttacctttggttgtttaagtatataactttgtcttctagaagtggacgtcactggtgtatccaaacaaaca

SEQ ID NO: 10021 - DNA, 119 bp, homo sapiens
gtttaagtaatataactttgtcttctagaagtggacgtcactggtgtatccaaacaaacagggatatacgtaaatcttgacattgtcaaaatccaggccctaattttttaaaaataata

SEQ ID NO: 10022 - DNA, 119 bp, homo sapiens
tttcgaacccgcaatggaagaaaggggaggggtttatgcggggcggggtctggagttagtgttttgggatgggaggtagttacagtgatgtctgttttttcccgttcaagaattaagtg

SEQ ID NO: 10023 - DNA, 119 bp, homo sapiens
atgcggggcggggtctggagttagtgttttgggagtgggaggtagttacagtgatgtctgttttttcccttcaagaattaagtgtgtacctgcagacgtgtattcattcatatattctt

SEQ ID NO: 10024 - DNA, 119 bp, homo sapiens
gttctgaagagggtcactccctcactggctgccattgaaagagtccacttctcagtgactcctagctggcactggatgcagttgaggattgctggtcaatatgattcttcttgctgtgc

SEQ ID NO: 10025 - DNA, 119 bp, homo sapiens
gtccacttctcagtgactcctagctgggcactggatgcagttgaggattgctggtcaatatgattcttctgctgtgctttttctctgcttcatttcctcatattcagcttctgttaaag

SEQ ID NO: 10026 - DNA, 119 bp, homo sapiens
gtcacacaactggtctctcattaaataatgaccggctgtacaagctcacgtactccactgaagttcttctgatcggggcaaaggaaaactgcaagacagcgtgggctaccgcatttcct

SEQ ID NO: 10027 - DNA, 119 bp, homo sapiens
gctgtacaagctcacgtactccactgaagttcttcttgatcggggcaaaggaaaactgcaagacagcgtggctaccgcatttcctccaacgtggatgtggccttactatggaggaatcc

SEQ ID NO: 10028 - DNA, 119 bp, homo sapiens
cttgatcggggcaaaggaaaactgcaagacagcgtgggctaccgcatttcctccaacgtggatgtggcctactatggaggaatcctgatggtgatgatgaccagttgatccaaataacg

SEQ ID NO: 10029 - DNA, 119 bp, homo sapiens
atgaaggatgtaaatgttgaaaatgtgaatcagcagagaggagagaagagcatcttcaaaggaaaaagccatctaaaataatgggaaaggaaaacttggaagctctgcaaagacctacg

SEQ ID NO: 10030 - DNA, 119 bp, homo sapiens
gtgaatcagcagagaggagagaagagcatcttcaaaggaaaaagcccatctaaaataatgggaaaggaaacttggaagctctgcaaagacctacgctccttcatctaatccatggaaag

SEQ ID NO: 10031 - DNA, 119 bp, homo sapiens
gtcttgggtgtcagttcaaaagctacatctgtcaccacctataagatagaagacagctttgttatagcttgcttgctgaagaaacacacaattttggactgaatttcctacaaaccatt

SEQ ID NO: 10032 - DNA, 119 bp, homo sapiens
agctacatctgtcaccacctataagatagaagacagctttgttatagctgtgcttgctgaagaaacacaaattttggactgaatttcctacaaaccattaaggggaaaatagtatcgaa

SEQ ID NO: 10033 - DNA, 119 bp, homo sapiens
gcagaaattagagctgaagacaaccgaagcaggcccaagattgatgtctggaaagcaggctgcagccatatcaaagcagttgattcaaagtacacggccattcccattgtggggcaggt

SEQ ID NO: 10034 - DNA, 119 bp, homo sapiens
ggcccaagattgatgtctggaaagcaggctgcagccataatcaaagcagttgattcaaagtacacggccttcccattgtggggcaggtcttccagagccactgtaaaggatgtccttct

SEQ ID NO: 10035 - DNA, 119 bp, homo sapiens
ctctcggagctctggcggtccaccaggaaatacctgcagcctgacaacctttccaaggctgaggctgtcgaaacttcctggccttcattcagcacctcaggactgcgaagaaagaagag

SEQ ID NO: 10036 - DNA, 119 bp, homo sapiens
gcctgacaacctttccaaggctgaggctgtcagaaacttcctggccttcattcagcacctcaggactgcaagaaagaagagatccttcaaatactaaagatggaaaataaggaagtatt

SEQ ID NO: 10037 - DNA, 119 bp, homo sapiens
acctcagctggtggatgctgtcacctctgctcagacctcagactcattagaagccattttggactttttgatttcaaaagtgacagcagcattatcctccaggagaggtttctctatgc

SEQ ID NO: 10038 - DNA, 119 bp, homo sapiens
gaagccattttggactttttggatttcaaaagtgacagcagcattatcctccaggagaggtttctctatcctgtggatttgcttctcatcccaatgaagaactcctgagagccctcatt

SEQ ID NO: 10039 - DNA, 119 bp, homo sapiens
gcagtagtggaagctaagaagttaatcctgggaggacttgaaaaagcagagaaaaaagaggacaccaggtgtatctgctggctttgaagaatgccctgcttccagaaggcatcccaagt

SEQ ID NO: 10040 - DNA, 119 bp, homo sapiens
cagagaaaaaagaggacaccaggatgtatctgctggctttgaagaatgccctgcttccagaaggcatccaagtcttctgaagtatgcagaagcaggagaagggcccatcagccacctgg

SEQ ID NO: 10041 - DNA, 119 bp, homo sapiens
tgccctgcttccagaaggcatcccaagtcttctgaagtatgcagaagcaggagaagggcccatcagccactggctaccactgctctccagagatatgatctccctttcataactgatga

SEQ ID NO: 10042 - DNA, 119 bp, homo sapiens
gtgaagaagaccttaaacagaatataccaccaaaaccgtaaagttcatgaaaagactgtgcgcactgctcagctgctatcattttaaataacaatccatcctacatggacgtcaagaac

SEQ ID NO: 10043 - DNA, 119 bp, homo sapiens
atgaaaagactgtgcgcactgctgcagctgctatcattttaaataacaatccatcctacatggacgtcagaacatcctgctgtctattggggagcttccccaagaaatgaataaataca

SEQ ID NO: 10044 - DNA, 119 bp, homo sapiens
caatccatcctacatggacgtcaagaacatcctgctgtctattggggagcttccccaagaaatgaataatacatgctcgccattgttcaagacatcctacgttttgaaatgcctgcaag

SEQ ID NO: 10045 - DNA, 119 bp, homo sapiens
gtggttattgaagcccaaggactggaagccttaatcgcagccacccctgacgagggggaggagaaccttactcctatgctggtatgtcagccatcctctttgatgttcagctcagacct

SEQ ID NO: 10046 - DNA, 119 bp, homo sapiens
ggggaggagaaccttgactcctatgctggtatgtcagccatcctctttgatgttcagctcagacctgtccctttttcaacggatacagtgatttgatgtccaaaatgctgtcagcatct

SEQ ID NO: 10047 - DNA, 119 bp, homo sapiens
cagctcagacctgtcacctttttcaacggatacagtgatttgatgtccaaaatgctgtcagcatctggcaccctatcagtgtggtgaaaggacttattctgctaatagatcattctcag

SEQ ID NO: 10048 - DNA, 119 bp, homo sapiens
gaacttcagttacaatctggactaaaagccaatatagaggtccagggtggtctagctattgatatttcagtgcaatggagtttagcttgtggtatcgtgagtctaaaacccgagtgaaa

SEQ ID NO: 10049 - DNA, 119 bp, homo sapiens
tcagttacaatctggactaaaagccaatatagaggtccagggtggtctagctattgatatttcaggtgcatggagtttagcttgtggtatcgtgagtctaaaacccgagtgaaaaatag

SEQ ID NO: 10050 - DNA, 119 bp, homo sapiens
ggtgactgtggtaataaccactgacatcacagtggactcctcttttgtgaaagctggcctggaaaccagacagaaacagaagcaggcttggagtttatctccacagtgcagttttctca

SEQ ID NO: 10051 - DNA, 119 bp, homo sapiens
agctggcctggaaaccagtacagaaacagaagcaggcttggagtttatctccacagtgcagttttctcatacccattcttagtttgcatgcagatggacaaggatgaagctccattcag

SEQ ID NO: 10052 - DNA, 119 bp, homo sapiens
gcaatttgagaaaaagtacgaaaggctgtccacaggcagaggttatgtctctcagaaaagaaaagaaaggtattagcaggatgtgaattcccgctccatcaagagaactcagagatgtg

SEQ ID NO: 10053 - DNA, 119 bp, homo sapiens
aagaaaagaaagcgtattagcaggatgtgaattcccgctccatcaagagaactcagagatgtgcaaagtgtgtttgcccctcagccggatagtacttccagcggatggttttgaaactg

SEQ ID NO: 10054 - DNA, 119 bp, homo sapiens
gatgtgcaaagtggtgtttgcccctcagccggatagtacttccagcggatggttttgaaactgacctgtatattttacttgaatttgtctccccgaaagggacacaatgtggcatgact

SEQ ID NO: 10055 - DNA, 119 bp, homo sapiens
aaactgacctgtgatattttacttgaatttgtctccccgaaagggacacaatgtggcatgactaagtactgctctctgagagcacagcgtttacatatttacctgtatttaagattttt

SEQ ID NO: 10056 - DNA, 119 bp, homo sapiens
atgactaagtacttgctctctgagagcacagcgtttacatatttacctgtatttaagatttttgtaaaagctacaaaaaactgcagtttgatcaaatttgggtatatgcagtatgctac

SEQ ID NO: 10057 - DNA, 119 bp, homo sapiens
atttttgtaaaaagctacaaaaaactgcagtttgatcaaatttgggtatatgcagtatgctacccacaggtcattttgaatcatcatgtgacgctttcaacaacgttcttagtttactt

SEQ ID NO: 10058 - DNA, 119 bp, homo sapiens
tgctacccacagcgtcattttgaatcatcatgtgacgctttcaacaacgttcttagtttacttataccttctcaaatctcatttggtacagtcagaatagttattctctaagaggaaac

SEQ ID NO: 10059 - DNA, 119 bp, homo sapiens
ttacttatacctctctcaaatctcatttggtacagtcagaatagttattctctaagaggaaactagtgttgttaaaaacaaaaataaaaacaaaaccacacaaggagaacccaattttg

SEQ ID NO: 10060 - DNA, 119 bp, homo sapiens
ggaaactagtgtttgttaaaaacaaaaataaaaacaaaaccacacaaggagaacccaattttgtttcaaaatttttgatcaatgtatatgaagctcttgataggacttccttaagcatg

SEQ ID NO: 10061 - DNA, 119 bp, homo sapiens
attttgtttcaacaatttttgatcaatgtatatgaagctcttgataggacttccttaagcatgacgggaaaccaaacacgttccctaatcaggaaaaaaaaaaaaaaaaaaagtaagac

SEQ ID NO: 10062 - DNA, 119 bp, homo sapiens
agcatgacgggaaaaccaaacacgttccctaatcaggaaaaaaaaaaaaaaaaaaagtaagacacaaacaaccattttttttctctttttttggagttgggggcccagggagaagggac

SEQ ID NO: 10063 - DNA, 119 bp, homo sapiens
taagacacaaacaaaccattttttttctctttttttggagttgggggcccagggagaagggacaagactttaaaagacttgttagccaacttcaagaattaatatttatgtctctgtta

SEQ ID NO: 10064 - DNA, 119 bp, homo sapiens
agggacaagacttttaaaagacttgttagccaacttcaagaattaatatttatgtctctgttattgttattttaagccttaaggtagaaggcacatagaaataacatctcatctttctg

SEQ ID NO: 10065 - DNA, 119 bp, homo sapiens
ctgttattgttagttttaagccttaaggtagaaggcacatagaaataacatctcatctttctgctgaccttttagtgaggttgttccaaagacattcaggtctctacctccagccctgc

SEQ ID NO: 10066 - DNA, 119 bp, homo sapiens
tttctgctgaccattttagtgaggttgttccaaagacattcaggtctctacctccagccctgcaaaaatttggacctagcacagaggaatcaggaaaattaatttcagaaactccattt

SEQ ID NO: 10067 - DNA, 119 bp, homo sapiens
ccctgcaaaaatattggacctagcacagaggaatcaggaaaattaatttcagaaactccatttgattttcttttgctgtgtctttttgagactgtaatatggtacactgtcctctaagg

SEQ ID NO: 10068 - DNA, 119 bp, homo sapiens
ccatttgatttttcttttgctgtgtctttttgagactgtaatatggtacactgtcctctaagggacatctcattttatctcacctttttgggggtgagagctctagttcatttaactgt

SEQ ID NO: 10069 - DNA, 119 bp, homo sapiens
ctaagggacatcctcattttatctcacctttttgggggtgagagctctagttcatttaactgtactctgacaatagctaggatgactaagagaacattgcttcaagaaactggtggatt

SEQ ID NO: 10070 - DNA, 119 bp, homo sapiens
aactgtactctgcacaatagctaggatgactaagagaacattgcttcaagaaactggtggatttggattccaaaatatgaaataaggaaaaaaatgtttttatttgtatgaattaaaag

SEQ ID NO: 10071 - DNA, 119 bp, homo sapiens
tggatttggatttccaaaatatgaaataaggaaaaaaatgtttttatttgtatgaattaaaagatccatttgaacatttgcaaatatttattaataaacagatgtggtgataaacccaa

SEQ ID NO: 10072 - DNA, 119 bp, homo sapiens
taaaagatccatgttgaacatttgcaaatatttattaataaacagatgtggtgataaacccaaaacaaagacaggtccttattttccactaaacacagacacatgaaatgaaagtttag

SEQ ID NO: 10073 - DNA, 119 bp, homo sapiens
acccaaaacaaatgacaggtccttattttccactaaacacagacacatgaaatgaaagtttagctagccactatttgttgtaaattgaaaacgaagtgtgataaaataaatatgtagaa

SEQ ID NO: 10074 - DNA, 119 bp, homo sapiens
gtgtcaagactgtaatgtcatcttaacatttaggcgtttattcatagtaaccagaaattgtgttttatgtttttatttttcctaatgaagatgcaattaatttaagatggcaccttgaa

SEQ ID NO: 10075 - DNA, 119 bp, homo sapiens
attgtgttttatgctttttatttttcctaatgaagatgcaattaatttaagatggcaccttgaactactttgatatatataataaatagcagtgcattacaaaatattcaaatacagtc

SEQ ID NO: 10076 - DNA, 119 bp, homo sapiens
accttgaactactgttgatatatataataaatagcagtgcattacaaaatattcaaatacagtcattaattttttctatttttccccaagctgtggcaaccaacaaaaaacacaatgac

SEQ ID NO: 10077 - DNA, 119 bp, homo sapiens
atacagtcattaatttttttctatttttccccaagctgtggcaaccaacaaaaaacacaatgacgttctgtgacctagatataattatgttcctttcagaagtaaagttttttaaacat

SEQ ID NO: 10078 - DNA, 119 bp, homo sapiens
acaatgacgttctagtgacctagatataattatgttcctttcagaagtaaagttttttaaacatagtaaaacaatatgaccttattaaaataaaactctcttaactatacgtgccttta

SEQ ID NO: 10079 - DNA, 119 bp, homo sapiens
gaatatacaaagcttgcacataactaataagtataatagcatatcattaagaagcactgttttctaaaaattcgtgagtctgcccttcttgaaacataaagcttattttccattatctg

SEQ ID NO: 10080 - DNA, 119 bp, homo sapiens
ctgttttctaaaaaattcgtgagtctgcccttcttgaaacataaagcttattttccattatctgtatgcattttaaaacctttcaatattcccttgaaattaataaatatgaattaaga

SEQ ID NO: 10081 - DNA, 119 bp, homo sapiens
attatctgtatgccattttaaaacctttcaatattcccttgaaattaataaatatgaattaagattaatcacaaaacttctgtagccttaatgtcatatatgataaaaagagatctaga

SEQ ID NO: 10082 - DNA, 119 bp, homo sapiens
aattaagattaatgcacaaaacttctgtagccttaatgtcatatatgataaaaagagatctagaagatatagtgtaggaaaatctaagatggcatcactatttctgcactcttcacttg

SEQ ID NO: 10083 - DNA, 119 bp, homo sapiens
gatctagaagatactagtgtaggaaaatctaagatggcatcactatttctgcactcttcacttgaagcagctgaatagctccactggttacagcatgtctaattaagatcccccgactc

SEQ ID NO: 10084 - DNA, 119 bp, homo sapiens
ttcacttgaagcacgctgaatagctccactggttacagcatgtctaattaagatcccccgactctgtgtagctcttcttatttcctggctacaatttatagcactgagccaagtccagc

SEQ ID NO: 10085 - DNA, 119 bp, homo sapiens
cccgactctgtgtaagctcttcttatttcctggctacaatttatagcactgagccaagtccagcatttcacaaactgcagcagagtcataaaacactaccaagcaaaaggaatatcagt

SEQ ID NO: 10086 - DNA, 119 bp, homo sapiens
agtccagcatttccacaaactgcagcagagtcataaaacactaccaagcaaaaggaatatcagttgcaatcaatcctatctcctagaaaaaacaattggtaggttatttccactagctg

SEQ ID NO: 10087 - DNA, 119 bp, homo sapiens
gtaccttgtaatacatttgaatatattttaattttccacatattacttctcaatttaaaaattaaaacaccacttgccaaaaattcattaaaatcctatttaaatcattctacttgtgt

SEQ ID NO: 10088 - DNA, 119 bp, homo sapiens
aaaattaaaacagccacttgccaaaaattcattaaaatcctatttaaatcattctacttgtgttttaaaataaaaagactcttttagttttagaaagttcaatttgtcaaaagaaatag

SEQ ID NO: 10089 - DNA, 119 bp, homo sapiens
ttgtgttttaaaaataaaaagactcttttagttttagaaagttcaatttgtcaaaagaaatagaagcatactttaaaaagccattatatctcaaatatttttagatataaaaaagcatt

SEQ ID NO: 10090 - DNA, 119 bp, homo sapiens
aaatagaagcattactttaaaaagccattatatctcaaatatttttagatataaaaaagcatttgaaataaagtacatacacagttaacttctaattctcttttaacatttttcattta

SEQ ID NO: 10091 - DNA, 119 bp, homo sapiens
agcatttgaaattaaagtacatacacagttaacttctaattctcttttaacatttttcatttaaacagacacttctttgggactttaccttatttgtatgtcatgctgcatcgaagaat

SEQ ID NO: 10092 - DNA, 119 bp, homo sapiens
catttaaacagaccacttctttgggactttaccttatttgtatgtcatgctgcatcgaagaatgaaatcatgcattttggtcataactgtccagaatttccaatagaaggggtacttta

SEQ ID NO: 10093 - DNA, 119 bp, homo sapiens
aagaatgaaatcaatgcattttggtcataactgtccagaatttccaatagaaggggtactttagtttttcattggtgcctttaaacttaaatttatctatgaaaagatcagtgatcatg

SEQ ID NO: 10094 - DNA, 119 bp, homo sapiens
tactgtatatcctttattaaattttgccttaaaaattttaaatgctgcatttttataattcacaatagcacaaaacatgacaattatttgtgtgaaatacagtctaagctctaaaggtt

SEQ ID NO: 10095 - DNA, 119 bp, homo sapiens
ttataattcacaatagcaacaaaacatgacaattatttgtgtgaaatacagtctaagctctaaaggttctagattacattcattttataccaggtttgttcatatatatagattaattc

SEQ ID NO: 10096 - DNA, 119 bp, homo sapiens
ctaagctctaaaggttcatagattacattcattttataccaggtttgttcatatatatagattaattcacacagtatacttatttcttaatatacttgcattttatcaagtaaaagaat

SEQ ID NO: 10097 - DNA, 119 bp, homo sapiens
atatatagattaattcatcacagtatacttatttcttaatatacttgcattttatcaagtaaaagaattaatattaaaagtagcttgacaaaatacagaaatattctgtgcaataaatt

SEQ ID NO: 10098 - DNA, 119 bp, homo sapiens
tatcaagtaaaagaattaaatattaaaagtagcttgacaaaatacagaaatattctgtgcaataaatttttgtcaactgattcatgactggttcatgaatcatgactgatgtaatcttt

SEQ ID NO: 10099 - DNA, 119 bp, homo sapiens
ttctgtgcaataaatttgttgtcaactgattcatgactggttcatgaatcatgactgatgtaatcttttatctttctgcccagcttctcttacatgatccttgggaaatagccagttga

SEQ ID NO: 10100 - DNA, 119 bp, homo sapiens
gactgatgtaatctttttatctttctgcccagcttctcttacatgatccttgggaaatagccagttgaaagaaatatggcaaggtattctagaatggtccactaaccatagagtctttc

SEQ ID NO: 10101 - DNA, 119 bp, homo sapiens
ggaaatagccagttgaaaagaaatatggcaaggtattctagaatggtccactaaccatagagtctttcagatgtgcaggttgctttttgtattcttcctgtaggtgatctgcctcttct

SEQ ID NO: 10102 - DNA, 119 bp, homo sapiens
aaccatagagtctttcaagatgtgcaggttgctttttgtattcttcctgtaggtgatctgcctcttctaaatacagtgatattctggtatcagaaagttcgtatttccctcatgaatct

SEQ ID NO: 10103 - DNA, 119 bp, homo sapiens
ctgtaggtactttcaagttgtgtatctagaaaggtgttctgaaagtaaaatgtcacacattctcctgctgaggtttttctggaacttcaggcagacaaaaaaccacccaggagtgaact

SEQ ID NO: 10104 - DNA, 119 bp, homo sapiens
taaaatgtcacacattctcctgctggaggtttttctggaacttcaggcagacaaaaaaccacccaggaggaacttcagcaaaactgaactggcctgttagggtcagtgtattcatgggt

SEQ ID NO: 10105 - DNA, 119 bp, homo sapiens
ctgtcatgatcaataaagtgagttctttgatggagtgaaagaggtttgatgtggtactggcggacctgaaggttttgggttgaattcttggagtcacatatgcttgtagtgtgccatac

SEQ ID NO: 10106 - DNA, 119 bp, homo sapiens
agttctttgatggagtgaaagaggtttgatgtggtactggcggacctgacaggttttgggttgaattctggagtcacatatgcttgtagtgtgccatactggccttcaattgagcgaat

SEQ ID NO: 10107 - DNA, 119 bp, homo sapiens
ctgtattaagacattatctattgcagtctgtacctctaagataaggctgtaactggcatcatctttattagtgtaaatttatcatttataccaaaggaaggtactgctgattttgcttt

SEQ ID NO: 10108 - DNA, 119 bp, homo sapiens
taagataaggctgtaactggcatcatctttatttagtgtaaatttatcatttataccaaaggaaggtacgctgattttgctttgcttgattgagaagactgttgataattctctctttc

SEQ ID NO: 10109 - DNA, 119 bp, homo sapiens
tgtaaatttatcatttataccaaaggaaggtactgctgattttgctttgcttgattgagaagactgttgtaattctctctttcctgcaataccttatactgcaaatgttccaactcatt

SEQ ID NO: 10110 - DNA, 119 bp, homo sapiens
ctgatcaaatcgtagaacaggttcatttgcattatcaaaactatacacttccaccattccgtcatctctccaacaagtaaatctttaaccccatcacccacaatgtcaaagctgtcaat

SEQ ID NO: 10111 - DNA, 119 bp, homo sapiens
gtagaacaggttcatttgcattatcaaaactatacacttccaccattccgtcatctctcccaacaagtaatctttaaccccatcacccacaatgtcaaagctgtcaatacacaaaatac

SEQ ID NO: 10112 - DNA, 119 bp, homo sapiens
ctgtaaaactctgagcactctgtcctggcaggccaatacaggtgtgatacgagataatctttccactggaggcagatcacatcattgattttatccccagaaaggtaataatgttggtc

SEQ ID NO: 10113 - DNA, 119 bp, homo sapiens
caatacaggtgtgatacgagataatctttccactggaaggcagatcacatcattgattttatccccagaaggtaataatgttggtctttgcagtcacaataatggttatagatgtaact

SEQ ID NO: 10114 - DNA, 119 bp, homo sapiens
tggaaggcagatcacatcattgattttatccccagaaaggtaataatgttggtctttgcagtcacaatatggttatagatgtaacttgcactgagaaagaggtctgagccagatatgtg

SEQ ID NO: 10115 - DNA, 119 bp, homo sapiens
atagctttaatgctttcagtgaggtttgtttcaaaggagaggaactgttttcctctttttgtgaagccttaatctcagatgctgcagcaataaaaattttctcctgaggtgtgttgata

SEQ ID NO: 10116 - DNA, 119 bp, homo sapiens
ttttgtgaagcctctaatctcagatgctgcagcaataaaaattttctcctgaggtgtgttgataacccccccagttccagccttgcaatcttcggcccgggtaaagtcttgaacactgc

SEQ ID NO: 10117 - DNA, 119 bp, homo sapiens
ctgcagataatccattcggtttaaaatcagatccatgatgactacgcggaggggctaagcagcgccggaaagaacaggagggacagaggcttcgggcccgcaggcctccgacccagtca

SEQ ID NO: 10118 - DNA, 119 bp, homo sapiens
ggggctaagcagcgccggacaagaacaggagggacagaggcttcgggcccgcaggcctccgacccagtcgaaggctgcccgcgcccctcaaaagccagccccagctaccgcgcctaggt

SEQ ID NO: 10119 - DNA, 119 bp, homo sapiens
gcaggcctccgacccagtcagaaggctgcccgcgcccctcaaaagccagccccagctaccgcgcctaggcctgggctgcacaggcggggcgacagggcagtggcgtcctgcgtgacgtc

SEQ ID NO: 10120 - DNA, 119 bp, homo sapiens
gtctcttagcaactaagcccccggctcctccagaagcccctcttcgcacatgcgcaaactgcggacgggaactgggctccctagccctggcgtttttggtgttgctgtcccagccagaa

SEQ ID NO: 10121 - DNA, 119 bp, homo sapiens
agaagcccctcttcgcacatgcgcaaactgcggacggggaactgggctccctagccctggcgtttttgggttgctgtcccagccagaatcgcgtctggccggtgggaagccgggaactc

SEQ ID NO: 10122 - DNA, 119 bp, homo sapiens
ggacggggaactgggctccctagccctggcgtttttggtgttgctgtcccagccagaatcgcgtctggcggtgggaagccgggaactccagccccctgtaggagaggagaaaggagcga

SEQ ID NO: 10123 - DNA, 119 bp, homo sapiens
gcaggagaggaaaacaagtgcaaagtgcattcttgaagcactctgtcaaatcacttttcatgcttcattagtagaaacatggcacattttccaaagccatcagcctgtcttgttcatat

SEQ ID NO: 10124 - DNA, 119 bp, homo sapiens
gaagcactctgtcaaatcacttttcatgcttcattgagtagaaacatggcacattttccaaagccatcacctgtcttgttcatattatatcccagacagacacgcaagtattgtaatca

SEQ ID NO: 10125 - DNA, 119 bp, homo sapiens
tgagtagaaacatggcacattttccaaagccatcagcctgtcttgttcatattatatcccagacagacagcaagtattgtaatcattgataaaaatctcattaggcttctggaaaatag

SEQ ID NO: 10126 - DNA, 119 bp, homo sapiens
atcatgatacatggtgatggcttgcagagtcgtaaacaaaagaagacacatgggacttcaacaactttctcattcgcggaaacaggaagaactttcctaggcccactaaaatcatccaa

SEQ ID NO: 10127 - DNA, 119 bp, homo sapiens
caacaactttcatcattcgcggaaacaggaagaactttcctaggcccactaaaatcatccaaatttatttagatgaagaatgtcatgaaagtgtattaatcagttcaacagtaaggctt

SEQ ID NO: 10128 - DNA, 119 bp, homo sapiens
ccaaatttattatagatgaagaatgtcatgaaagtgtattaatcagttcaacagtaaggcttcttgaaatttggatttaaccagtgcagtgggacaacttctcaatgaagcagttcaag

SEQ ID NO: 10129 - DNA, 119 bp, homo sapiens
gcttcttgaaagtttggatttaaccagtgcagtgggacaacttctcaatgaagcagttcaagcacaaaaaacacatatagaactggaatcagtactcttttgtttcttgttggtgcttg

SEQ ID NO: 10130 - DNA, 119 bp, homo sapiens
caagcacaaaacaacacatatagaactggaatcagtactcttttgtttcttgttggtgcttggagcagtcagttgaagaatgtcttcatcttggtgtccccatttccataatagtatca

SEQ ID NO: 10131 - DNA, 119 bp, homo sapiens
cttggagcagtgcagttgaagaatgtcttcatcttggtgtccccatttccataatagtatcagtaatgtagaaggcttaaacttttgtagtgaagaggtagtttctcttcatgtacctg

SEQ ID NO: 10132 - DNA, 119 bp, homo sapiens
atcagtaatgtcagaaggcttaaacttttgtagtgaagaggtagtttctcttcatgtacctgttcacaaatatttgactgtatggacagcacaaaaacattttctcaacttgaaacatt

SEQ ID NO: 10133 - DNA, 119 bp, homo sapiens
cctgttcacaatatatttgactgtatggacagcacaaaaacattttctcaacttgaaacatttagtgtagtttgtgtccttttctacaggtcccttcagatactgatttgatagaggaa

SEQ ID NO: 10134 - DNA, 119 bp, homo sapiens
catttagtgtaagtttgtgtccttttctacaggtcccttcagatactgatttgatagaggaattgcatgtctcaaagatgttgcctctcaaacactgaccatttccaacctttctggga

SEQ ID NO: 10135 - DNA, 119 bp, homo sapiens
ggaattgcatggtctcaaagatgttgcctctcaaacactgaccatttccaacctttctgggagacctctaaatcatatgaattatttaaacctcagacaaaggttgaagcagataacaa

SEQ ID NO: 10136 - DNA, 119 bp, homo sapiens
gggagacctcttaaatcatatgaattatttaaacctcagacaaaggttgaagcagataacaacacatcagaactctgaaaaacagcctgcttgcagatacctgctgcagacagtcaata

SEQ ID NO: 10137 - DNA, 119 bp, homo sapiens
acaacacatcacgaactctgaaaaacagcctgcttgcagatacctgctgcagacagtcaatactaatcccagtaggcattttaataggacagataatactgaaggggtaagcaaaccag

SEQ ID NO: 10138 - DNA, 119 bp, homo sapiens
aatactaatccacagtaggcattttaataggacagataatactgaaggggtaagcaaaccagatggattcaagaacatgttacagctactcacaaaacttacagatgtaatgatttggt

SEQ ID NO: 10139 - DNA, 119 bp, homo sapiens
ccagatggatttcaagaacatgttacagctactcacaaaacttacagatgtaatgatttggtagagttgcagtaggcttgagtcatggagatcacagcagcatgaagttagtagaagaa

SEQ ID NO: 10140 - DNA, 119 bp, homo sapiens
tggtagagttggcagtaggcttgagtcatggagatcacagcagcatgaagttagtagaagaagcagtacgctgcaatatcagaatgcttgtgtgcaacaaggcaactgtacaaaaccat

SEQ ID NO: 10141 - DNA, 119 bp, homo sapiens
agaagcagtacagctgcaatatcagaatgcttgtgtgcaacaaggcaactgtacaaaaccatttatgttgacatttcaagaattttcacttgctgtctaccaggcttacctgaaacttc

SEQ ID NO: 10142 - DNA, 119 bp, homo sapiens
ccatttatgtttgacatttcaagaattttcacttgctgtctaccaggcttacctgaaacttcttcttgttttgtccaggatatatcactgttgtgtcagtatctaataatcctgtgatc

SEQ ID NO: 10143 - DNA, 119 bp, homo sapiens
cttcttcttgtgtttgtccaggatatatcactgttgtgtcagtatctaataatcctgtgatcaaggaatgcagaatcagcctgtgcgaatagttctcattgagggtgacctcacagaga

SEQ ID NO: 10144 - DNA, 119 bp, homo sapiens
gatcaaggaattgcagaatcagcctgtgcgaatagttctcattgagggtgacctcacagagaattaccgcacctgggatttaataagtctgcaaatattaaaacagtattagatagcat

SEQ ID NO: 10145 - DNA, 119 bp, homo sapiens
gagaattaccgccacctgggatttaataagtctgcaaatattaaaacagtattagatagcatgcggcttaagaagacagctcagaagaactgtgggcaaatcacgtgttacaggtgtta

SEQ ID NO: 10146 - DNA, 119 bp, homo sapiens
gcatgcggcttcaagaagacagctcagaagaactgtgggcaaatcacgtgttacaggtgttaatccagtcaaggtgaaccttgtcctggtacaaggaaatgtgtccgaacgcttaattg

SEQ ID NO: 10147 - DNA, 119 bp, homo sapiens
gttaatccagttcaaggtgaaccttgtcctggtacaaggaaatgtgtccgaacgcttaattgaaaaatgataaacagtaagcggttggtaatcggctcagtgaatggcagtgtgatgca

SEQ ID NO: 10148 - DNA, 119 bp, homo sapiens
attgaaaaatgtataaacagtaagcggttggtaatcggctcagtgaatggcagtgtgatgcaggcttttcagaggctgcaggagcagtacaggtggcctacattacacaagtgaatgaa

SEQ ID NO: 10149 - DNA, 119 bp, homo sapiens
tgcaggcttttgcagaggctgcaggagcagtacaggtggcctacattacacaagtgaatgaagattgtggggcgacggggtctgcgtgaccttctggagaagcagccctttggatgttg

SEQ ID NO: 10150 - DNA, 119 bp, homo sapiens
tgaagattgtgtgggcgacggggtctgcgtgaccttctggagaagcagccctttggatgttgtagatagaacaacagaatcgcaatcttattaaaaacagaaggaattaatttggttac

SEQ ID NO: 10151 - DNA, 119 bp, homo sapiens
gttgtagataggaacaacagaatcgcaatcttattaaaaacagaaggaattaatttggttacggccgtgtcactaacccagttactgcacagatgcaaatcaaagaagataggttctgg

SEQ ID NO: 10152 - DNA, 119 bp, homo sapiens
ttacggccgtgctcactaacccagttactgcacagatgcaaatcaaagaagataggttctggacatgtgctatcgtttgtattatgctctaaaagaggaaaaggtcttccttggaggtg

SEQ ID NO: 10153 - DNA, 119 bp, homo sapiens
ctggacatgtgcctatcgtttgtattatgctctaaaagaggaaaaggtcttccttggaggtggtgcagtgaatttttgtgtcttagctgtcttcatattcttgcagagcaatctctgaa

SEQ ID NO: 10154 - DNA, 119 bp, homo sapiens
ggtggtgcagttgaatttttgtgtcttagctgtcttcatattcttgcagagcaatctctgaaaaaagaaaccatgcctgctcagggtggctgcataatacttcctcttggctggcttca

SEQ ID NO: 10155 - DNA, 119 bp, homo sapiens
tgaaaaaagaaaaccatgcctgctcagggtggctgcataatacttcctcttggctggcttcatctctggaatatacagaccaactgtgcttaaattcctggcaaatggatggcagaaat

SEQ ID NO: 10156 - DNA, 119 bp, homo sapiens
ttcatctctggcaatatacagaccaactgtgcttaaattcctggcaaatggatggcagaaatacctttcactctcctatataacactgccaattactcatcagaatttgaagccagcac

SEQ ID NO: 10157 - DNA, 119 bp, homo sapiens
aaatacctttcaactctcctatataacactgccaattactcatcagaatttgaagccagcacatacattaacatcatctgcaaaatgccacagactctggctctccttcatcttacatc

SEQ ID NO: 10158 - DNA, 119 bp, homo sapiens
gcacatacattcaacatcatctgcaaaatgccacagactctggctctccttcatcttacatcttgaatgatatagtaaactaaatagtagaatttttaattcagacatttcaaataaac

SEQ ID NO: 10159 - DNA, 119 bp, homo sapiens
catcttgaatgaatatagtaaactaaatagtagaatttttaattcagacatttcaaataaactggagcaattccgagagtttatgacgttgttacaccaaagattgaggcgtggcgccg

SEQ ID NO: 10160 - DNA, 119 bp, homo sapiens
aaactggagcagattccgagagtttatgacgttgttacaccaaagattgaggcgtggcgccgagcattgatttagtattgttagtacttcagacagacagtgaaataattactggacat

SEQ ID NO: 10161 - DNA, 119 bp, homo sapiens
gccgagcattggatttagtattgttagtacttcagacagacagtgaaataattactggacatggacacaacagataaattcacaggaattaacgggctttctatttttgtagtgttact

SEQ ID NO: 10162 - DNA, 119 bp, homo sapiens
acatggacacacacagataaattcacaggaattaacgggctttctatttttgtagtgttactggctaagctttggaaaataatttttcataatatgtcatgctaataataaatatattg

SEQ ID NO: 10163 - DNA, 119 bp, homo sapiens
tactggctaagtctttggaaaataatttttcataatatgtcatgctaataataaatatattgatagccagtcatggtgcctaaaatgccagctattgccaagaagaaaatagttgatgt

SEQ ID NO: 10164 - DNA, 119 bp, homo sapiens
gcggccctgcccccggcacggcccccaggtgcgctccttctccggctgcttgtagcactggtctcactgccccgccgtcagccaccggttccttatccgtctcattccccattgtggct

SEQ ID NO: 10165 - DNA, 119 bp, homo sapiens
tgcttgtagcactggtctcactgtccccgccgtcagccaccggttccttatccgtctcattccccattgggcttggctgagccggtcgccaggcctcgctgtcctcctttgccttcctc

SEQ ID NO: 10166 - DNA, 119 bp, homo sapiens
cttatccgtctcattccccattgtggcttggctgagccggtcgccaggcctcgctgtcctcctttgcctcctctctcctcagcggccgtactttgcgccgtacctcacctggcctgcag

SEQ ID NO: 10167 - DNA, 119 bp, homo sapiens
gatgaagaaccccatgctggaggtggtgtctttactactggagaagctgctcctcatctccaacttcacctctttagttcgggcgccgcgggcgaagacaaagggaggaacagttttta

SEQ ID NO: 10168 - DNA, 119 bp, homo sapiens
ctcatctccaacttcacgctctttagttcgggcgccgcgggcgaagacaaagggaggaacagtttttataaaccagctctttccaccgaggcgacgtgctggaggtgccccggacccac

SEQ ID NO: 10169 - DNA, 119 bp, homo sapiens
ggaggaacagtttttatgaaaccagctctttccaccgaggcgacgtgctggaggtgccccggacccaccgacccactatggcatctacctaggagacaaccgtgttgcccacatgatgc

SEQ ID NO: 10170 - DNA, 119 bp, homo sapiens
ggtgccccggacccacctgacccactatggcatctacctaggagacaaccgtgttgcccacatgatgccgacatcctgttggccctgacagacgacatggggcgcacgcagaaggtggt

SEQ ID NO: 10171 - DNA, 119 bp, homo sapiens
gttgcccacatgatgcccgacatcctgttggccctgacagacgacatggggcgcacgcagaaggtggtcccaacaagcgtctcatcctgggcgttattgtcaaagtggccagcatccgc

SEQ ID NO: 10172 - DNA, 119 bp, homo sapiens
gcacgcagaaggtggtctccaacaagcgtctcatcctgggcgttattgtcaaagtggccagcatccgcgggacacagtggaggacttcgcctacggagctaacatcctggtcaatcacc

SEQ ID NO: 10173 - DNA, 119 bp, homo sapiens
agtggccagcatccgcgtggacacagtggaggacttcgcctacggagctaacatcctggtcaatcacctgacgagtccctccagaaaaaggcactgctcaacgaggaggtggcgcggag

SEQ ID NO: 10174 - DNA, 119 bp, homo sapiens
atcctggtcaatcacctggacgagtccctccagaaaaaggcactgctcaacgaggaggtggcgcggaggctgaaaagctgctgggctttaccccctacagcctgctgtggaacaactgc

SEQ ID NO: 10175 - DNA, 119 bp, homo sapiens
aggaggtggcgcggagggctgaaaagctgctgggctttaccccctacagcctgctgtggaacaactgcggcacttcgtgacctactgcagatatggcaccccgatcagtccccagtccg

SEQ ID NO: 10176 - DNA, 119 bp, homo sapiens
ttttgtgagactgtgaagataattattcgtgatcagagaagtgttcttgcttcagcagtcttgggattgcgtctatagtctgtacgggcttggtatcatacactacccttcctgcaatt

SEQ ID NO: 10177 - DNA, 119 bp, homo sapiens
tcttgggattggcgtctatagtctgtacgggcttggtatcatacactacccttcctgcaatttttattcattcttcctatggatggctggctaacttcatacccccatgtcagtgtgtg

SEQ ID NO: 10178 - DNA, 119 bp, homo sapiens
aatttttattccattcttcctatggatggctggctaacttcatacccccatgtcagtgtgtgtattctgatgtaaatatgtttatatttatagagcatcaatcaatataagcattattg

SEQ ID NO: 10179 - DNA, 119 bp, homo sapiens
tgtgtattctgtatgtaaatatgtttatatttatagagcatcaatcaatataagcattattgagaaaaagtgacccgtaacactgtgttctggataaaaatgtgattaggaatcacgca

SEQ ID NO: 10180 - DNA, 119 bp, homo sapiens
attgagaaaaatgtgacccgtaacactgtgttctggataaaaatgtgattaggaatcacgcaaagtgctactgtgtaagcccaagaacaaaggctttctgaatcttctcaggcagttca

SEQ ID NO: 10181 - DNA, 119 bp, homo sapiens
cgcaaagtgcttactgtgtaagcccaagaacaaaggctttctgaatcttctcaggcagttcagatttaagcaccatccaaaccttggaaatacgacagggtgtggtagaattcagcaat

SEQ ID NO: 10182 - DNA, 119 bp, homo sapiens
ttcagatttaaagcaccatccaaaccttggaaatacgacagggtgtggtagaattcagcaatatgagaaaccagcccctaaaatgatagccacaagagattaattgtgtttttttttct

SEQ ID NO: 10183 - DNA, 119 bp, homo sapiens
caatatgagaaaaccagcccctaaaatgatagccacaagagattaattgtgtttttttttctcctgtaaccttgtactgttcggctgaatttgaagattggaagacttatattgagacc

SEQ ID NO: 10184 - DNA, 119 bp, homo sapiens
ttctcctgtaatccttgtactgttcggctgaatttgaagattggaagacttatattgagaccagtaacttactgtaaatttactttgtttcattgaaaaaacaaattgataaacatatt

SEQ ID NO: 10185 - DNA, 119 bp, homo sapiens
gaccagtaactttactgtaaatttactttgtttcattgaaaaaacaaattgataaacatattaaactggagaattttctttattcaaatgaaaacatgtttgatgactggtcaaaaaat

SEQ ID NO: 10186 - DNA, 119 bp, homo sapiens
tattaaactggaagaattttctttattcaaatgaaaacatgtttgatgactggtcaaaaaataagctcaaatctatttttttcatgtagtatataagtcaagaatgttttattgtcatt

SEQ ID NO: 10187 - DNA, 119 bp, homo sapiens
aaataagctcataatctatttttttcatgtagtatataagtcaagaatgttttattgtcattatgtgaaccaatattggcaaatagtactttaatgatgaagtaaatgaccagaaatta

SEQ ID NO: 10188 - DNA, 119 bp, homo sapiens
cattatgtgaaaccaatattggcaaatagtactttaatgatgaagtaaatgaccagaaattatagaaattgtgttttcctgtaaaaatagcactatagtatcacttgaacaatttgatt

SEQ ID NO: 10189 - DNA, 119 bp, homo sapiens
attatagaaatctgtgttttcctgtaaaaatagcactatagtatcacttgaacaatttgatttggctttcttactaggaagcctggaattcattatttttttccttttatgtgccactg

SEQ ID NO: 10190 - DNA, 119 bp, homo sapiens
gatttggctttacttactaggaagcctggaattcattatttttttccttttatgtgccactgtggctacttaaatcactctgagaggtaaatggatataggattgaagttatgtgggta

SEQ ID NO: 10191 - DNA, 119 bp, homo sapiens
actgtggctactttaaatcactctgagaggtaaatggatataggattgaagttatgtgggtatttggcagtgtgtgtgaaataaatatgtagatagtcacatatacacagactgagaga

SEQ ID NO: 10192 - DNA, 119 bp, homo sapiens
ggtatttggcatgtgtgtgtgaaataaatatgtagatagtcacatatacacagactgagagataaattgtcttgattgctttattatcatcatactagtgtgttcattatagagtatct

SEQ ID NO: 10193 - DNA, 119 bp, homo sapiens
gagataaattgttcttgattgctttattatcatcatactagtgtgttcattatagagtatctgtagagggaatgtaaaagtaagtccaatctattttcttatgtcattgaatttgtagt

SEQ ID NO: 10194 - DNA, 119 bp, homo sapiens
atctgtagaggtgaatgtaaaagtaagtccaatctattttcttatgtcattgaatttgtagtgttaactgcatatatgttattggatgggttgtcttttaaagcatttactaatgtact

SEQ ID NO: 10195 - DNA, 119 bp, homo sapiens
tagtgttaacttgcatatatgttattggatgggttgtcttttaaagcatttactaatgtactctgaaattttaaaagccttcagatttgttttctagtcacttttttccatatcatttc

SEQ ID NO: 10196 - DNA, 119 bp, homo sapiens
tactctgaaatttttaaaagccttcagatttgttttctagtcacttttttccatatcatttctaattatgtttatatccttaaaagaaggatgccacagtagtatgtaaaacccaaaca

SEQ ID NO: 10197 - DNA, 119 bp, homo sapiens
gtggcttagtactgccagtcatgtaaattgattctgctgagggtcttataagaattgagatataacaatgtaaaacaagcattcaagcacttttacaaaattaccaaattcttaaaatg

SEQ ID NO: 10198 - DNA, 119 bp, homo sapiens
aagaattgagatataacaatggtaaaacaagcattcaagcacttttacaaaattaccaaattcttaaaagaagccacagctagacttgcatttcaggtattaaaattgctttcttaact

SEQ ID NO: 10199 - DNA, 119 bp, homo sapiens
aaattaccaaattcttaaaatgaagccacagctagacttgcatttcaggtattaaaattgctttcttaatgtcaagaatcacaaaataacaaatcatattatgagtgaatatggggagg

SEQ ID NO: 10200 - DNA, 119 bp, homo sapiens
tattaaaattgctttcttaactgtcaagaatcacaaaataacaaatcatattatgagtgaatatggggaggcggggccaatcagtcaatgataatctgaacaaattttaagagcagatt

SEQ ID NO: 10201 - DNA, 119 bp, homo sapiens
attatgagtgaatatggggagggcggggccaatcagtcaatgataatctgaacaaattttaagagcagatttagattaataatgttttatcaccactaatttgcccacaacaaactcag

SEQ ID NO: 10202 - DNA, 119 bp, homo sapiens
ggcaacaccatagaatataggtgttctctggacctattctaaccacttaaaattatcttaagtatgcatcataaaagcaaccactatgagaactaccgtgttagtggtttttcacttac

SEQ ID NO: 10203 - DNA, 119 bp, homo sapiens
ttatcttaagtatgcatacataaaagcaaccactatgagaactaccgtgttagtggtttttcacttacttatattacccttgtaggaatagtttaaggaaattcatttcttaaaaatat

SEQ ID NO: 10204 - DNA, 119 bp, homo sapiens
gtggtttttcacttactgtatattacccttgtaggaatagtttaaggaaattcatttcttaaaaatatatgtcctcaaataattaatttttttgcaaactttagttattacaggcagca

SEQ ID NO: 10205 - DNA, 119 bp, homo sapiens
catttcttaaaaatatagtgtcctcaaataattaatttttttgcaaactttagttattacaggcagcaaaaccactgtctgaaactaaatctgtgttcaaagatgaagacccctcatta

SEQ ID NO: 10206 - DNA, 119 bp, homo sapiens
gttattacaggcagcaaaaaccactgtctgaaactaaatctgtgttcaaagatgaagacccctcattaaagccaaggacgttcttaagattggaactgacataattagtcttgacttac

SEQ ID NO: 10207 - DNA, 119 bp, homo sapiens
tgaagacccctcattaaaagccaaggacgttcttaagattggaactgacataattagtcttgacttactcattaaagcaagattcaattccttgttcatttgagtgttcattatatgcc

SEQ ID NO: 10208 - DNA, 119 bp, homo sapiens
attagtcttgacttacttcattaaagcaagattcaattccttgttcatttgagtgttcattatatgccagcattgaccagttgcaattttatggtccagaattaatattattattcgta

SEQ ID NO: 10209 - DNA, 119 bp, homo sapiens
caatgctagcattaagccaagaaatagtgtgaggtgatcttatcacactgatgtgttcaactgtttatggaaaaggaaactaggatggttttatttgtgaaatgttctacaacgctaga

SEQ ID NO: 10210 - DNA, 119 bp, homo sapiens
tatcacactgatgtgttcaactgtttatgggaaaaggaaactaggatggttttatttgtgaaatgttctcaacgctagaactgttgaacttcttgggagaaaaggagaatctttgtttt

SEQ ID NO: 10211 - DNA, 119 bp, homo sapiens
ctaggatggttttatttgtgaaatgttctacaacgctagaactgttgaacttcttgggagaaaaggagatctttgttttgttgtgctgagtttgattagttgcttaaccaagtagaaag

SEQ ID NO: 10212 - DNA, 119 bp, homo sapiens
actgttgaacttcttgggagaaaaggagaatctttgttttgttgtgctgagtttgattagttgcttaacaagtagaaagaaaagcacatcttcctgatcacagttataaaagaaaccct

SEQ ID NO: 10213 - DNA, 119 bp, homo sapiens
gaagaagaaaccctgagccattaatgtgtctcgtaacttgaggaagttcatgaattctctgggcttcatcattaagattcatccttatgctcctgcaagtttcttatatttatgtattt

SEQ ID NO: 10214 - DNA, 119 bp, homo sapiens
tgggcttcatccattaagattcatccttatgctcctgcaagtttcttatatttatgtatttctattctgtttctgaaatgataacctagtagtgtctgatgaagttttttcatgcttat

SEQ ID NO: 10215 - DNA, 119 bp, homo sapiens
ttctattctgatttctgaaatgataacctagtagtgtctgatgaagttttttcatgcttattttattcttgtcacagatgaaagaagaataggactaattggggctaagatgaattaat

SEQ ID NO: 10216 - DNA, 119 bp, homo sapiens
tagacataattgtattaggactttctgcagttgacatttgcataaagctgactgactgaaggaacagaagtgagacagacagatatgaccaaatttatacaaaccatgtaccaacactt

SEQ ID NO: 10217 - DNA, 119 bp, homo sapiens
ctgtgaggtaccctatgagttgttgacttgaaaacatggaactgcacagggcattcaggcaagtgcaagggttcaggggccagcgcagagcagagtgctgagtaaagatgtcagaaaag

SEQ ID NO: 10218 - DNA, 119 bp, homo sapiens
ggcaagtgcaagtggttcaggggccagcgcagagcagagtgctgagtaaagatgtcagaaaaggaaagcatggtctggtacaagtcttgtatagaacaagaagtttagacttttgaaca

SEQ ID NO: 10219 - DNA, 119 bp, homo sapiens
gaaaaggaaagcaatggtctggtacaagtcttgtatagaacaagaagtttagacttttgaacaggcaatgagatttggggttcagaaagataaatcccaaaagtatggagaacaaagga

SEQ ID NO: 10220 - DNA, 119 bp, homo sapiens
tgaacaggcaatcgagatttggggttcagaaagataaatcccaaaagtatggagaacaaaggaactcatttaaaggactagctaagatgctcaatctctaaaaaaaaaaggatctgtat

SEQ ID NO: 10221 - DNA, 119 bp, homo sapiens
aaaggaactcattttaaaggactagctaagatgctcaatctctaaaaaaaaaaggatctgtattcgtgaagtagagagaaaggttgtttaggaagagtcaacagactttagcaaaatcc

SEQ ID NO: 10222 - DNA, 119 bp, homo sapiens
ctgtattcgtgagagtagagagaaaggttgtttaggaagagtcaacagactttagcaaaatccttttattgattcatgcataactcctgatggagtgtcaaggaagactcattcacttt

SEQ ID NO: 10223 - DNA, 119 bp, homo sapiens
aaatccttttatttgattcatgcataactcctgatggagtgtcaaggaagactcattcacttttctttctgccagaaagttggttcttgcaaaatagattaacttgatgactatgtgta

SEQ ID NO: 10224 - DNA, 119 bp, homo sapiens
cacttttctttcctgccagaaagttggttcttgcaaaatagattaacttgatgactatgtgtatattggtactcctaattttagctctgttagatatgtttctttctaaggacaagcaa

SEQ ID NO: 10225 - DNA, 119 bp, homo sapiens
tgtgtatattggatactcctaattttagctctgttagatatgtttctttctaaggacaagcaactatgttagacttgttgtttgaattttttttcagtatatatatgtttcttgttttt

SEQ ID NO: 10226 - DNA, 119 bp, homo sapiens
aagcaactatgtatagacttgttgtttgaattttttttcagtatatatatgtttcttgtttttctattttctacttcatactgttaatgtcaaatatcaaaaatgttttccagcaatat

SEQ ID NO: 10227 - DNA, 119 bp, homo sapiens
gtttttctatttttctacttcatactgttaatgtcaaatatcaaaaatgttttccagcaatatcaagtttggcaatggcaaaagtccttgttgtagatgagaagcatataagaaatggt

SEQ ID NO: 10228 - DNA, 119 bp, homo sapiens
caatatcaagttatggcaatggcaaaagtccttgttgtagatgagaagcatataagaaatggttgccaactttgttttgtatgatctatttagagttttaaccaacctagatctgtcag

SEQ ID NO: 10229 - DNA, 119 bp, homo sapiens
aatggttgccaatctttgttttgtatgatctatttagagttttaaccaacctagatctgtcagctaagcaattttatatttggtatacatgcatgtcaaataaagttaattttacatac

SEQ ID NO: 10230 - DNA, 119 bp, homo sapiens
cagaatcatgagacagactttgccttgtatctacttttgggggggccttttgccctttgggatgctgtggcatcctccaccaccaagtgcactgttagccatgaagttgctgactgcag

SEQ ID NO: 10231 - DNA, 119 bp, homo sapiens
ctttgggatgctgtgtgcatcctccaccaccaagtgcactgttagccatgaagttgctgactgcagccactgaagttgactcaggtacccgatgatctacccacaaacataacagtgtt

SEQ ID NO: 10232 - DNA, 119 bp, homo sapiens
tgctgactgcagccacctgaagttgactcaggtacccgatgatctacccacaaacataacagtgttgaacttacccataatcaactcagaagattaccagccgccaacttcacaaggta

SEQ ID NO: 10233 - DNA, 119 bp, homo sapiens
cataacagtgttgaaccttacccataatcaactcagaagattaccagccgccaacttcacaaggtatagcagctaactagcttggatgtaggatttaacaccatctcaaaactggagcc

SEQ ID NO: 10234 - DNA, 119 bp, homo sapiens
cttcacaaggtatagccagctaactagcttggatgtaggatttaacaccatctcaaaactggagccagattgtgccagaaacttcccatgttaaaagttttgaacctccagcacaatga

SEQ ID NO: 10235 - DNA, 119 bp, homo sapiens
aaaactggagccagaattgtgccagaaacttcccatgttaaaagttttgaacctccagcacaatgagcttctcaactttctgataaaacctttgccttctgcacgaatttgactgaact

SEQ ID NO: 10236 - DNA, 119 bp, homo sapiens
ccagcacaatgagctatctcaactttctgataaaacctttgccttctgcacgaatttgactgaactccactcatgtccaactcaatccagaaaattaaaaataatccctttgtcaagca

SEQ ID NO: 10237 - DNA, 119 bp, homo sapiens
aatttaatcacattagatctgtctcataatggcttgtcatctacaaaattaggaactcaggttcagctgaaaatctccaagagcttctattatcaaacaataaaattcaagcgctaaaa

SEQ ID NO: 10238 - DNA, 119 bp, homo sapiens
tcatctacaaaattaggaactcaggttcagctggaaaatctccaagagcttctattatcaaacaataaattcaagcgctaaaaagtgaagaactggatatctttgccaattcatcttta

SEQ ID NO: 10239 - DNA, 119 bp, homo sapiens
aatctccaagagcttctattatcaaacaataaaattcaagcgctaaaaagtgaagaactggatatctttccaattcatctttaaaaaaattagagttgtcatcgaatcaaattaaagag

SEQ ID NO: 10240 - DNA, 119 bp, homo sapiens
ttttctccagggtgttttcacgcaattggaagattatttggcctctttctgaacaatgtccagctgggtccagccttacagagaagctatgtttggaattagcaaacacaagcattcgg

SEQ ID NO: 10241 - DNA, 119 bp, homo sapiens
ccagctgggtcccagccttacagagaagctatgtttggaattagcaaacacaagcattcggaatctgtcctgagtaacagccagctgtccaccaccagcaatacaactttcttgggact

SEQ ID NO: 10242 - DNA, 119 bp, homo sapiens
ggaatctgtctctgagtaacagccagctgtccaccaccagcaatacaactttcttgggactaaagtggaaaatctcactatgctcgatctttcctacaacaacttaaatgtggttggta

SEQ ID NO: 10243 - DNA, 119 bp, homo sapiens
ctaaagtggacaaatctcactatgctcgatctttcctacaacaacttaaatgtggttggtaacgattccttgcttggcttccacaactagaatatttcttcctagagtataataatata

SEQ ID NO: 10244 - DNA, 119 bp, homo sapiens
taacgattcctttgcttggcttccacaactagaatatttcttcctagagtataataatatacagcatttttttctcactctttgcacgggcttttcaatgtgaggtacctgaatttgaa

SEQ ID NO: 10245 - DNA, 119 bp, homo sapiens
tacagcatttgttttctcactctttgcacgggcttttcaatgtgaggtacctgaatttgaaacggtctttactaaacaaagtatttcccttgcctcactccccaagattgatgattttt

SEQ ID NO: 10246 - DNA, 119 bp, homo sapiens
aaacggtcttttactaaacaaagtatttcccttgcctcactccccaagattgatgatttttcttttcagggctaaaatgtttggagcaccttaacatggaagataatgatattccaggc

SEQ ID NO: 10247 - DNA, 119 bp, homo sapiens
ttcttttcagtggctaaaatgtttggagcaccttaacatggaagataatgatattccaggcataaaaagaatatgttcacaggattgataaacctgaaatacttaagtctatccaactc

SEQ ID NO: 10248 - DNA, 119 bp, homo sapiens
gcataaaaagcaatatgttcacaggattgataaacctgaaatacttaagtctatccaactcctttacaatttgcgaactttgacaaatgaaacatttgtatcacttgctcattctccct

SEQ ID NO: 10249 - DNA, 119 bp, homo sapiens
tcctttacaagtttgcgaactttgacaaatgaaacatttgtatcacttgctcattctcccttacacatatcaacctaaccaagaataaaatctcaaaaatagagagtgatgctttctct

SEQ ID NO: 10250 - DNA, 119 bp, homo sapiens
cttacacatactcaacctaaccaagaataaaatctcaaaaatagagagtgatgctttctcttggttgggcacctagaagtacttgacctgggccttaatgaaattgggcaagaactcac

SEQ ID NO: 10251 - DNA, 119 bp, homo sapiens
cttggttgggccacctagaagtacttgacctgggccttaatgaaattgggcaagaactcacaggccaggatggagaggtctagaaaatattttcgaaatctatctttcctacaacaagt

SEQ ID NO: 10252 - DNA, 119 bp, homo sapiens
acaggccaggaatggagaggtctagaaaatattttcgaaatctatctttcctacaacaagtacctgcagtgactaggaactcctttgccttggtcccaagccttcaacgactgatgctc

SEQ ID NO: 10253 - DNA, 119 bp, homo sapiens
gtacctgcagctgactaggaactcctttgccttggtcccaagccttcaacgactgatgctccgaagggtgcccttaaaaatgtggatagctctccttcaccattccagcctcttcgtaa

SEQ ID NO: 10254 - DNA, 119 bp, homo sapiens
tccgaagggtggcccttaaaaatgtggatagctctccttcaccattccagcctcttcgtaacttgaccatctggatctaagcaacaacaacatagccaacataaatgatgacatgttgg

SEQ ID NO: 10255 - DNA, 119 bp, homo sapiens
aacttgaccattctggatctaagcaacaacaacatagccaacataaatgatgacatgttggagggtcttagaaactagaaattctcgatttgcagcataacaacttagcacggctctgg

SEQ ID NO: 10256 - DNA, 119 bp, homo sapiens
ggagggtcttgagaaactagaaattctcgatttgcagcataacaacttagcacggctctggaaacacgcaaccctggtggtcccatttatttcctaaagggtctgtctcacctccacat

SEQ ID NO: 10257 - DNA, 119 bp, homo sapiens
ggaaacacgcaaaccctggtggtcccatttatttcctaaagggtctgtctcacctccacatccttaactggagtccaacggctttgacgagatcccagttgaggtcttcaaggatttat

SEQ ID NO: 10258 - DNA, 119 bp, homo sapiens
atccttaacttggagtccaacggctttgacgagatcccagttgaggtcttcaaggatttatttgaactaagatcatcgatttaggattgaataatttaaacacacttccagcatctgtc

SEQ ID NO: 10259 - DNA, 119 bp, homo sapiens
atttgaactaaagatcatcgatttaggattgaataatttaaacacacttccagcatctgtctttaataacaggtgtctctaaagtcattgaaccttcagaagaatctcataacatccgt

SEQ ID NO: 10260 - DNA, 119 bp, homo sapiens
tctttaataatcaggtgtctctaaagtcattgaaccttcagaagaatctcataacatccgttgagaagaggttttcgggccagctttcaggaacctgactgagttagatatgcgcttta

SEQ ID NO: 10261 - DNA, 119 bp, homo sapiens
gttgagaagaaggttttcgggccagctttcaggaacctgactgagttagatatgcgctttaatccctttattgcacgtgtgaaagtattgcctggtttgttaattggattaacgagacc

SEQ ID NO: 10262 - DNA, 119 bp, homo sapiens
taatccctttgattgcacgtgtgaaagtattgcctggtttgttaattggattaacgagacccataccaaatccctgagctgtcaagccactacctttgcaacactccacctcactatca

SEQ ID NO: 10263 - DNA, 119 bp, homo sapiens
cccataccaacatccctgagctgtcaagccactacctttgcaacactccacctcactatcatgggttccagtgagactttttgatacatcatcttgcaaagacagtgccccctttgaac

SEQ ID NO: 10264 - DNA, 119 bp, homo sapiens
catgggttcccagtgagactttttgatacatcatcttgcaaagacagtgccccctttgaactctttttctgatcaataccagtatcctgttgatttttatctttattgtacttctcatc

SEQ ID NO: 10265 - DNA, 119 bp, homo sapiens
actctttttcatgatcaataccagtatcctgttgatttttatctttattgtacttctcatccactttgaggctggaggatatctttttattggaatgtttcagtacatcgagttcttgg

SEQ ID NO: 10266 - DNA, 119 bp, homo sapiens
tccactttgagggctggaggatatctttttattggaatgtttcagtacatcgagttcttggtttcaaagaatagacagacagacagaacagtttgaatatgcagcatatataattcatg

SEQ ID NO: 10267 - DNA, 119 bp, homo sapiens
ggtttcaaagaaatagacagacagacagaacagtttgaatatgcagcatatataattcatgcctataaaataaggattgggtctgggaacatttctcttcaatggaaaaggaagaccaa

SEQ ID NO: 10268 - DNA, 119 bp, homo sapiens
tgcctataaagataaggattgggtctgggaacatttctcttcaatggaaaaggaagaccaatctctcaattttgtctggaagaaagggactttgaggcgggtgtttttgaactagaagc

SEQ ID NO: 10269 - DNA, 119 bp, homo sapiens
aatctctcaaattttgtctggaagaaagggactttgaggcgggtgtttttgaactagaagcaattgttacagcatcaaaagaagcagaaaaattatttttgttataacacaccatctat

SEQ ID NO: 10270 - DNA, 119 bp, homo sapiens
attcaaggtacatcatgcagttcaacaagctattgaacaaaatctggattccattatattggttttcctgaggagattccagattataaactgaaccatgcactctgtttgcgaagagg

SEQ ID NO: 10271 - DNA, 119 bp, homo sapiens
atattggttttccttgaggagattccagattataaactgaaccatgcactctgtttgcgaagaggaatgttaaatctcactgcatcttgaactggccagttcagaaagaacggataggt

SEQ ID NO: 10272 - DNA, 119 bp, homo sapiens
tgcgaagaggaatgtttaaatctcactgcatcttgaactggccagttcagaaagaacggataggtgccttcgtcataaattgcaagtagcacttggatccaaaaactctgtacattaaa

SEQ ID NO: 10273 - DNA, 119 bp, homo sapiens
acggataggtgcctttcgtcataaattgcaagtagcacttggatccaaaaactctgtacattaaatttattaaatattcaattagcaaaggagaaactttctcaatttaaaaagttcta

SEQ ID NO: 10274 - DNA, 119 bp, homo sapiens
gtacattaaatttatttaaatattcaattagcaaaggagaaactttctcaatttaaaaagttctatggcaatttaagttttccataaaggtgttataatttgtttattcatatttgtaa

SEQ ID NO: 10275 - DNA, 119 bp, homo sapiens
aaaagttctatggcaaatttaagttttccataaaggtgttataatttgtttattcatatttgtaaatgatatattctatcacaattacatctcttctaggaaaatgtgtctccttattt

SEQ ID NO: 10276 - DNA, 119 bp, homo sapiens
atatttgtaaatgattatattctatcacaattacatctcttctaggaaaatgtgtctccttatttcaggctatttttgacaattgacttaattttacccaaaataaaacatataagcac

SEQ ID NO: 10277 - DNA, 119 bp, homo sapiens
gggcctccagtgcaatcactacgccctggggcccggaaaccgttttccggtctttcgctttcggctgggcgtggaggccgcggtgctgcgtaggccgggccgggcgcaggaacagcccc

SEQ ID NO: 10278 - DNA, 119 bp, homo sapiens
gctttcggctggggcgtggaggccgcggtgctgcgtaggccgggccgggcgcaggaacagccccgtggcccctctctggccgccgcccgggcgggaaacgtcgttccggggaccgggcg

SEQ ID NO: 10279 - DNA, 119 bp, homo sapiens
acagccccgtggcgccctctctggccgccgcccgggcgggaaacgtcgttccggggaccgggcgacccccagcggggagcgcgccaggtccgcgcggggaagtgggcggtgtgcggccg

SEQ ID NO: 10280 - DNA, 119 bp, homo sapiens
accgggcgaccccgcagcggggagcgcgccaggtccgcgcggggaagtgggcggtgtgcggccggcacccctcgcaccacgcccccgcgggcccgcactttcccggagtgcaccccgcg

SEQ ID NO: 10281 - DNA, 119 bp, homo sapiens
tgcggccggcaccgcctcgcaccacgcccccgcgggcccgcactttcccggagtgcaccccgcggccgcagccggggcgatggcggggctctggctggggctcgtgtggcagaagctgc

SEQ ID NO: 10282 - DNA, 119 bp, homo sapiens
accccgcggccgccagccggggcgatggcggggctctggctggggctcgtgtggcagaagctgctgctgggggcgcggcgagtgccctttccctggccggcgccagtctggtcctgagc

SEQ ID NO: 10283 - DNA, 119 bp, homo sapiens
gaagctgctgctgtggggcgcggcgagtgccctttccctggccggcgccagtctggtcctgagcctgctcagagggtggcgagctacgcgcggaaatggcagcagatgcggcccatccc

SEQ ID NO: 10284 - DNA, 119 bp, homo sapiens
tcctgagcctgctgcagagggtggcgagctacgcgcggaaatggcagcagatgcggcccatccccacggggcccgcgcctacccactggtgggccacgcgctgctgatgaagccggacg

SEQ ID NO: 10285 - DNA, 119 bp, homo sapiens
tactggaaacaaatggcgctccaggagaaagatgttaacacccactttccattttaccattctggaagattcttagatatcatgaatgaacaagcaaatatattggttaagaaacttga

SEQ ID NO: 10286 - DNA, 119 bp, homo sapiens
taacacccactttccattttaccattctggaagatttcttagatatcatgaatgaacaagcaaatatatggttaagaaacttgaaaaacacattaaccaagaagcatttaactgctttt

SEQ ID NO: 10287 - DNA, 119 bp, homo sapiens
ttcttagatatcatgaatgaacaagcaaatatattggttaagaaacttgaaaaacacattaaccaagaacatttaactgctttttttacatcactctttgtgccttagatatcatctgt

SEQ ID NO: 10288 - DNA, 119 bp, homo sapiens
aatgagtgagatgatatttcgaagaataaagatgccctggctttggcttgatctctggtaccttatgttaaagaaggatgggaacacaaaaagagccttcagatcctacatacttttac

SEQ ID NO: 10289 - DNA, 119 bp, homo sapiens
gagatgatatttcgaagaataaagatgccctggctttggcttgatctctggtaccttatgtttaaagaagatgggaacacaaaaagagccttcagatcctacatacttttaccaacagt

SEQ ID NO: 10290 - DNA, 119 bp, homo sapiens
gtcatcgctgaacgggccaatgaaatgaacgccaatgaagactgtagaggtgatggcaggggctctgcccctccaaaaataaacgcagggcctttcttgacttgcttttaagtgtgact

SEQ ID NO: 10291 - DNA, 119 bp, homo sapiens
aatgaagactgtagaggtgatggcaggggctctgccccctccaaaaataaacgcagggcctttcttgactgcttttaagtgtgactgatgacgaagggaacaggctaagtcatgaagat

SEQ ID NO: 10292 - DNA, 119 bp, homo sapiens
gccccctccaaaaataaacgcagggcctttcttgacttgcttttaagtgtgactgatgacgaagggaacggctaagtcatgaagatattcgagaagaagttgacaccttcatgtttgag

SEQ ID NO: 10293 - DNA, 119 bp, homo sapiens
ggaagtctgaccgtcccgctacagtagaagacctgaagaaacttcggtatctggaatgtgttattaagggacccttcgcctttttccttctgttcctttatttgcccgtagtgttagtg

SEQ ID NO: 10294 - DNA, 119 bp, homo sapiens
ccgctacagtagaagacctgaagaaacttcggtatctggaatgtgttattaaggagacccttcgccttttccttctgttcctttatttgcccgtagtgttagtgaagattgtgaagtgg

SEQ ID NO: 10295 - DNA, 119 bp, homo sapiens
caggttacagagttctaaaaggcactgaagccgtcatcattccctatgcattgcacagagatccgagatcttccccaaccccgaggagttccagcctgagcggttcttccccgagaatg

SEQ ID NO: 10296 - DNA, 119 bp, homo sapiens
atccgagatacttccccaaccccgaggagttccagcctgagcggttcttccccgagaatgcacaagggcccatccatatgcctacgtgcccttctctgctggccccaggaactgtatag

SEQ ID NO: 10297 - DNA, 119 bp, homo sapiens
gtcaaaagtttgctgtgatggaagaaaagaccattctttcgtgcatcctgaggcacttttggatagaatcaaccagaaaagagaagagcttggtctagaaggacagttgattcttcgtc

SEQ ID NO: 10298 - DNA, 119 bp, homo sapiens
ttggatagaatccaaccagaaaagagaagagcttggtctagaaggacagttgattcttcgtccaagtaaggcatctggatcaagttgaagaggagaaatgcagatgaacgctaactata

SEQ ID NO: 10299 - DNA, 119 bp, homo sapiens
cgtccaagtaatggcatctggatcaagttgaagaggagaaatgcagatgaacgctaactatattattggttgtgcctttatcatgagaaaggtctttattttaagagatccttgtcatt

SEQ ID NO: 10300 - DNA, 119 bp, homo sapiens
tatattattgggttgtgcctttatcatgagaaaggtctttattttaagagatccttgtcatttacaattacagatcatgagttcaatatgcttgaatcccctagacctaatttttcctt

SEQ ID NO: 10301 - DNA, 119 bp, homo sapiens
catttacaatttacagatcatgagttcaatatgcttgaatcccctagacctaatttttccttgatcccatgatcttgacatcaagtctaacaaagaaaaagttttgagttttgtatttt

SEQ ID NO: 10302 - DNA, 119 bp, homo sapiens
agagttttttatttttatcaccaccatagatgttacagttggctgtggtcacaaaagtagttaattgtgcagcacccaaataaacatctaacaggtttctcaacagaggaatccacagt

SEQ ID NO: 10303 - DNA, 119 bp, homo sapiens
gtagttaattgtgtcagcacccaaataaacatctaacaggtttctcaacagaggaatccacagtccaatccacttcaattgatagacccaaaaaatataatttaatcaaagttctagag

SEQ ID NO: 10304 - DNA, 119 bp, homo sapiens
tataatttgaaagaggtgagtatgtactctgacttcagctctcaggttttaaaaattatattagtgggacagttatgacaagaataatcattatagtacttttcagattttataacctg

SEQ ID NO: 10305 - DNA, 119 bp, homo sapiens
ttttaaaaattatattagtgggaccagttatgacaagaataatcattatagtacttttcagattttatacctggagcagattattttaagttgattagtaggttctgttacagtttttc

SEQ ID NO: 10306 - DNA, 119 bp, homo sapiens
tatagtacttttcagattttataacctggagcagattattttaagttgattagtaggttctgttacagttttcttttgatcgtgcacttatagtcttcatttaattcctcatagaatcc

SEQ ID NO: 10307 - DNA, 119 bp, homo sapiens
tgattagtaggttctgttacagtttttcttttgatcgtgcacttatagtcttcatttaattcctcatagatcccagtcacctttatatatcatattattggaagagattcatcttcata

SEQ ID NO: 10308 - DNA, 119 bp, homo sapiens
agtcttcatttaattcctcatagaatcccagtcacctttatatatcatattattggaagagattcatctcataatctccagttttttcacagtgcctcacagagttaatcatgcctttt

SEQ ID NO: 10309 - DNA, 119 bp, homo sapiens
cgtagagatctatacccttaaatctctccactcacatgctgatatactttctactacaatatgctatagtttatggaactcagggtgatgatcagacgtgtcattagaacatgagtcct

SEQ ID NO: 10310 - DNA, 119 bp, homo sapiens
aatatgctatagctttatggaactcagggtgatgatcagacgtgtcattagaacatgagtcctctgctttgattcaggcatacttttgggattcttccatctttaaaggaaaaaggaag

SEQ ID NO: 10311 - DNA, 119 bp, homo sapiens
agtcctctgcttctgattcaggcatacttttgggattcttccatctttaaaggaaaaaggaagccattctctatatttagtaacccagtaatatctcacttagtttagggttagatctt

SEQ ID NO: 10312 - DNA, 119 bp, homo sapiens
aggaagccattcatctatatttagtaacccagtaatatctcacttagtttagggttagatctttagttattcaaccttatagatcatacttatgaaggtgataactgacacgtgttcac

SEQ ID NO: 10313 - DNA, 119 bp, homo sapiens
gatctttagttaattcaaccttatagatcatacttatgaaggtgataactgacacgtgttcactgaatttaatttgataggcaatacatctacccactccattattttttaaaacttca

SEQ ID NO: 10314 - DNA, 119 bp, homo sapiens
gttcactgaattttaatttgataggcaatacatctacccactccattattttttaaaacttcatttaatgtttaaacaagattggttttgttttcaatttttattcactcttcatagaa

SEQ ID NO: 10315 - DNA, 119 bp, homo sapiens
acttcatttaatagtttaaacaagattggttttgttttcaatttttattcactcttcatagaatcacaatacctttatatatcatatgttattggaagagattcctcagtaatctccaa

SEQ ID NO: 10316 - DNA, 119 bp, homo sapiens
atagaatcacaattacctttatatatcatatgttattggaagagattcctcagtaatctccaatctctctagtgcctcacagggttggtcaatggcttttggaactggaaggaccttag

SEQ ID NO: 10317 - DNA, 119 bp, homo sapiens
ctccaatctctcatagtgcctcacagggttggtcaatggcttttggaactggaaggaccttagaacttactgttatgctcctgatagccaatagcagatagaagcttgcaatcaagagg

SEQ ID NO: 10318 - DNA, 119 bp, homo sapiens
ccttagaacttatctgttatgctcctgatagccaatagcagatagaagcttgcaatcaagagggtaggaatgtgttcttcaatggatatcaaaggaagaggttgcaaaccaaagccatt

SEQ ID NO: 10319 - DNA, 119 bp, homo sapiens
aagagggtaggacatgtgttcttcaatggatatcaaaggaagaggttgcaaaccaaagccatttggcaaccctgtagcctgggccatttaagacaggggcggtctcagccaaattgcac

SEQ ID NO: 10320 - DNA, 119 bp, homo sapiens
gccatttggcaagccctgtagcctgggccatttaagacaggggcggtctcagccaaattgcacccatttactatcccaaagagccacagtgcctacaacccaggccctaagttgatgaa

SEQ ID NO: 10321 - DNA, 119 bp, homo sapiens
ttgcacccatttaactatcccaaagagccacagtgcctacaacccaggccctaagttgatgaagaaaaatcaaggaaggaggtgatacaattggaaatattcccatcaaatggttaatc

SEQ ID NO: 10322 - DNA, 119 bp, homo sapiens
gatgaagaaaaagtcaaggaaggaggtgatacaattggaaatattcccatcaaatggttaatcttatttgaaaatgggcatattagaaaaagtccttccaagatgattttggataataa

SEQ ID NO: 10323 - DNA, 119 bp, homo sapiens
ttaatcttatttagaaaatgggcatattagaaaaagtccttccaagatgattttggataataaaagttgatttgtggaaattggtattatctctgttttatgcacttacatttatccct

SEQ ID NO: 10324 - DNA, 119 bp, homo sapiens
taataaaagttgtatttgtggaaattggtattatctctgttttatgcacttacatttatcccttacatttgtttttagtgaccctacatgacattaaatttaaagtaaaacattgttta

SEQ ID NO: 10325 - DNA, 119 bp, homo sapiens
atcccttacattttgtttttagtgaccctacatgacattaaatttaaagtaaaacattgtttaatgttacttttggcttgagaatgtctttcagctccagaattattgttactcatatt

SEQ ID NO: 10326 - DNA, 119 bp, homo sapiens
tgtttaatgttaccttttggcttgagaatgtctttcagctccagaattattgttactcatattttaatcgtaagtcatttaagctatgacagagtaggaattgagaaattatttcatat

SEQ ID NO: 10327 - DNA, 119 bp, homo sapiens
catattttaatcagtaagtcatttaagctatgacagagtaggaattgagaaattatttcatatgctacatattgaaatgtggatgctgccttgttttataagaagatgatcaaggtttg

SEQ ID NO: 10328 - DNA, 119 bp, homo sapiens
tcatatgctacagtattgaaatgtggatgctgccttgttttataagaagatgatcaaggtttgtgtgccattacctttcctctgcctgaaagacgtgtctcaagaaaaataaattctat

SEQ ID NO: 10329 - DNA, 119 bp, homo sapiens
ggtttgtgtgcccattacctttcctctgcctgaaagacgtgtctcaagaaaaataaattctattttagagcaggtactgcattttattctaagaattgatatcaattcaaaacatagaa

SEQ ID NO: 10330 - DNA, 119 bp, homo sapiens
ttctattttagatgcaggtactgcattttattctaagaattgatatcaattcaaaacatagaaaactgtaaagataaatcaggagatggctgattcataatgggtaataaaataaatag

SEQ ID NO: 10331 - DNA, 119 bp, homo sapiens
ctgaagccagcactactcttctcaactcaccttgccaactttgatcaccttcttcaccgcatctgcgatatgctggagtgatactcaagactgtggatatggacaggaagaaactgtga

SEQ ID NO: 10332 - DNA, 119 bp, homo sapiens
tcccatgacctacttaagatgccgcagcatgttggaagccgacagcagcatggccgtgggattggctatttcctgcccactgcctgggcaaatgggtgccgggcaccctgtggagagag

SEQ ID NO: 10333 - DNA, 119 bp, homo sapiens
aggcctcacctgcatgcagcagttgtctatgatcattgtctcaaatttgattttggggtacagttcagcacttcctcacagcactgcaggaacaacccatccccaagtttcctgtccat

SEQ ID NO: 10334 - DNA, 119 bp, homo sapiens
tcaaccattcaccccacccagaccacctacctcagccgcatatcataggaggctagctcccccttatacccatcggggtatgaatctttcctgtgaaaacaaagtgggaaaaggagtgt

SEQ ID NO: 10335 - DNA, 119 bp, homo sapiens
aaacatttggtcatttgattttaaatggcacatggacaagtggcaagagggcacacataccaatgatggcactttgttctccttcatggaactcagcacctgctccagcttctcctcag

SEQ ID NO: 10336 - DNA, 119 bp, homo sapiens
atgccatattctgcacctcactcaggtggtgctcctggaactccactgggacagcggcagccttcagagcaggttcccaaaacatcacagtcaaggccaagtcctttccaacacactac

SEQ ID NO: 10337 - DNA, 119 bp, homo sapiens
aggccactcaccttgaacacctccttgacggcgtgcatcagctcaggccccacaccgtctcccggaagctggtcacgggaaaggagccctccaccctcacgtcctcggcctcaattggg

SEQ ID NO: 10338 - DNA, 119 bp, homo sapiens
ccagccagattcgtgcatacctggctccgcgatgcagcgtgcgccgcggccgaggtactcagacctctcatgccccagggttcccggcggagaccagcgcctgcaacagggacacacaa

SEQ ID NO: 10339 - DNA, 119 bp, homo sapiens
cttcgcccgcccctgcccgacatgtcccggggcctcactcgggtcagccagcggactccgctcaatgccccatgtttcccgcaggaagtcgcgtgggaagtgacgcctgaagctggcgc

SEQ ID NO: 10340 - DNA, 119 bp, homo sapiens
gcggaaaggaggcggcttagcccaaacatgctgggggaggggctggcggcctcgacggcagctgcggaataggccgagggacaaaggctaaggtcagccgcggttcaagccctttcgtc

SEQ ID NO: 10341 - DNA, 119 bp, homo sapiens
tcccgcgcgcggacactgtccccgcacggtggtccctcgttggtgcgtggcctgacatccggctggaggctcgggtgctccgaaagcggtaccttcgggggcccccccgcacccattgg

SEQ ID NO: 10342 - DNA, 119 bp, homo sapiens
cataccttgtgtctgatatatgcagccaaatgagtttcagtacagccacctcccaacaaagcccatggtccttgagtgttaactgcaggacatgcagtgccgtctgacacgtgagctaa

SEQ ID NO: 10343 - DNA, 119 bp, homo sapiens
ctcacctgcgcaccagccgtcgcgccgccccaggccgccaccgccagaggccccagaaacagatctcaacagccgctgctgccgcggatcccgacaaccttcgcgtcgcgcgagggcac

SEQ ID NO: 10344 - DNA, 119 bp, homo sapiens
cctacctttgagcaggcgatccgtccattcaggcactggcaggtattacagtcatcatcccatttggcccatctggtatcacactccccatggtgatgcaaggtctccctgaaactgac

SEQ ID NO: 10345 - DNA, 119 bp, homo sapiens
taccttcctggcacttggcaccactgtgccctggagggcagacacaccggtagccattgatctcatccaacaggtcgctccaaaggcacaaggtgaagactggcattcattgatgtcta

SEQ ID NO: 10346 - DNA, 119 bp, homo sapiens
acggagacagtccttacttattctgcagtcgggcccagcaaaacccggggcacattcgcaccggtaccattgtctccatccacacaggtgccgctgttgtaactaagaaagcaaagacc

SEQ ID NO: 10347 - DNA, 119 bp, homo sapiens
cacacgatagtggatgagtgctggcttaaaaggatgtcacacttaccagggatgagggctgcagtcattgtatctgcaaagaaaagacaacttaatagtgaggacttcaacagggaaag

SEQ ID NO: 10348 - DNA, 119 bp, homo sapiens
actctgagcacagatgggcccctcccagccttccttgcagacgcacgtaaaggactcgccgttgaccaccatgtgcccccattatggcaggggttgggcaggcagctactgtttcgggc

SEQ ID NO: 10349 - DNA, 119 bp, homo sapiens
tacctatgttacaggttgttccttcccagccgccaggacacatgcacttaaaagcatccccctcatcatgcaggtgccaccgttgttgcacgtggcctcatcacactgactgtcacctg

SEQ ID NO: 10350 - DNA, 119 bp, homo sapiens
tacgtgagtggcaggtctttcctttccacccatttttacagtcacagtagaagtcattgaccaggtcgcacacgtgcccccattgtggcaggggttctggctgcagtcattaatatcta

SEQ ID NO: 10351 - DNA, 119 bp, homo sapiens
cactggtttcacagtaggccccctcccagccgtcactacagatgcacttgtaggagttgacaccatcgagcaagtgccaccgtttctacaagggttgctctcacagtcattaatatcta

SEQ ID NO: 10352 - DNA, 119 bp, homo sapiens
attgtcaaagttttgatttaagcaaagatttacatacccgacaggaggcgtcattctgacactggccaagcagtcattaatatctaaaaaataaataagtcatcattttaaagaggtaa

SEQ ID NO: 10353 - DNA, 119 bp, homo sapiens
cacttatgtcacaattctgacccatccagccgggaagacagtcgcagtagtagctggcaatgagattctacaggatttggcgtttacacaaggtttggcctcacattcatttgcatctg

SEQ ID NO: 10354 - DNA, 119 bp, homo sapiens
tacctaactggcacgttttcccagtccactgtggggggcacacacacttaaatccgttaaccaggtcctgcaggtgcccccgtgggaacagttattaggagaacagtcatcaatgtctg

SEQ ID NO: 10355 - DNA, 119 bp, homo sapiens
tacttgtagagcatgtggggccggtccagcctggggaacactcacactcaaagcccagggaggtctcctacagctgcctctgttgtgacagggatcagagaggcaggcgtgctcagctg

SEQ ID NO: 10356 - DNA, 119 bp, homo sapiens
caatttcacagttgggtcctgaatacccctcagggcaggaacactgatatttgtcagggcctgtgttgcacaagttcccccgttgagacacggctgatgagtcccacagtaattgagat

SEQ ID NO: 10357 - DNA, 119 bp, homo sapiens
agaaatctcacaaaagaccagttgatttacctgcagtcacctgggagtttgcaagacccatgcttaggatgcagccttgtcggcaaatagctgtaaaaaacagagaagggcgtgtcagc

SEQ ID NO: 10358 - DNA, 119 bp, homo sapiens
tgtttagagaaaagtccacagaagcgatacttacgaacggtgtcattactggaatcccacgcctccacagcaacgtataggacctctgcaagacaaacaaacaatttagcaattcagaa

SEQ ID NO: 10359 - DNA, 119 bp, homo sapiens
gtttaatggctatgctgggagcctcttctcaagtggaccctacgagaaagatgatgaggaagcagatgcatctatgcagccctggataaaaggatggatgaaagaagaaaagaaagacg

SEQ ID NO: 10360 - DNA, 119 bp, homo sapiens
tgtgcatgttttatttcctagggagcaaagggagaaagaagaaatagagaaatatcgtatggaacgcccaaaatccaacagcagttctcagacctcaaggtgagccgatgaagcggtga

SEQ ID NO: 10361 - DNA, 119 bp, homo sapiens
gcctgtctcacaggtgtctgactccgtgagtggacagaccgtcgttgaccccaaaggctacctgacggattaaattccatgatcccgacacacggaggagacatcaagtgagtgctttg

SEQ ID NO: 10362 - DNA, 119 bp, homo sapiens
gccctcgagcatgttccaaactcggttcgcttgtggaaagcagccgttgagctggaagaacctgaagatctagaatcatgctgagccgagctgtggagtgctgccccaccagcgtggag

SEQ ID NO: 10363 - DNA, 119 bp, homo sapiens
tgccacttgttctgtggccagtgctgggctgcccattctcatgtctctctctgctctagtgtgtagccccaatgccctggagtgtgcacgagccatctacgcctacgccctgcaggtgt

SEQ ID NO: 10364 - DNA, 119 bp, homo sapiens
tccccagcaagaagagtgtgtggctgcgcgccgcgtacttcgagaagaaccatggcactcggtatgtgggggacccgcctgcccaagggtgctaatgaaacctccagctccatttgtgt

SEQ ID NO: 10365 - DNA, 119 bp, homo sapiens
gccaaccccaacagtgaggagatctggctggcagccgtgaagctggagtccgagaatgatgagtacgaggggcccggaggctgctggccaaggcgcggagcagtgcccccaccgcccgg

SEQ ID NO: 10366 - DNA, 119 bp, homo sapiens
gcctgtctcctcaggttggagtccgtgcggctggagtaccgtgcggggctgaagaacatcgcaaatacatcatggccaaggcgctgcaggagtgccccaactccggtaagggggtgccc

SEQ ID NO: 10367 - DNA, 119 bp, homo sapiens
taggtatcctgtggtctgaggccatcttcctcgaggcaaggccccagaggaggaccaagagcgtggatgcctgaagaagtgtgagcatgacccccatgtgctcctggccgtggccaagt

SEQ ID NO: 10368 - DNA, 119 bp, homo sapiens
tcttctcccttacaattaccagaatctggaggtttgtttatcaacattgtgtgcatggccataatattagtccagtgaagcactccacatatttcagaatctaagaaagcaaaaaaaaa

SEQ ID NO: 10369 - DNA, 119 bp, homo sapiens
tgtaccgaaagcgttgaatatcggcatcaggtacaagatttttgattactagaaacccattttcttcataaattttctctgttccagggttagaacgttattatccagagtatacctaa

SEQ ID NO: 10370 - DNA, 119 bp, homo sapiens
atatttcaaaatcaaaactcaaactacttactggaattgttgaggatggaaactggcagaggaaatagtcctgaagtgggatgagctacctaggatgtgaattaaggcaaataaagtaa

SEQ ID NO: 10371 - DNA, 119 bp, homo sapiens
caaaaaggttatctatattacctggcacttctctgttggagatgttgatgaaggatgctgcacagagaattagaattccttttcttaccaaatctactcctaaaaaaggaaaagcatca

SEQ ID NO: 10372 - DNA, 119 bp, homo sapiens
tgtgtgcactgaccggtggtagatcttttcttcaatggtgcccgcagtcaggagcctgtacacagtcactgcttcttctggcctattctccatgctcgctcccgggcctgcaacagaga

SEQ ID NO: 10373 - DNA, 119 bp, homo sapiens
ctgcgtgtccgtgcttgggttccagtctgggtcatagatgacaactctgtttgcccccgtcaggttgaccctaagccgcccacccgcgtggtcagaagaaacacaaatatggatgtgtc

SEQ ID NO: 10374 - DNA, 119 bp, homo sapiens
gttacctcattgtatctcgtaatcagtggctgtcttgaagctattgtagtggtaccatccatcttgagaaggtatacttttgggctctaaggaatacttcaagtatgtccagcatctgt

SEQ ID NO: 10375 - DNA, 119 bp, homo sapiens
tttttagctgacctgcatctctccattgagaatcctgtaaacttctttggaatcaacgaaattttggtaactttatgctgctcatctgtaagacggcaaaataagacctacggacggga

SEQ ID NO: 10376 - DNA, 119 bp, homo sapiens
acctgttcatttttatctggcaaagaaaggctcatcttgacatctgacttcattctccgcagtaggtatgatttatggtatctcgtaagacacatgcacacttgtaagcagttttgacc

SEQ ID NO: 10377 - DNA, 119 bp, homo sapiens
cctcacctgcatcctcctccagactggcgtgatctagttcaattttcacctctgctcctccaaggatggctggagatgcttttgttttgcagtgatcttttttagctgttgttccttga

SEQ ID NO: 10378 - DNA, 119 bp, homo sapiens
taagtgcccctaaatgatgactttttcaaaaatgcaatactgaatgttattctgaatcaccttattatattctgtcgttttacagaatctagtttcctgttgatgtctctgctggtggc

SEQ ID NO: 10379 - DNA, 119 bp, homo sapiens
agcttgagggctaagctgttcaataattttattgatttgccttagggatgtcgtacatgacctgaaaaaaagataaattgtctattttgcactctgataacatttttatagcataatat

SEQ ID NO: 10380 - DNA, 119 bp, homo sapiens
attacctcttcctcctcatattcttcctcagcttcaccaaccacctcaccatattcctcctgtccagctgtggtaacaatcgacggcgactcccatattgaggcatttcatacctgtaa

SEQ ID NO: 10381 - DNA, 119 bp, homo sapiens
aattttaaaaatctgaagatgtacccatgctcataactgtaataatcttgtccatattcctggccaggacaattccagactccatggataattcctattgttcaaaaagaaaaattgca

SEQ ID NO: 10382 - DNA, 119 bp, homo sapiens
gaagataatgaaatgtaaggaaacaagttgtgacacagctttcatgagaaagatgtttttatggctctcttactattaaatacttaaaaacatcaaaggccaaacaacactaacctact

SEQ ID NO: 10383 - DNA, 119 bp, homo sapiens
gggtttctcttttcctattacatgaaaaggatgtgtaaaatgttaattatacttacactttaaacctgttgggaaagcaagagtaagaaaaatagaaagctacattagaactattgcat

SEQ ID NO: 10384 - DNA, 119 bp, homo sapiens
agacaaaatcaattactctgtaagatcttctatctttttttccactagagtaggaggcacattggaaacatgacttgcatatccagctgattgaccacggagacctgaaagaagaaaaa

SEQ ID NO: 10385 - DNA, 119 bp, homo sapiens
ctcaccttcttcatttcctgaaacaatggagtacacaatactttgattaatggcagcagcagaaattacccaaccatggtccctttggtggcaagttcacttactggaggaggtctgca

SEQ ID NO: 10386 - DNA, 119 bp, homo sapiens
atacctatattcctcctgtgtgaagcgtgggatctcaccaggatgtaagacaagaatcttcactgtggcctgctggacatcacaggctccccatcatcaaaagcaaccaccaccaactt

SEQ ID NO: 10387 - DNA, 119 bp, homo sapiens
acaggagggtctgcatcttcagcataaactgttgtgataggtgtacccttgactgcatccggagccacctccctttgtatattcgtttactaaagacaggaggataatcattcatatcc

SEQ ID NO: 10388 - DNA, 119 bp, homo sapiens
ggagcatactcaccccatctggcctgccatctgaagctgtgatgatcagaatgtagcgatcagtgctttcctgtccagtgctttccctaaggttagaatccccgtgctagtgacaaaac

SEQ ID NO: 10389 - DNA, 119 bp, homo sapiens
ggaaatcatttttaacttacgtttctgaaagattaaaaactctctgaggatctccattctcaatggcattgttattgagtctccctctcgatcagttgccttcagagagaaaacataat

SEQ ID NO: 10390 - DNA, 119 bp, homo sapiens
ccacagcaattaacaaaagaacaatcacaagcttaacacctagtacctacaggaactccactgggtggacctatacgcaaattaaacatgaaataaatattgtaaatgtaaatgatcac

SEQ ID NO: 10391 - DNA, 119 bp, homo sapiens
ttaccttaataaccaaatcaaatttctggtgaaagtctctgtttactggctccaggagactaagttctgtgtcctaggatgcatatggaaaaatcgtgggtaatcctcaggagtccctg

SEQ ID NO: 10392 - DNA, 119 bp, homo sapiens
acaaaccaacaaggatggaatagaggattcctggcctatctgatggcggttgaatattccggtcctgataatggcttggattggtggcgtaacaataatggggttcagttcttcctgaa

SEQ ID NO: 10393 - DNA, 119 bp, homo sapiens
ctcacattagcttggattatgacaaagtagcgagtcttatcttcatagttgagcctcttccttaacacttatttccagtcaacattaggggaatttcaaaggtgtcattggatgtctgc

SEQ ID NO: 10394 - DNA, 119 bp, homo sapiens
cggatcatctggattatactgaataacatactctatctgtccatttggtccatcatctatatctgtagcccattgtctcctgaaaatcctgtgaatattgtggtaccaactggagtgag

SEQ ID NO: 10395 - DNA, 119 bp, homo sapiens
catttgtaaaataaaaaactcacttaccattccgactttcttcatcaatagcaactatggtagctggtgtcctcccctagctagtttgcaatctaaagagagaaaataaccaaaagtaa

SEQ ID NO: 10396 - DNA, 119 bp, homo sapiens
cagacaagcaatgctcatgaggttgtttggggtttttatttttgtcatcttaccctcatattgccagtcggagtcaaaagtatagagtcatcaatggaagcagatcagaaaaatggaag

SEQ ID NO: 10397 - DNA, 119 bp, homo sapiens
ccatcatcatactggcccaagcagatttcaaagagagagcccaggatgatccctgaagctaaacatgtcagagataaaactgtcgaaacatcttctgtcaaagttcactcaaagctgat

SEQ ID NO: 10398 - DNA, 119 bp, homo sapiens
tcttctctttctttgtgtccccaggagccatggggcgccatgttgccaccagctgccacgtggcctggctttggtgctgatctctggatgctggggtaagtccagtcctccccgtgtct

SEQ ID NO: 10399 - DNA, 119 bp, homo sapiens
ctcttgtcctctgacttccaggccaggtgaaccggctgcccttcttcaccaaccacttctttgatacatcctgctgatcagcgaggacacgcctgtgggtgagtgggggcatgggctgg

SEQ ID NO: 10400 - DNA, 119 bp, homo sapiens
ctaactgcccccctccctctctcacttttctttcagaccaagtcagagttcaccgtggagttctctgtcgcgaccaccagggggtgagtgttccctggggccctggaggcatgttcctg

SEQ ID NO: 10401 - DNA, 119 bp, homo sapiens
ctttctcttgccaggtgatcacacggaaggtgaacatccaggttggggatgtgaatgacaacgcgcccaatttcacaatcagccctacagcgtccgcatccctgaggtaggagccactg

SEQ ID NO: 10402 - DNA, 119 bp, homo sapiens
tccctcctctcttctgcccagggcacgacggtgcgcatcatcaccgccatagaccaggataaaggacgtcccggggcattggctacaccatcgtttcaggtaagacagaaggctgcccc

SEQ ID NO: 10403 - DNA, 119 bp, homo sapiens
gcagggaataccaacagcatctttgccctggactacatcagcggagtgctgaccttgaatggcctgctgaccgggagaaccccctgtacagccatggcttcatcctgactgtgaaggtg

SEQ ID NO: 10404 - DNA, 119 bp, homo sapiens
taatgacttcttgttctcgctgttgcaggcaactgacaatgatgcaggcacctttggggaagtcagctattcttcagtgatgaccctgacaggtgagactctgcccacagcccctcagg

SEQ ID NO: 10405 - DNA, 119 bp, homo sapiens
ctttcaggcaacagatgaagactcccctcccaacaaccagatcacctacagcattgtcagtgcatctgctttggcagctacttcgacatcagcctgtacgagggctatggaggtaggtg

SEQ ID NO: 10406 - DNA, 119 bp, homo sapiens
gcaacctgtctgtgttccttccaggatgagaatgacaaccctcccaccttcagcaagcccgcctacttctctccgtggtggagaacatcatggcaggtacaggctcaggtcggggggtg

SEQ ID NO: 10407 - DNA, 119 bp, homo sapiens
aggagccacggtgctgttcctgaatgccacagacctggaccgctcccgggagtacggccaggagtccatatctactccttggaaggctccacccagtttcggatcaatgcccgctcagg

SEQ ID NO: 10408 - DNA, 119 bp, homo sapiens
gcaggggaaatcaccaccacgtctctgcttgaccgagagaccaagtctgaatacatcctcatcgttcgccagtggacgggggtgtgggccacaaccagaaaactggcatcgccaccgtg

SEQ ID NO: 10409 - DNA, 119 bp, homo sapiens
tcacaggtaaacatcaccctcctggacatcaatgacaaccaccccacgtggaaggacgcaccctactactcaacctggtggagatgacccctccagactctgatgtgaccacggtaggt

SEQ ID NO: 10410 - DNA, 119 bp, homo sapiens
caggtggcaacgtggatgggaagttcagcgtgggttaccgcgatgccgttgtgagaaccgtggtgggccggaccgggagaccacagccgcctacatgctcatcctggaggccatcggta

SEQ ID NO: 10411 - DNA, 119 bp, homo sapiens
agaagtaactcgtgtctcattcttcctcagctgaaagccacggacgcagatgagggcgagtttgggcgttgtggtaccgcatcctccatggtaagtggggctgccctaggatggggggc

SEQ ID NO: 10412 - DNA, 119 bp, homo sapiens
tccctgcagggtgtgatcacagtccagggcctggtggaccgtgagaagggcgacttctataccttgacatggtggcagatgacggcggccccaaggtggactccaccgtggtgagtggg

SEQ ID NO: 10413 - DNA, 119 bp, homo sapiens
ggtgtcatcactgctgccaaagagctggactacgagatcagccacggccgctacaccctgatcgtcactccacagaccagtgccccatcttatcccaccgcctcacctctaccaccacg

SEQ ID NO: 10414 - DNA, 119 bp, homo sapiens
tcccagacagggatcgtcactgtgaaccggcccctggaccgcgagcggatcccagagtacaagctgacctttctgtgaaggacaacccggagaatccacgcatagccaggagggtgaga

SEQ ID NO: 10415 - DNA, 119 bp, homo sapiens
cccttgcaggattatgacttgcttctgatcttcctttctgatgagaatgacaaccaccccctcttcactaaagcacctaccaggcagaggtgatggaaaactctcccgctggtaggtgc

SEQ ID NO: 10416 - DNA, 119 bp, homo sapiens
aggatctgtaatggtgaagtcccccatgaatcgggagctggttgccacctatgaggtcactctctcagtattgacaatgccagcgacctaccagagcgctctgtcagtgtgccaaatgg

SEQ ID NO: 10417 - DNA, 119 bp, homo sapiens
ggtgacatctatgtgctgtcttctctggaccgggagaagaaggaccactatatcctgactgccttggccaagacaaccctggggatgtagccagcaaccgtcgcgaaaattcagtgcag

SEQ ID NO: 10418 - DNA, 119 bp, homo sapiens
tagctcatcttggtggccagcgacctgggccagccagtgccatacgagactatgcagccgctgcaggtgccctggaggacatcgatgacaacgaaccccttttcgtgaggcctccagtg

SEQ ID NO: 10419 - DNA, 119 bp, homo sapiens
ttctcatctagttccatgtggacaagaagggccgggtgaactttgcgcagacagaactgcttatccacgggtgaaccgcgataccaaccgcatcctggacgtggaccggtgagtcgggg

SEQ ID NO: 10420 - DNA, 119 bp, homo sapiens
gactgtcggtggtgggggaatggctgaggaggagagctgagacccctgcccctcgcccagggtgatccaatgatcgatgagaacaaggagcagctacggaatcttttccggaactacaa

SEQ ID NO: 10421 - DNA, 119 bp, homo sapiens
cgtcctggacgtgcagcctgccatctctgtccggctgccggatgacatgtctgccctgcaggtacccgggaccgtgccccacagccctagccgccctccccactgcccgggcttaccct

SEQ ID NO: 10422 - DNA, 119 bp, homo sapiens
ccctggtcctgctcccgcagatggcgatcatcgtcctggctatcctcctgttcctggccgccatgctcttgtcctcatgaactggtactacaggactgtgtgagtgtcccccacccctg

SEQ ID NO: 10423 - DNA, 119 bp, homo sapiens
gcttggcccccctcaccagcccctctctgcttctctccagacacaagaggaagctcaaggccattgtggtggctcagctggtaagtgagggccatagtggggacacaggtgagaaggca

SEQ ID NO: 10424 - DNA, 119 bp, homo sapiens
ccctccatgccccaacccttctccctgcagggaatcgtggcttcatcgacatcatggacatgcctaacacaacaagtactcctttgatgggtgagtggggtactggccctgcccggtcc

SEQ ID NO: 10425 - DNA, 119 bp, homo sapiens
tcccccagggctcgctgctgaaggtggtcctggaggattacctgcggctcaaaaagctctttgcacagcgatggtgcaaaaagcctcctcctgccactcctccatctctgaggtagccg

SEQ ID NO: 10426 - DNA, 119 bp, homo sapiens
ttctttttccagctcaggccaacttcgccccgcacttcttcgacaacggggtcggcagcaccaacggaacatggctctgttcagcctcccagaggacacccctgtaggtgagtagccct

SEQ ID NO: 10427 - DNA, 119 bp, homo sapiens
ctcctggacactcactcagtccctgtgcttcacagagggaagatgagattgaagccatcatcagcattttgatggcctgaatctggtgagtgcacgtccaaggcagtccctggcagcct

SEQ ID NO: 10428 - DNA, 119 bp, homo sapiens
tctgccccttctcaggtggccgaaaaagtcgtgatcctggtgaccgatgccaatgatgaggcgcccaggtcatccaggagccttatgttgccctggttcccgaggtaagtgaggagctg

SEQ ID NO: 10429 - DNA, 119 bp, homo sapiens
ggctgtgaccccctcaggacatacctgctgggagcatcatctttaaggtccatgcagtggacagggacaaggctctggagggagtgtcacctacttcctgcaggtaaggcaggacacac

SEQ ID NO: 10430 - DNA, 119 bp, homo sapiens
tagaacctgcactccccatttgccgtggaccgccacagcggtgtgctgcgcctccaggctggggccacttggactacgagaggtcccggacccactacatcaccgtggtcgccaaggta

SEQ ID NO: 10431 - DNA, 119 bp, homo sapiens
ggctgttcctgtttccccgagggctcggaggtactgaaggtggtcgccatggatggagaccggggcaaaccaatcgaattctctacagccttgtaaatggtgagtctgagcagctttgg

SEQ ID NO: 10432 - DNA, 119 bp, homo sapiens
cccttgacagggaacgatggagcctttgaaattaatgagacatctggagccatctccatcactcagagccggcccagctccagagagaggtgtatgagctgcatgtacaggtaccctcc

SEQ ID NO: 10433 - DNA, 119 bp, homo sapiens
gccacccagggctctttctcttccaggctgtggatccagatacaggaccctggggcgaagtgaaatattcacctatgggactggggcagacctgtaagtagatccagaatccaggacag

SEQ ID NO: 10434 - DNA, 119 bp, homo sapiens
ccagagacagctgggccactggcagtgagggagagtgaggatggcagagaccagtgccctgcccactggttcggggagctcgaggtgctggctgtggggatggtgctactggtggaagg

SEQ ID NO: 10435 - DNA, 119 bp, homo sapiens
aggtgtgggaggtggaaaggatcggaggagaggtcactggtgcccagtgtctcccacaggcgctggcccacggctcggacggctgccaggctcacggcttccagggctttgtgacagcg

SEQ ID NO: 10436 - DNA, 119 bp, homo sapiens
ttggccagcatctgcagcagtgcagccatcgcatgggggcgttatcaccactactgcacccgtatgtattgggctcctggagtggagggacaccgatgcagtgtggagaggataagagg

SEQ ID NO: 10437 - DNA, 119 bp, homo sapiens
gaaacttcaccagcttcctcttcaccatgtccttcttcaacttcgccatgcccctcttcatcacgatcattcctacagtctcatggagcagaaactggggaagagtggccatctccagg

SEQ ID NO: 10438 - DNA, 119 bp, homo sapiens
caggtaaacaccactctgccagcaaggacgctgctgctcggctggggcccctatgccatcctgtatctaacgcagtcatcgcagacgtgacttccatctcccccaaactgcagatggta

SEQ ID NO: 10439 - DNA, 119 bp, homo sapiens
tactcacttcctttctggagaaaggaggctacgccccagtacttcatcttgaacttggcagggtcctcgtgtctgtgaaggtgcccaccatgtctgcgcacacgtcccagttactgcaa

SEQ ID NO: 10440 - DNA, 119 bp, homo sapiens
ggccccgaggccccggccgcgactcaccaccgggaggggaaccgcgcgcaagcctggccgccgagtccggcgcgcgtggagcgagggaggcgagcgcgccgcggccgccccgctgcttt

SEQ ID NO: 10441 - DNA, 119 bp, homo sapiens
cttcacccacctgcagggccccactgaggaaagcggcccccccagggaagatcttctctatcttcaccagggctgcaccttggactcaatgcccccagaaatgctgatacctagtgaca

SEQ ID NO: 10442 - DNA, 119 bp, homo sapiens
ctgggctctgggactctgactgaccaggcacgggggtgataaggtgacgcttgggtggcgtgtcctgccggctggtctcaaagcaggaggccggactggttggagagatgaacaggtca

SEQ ID NO: 10443 - DNA, 119 bp, homo sapiens
cccccactgctgacctgccctgctcttgagggcctcaaaagcctccagctccacaagcatcaccatgcttcgaagcggcccaggtctgtgggggccaccacactcctgggagagggcga

SEQ ID NO: 10444 - DNA, 119 bp, homo sapiens
caacctcctcccacctgatgtcctgcagcagtagcagcttctccggcctgtcgaggatggccagcagggcctcaccaggtcctctatgcctccctcgtgcacatactgcagatagaggc

SEQ ID NO: 10445 - DNA, 119 bp, homo sapiens
taaactaggccttggtaaagggatgcatgaattaccacgtctcagtctccaggtgacaaacttctgtacgggcccacgccccctgctatgaagaagaaagaggctcagctgcaggcctt

SEQ ID NO: 10446 - DNA, 119 bp, homo sapiens
ctccaaccttgggagatctgagccacttacgtcggtccagccagcagtactcagaaaccatctccttgtggcaggataccggccggtctcctggggaggggatggtgggcataggaggg

SEQ ID NO: 10447 - DNA, 119 bp, homo sapiens
gtgcctggtcggcctcacctggtcgctggtgtggcgccgccagccttgtcaaaccacccgcaggcgagactactgccgcagccggcaaaccccacccacgctgcgcggaggctgcggga

SEQ ID NO: 10448 - DNA, 119 bp, homo sapiens
ttgttctcagggcaggaagatcccaacagtttgcgccataaatataactttatcgcggacgtggtggagagatcgcccctgccgtggttcatatcgaattgtttcgcaagtaaagagag

SEQ ID NO: 10449 - DNA, 119 bp, homo sapiens
gttatgacacgatttgtaaccttttcatttctgtttaattgcagtatggaaactcgggaggcccgttagaaacctggtaaggtcttttaaacctatgttaggtcatttgtttttatcta

SEQ ID NO: 10450 - DNA, 119 bp, homo sapiens
caggacggtgaagtgattggaattaacactttgaaagtgacagctggaatctcctttgcaatcccatctataagattaaaaagttcctcacggagtcccatgaccgacaggccaaaggt

SEQ ID NO: 10451 - DNA, 119 bp, homo sapiens
accttctgctgtccctttgttgtctcaccaggaaaagccatcaccaagaagaagtatattggtatccgatgatgtcactcacgtccaggtgggtaaacaggatgcgtgtctgtgtctta

SEQ ID NO: 10452 - DNA, 119 bp, homo sapiens
tctctggagcagcaaagccaaagagctgaaggaccggcaccgggacttcccagacgtgatctcaggagctatataattgaagtaattcctgataccccagcagaagcgtgagttggagt

SEQ ID NO: 10453 - DNA, 119 bp, homo sapiens
tacctcaagggctgcgatggccactcggcagcctagtggattgccaccgtatgtggacccatgctccccggcttaatggtcagcatgatgtcatcatcacacagcactgcagacacctg

SEQ ID NO: 10454 - DNA, 119 bp, homo sapiens
aatttcacatacctgcaaaaacaatctttgctttgtatttctgaatgcccttcacggtatagccccactacgagctagtttacaggcagtctctccagcctccactcctatcaggagag

SEQ ID NO: 10455 - DNA, 119 bp, homo sapiens
gacggtacctgacagcgcctgaggacaaccgggtacacgcggcgtctatgaagcgcaacagtgacgccgagagtcactgcaacttaaaggctgattctgccccgcccccaagacaccct

SEQ ID NO: 10456 - DNA, 119 bp, homo sapiens
cctcatggtaaattcttctttctttcaggtaggaatgaattgatagccagatacatcaaactcaggacagcaagacgaggaccagaaaacaggtaaaataacccacctggaaattgtgc

SEQ ID NO: 10457 - DNA, 119 bp, homo sapiens
ttgttttcctcccttcccctaccctgcaggtgtctagtcacattcaggttcttgccagaaggaaatctctgattttcattccaagctaaaggtatgcgcttttctgctttttggcttgt

SEQ ID NO: 10458 - DNA, 119 bp, homo sapiens
actcgtaattctgaggcctttgcattttgccttccagttctggccgggaatgattcaaacagggcagccggatcctcacaagagtaagtctgaggaggggtgggcactgacaactacgg

SEQ ID NO: 10459 - DNA, 119 bp, homo sapiens
aactctgtctgccatctctctgttcccagcgtcaagccttttgtgcagcaggcctaccccatccagccacggtcacagcccccattccaggtgagtgtccctgaaactcctttttggga

SEQ ID NO: 10460 - DNA, 119 bp, homo sapiens
attcaccgtgggctccagctgcaggaggaacccgtgtctgtgcacggcagcacggtcttcaaggagcttcggaccggttgggggctttcagctacggaggagggaagagaagctctata

SEQ ID NO: 10461 - DNA, 119 bp, homo sapiens
aggtctcaggctaggtgcttgcacacacttacagctcatcgtcatactcctttggggggcagacggcaacacaaggtcgatccagtcctgtggggagaagccgtgtgactctggggcac

SEQ ID NO: 10462 - DNA, 119 bp, homo sapiens
cttaccccgccctgattccaggccttctgcagggcagcctcagcctcagccagggtgtagtctgtcacatcttgccgttgattgccatgatctcgtcccctttcacaatgccacctgca

SEQ ID NO: 10463 - DNA, 119 bp, homo sapiens
ctccactcaccatgccgctcagcagctccccgctcatacacagcagaaacgaccaccttcccaatggggagtccacaccgccttccagggccaggtctaaggatccctcctggttagag

SEQ ID NO: 10464 - DNA, 119 bp, homo sapiens
tggcggcccaccggcctccacatgcccaggtaccttcttgatgcgtaggagccggacatccttccccatatctgctctggggtgaactagagagaaaaagacagtgggaagctttgagc

SEQ ID NO: 10465 - DNA, 119 bp, homo sapiens
ctggggttacttgtccaggagagaagcgtcatctcttaccatagagtaggggtcaaagccttcctcatattccggaaatcctggaagcaaagggagggctttagggcaacacagcagag

SEQ ID NO: 10466 - DNA, 119 bp, homo sapiens
ggagacctccagacacacaatgggtatcagtttacttgtctgaatgctgtctgataaaccaccatcctctcaacatctcctgtggctgccagaggaaaaaaaaaaaagttccacattgg

SEQ ID NO: 10467 - DNA, 119 bp, homo sapiens
cagaacttcagatttcacagctggcctgtagatgaaattgggctcctggtggaccatgacaggtttggaatggtggacacgccagggcctcgtggaggctgtgggcttgggcaaaatgt

SEQ ID NO: 10468 - DNA, 119 bp, homo sapiens
acctctgaaatctcattatcagcagaggaaatctgctcgaggcgcgtttgacagagcctctccacccaaattgaatcttttccgattcttcaaggtcttcccgctctgtctcagacacc

SEQ ID NO: 10469 - DNA, 119 bp, homo sapiens
gcagcacaccagcacagcacccaaccctgtcctaccttccggatggttgggaatttgccatcgtaacgaaaaaccatccaaaagctataagacacagataacaaaatgatgagacacag

SEQ ID NO: 10470 - DNA, 119 bp, homo sapiens
gggagcaaagcggggacgcgaacctgctctccctgctcctccgtgcctccatccaggtcatctgcgggccgagctcaggttccactccctgatcatctacccagggaaaagaggaggaa

SEQ ID NO: 10471 - DNA, 119 bp, homo sapiens
agacacgcgtggagccgaggtactcactgttccatctccttccggtatctctcattttcctctgctgcctctgggcaatttcttttctccttctgaaacacaaatgcagattggcatgt

SEQ ID NO: 10472 - DNA, 119 bp, homo sapiens
aaggggctcccaccagctcattctggacttacagctgcagctacaatggagatggtcaggctgcggctatcttcagcacatttacagcctgtggggacagaaggacagtgggccgaggc

SEQ ID NO: 10473 - DNA, 119 bp, homo sapiens
ggccaacaggtgaagacccccacatctcacctccttgtgatccaggttagagaagtcgacgccattgactcgacaatctggtcccctatctggtggggaaatggagaaagattagtgtg

SEQ ID NO: 10474 - DNA, 119 bp, homo sapiens
cggcccagcgtcactcacctccaatcccacctcagcagacagggagccaggtttcacatggctgataaaatgccaggcttctggatggggccgctggaaatgctgcgggaggtgggaaa

SEQ ID NO: 10475 - DNA, 119 bp, homo sapiens
gcctgccacccacctgcagccaaggcctcgggagcctaccaggctgatgaagaccttcttctccttgtttcccgatttccaggggagcccaggctgcctcgcacgccctgaaagagaga

SEQ ID NO: 10476 - DNA, 119 bp, homo sapiens
caaaccccatcacaggaggtctggcccttaccccagattccgacacaaactgatccacatactgccaaggaggggctcatcaggagagctgatgggaagggaaaatagatgggagggtg

SEQ ID NO: 10477 - DNA, 119 bp, homo sapiens
tcctgggcccacagggaagagttggcctgcagaggaggggcctctcaccttttcacggggatcaggccgtgtctgcgggagaaaggcacaggggttaggacagctcccccgccctccct

SEQ ID NO: 10478 - DNA, 119 bp, homo sapiens
actcacgtctcactttgatggacacagttttcttggttcgaatgaggttgatgacctcctcatgggtacggaggagatggaatatccattgatccggacgatctcgtcccctaccttga

SEQ ID NO: 10479 - DNA, 119 bp, homo sapiens
acaagagctggacccagcacacttactggtggtacattcgcagcacatcatagagatagtccttctctgatcattttcaatcagaaaatccacctggaaaatccaatagcagaatcaca

SEQ ID NO: 10480 - DNA, 119 bp, homo sapiens
cagtcatcgcgtccccatccctgcttacttgtgaccaggccaacgccagggacgtggtcggccagcaacggagcaggaagaggatcctggccctgggggaggcaataaatggggagcaa

SEQ ID NO: 10481 - DNA, 119 bp, homo sapiens
tcggagaagcggtcatagaaaggagagcgcagcaggtagtagagcagcaggatggtccggcgccgcagccccgccgctccctccgggtcaggccctttctgtcactcaggaggctcagg

SEQ ID NO: 10482 - DNA, 119 bp, homo sapiens
agccccaggcaggcccaggctcacctggtcacgtccacaacaccagccaagagccagggtttccacgactctgaccccacaggcccaggctgagcactgacggccaaggcgtcaaggat

SEQ ID NO: 10483 - DNA, 119 bp, homo sapiens
cagccacatcctccacttactgttctggagggttcgcaccacccggtttgaccgcttccccacgtaggatgctcatggttgccagggctgtggtcaccatctagcagggatagacagaa

SEQ ID NO: 10484 - DNA, 119 bp, homo sapiens
agtagctcacccgggggctgtgcctgggtctctctgtccagtggaacgatagggggtgaagtctggaggcagccttgaaccagagcagcaggagcatccgcagtacagccctgggtcgg

SEQ ID NO: 10485 - DNA, 119 bp, homo sapiens
ctgttcttggcagaattctcaccacaggcaactttttccgaagctccttccgtaggatcccgtcattgacagcacaagcaggttagaggcagagtacactgaggggtagagagtggcct

SEQ ID NO: 10486 - DNA, 119 bp, homo sapiens
ggcagccgatcccccatcccccacccccagagcccggctcacccagctctgacagctcgtgcgaatcgggaatcgacctggggagagggtacagaaggaggtgtgagtgagcatctgcc

SEQ ID NO: 10487 - DNA, 119 bp, homo sapiens
cccccacccccaggctggccctcacggaagaacaacagctgatgtttgagaaactgactctgtattgcgcagctacatccagctcatccccatttccttcgtgctgggtgagttccccc

SEQ ID NO: 10488 - DNA, 119 bp, homo sapiens
tccccctcttctgccccccaggagatgaacaccttgcgtactcagtgtggacacctgtatgcctacgacggattagtatcccactggtgtatacacaggtgaggactaggctggtgagg

SEQ ID NO: 10489 - DNA, 119 bp, homo sapiens
gagcctcacctgtccccaaggtggcagagcagctcatcaacccctttggagaggatgatgatgattttggaccaactggattgtcgacaggaatttgcaggtatggggagagggagaga

SEQ ID NO: 10490 - DNA, 119 bp, homo sapiens
ttacgcgagggcggggccggttgccaggacgacgcctgcgaagatggccgctgcgtcctcatcggattcgacgcctgcggagctgagaggtgaaggcagggctcctcaaggcctctttt

SEQ ID NO: 10491 - DNA, 119 bp, homo sapiens
actgtctttcccccacttccagcaatgaggccaattcgaagtggttggatgcgcactacgacccaatggcaatatccacaccttttctgcctgcctaggtgagtctctggaaccaggaa

SEQ ID NO: 10492 - DNA, 119 bp, homo sapiens
tctgggattctgagactctggttttggcccttttgttttccagcgctggcagatttacatggggatgggaatacaaggtaagcatatcaccctagccaggagagttgagggtagggggg

SEQ ID NO: 10493 - DNA, 119 bp, homo sapiens
gcttgagctcacaggctctcttcccacattgtcacaggaccgaatcgaccccttaaccctgaaggagatctggagagcatccggtgagaggctgccttccccttcatacccccctcact

SEQ ID NO: 10494 - DNA, 119 bp, homo sapiens
attcttccattcggctgccatgctggcccctttccttgcagggagacggcagaggagcctttgtccatcagtcactcaggtaaggaccctgtggagggccagggtttgggaggctccag

SEQ ID NO: 10495 - DNA, 119 bp, homo sapiens
gatgccagttctctgtgtgtctaggtttctgcagctggagctaagtgaaatggaggcatttgtaaaccacacaagtccaactccatcaagcggcaggtaatacccccttctctttttat

SEQ ID NO: 10496 - DNA, 119 bp, homo sapiens
tttgcagatgagccttcccagcgtccccgtcttcctagaggtttctggccagtttgatgttgagttccgcttgccgcggcctgccgcaatggaaacatctatattctgagaaggtagcc

SEQ ID NO: 10497 - DNA, 119 bp, homo sapiens
tcagccatagaagtggagaggatttctctggggccagacagtgtgttgtttattccacagagactccaacaccccaagtactgcatcgagctgagcgcccagcctgtgggacttatccg

SEQ ID NO: 10498 - DNA, 119 bp, homo sapiens
ggtacacaaggtcctagtggtgggcagcacccaagacagcctgcatggcttcacccacaaggtgcagccccagcaagcagcagcccctccacgcctatgtccctagcccccacttggca

SEQ ID NO: 10499 - DNA, 119 bp, homo sapiens
actaaactctgacgtctccacataggatgcagtgaccagcctttgctttggccggtacgggcgggaggaaacaccctcatcatgaccactcgaggtgagtggagtcagacctggcaagg

SEQ ID NO: 10500 - DNA, 119 bp, homo sapiens
tttgtccccaaacttaggtacccttgctggtgccagggctcaactaccccctggagacctttgtggagatctcagtaacaagggcatctcagacatcatcaaggtaggccccgcacttg

SEQ ID NO: 10501 - DNA, 119 bp, homo sapiens
gagccgtggctggccctggggacatcctggactctccccctgcaggaccgcgaactgggccccgaggagtagacggtgagtggctcttgctgctggcagggggtgggagctgtccctga

SEQ ID NO: 10502 - DNA, 119 bp, homo sapiens
tgcagtgggcggccgtgtggactttgaggagtttgtagaactgataggcccaaagctgagggaggagacgcgcacatgctgggggtgcgagagctgcgcatcgccttccgagaggtgcg

SEQ ID NO: 10503 - DNA, 119 bp, homo sapiens
tgcagccatctgcctgcccaaccagttccggtgtgcgagcggccagtgtgtcctcatcaaacagcagtggactccttccccgactgtatcgacggctccgacgagctcatgtgtggtga

SEQ ID NO: 10504 - DNA, 119 bp, homo sapiens
gctctcctcagatcctgaacccgccgccctccccggccacggacccctccctgtacaacatggacatgtctactcttcaaacattccggccactgcgagaccgtacaggtaggacatcc

SEQ ID NO: 10505 - DNA, 119 bp, homo sapiens
aagcatgacatggtctctctccctgcagaactgtgcctggcccagtgggcagcaggagctcctgacttggaccatggtgattcttcagcaggtcagtgttcccacctctttgggtggcc

SEQ ID NO: 10506 - DNA, 119 bp, homo sapiens
tagggggaccatgtgtggatggacctgagattggggcaggagttcgacgtgcccatcggggcggtggtgagctctgcgactctgggcaggtccaggtggtggatgatgaagacaatgtg

SEQ ID NO: 10507 - DNA, 119 bp, homo sapiens
ccagttggtggggagtccctgtgggttgtgacaggtcctgccactccctccctctgcagtggggaatctgggccgggaagacggagagcacaaagctgatcctgcagttcctggcagcc

SEQ ID NO: 10508 - DNA, 119 bp, homo sapiens
atcagtgggcagcactcgtggattgagcagcaggtcttggaggccacccccattctggaaggtaggaccgagttccgagggtgggaccaggcagtggggcgggagcgggctttgccagt

SEQ ID NO: 10509 - DNA, 119 bp, homo sapiens
caggccctggatgaaaggaactaccacgtgttctactgcatgctggagggtatgagtgaggatcagaagagaagctgggcttgggccaggcctctgactacaactacttggccatggtg

SEQ ID NO: 10510 - DNA, 119 bp, homo sapiens
ctgtgccccttgctgccaacagcacgcacatttgaaaacctggatgcctgtgaggttctcttctccccacgctggccacagctgcatccctgcttgaggtcagtgcctggcctctctcc

SEQ ID NO: 10511 - DNA, 119 bp, homo sapiens
gtgaaccccccagacctgatgagctgcctgactagccgcaccctcatcacccgcggggagacggtgtccccccactgagcagggaacaggcactggacgtgcgcgacgccttcgtaaag

SEQ ID NO: 10512 - DNA, 119 bp, homo sapiens
cttgcaggcttcctggagaagaaccgagacaccctgcatggggacattatccagctggtccactcctccggaacaagttcatcaagcagatcttccaggccgatgtcgccatggtaagc

SEQ ID NO: 10513 - DNA, 119 bp, homo sapiens
catcctcactccagggcgacctccgcgggacttgccagcgcatggctgaggctgtgctgggcacccacgtgactggcagataggcaaaaccaagatctttctgaaggtgagcacagatg

SEQ ID NO: 10514 - DNA, 119 bp, homo sapiens
ctctgcctcctaggaccaccatgacatgctgctggaagtggagcgggacaaagccatcaccgacagagtatcctccttcagaaagtcatccggggattcaaagacaggtgcgtgttccc

SEQ ID NO: 10515 - DNA, 119 bp, homo sapiens
ccactactgctgtttcaggtctaactttctgaagctgaagaacgctgccacactgatccagaggcactgcggggtcacaactgtaggaagaactacgggctggtgagcctccccatggg

SEQ ID NO: 10516 - DNA, 119 bp, homo sapiens
cctcagtatctgtggcgcctcgaggctgagaaaatgcggctggcggaggaagagaagcttcggaaggagtgagcgccaagaaggccaaggaggaggccgagcgcaagcatcaggtgagc

SEQ ID NO: 10517 - DNA, 119 bp, homo sapiens
ctgctggtcctgcaggcccagctccccgagggccagaagaagagcagtgtgaggcacaagctggtgcattgactctgaaaaagaagtccaagctcacagaggaggtgagggcagacgct

SEQ ID NO: 10518 - DNA, 119 bp, homo sapiens
tacctgcggaacttcatccacgggggcccgcccggctacgccccgtactgtgaggagcgcctgagaaggcctttgtcaatgggacacggacacagccgcccagctggctggagctgcag

SEQ ID NO: 10519 - DNA, 119 bp, homo sapiens
ggggatttatgcccagaggagaactgatgcccagaaggtcaaagaggatgtggtcagttatgcccgcttaagtggcccttgctcttctccaggttttatgaagcctacaaattctcagg

SEQ ID NO: 10520 - DNA, 119 bp, homo sapiens
ttttcagaaacgggtcccggaagtaccctccgcacctggtggaggtggaggccatccagcacaagaccaccagattttccacaaagtctacttccctgatgacactgacgaggtgaggg

SEQ ID NO: 10521 - DNA, 119 bp, homo sapiens
caggccttcgaagtggagtccagcaccaaggccaaggacttctgccagaacatcgccaccaggctgctctcaagtcctcagagggattcagcctctttgtcaaaattgcagacaaggtg

SEQ ID NO: 10522 - DNA, 119 bp, homo sapiens
atggccctgaccccaggtcctcagcgttcctgagaatgacttcttctttgactttgttcgacacttgacgactggataaagaaagctcggcccatcaaggacggtaatgaggccgggtc

SEQ ID NO: 10523 - DNA, 119 bp, homo sapiens
gctgcaggaattgtgccctcactcacctaccaggtgttcttcatgaagaagctgtggaccaccacggtgcagggaaggatcccatggccgattccatcttccactattaccaggtgggc

SEQ ID NO: 10524 - DNA, 119 bp, homo sapiens
agtccatcgtcgcctacttcaacaagcacgcagggaagtccaaggaggaggccaagctggccttcctgagctcatcttcaagtggcccacctttggctcagccttcttcgaggtgaagg

SEQ ID NO: 10525 - DNA, 119 bp, homo sapiens
tctcatctttttttctagcaaactacggagccaaacttccctgagatcctcctaattgccatcaacaagatggggtcagcctcatcgatcccaaaacgaaggtgagcagggataaggca

SEQ ID NO: 10526 - DNA, 119 bp, homo sapiens
gatatcctcaccactcatcccttcaccaagatctccaactggagcagcggcaacacctacttccacatcccattgggaacttggtgcgcgggagcaaactgctctgcgagacgtcactg

SEQ ID NO: 10527 - DNA, 119 bp, homo sapiens
tcatgttttttaaggctcaaaatggaaaatcataaatccaataataaggaaaacataacaattgttgattatccagaaaaattaaccagcttccagaagcagaaaggtaagatcccttc

SEQ ID NO: 10528 - DNA, 119 bp, homo sapiens
taggtgatttggattgtgaaacctgtaccataacacggagtggactgactggtcttgttattggtggtcataccctgttttcttggctatacctgtaaatggtggtctagcagccaggt

SEQ ID NO: 10529 - DNA, 119 bp, homo sapiens
cggttgctaggcggtaccttttccggaagtgtttgttgcgcgctgcagggcaacaccccggcgtccctgaagctgggggagcgggtgggtgttgggtggcgttgggggagctgcgcctc

SEQ ID NO: 10530 - DNA, 119 bp, homo sapiens
tttttttttttttttcaaccaggagaaataactttatttggactgagagctggagaatgagaataggactgagagtatattgggctaaggaggagaggtaaggttccaaaacggcggtc

SEQ ID NO: 10531 - DNA, 119 bp, homo sapiens
gggatctaggtgtttgagcccagatgagtcatggctggacgacccctccgcataggagatcagctggtttggaagaagattatgatgagacctacattcctagtgagcaaggtaacaag

SEQ ID NO: 10532 - DNA, 119 bp, homo sapiens
gcagaaattcttgaatttgcccgggagattggtattgatcccatcaaggaaccagaactgatgtggctgcgcgagagggcatcgtggccccactgcctggagagtggaaaccatggtaa

SEQ ID NO: 10533 - DNA, 119 bp, homo sapiens
tgtcatcatttttgtttctagagtgtccacagctcaagtgagcctcttaggaacctacacctggacattgggcactggggggtgactttgagtatgaggtaagagccctaatccctaca

SEQ ID NO: 10534 - DNA, 119 bp, homo sapiens
ctgtgggtctgtctctccaggaactggaaattagtgaacacatgaaggaaccacagctctcagactccaagcttctgaccccaagtccttccatggcctggtgagtttgagatgagggc

SEQ ID NO: 10535 - DNA, 119 bp, homo sapiens
catctccactgtctccaggacttcggttttcgcagccggatctcggagcacctgctggatgttgatgtgtttccccagtcctgggtggagcttgtcggcaggtgagtttctgtgggtgg

SEQ ID NO: 10536 - DNA, 119 bp, homo sapiens
cttctctcctacaggcccagcaaccactgggaatagaagacaaggatgacagccagtccagccaagatggctgcagagcaagcagtccaaaggcctggaggagaggtaccataggtggg

SEQ ID NO: 10537 - DNA, 119 bp, homo sapiens
agtccctttgctcctccccaggctgtggcaacgctggagaaggagcacagtgctgagctggagcggctcgctcctcattggaggccaagcaccgggaggtaagatgcagcatcctgggc

SEQ ID NO: 10538 - DNA, 119 bp, homo sapiens
gtttccctttctgggcaggaaaggaagctccaggatttagagttggaccttgaaaccagagctaaagattcaaggccagattggctctgctggaggtccaggtgagggatctgcaggag

SEQ ID NO: 10539 - DNA, 119 bp, homo sapiens
agaaaatcctgtctcttccctgcaaggaggagaccgcccggagggagaagcagcagctgcttgatgtgcgaggcaggttgctctgaagagtgaggtttgtctccctgttttgtcctccc

SEQ ID NO: 10540 - DNA, 119 bp, homo sapiens
cagtggacttttctaccatgtgtccctagaaccagaccaaagaggtgtcttcttctctctcccagagcaggaggacttatacttggacaggtgagttcccatagcctgtcttatttgag

SEQ ID NO: 10541 - DNA, 119 bp, homo sapiens
ctgcaggagaccaggcacctggatgagatgaagtcggccatgcggaaaggccacaacctgctgaagaagaagaggagaagctgaatcagttggagtcctctctttgggaagaggtgcag

SEQ ID NO: 10542 - DNA, 119 bp, homo sapiens
ctgagtcctgtccccatgctcttccagctggcatcccgctgctcagcaacagccccaccccgctggagacaggctgggttacatgtctgccaggtgagcctccctgggggctggttggg

SEQ ID NO: 10543 - DNA, 119 bp, homo sapiens
ctgcatggagcactgtgcttaccagttggtgagggtactgctgcaggtagctgggagtagagaaagtgcctggaggccagtcagattccccccacaccctgtagagaggtggaagggct

SEQ ID NO: 10544 - DNA, 119 bp, homo sapiens
tacgggccaggatgatggccaccagcagcccaagcagcaggaggagcaggctggagagcaggaggacacgagccaggagaagcggcagtctggccgtagccctcgaggacgccgacctg

SEQ ID NO: 10545 - DNA, 119 bp, homo sapiens
gatggttaccatgccagggagctgggacgctgtagctggcatcctctgggaaaactgggggagggcaggtggcccagactcaggctcgaaggcaggattgcagaactcggtctggaagg

SEQ ID NO: 10546 - DNA, 119 bp, homo sapiens
cgatccgcctcaacccgcacctctggatggaaggcgtggcaggagtctggtcgccggcggagcttctggagcgcatccggtcacatttgacagaggcattatgtgcagaagccactgtt

SEQ ID NO: 10547 - DNA, 119 bp, homo sapiens
gatatatttgacttctgtcgcctcctgcagcactggtgggaagatgctgcagtcacaggtggggtctgtaccaggaggaggaggttactgttgggaatctgctgcaccacaaataccct

SEQ ID NO: 10548 - DNA, 119 bp, homo sapiens
cttctggcagggcccgcactccacgatcccgttggcctcccggatggccggctggtacacgaacacgggtactccgtgtcgcagggctgcagcgggtcctgcttcttgtgtttgtgggc

SEQ ID NO: 10549 - DNA, 119 bp, homo sapiens
tgcgtccccaacccaccgccagcagggatggcctcagctgggctacttacagtgatggaagacacttttgctggccggaacataagcccagcacagggtggacacggcacaggaaaaca

SEQ ID NO: 10550 - DNA, 119 bp, homo sapiens
ttcagcacatggccctgcagctccgtgcactcaccctcggcccctctgtcgtaccaggagccccagacatccactccagcaggaacctgtcagacacaggactgaatctcggagacctc

SEQ ID NO: 10551 - DNA, 119 bp, homo sapiens
gccctccaccagccccgtgtctacccccactcacagcaccagctcctgcagcagccacctggtcgccgtaagaaggcagaaattggctgggaaggagagagtgcacaccgctcgcacct

SEQ ID NO: 10552 - DNA, 119 bp, homo sapiens
ggaagggctgggtgacactcacgctgaccaggggctgggctgcactgtggtggtgactcgagggtttgccatggcctgatagtcatacatagtcactctgaaaatcagaagcgggctgt

SEQ ID NO: 10553 - DNA, 119 bp, homo sapiens
ctggggaggagtgtgccccacttactggctgaacacccccatgctgagcagctgggtcaggacagcacctccacctcccccagaaatcttcccgtctgtgagagagggacagcagagag

SEQ ID NO: 10554 - DNA, 119 bp, homo sapiens
cccctcattctatatccccagtgactcacctctcgggacctcttggagatcagaatgaacccgttgttgcgatgacgaagcagtccagatcctgggaggaaacccagaagggaggttat

SEQ ID NO: 10555 - DNA, 119 bp, homo sapiens
gctccctcctccaccttcctcacacgggcagaacttacactgtcctcgcagctctgtgtgcacggcccaccacagtgctgcactggaaggaagaggagagactgaatgtggacactgca

SEQ ID NO: 10556 - DNA, 119 bp, homo sapiens
gccccgacctggcccgacatcacacctacctgccgcgttgccgcccagaatttgcgctggaggaattccgcttcatttggacgcccgcggctacagggcagaaagagagagggcaaggc

SEQ ID NO: 10557 - DNA, 119 bp, homo sapiens
accacaagggccgttcctacctgcagcaatggctgtcctcttgtccacggtcaccgccacagctgtgctgccgtcaccaccatgggttcacccgcactttctggggaaacagagacaac

SEQ ID NO: 10558 - DNA, 119 bp, homo sapiens
ggcccaacccacctgtcggagaccttctcggagcccacgaacaagctgcttctcaggaggccagcccggtgcccaggaaggccatgtccaccacgtgttcagactccctgtgtggcaga

SEQ ID NO: 10559 - DNA, 119 bp, homo sapiens
aacctggacctactcggacatgttgagggccagcgctgtccagtaggcttccatgggggctgtcaccacgcgtcaaacagcacctcccggaccagctcctcgtcacctgggtgcaaaac

SEQ ID NO: 10560 - DNA, 119 bp, homo sapiens
ccagcactcacactccaggtctgggtccttcctggtgaggaagcggatcatggcctctagctggctgagttccggtggtctgggtcaatatctgtgatgcagtagatcctgaaacccag

SEQ ID NO: 10561 - DNA, 119 bp, homo sapiens
ccacctgtctccctcccattttttactcctcacttaccagtcaccggccagggccaggtctgggtgaagaagtcatgcaggcctgaaaccagagtccacattcagggtgatgctccctc

SEQ ID NO: 10562 - DNA, 119 bp, homo sapiens
tccctcagcccctggtaccgacccaccttcttccacagacgtgttccccagaaggatgtattctccgtgccccgggacagcaccacccccaaactgtggggagagaagagaaggcactc

SEQ ID NO: 10563 - DNA, 119 bp, homo sapiens
cccgtgcaaataaagcctgtgtccctcacctgaaaggggtgtcgctgatgtccgtgaagaagtagtcatggtcaggaaaagaactcgcttctgaaagagtagacaaggaaagagtgctc

SEQ ID NO: 10564 - DNA, 119 bp, homo sapiens
ccctggctgtttctagctccttacccctttatccatcggaaccttcacatccatcgagagagtacctgttccctattgatcatggctgttctcagcttcaggaggaaagacaatggcat

SEQ ID NO: 10565 - DNA, 119 bp, homo sapiens
ctattttccccactcacagattcagcctggtcttcccactccacttcggagagatccacactgttgtagtaggtttgggttttagtttcttcccctctctgtactggagtgggcaggtc

SEQ ID NO: 10566 - DNA, 119 bp, homo sapiens
aggcaaagaagatctgtacctaccaggggccggaggtcgggatgggagaggatgtagccattgttggtgtcagaaaggcgtatccgtgcactccaagctgccagagtccagggtggagg

SEQ ID NO: 10567 - DNA, 119 bp, homo sapiens
gggaacagacccaggctcaccttgtaccggggcgccagcttcatcagctctctcagggccacatctgagccaccacacccaggagaatgccatgggatcgctggaaggaaagacacaag

SEQ ID NO: 10568 - DNA, 119 bp, homo sapiens
tctccaggagcggccactcaccgtttcgttcttcttgctgaagactggcatggccacagtggtgagcaggtcaggctctgagcctgcgagctgaggagctgtaagggaggggagaacag

SEQ ID NO: 10569 - DNA, 119 bp, homo sapiens
acctgctggcccggcactcacctttgttgttgcatgcaatccacttcatgcggtcagcaaaagacactttctcccaatgaggtaagtgaaaactcggacctaacccacaagacacagag

SEQ ID NO: 10570 - DNA, 119 bp, homo sapiens
caccttacagtctggccagttatacttctcaaacaccggctcgtagtcctccacggcgccgtcgctgatagcatgatggcctggttgcagaggcttccttgcttggcctcttggaactg

SEQ ID NO: 10571 - DNA, 119 bp, homo sapiens
cattacagtgggcacctgcttcaggatctggaaggcttctctcagggcttggtccacgacccccacaccttgaccatcaactcctccaccagcagtttgaaatgctgccatgggtgaga

SEQ ID NO: 10572 - DNA, 119 bp, homo sapiens
ctcaggccaccgtggacactcacctctcgattgtctcggtccgcctggacgaggatccctttaaaacaagctcgatgtaatggacgtagtcattgtactgcagttgcagtgagttgagg

SEQ ID NO: 10573 - DNA, 119 bp, homo sapiens
gccgcaaacctttcccctgtgagctcttaccagccgcggtttcggcagtcaaaagtaatgactccattccatcaggtgtccattttatacctgggagaataaagactcgttcttttact

SEQ ID NO: 10574 - DNA, 119 bp, homo sapiens
tctggcaccagtgccaggagtgggactcaccaccagggattcattgaattcgtggttcaggtcggcctctcggcagcttccaccagattctgagggatgggaacacagaggtagggaga

SEQ ID NO: 10575 - DNA, 119 bp, homo sapiens
acctggaccgcctcgactttcctccgcagcatgttctccatgtcctctgagaacttcctcaccagctccagccatccacctcctcgatcttcagactggactccacatccttgtacttc

SEQ ID NO: 10576 - DNA, 119 bp, homo sapiens
ctggaagggggtgactgaccttctgcagcaagagagagcctgagtatttggtcacagtgttatacaggtcccgccgaaggtgtcagcccatagcttcactctgccaggcaatgaaagga

SEQ ID NO: 10577 - DNA, 119 bp, homo sapiens
tgagccccgccccctggctccccgccccctcttctcccctcccccaagccagcacctggtgccccggcggtcgtgcggcgcggcgctccgcggtgagcgcctgaccccgagggggcccg

SEQ ID NO: 10578 - DNA, 119 bp, homo sapiens
agaggaactgcgtcattgtacatctctgtctttctctcttaggcctccaagcctttgggagtagcttctaagatgaggtaaatagaccagtctcttttctgtcccatttttctcttgcc

SEQ ID NO: 10579 - DNA, 119 bp, homo sapiens
tccttgcagaccccttgtctgtgtcccctgcccgctgggctgaggaatatttggagcaatcagaggagagctgtggctgggagaacctgagggaacagccaccgatcgctggtgagttc

SEQ ID NO: 10580 - DNA, 119 bp, homo sapiens
tcttacccgttccaggtatgatgaatatcatcctgaggaggatctgcagcacacggccagtgactttgtgccaaagtggatgaccccaaattggctaattctgaggtgagccacatccc

SEQ ID NO: 10581 - DNA, 119 bp, homo sapiens
cccagttcctgaaattcgtgcggcagattggcgaagggcaggtgtccctggagtccggtgcagggtcggccgagctcaggcagaacagtgggcagcagagtttatacagcagcaggtag

SEQ ID NO: 10582 - DNA, 119 bp, homo sapiens
cttttttgtcgcagggtacatcagatgcctgggttgaccagttcacaagaccagtaaacacatctgccctgatatggagtttgaacgagccaagtcagctatagaggtgagagcagata

SEQ ID NO: 10583 - DNA, 119 bp, homo sapiens
tctgatgtcgatttctgggacaagttgcaggcagagttggaggagatggcaaaacgggatgctgaggccacccctggctttctgactatgatgaccttacgtcagctacctatgataag

SEQ ID NO: 10584 - DNA, 119 bp, homo sapiens
atggaatctgtcaacttccctctaggcttggcagtatctgggtaccacccaggcagagaatgaacaagactattagccatcagtgcattgcggaggtgagtacactgaaaggtgtgggt

SEQ ID NO: 10585 - DNA, 119 bp, homo sapiens
acttacagcagggccggtttcgcctgatcgtccacggggaccaggaggcccaatggggccagggattccttagcaccatctttgccagagggaccgacggggccaggaggaccctgcaa

SEQ ID NO: 10586 - DNA, 119 bp, homo sapiens
gccccctccatcttccaactccatgtcacttactctagggccagaaggaccagcaggaccagaagcacctggtctccagaaggaccctgtgtagaaggaagaggcaaaaggccacggtc

SEQ ID NO: 10587 - DNA, 119 bp, homo sapiens
actcacaggagggccgggcagaccctgcagaccagtgaagccacggtgtcccttcaggcctctctcgccggctctccagcctctcctttgtcacctctggggccttgaggaccctggga

SEQ ID NO: 10588 - DNA, 119 bp, homo sapiens
tggggactcagtgcaggacacttggatactcacctggattccccgggctccagctggtcctgagggtccatggggccttgtgcaccctgaggagagagtgagcgcagcgtcagagaaaa

SEQ ID NO: 10589 - DNA, 119 bp, homo sapiens
acttacagcttctcctctgtctccttgcttgccagttggaccagcggggccaggggagccagggggcccggggctccaggagctcccacagcaccagtctcaccacgatcaccctgtca

SEQ ID NO: 10590 - DNA, 119 bp, homo sapiens
aacccactgcacacacagacaccagacactcaccttgactccagcagcgccatctctgccaggggggcctcagcaccggggcttccctggacaaagtgaaacaagaatgcacttagagc

SEQ ID NO: 10591 - DNA, 119 bp, homo sapiens
gctcacctctcgtccaggttcacctgcaggacccgtcaggccaggaggacccacggggccaggaggaccctgtctccagatgctccaggagcaccctgcttgccgggctcaccctggag

SEQ ID NO: 10592 - DNA, 119 bp, homo sapiens
actcaccgacgggccaggcaagccagggaatcctctctcaccacgttgcccaggcagaccgacgatgccctctgaccagccagaccctggggacctggtggaccttcggcaccctgaga

SEQ ID NO: 10593 - DNA, 119 bp, homo sapiens
gcctgtgcctctcatgccaggagcatcacttacattggagcctgggggtccaacgcggccagcagctccgggaatccagtggctccctgtgtggggagaggagagcccctgagaacctc

SEQ ID NO: 10594 - DNA, 119 bp, homo sapiens
ggtgcagggtggggtgtcagaggcctcactcaccggggggccttgggcacctcgggctcctttaggaccgtcactccagtaggaccctggaaaggaaagagggagacagtgaggcccag

SEQ ID NO: 10595 - DNA, 119 bp, homo sapiens
acccacctgaggcccaggtgctccagaggggccctgaggaccaggggcaccagcatcgcctttctggccgcctctccttgctcacccttggccccaggctggccatcagcaccctataa

SEQ ID NO: 10596 - DNA, 119 bp, homo sapiens
gagggacccaggaggatggacagagatactcacaggaggcccagcaaatcccgctggtccggggggcccgtctctccacgttcaccctgtgagagaagggggcatggcgagaggtcagg

SEQ ID NO: 10597 - DNA, 119 bp, homo sapiens
ggcagagccaggctcagaggggcagacactcaccggagcgccacgagcaccagcacttcctgcaggaccggaggtccaacttctccctgagggtggggaagggaggaagagctggggta

SEQ ID NO: 10598 - DNA, 119 bp, homo sapiens
caaggtgtggagaggaaaggagccgggactcaccttctcgccattagcaccagctgggccaggggggccatgggacctgtcaggccctgcggggagagcaggtagaggtgagggaggca

SEQ ID NO: 10599 - DNA, 119 bp, homo sapiens
tgcccagcagtccagcagcccgcattcacttactcgtccaccatcctttccaggggctccctcagggccttctcaccaacgtcaccctgagggaagagaaaaccagccgcctcagccag

SEQ ID NO: 10600 - DNA, 119 bp, homo sapiens
acttaccctgtcgcctttgggcccagcgataccagctgctcccctctcgccaggcattccctgaagaccggagggccctgagccccaggggggcctgctgggccagatgcaccctgggg

SEQ ID NO: 10601 - DNA, 119 bp, homo sapiens
gcctcacttactttgggaccatcagtgccaggagtgccggggaggccacggggaccctggaggccctggcaccgggagagccacgttcacctgggaaacctcgttcaccctgcggcaga

SEQ ID NO: 10602 - DNA, 119 bp, homo sapiens
ccaaggaggcagcccgcattggccaacaggatactcaccctgggacccacgaggccaggggctccagctcaccgggaacaccctggagaacaaagaaagatgtgtgagagtgaaggctt

SEQ ID NO: 10603 - DNA, 119 bp, homo sapiens
acaggttgcaggtccaaagagccccatactcacctggtcacctggttttccaccttcacctgggggaccggagggccaggaagtccctagaagccgaagtgacaagcgttagcaaagga

SEQ ID NO: 10604 - DNA, 119 bp, homo sapiens
ggactgcacagagagcctggtccagccacctacctggaacccagatggcccaggagcaccctgctcgcccgttcaccagcaggtccctgcagtggaaaagaaaaggtgagctgagccag

SEQ ID NO: 10605 - DNA, 119 bp, homo sapiens
agggccacctggggaggctgggcaggtacttacagcagggccagggggtcctgcagcacctgtctcacctctttgccaggaagaccctagacagaagagaaaaagaaaagtcaatgaca

SEQ ID NO: 10606 - DNA, 119 bp, homo sapiens
accaagtcatgggcagcggggaaggatacttaccctcagaccaggagcaccaggcagtcccttctcaccgctttgccaggctcaccctgaaggaaagagagggcagggccatgaggcgg

SEQ ID NO: 10607 - DNA, 119 bp, homo sapiens
ttattacttacgttggcacctttggggccagggaaacccatgacaccaggctgcccacgagccccctgagacctggaggtccaggacgaccatcttcaccaggggctccctgaaagaca

SEQ ID NO: 10608 - DNA, 119 bp, homo sapiens
accctcctagcagccctcagaggatagacttacagaagggccaactttgccttgaggaccagcatcaccgggcggccagtgagaccctttgttcaggagagagaagagggtggggtcag

SEQ ID NO: 10609 - DNA, 119 bp, homo sapiens
ctgctacttacccgggctccaggaaggccaggttctccaggacggccagggtcaccgttggctcccttgggccagcaagaccactgggccctcgctctccaggggctccctacaagggt

SEQ ID NO: 10610 - DNA, 119 bp, homo sapiens
gggagggaccccagcccctcttctcccactcaccttgggacctgccagaccatcttgacctgggaaacccggttgccgggagcaccctaaggagccacagggaggagaggcagtgagtg

SEQ ID NO: 10611 - DNA, 119 bp, homo sapiens
cttaactctttctccagggggaccgatgggcccaacgccaccaggctctccacgggcacctctcttgcctcttcaccagcgggtccaggggctccctgggggccagcagggccctgagg

SEQ ID NO: 10612 - DNA, 119 bp, homo sapiens
agagaagacaagggcttgggggcagatactcacaggttctcccttggggccttgttcacctttgaagccgcaataccaggttcacccttgaaaagagaggcaggtcctcacaccagatt

SEQ ID NO: 10613 - DNA, 119 bp, homo sapiens
tgggctcttaccgtctgacctttcgggcccagaggaccagttgcaccttgagggccaggagggccccgtgcccagggaagccaggagcaccagcaatgccaggagcaccctgtgggcat

SEQ ID NO: 10614 - DNA, 119 bp, homo sapiens
gctctcctggggtagcaaagtccacgggcaacactcacagcagatcctttggctccaggaattccatctttccagggttaccctgaaaagggagacattgtcaaataagcagcaaagaa

SEQ ID NO: 10615 - DNA, 119 bp, homo sapiens
gctgcacttacggaggcaccagcaggcccaggggacccaggagtaccaggttcaccgcgaggaccttgacaccttcaggaccacgggcaccagtggggccggcttcaccctgggaagag

SEQ ID NO: 10616 - DNA, 119 bp, homo sapiens
cagaagttcctgactggacaacagggcacgtaccttggctccaggagcaccagggaagccaggaccaccgcaggaccgacaggaccctggagagagtaggcggatgagaagagaggtga

SEQ ID NO: 10617 - DNA, 119 bp, homo sapiens
acagcaacaatgacctgctgaggatgaaatgaacttaccggaggccctgcggggcctggctgaccatcgtgcctcgggcaccctgtgagcaagaaggaagtgaccatgagaggtgccca

SEQ ID NO: 10618 - DNA, 119 bp, homo sapiens
aaatggtggtgtttggctttgtcaattactcaccgcagcgccagcagggccagtccgtcctctttcaccggcaggccacgaggaccctggaacacacaccaggacagcctaagcatgag

SEQ ID NO: 10619 - DNA, 119 bp, homo sapiens
gtctttgataaaccttcctggagggtgtccatacttaccattgggcccggagatccgttctcacccgggaaccactctcaccctggaaaaatgatgcacaaggtcagtgtctgggaccc

SEQ ID NO: 10620 - DNA, 119 bp, homo sapiens
ctccccatcccattgtactttctggcctctcaccttcacaccaggagcacccgcctctcccttagcacctccaggcctggataaccctagggaacaagagaaaatgttcaatcagactt

SEQ ID NO: 10621 - DNA, 119 bp, homo sapiens
cttccttccaaccttctcacccgtgatacttactctgtgacctttgacaccaggaaggcctggggttccgggaaaccacgagcaccctgcaatccaaagtggaggtgttcagagcacag

SEQ ID NO: 10622 - DNA, 119 bp, homo sapiens
aagatgcctgaggctgggaacggtggcgtttacctgaggaccaggcggacccctttcaccagcttttccggttttccagcttcaccctgaagggagagagagagatatcccagcttcct

SEQ ID NO: 10623 - DNA, 119 bp, homo sapiens
cagctcctcatttgtctactcgtgtatactcacatcatcaccaggctttccagggggaccaggaggacccggggacccatgggaccctacaaacaaaggaagatagtttaagagatggt

SEQ ID NO: 10624 - DNA, 119 bp, homo sapiens
ccagagaagggacagggccgtgctggtactcacagagacaccaggttcaccaggttcaccaggattgcctgaaatccttgaggcccctaaaaagtaaaatgaggataccaggtcaatcc

SEQ ID NO: 10625 - DNA, 119 bp, homo sapiens
gcgacacgatggaggcaaaaagaattgcagatacttacaggagcacctgcagggcctggaggtcctcgagtcccatggggccctgcatcggaacagaaaatgaggggtttactacacat

SEQ ID NO: 10626 - DNA, 119 bp, homo sapiens
agaactagtgtcttttcttaccattggtccttgcattactcccaactgggcgccaccagccttttcatcaatcctccagccatctgggcagcaaagttctgcaaagaaacccaacaacg

SEQ ID NO: 10627 - DNA, 119 bp, homo sapiens
aagtgcaagcagcaatttaaaagccacatttctggagggacagcctgaaggaatgggaagtaaggatactactccaccaagaccagggggaccaggggggccgggaggaccaggggggc

SEQ ID NO: 10628 - DNA, 119 bp, homo sapiens
ggaccaggggggccgggaggaccaggggggccaggatttccaggggtcccaggttctccatctctgccagaggtccaggggcacccttggcataaagagaaaaaggcatcaatgggaag

SEQ ID NO: 10629 - DNA, 119 bp, homo sapiens
caccagggtcaagcagcattgctttttactcactttttcacctttgtcaccacgatcccctctgggtcctgttcccctgcaggtccctgaaggtgaagaacatggtaagatgacagcaa

SEQ ID NO: 10630 - DNA, 119 bp, homo sapiens
cgcagcgaggaagggacggagaaagagatttctccctctcttacctgaggcccaggaggtcctttgggtctacaatctgtgagagagagccccacaggatggtaagttagaggagagca

SEQ ID NO: 10631 - DNA, 119 bp, homo sapiens
tagagcagcagctgcaataccgggtgagaataatttgcacttacatccttgatgtctccaggttctccttctgtccctgaaacatgaaacattcacaggattaagccgagtaagcccac

SEQ ID NO: 10632 - DNA, 119 bp, homo sapiens
gaaaatataaagccaaaaaaatatgaaaaaagaaaaagaagaaagcccttacctttggtcctggttgcctgcaagggaaaaaatatagagaagaagaaggtaagaatcttgagatggaa

SEQ ID NO: 10633 - DNA, 119 bp, homo sapiens
aaaatataattaaatattaccttcaaatgctgcttttctagatctgacattttgagctgtgtctctagacttttattttttcctttagttgatcagcatctgttgaaaaagtcatacaa

SEQ ID NO: 10634 - DNA, 119 bp, homo sapiens
taaaatacattaccaggtatggtgctttcagctccactttggtccttgttagcttctatctgatggattattctgctttctctttatccagctgatgattagctaatctagaacacaat

SEQ ID NO: 10635 - DNA, 119 bp, homo sapiens
agtcatatgaatacatgatgtacctaagaacttgaagctcccgtttaaggccttgctctgtctcagcacttcaggaacatgtttaagaatcttaatctttgaggacaatgaaaagttag

SEQ ID NO: 10636 - DNA, 119 bp, homo sapiens
ggtaaattctcacatacccctctaacatggccaagtttccgctgaacttctgctttttctttcttaagaattcacacatttccttcaaatctctgacttgattctgaaagataacaagc

SEQ ID NO: 10637 - DNA, 119 bp, homo sapiens
tcttacccaagccgtttgtttgaatttatttagtgaactatcagcctgtagttctaatctgtgatgaagatatgaaggtcttcctcatgtttcttcacaatttctctttgctcctgttt

SEQ ID NO: 10638 - DNA, 119 bp, homo sapiens
tcataccttttgtgccgcatttagtatttcattttgctgacggtcaaaaatgtctagttggcgttccagtcaacttctctttgatcccaggccatttgtctttcttcatgaaactaaaa

SEQ ID NO: 10639 - DNA, 119 bp, homo sapiens
atacctgatagtctagcagttgcattctgagggactctacttccttgtccctagattgttgttgtgcatcaaaatttcaacttgtcttctggcaatatcagaaatctctctcagtctag

SEQ ID NO: 10640 - DNA, 119 bp, homo sapiens
ttacctaatttagtttcctgttcccaggcttgttcaatagtgtgaagtttttccttggtaatctccagtctttatttatagactccacttgttcttttaaggagatgttttcacactga

SEQ ID NO: 10641 - DNA, 119 bp, homo sapiens
tttacttacattatattcttttacttttatagcatcttgttggacttgatcctcaagttttctcttttctcttttattgttttagattctgttttccaggtctccttttcactaaaaac

SEQ ID NO: 10642 - DNA, 119 bp, homo sapiens
accttaggtattctttatacaacaaactttgttgatgacgaattacagcaaattttctgttgtaatcttaagagaatcttctaaattctttaactttttttctttattttctagttcct

SEQ ID NO: 10643 - DNA, 119 bp, homo sapiens
aagataattgtaacttacatttattctgaaatttggctatcactgtcctactcctttctaaatctcttttttttcaattagttctcttgaaagaaattcattctgaaaaaagcagagag

SEQ ID NO: 10644 - DNA, 119 bp, homo sapiens
ttacctttgattgtgcttcactcatatttttgaggctcaataaatccaattttctttcacttattctattccttgagaaatgttttcagttaggttcaggtcctcagtggttaatccta

SEQ ID NO: 10645 - DNA, 119 bp, homo sapiens
gaataactgagtatacctgaagttgcacttctttttcctctttcttgagccatttgacgaatttttttttcagatcaagtcgttcttcctctagactttcaatctgcaaagtataaatt

SEQ ID NO: 10646 - DNA, 119 bp, homo sapiens
ccacacttgcctctttcaaaagaatctggttttcagctctgtactgctgctgttttaagtgtttgctattctaaattcagttaaatcaatcattgtctttggttcaaggcctacaatag

SEQ ID NO: 10647 - DNA, 119 bp, homo sapiens
attgaaaaaaaataccttccattcttctacttttgcattgacagctaccataattggatcatcttcttcttttttgatttcagaagatctgtaagctcctgcacctaaaagacaaagtt

SEQ ID NO: 10648 - DNA, 119 bp, homo sapiens
ctcacaacatattttaaattcccaagatttcaccacacttaaagcctcacctttttctttagacgtttgtctacagaaaaggacaggaaaacggtaattagaaatgagaaaggtaatac

SEQ ID NO: 10649 - DNA, 119 bp, homo sapiens
tgttgaaccaccacaactactaaaattttttacctctcttcttaatttgctgttttcattttctgcctctcatttcgaagagccaactaaaatagtaaaaaaaaaaaataaataagaag

SEQ ID NO: 10650 - DNA, 119 bp, homo sapiens
atgacaattacatcctagggaatacaaaaagacatacctccagttcattttccagtttcattactttagttttaattgattttctatttttttaaaaaaaaagaaaaacgttttaattg

SEQ ID NO: 10651 - DNA, 119 bp, homo sapiens
aataaactttttccaaggtgcttaccaaattttgcttgttcttctccagctttttctacttcttccaaaccagctccacttcttgagctttcatctaaacattaaaaaaaggttatttc

SEQ ID NO: 10652 - DNA, 119 bp, homo sapiens
taaaacctactacatacaaaccttcattagtgactgagtaattctgaaaaggtgtatcacattttcttgttttcactttttagctcatttacttccacctaagtaaacagaaaagcaac

SEQ ID NO: 10653 - DNA, 119 bp, homo sapiens
ctgtctttaccttcagcaagaaagcctcagttcgtggattcctgaaaacatcaagaagaaagaatgcgttattttgtggaaagttccaaactgtctgatgctgggtaagtgacgtgatt

SEQ ID NO: 10654 - DNA, 119 bp, homo sapiens
gccctcactcggctgtgtgctttttctaggtgtggccatcaagatccccatcgtgtgcgtggtgctggaggcggcccgggcacgttgcacgtgagtatggccaggtgggagggggcatg

SEQ ID NO: 10655 - DNA, 119 bp, homo sapiens
ttgttgcagatccaagatatcgtccggaggcggcagctgctgactgtcttccgggaaggcaaggatggtagcaggacgtggatgtggccatcttgcaggccttgctgaaaggtgagggt

SEQ ID NO: 10656 - DNA, 119 bp, homo sapiens
tggagggaaatggctttgagctccagatcgaggcccaatatgcacctgttcatctgcagcctcacggagcaagaccactttggccacgagaactgggaccaccagctgaaactggcagt

SEQ ID NO: 10657 - DNA, 119 bp, homo sapiens
ggcatggaatcgcgtggacattgcccgcagtgagatcttcatggatgagtggcagtggaaggtaagtctccagagcaccccgtggaggggcctactgggcccacatgcattgcaccact

SEQ ID NO: 10658 - DNA, 119 bp, homo sapiens
gcaggccttcctgaccaaggtgtggtggggccagctctccgtggacaatgggctgtggcgtgtgacccttgcatgctggccttcccgctgctcctcaccggcctcatctccttcaggtg

SEQ ID NO: 10659 - DNA, 119 bp, homo sapiens
tgacagtgaggatagtaagagtgacaacctgtctgccttcctaccgcccctcttcccagtagctcttcttgaccctgacgagtgcgggctgatgaagaaggcagccttgtacttcagtg

SEQ ID NO: 10660 - DNA, 119 bp, homo sapiens
acttctggaataagctggacgtcggcgcaatcttgctcttcgtggcagggctgacctgcaggtgagtggctcaccccgatggcgggcccgtctgaggcagccagccctgcaggggatga

SEQ ID NO: 10661 - DNA, 119 bp, homo sapiens
ctgcttcctctttcagggttgacgccatggtggacctgctggacctggacccactgaagaggtcgggctcatggagcagaggttggcctccctggaggagcaggtgggtccgaggtcgg

SEQ ID NO: 10662 - DNA, 119 bp, homo sapiens
gggccatgccttccaggtggcccagacagcccaagccctgcactggatcgtgaggacgctgcgggccagggcttcagctcggaggcggacgtccccactctgggtgagtgggtggccag

SEQ ID NO: 10663 - DNA, 119 bp, homo sapiens
aaaactccctgttttgcgacagacggagttcctgatctatgacccacccttttacacggcagagaggaagacgcggccgccatggaccccatgggagagtgagtatgagccgctgtccg

SEQ ID NO: 10664 - DNA, 119 bp, homo sapiens
tgctcccagcaccctggagccactgtccacgatccagtacaacgtggtggatggcctgagggaccgccgagcttccacgggccgtacacagtgcaggccgggttgcccctgtgagtgtg

SEQ ID NO: 10665 - DNA, 119 bp, homo sapiens
acccctctgcatcccaggaaccccatgggccgcacaggactgcgtgggcgcgggagcctcagctgcttcgacccaaccacacgctgtaccccatggtcacgcggtgagttcatgtgtgc

SEQ ID NO: 10666 - DNA, 119 bp, homo sapiens
tccgcaggtggaggcggaacgaggatggagccatctgcaggaagagcataaagaagatgctggaagtgcggtggtgaagctccctctctccgagcactgggccctgcctggggtaaggc

SEQ ID NO: 10667 - DNA, 119 bp, homo sapiens
tctgtccagggctcccgggagccaggggagatgctacctcggaagctgaagcggatcctccggcaggagactggccgtcttttgaaaacttgctgaagtgcggcatggaggtattcctg

SEQ ID NO: 10668 - DNA, 119 bp, homo sapiens
aggtgtacaaaggctacatggatgacccgaggaacacggacaatgcctggatcgagacggtggccgtcacgtccacttccaggaccagaatgacgtggagctgaacaggctgaactctg

SEQ ID NO: 10669 - DNA, 119 bp, homo sapiens
ccgctatctgcctctcaggcaatgtccggatctctgaccttgggctggccgtggagctgctggacggacgagcaagaccaagggctacgcagggaccccaggtaagggtctgagcgcag

SEQ ID NO: 10670 - DNA, 119 bp, homo sapiens
tctccttctgtctctgcagtgatccgggccaaggtggtggggaagaagctggtaaaggaggggcccttcgcacgctggtctacaccatcaagcagatgaaggtaggtaatgtcatcacc

SEQ ID NO: 10671 - DNA, 119 bp, homo sapiens
acagatgtaccgaggcttcaccaagatgccccatgtgcagtacatccatacggaagcttccgagagtcttgtggccttaagctggaggtcaacaagtaccagtacctgctgacaggtaa

SEQ ID NO: 10672 - DNA, 119 bp, homo sapiens
tctctgggctaggctctggacaaaacaacctctccttgttttcttctttcctcctgtaggtcgcgtctagatggcaagatgtacacggggctgtgcaacttcgtggagaggtgggacca

SEQ ID NO: 10673 - DNA, 119 bp, homo sapiens
gctcaccctctcccagcgcaaggggctgaactatcggtatcacctgggttgtaactgcaaggtaagctcggggtcactgggggaaggaggggaggtgctgacttgcagccctagaaaca

SEQ ID NO: 10674 - DNA, 119 bp, homo sapiens
ttgtgtttttcttcatttctaggccaagatgttcataaatataaagagcatcttatggatgtgttcaacttaatagtaacccatgcgctacataaaggtgagtgtgctaacaatttctt

SEQ ID NO: 10675 - DNA, 119 bp, homo sapiens
taggacctgatcgctgcaaaatgaacccgtgccttaacggaggcacctgttatcctactgaaacttcctcgtatgcacctgtgtgccaggatacagcggagaccagtgtgaacttggta

SEQ ID NO: 10676 - DNA, 119 bp, homo sapiens
cagattttgatgaatgtcactctaatccctgtcgtaatggagccacttgtgttgatggttttaacacatcaggtgcctctgccttccaagttatgttggtgcactttgtgagcaaggta

SEQ ID NO: 10677 - DNA, 119 bp, homo sapiens
gtggtttcctatcccttaggtgtgggccatgattatcagtggataggcctcaatgacaagatgtttgagatgacttccgttggactgatggcagcacactggtaagatgcccttgaaaa

SEQ ID NO: 10678 - DNA, 119 bp, homo sapiens
tagtaagaatcagcagcgcgggcaaggagtacggacgggagtcagaggcagagcgagggtgtgtggaggccggcggggaccgccgggagcgcgcggatgtcggtgttcctggggccagg

SEQ ID NO: 10679 - DNA, 119 bp, homo sapiens
attttattttagaaaccttcagcaaatgtgaagcttggatggccaaggactgttactgtgacaatattacaaatgacaatgcatttggaattatttcatttaatatggtatggacacaa

SEQ ID NO: 10680 - DNA, 119 bp, homo sapiens
ctcaatagcttccctcaatcgcagtgagtgagcccaagggcagaaatgagtctatgcctcttactctcacagggaaaagggaacctatggaatggtcatggtgacttttgaggtaagtt

SEQ ID NO: 10681 - DNA, 119 bp, homo sapiens
caggtagagggtggcccaaatccccctgatgaagatttgagtccagttaaaggaaatatcacctttcccctggcagagcaacagtaatttataacttgacagtactcgatgacgaggtt

SEQ ID NO: 10682 - DNA, 119 bp, homo sapiens
ctctgtgtctccttgtgaagtagctgaactctttagggttgatggaagtggtagtggtgatggggacatgaattcttccttccaactattcacaaacgtggtaagcagtttttccaagg

SEQ ID NO: 10683 - DNA, 119 bp, homo sapiens
tatgacataggggtcgttgaatacaacattgtttgtgcatttgttggatgacaacattcctgaggagaagaagtataccaagtcattctgtatgatgtcaggacacaaggtaattcaga

SEQ ID NO: 10684 - DNA, 119 bp, homo sapiens
gtaattttttcaggatgatgtaccagagctagaagaatatttcctggtgaatttaacttacgttggactaccatggctgcttcaacttcatttcctcccagactaggtatgaggggttt

SEQ ID NO: 10685 - DNA, 119 bp, homo sapiens
tatgcttctatgttttttaagattcagaaggtttgactgcacaagttattattgatgccaatgatggggccgaggtgtaattgaatggcaacaaagcaggtaaggccaaggctgcatga

SEQ ID NO: 10686 - DNA, 119 bp, homo sapiens
ttgcaggtacaaacaatcattattctggaaagttctcaagtaagatattttacttcagacagccaagatatttaatcattgcaagtcaaagagatgattccgaattaactcaggtttga

SEQ ID NO: 10687 - DNA, 119 bp, homo sapiens
gactgagtcccagaagaccattgtgttgcacacacttcaagacacagtgttggaggaggacaggcgtttaccattcagctgatatcaattgatgaggtagaaatatctccagtaaaagg

SEQ ID NO: 10688 - DNA, 119 bp, homo sapiens
gggagtgaccttcacaatggcatcataggattcagtgaggagtcccagagtggactagaactcagggaagagctgttatgagaagattgcaccttattgtcacaagacagccaaacagg

SEQ ID NO: 10689 - DNA, 119 bp, homo sapiens
gttcctacaggtctttgcttggctgttctttcccatatcttctgtgccaggtactccatgtttgcagctaacttctgactcacatgatggcagccagcttaggtacacaggtaggagag

SEQ ID NO: 10690 - DNA, 119 bp, homo sapiens
agattctgtttctggcgtctgcatacgcaagtccccaactcgctgaggagagctgttcagctatggctgtgtcacacattacctgtatctttgccagtttagctggatgctcattcagg

SEQ ID NO: 10691 - DNA, 119 bp, homo sapiens
gtatacatgtgactgtgcagtattctgaagctcaaaaattcttttttttttatttctagaaattccactattttatatctctttgctctgatttccgtgacatggctttggggaggact

SEQ ID NO: 10692 - DNA, 119 bp, homo sapiens
acacatggcctacagacacttctggatgttggttctctttgtcattttcaacagtctgcaggtaagcctacaatttggttagtgacaacatacatttatcttaatgaacacaaggcata

SEQ ID NO: 10693 - DNA, 119 bp, homo sapiens
aggaagccaagggcctaccttgtagacgaaggtgcaaacaaagtcaatgaagccgacttgaagcttaggagttcatctgctttgtttctgtccatcatgggctgtcatgggggagaaag

SEQ ID NO: 10694 - DNA, 119 bp, homo sapiens
gctgacatcccctgtctactcacaatgggattctgttgcagcaccgtgcgctccaggtcaccttgttccagaattcagcagccaccagcagagctacctgcaacagacagaccctcaca

SEQ ID NO: 10695 - DNA, 119 bp, homo sapiens
ctcctcttgggtcagcaggagttcatacctggctctgcacctcccagggtttggtgatggctgagagatacaggcggtcatcatcatggccctgggcacacaggacaccctctatcagt

SEQ ID NO: 10696 - DNA, 119 bp, homo sapiens
actcacataacgatttccttccgtgtctgctccagcatcatgtactgtgtccactcctgttcactctcaatgtcttagactgatccacgatcttttggaacatcgtcctcttcctacaa

SEQ ID NO: 10697 - DNA, 119 bp, homo sapiens
atataccaacttgaaatacagggcgaggtctgtggcaatgattgcaatgtccatcatgtggatggcatgtcatgctgtcgacgattgaggttttgaaagatattcaggctctaaagaaa

SEQ ID NO: 10698 - DNA, 119 bp, homo sapiens
ttggccctcatcctacctcgtctctgagcagtgttttgccaaactccaagtggtgtctttccaagatagggacccatggagcttggccagtgggttctgggatctgaatgagaaagaga

SEQ ID NO: 10699 - DNA, 119 bp, homo sapiens
ctcacttcatctggtagaggttattggtgcctctgtggtcaatgtcatggcagaaagcagcagtgaccaggccaaggcctctaggtccgtgaagtagcgcttcagctttcccgtctgga

SEQ ID NO: 10700 - DNA, 119 bp, homo sapiens
ccataccaccagcagggagaacatggtctgccccacgttgaagccgtgccgccagttgtggtaggtgatttgcggtagcccttactcagggagtacatgaaccgcaccagggcctgtga

SEQ ID NO: 10701 - DNA, 119 bp, homo sapiens
ggctcgtgctgccccggttcagctcaccaggatctcagccagctcctcttcctcacactcccatggctcttcccatacacctctctggttttctgccaggacccaaaatggcaggggaa

SEQ ID NO: 10702 - DNA, 119 bp, homo sapiens
tcatatgactaagactgcaaataaaaaatgacttacctgaaatgcaaaaaagtcctccgcaggcgcattatgatgttgcaaatctgagagcagtgaaggggaataatgaaggtgtgatt

SEQ ID NO: 10703 - DNA, 119 bp, homo sapiens
ctcccccttcaaagttatattacttaccaggccattctgggcaacataagctgggagaccgcttactaagcccaatggtcaggaggtggattcctgtgaaggccaaagacaaaacggtg

SEQ ID NO: 10704 - DNA, 119 bp, homo sapiens
attttgtcttttgacaggtgaaacttacgggatgactttgatgtcctctttgccatgcaggatgtagtcatgaccttgtaaaagttaatttcctggcaaaagagagaaaaattatactt

SEQ ID NO: 10705 - DNA, 119 bp, homo sapiens
tgaaaaggtcagagagaacgtactcttccatccggagtcctgggaccagagtaaggtggaacttcaccctcagaaccggccacacatcaaaaaattcctaggaatgagaaaaacaataa

SEQ ID NO: 10706 - DNA, 119 bp, homo sapiens
gcccaagccccttacctggccacgtcgagtttcacagttgtgcaggtaactcaggtggtacaccttcatattagatttgcaaaattgaggtacttgagaagaatctaaaaatcaaacag

SEQ ID NO: 10707 - DNA, 119 bp, homo sapiens
ctgaagccgttgcattgagaggtgctaagtggatcctctggccagctgactgcacttcttttttgagaaggaaggaatatatcctgactgattgtaagtagcataacttccaagatttc

SEQ ID NO: 10708 - DNA, 119 bp, homo sapiens
ttcatctgacgcccagaaattaccttgtgggtcctctaatttttcaggaaaagtttcattgcatgatagttttcgattggtttaattatgctttcttctaaagagaagacagatggaaa

SEQ ID NO: 10709 - DNA, 119 bp, homo sapiens
taaacttaaaagaaacctaccatgtttatggataaaagccagcccttgcaatatttgatacataatattctgatgactgattcagggaacaacttgtttctgtaaagaaatgaacagtc

SEQ ID NO: 10710 - DNA, 119 bp, homo sapiens
aaaaggatccaaagaactcatggagagaataacagggaaaaacatgaataaaaacatacctgtctttcataattgatagaggttttctttcatatattcaaatataaaataaagatggt

SEQ ID NO: 10711 - DNA, 119 bp, homo sapiens
cattttctctgataacttctttcaatttaataacattggcatgattaagtttcttcagagactgaaaaaaacaaatatgccttaaaatttcttaaaaaaaacttacagaatttggcaaa

SEQ ID NO: 10712 - DNA, 119 bp, homo sapiens
cttctcaggttcttttcatctttaggattttaccttaacttctctcaagttcatgcattcatcccaagatagaactttctcttcatcctaaaataaattagggaaagtttagtgttcag

SEQ ID NO: 10713 - DNA, 119 bp, homo sapiens
ccctgcagcccgctggggattacctgtccgcgcctgctgcttacctcgttcgctcccttgtgaagctccgcgtcttgtgtgtttcatctcctaggaaacggcgggggcagcaggcgggc

SEQ ID NO: 10714 - DNA, 119 bp, homo sapiens
tctccccacagaaccctactcttatgacttccctgaggacgtggcccctgccctgggcacttccttctccacatgcttggggccaccaatcccacccagaagacaaagggtgagtgttt

SEQ ID NO: 10715 - DNA, 119 bp, homo sapiens
ttctctttgttctaggaaagtccaatatgggtggctctcccaagacagctgttgaccatatcagagagacctgaacatcaaccagaagaggaatgactatctgggtgagcccctgccac

SEQ ID NO: 10716 - DNA, 119 bp, homo sapiens
ctcacacccacagatgtctccaagctcacagacaccatctgcggggtggggaacatgtcagcaaacgccctgaccaggagaggacaccctggcatgtcactattaaggtaccaggaagg

SEQ ID NO: 10717 - DNA, 119 bp, homo sapiens
gcagcccaagagccaagagacctgccggggggccctcatctccgaccaatgggtcctgacagcagctcatgcttccgcgatggcaacgaccactccctgtggagggtcaatgtgggtaa

SEQ ID NO: 10718 - DNA, 119 bp, homo sapiens
tgacccttgctcttctccccaggcccatctgccttccctgcacgatggaggccaatctggctctgcggaacctcaaggcagcacctgtagggaccatggtgagtgctgggacttatggt

SEQ ID NO: 10719 - DNA, 119 bp, homo sapiens
tctcttgactatagagaatgaactgctgaacaaacagagtgttcctgctcattttgtcgccttgaatggagcaaactgaacattaaccttaagatgggagtggaggtgagggtctcagg

SEQ ID NO: 10720 - DNA, 119 bp, homo sapiens
agatgacactgtctcctgtcaccctttgctggcaggagaatctgggggagcagttttccttgagcggagttcaggttttttcaggtgagaaggtagaagcttgcaggacccaggggtta

SEQ ID NO: 10721 - DNA, 119 bp, homo sapiens
ctctcccagactccttcatgtacgacacccctcaagaggtggccgaagctttcctgtcttccctgacaggaccatagaaggagtcgatgctgaggatgggcacggcccaggtttgaaga

SEQ ID NO: 10722 - DNA, 119 bp, homo sapiens
cttctgcaggattgcacaacatgggcggggacccaattactgtcattgatgagatccgggacttgctatcattggcaaggatcgcaaaaacccaagggaggattatctgggtgagtaac

SEQ ID NO: 10723 - DNA, 119 bp, homo sapiens
ttctctgccagatgaaagccagtctctgagtctctgtggcatggtttgggaacacaggaagggtaccgataccacaagcaaccatggcaggccaagatctcagtcattgtaagcacaga

SEQ ID NO: 10724 - DNA, 119 bp, homo sapiens
gcgcccttcaaagggacacgagagctgtatgggggctgtggtgtctgagtactttgtgctgacagcagccattgtttcactgtggatgacaaggaacactcaatcaaggtcagcgtagg

SEQ ID NO: 10725 - DNA, 119 bp, homo sapiens
ctgttctccttgtcctttataggcccatttgtctcccctgcaccgagggaacaactcgagctttgaggctcctccaactaccacttgccagcaacaaagtaagacatacttggcaagag

SEQ ID NO: 10726 - DNA, 119 bp, homo sapiens
attcgtccagaggaagagctgctccctgcacaggatatcaaagctctgtttgtgtctgaggaggagaaaagctgactcggaaggaggtctacatcaagaatggggataaggtgagaaac

SEQ ID NO: 10727 - DNA, 119 bp, homo sapiens
agtccttttctctacagcttctcctctccttgcaggtgattctggcggccccttgatagttcacaagagagtcgtttcattcaagtgagtcctccctttcctatctggggagatgccaa

SEQ ID NO: 10728 - DNA, 119 bp, homo sapiens
gcggggctcacatttcggggccggatggggaccctctcgttctccgcactcatgccaggaatgatgacgtcatgcgccgggggccacggaagcccagcacgttggtttcctgggaagga

SEQ ID NO: 10729 - DNA, 119 bp, homo sapiens
tcacatagatcacagctgccagctcctgccgaaggcttgccacattagtgctgtacccacgctgtgggtctgcccgttgtcaaagaccgtgaagcggttccccaggaggttggacctgc

SEQ ID NO: 10730 - DNA, 119 bp, homo sapiens
ccacctcagcttcccgatgaaattctcccctcctcgggacagattggtagggtcgatggagatgaggtattggctgtcttgctccgttttcgtttcctgccagccaagaggaacacctg

SEQ ID NO: 10731 - DNA, 119 bp, homo sapiens
ccccgctcccagcaggtcccagtgctgagacacgggcagcccggcaggacaactcaccgctttctgtgtcggagagaacagagaggctggctagagcaggggccgcatccctggaggcg

SEQ ID NO: 10732 - DNA, 119 bp, homo sapiens
gccccaacctttttgccttttcctttggctttgcccttttgattgctcttctttatcaccgtagctgcccctcctcctcttcttcctccttcctcgcgcctttgggagtgcctgagcgt

SEQ ID NO: 10733 - DNA, 119 bp, homo sapiens
acctttcttcttcagggctttcttgtcaggactgccttccccaaccagaaacatggctgctgggctcttctcgcactggctgggctccctgaggggtccttgtcggcctccccagaccc

SEQ ID NO: 10734 - DNA, 119 bp, homo sapiens
tgggctcacctttcttcttggtctttctcatcttggtcccctcccctgctggagcttccttattcctaaacgcagaggtttcggtggggggtcagggcttcccaggtctcctggaaatg

SEQ ID NO: 10735 - DNA, 119 bp, homo sapiens
ctgcaccccgcccacctccgggcttccggggcttggatcccgtggggcagggggattcgggggcctccgcctcttcttccttagcctctgtgccggggcgggtcgctgcggaacggggg

SEQ ID NO: 10736 - DNA, 119 bp, homo sapiens
tctttctgcttcctttccaagtggggtggcatacctgtttggggcgccgcggggcctccgggctcaggcttcttcttcatgcccactgagggtagcaaagggatcagcctgtctccctt

SEQ ID NO: 10737 - DNA, 119 bp, homo sapiens
tcaggtgccacgaactgggggccttccagacctgtcagaggcccacacctctcggagggtttcatcccgagaggcatggtgcctttgcctatcgcacccctttctctgcaggtctagga

SEQ ID NO: 10738 - DNA, 119 bp, homo sapiens
tcttccctcccaggccattcgcgccattaacccctgcagcgataccaccatgactgcagaggagttcacgatacagtgttctccaagattgacgtcaacggggatggtgagggggccga

SEQ ID NO: 10739 - DNA, 119 bp, homo sapiens
ccatctccattctcatccaccaggaggaagatcctgtccacgacctcctcgggtgtgagcagctggcctgctcagtttgtagctctcgccggcaggctttcttcagctggtaaattccc

SEQ ID NO: 10740 - DNA, 119 bp, homo sapiens
tcttcctctaacagagcatacttgcgtgtgatggcacttagaacgcgtagctgggaggcccggtcctcattgcccccacaaacaccagcttgtcaaatctttagggagataggcaggta

SEQ ID NO: 10741 - DNA, 119 bp, homo sapiens
acctgccaggccgcagaagggcagggtccaggagatctggtctgttggtggctccaatcacaaacacatctgagtgctgtgcagcccatctagctcggcaaggagctgagacaccaccc

SEQ ID NO: 10742 - DNA, 119 bp, homo sapiens
ccctacctgtccatcactcctccagaatctccacttcgcccccggcttggggccaaagagtccagttcacaaagaagataatgcatggagctgcagccctggccctggcaaacactgaa

SEQ ID NO: 10743 - DNA, 119 bp, homo sapiens
ggacgccctgcccctccctgctcactcaccttcccgcacattctcctcactttggcccacatacatgttatgagctctggccccttcacgctgagtgagaggatgtgagaaggtgagag

SEQ ID NO: 10744 - DNA, 119 bp, homo sapiens
tccggtgcccacgtcctcttaccctgagttcttgatcctggtgcaggctgcccggctgctgtgggtcagagggcatagagatcccctaccacaaagccctagggaaccacaggaaagga

SEQ ID NO: 10745 - DNA, 119 bp, homo sapiens
tcaccttcagtaagtggagcccaaggtgactacaggcagcagcaactactgtggtcttcccacagcctgggggccccgtagaaggacactgctagttcctgtcagcagggcacccctgc

SEQ ID NO: 10746 - DNA, 119 bp, homo sapiens
gggcctcaccatgtacaaggaggtatgggtggtgtcggccaagtaggcactggctggtccatctggagctccccaactgttttcttcactttaaaaaacatttcccgccacctgcagga

SEQ ID NO: 10747 - DNA, 119 bp, homo sapiens
cagaaggcagctgcatacctgggcagtttctctggacttccttccaggatctctacttgcccaattgttgcacacatagaacatccccttcctggactaccctgcaacacagcagtggc

SEQ ID NO: 10748 - DNA, 119 bp, homo sapiens
acctacctgagaggcatgggaaatctctgtgtctttcttctgtactggaggttttccatctgcagtcattcaatcatacaaacaactccagggctgccaacaggcgttgtgtagctaaa

SEQ ID NO: 10749 - DNA, 119 bp, homo sapiens
ttacctgcaattgttaatgtgatagtttttcactgccttggatggaatgaaagatctccagttatttattctataacttctatgcagccagtaaaattcttgactggtacaggcatctg

SEQ ID NO: 10750 - DNA, 119 bp, homo sapiens
aataattatcttacctgataagcagtgtatacttttgcccgttgtccactctaacagtagtattaatgctttaaattttgcttcaccaggacagtaaaagtggtactgttgggggaaaa

SEQ ID NO: 10751 - DNA, 119 bp, homo sapiens
accataaatccaggtgtgcataaacatgtcgagccaggttcattctccatgcagagttcatgaacacatagttgggaatgcactcaagctcattctcacagtggtgtccagaccatcct

SEQ ID NO: 10752 - DNA, 119 bp, homo sapiens
gaataaaattataagacttacattaattttgatcttacattgtgtgctagtcccatctgcatcacatgacatggatattcattaataagttctgtgcacctgaaacacagaattagaat

SEQ ID NO: 10753 - DNA, 119 bp, homo sapiens
tctcacctgtttgtcagatccacacatgttccattatttttgcaaggttcagaggaacattcattaattcaatttcacacagagatccagaaaacccaggtctgcaaatacacctttta

SEQ ID NO: 10754 - DNA, 119 bp, homo sapiens
agttttctgtacctgaaattgttgaccatatcttcacagtcaccataatcctggcaggaaaggaagaggagtctttcacatcaatttcacagtttttaccttcaaattctgcaaagagt

SEQ ID NO: 10755 - DNA, 119 bp, homo sapiens
ccaaggacactgagcactccaagtaatttcatgaagaaagctaaaaatatgttactcaccgatagctttgtaaaggtcagtacaggtggaattgttcttgcaaggattcattttacact

SEQ ID NO: 10756 - DNA, 119 bp, homo sapiens
cattggattcttgttcacaaaaatttccttcccaatcagataggcacacacactggtagctctaagagatatgaaattatatatttttaggctatttcttactattaagcctataatac

SEQ ID NO: 10757 - DNA, 119 bp, homo sapiens
ataggtgttaaattatattagtccacatttaggtatataaaaagccagtggatactaacgagatgcaggctttgcaggtagaattgtgctcacaggcattcaggatgcagtcatcaatg

SEQ ID NO: 10758 - DNA, 119 bp, homo sapiens
tcctgttcacatcttatcccaacatagcctggattgcataagcaggaaaagccatcaaccactggaaacacagaaaagagaaaactcttaacattcctttaaccttagtacaggtaatt

SEQ ID NO: 10759 - DNA, 119 bp, homo sapiens
tacctttaaatggaggcacacactggcagaagtaattaccaggttggtcaatgcaggtggctccattttgcagggatgtgaagcacactcatctatatcaatttcacattgcgtacctt

SEQ ID NO: 10760 - DNA, 119 bp, homo sapiens
tactttgaatcttccaattatattgaaacaccattcttcattcagacagttgatgctgagcagtttacatggtcaattgctttctcacagtttttttcagtaaatcctgatatacagct

SEQ ID NO: 10761 - DNA, 119 bp, homo sapiens
tacctgaaaattgctcatcacattcacaaatgaaactatttgaagtaatattgctgcagtttccatggaacagacatgtggttgacactggccaattatttctgagcaattctttccta

SEQ ID NO: 10762 - DNA, 119 bp, homo sapiens
tacctcaagtacacaggttccgttgctgtttgagatcagtgttttatttgctaaataaatatggagcagggatccagacttgactccccaggtgtaagagaagagtgaggcacaaagct

SEQ ID NO: 10763 - DNA, 119 bp, homo sapiens
tcaagtataacttaccccaaccattagccaaggaggcttgcaaccctaggaggcttctgattacggttatgtctggacatgcctagcgtgtatcactttgtttctcagaagcctaatcc

SEQ ID NO: 10764 - DNA, 119 bp, homo sapiens
tcagctatacaacacacttacctgggagacctatagctccaggcaaaccgttgggacctcttcctggaggccacgctcccccttttctcccaagtcacctgcattacattaaagaaatg

SEQ ID NO: 10765 - DNA, 119 bp, homo sapiens
gtggaaaaagtcaaaccattgtgatttatttaccttgtatgactctcatgcaaacctgcttaatgtgctatctgtcggtgctctaccctgggacagaaaagaaaaaaaggcagtttatg

SEQ ID NO: 10766 - DNA, 119 bp, homo sapiens
aatgtttttaatttttttataccattactattcaccatacttacagatccctttgggccaggtaatccttatctccctaaatcaataaaagaaatttatgttagaacaatgtattcaca

SEQ ID NO: 10767 - DNA, 119 bp, homo sapiens
gtaaagcttcatcattaaccagaaaaaaaaaatcttacaagttcccccctttctcctgcttcaccttctcaccagaggcaccctaaaaattaagataaaaggttacattttaaaattct

SEQ ID NO: 10768 - DNA, 119 bp, homo sapiens
atcaaacattgcattttataccaattaaataataagactgacctgttcaccctttggacccggttcaccactacaccctgtaataaataaaatataatactttttcagtattttcaact

SEQ ID NO: 10769 - DNA, 119 bp, homo sapiens
cttctggagtgctggagctcttaccctgtcacctttcattccaggaagtccagggggcccaggcaagccgggaggccagggctacccagagaaccctggaaagcaaaaacaaagtcccc

SEQ ID NO: 10770 - DNA, 119 bp, homo sapiens
tagaaggcaaataaacgaaacttttctacttaccagtttacctggtaggcctggggatcccactggtccaattctcctctactgccctgtaaaaacacaaacattgtcaattggatatt

SEQ ID NO: 10771 - DNA, 119 bp, homo sapiens
gtgctttaggaaagaacagcaaggaatactcacaggaagcccctggggtcctcggggtcccacctctccggaggcccctgttggccctgttatcaggaaggaaggtagaaaaaaagtta

SEQ ID NO: 10772 - DNA, 119 bp, homo sapiens
tagaacttcaggagaggtaaaatggtgtcttaccggtttgcctgaatttcccatctgaccaggcttcccggagcacctgtgctaccctaagggtaaaatgcaacatccaaaataactca

SEQ ID NO: 10773 - DNA, 119 bp, homo sapiens
ttaagaaagatattaacttaaattttaaaatattttaccttttcaccagcaacaccctttgcaccaggattccaggtacaccctaaaagaatacatacacaatcctagtttaatcacct

SEQ ID NO: 10774 - DNA, 119 bp, homo sapiens
aaccaattaacatgtaaagaatcaaatacttactggtaacccctgcaatcctgcatcaccaggaggcccggttttcctggttcaccctgcaaaaaaagcttttatcacatgattgaacc

SEQ ID NO: 10775 - DNA, 119 bp, homo sapiens
ccactcactcttggagtaaattacacagcctacctttgttccaggcattccagggatcccatcacggcctccacacctggcaaaccctaaacacacacaaagaaacatactgtctctta

SEQ ID NO: 10776 - DNA, 119 bp, homo sapiens
aaatgtgcttgatgactacagctcaggacataccgtgtctcctttgggcccagggagaccaggaattccctagcaccttcagccccctgcagggaggaagagaaagaatagacaagaca

SEQ ID NO: 10777 - DNA, 119 bp, homo sapiens
caggaggcttggagtgactgaatttaaactcactctatctcctttgggacctgcttctcctggaggtcccgctgtccttgatcaccctgtatgaaaataaaattttgttaatacaagaa

SEQ ID NO: 10778 - DNA, 119 bp, homo sapiens
atcattgggttttgtggaaggaaaatcacttacaggtgcaccaggaagaccctgaggcccaggttcacctctaagccccgagcaccctgcaaaaaaacaagacaatggaaaaaaactga

SEQ ID NO: 10779 - DNA, 119 bp, homo sapiens
tttggtattatattattgtcatcaccatcttactttttcccctttgtccccaactatgccggtgatgcccgcaaaccctgggctccctggaaatgtgaaaaagagaagtgaattatttt

SEQ ID NO: 10780 - DNA, 119 bp, homo sapiens
tcctagttaaatattttttaaaaaatactttactggaggtccttgagctccaacttctccgagttctcctggtcaccttcttcaccctaaagaaaaaaaagaaaaaagaaaagcacacc

SEQ ID NO: 10781 - DNA, 119 bp, homo sapiens
acaatttatccactaaatacccattttccttaccttgtgtccttgtcttcctggttcaccaatttctccttagcccctttatgaccctaacaaatgcaaaataagtaattgtcttgagt

SEQ ID NO: 10782 - DNA, 119 bp, homo sapiens
tactcttaaaatactggaagttattctcttaccctcatgcctggtaggcctggatatcctgagcgacctgtggacaggcattgggacactgccagggagagagggaacaaagagaaaga

SEQ ID NO: 10783 - DNA, 119 bp, homo sapiens
tctttgaattaaaactatattttgttcaaaggaaagcatcttaccaatggatctccatcatgaaagccattgttccctaaagtaaacaaaatattaaggttcagaatacaattaaataa

SEQ ID NO: 10784 - DNA, 119 bp, homo sapiens
cacaaacagaaattcaagctgcaaataacttactctgggtcctggggggccaggggggccaggtggtcccttctcccagggtcaccctaagttatttgaaaattgcgacacagtggtta

SEQ ID NO: 10785 - DNA, 119 bp, homo sapiens
caaacgtctatcaaagtgcactgtggtactcacaacaggtcctacacggccaagctctccagggagtccgctgtcccaggaggaccctgaagtcaacaaatcaaagcaaatggtcattt

SEQ ID NO: 10786 - DNA, 119 bp, homo sapiens
ggacatttttatagactgcataaaaataaatgatgaagtgatacttacagggggtccaggaataccacgccctaaaagagtacaataaaaatggttatagcttgaggtttatacttagt

SEQ ID NO: 10787 - DNA, 119 bp, homo sapiens
aagataggaaattttcaattctgtagctttacatttacttactggaaatccacgcgatccaggcacaccggttctccctaaaaataaaaatagtttcattgtactgacctttcatatca

SEQ ID NO: 10788 - DNA, 119 bp, homo sapiens
gtactagcaattaatgccagatggctaacttactttttgtccctttgacccaatggagccaggggatcctcaggtcctgttaatccctaatagagcaagacaatgatgttagaactatc

SEQ ID NO: 10789 - DNA, 119 bp, homo sapiens
gggcgccctcccagcactcgcctactcacatcagcgccaggtgtgccaggcttgcctggagctcctggcttcccggttcacctgcaggaccctgagcaggggcagaagggtgcgggggc

SEQ ID NO: 10790 - DNA, 119 bp, homo sapiens
taaaggaaggaagtggagcgccatatgctccaatcaacttaccggggggcccggggggcccttaggacccggtcaccctggaggggtaggagaaaaagagagagcagtctatgagcggg

SEQ ID NO: 10791 - DNA, 119 bp, homo sapiens
gtggcctggagatagaaacttacgtcgatgccatcgatgcctggaactccaggggggcccggaggcccggaggaccctgctcacccgggggacctctctggcaaaaatagcagacatag

SEQ ID NO: 10792 - DNA, 119 bp, homo sapiens
tgtcctcgtgtgcgcttgaaaaatgcaaacactccctgcccccaacttacctcgtcggtggtctggctggctggagaagaaaagatggggagaaagtgagaaaagcacccctcaaactc

SEQ ID NO: 10793 - DNA, 119 bp, homo sapiens
ggtagtcaggggactcaccgttattctggctggcagctcatggcaagtttctctcctgggccgcaggggtcacaatggatcagcatccattgaagttcaaactggagaaaggtagtaga

SEQ ID NO: 10794 - DNA, 119 bp, homo sapiens
atagggtacattgctactcacctggtaagtcatcttggccaatcctgatctttggacagagttcatttcaccattagaattggaattgacagggaatcctgcaaaagagatagcatgtc

SEQ ID NO: 10795 - DNA, 119 bp, homo sapiens
agtctagaaactatggcccttactggggcgacgcttgacagctgcagatgcccagggttccaggaaactcacacaaagaagaaaactggaattttcctgaagaagagagaagaaaaatg

SEQ ID NO: 10796 - DNA, 119 bp, homo sapiens
ctgtctatcatgcgccccaggtgtgttgtcagggacatggcgaagcctgctgcctgcaaaacaccaagaatgctgaaaaccagccccaccaaccttcaccgtgagtatggcattggttt

SEQ ID NO: 10797 - DNA, 119 bp, homo sapiens
tttcttttctttgtcttctttctctactctgcttccttggatgctttcccaaaggaggacaaagtggttgaatccatactttcttttctatcatttgttattgtattgttgtgaacttt

SEQ ID NO: 10798 - DNA, 119 bp, homo sapiens
cttttcattctttttgtattgcacaggtgatttggattattactggttggatcctgccacgtggcacagcgggagacatcacctattagttcggtaagttttctggaaagtgtgtttgg

SEQ ID NO: 10799 - DNA, 119 bp, homo sapiens
aacagcatcctgtaacgtggcaaccatctaaagagggggaccgattaattggacgtgttattcttaacagagaacaaccatgcccaaagactcaggtgcattgctgggtctgaaagtaa

SEQ ID NO: 10800 - DNA, 119 bp, homo sapiens
aattatccaggttgttggaggaaaaatgactgacttaggacgacttggtgctttcatcaccaaagtaaaaagggtagcctagcagatgtagttggacacctaagagcaggtaaagtttc

SEQ ID NO: 10801 - DNA, 119 bp, homo sapiens
aactaatgggattttcaccatatcctgtttcttttagtgacattccccggattcctgagagctcccacctccactggagtccagtgagtataaggtttctttgttattataaaagtatt

SEQ ID NO: 10802 - DNA, 119 bp, homo sapiens
ttaggttcaagttcctttgaatctcagaagatggaaaggccttccatttctgttatttctccaacaagtctggagctctaaaagatgccccacaagtcttaccagggcaactttctgta

SEQ ID NO: 10803 - DNA, 119 bp, homo sapiens
tctctttgccttactgttgtgcaggatctcagcgaatcagtgatagtgacatctcagattatgaggttgtgatggtattggcgtagttcctccaggtgcgtgggtgaggagcatgaccc

SEQ ID NO: 10804 - DNA, 119 bp, homo sapiens
ttcactcaccacccatcctgtctgtgcagtgagcttcttatgctgcccagagcaaaacgaggacgaagtcagaatgcctacatactaccaggtaaatacagggatttggtaatggtgac

SEQ ID NO: 10805 - DNA, 119 bp, homo sapiens
gtttgtgttgctacgttccagacatcttgttaggcactataaaacattacctcccaagatgcctttattcagagcagttctcactggaatatttacaggtaagagccctaacagtgagt

SEQ ID NO: 10806 - DNA, 119 bp, homo sapiens
gagctcaattctgcctgcacatactaagaccaaatcagtgactagacaggacatttcccttcatcatgatgctttaactcaacagtattgagatttactgatgaaatactggttaggta

SEQ ID NO: 10807 - DNA, 119 bp, homo sapiens
atgcactggcactagtgaactgcagccctttcttgacagggctaggagtgctagtaccaactgcttgagccagatactagtttgcattcaccagaacgagaaaggtataaaataaagac

SEQ ID NO: 10808 - DNA, 119 bp, homo sapiens
tgttcactgggcaaacaggggtagatggtccccctccctagataggagacgacctcctagtcccaggatcaaatccagcatgcgtctccggagaatgacaggtactagtcaactcctcc

SEQ ID NO: 10809 - DNA, 119 bp, homo sapiens
tgtgtttaacatttcattccacaggcactccagaaagtctgaaagatctagcatccaaaaacagactagaaaggcactgcctctgatgcagaaaggtaggcttggtgttgtggtgtgct

SEQ ID NO: 10810 - DNA, 119 bp, homo sapiens
gcagaatgcaccgacagagaagtccaacacaatctcctccagcagacacatcgttcagcagtcgcagggaagacagctcccacaagtgccagtgagaagcggcagtatagaacaaggta

SEQ ID NO: 10811 - DNA, 119 bp, homo sapiens
gcagcaagcttagtagtggaggagcgaacaagacagatgaaaatgaaagtgcatcgatttaagcagacacagggtctggttctagtcaagaacttgatcgcgagcaatattccaaggta

SEQ ID NO: 10812 - DNA, 119 bp, homo sapiens
atagtttaatatttcctggagtgcgactgggagctgacagtcaattcagtgattttcttgatggattggaccagcccagcttgttggccgccaaacccttgccacccctgcaatgggta

SEQ ID NO: 10813 - DNA, 119 bp, homo sapiens
catttgcaggtgatatacaaataggaatggaggacaaaaagggccaattagaagtggaagtcattagagacgaagcctcacacaaaagcctggttccaaatctacacctggtaaggaga

SEQ ID NO: 10814 - DNA, 119 bp, homo sapiens
tatttaccataccattttttcttaatgcaagttctttctctttatttggagaggactttggcagacgatagaatatatattttttatatccagttctctctccttttcctgaaaacaaa

SEQ ID NO: 10815 - DNA, 119 bp, homo sapiens
agtatttttaatgtacttaccctgacttcatgaacattattagaataatccacactctggcaaatatagtatatcccgcattatatgatcccatgaataactggaaaaagagtaataat

SEQ ID NO: 10816 - DNA, 119 bp, homo sapiens
cttttctgcctgcttgcttgttcttcctcatccgtgtatccattatgtgtccttggtcctcatggctctttcttttctcatttcagaactataggagggaaagatcagaaacaaggagc

SEQ ID NO: 10817 - DNA, 119 bp, homo sapiens
cactgcaaattattttgaagaagttgcttactgtgtcatagattctgagcctagtctgaagtcctgggattgttcttattgattgattgctgtggaagaagaggaaaaacaagtagtaa

SEQ ID NO: 10818 - DNA, 119 bp, homo sapiens
aaaacatttaccttttgaggagctggagatttttctattttagttttttcctcagggcttaaaggagggatcgctcctttatctcaggaggcagttcttgatacagtgctgaaattgga

SEQ ID NO: 10819 - DNA, 119 bp, homo sapiens
acttttaacaacgtagcaacagactgtcttaccgttggtgctgtatctacctgatggttacaaggcttttttctatgctgataatccctgtggaaagaaaacattgtgagtatttggtt

SEQ ID NO: 10820 - DNA, 119 bp, homo sapiens
catcaacacaacaagcatctgaacatttaaaagaattgtcaaagtaagaaaggggctcaccggtctgaggaaaccaaactgatgtagaatctcttgagcggtcagcatgtttgactgct

SEQ ID NO: 10821 - DNA, 119 bp, homo sapiens
ttaacttagactgttgtgaggaaactgctggtggtgaagtaaatgagagatttttgttgacctgtattagaaaacaaatcagaaactacagtgtaatttcctggattactaatgcaaaa

SEQ ID NO: 10822 - DNA, 119 bp, homo sapiens
atcactatacctttgaagttatcttcctggtaataaaaactacttacttttgcagcacaggaacgtatccctcctaaaagaaatacaataaaataaggaagtattcataatttcattaa

SEQ ID NO: 10823 - DNA, 119 bp, homo sapiens
catccggagatccataattctcaaagtactgtctttggtatggattaacaaacgttttccattgggatgatctccaaataacttattggaattcccttaaactcagtttctttaatttc

SEQ ID NO: 10824 - DNA, 119 bp, homo sapiens
tttataccttatttatagtccagtggtgcactgaatgttccaaatcattaatcttgacataggtattccaacaacaatcacccctgtacaatctcctgaatacatatgatgacctattt

SEQ ID NO: 10825 - DNA, 119 bp, homo sapiens
tgaaaaacataccttaagaaatgcccaggcaattttccgaaagccacattcttggttttgaacctcagattattcttaatttcatccacgcttaagaaatcaagaatctgcaaataaat

SEQ ID NO: 10826 - DNA, 119 bp, homo sapiens
cttcttcaggctgttagtgttagcagtacttacatcatcacttgtagtttctttcatatagtgaagattcttctaatagtgtcaggctaaaaaggaagacataataaagtttcagctaa

SEQ ID NO: 10827 - DNA, 119 bp, homo sapiens
ttatacataaatttcatagaagtcttacctgtaggcatctctcagctttatgcagaggactgagaatgcaagcattgactcaatcaggatcctatcgaaacaaaggagatgtatttgta

SEQ ID NO: 10828 - DNA, 119 bp, homo sapiens
ggctcttataaatataacaaattgatcaccttttctcagacataattaagaaggctttgacaggttgaaattcagccccaggttgacactctaaaaggaaataaacacactcagtacac

SEQ ID NO: 10829 - DNA, 119 bp, homo sapiens
aagggatgaccttgattttttttctctttaggctgtggaaccctactaatattggatccagatgaagctggctaaggctttttagaaggtaagggggctgaaattattaaaggtatata

SEQ ID NO: 10830 - DNA, 119 bp, homo sapiens
aacacttttcaatgtttttaggtgtatagtgttgattggagccaaaccagaggtgaacagcttgtggtgctggctcatgggatcaaactgtcaaattggtatgttagcattattgtatt

SEQ ID NO: 10831 - DNA, 119 bp, homo sapiens
ttgtagtgggatccaactgttggaaagtctctgtgcacctttagaggccatgaaagtattatttatagccaatctggtctccccacatccctggttgttttgcttcagcctcaggtaaa

SEQ ID NO: 10832 - DNA, 119 bp, homo sapiens
ttactaggtgatcagactctgagaatatgggatgtgaaggcagcaggagtaagaatcgtgattcctgcaatcaggcagaaatcttgagttgtgactggtgtaaatacaatgaggtatag

SEQ ID NO: 10833 - DNA, 119 bp, homo sapiens
tagaatttgctggtgaccggggcggttgactgtagtttgagaggctgggacttaaggaatgtacgacaacagtgtttgaacttcttggtcatacctatgctattaggagggtgaaagta

SEQ ID NO: 10834 - DNA, 119 bp, homo sapiens
aaagggttttttttttctttttttttttgtagttttcaccatttcatgcttctgtgctggcctcttgctgtatgattttactgtaaggtacagtggtttttaatacatttcattgtgaa

SEQ ID NO: 10835 - DNA, 119 bp, homo sapiens
atcttcacagattctggaacttttcaaagcctgactctcttcttgaaacagtggagcatcatacagagttacttgtggtttagacttcagtcttcagagccccactcaggtaacggata

SEQ ID NO: 10836 - DNA, 119 bp, homo sapiens
tttgattagaaaacgttgtgtgacgtgatcctcatggtccaggaaagaaagatacctgctcatcgtgttttcttgctgcagccagtcatttttttaacttaatgttcacaagtaagtat

SEQ ID NO: 10837 - DNA, 119 bp, homo sapiens
ctcttcattgtagctaacatgcttgaatcaaagtcctttgaagtagaactcaaagatgctgaacctgatttattgaacaactggtggaatttgcttatactgctaggtgagttaagtat

SEQ ID NO: 10838 - DNA, 119 bp, homo sapiens
aattttttcagatggactgagctgtgtccaatgattgaagccaggaagaatcatgggctggtatttgtaaagacaagatatttgctgtgggtggtcagaatggtttaggtatgtgatgt

SEQ ID NO: 10839 - DNA, 119 bp, homo sapiens
ggatattgttatcatcaggacgacctcaccttacgtccttttcatgtcgtttattgtctcgtatgatgtatacatgggatcttcatgtgccttaagggtcagagaaggttaaggtttgg

SEQ ID NO: 10840 - DNA, 119 bp, homo sapiens
tggactttacttaccactctgaactgctctaacttttggttgcctttgataaagaaagggcattctttgcacccgttcggtgaccatagcgtttgcaacgccaacctaaaaacgaaaag

SEQ ID NO: 10841 - DNA, 119 bp, homo sapiens
aagtatgtcttgtggaataaccaagagtacaaacttcacactaaccttgataagcccaggaggaggttttcgtaactggaaaacaaaaaacaaaaccttatcaaccatgttaatgtaaa

SEQ ID NO: 10842 - DNA, 119 bp, homo sapiens
aactttaaaaactttctctgtttttcagaggtaccgaaatgctacatttggctgtgttacattctagaaactttgtgtctactctgtctcaggtaagaaatatttttaccaatgtagaa

SEQ ID NO: 10843 - DNA, 119 bp, homo sapiens
taggaaccttgggtaatgtggaacatgggaaccaatgtcagatgaaattgatgtatgaacataatcttcgagaacagcctgcaatatgacctatggatcatttggtggtgtaaaaggta

SEQ ID NO: 10844 - DNA, 119 bp, homo sapiens
taaatttctttcatacaggtaccaggtacttgcttttgcaacagatgcagataaaaggcaggagactgacagcaaaaacttggttctggaaaaagactagttgtaaggcctttttttaa

SEQ ID NO: 10845 - DNA, 119 bp, homo sapiens
tttttctttttttaaatcacaggtgtttggcccatgactgagagagaagatgacttgaacgtttctgtctggtttctcctaactttgattcagtttctgtaggtgtacttgcagatttt

SEQ ID NO: 10846 - DNA, 119 bp, homo sapiens
ttctttcttgccttctcaattctgtgtttacagcaagcgaccgatgttgaggtgggaactgaccttgtccttctgtcacggtgaaggtattgtaccagattttagactgtaatgtgcaa

SEQ ID NO: 10847 - DNA, 119 bp, homo sapiens
tttccttaggtcacactgcagaacagagtgatattgcaaaaagccaaattatcagtctacgtgcaaccacattagaattgacttgtgatcagttcacctttgaatttatgagtaagttt

SEQ ID NO: 10848 - DNA, 119 bp, homo sapiens
gcttatagcaccagatttgactagaacagtaagcttttctgtttatctgaaaagaagttatacaccatcgaattggaaggaaatgctgttgtttcttattccagaccaacaggtaaaca

SEQ ID NO: 10849 - DNA, 119 bp, homo sapiens
atttgttgccttcttttccccctacccatttttgcattgcctgtgatggacagatcgaaatcctgatggaagtgtaaagataatttagaaaaaaatgaatttcagaactgaaatttgat

SEQ ID NO: 10850 - DNA, 119 bp, homo sapiens
ttttctttgtaggttttgccagtcagtcagatgatgatcaggtgaatgtaatgggttttcacttcttagaggtgctcgaattactgttcttgcttccaaaacttctcgtaagtaaaacc

SEQ ID NO: 10851 - DNA, 119 bp, homo sapiens
actaggtggttgtactacaatcccagagtcagacctagaagaaagatcagtagaacaagactctacagactgtttaccaaccacagacatctcactgcagagacacccaggcctggtaa

SEQ ID NO: 10852 - DNA, 119 bp, homo sapiens
attgtcacctgatcaggaggaggacagtatacacatttatctagtcgaccaggcctaagcagggcagggcaatcaagtcagggcgactagtagcagccaatacataaacacctagagga

SEQ ID NO: 10853 - DNA, 119 bp, homo sapiens
actttaaaaacattcataggctaccaacctaataaaaatatcccgaacagcttgttcacttgctccaattatttgctgagtaactctggcccctattgggtaaaataagagttgagata

SEQ ID NO: 10854 - DNA, 119 bp, homo sapiens
ccatactcatacctcgtaaagctttacagtcaactctctccacatgggcatccagtttgtcaaatgctttttacagattgctttggctaaagttgattttccacttccctagaaaataa

SEQ ID NO: 10855 - DNA, 119 bp, homo sapiens
tttggccataacttcttaccccaaagagctcagctttaaaaaaggaagaataaagtcaatttcctcactttttcttcttttaccataggatctagaaggacctacagttgcaaggaaaa

SEQ ID NO: 10856 - DNA, 119 bp, homo sapiens
gctattacttgtattgtagtcttctgcagcaaattgggactcaacagaaaaatatttttatctttttcttttcccaagaatgaactatactcagagaaaattccttcagtcctattaaa

SEQ ID NO: 10857 - DNA, 119 bp, homo sapiens
taaattctctctaggttgtaactttagagatcttggaattttaggggtaacttccactggagttatcctactacggcatgcatttctatatttagtctcttcctcaggtcatctggaat

SEQ ID NO: 10858 - DNA, 119 bp, homo sapiens
taccaatttggataaatatgtacgtttgttgatcaacccaaacaggaaaaatggcttttggaaaaactatcgaatttgatctagaagatgttgttcaagggaaacagcatgcagctcct

SEQ ID NO: 10859 - DNA, 119 bp, homo sapiens
ttatttggttttctttaccagtatctcccaatcatctgctgagaggggttccacctcaacttgttgacagataccacatgggaacatggcttgagaaatacctagaaaaaattaaaaat

SEQ ID NO: 10860 - DNA, 119 bp, homo sapiens
acttacctctctctgaaaaaaattccaagcatgagtaagccaccgatatctaggtaatccataatttgtatcctggctttcaaagtgaccatatctgaccattgtactggaacctggtg

SEQ ID NO: 10861 - DNA, 119 bp, homo sapiens
gattatatctattttgaactcaccataagttcctgttcatatgtccaaacgccacaagccagttctacaagaaaatgacaagcaaacttccaaagtactgtagaaaaacagaaaagtat

SEQ ID NO: 10862 - DNA, 119 bp, homo sapiens
caataattataaagtatacctcgtttctgcagttaaagtgagaacattatttaggtagtccctcatccagcagaaactgccaacacactgatggacattaactggggagaaaaaagtac

SEQ ID NO: 10863 - DNA, 119 bp, homo sapiens
ggaggccaccacacttacgagtgcaggccatggacaccaccctcaatctgggccgacatggtccgcttccaaacttgagctctcctgagtacatcatggacctaggaggaaggtaggtg

SEQ ID NO: 10864 - DNA, 119 bp, homo sapiens
cctgacacccaccttcctgggtgatgcagatggagccgcagcccatgcccacgcgcagcccgtccacacagcatcaatcaggttcttggcctgggctgctgtcaccactgggggtgggg

SEQ ID NO: 10865 - DNA, 119 bp, homo sapiens
cgaccccgcactcaccgttccccccaatcacctggaggtgggggtacttctgtttgatgtaatgcaccaggcgatctgatacaccgaattcccttgggacgagtcctgtgagaaaggac

SEQ ID NO: 10866 - DNA, 119 bp, homo sapiens
actagctccctggtacctttcttgctacgctgcaggatctcatttgcctctttcaacgtcacacctgctgagccaccaccagttcaatccttggcgtcatcacctgtggggccaggaac

SEQ ID NO: 10867 - DNA, 119 bp, homo sapiens
ctggggacaggcctggtacttgccttgaccttccgcacctcgttggcctggaactctggggtgcagttgggtgaatgaaaccaatacctcccatcagctgatgtagaagggaagtgtgg

SEQ ID NO: 10868 - DNA, 119 bp, homo sapiens
gtaactcacagccatggcaatggccatgtcagcctctgtcacagtgtccatgggggaggagatcagtgggtcttcagcgtgatcttccgggtcagggctgaggtcaggtcctgaggatg

SEQ ID NO: 10869 - DNA, 119 bp, homo sapiens
cagccccctccccttgtcaaaggaagaggtactcaccacctcatcagctatgaagtctatgaatcctggagaatcaggaagtcgctgtgaagacagagaagtgagtgttattagtgggg

SEQ ID NO: 10870 - DNA, 119 bp, homo sapiens
ccggcgcttacttgtaggtgaggccgtcggcgctggcgaagagctgctgcgcggtgagcccatcctcggcacgtagccggtgccgccgctgatcaggtagtccgccatgctgccgcgag

SEQ ID NO: 10871 - DNA, 119 bp, homo sapiens
aggaggggagagtgtcctcacctagccctgcgaaggcgatccatctggacaccaacacctgccagtaagccactgaagatagttctaggaggaaacagctaaggaggggtaagccaagt

SEQ ID NO: 10872 - DNA, 119 bp, homo sapiens
ccagcaagcactgtttgaaccccaggagttggagccacctgaacggggtgtcgtcgggtgtgtagcgagtccaatctagggctaagattttagggaaggtttttacgacctgttccctc

SEQ ID NO: 10873 - DNA, 119 bp, homo sapiens
gcggcggcgggggcggggctggcctcacccggaatgaaaacaaacggcggccgctgccgcatccgggcatctgctggtcgcggcgggagtggcgtggcgcaggtgaggacacggcggcc

SEQ ID NO: 10874 - DNA, 119 bp, homo sapiens
gggatggcacaaaagaaatatcttcaagcaaaattgacccagtttttaagggaagacaggattcaacttggaaacctccatatacagatgaaaataaaaaagttggtttggcattaaag

SEQ ID NO: 10875 - DNA, 119 bp, homo sapiens
agtacgttttactttgtcttatttttaacaggataggaaaaacttgttggagacccgattgcacatcacggcagagaactgaggtccaagtaagtatctgtgtgctctgtgtcctaggt

SEQ ID NO: 10876 - DNA, 119 bp, homo sapiens
aattttcactggttttattttacagaatagctgaaacctttggacttcaagaaaattatatcaaaattgcataaataagaagcaactacaactaggtatgtatggcaaagtatgcataa

SEQ ID NO: 10877 - DNA, 119 bp, homo sapiens
ggttttgttacagcagcagagacagtggtggatccagaaatgacaccgtacttagacatagctaaccagcaggcagatcaatcagaattcccccatcagaaagaaaagtaagtactatg

SEQ ID NO: 10878 - DNA, 119 bp, homo sapiens
ttcctaggcccttatgttagctatgggatatcatgagaagggcagagctttcctgaaaagaaaagaataggaatagccttgccatgtctgttggacgctgacaaatatttctggtaggc

SEQ ID NO: 10879 - DNA, 119 bp, homo sapiens
ttttagggaaattgtgggaaagagaaggtactgtttctaagactctacttacttcaagggatccgaaacatcacagtggaaatgatgtagaggcttatgagtatcttaacaaggtaaga

SEQ ID NO: 10880 - DNA, 119 bp, homo sapiens
tcctaaaggaactggcccaaataaggaaggaggaaaaagagaagaaaagacgccgcctcgagaacatcagtttctgaaagggatgggctactccacgcacgcggcccagcaggtactcc

SEQ ID NO: 10881 - DNA, 119 bp, homo sapiens
tgtgtgttttagattctgctcagcaatcctcagatgtggtggttaaatgattccaatcctgaaaccgacaccgtcaagaaagtccttcccaggaaaacattgaccgagtgagtgacagg

SEQ ID NO: 10882 - DNA, 119 bp, homo sapiens
ctcacctttttcctgttcctgcagctccctcaagactggacagcctatagctatgacagtgggaattttgctccaagttcttctgtgaaatccttgcctcatacttgccagaagctaca

SEQ ID NO: 10883 - DNA, 119 bp, homo sapiens
cctgatttctccaaacaccgacccagctttcagagtaaccagaactttagtaccatcagggcctccaagacttggacttctccatgcttgatgatatacatttccttgccaatttctcc

SEQ ID NO: 10884 - DNA, 119 bp, homo sapiens
aaaatagcatgcactcacctttttgcagacaaagtcaccaggcaaatagagaacggatttcaatcttagaacatgtcataaatcatctgtgtatcacaaccctatataaaaagaaaaat

SEQ ID NO: 10885 - DNA, 119 bp, homo sapiens
aaagcacttgccttgaacaagtcgactttgctgatgatgctgaagttcacatcaatggcgagggctaacggaccgtagttggtagggtcttaagcaaatcagactcatctttataaaga

SEQ ID NO: 10886 - DNA, 119 bp, homo sapiens
cccccaagtatactgagttatactttacctgtagatatatgctttgtccattatagactctaggtgatgttaaattcaaaaaatgaagtgtactatatagaaaagcaaaagaaatccaa

SEQ ID NO: 10887 - DNA, 119 bp, homo sapiens
aaatatagttatcttacctttaacatcctatttgctctaaacattggattaaacccaaagaagaggtagaaatatcaaatggtattattgatgcgacatccaactgttgaaagaacaca

SEQ ID NO: 10888 - DNA, 119 bp, homo sapiens
tcacgtgagcaactttgaaattgtttgtcacctacctgaaattttgtagaagtcctgtagtgtttccttgctcatttgaatccacctgaaagatatttgtattttcattaattttagcc

SEQ ID NO: 10889 - DNA, 119 bp, homo sapiens
tttcagactgcattctgaccttgtatgttggtgtgtggctcttcagacgtgactggagttgacttggtttgagagatttctcttcacctttgttttcttcctttgagaaaaaacataga

SEQ ID NO: 10890 - DNA, 119 bp, homo sapiens
cttccggtacccggacttgggttgtccaatcagctcagcgaagccgccgcagaggctgatggggggctgaggctgtgaggcttccagcgtcggtaccatggcgacgcgcggtggggctg

SEQ ID NO: 10891 - DNA, 119 bp, homo sapiens
ggcccagaccttctctttccctttccagcagccggagaagtgcgacaacaaccagtactttgatatctcgccctctcgtgtgttccttgtggagctaaccagaggcaagatgcccgagg

SEQ ID NO: 10892 - DNA, 119 bp, homo sapiens
ttttttttttttttaggaacttcatgtgtatgtctaccaggatttcagatgatctctaataatggaggactgctattatttgtaaaaagtgcccagaaaacatggtgcgcataatttat

SEQ ID NO: 10893 - DNA, 119 bp, homo sapiens
tcttttaatttagaaaggtgttacagaagatggctggaactgcatttcttgccctagtgacttaactgcgaaggaaaatgtcactgtcccattggccatattttaggtaagaattagat

SEQ ID NO: 10894 - DNA, 119 bp, homo sapiens
aactgttcagtggaaagagacattaatggaacattgttgtctcaagcaacttgtgagctctgtgatggaatgaaaactcttttatggtagtaaatgctttaggagacaggtaagcagtg

SEQ ID NO: 10895 - DNA, 119 bp, homo sapiens
aaattatttttgttatattgaacaggtgcgtccgatgtgagccaacatttgttaataccagcaggtccttgcatgttcagaacctaacattttagtaaggctaaccaaattgataaagt

SEQ ID NO: 10896 - DNA, 119 bp, homo sapiens
ttttccctcatttatttatgaagacagggggattatgtttcagcagcacagggaattttcctctacgtaaatttcagctgcacgttatggagaagttgtgagtatgtttcaattttttt

SEQ ID NO: 10897 - DNA, 119 bp, homo sapiens
aaaaataaaatgtatctttttgtttacagggcatgtctttaacttcagaatggtttgcaaagtatttgcatcatcagcagctgcatgttgggtaagtttgaattttttaaataaatttc

SEQ ID NO: 10898 - DNA, 119 bp, homo sapiens
ttataggagacagaatcttccttggctgttttatggagaccagttaggattagcacctcaagtgctcagtctacctctcttcctacaaatttcagttttaaaggagaaaaccaggtaaa

SEQ ID NO: 10899 - DNA, 119 bp, homo sapiens
tcgttttctttaatcagaatacaaaactgaagtttgttgctgcttcctatgatataagaggaaattttccaagtggcaaactttagaaggaggtgttttacaggtaagcatgattctag

SEQ ID NO: 10900 - DNA, 119 bp, homo sapiens
tttatctgttgtattattttgctgcagctttgtccagacacagagacaaggctaaatgctgcttattcattggaacaacctaccaacaaaatgtaagtttgaacgatattagtctatat

SEQ ID NO: 10901 - DNA, 119 bp, homo sapiens
taaatagtgtccaccttgtacccaacacaataaatggaaacatctaccctcccttaatcaccattgcctcagtgacattgatatcaaagatgccaacagccagtctgtgaaggtgagtt

SEQ ID NO: 10902 - DNA, 119 bp, homo sapiens
gtatagctaatttgttttgttttaaatatcaggtttctttctcagtcacatatgaaatggatcatggagagcacatgtccagacagatgtaagtttattttaaccttttaaaatatata

SEQ ID NO: 10903 - DNA, 119 bp, homo sapiens
ttgttttttagattgctttgggtgtattgggtgggctagctgttttagcatctcttttgaagacagcagatggaagaggcgcattgggagtcccatgattgatttacaggtataatctc

SEQ ID NO: 10904 - DNA, 119 bp, homo sapiens
ttaaattgcagacagttgtgaaattcttggtgtactatgctggtgatctggccaatgttttctttatcacacagtgggaacaggtctttactggcttattttcttcaaagtgagtgagt

SEQ ID NO: 10905 - DNA, 119 bp, homo sapiens
agtaatttttattataggcacagaagtctgtgtctgttttgctgccaatgccaattcaggaagaacgtttgtcacttatgttggatgtgcctttgctctgaaggtaagttttaaaggac

SEQ ID NO: 10906 - DNA, 119 bp, homo sapiens
tcattctcaggcactacaatttttgcataagctcatatcccagattacaatagatgtattctttattgatgggagcgacctaaaggaaaggttcttaaagctgttgaaggtaactgaaa

SEQ ID NO: 10907 - DNA, 119 bp, homo sapiens
aacttgacttaatgtttcaggtcgtgttctttgctgtcttttatgagagatttatagaagataaaattcacagttcgttgatttatgctctatgagtaatgtaagtactttctgacttc

SEQ ID NO: 10908 - DNA, 119 bp, homo sapiens
agatatcagtgtttctgttatcccacaaatgttttggatattacattcatggtagatcagtacatgggctgcagatactaatatggaagaaatgaatatgaaccttaaaagagaagcgg

SEQ ID NO: 10909 - DNA, 119 bp, homo sapiens
aggaaaatttgtgtagccagagaggtttggtacccaacacagatggtcagacttttgagattgcaattttaaccagatgagacaacattatgacagaattcatgagacactaataaggg

SEQ ID NO: 10910 - DNA, 119 bp, homo sapiens
tacattagaaaaatggtcctgctagactactgagttcatcagcaagtacttttgagcagagtataaaagatatcatatgatgaataaatttcttggctccttcattgaccatgtatgta

SEQ ID NO: 10911 - DNA, 119 bp, homo sapiens
ctttattaggttcataaggaaatggattactttataaaagataagttgcttcttgaaagaattcttggatggaattcatggaaccaatggaaaaaagcatcttttacaatggtatcttc

SEQ ID NO: 10912 - DNA, 119 bp, homo sapiens
ttagcaacatacctgaaaaacagataatcacacgatttgtcccacatatagtcatcatagctgactaccagaaatcacaggctatacaacgcagatggtcacatgctctgttcagagaa

SEQ ID NO: 10913 - DNA, 119 bp, homo sapiens
aagtataatacatttctgacaacctacctccatgaaatatttgttccaatcccacatggaatagagcttcaccaaggtacaccggactgcaactagatgtgttcaacagatgcaaaaat

SEQ ID NO: 10914 - DNA, 119 bp, homo sapiens
ataattcaccaaagcaatctcaacttaccttttaccaaggccttcaatggaagctctgacagatgtgttcctgaagatttagattttaatttctgttaaaaaagcaaaacaataaaagg

SEQ ID NO: 10915 - DNA, 119 bp, homo sapiens
ataacacttgacttacagagggttttttgtccaagttgggctcttcaagtatttcattaataagactgtaagatcatcttcttttttaaatgtttctgttgatctgaaaagaagacata

SEQ ID NO: 10916 - DNA, 119 bp, homo sapiens
gtgggacacacccggaagtggcgcggtacaggagcagcactgccggcgggggcgggtgccagggacttgaggtggaggggacgcggcggtactctggcgtgtgagccgagggtggagtg

SEQ ID NO: 10917 - DNA, 119 bp, homo sapiens
ttttcttaattcttgagtatgatcgatggttttctttttctttctttaaaataaaaataggatgaccataaagctgtggttctaattctaccaaccgtagtactgctgagagcacaaaa

SEQ ID NO: 10918 - DNA, 119 bp, homo sapiens
tcatcaatcaaaccgcggagaatgcagcaggctgctcctacagatcctgacttaccaccaggtaacttcaatgggatcaataaaaccaaatttcaatttttggccgggcatggtggctc

SEQ ID NO: 10919 - DNA, 119 bp, homo sapiens
tatatttcttagctcacagaaatgcaagttgagagtagttattacagtccacagaaagtaaaatctaaaaagtattgtgttgggaacaagaaggaactacagttgaggtaatctttcaa

SEQ ID NO: 10920 - DNA, 119 bp, homo sapiens
attgctttgttggcaggagacatacactgagatagctggaatgcaacggtttggggctttttatatggatacctgtatacaatggagaacactagtggcaaaggtattggcttctttcc

SEQ ID NO: 10921 - DNA, 119 bp, homo sapiens
tttaggtgctgtacttctttgcagtatacaaggactagcagttaatattgacccaatcttatatacgtgctcatctatcagcctcagaaacgaacaagtagacatatgcaacaggtaag

SEQ ID NO: 10922 - DNA, 119 bp, homo sapiens
cagaggtttgtatggtcagtgaactagaagatctcagtgcttccatagatgtccaggatgtatataccaagtgaaatgtaaaatagagagtttcaatattgatcactatagaagcaggt

SEQ ID NO: 10923 - DNA, 119 bp, homo sapiens
cagataaggtgaacttatgttttccaggccaggggaaggttggcagtcaggacattttgaaggagtattctacaatgcaaagaaaaatctgtggtgagacccatttagttactatgatt

SEQ ID NO: 10924 - DNA, 119 bp, homo sapiens
acagctaatcaggcagcaaaagaagacactgtggttttgaagattggctctgttgccatggctccccagctgacaatccccttggcagatctgtccttaggaaagatatttaccagtaa

SEQ ID NO: 10925 - DNA, 119 bp, homo sapiens
ttgctatttcatgtgcaggtgccatcttcaaacagttccattatttatgtctggtgcacagttttgacttagaacccaactctcaagtgcaacaacgaatggtgagtgctttcccaatc

SEQ ID NO: 10926 - DNA, 119 bp, homo sapiens
ggttgtgttcctgactggctttggctatgtgtatgtggatgttgtacatcagtgtggcacagtcttcatactgtggccccagaaggaaaagcaggacctattttaaccaataccaacag

SEQ ID NO: 10927 - DNA, 119 bp, homo sapiens
ttaccacaggtattttacatggagctggactttctcagcttcccaaacagcgccatcagccaagtgatcacatgctgaccaggctccaaacagccatgtcaaatatgtctggtaaaatt

SEQ ID NO: 10928 - DNA, 119 bp, homo sapiens
tccacatgcacttaacagttctgacgtgagaggacaagaaacacaagcaaatataaaacattcaattctagagaagttcatcagagacatccttcaggattgtgaggtactggaaagaa

SEQ ID NO: 10929 - DNA, 119 bp, homo sapiens
ctcaggccatgcacagattgtccatctccttttagaaagaaataagtctggaactatcccatctgacagcaaggagccacacctttgcactatgctgctcagagtaactttgctgtaag

SEQ ID NO: 10930 - DNA, 119 bp, homo sapiens
cttatagggaagaacagctttgcattggtcctgcaacaatggataccttgatgccattaaattactgctgactttgctgctttccctaatcagatggaaaacaatgaagagaggtaagt

SEQ ID NO: 10931 - DNA, 119 bp, homo sapiens
tcaagaaacagccagagaacattctaaaggccaatctgcttgtgtccacttcagacccaatgaaggcaggatggaagcaggcatccaggagttccctctgttgagaagtccagaggtga

SEQ ID NO: 10932 - DNA, 119 bp, homo sapiens
ttctccccgtagagctccgactgcagataattcagagagaacgaaggaggaaggagctgtttcgcaaaagaacaaggcagcagcagtcatccagcgcgcctggcgaaggtaggaaaatg

SEQ ID NO: 10933 - DNA, 119 bp, homo sapiens
taacagttgttggttcatttcaggttgttctcacgaagggaaaatacatcatcctacaagatctgtaaagcctcttctgtgctgcgtctcaactcaggtaaggcagccactgcaaagca

SEQ ID NO: 10934 - DNA, 119 bp, homo sapiens
ccaaagggccagccagggccttaccacggacacatctgggagggcgttgatattgccctggacagcctcccagtttcctccaggtccagagtgttctagaaatggacgagaaagcaaag

SEQ ID NO: 10935 - DNA, 119 bp, homo sapiens
agctgtgaggaagcagagaataccccttagaggatgtcctaccttgtttattccttctgttgtgagatcccaagaaacctgtggggaaagacacacatctccagttgtgcatttgagca

SEQ ID NO: 10936 - DNA, 119 bp, homo sapiens
actcacctggacacaggccactgaacggcactcaggaggaagtagtcgtgggcctctgctgcctaggagttcccagcagccagcaggccctcagctggagttcaaaacacctgcgctgg

SEQ ID NO: 10937 - DNA, 119 bp, homo sapiens
cgaattggcgcccggcaaggggtgctcaacggcgcgtgcgcagagggaggcaggcgggtgggctgccggggtggactcgtcggagccgcgggcggtcaggtagggggcgggaaggaggg

SEQ ID NO: 10938 - DNA, 119 bp, homo sapiens
acttggccctaaaccacacagaagagctggcatgaaacccagagctttcagactccggagcctcagccctcaccccgattccattgcttcttgctaaatgctgccgttttatcacggag

SEQ ID NO: 10939 - DNA, 119 bp, homo sapiens
ccataataaaccatgtggtcttggctgcagttctgacaggtttcaaagaacctccattgatatctgtttcatctcaagatagaataaaaggctttcattgatgatattcgacaaccaac

SEQ ID NO: 10940 - DNA, 119 bp, homo sapiens
ggttaccaaataattaaaaccagcatgattttgaaaaatcggatcttgatcacggctcccatcctcctccgttctccgtgtaaatgccttgtcttcctttaagtaaagaggccactgtg

SEQ ID NO: 10941 - DNA, 119 bp, homo sapiens
tttacctgcagtcactgtcttttggaacaggatggggttcgccacgagaaccagcagcaggggcaggtaatggtgacatagtgggggatggcgtggtccaggccccgctcacacctgag

SEQ ID NO: 10942 - DNA, 119 bp, homo sapiens
gagtcccaacttacctggacacggaagggtagtagagcatggcggctccctccacacagagcagggtggcaggccccacgccatgatgtgatacagcaggatggtgctaggggacaagc

SEQ ID NO: 10943 - DNA, 119 bp, homo sapiens
cctcggtgaatacctcagtcctgccgatctccggatcaccagataagcatccactgcatagcaaaacagcaccagaagcaggcactgtacaacagctggatccacatctgcaatcggga

SEQ ID NO: 10944 - DNA, 119 bp, homo sapiens
ctcaccgcactccccacgcagaaagcagcaggccaaatttccgtgtggttcatatccgagacgctgtcacaaaatttgggaatcctaaccacacggtggaccggatcaccatacctaag

SEQ ID NO: 10945 - DNA, 119 bp, homo sapiens
tactcacctggtatacagtccaaggaggtggcacctgcagaccacagagcattgggtcctccttggcaacgcacttgcatgctttttggtaccaggggtcctcgccttcatcctgcagc

SEQ ID NO: 10946 - DNA, 119 bp, homo sapiens
tcaaaagtactatgcatgtacattacagccttcttactgttacatacctcggtagacgataatcccaattggctaaagcaaaaggatgagacagaaaaaatctaattaatgaaagagaa

SEQ ID NO: 10947 - DNA, 119 bp, homo sapiens
ggttgaatagcacataccttcatagccaaagagaagtaataacaaaaagccttctatcttgcgtgacatttcccctcgtcctcggccaaagctctaccttactgaactggagagctggc

SEQ ID NO: 10948 - DNA, 119 bp, homo sapiens
ttcatttcacttaccttctttgtttttttcatgtctttgcttggtgttgtttcactgttttctaggattctaatgaactgctatctgcatcatcaagcatgtatcctacaattggatca

SEQ ID NO: 10949 - DNA, 119 bp, homo sapiens
tatatatgtatgttatcaaatgtgctcataccttttgggttttcattgtactcacaaatggcccgttccctaggttggctttttctttctataaacaataacaaagcaatataacaaaa

SEQ ID NO: 10950 - DNA, 119 bp, homo sapiens
taacgaaaataaatcttcatattataccttttgtttctgaactggtgataattttaatgacttttcattgaattcaggctcatgatgtgtgtctgaaataaataaaaaatatatattat

SEQ ID NO: 10951 - DNA, 119 bp, homo sapiens
taggaaatcattaccatgtttaagatatcagtagtttctccaaggctttctacagttgaagaattatcttctctgcttctttggtcatttcatctagcaaataatctgaatgattaaat

SEQ ID NO: 10952 - DNA, 119 bp, homo sapiens
caggaaatcatacaggttgagcactatacctgttgacaccagggtgtggttccttccacaggcagctaattcactttttcaggttttagagctaaaaatatttaaaatgggacaattat

SEQ ID NO: 10953 - DNA, 119 bp, homo sapiens
aaaagatcccaaacctttgacacatgttggcttgctgatggctgactttgatcctaatcctaactgacccagttgttactgccaaacatgtaaagtttattatttcctggtaggaggga

SEQ ID NO: 10954 - DNA, 119 bp, homo sapiens
cagatggttggtaaaggctttttcctagttcagacaaaggaagtgtccatgaaagctgaggatgctcaagggtttttcgggaaaaagcacctgacttccttcctcttctgaacaaaggt

SEQ ID NO: 10955 - DNA, 119 bp, homo sapiens
cttgggtttgcttataggtcctgttattgccttggagtttaatggggatggtgctgtagaagtatgtcacttattgtaaacgagatattcaatgggaccaaggtacaagattttattga

SEQ ID NO: 10956 - DNA, 119 bp, homo sapiens
tcacctgagccctattgggccctgaatttcgcccacgatgataggtgcctgggatgggtaaatcctcacactgccctggcgctgcagacactggatggtgaaggagggcttccgacctg

SEQ ID NO: 10957 - DNA, 119 bp, homo sapiens
gtgtaccgatcagggacttcctcatcctcatcttgcttgttttgccctttggttcccttgggctgagaattccttcttctgggatggtgaaaatgagagccccagagcctctcctgggg

SEQ ID NO: 10958 - DNA, 119 bp, homo sapiens
atagctcaccgtctggtggggggatgacctcatctagcagcttctgtttcatccgcttccagatcttttgatgacaatccgcagctcctggttggcttgctccaggttccctgcgttgg

SEQ ID NO: 10959 - DNA, 119 bp, homo sapiens
cccctacaccttctgttttgatcttcagggatgtccggaccagggcaaagagtgtggcgttgaatgtcacgtcccatctgagttgaggggcatgttcattgccacaagtctctgcaaac

SEQ ID NO: 10960 - DNA, 119 bp, homo sapiens
aggtgcacagaccttgcaggccactcggtgtgggcacagcttcccaaatcccagagggggctggatacgctcagcagggcaaccacatccaagtgtttgatgcggcccctggaggagtt

SEQ ID NO: 10961 - DNA, 119 bp, homo sapiens
tgagtagatgtcacctgaacagaagcagcacagcctgtggaaaggtctggaagttgttgtttcggtttactgtgtgccatcctgaagagccaccttgccgaacatctgtggacacatca

SEQ ID NO: 10962 - DNA, 119 bp, homo sapiens
gggatgcttcctagggtccccacttgcctgcatgccaatgacggcatagatgaagaatatcattgcgatagaagagccacatagggcaaggcctatagggatgggggaggggggcagag

SEQ ID NO: 10963 - DNA, 119 bp, homo sapiens
gagggacatgggaaaagaagcagagagtccctgttattagggtgggctacctcgccaaggtggccaccatctggagggagatatggccaagaaaaaggtgatacaggagatgatgacat

SEQ ID NO: 10964 - DNA, 119 bp, homo sapiens
ggaaaggccagttctcacattgacttcagtgacggcaatatccactatgctgcccaccacaataagagctcaaacgtgttccaggcatcagtgaagtaatgctgcaagtaggagaaaag

SEQ ID NO: 10965 - DNA, 119 bp, homo sapiens
gccaccttgggcttgaaggcgatgattttgagcaccatctcaatagtgaagaggccagtgaagaccatgtgaggatgtccatggcatagttgaagggagcagtctgctcatagtgctgc

SEQ ID NO: 10966 - DNA, 119 bp, homo sapiens
gagctccgtggacggcagggtcttgggcactcacttgcattcttgaggggtgtgtttggcctcgtccgtcaggtgtagaatttcccctgtagagaggatgtctgtcaagtaggttcacc

SEQ ID NO: 10967 - DNA, 119 bp, homo sapiens
ccccaccttgaagagctgcaccccgatgcaggcgaacataaattgcagaagtgtggtgacaatcatgattttccgatggtccggatggccacaaatacacactgcaccacatgctgcgg

SEQ ID NO: 10968 - DNA, 119 bp, homo sapiens
ggtggggtggggttaccttgagtcccttggccctgttgatggctcggaggggccgcagtactcggagtatcgcagaatcttcaccaccgagatggcgctggagctggggaaggggcaat

SEQ ID NO: 10969 - DNA, 119 bp, homo sapiens
cacttactggatgccaaaggagatgagggacacactgaccaccagcagatccaacatattaaaccagctcggcagaaggagccgcggtgcaggaaggccccaaacactgtcatctgggg

SEQ ID NO: 10970 - DNA, 119 bp, homo sapiens
tgagggtaggactggggtcccattagtcacctttagtagaatctccacagtgaaaatggaggtgaaggctaatcgaagtaacccagaatctggggtgtgagaaagagcggggagccact

SEQ ID NO: 10971 - DNA, 119 bp, homo sapiens
cccacacctgctccacctggccctgcccacttgcctgctccttccctccttgcaccctcctcttcctcttctccacaccaggcacctgaggacaggaagacgggagtcatcaatggtga

SEQ ID NO: 10972 - DNA, 119 bp, homo sapiens
gtgggaggtgtagacagtgcccaggcatctaactcaccaggccttcattctcctgtgggagatccttctattgctcttctccctgtgcgaggaaataggggtgattgctgcagatgggc

SEQ ID NO: 10973 - DNA, 119 bp, homo sapiens
gggtggagccagatctcacccgcccttgtccttggcagtgcctgcatctccactggccaggttgtccacgcaatggcaagaaacacgttcaacaggatgtctgggatgagcttaggctg

SEQ ID NO: 10974 - DNA, 119 bp, homo sapiens
cagttccccttacccaccccgactccaccatcatccagccccacaaagctccaaggatacagttgccacgatgaagagaatgatgaaatagatgcacaccaacattcctgggaagaagg

SEQ ID NO: 10975 - DNA, 119 bp, homo sapiens
ggccaccatatgccatgataccatcatacatgaccacgttccagtcctcacctgtcaggatctgggggtggaagtcactgtggagctcttggaccccctccaactccagggtctccccg

SEQ ID NO: 10976 - DNA, 119 bp, homo sapiens
gtttcaaagttatggagtcaaggatttgcacaactttcccaactcaccagactctggttttcatgatctgtttctgaaaaagaagggggatgggaggtgtgtgtcgtaaagggcagaag

SEQ ID NO: 10977 - DNA, 119 bp, homo sapiens
tgggggccctcacaggcagcgtgtacagctggccagagccccctcctcctcatcctcatcgccttgggttctgtcatggaaccggtgtcactggctgggaggctggctgtaggcaaggt

SEQ ID NO: 10978 - DNA, 119 bp, homo sapiens
ggctggacccccaccatggctgctggtggagtgtgtggagcgagtagaatgactgaaccagcgcagacgccacgcctcctattggtcagctcggccagctgtggccctgcagggagaga

SEQ ID NO: 10979 - DNA, 119 bp, homo sapiens
tccctcacccactcaggacgccaagcacaaggttgaggacgaagaaggacccaaagatgacaaggctcaaaagtacacccagggcagttcataccccatggcatcttgcatctggggag

SEQ ID NO: 10980 - DNA, 119 bp, homo sapiens
gccttaccaggttgtggttggcagtgttggagtcgtcctcagggaaggggatgtaaactcccagggccagcagttggcaaagatggtcagcaggatgaggatgtcgaagggcctcaggt

SEQ ID NO: 10981 - DNA, 119 bp, homo sapiens
tggaaggattctctcacctttcccgccttcagattccgacatctttctttcgagattgaagggccatctcacacaacccccctctcttcccccagctttggagggattaaggccgcagg

SEQ ID NO: 10982 - DNA, 119 bp, homo sapiens
atttttcttacctatctccatttcagtatatggaacaaacaatttctgcacaactgattctaaatcttccttgctgttttagaagatgtgcaagtcaaatgaaccaaatctgttaaaaa

SEQ ID NO: 10983 - DNA, 119 bp, homo sapiens
tactatgcttacaggtgcctttcatgcatgtcatcgttgaagaacataactcaatgacccgaacagcaaagttcctggttcctctgctggcactgtcaaaatggaaatctaaaaagcaa

SEQ ID NO: 10984 - DNA, 119 bp, homo sapiens
tattaaaaatatataggactgaatttacctgttgatctgaatctgtttttaggacagatctatctgtaacagcactgccctggagatctgcctgtaatgcacaaaacagtgaagcagta

SEQ ID NO: 10985 - DNA, 119 bp, homo sapiens
ggccttacctgtattgcacacgtgagcacatgttctcaggaaagtaactgtcctccacgaggaaatgctagagattattctctgaccaaactgatctataattgctttacatctataaa

SEQ ID NO: 10986 - DNA, 119 bp, homo sapiens
ggttacttatatcatccttactttctggattctttgtccactacaaggcactgtactgaatggcgaagaaataaattccaccaaacacagcacacatcctagaaagagaacagaaaaat

SEQ ID NO: 10987 - DNA, 119 bp, homo sapiens
catattaaaatagtaagaaatgtcaaataattggagagcactacttaatgaaaaaaatacctttatattatcaggatatttctcatattccatacaaaatgtaagaaatttcattagca

SEQ ID NO: 10988 - DNA, 119 bp, homo sapiens
ttcgcttttctaccatagtaagttgtttgctattaaagacatctgctctggaacacggaacctgaaaaaattatgattttaagttaagaaactgcttcctaatgatataactattccaa

SEQ ID NO: 10989 - DNA, 119 bp, homo sapiens
acctgttccactcgtccttctcgaaatgcaagaatcctggtaatatttttaaactctgcatatcgactacattagatttgattagaagatcaattagtaatcctcgagaatacagcagc

SEQ ID NO: 10990 - DNA, 119 bp, homo sapiens
taaaaggtcagatacaaactttacctggtattcctttagccaggacaatagtcctgaaaagctaaaactgcccagtttcctccatagtagcttcttctgtaacaattaaaaaaaaaaaa

SEQ ID NO: 10991 - DNA, 119 bp, homo sapiens
attaaatgctatcgttgataaacttacgaatcaacatgcagaactctccggccacttcttgaacatgcactgcaatgatggattcaggcaaacctacaaaaacacacacccgtatcatt

SEQ ID NO: 10992 - DNA, 119 bp, homo sapiens
gaagcaccaggctacacatacccgtccctattacgatcacatcaaactccgaagggagagtatccgccacttgacgggaaacgtgtcatgtgactattacttgtggaaatgagatcaag

SEQ ID NO: 10993 - DNA, 119 bp, homo sapiens
aatttaaaagtacctgaaaaattccatgaaggagaacccatatccatgctgttctgcaatccctgcacaacgacgtttgccgacgcgccaatcagtgtcccgttacctaaagtcaaaat

SEQ ID NO: 10994 - DNA, 119 bp, homo sapiens
agcagccccttacctcccaggcaagcaccgaaggccagggcatacatgagcggcggtgcgggcaggccacctcagggtcgtggctcaggttcaggagcacgggaatctgtggaggaaga

SEQ ID NO: 10995 - DNA, 119 bp, homo sapiens
caactcaccatggtagcagtgaacgggatgttgtcaatcagggacgacgccagggctgagacccacaccccaggacaatggcggctatgaggcgctgctcctctgggaccatctggaag

SEQ ID NO: 10996 - DNA, 119 bp, homo sapiens
gagtgccttctattatagcatttattttacctttattagcaaagcagtttgttctccaacatattctataagtggagatgtgccaatgcctagaagaaaggatgtgtggtgagaatcag

SEQ ID NO: 10997 - DNA, 119 bp, homo sapiens
actcaccaagatcaagatgaatgccagggacaaacgaattgaggaaaaacatgaagataacaaatcccacactgtcaggcatttggcgagcagaatcccgtcagatatcctatgctgta

SEQ ID NO: 10998 - DNA, 119 bp, homo sapiens
cagaaatccctgaggaaagaaagctgggtacctttttttggagttcttggatattggtctcccaattttgtcctcctgtgagatctgtctaaaagagaaaagaagagactcattacttc

SEQ ID NO: 10999 - DNA, 119 bp, homo sapiens
gatagaattattaaatgcaacatcatacctacctttacagcacaataatcgaaaaatcccgtttctgaaatatggctactaagatcatctatggggaaaagaagaagacaaggataatc

SEQ ID NO: 11000 - DNA, 119 bp, homo sapiens
cagtcccacggggagagctgtaattaccatgccaaacagcagggccagcgtctcaaaatcaatccactcaccacatgggtcaggctgggtctctgcaatcaaagcacaaatttgccaat

SEQ ID NO: 11001 - DNA, 119 bp, homo sapiens
gggattgggactgtgacaacttacatcgccaatcacagccagtgctgccagtgctgcaagggaacccagatggccgccagagttctgtgcacgatctggaaagaagcacaggaaattac

SEQ ID NO: 11002 - DNA, 119 bp, homo sapiens
tcactcactgagaactcacctggtcagtacctcaaaggtcctgctcatcactgagtgctcgcttctcctggatttaaatacaccgtccagttgtgagtgacctgtacaagccaaagcat

SEQ ID NO: 11003 - DNA, 119 bp, homo sapiens
catctcagagtggattttggatacagtagttctccagcggtgataaggccaacagctgccagagctttcttgatccggatataggctgaacaaaatctgtaacaatcagaaacgttgaa

SEQ ID NO: 11004 - DNA, 119 bp, homo sapiens
acagtagtgctggggcagctaaggtactcacagaacacagcaccacaaaggcaaacaggcccatgacttcagccactgcacacagcgcctgcaagagaaaaagtagggccttagtggca

SEQ ID NO: 11005 - DNA, 119 bp, homo sapiens
aaatatctcaccctttctcctgtaaggaattcctcagcaaaggagtgttttctgtaaagcaggaatcttagacctggagctggacatctggggcaaagaagagtgagacctgaaagaga

SEQ ID NO: 11006 - DNA, 119 bp, homo sapiens
agcacgtgcactttacctgcgcacttgcagatctttctccaggagtgagtttaaggtccgcacctccgcctggatggtgagcggagcacagccttcgaagtaagaactcagagggagct

SEQ ID NO: 11007 - DNA, 119 bp, homo sapiens
ttgaaaaacacattccatagactagaataatcaattccatgtaaacttacgattaatttccatggcgtaactacatgacgattggaaagcaggatttttgttttgttttgttttgacag

SEQ ID NO: 11008 - DNA, 119 bp, homo sapiens
tttgaccaggatattataaaactgttgaaaacaagttctacttacttccattcccagaagtttaagagcttaggctgcatggtgaaagaggaagaaaaaaaatcaatttacttagataa

SEQ ID NO: 11009 - DNA, 119 bp, homo sapiens
gccaacaggtaagaattgtaaaacagtagactgacctttttcacatccctcaccagcagatgaagtgtgttggtggacccagtctctgaaagagaagcattcatgtgtgttaaatatgt

SEQ ID NO: 11010 - DNA, 119 bp, homo sapiens
acagtttcaccggccagtggggcccaaagacaaagatctggcttcgtgctatgtccacgcggttccaagcagtgccaagctcagctgatctggagcagatacgtttgttcctggaaagg

SEQ ID NO: 11011 - DNA, 119 bp, homo sapiens
agtcaccatttcctgagagctcacctttcagcagggcagttaaaattgccatctcgatgtcctgctggcctcagaacccattctgaacacagtgacctgaaaatgtgaaaagactgaat

SEQ ID NO: 11012 - DNA, 119 bp, homo sapiens
aatcgtggatttcaatttacctgttagagtctttcatgctaggaattacaaagatacattcccgtttgcaaaggttttctctatccaagatttctgaccctggaagagagagagaagtg

SEQ ID NO: 11013 - DNA, 119 bp, homo sapiens
tttacttaggtattaaccatgagttttcaaaaagttgatataaggaaatagcctcagtccagcactgcagttactgctgagtcctcagaaatcttctagaacctacgaggataaacaag

SEQ ID NO: 11014 - DNA, 119 bp, homo sapiens
tgtgcttacccgcatctgagcttacctgccacagcagtggaatggagagggcacagctcaggctctttcgcctcctccttggccagggcagggagctgggtgaggagggcccacccttt

SEQ ID NO: 11015 - DNA, 119 bp, homo sapiens
acaacatctcgtgactcctctccctgtttgcagccgggcgatggggccattgcggtggatgagctacagataacaagaagctgaaggtgggtgccgtatggagtctgcccagtggggac

SEQ ID NO: 11016 - DNA, 119 bp, homo sapiens
gctcagctcccgtccttgctgacccgagggagcagctcgacctctctgcacaacagcaccatccgcagcccatctaccagctcatgctccacagcctggaccccctgagggaaggtaag

SEQ ID NO: 11017 - DNA, 119 bp, homo sapiens
gccaggcagagcctttgatccacccagcttcccagattgcactttccagcttctccgtttcctctcagtcgtctgtattatggactagatgatctccagggttccttctaactcggacc

SEQ ID NO: 11018 - DNA, 119 bp, homo sapiens
tgatctccagggttccttctaactcggaccctctgggatgccgggcatcatcactgtggggtgcttcccggtaggacagctgctctcaactactcttgtcaatttgttttcatcattgt

SEQ ID NO: 11019 - DNA, 119 bp, homo sapiens
tcctgtctcatttgcagttcgccttgccaaggagaaggaggaggagagcttgaatcaaggggccagagccaaccccaggccaaagcagaaagcaaaccagaaggtgagaggatggccag

SEQ ID NO: 11020 - DNA, 119 bp, homo sapiens
tttatcctttaaagaggaggagccagccaagctccctgcggtcacggtcacaccagcccctgttccagaatcaagggagatcagaaggagaatccaggcggtcaggtaggcacccagcc

SEQ ID NO: 11021 - DNA, 119 bp, homo sapiens
caaactttcaaacaggagtctaggaagttttttgttttcaccttcctgggatctatcatgtggatagcctgttctcatacctcatggtgtggtgggctcaccaggtgagtgaacagcag

SEQ ID NO: 11022 - DNA, 119 bp, homo sapiens
acctgcaggtgccaggtgggggcagggatgtgccccgtggacaaggcccaccgcaaccagtgccaggccgccggctgaagaagtgcctgcaggcggggatgaaccaggacggtgaggcg

SEQ ID NO: 11023 - DNA, 119 bp, homo sapiens
ggaaactatctctcggttccgggcattggcggtggacccccacggagtttgcctgcatgaaggccttggcctcttcaagccaggtaactgagtctctgcccaaaccttgagtgggaatt

SEQ ID NO: 11024 - DNA, 119 bp, homo sapiens
tccccagagacgcggggcctgaaggatcctgagcacgtagaggccttgcaggaccagtcccaagtgatgtgagccagcacagcaaggcccaccaccccagccagcccgtgaggtgacct

SEQ ID NO: 11025 - DNA, 119 bp, homo sapiens
cctacgacttccgcttgcctcgtcgtctgggaaaccgccgacttccggccgcgcagcggtgggctgagcaaaatggctgaggagagagtcgcgacggtgagcgccgagattctctttag

SEQ ID NO: 11026 - DNA, 119 bp, homo sapiens
ggtgcttcaatatagactacttatttcatttcagagaactcaatttcctgtatctactgagtctcaaaaccccggcagaaaaaaggtctgtatgcagtttcatggtatgtgtatgtttg

SEQ ID NO: 11027 - DNA, 119 bp, homo sapiens
agcatataagaaccagtatctccatttttagggggagttggagtgagcaatgatttggaataccagaaatcaacttatatatttacaggtaaaattctaattgtaaattcaggattcat

SEQ ID NO: 11028 - DNA, 119 bp, homo sapiens
tgtcaaaatatgctgcctagctccagagtttcctattttggagaagcagaactggttgattcatcttcatatatccggaaagattatgaagcctgcaaggtaagagattgccataataa

SEQ ID NO: 11029 - DNA, 119 bp, homo sapiens
ctcagaagcatttttctccctctttcaggctgttatcaaagaacagcttcaagagactcagggattgtggaatatgctatctatgtccaaggtaagacacatacttcttgtcttcttgc

SEQ ID NO: 11030 - DNA, 119 bp, homo sapiens
gcagcattgatatttcgcctagaaggaaatatccaagaatccctagaactcttccagacatgtgcagttttagtcctcagagtgctgataacctcaagcaggtggccagatctttgtga

SEQ ID NO: 11031 - DNA, 119 bp, homo sapiens
ttatggaaaatatatcttttacagatttcttttgggaaaacataaagctgccattgaagtatataatgagcagctaaactcaaccagaaagattgggtaagtagagaactttcagttct

SEQ ID NO: 11032 - DNA, 119 bp, homo sapiens
cacctgagttgttttccttcttttttatgagcctaggagatcagccataacctaggagtttgctacataacctgaagcagttcaacaaggtaatttatagaagtggtgatagatttcac

SEQ ID NO: 11033 - DNA, 119 bp, homo sapiens
tcttgtttccctctgagcatctctatgttgcaggttctcaccagaaaatacagagcttcttacaactttggattactctacttacaggtaatgaaaactctgtactcattcatgcactg

SEQ ID NO: 11034 - DNA, 119 bp, homo sapiens
attgtcttgtttgctttttttccaagctcggcatttaccagaaggcatttgaacatcttggcaatgcacgacttatgaccctaccaactacaaggtattacaggctgtgaaggctctgg

SEQ ID NO: 11035 - DNA, 119 bp, homo sapiens
agctgcagtgctttctttgttgcagtggctctgaccaatctggaagatatagaaaatgccaagagagccacgcagaagcagtccacctggataagtatgcactttgttgagaatggtac

SEQ ID NO: 11036 - DNA, 119 bp, homo sapiens
ctcaccctctcaagcagcttgctcttcaagaagggcttgaccacattgtaggtcgtggtgaagtaccatgctggtggatgaagtggatggctttgaaccgggctgggaaggaatcctgc

SEQ ID NO: 11037 - DNA, 119 bp, homo sapiens
ttaccccttctgacatgttgcctatggaagacacagagtccttggaaaaagaagggatctgctttctcttcctggcctctccagccggccccttccctaggataggaagtcagggctgc

SEQ ID NO: 11038 - DNA, 119 bp, homo sapiens
agcttgggaacagagatcatgtcacatctggtggaccctacatcaggagacttgccagttagagacataatgctatacctctggtgctaccagcctcaaaaggtaacttctacgcctga

SEQ ID NO: 11039 - DNA, 119 bp, homo sapiens
ctaaacttttagggccaagggacaggctgagctacacagcccctccatcgtttaaggagcatgcgacaatgaaaacagaggtgaagtagccagtaaacccagtgaactgtgagttcttc

SEQ ID NO: 11040 - DNA, 119 bp, homo sapiens
tctgcagagcttccattaaagagaaggtagagctgattcgacttaagaagctcttacatgaaagaaatgttcattggttatgacaaaagcacaattaacagaagttcaagaggtgagtt

SEQ ID NO: 11041 - DNA, 119 bp, homo sapiens
tcatgaaattgataaatcaataaaataataataatttctttcttccaggcatacgaaaccttgctccagaggtacttaatgagaattgagtctctgtttcttagtaaccagaataatca

SEQ ID NO: 11042 - DNA, 119 bp, homo sapiens
tcaagggctactatcactcttagtttcaggagagagttgaagatttggaaaaagaacgaaaattgctgatgacaattatgacaaactcttagaaaggtgagtaccacatttgggtccca

SEQ ID NO: 11043 - DNA, 119 bp, homo sapiens
tctctagcagacaaagaatcctctgaacaaggttctgaagtcagtgaagcacaaactaccgacagtgatatgtcatagtgccacccatgtctcagaaatatcctaaggcagtaagtaca

SEQ ID NO: 11044 - DNA, 119 bp, homo sapiens
ctcttacccttaatacagtaatagacctggacccacaggagcagcaaggccgaaggcggtttctgttcgcatgctgaatggacaagatcctgatcaaggacagtaagcatctgctttcc

SEQ ID NO: 11045 - DNA, 119 bp, homo sapiens
atactcacttcagaaatggccgagaggatgtggtcagtgccagagccagacaggcacagcttcccaggaactgaaggctccatggagcagggcctggtgcctctgctcagctccagggg

SEQ ID NO: 11046 - DNA, 119 bp, homo sapiens
tgccttatggtccttctaatatcttctctccagaggactgtatgctgttcttaaggactctctgcttccggacaagctcaagctaaggtgagtaccatcttcttaaatgcaaggatctt

SEQ ID NO: 11047 - DNA, 119 bp, homo sapiens
ggaagttctttgctggtggagtgtgtagaacaaatgtgcagcttcctggcaaggtagtggtgatcactgcgccaacacgggcattggcaaggagacggccagagagctcgctagccgag

SEQ ID NO: 11048 - DNA, 119 bp, homo sapiens
ccctatagaggaaaagcagctccatattctgatcaacaatgcgggagtaatgatgtgtccatattccaaacagctgatggctttgaaacccacctgggagtcaaccacctgggtaagta

SEQ ID NO: 11049 - DNA, 119 bp, homo sapiens
tgatttttttttcttgttaaaagtcagagcaacctctgtccttcccagatatggtccaccgtgcctattaaaggacacttgagcaccaaaagtaatggtaagtgaggtgcttaaaacgg

SEQ ID NO: 11050 - DNA, 119 bp, homo sapiens
tttaatttttagctttttgcactgactcctcttctctcagactaagcactctccagctggtcaagaatccatggctgttcactataataaaatcctttcagccaaaggtaaaaatgtgc

SEQ ID NO: 11051 - DNA, 119 bp, homo sapiens
tgacaatattattaaactattacctttctctttcagctgcagtagactgctcggttccagtaagcgtgataccagcataaagtgtaagtaatttttggacattattacctttttaaaaa

SEQ ID NO: 11052 - DNA, 119 bp, homo sapiens
acaattatttattttaaattattacagctttaaatctgagttggggacagctgagactaaaaacatgacgattcagaaatgaacataaagcaggtaataagtatgaaatcttttggtat

SEQ ID NO: 11053 - DNA, 119 bp, homo sapiens
aggcatctaattgtgtgacatatgatgccaaagaaaaaatagctcctttacctttagaagggcatgactaacatgggatgagattaaggatgatgctcttcagcattcctcaccaaggt

SEQ ID NO: 11054 - DNA, 119 bp, homo sapiens
ttttgctcaactactttaacttcctctttctagggcaatgtgtcagtattccctgaagcccccttcaaccgtaaaatctactctgagtaagatcttttttaagtcttcgttttgcatag

SEQ ID NO: 11055 - DNA, 119 bp, homo sapiens
tatattgccttccttttacagtgaagaagaactgttgtatctgagtttcattgaagatgtaacagatgaattttgaaacttggtttattttcaaacaggttagtttttttaatggtgtt

SEQ ID NO: 11056 - DNA, 119 bp, homo sapiens
tgagacattaacatttttgtttatcatttgtaggtttttagaacgactgttcgagcgacatataaaacaaataaacatttggaggaggtttgtctttccttataacttcattagaaaaa

SEQ ID NO: 11057 - DNA, 119 bp, homo sapiens
actgtatttcttaaaactgtttactgccttcttaatgctttccaggaaccagatcctgaattgccagtgatcaggtaaagaaaggtttagctgcaacctttagtttagagaattcttta

SEQ ID NO: 11058 - DNA, 119 bp, homo sapiens
aagctgtgtagtatttctaatgctattttaatatatgttttatttatccatgggttttaggcagcttggtcttaaaagcaagagcgctaacagaaatggtatacatagatgaaattgat

SEQ ID NO: 11059 - DNA, 119 bp, homo sapiens
gtagatcaggaaggaattgcagaaatgatgctggatgaaaatgctatagctcaagttccacgtaagtatgggttttcagttaagttaatgaaataccattaagaggaagaatactgtgt

SEQ ID NO: 11060 - DNA, 119 bp, homo sapiens
aaattgtattagccatcttgtctcctaggccctggaacgtctttgaaactccctggaactaatcagacagagggcctagccaggccgttaggtatgtacttctgcttcataacctctgc

SEQ ID NO: 11061 - DNA, 119 bp, homo sapiens
gtttttcctctgtaggcttccatgcttacaagtcctgatggaccatttataaatttatctaggctgaattaacaaagtattcccagaaacctaagttggcaaaggtatgtacttaaaat

SEQ ID NO: 11062 - DNA, 119 bp, homo sapiens
aaaaatctaacgtatttttgacacttttttcttcacaggctttgtttgagtatatctttcatcatgaaatgatgttaagactgtaagttttgaattcatgctattttcttttattgtaa

SEQ ID NO: 11063 - DNA, 119 bp, homo sapiens
atgaattgttttcaaaggctttggatctggctgccctctccacagaacattctcagtacaaggactggtgtggaaagtacagattggaaaatgttactacaggtaaatttcattatttg

SEQ ID NO: 11064 - DNA, 119 bp, homo sapiens
aaattgctatttgtaggttgggaatgtatcgtgaagcagaaaaacagtttaaatcagccctgaagcagcggaaatggtagatacatttctgtacttggcaaaagtaagtaaatcttaat

SEQ ID NO: 11065 - DNA, 119 bp, homo sapiens
tttaggtttatgtctcattggatcaacctgtgactgctttaaatcttttcaaacaaggcttagataagttccaggagaagtaaccctgctctgtggaattgcaagaatctatgaggtaa

SEQ ID NO: 11066 - DNA, 119 bp, homo sapiens
ctttatttttatacacaggcaagggcactattacaaactgcatcatcattagcaccccatatgtatgaacgcattttaattttgcaacaatctctgataaggtattctctttcttcatt

SEQ ID NO: 11067 - DNA, 119 bp, homo sapiens
cactgcaatgaacgccatcttcctcaagttcatatcctgggtcacagcggcagatgaaagagccgtagggttgacgcaggtttgcacgcaggggttctcggtggcacactcgttcacat

SEQ ID NO: 11068 - DNA, 119 bp, homo sapiens
accttggcaagaccttccatcctcattgagggtaaaaccagggttgcatgtacaagaataggatccaggacattcgcacagagctgctggcagtaaccatagcgacattcatcaatgtc

SEQ ID NO: 11069 - DNA, 119 bp, homo sapiens
tccaccccaatgaaggatccacagtggctcatacctaaacactgtcctgactggcgatccaggtcaaagcattcgtgcactgtgcctgcagggaaggagagaggagaaacaggcaaggt

SEQ ID NO: 11070 - DNA, 119 bp, homo sapiens
cttgtagatattttttaaaaataaaaatcttacctgtgcattcccagggcttggaagacagagagccagatggtaacagtgagtatcctgtggaggtgaaaagtcaaatataaatgccc

SEQ ID NO: 11071 - DNA, 119 bp, homo sapiens
tacctccagtgggtccagcatgcccttcctggtgacaatgatctgcttgggctgctcctccacaggcaggatcggatcagggcggccacctcctcagctgtcttccacttagccaactt

SEQ ID NO: 11072 - DNA, 119 bp, homo sapiens
accttggtgaaggtggtggacccagaggccatgagaatctgacgcacgcggttgtggaagcgctgcattactcatcgtccacacgcaggaaacactgagctgtgcgctccttagtaacc

SEQ ID NO: 11073 - DNA, 119 bp, homo sapiens
ctggaaggcatccacattgcccagccgatactgcacgtgactatccaccaccagcttagtcaaacgcagacttcccgacacaggtggaaagcattcccaaaacgagatttctttctttc

SEQ ID NO: 11074 - DNA, 119 bp, homo sapiens
ctcttcttttgagccttagggggccgatgcttcagggcattcagcacatagtacttaagcagcttctggaggagaccctcactttcacaggctgcccggcaggacaatgctcccgatac

SEQ ID NO: 11075 - DNA, 119 bp, homo sapiens
tcctcaccttgactgagtgcctatgggagattgggttgatcaaagggtcaaagtagaaagctggcaagtaggatcctcagttttgatgaatacaacattgggagtatggtacctaaaat

SEQ ID NO: 11076 - DNA, 119 bp, homo sapiens
ctcacctttctcctgcagcttctcctccgacatgtagtccggtagcggggctagagggccaggcaccggttacccggccctcgataaggaaacactccggccatatccggagaatctgg

SEQ ID NO: 11077 - DNA, 119 bp, homo sapiens
gccacgcaccccacaggccctcacacaagaggccgctttccccgcagcgcaatggcggccagactgcgtcgctccgcgttcccagcgccgggaagtgcgcaacccgagttcagcagttg

SEQ ID NO: 11078 - DNA, 119 bp, homo sapiens
accttctctccagtcagagccaccatgtcgaggggcccgtacatgaaccgccccaccaggacctgggggcatcttcagcagcaatcacatcattggcccggtgattagccgtgacattc

SEQ ID NO: 11079 - DNA, 119 bp, homo sapiens
accctcagcttgacctgagtccgcttacgaagccacttctcccgggggttggcaggactcagtgctgcaggtccaggcgggcgctttccttgatgttcacgctctcatagcgcattacc

SEQ ID NO: 11080 - DNA, 119 bp, homo sapiens
caccctccgaagcccagcctacctcgctgtcttcgtggatctcgatgcttccctgggctgggaacctcttcttctcaaggaaacccggtacagttctcctgcagagggaaagaggggag

SEQ ID NO: 11081 - DNA, 119 bp, homo sapiens
ggaagaaatgaccccacagggtcaggcttgactcacgctgcttctcctggaggatgctggatgtgcacgcgcggtcccttctcctgcagaaaaagaaaagaaacatgagcagatccttg

SEQ ID NO: 11082 - DNA, 119 bp, homo sapiens
tctcaccttgatgctcgtccagtttccccatggtctcgatctgctccacgaggtcattggagttccactgctcatcccaatgaggatggcattcttcccttcagccatctcctctgtgg

SEQ ID NO: 11083 - DNA, 119 bp, homo sapiens
gggttcactcacctctggcatcaaagaattcatcatctgagctctccacagagtcactgaggacatttcaaggtgccagggggcaccgccgcccgggggaggaccacctgttaaaggga

SEQ ID NO: 11084 - DNA, 119 bp, homo sapiens
ctggcaaggaagacctgtgggcgggcgtcaaaagggggaccggccctgtgacccctcaccgggggccgtggcccgagcccccggacttccctgtaaatgtcagaggcccctccgctggg

SEQ ID NO: 11085 - DNA, 119 bp, homo sapiens
ctgtcactgtcccttcaggactggagccgggcctcgtctttcttggcttcctcctggtggttgggatgggctggctggggccttcctggcccattatgtgaggtgagtagtggaatgag

SEQ ID NO: 11086 - DNA, 119 bp, homo sapiens
ctccaccaggcaccggctacttcacatgcaaatggtctccggccccaacaagatcatcctgaccgtggagacatcacctttctccacccacatgggggcacctctcgaaaggtggggga

SEQ ID NO: 11087 - DNA, 119 bp, homo sapiens
acctgctaggtggcccaggggagtcgatcaagtctgggtgcccgcagcatgtcagacattcgcagcggcccagccaacacttggacagccccaacattggtgtctatgaggtgagcctg

SEQ ID NO: 11088 - DNA, 119 bp, homo sapiens
ccccatcctctttgctgcagggagacagggtttggctgaagaaattcccaggggatcagcacatagctaccgcccagcaaccaagacggccttctccaaggtgagacttgggcctgtga

SEQ ID NO: 11089 - DNA, 119 bp, homo sapiens
catctccacaggtccatgcgtggcaggcgtggtgggcctcaccatgccgcggtactgcctgtttggggaacggtcaacaccgcctcgcgcatggagtccaccgggctgcgtgagtgtga

SEQ ID NO: 11090 - DNA, 119 bp, homo sapiens
cccaccgccacagcttaccgcatccacgtgaacttgagcactgtggggattctccgtgctctggactcggctaccaggtggagctgcgaggccgcacggagctgaaggtgaggcagggc

SEQ ID NO: 11091 - DNA, 119 bp, homo sapiens
ctcccatgtctccccagggcaagggcgccgaggacactttctggctagtgggcagacgcggcttcaacagcccatccccaaaccgcctgacctgcaaccggggtgaggggccggcctcc

SEQ ID NO: 11092 - DNA, 119 bp, homo sapiens
gcaggtccagcaaccacggcatcagcctgcaggagatcccacccgagcggcgacggaagctggagaagggcggccgggccagttctcttgagaagtgaggcccggccccggacaggtac

SEQ ID NO: 11093 - DNA, 119 bp, homo sapiens
gcgactcacgtggctcccacctgcctcaggcggaggaaggcaggcgtgaactggtagcggacaaagcgccagcattggggtccaggtcccgccggttgatgggcaaccgttctgcaatg

SEQ ID NO: 11094 - DNA, 119 bp, homo sapiens
cacctgagactgggggcttcttgatttcaaagaggacagtgcctgagtccatgtcccgaatcttaaaccgacaaagtcgatcttgtagatattctcctcaggggagcagaggtagtcta

SEQ ID NO: 11095 - DNA, 119 bp, homo sapiens
ccgcgtgggggacggaagtgaaactctaagaaatgagatggagaagtacgagcggatccgagtggtgggagaggtgccttcgggtgagccagggctctgggggaggaaactgctagggg

SEQ ID NO: 11096 - DNA, 119 bp, homo sapiens
ttgtccttaggcccccatctgtcctgcagggcagagaagtccgtggcccccagcaacacagggagcaggccaccagtgtccgctgcagaggtaagtgggaagaggccgccagtccccat

SEQ ID NO: 11097 - DNA, 119 bp, homo sapiens
tcctcactgcccttctccccagacagaggcatcatcatgacattcggcagcggcagcaatgggtgcctagccatggcagcctcactgacatcagccaggtgggtgtcacatataccttg

SEQ ID NO: 11098 - DNA, 119 bp, homo sapiens
gcccaccattgtggaggctttgctgggctatgaaatggtgcaggtggcctgtggggcctctcacgtgctgccctgtccactgagcgagaactatttgcctggggccgtggagacagcgg

SEQ ID NO: 11099 - DNA, 119 bp, homo sapiens
acgcacacttcacacccttcctctctgctccagagtcacactggtgctacgaggttcaagccgagtcctcaactacccctgcttgggtgagtacagccagtccaggggactgctctttg

SEQ ID NO: 11100 - DNA, 119 bp, homo sapiens
accccgaccagatgcacatagtacatgagaaagagaaggggacatcgaggaatgtgaaagaggcccaggccctgaagacgaaattgcggtgctggcctttctggtggaggtgggactcc

SEQ ID NO: 11101 - DNA, 119 bp, homo sapiens
tctcaagacccttccctccctttccaggctggaacccaggtgaacgagggcttccagccactggtggagcactgtctaatatccccaaacctggtgagtcaggatgggggagaagggct

SEQ ID NO: 11102 - DNA, 119 bp, homo sapiens
tctgtcttgcagattgaagcgctcgtgaaggacatgcagaacccagagacaggggtccgaatgcagaacagagggtcctggtcaccagcgttcctcatgccatgacaggtgatgtagct

SEQ ID NO: 11103 - DNA, 119 bp, homo sapiens
tatgacaataaccgcaaatgtctcttgtttttcaggaagtgatgttctgcaatggatcgtccagcggcttggatctccagtctgggtgagagctcatctggcactcagttatccgggac

SEQ ID NO: 11104 - DNA, 119 bp, homo sapiens
ttcccagaggcacagaacttgggcaactttattgtcaggtatggctacatttaccccctgcaagaccccagaatctcattctcaagcctgatggcagcctctacagatttcaggtgagt

SEQ ID NO: 11105 - DNA, 119 bp, homo sapiens
ttttaaagcgtggtttccctggtttcttttgcagacaccgtatttctggcccacccagcagtggccagcgaagataccgattacggtaaatacttcagccccaactatgcctttggtag

SEQ ID NO: 11106 - DNA, 119 bp, homo sapiens
tgatggaaaatgtcattgctttcttttccagccatctatctggccaagcgaaatatcaaaaagaaagggttttggaagaatatgaaaaggtatggaggtgcttttaagtagaggttgtt

SEQ ID NO: 11107 - DNA, 119 bp, homo sapiens
tcattttgtttttcttctttaggaaaattacaatttcttgaaccaaaaaatgaactataagtgggacttgtcattatgcaggccaaagagcagtacaggtgagtgaaaggagaccatgc

SEQ ID NO: 11108 - DNA, 119 bp, homo sapiens
gtggcttttggctttccagggctggaaaggagaggaacaaagcagacagatatgccctggactgccagggaaggcatactggctggtgcaccgatgccctgtgagtatcctcctgcctg

SEQ ID NO: 11109 - DNA, 119 bp, homo sapiens
ttatgttgtttttattccatttagcctggaatggacaatgtgctggactacggcctggaccgagtgaccatccgaatgaagtcaaggtaaaccaggtatgtctctgctgcatagtttgg

SEQ ID NO: 11110 - DNA, 119 bp, homo sapiens
gatttcatgacatctgcctaacggttttgtttctttgtcttacagaaacaaacagtcgttgctgtcaaaaagaggtaattagtcttacacttccagtgaagaatggttttaaatcttct

SEQ ID NO: 11111 - DNA, 119 bp, homo sapiens
ataccttctaacaactgtgtctcttccagatcatgtattaccaacaggccttgatgaggtccacagtgagtcttctgtgtccctgggagggtatgtccctgatttgttgatcttgctaa

SEQ ID NO: 11112 - DNA, 119 bp, homo sapiens
caggattgtgaaatacagtgagcagttctcatccaacgatgccatcatgtcaggctgcctccccagcaaccctggatcaccgatgacacccagttctgggacttaaatgccaaattgta

SEQ ID NO: 11113 - DNA, 119 bp, homo sapiens
agggtggaaatcccaaccaagatgcgagtggaacgatgggccttcaacttcagcgaattgatccgagacccaaaggtcgacagagcttccagtacttcctcaagaaagaattcagtggt

SEQ ID NO: 11114 - DNA, 119 bp, homo sapiens
acttctcaccatgcaggagagaatctgggattctgggaagcctgcgaggatctgaagtatggagatcagccaaagtcaaggagaaagcagaggagatttacaagtgagcatcagccagg

SEQ ID NO: 11115 - DNA, 119 bp, homo sapiens
tttcttgttcccactaggattcttatgctcgctatttaaaatctccgatctataaggacatgctggccaagctattgaacctcaggaaaccaccaagaaaaggcaagtggaattatctg

SEQ ID NO: 11116 - DNA, 119 bp, homo sapiens
gctccaccctcccttttatgcggcgtcacctgcgctccagcccaagccctgtcatcctgagacagctggagaggaagccaaggcccgagaagcagccaacactgtggacatcacccagg

SEQ ID NO: 11117 - DNA, 119 bp, homo sapiens
ttcctccctactcttgcctcccacagagagcccagcgacgtggatggggcagctaggggcagcagcttgatgcggaccctcagtcctcaggcaggtaaggcaggagtctgggctggggg

SEQ ID NO: 11118 - DNA, 119 bp, homo sapiens
cagtgctttcctctgtttagggagaaagaacctctgaagtaagccctcacctctgcaggtggggctcagcccagagactgggatcagctggctcaggcaggtagggcagggctgggagc

SEQ ID NO: 11119 - DNA, 119 bp, homo sapiens
gttttctgtttcagctcaggtcctggttcgtcccctagcccaggaggatgctgtgggagctgcagcagcgcaagagggagaatggggggaagcagcactagagaaggtagacgcctccc

SEQ ID NO: 11120 - DNA, 119 bp, homo sapiens
tgagaccctgcacccccatctcctgctgtcctgaggagaccttttgctgctccctccagttctgccaacccatgtttgagatggagtggcgtggccggcgggtagcactcaaagccagc

SEQ ID NO: 11121 - DNA, 119 bp, homo sapiens
aacgggcgctacgtgtgcatgaagaagaatgggcagctggcggctatcagcgattttgtcggtgagcacctgcctgccaggtactggggcaggggctgtctccacccagggaaaggacc

SEQ ID NO: 11122 - DNA, 119 bp, homo sapiens
acctgggcagacctcgggttggtactggcagccgtcatacctgttcccaggccttccattccagggatgcgtccccaaacctgcaaggacagagcactcagggacatggccgggcccag

SEQ ID NO: 11123 - DNA, 119 bp, homo sapiens
gggttggccactactcaccaagtgcagggcgggtctcagggggctgtgctgtgagtgctgggcctccctcgcagggtgccagccccggcctttatctcgctgcttcatgagctgattag

SEQ ID NO: 11124 - DNA, 119 bp, homo sapiens
gccacttccggtccccgtggtcacgtgaccgtcacttcacgtgaccgcgcggcggccgctgcggcgcgaggcggcggggctggcgcggctcctgttgctcctcgggctctcggccggcg

SEQ ID NO: 11125 - DNA, 119 bp, homo sapiens
gcctccccgctcacggtctcgctccccgtagggcccgcgccggcaggtgcagcgaagatgaaggtggtgaggagcccaacgcgtttgggtgagcagcctcgcgggctggcggctcgagc

SEQ ID NO: 11126 - DNA, 119 bp, homo sapiens
cccgctgaccttgccgcttcccgtagggtgaacaacccgttcttgcctcaggccagtcgcctccaggccagagggatccttcacccgtgtctggtgagtgaggagcgctgttggccggc

SEQ ID NO: 11127 - DNA, 119 bp, homo sapiens
ggaccctggggatcagtgtgaggtctcttccaggacccgtgcatctcttccgactctcgggcaagtgctcagcctggtggagtccacgtgagtgcagggtgggtgcgagggtgggctgg

SEQ ID NO: 11128 - DNA, 119 bp, homo sapiens
tgccatctgtgtccccaggtacaagtatgagttctgcccgttccacaacgtgacccagcacgagcagacttccgctggaacgcctacagtgggatcctcgggtgagtggggccggggca

SEQ ID NO: 11129 - DNA, 119 bp, homo sapiens
cgtgtctccccagcatctggcacgagtgggagatcgccaacaacaccttcacgggcatgtggatgagggcggtgacgcctgccgttcccggagccggcagagcaaggtggggcctcaga

SEQ ID NO: 11130 - DNA, 119 bp, homo sapiens
caggtggagctggcgtgtggaaaaagcaaccggctggcccatgtgtccgagccgagcacctgcgtctaccgctgacgttcgagacccccctcgtctgccacccccacgccttgctaggt

SEQ ID NO: 11131 - DNA, 119 bp, homo sapiens
gcttctcttgggtcctcagtgtacccaaccctgccagaggccctgcagcggcagtgggaccaggtagagaggacctggccgatgagctgatcaccccccaggtaagcgtgcgctcgggg

SEQ ID NO: 11132 - DNA, 119 bp, homo sapiens
ctctttttgtggttggtaggctcataaagaactctcaaaggagatcaaaaggctgaaaggtttgctcaccagcacggcatcccctacacgaggcccacaggtgagtcacctgtggggag

SEQ ID NO: 11133 - DNA, 119 bp, homo sapiens
aggggtttggtacctgcagcagggccagggcccaggtgaaacggatgcgacagcagcggagagaagagcggaggcaaagacgccagcctggtacagcatctggtacctgaggttagggt

SEQ ID NO: 11134 - DNA, 119 bp, homo sapiens
ccctcccagcccactgccctcgctcctcttaccagcggtattgctgagcgtgactcagggaagtgttccgaaaaagaggagttcaaactgcaacaaataccagacaggggagatggacg

SEQ ID NO: 11135 - DNA, 119 bp, homo sapiens
cacccctcctagcacccctcacttacaagtccctggttaatgaaatactcggcaaagtaaactacgaccagggaacaatgtaccacagcagaccctggaaaaggcagaagatataagcg

SEQ ID NO: 11136 - DNA, 119 bp, homo sapiens
aagccccacagggacataccccagccatcatccgaaccttgaacactgtccacctttcccgaagggagagctggagctggagcctgcaggggaacagagagagaagggcagatgaagtt

SEQ ID NO: 11137 - DNA, 119 bp, homo sapiens
ctacctggcttcgactccggggcctcggttcttatgaggggctgccgggctgcgctctctgcttcttctcccctccagggtcctgggcctcaggagatgtgagcaacaagaaatagcta

SEQ ID NO: 11138 - DNA, 119 bp, homo sapiens
acactccctgctccacctgcttacctggggtagaaggcagtgagggagaggaaggtgacctccccaaggctgatgagatgctagcgaagaccacacctggggggaggacaagcactggg

SEQ ID NO: 11139 - DNA, 119 bp, homo sapiens
cagaaccacacactcaccacacaggctggtccccacagaatgagaaaaggcaaccaggacgaagcttccgcagcacaaatcccactgacgagaacccgggggctgagggggtgagaagg

SEQ ID NO: 11140 - DNA, 119 bp, homo sapiens
cccactaccctcacccagacctgtagggcagcaggtgaaggccaagaggagccaacaatttgatgacgatgtggggaggatgtccgccaggagcacagcctgggacaggagaatagagt

SEQ ID NO: 11141 - DNA, 119 bp, homo sapiens
ggaccaggtgagatgagtacgcacagccgtagagacagagttgcagtcaaatcgtgatgagctgttgtggggatcggcgttgggcctgggtccacctaatgggagaaaagcatgtcttt

SEQ ID NO: 11142 - DNA, 119 bp, homo sapiens
agagtcacttacatggctctggtttcccgatgtcctcttgtggctaaggatgtcgtgggcggcactcagatcaccacataagagaagttgttgcaaaggcccagcagcctggaaggagc

SEQ ID NO: 11143 - DNA, 119 bp, homo sapiens
ctgaagtctcaggccactcaccagaagcccaccgcgttcttccaatgcgcgccctgatggtccaacagaggagccggggctccgggacggtctcctcccctgggagagcgagaagaggg

SEQ ID NO: 11144 - DNA, 119 bp, homo sapiens
cctcaggtgggctgcgagccagaggtggtcgttccatgagggtgggcgggaatactcaccctcggaatcgaaaagcgccgccgcgagcctgcacagcctcccatcgcatcaagttcagg

SEQ ID NO: 11145 - DNA, 119 bp, homo sapiens
tcccccgagggtccagggtcatagagtgtccaaagggggctcccacgggagggatgagggtctgcgacagtgacaaggatcaacgcccgattgccggtcccagctccggcttgtctagg

SEQ ID NO: 11146 - DNA, 119 bp, homo sapiens
tggactgccaaaacataccttctattaggcatctcttgtttttgtagtatagcttttaagatgtctctcttgctttgttgttttctttatccacgtagatcactataccaaaagaaaaa

SEQ ID NO: 11147 - DNA, 119 bp, homo sapiens
ctagttggcatcaagttactgacctgtttgatattcttggagataggacctggaataatacagtcatcatgtcagaagctgacatgtcctcttcaactgtttaaaaaataaaagggtaa

SEQ ID NO: 11148 - DNA, 119 bp, homo sapiens
aatgcataccttgggaacatgtggaacagtcagcatattaatttctatttctggtatatgctctacctcggtgaaatttccttcctatcttcaggaggaggagaagtctccttatatta

SEQ ID NO: 11149 - DNA, 119 bp, homo sapiens
tcagtgtctactacttacatcactctgatgtggcatgatatccacgaaagataccttcttatctacagggttaaacgttgtcttggtttaggtcttggtgcctaagacaaaccaaccaa

SEQ ID NO: 11150 - DNA, 119 bp, homo sapiens
ccttctagtttatggatacgtgcagccctgatatcaagaagatgaacatactgttccactttgagttcaaatcttgctgcaaattttccatcttacgggtcactgcctcaacctccatc

SEQ ID NO: 11151 - DNA, 119 bp, homo sapiens
agacatgaaaatcacgatgaagttcagaaccttacctttataagtaggagagcttcactcaattcatcacattaatatcattctcctgcaatagattaagtaaaagctcacaatgagtt

SEQ ID NO: 11152 - DNA, 119 bp, homo sapiens
aattcacctggttgtacaattttatgcgttttttaagttcatcaagttgttgcttttgttccagatacttaactgtagttctctattctcttgaacgagtttttcattttgatcttaaa

SEQ ID NO: 11153 - DNA, 119 bp, homo sapiens
gaacacatggaatcacgatttacctgtcataaagtttatcatagttttcctttaaaagttcccgttcctttctaaatcattaattctatcctgcagctaaaatgaaaataaaattacat

SEQ ID NO: 11154 - DNA, 119 bp, homo sapiens
actgtacctcttgaagctgaataaattttccttccattgctgaaagagcattgcttttctctactagcttttatgaagcttaatcatttctacattgtcccgaatatttgaccttcaga

SEQ ID NO: 11155 - DNA, 119 bp, homo sapiens
aacacatacaaatttcttatttctcctctggcttcttcaagtaaactgttgccatattttgtaaacatggatgtggagtttctgctacatctgcatcttggaattttatacctaaaaac

SEQ ID NO: 11156 - DNA, 119 bp, homo sapiens
acagctggccataccttgtaaccctcccattccaaagaggtttagacctgtatctttcacaggcaagtccctgcagtctcatcagttggaccagacatggcctagctgtggaaaaaaga

SEQ ID NO: 11157 - DNA, 119 bp, homo sapiens
cctcatcctcccccatcctcccgggtactcaccgtgccactggccctgcagctagctaccgttgctatacgccgacagcgtggcgggcggctggccgagaggagcacgggagaaacatg

SEQ ID NO: 11158 - DNA, 119 bp, homo sapiens
tcacatgtccctcatcagacgagcatcctcagctccgaccagcaaacttcggatcaaattagaatgatcgccatatcagcactgagcttctgatgcactgaatgatattcatccacctg

SEQ ID NO: 11159 - DNA, 119 bp, homo sapiens
ttgctattcaaacttaccttcccattggaccaaccagttatcagttcattcactccatcagaattaaggcaaaagcatgaatgctcatggcatgatttttcgactgaaaaagaatttta

SEQ ID NO: 11160 - DNA, 119 bp, homo sapiens
atactaactttaattctccagtatcgggatgttttgtcataaactccaactgtgccattggaaagggcaaaccaaatcgactgccatacatgggacaaagagaggtgactatctgcaaa

SEQ ID NO: 11161 - DNA, 119 bp, homo sapiens
gttcgaggtggagcttcttacctctgtttctgtcatttctgccacaatctcatcttccttaaaaactcgatatcaaaatcctcagatccaacaagaagctgaaggggaaatatcataca

SEQ ID NO: 11162 - DNA, 119 bp, homo sapiens
acaagagagatatctcctcccccacatacctctttctttccatcaccatcaaagtcacacaaggccaagaattaacattgtctccagtaacctgaaaataaaaccccaaaccattagca

SEQ ID NO: 11163 - DNA, 119 bp, homo sapiens
ccttatttctccaaacacagatccagctttcagcgtcaccagcacagatttcccatcagggccgcccaaacctgcacttgccctgcctggatgatgtacatctcacggccgatctcccc

SEQ ID NO: 11164 - DNA, 119 bp, homo sapiens
gctgccaggccagctcaccttcttgcacacatagtcgttgggcaggtagacaacagagcgaagcctcttagcatgtcaaagatcatctgccggtcacagccctgtcccggtgaggaagg

SEQ ID NO: 11165 - DNA, 119 bp, homo sapiens
aaaaggtgtacctgaaagagtgcgactttgctaacgatgttgtagttcacgtcgatggcgaggtccagcgcatcttgtctggaagctgcaccatcagctctgactcatctgtgaacaag

SEQ ID NO: 11166 - DNA, 119 bp, homo sapiens
atgcatgcacatgcagggggagtctcacctgtacacgtaggctttgctgaggatggattccaggcggctttaaactcgaagaaggccatgtactggagggagaggagggcgtgagagca

SEQ ID NO: 11167 - DNA, 119 bp, homo sapiens
gggcccagcagtcctacctttaaacagcggggcaggcggaggagggggttcacaccgactttcaaataggaaaatccaagggcaggaggctgagcaggtccatctgaaatcccagtggg

SEQ ID NO: 11168 - DNA, 119 bp, homo sapiens
ccgcagacgctaaaccttgcatgcccggcacacaccttgaagcggcgagacttcaggtagttatttcgctgtcctttttgtccgtctgaaagaaagggaatgatgatggtgaaatgacc

SEQ ID NO: 11169 - DNA, 119 bp, homo sapiens
tctcactcagtgtccttcggggtggtggggtcagaccaggcaaccactggggactctgctggtgacaacccttgagctcttcagcctcatcatcctcagagggcagcttcttcctgcaa

SEQ ID NO: 11170 - DNA, 119 bp, homo sapiens
ctggtgcttctcatacctgatctgaagtgctctggggccgggtcccgtcttcttcactctggcccacgccacctgcgacaccacacagctatccagcagcaccctgtgacccggggcgg

SEQ ID NO: 11171 - DNA, 119 bp, homo sapiens
gagtgcccagaccccaggagctcagccaaccccagccccagggccgttcccagacaggtgagcaaatgattactcagtcacctcctcctcttcctcctcctcctcctcttcctcttcct

SEQ ID NO: 11172 - DNA, 119 bp, homo sapiens
ctcttcctcttcctcctcctcatcttctttctcctcttcaatccgggacagctctctgagttggggttaaggcaggaggtgagcccacccgaagctgccccgctgagtctacctcctgc

SEQ ID NO: 11173 - DNA, 119 bp, homo sapiens
cttcctaatatgtacatggggactcagtaatgtgtcacttactggtctgcacatcacatatcccagggggtcaggctcctgcatggagagagaaaaaagggaaaatcctgccacggcct

SEQ ID NO: 11174 - DNA, 119 bp, homo sapiens
actccatgagcccagcactgacctgttcccctattttcccatgtagcactggctgcggcaaggccatctcagcctgtgcaggacccatgccaccagcctgcaggtgggagagagtgtgc

SEQ ID NO: 11175 - DNA, 119 bp, homo sapiens
cccaggcagccccctcccgagctcccctccctgtacctgggtctgaggcagcacctgtagcaactgcagctcatctctccagacctgggtgacaaacagggcgcaaggtcatgggccat

SEQ ID NO: 11176 - DNA, 119 bp, homo sapiens
gcctctcccttccttggctcacctcagaggatttggggggctgaggaagcactctttccagattctgctcagccacagaagcagccgcagcccaggcctgcagaggggccagtgatcag

SEQ ID NO: 11177 - DNA, 119 bp, homo sapiens
atacagacaacagtgacactcagggatagggactcacctagtgtcttgggcctcaagggcctcattgggtcatctgtgcaccctgcagggtcagaaaatacagaaaggcagtcagcagc

SEQ ID NO: 11178 - DNA, 119 bp, homo sapiens
ccctcagccctgctgctgaaaagccatcctgccccttgttcttacctgtgtccccagtgctgccatgcccaggatctgccagggacagacagacagacatgggcagggagcccaagggc

SEQ ID NO: 11179 - DNA, 119 bp, homo sapiens
cagccccagcagtacctgagccgggtcctccgtgatgctgtgaacaggctgcgggatcaccttctctaccccttcatgagccaggtcagtaccctgcggctgggactgcgatggacaga

SEQ ID NO: 11180 - DNA, 119 bp, homo sapiens
agagaggggagggtggtgcagtacctattcatttcagaaatctcagcgccctgggcccggagggatatgtggaagtaagggcagcctccttggtctctggaaaagaatctctcatcctt

SEQ ID NO: 11181 - DNA, 119 bp, homo sapiens
tgccagcctgggcttcagcactcgcactcaccctgagggcttgggtctgccacagccacttcctcctcctgaatgactcttcggggggctagagggttcgaacaggatcatgtaagtcc

SEQ ID NO: 11182 - DNA, 119 bp, homo sapiens
tcccaccgagcctccacctcaccctgagttacctgcttagatgccaaccgccagccaggaattgccttctgctgccactcgtagctggcccctcagacacaaggaagattaattggcag

SEQ ID NO: 11183 - DNA, 119 bp, homo sapiens
agaatgattacggacctgaagccaaagaacaagatgcgctagtggacagattgctgaccaggggcttgaagctgggttctattttccctcctcaaactgactttgcagccacggagagg

SEQ ID NO: 11184 - DNA, 119 bp, homo sapiens
tgtgctcttgttacagtctgtgttaacagaagttaaagttcggttgttttcgtatttcaggtcagcaaataaaacgtcacattcgctctcatactggagagcgtccgtttcagtgcagt

SEQ ID NO: 11185 - DNA, 119 bp, homo sapiens
ttgtgcagttatgccagcagggacacatacaagctgaaaaggcacatgagaacccattcaggtaggactctccactccttactgtattaatgagcttcttttcagtgaatcccatggga

SEQ ID NO: 11186 - DNA, 119 bp, homo sapiens
caggtttgctggctgcagtgcgcggcctccgagccgtgccgggcggtcttcagggaggctgaagtgacctggaggcgggaggcgcggagcaggagcccggccaggcgctggggaaaggt

SEQ ID NO: 11187 - DNA, 119 bp, homo sapiens
cttccccttccccacagtattcatgggctgccctgggcaagagccagctctgtttagcactgataatgagacttcactgtgcggaatggcgagacagtccaggtaaaataccatgtcca

SEQ ID NO: 11188 - DNA, 119 bp, homo sapiens
ccaggcccaccagtgcccaccccgcactcaccgcccacggcagcccctccgtcgatttccacgggacactgccccagcgggcctggcgctgcgtctgctgtggcctggccctgccggag

SEQ ID NO: 11189 - DNA, 119 bp, homo sapiens
cagcgtgctgagcctgacctgacttgatggtctgctcaatggccatgatgtactcgtcaaagtcattggcagctgaaccttgaccagtcgggtcttgtacactgtgggggagaggcaga

SEQ ID NO: 11190 - DNA, 119 bp, homo sapiens
cacccatcacccactcaccatagtccactcctggctcacaggccttgtccagccgttcttccagggtgacttgtcatccgacttttgtatgaagcaattctctgcagggtggggtggag

SEQ ID NO: 11191 - DNA, 119 bp, homo sapiens
ctccagggaactcaccctcagcacagcggcacagttcatcacggcagagcttgttcagctttccatcctcttttccggatggtagaaccgggtacagctttcctctgcgggcagatgtg

SEQ ID NO: 11192 - DNA, 119 bp, homo sapiens
tgctcacccaggttgtaataggcgtagaccttgactgctccaggctggataagctctacattaaagtatggtgaactttgaaagctagacagtcatcctcagagtgtgagacctgaggg

SEQ ID NO: 11193 - DNA, 119 bp, homo sapiens
atgatgcagccttaccttgtccaggtagatgatgagggtgttcctatcggagaaggctttgtccagctctacttggagatgtatctgtcaacaccattggccagctggggaaaggtgga

SEQ ID NO: 11194 - DNA, 119 bp, homo sapiens
cctgagcccttcatacctgcttcaggtcatctgtgtctggagcaaagccagtcatcatggatatgtccatatagacatagtggcatcctggtctccccggtacctggatagtgcagaaa

SEQ ID NO: 11195 - DNA, 119 bp, homo sapiens
ggccaagatgaaccccggtgacctagcttcttacctggtacagatctcaaggatcatagtgttcttggctcctgaggcctcttttctagaaacacagaagagagaaagatgggagaggg

SEQ ID NO: 11196 - DNA, 119 bp, homo sapiens
cttgattccttttacctgtttccggtgctggttttatggtgaccttgaggtcgaatttattacaggtgattgatctttggccttagcatggtacattgtcaccacctggtaagatggga

SEQ ID NO: 11197 - DNA, 119 bp, homo sapiens
gccaggcaggtgtgggtttctgttccttaccgacaaggtgccttggccttttccttcagctgtgactgtaaaccctcattttccttggtctgcagagtgaaaagagagaagagagcatg

SEQ ID NO: 11198 - DNA, 119 bp, homo sapiens
agggcacttacgttgacctgctcctcgcaaatatctttagcctcctgcagcgagatgagaacaaaggcctgagggccatgtctttctcgttgttgttccgtaatccaccctgagataga

SEQ ID NO: 11199 - DNA, 119 bp, homo sapiens
tgagctggctgttgggactcaccaggtgctgggtgcccgtttcacgaaggccgcaaaggcagagctgggtgtctgaaggccagctgctgggtgtaccctgcagagaagagagaggaacc

SEQ ID NO: 11200 - DNA, 119 bp, homo sapiens
ggtcaagggtgtctcaccttgcaggagaattctggtctcagactcggtgtccgggacttggtcactgagtctgcaggtgggatgtcctctttctgcactccttctgcagggtgagtgag

SEQ ID NO: 11201 - DNA, 119 bp, homo sapiens
cagcccctccccctgcagccgactcaccacggcccaggcgttctggatccagggtgcgaacagccacagtttgttcattctgattccttccggctacgcagtgttagaggtggggggag

SEQ ID NO: 11202 - DNA, 119 bp, homo sapiens
ccagcatcctctctcacctttcttgtccgacatgctcacagccagaatctcccacgtggtgatggagtcttcaaaaatatattcatgagcttcgtagagattctggatggagaagaggt

SEQ ID NO: 11203 - DNA, 119 bp, homo sapiens
ccttacccatttttcggtggctctttcaagtcctcaacgttccacagccagctctctgggaactcacttgggaaacgatgttctcttctgcaatgatgtcctcatccaggttacctgca

SEQ ID NO: 11204 - DNA, 119 bp, homo sapiens
ggagtgggtaggaaaggctcccacctttgtccattcgcttctccgtgagctgcacggaacggcgtcggcggcggctggctgcgggcactgaagttctgcagggcaggcggaccgagaag

SEQ ID NO: 11205 - DNA, 119 bp, homo sapiens
accatgaggtcaaagggcattcctggtttgaagtacttgggtgtcttggtgaagtggatctggtagggaaggtcacgatggggatcccgctgcgctctgcctgcaccatgtcactgcct

SEQ ID NO: 11206 - DNA, 119 bp, homo sapiens
ctatggtaccggaatgcgcttgagggattcaggcagggaaatcctctgttcgccatcctggatcccgaaatgacaaaggcagttccctccactttcttcccgtagaggaacctacggga

SEQ ID NO: 11207 - DNA, 119 bp, homo sapiens
cccccagtccctcacctggcggtgatggtgacctccaggcccttctcgttatagatgtagtagaatttcctgtaggctccactatgacctcgaaactgggcagcactgggggagagatg

SEQ ID NO: 11208 - DNA, 119 bp, homo sapiens
cagcccctcctcctcttaccgtactccttcacctcaaactcagtggagaagacctgctgtggtgagtttcatagtaggctcggatcttccactggcccatgctgtgaggagggcggatg

SEQ ID NO: 11209 - DNA, 119 bp, homo sapiens
gaacctgacatacttgacgagttccggaatgtcccaagacaagggcaagacgccaagctggttctgagagacaaggagtcctgcttgaccgggatgccttccgggttctgtgggaggca

SEQ ID NO: 11210 - DNA, 119 bp, homo sapiens
ccctggggccccctctggctggcacctcaatgttgaccatgaccgtccggcccacgggtagcagcttgtgttgacggtgaagatccgatagagaactggggagagacaaagaggcctcg

SEQ ID NO: 11211 - DNA, 119 bp, homo sapiens
ggaggctcctactttgctcaggataatctcaggggccaggtactcaggggtgccgcacaaggtccaagtcggcccttcacgcgcttggcgaaaccgaagtctgtcacctgtgggcacaa

SEQ ID NO: 11212 - DNA, 119 bp, homo sapiens
tggggggtggcccgcttacctgaaccttccgatccgccgtaggtgtgagaacatctccccgccgggcactactccatgaccatgtataagtttgagttgtcctgtgggaagcagtggct

SEQ ID NO: 11213 - DNA, 119 bp, homo sapiens
tgggaccccaccttgaaggagaactcgagtttgacgaggaacggaaagttgacagcttgcaggatgcgctttcattcagggtgtgttcgatctgtttcagtttcaccacctgggaaggg

SEQ ID NO: 11214 - DNA, 119 bp, homo sapiens
tccctgggctctgcacccggcagccttacctgagcgggactttcccattttttaagaaaatcttctttgctttggctaagaattctttcactgaaagggagagaggggagagttataca

SEQ ID NO: 11215 - DNA, 119 bp, homo sapiens
cctaggaagttgctatagtaacaggactcagcctcaccatcgctggagttggaagccatcactcagtccgttctcagggcaccggcactacggtggctgggaaggctcatgagacctgc

SEQ ID NO: 11216 - DNA, 119 bp, homo sapiens
acagggggagccctataattggacaagtctgggatccttgagtcctactcagccccagcggaggtgaagacgtccttccccaggagccggtgagaagcgcagtcgggggcacggggatg

SEQ ID NO: 11217 - DNA, 119 bp, homo sapiens
gttgattgacagtttctccttccccagactggccaatcacaggcaggaagatgaaggttctgtgggctggttgctggtcacattcctggcaggtatgggggcggggcttgctcggttcc

SEQ ID NO: 11218 - DNA, 119 bp, homo sapiens
ggattctgactgtcttctcctttcctacagtttgctgagattatgatgaagattgaggagtatatcagcagcaagccaaagcttcagaaggtgcttcctcccactctgtgcccctcccc

SEQ ID NO: 11219 - DNA, 119 bp, homo sapiens
gcctccgtgtcctcacagtgatgggaccagtggaggccgcgcctgaataccgcgtcatcgtggatgccacaacctgaccgtggagatcgaaaacgagctgagtgagtgctggggggcag

SEQ ID NO: 11220 - DNA, 119 bp, homo sapiens
gtttaccctagacatcatccataagttcatccgggataagtactcaaagagattccctgaactggagtcttggtccccaatgcactggattacatccgcacggtcaaggtgagcgcaga

SEQ ID NO: 11221 - DNA, 119 bp, homo sapiens
cccccaggagctgggcaacagcctggacaagtgcaagaacaatgagaacctgcagcagatcctcaccaagccaccatcatggtcgtcagcgtcaccgcctccaccacccaggggtatgt

SEQ ID NO: 11222 - DNA, 119 bp, homo sapiens
tttccgttgctccaggatctgcggcggaaagcggcccggctggtggccgccaagtgcacactggcagccgtgtggacagtttccacgagagcacagaagggaaggtgaggagggaaagg

SEQ ID NO: 11223 - DNA, 119 bp, homo sapiens
cgccgcccacccacccgtccccaggtaccgcaagatgaaggagcggctggggctgacggagatccggaacaggccaaccgtatgagcttcggagaggtcagactcccagagcgccctcc

SEQ ID NO: 11224 - DNA, 119 bp, homo sapiens
cctccccacagcggaccctgcagaagcagagcgtcgtatatggcgggaagtccaccatccgcgaccgctctcgggcacggcctccagcgtggccttcaccccactccaggtacctcccc

SEQ ID NO: 11225 - DNA, 119 bp, homo sapiens
acctactggcgttagttccagatcttgaggaagctatcccaggaccctgtcgccacagccatgccatcgcagtcacgcccaggcagctgacgcggttgtcatgcccagccaagacacct

SEQ ID NO: 11226 - DNA, 119 bp, homo sapiens
actgcctgccccgggtcaggtacttaccacgtggtgtctccagagctggtgacgatctgattgtcatccggaatcggcagcaggacaggtaacctggcaaagaacaggcctaagtgatg

SEQ ID NO: 11227 - DNA, 119 bp, homo sapiens
tcaaggaagggaatcctccagtccctaccttgttggtggtgtagctgtcccagatgataagtttaccatctgcgaggcactgacgagaagcctggagggacagacaaaagcaaacctat

SEQ ID NO: 11228 - DNA, 119 bp, homo sapiens
cgcctacctggagtctgtgccccagtgcatggcgtagatcttggccaggtgcccccgcagtgtcctcctgtgcgcatttggattcttcccactgggtcgatgttgtttgtgatcttgaa

SEQ ID NO: 11229 - DNA, 119 bp, homo sapiens
ctcacaggcagatggctctgcgtgactcagtgggctcttacctgagagagagttgcatctgcacatgcttcctggcgtcctgggaagcaaggacagtgagaaattagcaacctttcaga

SEQ ID NO: 11230 - DNA, 119 bp, homo sapiens
actacatactcgaatctggttcttaagttgctcggcctcctgccgtaactggtcaagctcactcatcttcgatcttagtgctcttcaatgccaccttcaagaatgtgagatctgaaaca

SEQ ID NO: 11231 - DNA, 119 bp, homo sapiens
tctaaaactgatgaggatcaaatatatcaaaattaccttaattcagaagggcttctggtctggtctccatacatgtaaatttgtctgaaacaaacagaaaaggctgtatttgtattgca

SEQ ID NO: 11232 - DNA, 119 bp, homo sapiens
ggtcccgtgggagcttctacctgcaagtgtggtgaggccaaagtaggccacatctgagagcagctcaactccttcctccactccagccacttcctcgcacctgagaggagaaacagtat

SEQ ID NO: 11233 - DNA, 119 bp, homo sapiens
aaagcctgtgcacttacgagtaaatgatgacaaagaagtctttgatctccgggcttggaccactggccacttcagaaatatgtcccgtggttccccggggccctgccaaccagatgtgc

SEQ ID NO: 11234 - DNA, 119 bp, homo sapiens
gccacaacacaacctaccacattctgggtctcacagatgacgttcgggtcgctgcagcgaacatggactgggggtcctcaccaagcattcccaccggagcacctggagcaggggaaatg

SEQ ID NO: 11235 - DNA, 119 bp, homo sapiens
cctccgttgcccctttaccttggcgtgtttagtgggcactgcgctggacttccaaggtgacacggcgtcatgcccttctcgttgctcaacccaggagaggcctgcaggaaccgaacagc

SEQ ID NO: 11236 - DNA, 119 bp, homo sapiens
acttactgcctgggccggggaggcctgagagccatggggtagctgtgaagtaggcctggccaagcagtgtgagtcggggaccgcggggaggccgccagctgggaaattgacaactggaa

SEQ ID NO: 11237 - DNA, 119 bp, homo sapiens
gaaggaggccgtggggggcctggacttacccctggtcccacaggtgagttctgcggggcagcgagaactgaggtactggcgctggcgggcctgggaggaagcacagtggggtaggagag

SEQ ID NO: 11238 - DNA, 119 bp, homo sapiens
tgctgccaaggccaggtctggctcttacgctctgcggggtcctggagaagcgggtgcaggagggctctggggtgccatggtacagccgcaacctggaagacaggacccagagaacagtc

SEQ ID NO: 11239 - DNA, 119 bp, homo sapiens
gcgcctgggagaaacctcgcccagcggcggttgattagtcaggcctcagaaagatggcgtcctcggagcggcagagcagccgagccaggtaaggggagtgggactgccccgctgtgcgg

SEQ ID NO: 11240 - DNA, 119 bp, homo sapiens
ctgtgatcttatttttgtttccatttttctctgcagccaagctctactccaggaagtgaaaatgtgctgctcgagagccgctggtaagtacccaagatatgtggtatcactttctagta

SEQ ID NO: 11241 - DNA, 119 bp, homo sapiens
ttttctctctctcaccagattgccacggcagtgaagtttctacagaattcccgggtccgccagagcccattgcaaccaggagagcattcctaaagaagaaaggtacaggttccacaggg

SEQ ID NO: 11242 - DNA, 119 bp, homo sapiens
cctcttcccgcctgtaggtcccgcaggctcccgatggcgagattacggcgccctggccatcatcatggcggcattgcatttggctttcaccagctctacaaggtgagtcacccccagcg

SEQ ID NO: 11243 - DNA, 119 bp, homo sapiens
ttcttgcagaaatacctgctccccctcatcctgggcggccgagaggacagaaagcagctggagaggatgaggccggtctctctgagctgagtggcagcgtggcccagacaggtaaagat

SEQ ID NO: 11244 - DNA, 119 bp, homo sapiens
tctcctcgcagtgactcagttacagacgaccctcgcctccgtccaggagctgctgattcagcagcagcaaagatccaggagcttgcccacgagctggccgctgccaaggtacctgtctc

SEQ ID NO: 11245 - DNA, 119 bp, homo sapiens
tgctctgctttcaggccaccacatccaccaactggatcctggagtcccagaatatcaacgaactcaagtcgaaattaactccttgaaagggcttcttttaaatcggtaggagggaggaa

SEQ ID NO: 11246 - DNA, 119 bp, homo sapiens
gatagatctgttgtgggatgtgtttttttttccagaaccccagagatgaaaggcctcctcccactggctggttcctggcttgtagtaagtgctggccccgtgaccttcgaatgaacttt

SEQ ID NO: 11247 - DNA, 119 bp, homo sapiens
cggacaggtgctgttgggcgcatgaccactgctatgggcggctggaggagaagggctgcaacattcgcaacagtcctacaaatacagattcgcgtggggcgtggtcacctgcggtaagg

SEQ ID NO: 11248 - DNA, 119 bp, homo sapiens
gaaggggcgtgtcgcagcgcccaaagatgacgtgttctgccagcgccacgtcatgaggaagtgccggccactgaagccgtggggacgcgcccagcggagctaatcaggtgccactgaac

SEQ ID NO: 11249 - DNA, 119 bp, homo sapiens
gattacctggctggtgtttgcttgttctggagtgatcttctgactggaaaagaactatgtcatggatcaggaaggagagctgtcactttgggagcggttctgtgccaacatcataaagg

SEQ ID NO: 11250 - DNA, 119 bp, homo sapiens
aggcaggcccaatgccgaaacacattgcattcataatggacgggaaccgtcgctatgccaagaagtgccggtggagcggcaggaaggccactcacagggcttcaacaagctagctgagg

SEQ ID NO: 11251 - DNA, 119 bp, homo sapiens
agggagaaactgcagaagcatggggtgtgtatccgggtcctgggcgatctgcacttgttgcccttggattccaggagctgattgcacaagctgtacaggccacgaagaactacaacaag

SEQ ID NO: 11252 - DNA, 119 bp, homo sapiens
cctcctcaggtgtttcctgaatgtctgttttgcatacacatcccgtcatgagatcagcaatgctgtgaggagatggcctggggggtggagcaaggcctgttggatcccaggtatcccga

SEQ ID NO: 11253 - DNA, 119 bp, homo sapiens
tagtgatatctctgagtctctgcttgataagtgcctctataccaaccgctctcctcatcctgacatcttatacggacttctggagaagtgcggctgagtgacttcttgctatggcaggt

SEQ ID NO: 11254 - DNA, 119 bp, homo sapiens
tcccagacctctcactcctgcctggtgttccaacccgttctgtggccagagtatacattttggaacctctcgaggccatcctgcagttccagatgaaccatagcgtgcttcaggtaaga

SEQ ID NO: 11255 - DNA, 119 bp, homo sapiens
ttaccatcatcttcttccaaggcatctgggtgagaaacaaagatgggttctgatgggtatgaatcaggccttgccaaacccaagtttctttagttttgacattcagcttacagagctgt

SEQ ID NO: 11256 - DNA, 119 bp, homo sapiens
aaggattaattaccctatctggaacaaagtgattcaagccaagtccatacgcatatgtgtaaggtttccacaatacttctggtaattgatttgaggaaactcaaatgctacgaaataga

SEQ ID NO: 11257 - DNA, 119 bp, homo sapiens
caccttgacgaggccctgaaaagagaacttcaggctccagccagatagtctcgtcactgcacagaattgagtggcagttgtattggggagcgtgactaaattcttgcctgtgtcagcct

SEQ ID NO: 11258 - DNA, 119 bp, homo sapiens
tagcaggccttcaagttacctatgaacgtaagatggcttgaatcggtcactgcaggggaattgtacaacatctctgacttgcttattggatcttccttgtctgaaataaagtggtttta

SEQ ID NO: 11259 - DNA, 119 bp, homo sapiens
agtaacctggaaaatatattcttgcagggatctgggaaagcacaggtgccaaattctgttatgacgatcttttctcagtcattgcccgtacgtaagcatcagtgcggatgaacctgaag

SEQ ID NO: 11260 - DNA, 119 bp, homo sapiens
caagatgggcgagaccaacctgttacatgagctgtgagcggcgaggacagttcctccacagtttcaaacgtttcttgtaaccaccagcaggatgctcaaccctgaaatggtggaagaat

SEQ ID NO: 11261 - DNA, 119 bp, homo sapiens
tttaaaaaagtctcccagagatacttactggatagacattttcttccagttcaggatccagagttctggaccaactgcagaatgaagaaggaagttctcagccaggggcctttttatgc

SEQ ID NO: 11262 - DNA, 119 bp, homo sapiens
ataagcagcaggggtacctgggcttgtcgactggctccagcagctcgagggtgcagagggaggtcatgatttcagtctgctgtttagcaaaatttacaaacacctagaggtaagagaag

SEQ ID NO: 11263 - DNA, 119 bp, homo sapiens
caccatctgcttacttggacttgagatgctgaatggtgcccatacatcgaaaggcgccctttaccatgaggccagccgggtacacagtgcctcacattcttccatgctgtggggcagga

SEQ ID NO: 11264 - DNA, 119 bp, homo sapiens
tctcttgcctgtgggatgtgaggaccacagccctcccttctctgatgatgctcacgatgacgttccacacatgcggcgtgcctgggggtccatccctgtggtgggctcatcctgggggg

SEQ ID NO: 11265 - DNA, 119 bp, homo sapiens
tactcacctcttgcctgctacggtggcatcccctgaggtcactgtggtgtccccagtgagcatcttgaagtggttgttttgccggcaccattcactcccaggaggccaaagcactagga

SEQ ID NO: 11266 - DNA, 119 bp, homo sapiens
ctttcacacgtggtctgcagagtacccacctctccagggcgaactccgacacacagcctgtccactgctggctggaggtgcctggataaatctgcaagatacgaagaaaccggactgag

SEQ ID NO: 11267 - DNA, 119 bp, homo sapiens
gcaacatcatgccaactgtggatctaaccagcacctccaaactcatacccattcccttaccttggttagtcatgtagccttaagatgtcagttttatttccaccagtaataattctttg

SEQ ID NO: 11268 - DNA, 119 bp, homo sapiens
tctttcttcagccacatcatcatcttcatcaacaatgggctccttagtgggctcggcaatcctagatgagaaaaggggtcaggattgggctggctgtacagtgtccttggcactgtcct

SEQ ID NO: 11269 - DNA, 119 bp, homo sapiens
acccatacagcaggagcagtgccacaagggcaggaaggttttctggagaagtgtaggctttcttctgaacccgatgaagatgcccaccaccagcccagcactcacggaataattcatct

SEQ ID NO: 11270 - DNA, 119 bp, homo sapiens
cagattatacataggtcaagtaccttaatgttgtcttcagtttctagatgtttaaggaaatcaggtattctttagaggcctctctagtgatagggccctaaaaaccatgtaaacaaaca

SEQ ID NO: 11271 - DNA, 119 bp, homo sapiens
tacataccccgctcacattcatgatccggccaaggtcgcttaaaaacccaacaagtgcttcccccgtgaggggacgactgggagctttcctccaatggaaattcctccatacctgacaa

SEQ ID NO: 11272 - DNA, 119 bp, homo sapiens
tgaatcaatctgagattttaattctgataaaaatagtttcttacctctgttcattgacccagaatttgcctttaagctgaaagccaaaataaaataatgcaatgaataccacaagtaca

SEQ ID NO: 11273 - DNA, 119 bp, homo sapiens
gatttcttcttacctgcttcttataagagcaggatacgtttttaccaagaagtcggagatgttcctgtcgtcaggtcttgtagaatttccgtgctgcgctgtgttctctgaggcaatga

SEQ ID NO: 11274 - DNA, 119 bp, homo sapiens
taggcacttacggaagccacccttccttcaggcagcggttgccaaagcctggcttattcaggaggacgttgcaagtaccgtgaactgctcactgcctggttcatccatgctagacagag

SEQ ID NO: 11275 - DNA, 119 bp, homo sapiens
aaggaagggaacaagccactggctccagcaccatacccgcaaacagaggtcctgaatcagaatcctccggaccttcagaaaaatctgtcaagaagaaaaaaagagagaattttgtttag

SEQ ID NO: 11276 - DNA, 119 bp, homo sapiens
ggcccgtccagtccttaccatccaggacttgttctggagttaggtcatcgacgtgggctggacacgtggggagaaacccttagacgagcagctgcaggtcccctgcaacagatggatgg

SEQ ID NO: 11277 - DNA, 119 bp, homo sapiens
ttatcggggttttaccgtgtattccttctgggtgctctggatcctccgtttcctctgttaggggctcggcttttccagggctctttcttctctggttgaacaccctgcaccaatcagaa

SEQ ID NO: 11278 - DNA, 119 bp, homo sapiens
ttaagatttgtgttttaaaggactcaccttcaccgccaagccaatacgactcttgtagaagaaagtaccaggaagtggggttccatagtctcctaaaaatagagacaaataaacagaga

SEQ ID NO: 11279 - DNA, 119 bp, homo sapiens
actctgatcatgttcatctgtgtgctgttgtcaaagaagtaccagatctggggccctacttcttcccagctttgaccaacttcctaacgtgttccagttcttcaaaagttgagttggcc

SEQ ID NO: 11280 - DNA, 119 bp, homo sapiens
catcaggctactcacctcttgaattcttggtgacatatcagataatattcctccccaagatctcagattataccttgagaacggctgtctaggagtgtgggaagctgtaattgacagta

SEQ ID NO: 11281 - DNA, 119 bp, homo sapiens
ctgctatgcttacattcatgatggctgtagagtgggttggcattccttaaccagatcaagaccagaaataagataaaggccacacgagttccaccacaaagcgaatctggaaaaacaaa

SEQ ID NO: 11282 - DNA, 119 bp, homo sapiens
cgtttcatgttgaggtaataacataccagttttcccctcttaaattcactaaaccaacttcctggtttccctttggccatgatgaaattcttacctgttgcaaaggaacagaaaagtta

SEQ ID NO: 11283 - DNA, 119 bp, homo sapiens
ttactccctcagattttttgtctggataaatgcaagtctcaccaccagatgtgaaattacagtaaacttgaaggaatctcctgagcaaccttggttaggatcaatccaatattcaccta

SEQ ID NO: 11284 - DNA, 119 bp, homo sapiens
gtcagaacatcactcttgttaacatatacttactggagacccaggaggccctggaagaccactgtcaccttctggccagcgggtccctgttagaaagaagagagaggacataaataaag

SEQ ID NO: 11285 - DNA, 119 bp, homo sapiens
gtttcaatgcaaaattaaattgtcaaagggaaaagtacttacagtagagcctttgttaccctttgggcctgaggaccctacaaaatgcaaatgcaaaagcacagataaaaatctggagc

SEQ ID NO: 11286 - DNA, 119 bp, homo sapiens
ctaccttataaggttattttgtcttgtacttactggtaaacctggaggaccaggtggacctaagggaccgcaggaccaggaattccctagagagagaatcagccaatttaaagggattt

SEQ ID NO: 11287 - DNA, 119 bp, homo sapiens
actcaccccatccccttttgctcctggagatccttgagttccagggagccctcggtcacctttttcccctgttctcctggaggaccaatcaggccaattaaaccaggatgtccctttga

SEQ ID NO: 11288 - DNA, 119 bp, homo sapiens
tcttttattaataacacattcttttattctcaccttttcacccttggagccagggtcacctttgagaccggtaagccaggaggtccctaaataataacaaaaaaaaaaccccaaaacaa

SEQ ID NO: 11289 - DNA, 119 bp, homo sapiens
cactttttaaatgactgaaaagatcttactcaccataggaccaggtggtccatcttggcctgcagctccgggagaccttgttctccctagagaaaataaaaatgattgatttttaaaat

SEQ ID NO: 11290 - DNA, 119 bp, homo sapiens
gctcaccacaggaccagggatgccccgaagaccttctggaccaggctttcctgcaggtccctgaggaccactgggccggtttttccaggaggaccttctgcacctgcttccccctgtta

SEQ ID NO: 11291 - DNA, 119 bp, homo sapiens
atatatattatgtatatattattttttttttaccttagcacctttttcaccttgtcttccctctgcaccgcagctccaggaggaccctatagacataagatttattgtaaaatatgtat

SEQ ID NO: 11292 - DNA, 119 bp, homo sapiens
atatgtttcaaataaagaattaaagaaacttactcgttttccaggaggacctggtgggccagcctcaccgatgggccaggaggaccctataaaatgtgaaaaaatacctttaacaaaat

SEQ ID NO: 11293 - DNA, 119 bp, homo sapiens
aaaacttaaaaataaattagtgcatttactcaccggttgaccaggatctccatcttcacccttgtcaccccaacaccatcttgaccctataagaggcaataaaatatgaagcaagatat

SEQ ID NO: 11294 - DNA, 119 bp, homo sapiens
aaaataatttcttgatttttccctgatacttactgcagggccaggttccccaggaggaccaggatctccggaaaaccaacaggaccctagaatgacgttttgaaagaaaaagaaataaa

SEQ ID NO: 11295 - DNA, 119 bp, homo sapiens
acttaccgggttacccttagggccatcatcacctggtggccccttggcacctggaggtccagcagctccggtggaccagcttcccctttctctcctctttctcctttgggaccctaaac

SEQ ID NO: 11296 - DNA, 119 bp, homo sapiens
aatacactatgttaacaataacacagtacttacgcctacacctgcttccccaggaggccctgggttcccgcttctccaggttcaccctatatagagaagatcaaattagtattagaata

SEQ ID NO: 11297 - DNA, 119 bp, homo sapiens
ctgtttcaaactgtgtgtcactaacatatttaccttttctccaacaccaccaactgaaccaacagacccgggggtccttgtggtccctgcagtgtagaaaaaggaatgtaattatccat

SEQ ID NO: 11298 - DNA, 119 bp, homo sapiens
caaaataattaacatatatttcagagttcttacatcagctccattgggaccttgagggcctcttgggccggaggaccaggtggcccctgtaagagagaaatattgaggtttacaaagac

SEQ ID NO: 11299 - DNA, 119 bp, homo sapiens
catacccatcaaacaccaaaaataaaaacttaccatgggaccaacatccccattttcacctttttcaccggtgggcctggcagaccctaagaaaatataatagaaaaataataaaagtc

SEQ ID NO: 11300 - DNA, 119 bp, homo sapiens
tcttacctgaagacctattggaccaggaggtccagggaagcctctggcaccctcatcacctttttgcccaacatcccctgctgtcctctaggacctggttcaccatcacctccctagag

SEQ ID NO: 11301 - DNA, 119 bp, homo sapiens
atttagatttgctgaacaatgtggaatactcacagcaattccaggggcaccaactggtccttgaagaccgggggaccgggagggccctgcagtgagataaaaataagtaatttttaaag

SEQ ID NO: 11302 - DNA, 119 bp, homo sapiens
taatgttctctcagtaagaagtaggaaactcacattttctcccttgtcacccttgctgcctttttgtccggctcaccaatttcaccctgaaattgaaagatttgacttagagtttatct

SEQ ID NO: 11303 - DNA, 119 bp, homo sapiens
accaaccttgtctccgtcttccccaggggagccggcaggaccagctggccctgggagaccaacaggacctgaactccatctctccctgcaggcccttggggacctttttctccctgtat

SEQ ID NO: 11304 - DNA, 119 bp, homo sapiens
acttacaggagcacctttctctccagctggaccaggaggaccctgaggtcccgggcgccctggtaaaccattgggccagctgtacctgctgacccacgttctcctggtgagccctagta

SEQ ID NO: 11305 - DNA, 119 bp, homo sapiens
gattgtctggctatttattatcatcatacttacaactggacctggtgggccctggggaccttcccctccttcagtccaggtgcaccctgggaaaagtgaaaaaaataaagaaaatgaat

SEQ ID NO: 11306 - DNA, 119 bp, homo sapiens
agatattgattatacctgagctccaggaagacctctttcccctgggaaaccacgtaatcctgctggtcctctttccctgagataccttgaggacctggatcaccctaaagaatataata

SEQ ID NO: 11307 - DNA, 119 bp, homo sapiens
ttgtacctttgcaccttcttttcctgcagcaccaggaagaccttgctcaccaggagggccaggagggccggatgcccacgttcccctattggaccagtctcaccggttggtccctaaat

SEQ ID NO: 11308 - DNA, 119 bp, homo sapiens
atcttgcttgggaaataaagcaaaggaacatacctgtggtccaaccactccccctggcccaggagggccgtcttgccttgaaatccctaaggaggcaaagtattatttgtaaaagctac

SEQ ID NO: 11309 - DNA, 119 bp, homo sapiens
gaaatttttaataagagtaacaaggtcacttacagtctccccacgttgcccagggtgtcctggcagccctccttcccaggtggtccctgaaattacaaatattaaataccacatgtcat

SEQ ID NO: 11310 - DNA, 119 bp, homo sapiens
tgaagaaagagaaagagaagctctgacacttacaggagggccttttggtccagggaatccaactggacctgaggtccttgaggaccctggaaataaaaagcagtggggagaagttaaca

SEQ ID NO: 11311 - DNA, 119 bp, homo sapiens
aattttcattttatattatgtggctgtatcatacgtactctttcacctggagggccaggagggccatcgcacctgaagtgccctggcaccaagaaaagaaaagaaaaatcagtttgaat

SEQ ID NO: 11312 - DNA, 119 bp, homo sapiens
gtaacatccaaacagaaaaagtacaggtgatacctttggcccaggtttcccagtgggacctcttgcacccttgaacctcgaggaccctgcagatgagaacaaaagatgaacccaaacta

SEQ ID NO: 11313 - DNA, 119 bp, homo sapiens
tatgaaaaatgtacatcattttaaatcaaggcacctaccgttggaccacgctgaccccgagggcctggttgccagctactccctagcaaagacagttcaatttcaatatgcagtatatc

SEQ ID NO: 11314 - DNA, 119 bp, homo sapiens
atacatagttcaaaacatatttatatatcatacccgtgcacctttctctccattggcacctggaaacccgggaatccagtggaaccctacaataataaaagtaaataatgaataaacat

SEQ ID NO: 11315 - DNA, 119 bp, homo sapiens
tgttaataaactataaatatcaagctgttttacctttggaccttgtcttcctggatatcctggtaatccggaactccaagttttccctacagttaaaatatataataatcaaagtaata

SEQ ID NO: 11316 - DNA, 119 bp, homo sapiens
accaaccttttctcctgcttgacctgaaggacctgggtctccagttgggcctgctcgacctttgggtcctcagggccatcttcccctcttgggccaatttgaccaacttctccctgagg

SEQ ID NO: 11317 - DNA, 119 bp, homo sapiens
ttgtgtactggtgtacattttctctatacttactctgtcaccttttagacccatgtcacctttgaatccggaaaaccatcttcaccctaaaacattataaaaggaattaaataggagtt

SEQ ID NO: 11318 - DNA, 119 bp, homo sapiens
acacagaaattaataccatctaaacaattaaattttaccttttcacctttagatcccttgagacctctgcaccatctgctccctgtggaataaattagaagtattaagtgaatataaca

SEQ ID NO: 11319 - DNA, 119 bp, homo sapiens
aaagtaaataatgtgaaaacaatttaacgttacctttactccccgggggcccgggtatccaataggacctgtggaccagggggaccctgaaatagatgaattaccacttatacgtgtaa

SEQ ID NO: 11320 - DNA, 119 bp, homo sapiens
tattaataggacatttaaatggatactttggaacctaccagagcccccttttctccagactggccttcttcccaggatgaccctatatttagcaaaaacatacactgataagatgtaat

SEQ ID NO: 11321 - DNA, 119 bp, homo sapiens
agaaattttaatgaccaggtagctgttacttacaggaggcccatcagcaccaggaagtccagcaagtccggttttccttgtggtcccttatagagaaaaaaaaaatattaaaaagataa

SEQ ID NO: 11322 - DNA, 119 bp, homo sapiens
tgttcaccaggctttacgagaacaacagagtaacttactttttcaccaggaggaccaattggaccttgtgaccaggaagaccctattttaaaagaatttatttcatatatcagatatca

SEQ ID NO: 11323 - DNA, 119 bp, homo sapiens
tatttcaaaggagctgcagtggcttagacttacctgaggtcctggattcccttgttgacctggaggcccggctccccttggggaccctgccagaggaaaatataaaaagtttttaatgg

SEQ ID NO: 11324 - DNA, 119 bp, homo sapiens
ttcaaatatgagttattttatcactatttgctacataccatgttcccttttggtcctggggggccatctcacctgccataccctgcaatgaagaaaaagtatttatggttgtttatatg

SEQ ID NO: 11325 - DNA, 119 bp, homo sapiens
tagaaaatcttcaatgtttccagcaatacatacaggctgccctggagctcctggagttccccttggaccagcaaacctcgtgggccctaggagaaaaagaaaaagcacgcctttattaa

SEQ ID NO: 11326 - DNA, 119 bp, homo sapiens
tagaaatattacttaaaaataaaaagtaagttgcttacagcttcacctggaagacctcttggtccaattctccatcttctccctgtcattgacaaaatgaatgagagtatagaacattt

SEQ ID NO: 11327 - DNA, 119 bp, homo sapiens
aaatatttcttaagaaaagaagtattaacataccctcattccatcatcaccaggaggacctggaggacctgaggacctcgttcaccctgttaaatcaatacaaataagattagcatatg

SEQ ID NO: 11328 - DNA, 119 bp, homo sapiens
ttccctggaaaaaaaggaatagatgtatcttaccctgtgacctttgtcacctggcagacccggaagtcctcaaaccctcgatctccctgtaaaaccatcatcatcatcatcatcatcat

SEQ ID NO: 11329 - DNA, 119 bp, homo sapiens
ggatgtgaatataaaaatatgtgagctcctgacctttgccccaggttctcctggcattcctcttcctcctctgcacctggacgaccctaataatgccaacagcatgattaagcgaagtg

SEQ ID NO: 11330 - DNA, 119 bp, homo sapiens
gccttcaaaatgcacaatgaaaataagccataccctttttccaggttttcccgttggaccagggggacctggacgcctcgagggccctatatcaagacatcataattaaaccatattat

SEQ ID NO: 11331 - DNA, 119 bp, homo sapiens
tcaagaataaaaagtcaaatttttattttttacctgaggacctggatcaccactctcacctttggccccgatgaaccaggccccccctatagagaaaaagtgaagatatttcacttaat

SEQ ID NO: 11332 - DNA, 119 bp, homo sapiens
taacatatattatctttgttggggtaacctaccacaggacctggtcttccagttagacccattgggccagtgggcctctcagagcaatctagaaaacaaaatatatcaaattcagtaat

SEQ ID NO: 11333 - DNA, 119 bp, homo sapiens
aagtttatcctgtcttacccgagcctgctgaagaatagcttgagcctgagcttcctgagcagagatggtggtcctttggaaccatcaccaccataacggaacttggaagagataacatt

SEQ ID NO: 11334 - DNA, 119 bp, homo sapiens
ctataacataaaaaagaacataccggtaacatcaacatagtaccaggaggaccaggtagaccatcagccctggtaagccaggacgtcctggggggccctagaaaaataaatgaaataac

SEQ ID NO: 11335 - DNA, 119 bp, homo sapiens
gtaatgagatatcatgtccattcacttaccctatcgccagggtcaccagggggtccagtggggccttgtgacctggaggacccataataccctatagagaaacacaccatatcttaatc

SEQ ID NO: 11336 - DNA, 119 bp, homo sapiens
ctttaaatagacaaaaataatcttaaaacatttacatactgcaggtcctgctggtcctggtggtccttcacaagcataccctataacaggaaaagagaacatctctaccagggaaatat

SEQ ID NO: 11337 - DNA, 119 bp, homo sapiens
ctttaaagtgtattcacactactacttacaggctcaaccactgctggttctcctttctgtcctttctctcatatgcaccatggccatttatctgttgaatgaaatattcaaaacagcct

SEQ ID NO: 11338 - DNA, 119 bp, homo sapiens
tctatacgtattacctcatttgtcccagaaacatgcctaggagcttctgtctggtaactttccattgttcatagttgtattcttgaaaatcatcaacgatgtttgcctaatggtaaatt

SEQ ID NO: 11339 - DNA, 119 bp, homo sapiens
acctccgtctgtgctattgtctcctcagttacagtgggtccctctgttacactttcagcctctttatacctgcttccccatactcatagtcatattcgattatatcctctggtgcatac

SEQ ID NO: 11340 - DNA, 119 bp, homo sapiens
tcaccctatcttgtcttttggggctttgtttctactcacttcatctgtttgacgatggtgctctttcctactccccagcacctggaaggaaaaatgcttatgctttcgatttccaccag

SEQ ID NO: 11341 - DNA, 119 bp, homo sapiens
cggcggtggcggtagcgacggcacgccgtagggcggtcagaaggtttccggttccggtgtaacgttcggctccgtctcaggggctgaagtttgtgaggtgagtagtggccccgggccca

SEQ ID NO: 11342 - DNA, 119 bp, homo sapiens
ttttttcctggagagcagatcaaacagatgatggaggcagcaacacgacaaatcgaggagaggaaaaaaagctgagcttcattagcccccctacacctcaggtattgtgtctagattac

SEQ ID NO: 11343 - DNA, 119 bp, homo sapiens
ttttcttcctacaattttagtacagaggaaaatcccaagagagaagattattttggaatcacaaatcttttgaacatccagcccagctcaatcctccaggtaatgtatagattcctgaa

SEQ ID NO: 11344 - DNA, 119 bp, homo sapiens
ttcactgcagtgagaatttctaatttgatgcgagtattaggaacagaagctgttcaagaccccacgaagtagaagcccacgtcagagctcagatggcaaaaagacagaagtaagtgcca

SEQ ID NO: 11345 - DNA, 119 bp, homo sapiens
cagagcgcatgaagaggccaacgctgcccgaaaactcacagcagaacagagaaaggtcaagaaaattaaaagcttaaagaagacatttcacagggggtacacatatctgtatataggta

SEQ ID NO: 11346 - DNA, 119 bp, homo sapiens
gagttcgaaatttgagcaacccagccaagaagttcaagattgaagccaatgctgggcaactgtacctgaaggggtggtggtactgcacaaggatgtcaacgtggtagtagtggaagggg

SEQ ID NO: 11347 - DNA, 119 bp, homo sapiens
attcttctctgtttccaggccccaaggcccagaagaaatttaagcgtcttatgctgcatcggataaagtggatgaacagacatctaacacaaagggagatggtgaatgggggttagagg

SEQ ID NO: 11348 - DNA, 119 bp, homo sapiens
ctaagtctgtaacaagatttctcttccagatgatgaggagtctgatgaggaagctgtgaagaaaaccaaaaatgtgtactagtctgggaggtaggtgatcctttgtaaaacattgtaaa

SEQ ID NO: 11349 - DNA, 119 bp, homo sapiens
atctcgccctcccaactccccactttcagataccgtggccagccagtgacagaaaaaagagtgaatgtgctttaagaagaagagcaatgaggtaagtggaggtgggggagtaggggtag

SEQ ID NO: 11350 - DNA, 119 bp, homo sapiens
gtctccctcagacacagtgtttcaacttcatccgtgtcctggtttcttacaatgtcacccatctctacactgcggcaccttcgccttcagccctgcttgtaccttcattgtgagttctc

SEQ ID NO: 11351 - DNA, 119 bp, homo sapiens
catttaggaacttcaagattcctacctgttgcccatctcggaggacaaggtcatggagggaaaaggccaagcccctttgaccccgctcacaagcatacggctgtcttggtgggtgagta

SEQ ID NO: 11352 - DNA, 119 bp, homo sapiens
agatgggatgctctattctggtactatgaacaacttcctgggcagtgagcccatcctgatgcgcacactggatcccagcctgtcctcaagaccgacaacttcctccgctggctgcatcg

SEQ ID NO: 11353 - DNA, 119 bp, homo sapiens
gccacagggtcgctccacaaggctgtggtaagtggggacagcagtgctcatctggtggaagagattcagtgttccctgaccctgaacctgttcgcaacctgcagctggcccccacccag

SEQ ID NO: 11354 - DNA, 119 bp, homo sapiens
gctctcttaggaactcctggaagcaggacatggagcgggggaacccagagtgggcatgtgccagtggcccatgagcaggagccttcggcctcagagccgcccgcaaatcagtgagtgta

SEQ ID NO: 11355 - DNA, 119 bp, homo sapiens
gactcaaattaaaatctggaaaaataagacatactcaccatctctccagccagctcttttggaggatggctaaatcttgtagctagaaaataaggaaaatggaacatgaaatagagaaa

SEQ ID NO: 11356 - DNA, 119 bp, homo sapiens
tactactttctcctcacctgaaggtcagtggcatttttggctaatccacttagtgtttcctttaggcaaaagtgaattcttgttgggaggtcatatcactgcctaggagagattaaaaa

SEQ ID NO: 11357 - DNA, 119 bp, homo sapiens
tatactttggcagtgtctcctggcgatctcttctggggccccgaagcatcaggggccgtggtggtagaaggggtgctggggagggtttggctttatcgaaatcatcaagagcaccttca

SEQ ID NO: 11358 - DNA, 119 bp, homo sapiens
atgggctcttactttccagaagctcctccaattccctgtccgcttcggccccgacactacagccttcctagcggcggccatcttgctacctccgacttgccgtaggaggcgggacctcc

SEQ ID NO: 11359 - DNA, 119 bp, homo sapiens
acctatgttatttttatcttcacagaaattggcccagtgacaattaccacagatcccaagaaatttcaaatgaactcagagaactgtatgttcaggtgagtgcttgctttcagtgttct

SEQ ID NO: 11360 - DNA, 119 bp, homo sapiens
ctttcagggaagctgataaaaaagggatttggcctgcatgagctattaaatatccataactctgccaaatagtgaatgtgaaagagccagaggctggaatgtggacagtgaaggtacgg

SEQ ID NO: 11361 - DNA, 119 bp, homo sapiens
ttgcatatgaccagcatactggatcaactgctgaccaggtttgtcattaaacattttcagacctcaagcgtggaaggcactctgttcgcattactggcctcagtactattgatttccga

SEQ ID NO: 11362 - DNA, 119 bp, homo sapiens
gctggcttttctcgaaagcccaccctggacttcaaaaaaacagtcagcagaccagtgcaaggtttgtattgcatattatttaaattgacataatagatatccaaatgaaaaatatttct

SEQ ID NO: 11363 - DNA, 119 bp, homo sapiens
tgctttcaacttggtcttattttatagtaactaaaagttttccattttcttacctccagagaatctgccgtgtgaacttagatattgcaaaggtcactttgtctgacgaaggtttctat

SEQ ID NO: 11364 - DNA, 119 bp, homo sapiens
gaatgcattgctgtcagcagtgcaggtactggacgggcacagacattttttgacgtatcaggtaattacactaatttctttgcagttgcccaagtattaatgcagctatggaaatggga

SEQ ID NO: 11365 - DNA, 119 bp, homo sapiens
cagaagcccctaagttgatggtagttcagagtgagctcttggttgcccttggggatataaccgttatggatgcaaaacctctggtattcctccacctcaagttaaatggttcaaaggta

SEQ ID NO: 11366 - DNA, 119 bp, homo sapiens
tcttccttttagacttatgggcaagtgataaaggaacctatatttgtgaagctgaaaaccagtttggaagatccagtcagagacaacagtaacagtgaccggacttggtaagatcaatt

SEQ ID NO: 11367 - DNA, 119 bp, homo sapiens
tcagttctgccaaccattcagcatgggcagcagatactcagtacaattgaaggcattccagtaactttacatgcaaagcaagtggaaatcccaaaccgtctgtcatctggtccaaggta

SEQ ID NO: 11368 - DNA, 119 bp, homo sapiens
ttttcctaatagaaccacccacagtggaagatctagaacctccatataacactactttccaagaaagagggccaatcaacgcattgaatttccatgtcctgcaaaaggtacgtaatact

SEQ ID NO: 11369 - DNA, 119 bp, homo sapiens
ttctagtgccaccagctatagaaggaggagatgaaacatcttacttcattgtgatggttaataacttacggagctagattgtcatgtgacaggctctcccccaccaactatcatgtaag

SEQ ID NO: 11370 - DNA, 119 bp, homo sapiens
ctcttgtagaaccacctagtctggaagatgctggaaaaatgctgaatgagactgtgttggtgagcaacctgtacagctggagtgtaaggcagctggaaatcctgtgcctggtacattta

SEQ ID NO: 11371 - DNA, 119 bp, homo sapiens
ttttgttttcagattgaagatgctcaggttcaagacactggtcgttacacttgtgaagcaacaaatgttctggaaaaactgaaaaaaactacaatgtcaacatttggggtaagtgtaat

SEQ ID NO: 11372 - DNA, 119 bp, homo sapiens
caggaggcaggatgctacggctgatgcagaccacaatggaagatgctggccaatatacttgcgttgtaagaatgcagctggtgaagaaagaaaaatctttgggctttcagtattaggta

SEQ ID NO: 11373 - DNA, 119 bp, homo sapiens
ttgttgttgttttttagtaccacctcatattgtgggtgaaaatacattggaagatgtgaaggtaaaagaaaacagagtgttacgctgacttgtgaagtgacaggtatgggctcagctct

SEQ ID NO: 11374 - DNA, 119 bp, homo sapiens
caggaggcagaactctgcagatcctcaatgcacaggaggacaatgctggaagatactcttgtgtagccagaatgaggctggagaaatgataaagcactatgaagtgaaggtgtacagta

SEQ ID NO: 11375 - DNA, 119 bp, homo sapiens
caggagggcgagtgttgcagattcctcgggctaaagtagaagatgctgggagatacacatgtgtggctggaatgaggctggagaagattcccttcaatatgatgtccgtgtactcggtg

SEQ ID NO: 11376 - DNA, 119 bp, homo sapiens
tttttcccttagattctgaatactcaaataacagatatcggcaggtatgtgtgtgttgctgagaacacactgggagtgccaaaaaatattttaacctcaatgttcatggtaagagctca

SEQ ID NO: 11377 - DNA, 119 bp, homo sapiens
caggtggtcgaactctacagattattcgggccaaggtatcagatggtggtgaatacacttgtatagctacaatcaagctggcgaaagcaagaaaaagttttccctgactgtttatggtt

SEQ ID NO: 11378 - DNA, 119 bp, homo sapiens
tagtatctttttcttttaggtatctgacacaggccagtatgtatgtagagctataaatgtagcaggacggatgataaaaatttccacctcaatgtatatggtgagcatttgcctctaat

SEQ ID NO: 11379 - DNA, 119 bp, homo sapiens
ttgtttctcaggattgtgagagctcaggtgtctgatgtcgctgtgtatacttgtgtggcctccaacagactggggtggataataagcattacaatcttcaagtgtttggtatgtgtcac

SEQ ID NO: 11380 - DNA, 119 bp, homo sapiens
cattatttgggttttgtaggtggaggatacaggaagatatacatgtctggcatccagtcctgcaggagagatgataaggaatatctagtgagagtgcatggtaaatttgacaaaatatc

SEQ ID NO: 11381 - DNA, 119 bp, homo sapiens
ctgggaaaatttatgaaaacctacatatagtatctcatgctttgaaatgtgtcttctaggctcctttctcaggttcactagtaattatttccccttctgtggatgacactgcaacctat

SEQ ID NO: 11382 - DNA, 119 bp, homo sapiens
gaatgtactgtgacaaacggtgctggagatgataaaagaactgtggatctcactgtccaaggtagaattgcttggaacatggattgaaacatgataatgctatcacttcgttattctac

SEQ ID NO: 11383 - DNA, 119 bp, homo sapiens
ttttaggagcaattgaaatacttgccacccaattaaaccatgctggaagatacacttgtgtcgctaggatgcggctggctctgcacatcgacacgtgacccttcatgttcatggtatgg

SEQ ID NO: 11384 - DNA, 119 bp, homo sapiens
acgctgcttatttccatagaatgaagatgccggtgactatacatgtgtagctaccaatgaagctggggtgtggagcgcagcatgagtctgactctgcaaagtaagctgcttaatgaaac

SEQ ID NO: 11385 - DNA, 119 bp, homo sapiens
tctgtgcttacagaaaccatatttttttgctgtcaaaatgaatgtcttgtaattcccaggagaaatcttcagatgagtcatattgcccggggcttggattccgatggttctttgctgct

SEQ ID NO: 11386 - DNA, 119 bp, homo sapiens
agatatcgttgtgagtggctatgtcctacagcttcagtcacctgctgaagtcactgtaaaggtaaaatgcaggataacttgtctttgctgcttattagagtaatgatgagtgaaaggtc

SEQ ID NO: 11387 - DNA, 119 bp, homo sapiens
agttaactttgctttcctctctgtggtaggagatcgcagtaatcagtgcccctccgggtttaccttagatcagttggacctttttgtgctggtaagtacagagataaataaagggtttt

SEQ ID NO: 11388 - DNA, 119 bp, homo sapiens
atgaggatgaatgtgcagcagggaatccctgctcccatagctgccacaatgccatggggacttactactctcctgccctaaaggcctcaccatagctgcagatggaagaacttgtcaag

SEQ ID NO: 11389 - DNA, 119 bp, homo sapiens
cagatattaatgaatgtcaagaatccagcccctgtcaccagcgctgtttcaatgccataggaagtttccttgtggatgtgaacctgggtatcagctcaaaggcagaaaatgcatgggta

SEQ ID NO: 11390 - DNA, 119 bp, homo sapiens
atattgatgaatgtgaaaatacagatgcctgccagcatgagtgtaagaatacctttggaagttatcagtcatctgcccacctggctatcaactcacacacaatggaaagacatgccaag

SEQ ID NO: 11391 - DNA, 119 bp, homo sapiens
gttttagaaaggccctgtggacatcctggagatactccttttggtacttttacccttacaggaggaaattgtttgaatatggtgtaaaagctgtgtatacatgtaatgaggggtatgta

SEQ ID NO: 11392 - DNA, 119 bp, homo sapiens
tctgttattttttggttttcaggtatcaattgctaggtgagattaattaccgtgaatgtgacacagatgatggaccaatgatattcctatatgtgaaggtagacataaaatgtatttac

SEQ ID NO: 11393 - DNA, 119 bp, homo sapiens
aatatcatctttatttattattgtaggtatcatgactggtgccttttattcagtctcaacgttattaaacaaatgatattgacatattatgaggtaagcttctgcttatatcagattgc

SEQ ID NO: 11394 - DNA, 119 bp, homo sapiens
tttttcagggagaagaagtcaatgctggaaggattgggctaacgctagtagtagctggaatggtgggcttattctttgtggcttatggctggattatactaaaacatacaagtaagtga

SEQ ID NO: 11395 - DNA, 119 bp, homo sapiens
tttagacagactactctgatagtttatattttgtcttttattggaatggttatctttactttcacattgaccttagatatattatcatcgtgtttgttactggaggggtgcttgggtaa

SEQ ID NO: 11396 - DNA, 119 bp, homo sapiens
ttcctagcttcttcatgactggttacctccctttgggttttgaatttgctgttgaaatcacttaccctgatctgaaggtacttcatctggtcttcttaatgcttctgcacaggtaaacc

SEQ ID NO: 11397 - DNA, 119 bp, homo sapiens
ttagatatttggaattttgttcacattggctcaaggaaagctcacatcagactatggtcctaaggcaggaacatttttctctgtgtctggatgtttataggcatcatattaacaggtaa

SEQ ID NO: 11398 - DNA, 119 bp, homo sapiens
agtaacttgatgcccctctgtttcagcattaatcaagtctgatctgcgaagacacaacataaatataggattacaaatgttgatgttaaagctgtaagtaatatttttatgattatact

SEQ ID NO: 11399 - DNA, 119 bp, homo sapiens
ataatatgagttgtttaccaagtccagtagaggtatcatattggatcaacggcgtcttaacacttccttgtcagtcgtgcagatgacctggaaaaagaaggctagacaaaaggaagaac

SEQ ID NO: 11400 - DNA, 119 bp, homo sapiens
cattaccttcaggagctgcctgcagtgtctgacctagaaaaggctcgcttgaagtgcacccagcagatgacaagctgtaagagtgaagctgtagttggtgtatggctggagacctagaa

SEQ ID NO: 11401 - DNA, 119 bp, homo sapiens
gtaccttgaagtgatgccacgaattgtgggtgttggtatatcacttggagtgtcttccacagtggtaattgggttccattgcttttcacgcaggcatatattgtgcagacttcaacctg

SEQ ID NO: 11402 - DNA, 119 bp, homo sapiens
taccttcttgtggagtagagatgttcaatgcatgtgagctctcagtacagccagccaaagtgcaagcagtagggttactgcatagtttttgaagggtagcaagcctgtcaatatgccta

SEQ ID NO: 11403 - DNA, 119 bp, homo sapiens
atttgaagataagtatttacctgctcctgttgtacgtcctcgactccaatcactatatactgaacctcctcatgcgaggctatcactcgatacaggtattcttaaatggaaataagatg

SEQ ID NO: 11404 - DNA, 119 bp, homo sapiens
taaactcaccaggatccttcctgaggatggtataacttcgcgggagccctcccagaaagactcctgtgtatctccaataacagtactaccattcaggatggcagaggaacctagagaag

SEQ ID NO: 11405 - DNA, 119 bp, homo sapiens
aaatagaactcacatgaagtccttcagtgaagctctcctgggagcagaggcatctatatggctggcttgtgtgtcgcagttatcggcatgaccatggcactgacatctgcaaacatgag

SEQ ID NO: 11406 - DNA, 119 bp, homo sapiens
tgaggtttacaatgcaacatctgcttacctgtttgtaagtgccacttggtataatcgaaaatcttgcatcttccgacaaactgctctaaacctgcaaatacacacatgtgcataatata

SEQ ID NO: 11407 - DNA, 119 bp, homo sapiens
ctgcttttgctctatagttaatcagctcaaagatttgttgcgccaacaagcagataaggaaagtgaagttctccgtcaagaagaagaaaaatgtcccccttggtaagtatcaacttttc

SEQ ID NO: 11408 - DNA, 119 bp, homo sapiens
tagaggtcattagaacatgaggaaaccaatatgcctactatgcacgaccttgttcatactattaatgacagtctcaatatattcatcatttagaggcagaagttaagttctgcaaggta

SEQ ID NO: 11409 - DNA, 119 bp, homo sapiens
aatgtacttctatttttcttttctataggagaagctaaaacttacttatgaggaaaagtgtgaaattgagaatcccaattgaagtttttgaggtaaagtgaaatcgtccatttatagtc

SEQ ID NO: 11410 - DNA, 119 bp, homo sapiens
aggtgtgtggagaaatgcgctatcagctgaataaaaccaacatggagaaggatgaggcagaaaaggagccagagagttcagagcaaaaactaacagggatcttgaaattaaagatcagg

SEQ ID NO: 11411 - DNA, 119 bp, homo sapiens
ttctagaaaatgaacagtatttgttgctgacctcccagaatacatttttgacaaagttaaaggaagaatctgtacattagccaagaaactggaacaaatctctcaaaaaaccaggtagg

SEQ ID NO: 11412 - DNA, 119 bp, homo sapiens
cttgacatgttctacttctcaccacttggtatccctgggggcacatacatgagaatttcccaggttcatgacacattgatattgacacaggtagcttgaggttctgcattcatcaatgt

SEQ ID NO: 11413 - DNA, 119 bp, homo sapiens
cttcacagttgagcctgtcactgcttagctcatatccttgattgcactgacagatgaatgaaccaagaagttgtagcactgctgagcacattgattgctggcatcacattcatttatat

SEQ ID NO: 11414 - DNA, 119 bp, homo sapiens
ctacgcaggtatagttgtttgctgccaattgaaacccaggactgcactggcaataaaatgagcctggtgattcacgcatctttggtggcaatatggagggatggtacattcatctatgt

SEQ ID NO: 11415 - DNA, 119 bp, homo sapiens
gcaatgatcacatggaagtctttgaagctggctcacctttgcattgctgtctcacaggatcccactcattccgtcagtgcattgctgtgaagaaaacatcaaaggtggggccaggagac

SEQ ID NO: 11416 - DNA, 119 bp, homo sapiens
ttccatcaccccttaccgtgtacgtgatggtttcttcggtgtcctgtgacttgaccagcgccagagtcacatagttaggaaaagggctttcaacattgtgaatctcaaagaaaatacag

SEQ ID NO: 11417 - DNA, 119 bp, homo sapiens
tctgttctctagaacgttaaggctttcccagtatactcaccttgagctagcagagttccttgcacagcaagcaaaaatacctgtgagccaatatgaattgccttggcctcaagcttttt

SEQ ID NO: 11418 - DNA, 119 bp, homo sapiens
taaacacaacctgagcaactctttcaaatagcagtggcctcttttttaatttttcttctctttcttctattctcgttggtattctctcatcctttccttttcgctctttctaaaattaa

SEQ ID NO: 11419 - DNA, 119 bp, homo sapiens
cttagaatttaaatgtctagtaataaacagagaaagtgttttacctgttctctgccgtcttctctcagtctccgtctaaagtaaaagattaaaacattaattatcttaaaagtctaata

SEQ ID NO: 11420 - DNA, 119 bp, homo sapiens
ggtgtcttgaataccattaccttctgcattacaggtattagtcatcaaaaatccagaacagatgtcttttcaagttcattccttctgtcaattatttgtctgcagtatatgggtgtttt

SEQ ID NO: 11421 - DNA, 119 bp, homo sapiens
aattcttaccaaccccagaggttattgattctgcatcaatgtcactagctctttttcttgccacttcagtagtgccaattcacctttatctagtgcaaggtaatgaatatcctgaggaa

SEQ ID NO: 11422 - DNA, 119 bp, homo sapiens
cacaaaatcatctctgaaaatgactcaccataaagaggtcacgagcaccaacgtcaacagctaggagaatgccttttcaaacctctggtacctacaaggcagaaaaaaatattatgtta

SEQ ID NO: 11423 - DNA, 119 bp, homo sapiens
taccatcactgatggtgtctgagatgagcttccccaccaggcttctgtcaatcaccactttctccagctcggcccagaaaggcttagagacaccagcacacctgaaccaaaaaggagct

SEQ ID NO: 11424 - DNA, 119 bp, homo sapiens
acactgcaaaggcttgtcaaatcattttacctgacagacatatttgttcttccatttgctcagcacacacgactgttttgcatcagctcctgaagcacaacagaaaaagagagagcgta

SEQ ID NO: 11425 - DNA, 119 bp, homo sapiens
atttttgaaactttttgaaagatacctccaactctttgagcgagtctcggagtttttctgggcgtctgttttgagcgtccaaggataatctcgtgctggcaaataaaacatgtactaca

SEQ ID NO: 11426 - DNA, 119 bp, homo sapiens
gttttataataattccaaaaaatataaagtaagcttacactctgccagcttctgcttcttttctaagttccatgctctgtcgctgatattgtggcagaagggatagaaagaaaaaaaca

SEQ ID NO: 11427 - DNA, 119 bp, homo sapiens
ttaataaaaattaattgcacagaataggtactttacctggtggatctttcttgtcataatactggtagacccaatgtctctatctatagaaaggaagaaataacattaaattatgattt

SEQ ID NO: 11428 - DNA, 119 bp, homo sapiens
aatccagagctcatttacccgcaatgtgtaaggtattcttcaaagaccacaggtgcagttcagtcaagcgaaagacatctgatggcagaaggaatctctatcctgtttaaaaaataatt

SEQ ID NO: 11429 - DNA, 119 bp, homo sapiens
gtcatacaagatagctttgcttctcctgatttgcctttgctgacctgtttgacacaagaccaagaatttcgcctgattctttatttcatcaaagtgaactaagttttgcacctctgagg

SEQ ID NO: 11430 - DNA, 119 bp, homo sapiens
tattttgtagagggcctgcaggggaaggttgagtctgacgtcattactctggatggcctaaatgaaaatctgttgtatgcagtgaaagagttgctgaactacaaagaaaggtgagacac

SEQ ID NO: 11431 - DNA, 119 bp, homo sapiens
tgttccacataagccaacaagagagtcggaatatcactcttcagatctcagaatgttgaggatgtctccgacactgtgccaaaggctcctaaacatttaaaagcaggtacgtagaaaaa

SEQ ID NO: 11432 - DNA, 119 bp, homo sapiens
tgtggataactgtgacattgactgcaggtaataataacaagatctcttttatttttctaggtagcaaacatgtgatttcttctgactctatttcctcttctgccagtagtttcctgagc

SEQ ID NO: 11433 - DNA, 119 bp, homo sapiens
tcaaactctactttttgcaacaagcagaatgtacacatgttaaacaagggcatacaagcaggtaattactgaatctaaactttttcattgaaatacattgaaatggctcttaaacatgt

SEQ ID NO: 11434 - DNA, 119 bp, homo sapiens
actgaaaaccctttcttctcttgcctagtcttcctggctatccagaagaacaagcctatcagcaagaagaaatgattcagaggtccaaacggtaagaccaagaaaacaagagtacgtat

SEQ ID NO: 11435 - DNA, 119 bp, homo sapiens
catttctaaggatttatgagcagcttccagaagtacagaaaaagagagaagaagagaagagaaaatcagatataagtcataccggctgcgagcccagctatataaaaaggtcagtgggt

SEQ ID NO: 11436 - DNA, 119 bp, homo sapiens
caaggagtctacctaacagtgtttaccttcggtcaagttctgtgtcactgaaggaagaatcagagtgagaactccaactggaagatctttttcctggcaggaaaatgaaaaatgtcaga

SEQ ID NO: 11437 - DNA, 119 bp, homo sapiens
atcatgtgttttacttactggcaatgcagtggataccgttttggggatctgattggacactttccatggaatctttataaccgagggaggagggaactggggctggagaaaaacagtgg

SEQ ID NO: 11438 - DNA, 119 bp, homo sapiens
ttcttctgcatagctgccttagggaagagagagaggtacagtgaaatgctcactggagtcagcttcttcggattttgaattctgaccctccggtccccatctgtaaaatggggatcaga

SEQ ID NO: 11439 - DNA, 119 bp, homo sapiens
gaagggatctggagggaaagccttacctggatgccattcagggaggccacgcccatgtagaggaagactcgtacagcaccggcagggggatacactaaaatgagagcagagctttggat

SEQ ID NO: 11440 - DNA, 119 bp, homo sapiens
ctaggtgacagtgcaggacctcacctttaggatgggagccaggaagacagagattcccgtcaggatgaaacgatgatgccggttactctctgttccctggcagagaagaacacatggtc

SEQ ID NO: 11441 - DNA, 119 bp, homo sapiens
aaccttgatgacactgggcacatgcagcttgggagtttctaggccaaaacaggcatcgattccacagaaatcaggatggagaaaacaatggaaaagtcagccaccagggcccggacctg

SEQ ID NO: 11442 - DNA, 119 bp, homo sapiens
caaatgtctaacataagaggaaaggacttaccagagaagcgttggtgtctggtgccaatggggctgaagattgaacacggttgtattcactgtggatgagcacatgacacggggcaggg

SEQ ID NO: 11443 - DNA, 119 bp, homo sapiens
tctggttaccacttacatcatctaccatgagggttgcaatggcacggccaatttcattgtaggattttgtctcccagaaggtcccagtagtataaacagaaatctgcaaagaagatgga

SEQ ID NO: 11444 - DNA, 119 bp, homo sapiens
tccattgcagctaagtgcaggggttttactacctggtctgtgtttggggtgagagaaatgtcattcatgttctgctctgggcatgacctaggagaaaaggaaaagaagatccatcaggg

SEQ ID NO: 11445 - DNA, 119 bp, homo sapiens
gcacacactcacacagacgtccgtaatttgcactctgccgcatccgcaggtcttccgtggagtggtgtaactcgggccagcaccagggctccgggcaggactgcgatctgggaggagaa

SEQ ID NO: 11446 - DNA, 119 bp, homo sapiens
agtcctcaaagtgacctcacctttctgatccggaaatctcctcctgtggttagtgtggtccagctttccaccccagccttctcctccttcaccttcatgactataaagtaaaaggaaca

SEQ ID NO: 11447 - DNA, 119 bp, homo sapiens
ctctgaagcttccagctgcaaacttacctttgtgttcttagctctggaaaccaggatccaaatcccaggaggccagaaccacttgctctgttcctgttgggtggcaagaagggctctct

SEQ ID NO: 11448 - DNA, 119 bp, homo sapiens
aataaaaataaaaataaataaataaaatggacataccttttggtagcagcaactctttatctggaaggtatcttacactcccacctgtggacaaaaacagagatgtggtttgggacagt

SEQ ID NO: 11449 - DNA, 119 bp, homo sapiens
aaaggaggtggggagagcatacctgggtggtcttcagggtactcctggaaacatccatcagctcatgagtcacagctgaattccaaatcctgggatgcctgcttggagggagggtaaaa

SEQ ID NO: 11450 - DNA, 119 bp, homo sapiens
gtaactttatttatgtaaaatccactctacttaccccagtgcagtggcctgtggctcctgggccctgacccaattcctttagggtggaccttgcagttggaaccatccacctctcgttt

SEQ ID NO: 11451 - DNA, 119 bp, homo sapiens
gtggacacactcaccttggccttctgctgcaaggtcagcctcttgatggagatgaggctattggacttgcatctccaatcaccacccaccagccctcttcacgtttctgcagtgatcca

SEQ ID NO: 11452 - DNA, 119 bp, homo sapiens
gccagctaccaggacgcacctgcgggaagagaggcgcaatgacagggcctgtgacttcctcctctcgctcagctgcaccagcaccacaactggcccgccactgcagggggagaggaggg

SEQ ID NO: 11453 - DNA, 119 bp, homo sapiens
gggcacacaggccgagtttgttgttcccaggatgctctcctgaagtctgctgtcctcacctgcctcagggattgtcttcatggtgccggatgggaatgttctcatactctgctgcattg

SEQ ID NO: 11454 - DNA, 119 bp, homo sapiens
gagatgatctcgataagccctcgcaccttggtcttggcattgagggacatgctgaagagctctgacagaaaaggaaatgtgagagaagctaaaaccaggcagagaaggagcagaactgc

SEQ ID NO: 11455 - DNA, 119 bp, homo sapiens
actgaccttcttggagccctgacacatgatgacacagcgcccctcatcgtcctgcaaagggcggttggctggcccaccatctgaagcacgtcatagatggggtaatccacatagctggt

SEQ ID NO: 11456 - DNA, 119 bp, homo sapiens
actcacgcgtggatcttgccattgtagtactgggtatccatgatgattaccaggtgggcagccacgttctgccccagcagagactccgagaagccaccaccacctggatagcccctgag

SEQ ID NO: 11457 - DNA, 119 bp, homo sapiens
ccaatctcattatgattcaggtcgtacagacgctcaaaggggaaattcttcttctcaatcttcttcactcttcctcagggagtttccggaactggcgcagaggacacatggactgccac

SEQ ID NO: 11458 - DNA, 119 bp, homo sapiens
tccttacatgcgtttgtcgatcatcttgcagaggttcagggtcttgtctgtaagctgtgcccaacctcgttcaggacaatttcaaatatcgctcgcatcaaccggccagccgactaagc

SEQ ID NO: 11459 - DNA, 119 bp, homo sapiens
atacaactccgctctcacctgtgtgacatacaccatgtcagccatcagtgcaaagccctccaatttcagtgtgagatgaaggcttgcagaagaacgttgatctgtaaagaagcaaaatc

SEQ ID NO: 11460 - DNA, 119 bp, homo sapiens
caaagaggagaggagctcaccttagcactgggttcctcaatgctctcctttacagggataggcaccctcccagcaacttctgcagctccagcttctcctcctgccacaaggaggaaaag

SEQ ID NO: 11461 - DNA, 119 bp, homo sapiens
ctcacctgaatatgtttatcagcaaaaagatcctccacgagtgttcggtcaaccctggtcatgcctgcggatgaatagcaaagccataaggcagaagatccttcagctctaggttctgt

SEQ ID NO: 11462 - DNA, 119 bp, homo sapiens
aatcgccctggatcctacctctccaccctggtcgagatccatggtttccagatctgtgtccattcgagatgacgcactcgctctctccgggacctttcctcctgtagtggacaaagata

SEQ ID NO: 11463 - DNA, 119 bp, homo sapiens
atatactcactcatcatcctgtgctgccgcaacactttaatgaaatcaaaggtgttgaaaccaagcagcgaaccagctgattttcacattcccgatcatcactggccgtctgcagagag

SEQ ID NO: 11464 - DNA, 119 bp, homo sapiens
actgaacttacattagccgagagggtgcagcgcacgacagcctcgtccccttccatgtcatcatcagatcctcttctcgaacctccccgtatacgtcttcatcaccttcctgtggaaat

SEQ ID NO: 11465 - DNA, 119 bp, homo sapiens
acaagaatggactgggtatgtttatcactcacctcctcatcagactcaaactgcacattcacaccgtattctcatcaatgttgtcatctgaaacaatgaaggattagaaaaagagggca

SEQ ID NO: 11466 - DNA, 119 bp, homo sapiens
gtgttttttcaggggaaggtggaggtggaggcagggaaggagaacatgaagtttgagacgggcgccttccctactatgggactatggccctgacctcggtcccctccggtgagttgttg

SEQ ID NO: 11467 - DNA, 119 bp, homo sapiens
tagagcccactcgtcaagtgaggagacatcgtcagtgctgcagccggggatcgccatggagaccagaggctggctgactccgggcagggctccttcaccggccaggggatcgccaggta

SEQ ID NO: 11468 - DNA, 119 bp, homo sapiens
cagacccttgatgttctctctaccttcccgcagcgcctggcccctggccaaatgcaacactaacaccagaacaacacggaggaggagtaagtacccacacacccagcagagccctcccc

SEQ ID NO: 11469 - DNA, 119 bp, homo sapiens
aggaagaagacgaaaaagaaggatgcgatcgtggtggacccgtccagcaacctgtactaccgctggctgccgccatcgccctgcctgtcttctataactggtatctgcttatttgcagg

SEQ ID NO: 11470 - DNA, 119 bp, homo sapiens
tctttagggcctgtttcgatgagctgcagtccgagtacctgatgctgtggctggtcctggactactcggagatgtcctgtatgtcttggatgtgcttgtacgagctcggacaggtgagt

SEQ ID NO: 11471 - DNA, 119 bp, homo sapiens
tgcaaatatggagttcagtgtggagactcatattttaccttctctgatctttttaatgtgctttcttttcagcccacgaactctaaagagcaaacagaaatattatgttagtccaagta

SEQ ID NO: 11472 - DNA, 119 bp, homo sapiens
ccattgcaatgcatgctacccaccctgagagcatccatcacatcaggctgctccaagagcatggggaagtggccagcatgggatggctaattaaatctgaaatgcaaaacaacagaaag

SEQ ID NO: 11473 - DNA, 119 bp, homo sapiens
ttaccagtactttgcaagctcatcctgtctttcaggagcacatctccaagaatttgtcgataaaatatcacaagtgaatagaacacatatttccaattaatgtttctggcagtagacta

SEQ ID NO: 11474 - DNA, 119 bp, homo sapiens
aggtacccaccttagtacatttcttgatcttctgttcaaggatctcagtttcactagaagttgaggctgcttctcattgtcataatctggtagaaaacactgccgtgtgcttttaagaa

SEQ ID NO: 11475 - DNA, 119 bp, homo sapiens
agacaacacatgagagccatacctcttctggatattgaagggtccacttcaatacctttttcataaggataccaccattcaagaaaagctcataagttctataaaagaataacatacaa

SEQ ID NO: 11476 - DNA, 119 bp, homo sapiens
gaatatatagccaacttactttgctggaataggaactccactggcatcaaaaagtttaagaaacacccaccacagcttaactctcctctttcaccagttgactaggaaataagacaagt

SEQ ID NO: 11477 - DNA, 119 bp, homo sapiens
catacattgcgaatataagaaattccaagttcaaataatattccaagatctggagatgcagaattagactgataaagcaatcaccatcaagcaaacatggtaagatgcgagtaacctga

SEQ ID NO: 11478 - DNA, 119 bp, homo sapiens
cactcattcagcagattacttacctggggagaaaaggtccatgttttgggctttttaggttgccatgtgctctgactgtatgaatgttgctcagaacctgaaatgagattttccctttt

SEQ ID NO: 11479 - DNA, 119 bp, homo sapiens
taactatacttacagtgccttctgtagcatcccacatcagatctctgaaggccagttgtgaaggcatgactctggttgtaagaagtaatttgctcgaaattgattccctgaaaaaatca

SEQ ID NO: 11480 - DNA, 119 bp, homo sapiens
gataggcacgcattaccttcctccagaagctgtgagagcgtggaaggcctgaaccctgcaggaatagctccatcgtagttaacacatcaacagtgtttatctgctgaagacagtaacat

SEQ ID NO: 11481 - DNA, 119 bp, homo sapiens
gcaaaacgagacatgattaacaagacagaagatgcccgcctctgaaatcgctttctgaacagcactccatggggatcagttctggggagacaaaatagcaaagtgagtcaggtcaggtt

SEQ ID NO: 11482 - DNA, 119 bp, homo sapiens
ttttgtacctttgcttaacttctgctccatctgctgtttcatccaccgcctctacatcttcttcactgcctcttcacttgactcttggccttcttcttcttcactataaggctaaaaaa

SEQ ID NO: 11483 - DNA, 119 bp, homo sapiens
aagactaacctctaggtaggttctgggaacaagaccttcatttcctttggcatccttagctatccaccaccatcaggttttttttcaattacaaggagaatttcccctttcttaaagca

SEQ ID NO: 11484 - DNA, 119 bp, homo sapiens
tttaataatgtgattaacctcaatacttactttgcttaatttttgaagagcatttttattttcatctatgcctgctttaactggatacatctaaattaagaaaaaaaagaaaatatatt

SEQ ID NO: 11485 - DNA, 119 bp, homo sapiens
ttatataatttagcatactttacctttgataaatatgttgtcttttattgggttctagagcttctttcattggctctcagaaagcaaactatcaacctatggagaccatttaaaatatc

SEQ ID NO: 11486 - DNA, 119 bp, homo sapiens
ttctttgcagcataaccagtgtgcagcgttcagacaatgggtcgtatatctgtaagatgaaaataaacatgaagagatcgtgtctgatcccatctacatcgaagtacaaggtaagtcca

SEQ ID NO: 11487 - DNA, 119 bp, homo sapiens
gtctccttccattccaggcctgacggagatggcggtcttcagttgtgaggcccacaatgacaaagggctaccgtgtccaagggagtgcagatcaacatcaaaggtaagcagcaaggcta

SEQ ID NO: 11488 - DNA, 119 bp, homo sapiens
agcaattccctccccaccaactgaagtcagcatccgtaacagcactgcacacagcattctgatctcctggttcctggttttgatggatactccccgttcaggaattgcagcattcaggt

SEQ ID NO: 11489 - DNA, 119 bp, homo sapiens
tgttttcattcacccaggaatgcattcacagaggaggattctgaattagtggtgaattatatagcaaagaatccttctgtcggcgagccattgaacttacctgtaagttgactttcatt

SEQ ID NO: 11490 - DNA, 119 bp, homo sapiens
ctcctttttcagtacatagcttgggagtcagtgaggaactacaaaataaactagaagatgttgtgattgcaggaatcttctaattcttggaaaaattctgggtgaaggtaagcaattta

SEQ ID NO: 11491 - DNA, 119 bp, homo sapiens
ggtgttctttcacttcacaggagagtttgggtctgtaatggaaggaaatcttaagcaggaagatgggactctctgaaagtggcagtgaagaccatgaagtgtgagttatcagtgatgaa

SEQ ID NO: 11492 - DNA, 119 bp, homo sapiens
attttctcctctagtggacaactcttcacagcgggagatcgaggagtttctcagtgaggcagcgtgcataaagacttcagccacccaaatgtcattcgacttctaggtacttccgagaa

SEQ ID NO: 11493 - DNA, 119 bp, homo sapiens
ggtgtgtgtatagaaatgagctctcaaggcatcccaaagcccatggtaattttacccttcatgaaatacgggacctgcatacttacttactttattcccgattggagacaggaccaaag

SEQ ID NO: 11494 - DNA, 119 bp, homo sapiens
tctagcatattcctctgcagacactattgaagttcatggtggatattgccctgggaatggagtatctgacaacaggaattttcttcatcgagatttagctgctcgaaactgcatgtaag

SEQ ID NO: 11495 - DNA, 119 bp, homo sapiens
taagaaatctaaatttaagtgtttacctggtgacatatgtcaattgaatccacatatctttttgcttttagtaattaaatgccagtttgtatcctgttaagacaaaaaccataaaacag

SEQ ID NO: 11496 - DNA, 119 bp, homo sapiens
gaaaattaataaatacaacataatttttctgtgaaaaatctaggtgattgccaaactcacctactgccgatttgtccgattgctatatttccatgccatctcatagttcaaggcagcat

SEQ ID NO: 11497 - DNA, 119 bp, homo sapiens
ctgtatatgcttgctctttttccataatgtatcccatatattcataagctttgcagcaagactgaagaaaatgggagacatcaatagattaaacttgatatcactaagattttatggga

SEQ ID NO: 11498 - DNA, 119 bp, homo sapiens
acaataagtaggtatttacctggcttacgttctaaaagctgctgtaaatgaaacactgcttgttcatagcttgttttctgaacatgagatcagccatcatctataaagataaaagttgg

SEQ ID NO: 11499 - DNA, 119 bp, homo sapiens
ctgaccatggtagcagcttcgttatcctggtcactctgaagcagtagagcacactgccgcaggcaggaacagggtcatcttgtgccaggtataatcgtgccagttccaacataatctgt

SEQ ID NO: 11500 - DNA, 119 bp, homo sapiens
tgtttacctgttgtaatgcagtgatcgcatcaccaagtttttccattttactataaacttttgctagaaaacttgacaacgtccatcctccatgagagctgacagttcatttactatga

SEQ ID NO: 11501 - DNA, 119 bp, homo sapiens
cttaccattgagtagttatgagttttgataagtgctttgcccattttgcttgccaatgttccatctttcggttctgatttaatgcttgctcatatgctactatggcttcttcaggctaa

SEQ ID NO: 11502 - DNA, 119 bp, homo sapiens
gttcagtaacatcagaaattttacctctagaatattcatgtatgcatcaccaaggagaagaaaagaccggggttagccattctttcagcaatttctctggaaatcagaccaacattact

SEQ ID NO: 11503 - DNA, 119 bp, homo sapiens
aaatactgtaccgcagattttccaatggattgctggatttcatttaaaaattctagctgctgatctgcacctgtaattgcccttctatcaactgacattggataaatcctaaaatcaaa

SEQ ID NO: 11504 - DNA, 119 bp, homo sapiens
ggcactctcacagttctgctgaaggcgagtgtaatgttatagaaaagttgagcattctgtggttccatgcatccaatgtatttcccaagttttccagcttggtggaagcctaaaacaaa

SEQ ID NO: 11505 - DNA, 119 bp, homo sapiens
taatacaatgccacttaccttctctatatccccctctctacacacatagtagagtgcctgcattctcaggcttccacattttggctatcttggagcagcaacctgcaggaaaacaattt

SEQ ID NO: 11506 - DNA, 119 bp, homo sapiens
catacctggattaggactcattttatgggcatatatcagtgcaagtagagaacaaagtgatacatcttgttatttttaatagcctcaaattctcgaagagcttcttgagttttacctga

SEQ ID NO: 11507 - DNA, 119 bp, homo sapiens
agagagacgcagctaggcctgcacggctgtggagagatcctgccacgggccttgttcaccatgtcggtgtggatgcgctttgggaggatcgggatgtccgtttcgacctgtccgcgcag

SEQ ID NO: 11508 - DNA, 119 bp, homo sapiens
acctttatattcactttaggcaaatgaaaacaagacctggagaagtccttattgattgtttagattccatgaagacaccaaaggaaataatggagatagaggtgagtatatttttaaat

SEQ ID NO: 11509 - DNA, 119 bp, homo sapiens
acctattttttgtctgtgtgcttttaggtagactcttggtaacaaatttaagaattctctggcactcttggcattatcaagagtcaatgtttgtaagtatctttgttagataagtctga

SEQ ID NO: 11510 - DNA, 119 bp, homo sapiens
tcatgctctttacattctttgcttttggattttagctgtcggttacaattgcatattgaatattacaacaggactgctaactctgtaagtctaaaaaatcttattgcaatatatatata

SEQ ID NO: 11511 - DNA, 119 bp, homo sapiens
tgttttttacagggcaatttaggaaccttttttattaccaatgtgagaattgtgtggcatgcaaatatgatgatagttttaatgtcagtataccatatctgcaaattgtaagtacatac

SEQ ID NO: 11512 - DNA, 119 bp, homo sapiens
catgtttttctttttcattttgtatctagcgttcaataaagattagagattcaaaatttggtttagctctgtcatagaaagctctcagcaggtaagatcttgtatatttttattaatct

SEQ ID NO: 11513 - DNA, 119 bp, homo sapiens
acatctgctgattttcagccccagccgctcgaagctctgacagtcgaacaaattcaagatgatgtagaatagactctgatggtcacacggatgcttttgtggtgagcatcacaaaggac

SEQ ID NO: 11514 - DNA, 119 bp, homo sapiens
gaatattatatgtccagtttgtgaaatagaattttctttgtcttacaggcttattttgctgatggcaataggtaaggacatttattttacctacagtatatgaaaaaagtttctaaatt

SEQ ID NO: 11515 - DNA, 119 bp, homo sapiens
aatttactatacctgattttttacactggcatatcttttcaggtgttttataaattctggccgagaagttttcgggcaattataagagccatacttccattatttaatctgaaattaaa

SEQ ID NO: 11516 - DNA, 119 bp, homo sapiens
actaacctggtattaggtgccaagcctctaggtgccactgaacacaggcaaggaattgccataatgctgcattcaagaactgaccctggatcatttgccattgatcattacagtctaaa

SEQ ID NO: 11517 - DNA, 119 bp, homo sapiens
gtcaacagaacctggcacagttctcaaggagatacttttcgactcaccagatttgggagatccctgtgcctcctaaaagaaagaaaacaaaacaaagacataaaacagataacgcgcgc

SEQ ID NO: 11518 - DNA, 119 bp, homo sapiens
ttatctgtattacattgagtttttacctacctttcttgcacatcatcagagctgttaaatggtaaaaatatatttcacagtcttctgccctaaaatgtaatgaaatttgttattaacag

SEQ ID NO: 11519 - DNA, 119 bp, homo sapiens
aactgctttggaagaattcttacccattataatgtgcaatgttgcagttatcacatgaggaactccatgagagaatgtgccaatacattggtagatcctgccaaagcaattttaaaaca

SEQ ID NO: 11520 - DNA, 119 bp, homo sapiens
aatgaaatttatatcacttgccttggttctaacgtttgcatgccagtgaacaatctctgtacactccaagtattgcgaacaatggtttccgatgcccactgtgaataacatacctaaat

SEQ ID NO: 11521 - DNA, 119 bp, homo sapiens
acatatattgattaataatataacctacccatcaaatccctggagttcacattccttaagcagtgacaggcgtgcccttcatattccattactattaaaaaaacacacacacatacaca

SEQ ID NO: 11522 - DNA, 119 bp, homo sapiens
ttataaaaccattatagaagatttcaggatattcttatgctattttttttctttaataccttcactaagtccatgcctggcctataagacaaaaatagccaagataatccaaccagaag

SEQ ID NO: 11523 - DNA, 119 bp, homo sapiens
agccaccacgagattcaccacaatccatggctggagaatctgttcctcaattcctgcttccctaaaaattagaaacactcattagaagtgccttcagtttggttcatatacacaaatat

SEQ ID NO: 11524 - DNA, 119 bp, homo sapiens
tgtgaattcttaccagaggctaccattaacagaagaaggtgtgtaaaggtggattctgtcacttgtcattgctgactcagagatagtataagagcagtaaagtacactgagaaaaagac

SEQ ID NO: 11525 - DNA, 119 bp, homo sapiens
atcatgttaaactgcttactcacagaaagatgctaaagctgtaggatccagggccaaaaaatttcggatgctactgatattttagcaaagtcaatcctagaaaatataaaagtttcttg

SEQ ID NO: 11526 - DNA, 119 bp, homo sapiens
ctccaaacaaagcatcagggtaatcctggagaatagttagaagaataaataaattcctactttgtcttctccgaggtttttgaataactgcctcctcagctggctccgcatcaatacca

SEQ ID NO: 11527 - DNA, 119 bp, homo sapiens
ttttcatttcgtaataaagatgaactagatgacttcttttgggtggaggaagtctccaattctgaaaacaaataaatttaacttttcaaataactaaaacataaaaagaaaagtaatgt

SEQ ID NO: 11528 - DNA, 119 bp, homo sapiens
atcccacacaacaaagaataacgtcttacctggtgtgttttttgttctgggcttctttttcttaggacgctaagtggaatatcatctataaagcaagaaaaaacgtcaacagaaaaggg

SEQ ID NO: 11529 - DNA, 119 bp, homo sapiens
catttttaaagctcaataatgaaattactgtaaattatttttaccttggcacaggtggaagagctcgtgaggacgctgtggcggaaaaaataaatttgcttgtaagtaaaagcctagag

SEQ ID NO: 11530 - DNA, 119 bp, homo sapiens
aagtagctaaggctcgcttaccacaggattcttccccattctgcgtttagccggcctcggcggccgccgcccccaagcacctggcgccccacccctcccggctcggtcgcgcgcgcagg

SEQ ID NO: 11531 - DNA, 119 bp, homo sapiens
tcagtttctttccctgtttcccataaggaaagaagaatggatattattgcatgtactcaccagttctttgctgggtcagcctttatgccaaggtaggtcttaaggaaatttacagagtc

SEQ ID NO: 11532 - DNA, 119 bp, homo sapiens
tgcctttttgatcagataattttaatctacaagtctagtttgtaggttctcttcttggactggttttacgcttacattcctctgtttataatgttgtgggggctggtttcagctgaggt

SEQ ID NO: 11533 - DNA, 119 bp, homo sapiens
caccccaaggtggtagaagttgccagggacagataacatggcagccagcgggaagaccagcaagtccgaccgaaccatgttatcttcaagaagatctcccgggacaaatcggtgagtgg

SEQ ID NO: 11534 - DNA, 119 bp, homo sapiens
cccttagacccacacctgttcttcttgcaggtgaccatctacctggggaacagagactacatagaccattcagccaagtccagcctgtgggtaagttgcttggagaaaactgtaatgct

SEQ ID NO: 11535 - DNA, 119 bp, homo sapiens
ttctccaccctcactgctctctccctcttttgccttagatggtgtcgtgttggttgatcctgatcttgtaagggaaagaaaggtgagatgaagccccttgtctcaggctggtttctggg

SEQ ID NO: 11536 - DNA, 119 bp, homo sapiens
aaatgattttttatttgtttctttccacagtttcctgactacttgccctgttcagtgatgttgcagccactccacaagattcagggaaggttagttcaagaagaaatgccatggtttta

SEQ ID NO: 11537 - DNA, 119 bp, homo sapiens
gtctgctctctctccccaacagtcctgtggggttgactttgaggtcaaagcattcgccacagacagcacgatgccgaagaggacaaaatccccaagaagtaagagtatggttgcggaat

SEQ ID NO: 11538 - DNA, 119 bp, homo sapiens
atctgctgacttttctagatctatttccatggggagcccatccctgtgaccgtgactgtcaccaataaccagagaagaccgtgaagaagattaaagcattcggtaggaccttcttctca

SEQ ID NO: 11539 - DNA, 119 bp, homo sapiens
cggactcccgtcttccccttgcagtggaacaggtggccaatgtggttctctactcgagtgattattacgcaagcccgtggctatggaggaagcgcagtgagtagctgttggggtttccg

SEQ ID NO: 11540 - DNA, 119 bp, homo sapiens
ttttcccttctgtttgggcagcattaaggagggcatagaccggaccgtcctgggaatcctggtgtcttacagatcaaggtgaagctcacagtgtcagggtaagtgtcccggcaccaacc

SEQ ID NO: 11541 - DNA, 119 bp, homo sapiens
tgttaccactgtgacagttaacgacaggcgtttgtttgtgttttctagctttctgggagagctcacctcaggtaagcctgttcaccttccttgtttgattgtttctcaagatatcaaag

SEQ ID NO: 11542 - DNA, 119 bp, homo sapiens
tgttcacaccaatcttcattctttttttctagtgaagtcgccactgaggtcccattccgcctcatgcacctcagcctgaggacccaggtcagttatgtccttttttagctttctttaat

SEQ ID NO: 11543 - DNA, 119 bp, homo sapiens
taacaaatgtctctctctccctcttccctgcctcccttttattccatgcttacagctaaggaaaggtgatgagcctcttgaatgtggccctgatttgtcctatgctctgggaccttctc

SEQ ID NO: 11544 - DNA, 119 bp, homo sapiens
gctggtcagcgcagctctgaggcgccgcgtctctttcaggtgccggtgagtccgggaagagcaccatcgcaagcagatgaagtgagtgcccctgcctgtcccgaggcccctgggtctgg

SEQ ID NO: 11545 - DNA, 119 bp, homo sapiens
aaaaacaagaacttacccttccccgtaatccccatctgacttatcagttgaacttgtagaagaacttaatcatcctcagacagacaatgaatctgtttcctttcctattaaatgtttgg

SEQ ID NO: 11546 - DNA, 119 bp, homo sapiens
tgcacctgagtgacgctgcagtcagaggagagccgtcgggcaggcaagggctggtcttcttcctggggtttcctggccctgctacactcagagacgctttcctcactgaagggcctgaa

SEQ ID NO: 11547 - DNA, 119 bp, homo sapiens
tagatgaagaaaagaagtcaactttacctgaagaggacatttcttcctgtgactgctttagtcgcctccctctctggctgataatggtcgatcctttaaaagaaagtcacagagtcact

SEQ ID NO: 11548 - DNA, 119 bp, homo sapiens
ctttacctttccttcaataatccgataaactaaagaattcatatcttttgcattgaaagcatgcttcaagtggccatttcatagacacagcatcctagagcccaaacatcagactagaa

SEQ ID NO: 11549 - DNA, 119 bp, homo sapiens
tgtttttgcagatctgaacagaattaagacgaacgagctttcacaattgcagcagatgaagatccattgtaaattgatcaggatttttggcctaccctccaaagaaaaggtaactggct

SEQ ID NO: 11550 - DNA, 119 bp, homo sapiens
tcctcctgtgtgtgtatatctcctagggacagaattggacgaaagtttcaaggagtttgggaaaaaccggaagtcatggggctctgtcgggaaggtgagtccagcccccctgatggagt

SEQ ID NO: 11551 - DNA, 119 bp, homo sapiens
tgttgcagacatgccaatatttggtttctgtccagcccatgatgatttctacttggtggtgtgtaacgatgtaatcaggttgtcaaaccgcaggcatttcaatcacattatggtaagtg

SEQ ID NO: 11552 - DNA, 119 bp, homo sapiens
gcctgtgttcttttgacagaaagagagtttgatcctgacatccactgtggggttattgatctcgacaccagaagccctgcacccggtctttgacatgcaaggtaggtggactcctgaaa

SEQ ID NO: 11553 - DNA, 119 bp, homo sapiens
cctgactgggcatgccagtgtgggagtcagcaagcacgcggctatgttttctcttgcagttttgcacattgggagccggcagataggaagaggctattacgtgtttgactccaggtgga

SEQ ID NO: 11554 - DNA, 119 bp, homo sapiens
atcgacttcgctgcgccctcaacctcatggtggagaagcatctgaatgcacagctatggaagtgagtgctgttgttcttgggagaggagctgactttacacagtgctgcattgtctttt

SEQ ID NO: 11555 - DNA, 119 bp, homo sapiens
ctctcatcttgttattttattcatcaggatatctcctcaccttgcttacgaacaggaatttcagcaacacaccccagagccctgacttaaaatgtgaggctctttttcatgattttttt

SEQ ID NO: 11556 - DNA, 119 bp, homo sapiens
atttttaaatttctattattttaagaaaggtgactcttttgatggtgggacttgataatgctggtaaaacgcaacagcaaagggaatccaaggaggtaagctgaaaacatttatgtgct

SEQ ID NO: 11557 - DNA, 119 bp, homo sapiens
ttcaggttggcaaataaacaagataaagaaggagctttaggagaagctgatgtcattgaatgtctatcttggaaaaattggtcaatgagcacaagtgcctgtgtcagatagtaaggttt

SEQ ID NO: 11558 - DNA, 119 bp, homo sapiens
cgatagaaaacaaaatgaacaggagcaggctgaactcgatggaaccagtggtctggctgagttggacccgaaccaacgaatcctttccagccaatagcatctgtaatcattgaggtatg

SEQ ID NO: 11559 - DNA, 119 bp, homo sapiens
agctaatggtaaaaagaaaactaagaaactaagaatgaaaaggaaccaccgggtagaaccacttaatatgatgactgtgctcctgagagtccaacgccacccccaccccctcctcctgg

SEQ ID NO: 11560 - DNA, 119 bp, homo sapiens
ttttaaatgtttttctttttctttagttggctggggaacccctaaagtcactagacttccaaaacttgacctcttggtgaaacacatcataatggtaatgcaaaaggattggttttcag

SEQ ID NO: 11561 - DNA, 119 bp, homo sapiens
tagatttctataggaagccactgcctcccctggctgtgccacagcgacctaacagtgatgctcatgatggatctcataaacaagacgtatggaggagttctcttaatatcagcaaggtg

SEQ ID NO: 11562 - DNA, 119 bp, homo sapiens
acctcttttagaaaaactgcctgctcttctaaattgtgtgtcccaaaatatttcattaacaagtatcaatgataatccatggaaaagtgatggaaagtcacaatacaaggtactgtgaa

SEQ ID NO: 11563 - DNA, 119 bp, homo sapiens
gcaaaatgttgactatgcaacctccttttagatacagttgtcttggaagcctgttattgataaagttgcgcagcctcacatccttcaaggtatggccttgcctgaaattgtatggaata

SEQ ID NO: 11564 - DNA, 119 bp, homo sapiens
atttctgaactttgtcttttctcttaaaggctcaatctcaaaatatccttccaacaataggattcagcaagagaaattcaaatcatccaggtaatccactttatcccttaacaaaaaag

SEQ ID NO: 11565 - DNA, 119 bp, homo sapiens
tagtcatgttttgcttctttttgtagtttgtcatttacagtgtttgacatgtcaggtcaaggaagatacgaaatctctgggaacactattataagtaagtacatctgtgaatgttgctt

SEQ ID NO: 11566 - DNA, 119 bp, homo sapiens
ttacattacacagagaaggccaagctattatttttgtcattgatagtagtgatagattaagaatggttgggccaaagaagaactcgatactcttctgaatcatccaggtatgtgtgtgt

SEQ ID NO: 11567 - DNA, 119 bp, homo sapiens
gatggctatgtttcttatggatttcatttcagtgctagtgatgccataaaaggagaaggcttgcaagaagtgtagactggcttcaaggtacattacaaaatactgtgtgtcttcagcct

SEQ ID NO: 11568 - DNA, 119 bp, homo sapiens
gggctgtttcaaaagcttacacttgttgctctctcacaaaagctgcaaactcaggatcattggcatacattccaaaactctcattctctcttgaatttccttaaacaaaaaagaaacaa

SEQ ID NO: 11569 - DNA, 119 bp, homo sapiens
aaaacataaaaacataccagaatagatgacggcgttgcctgaagacttgaactttgggtgttccaaactgatcttcagtttggtgacgcaaaactcctctcactgaggaaagaacaata

SEQ ID NO: 11570 - DNA, 119 bp, homo sapiens
ctaaactgtctcccaattcaatggacattagagaaagtgccaaaaagtacctgtcattttccttgggggcctgaaaacaaaaattaaaaatattaaacagagtttgagacagttattat

SEQ ID NO: 11571 - DNA, 119 bp, homo sapiens
aaaatgtgcatatttagataagtctatttacctaaattcaagtacacgaatttccttgtagcctggtaaccagtaaatgcattttcaacctgttaaaagtacaaataaaaatgataact

SEQ ID NO: 11572 - DNA, 119 bp, homo sapiens
aaaacagagcatcactcacactctcctctggcctttccaagctgctctctgaggcaccttcataggcgtcacctctggatgtggaacactgagagtagtgtctaagaagaaaagcaaaa

SEQ ID NO: 11573 - DNA, 119 bp, homo sapiens
ttaaaagaaaagtgaatgaagacacaaaagtatacctcccaatgttgaagtatcaccaacaggaactgggaagacagttcagagctagaaaaaaaaatgtttgcagttaataaaatgac

SEQ ID NO: 11574 - DNA, 119 bp, homo sapiens
atctgtgttgccaaacatgaattttgggaaaaagagacactcacctgcttacagtttcctttgcataagcagtttctaaggaaaacaaagatataaaaatgactgagttaacaacagtt

SEQ ID NO: 11575 - DNA, 119 bp, homo sapiens
tttacctgaaactcctctgcaaagcaatcacagcagatggaagcttctttaatctctttcttgtctgaaacccttccaataggcttgaatcaagcatgctgcttgatgtagtttctgaa

SEQ ID NO: 11576 - DNA, 119 bp, homo sapiens
aatacctgctcttctacttcctgatagaccattgggcttaaaaggccaacaagctgtctaagttcttgatgaattcagtcccagtttcctgtttacttagtagacgtctgagtcctgaa

SEQ ID NO: 11577 - DNA, 119 bp, homo sapiens
accaagtcacctgttgatctgtagtatattctgtagcatcatcatgactgcagatcctatttggacatttcagcttgcagtaaatgtaagaaatgatcactttgtagtactaaaggaaa

SEQ ID NO: 11578 - DNA, 119 bp, homo sapiens
tcttttctcttaccattctgaataagttcaacatggcctcccaaaagccagaagagagaatcagtcacatttggaaaaagtgtagtaattcatctttttcttcagccttaacataaaag

SEQ ID NO: 11579 - DNA, 119 bp, homo sapiens
ttaccttttaacttcaacagtataacagggacattctgctcagggctttttgcaacttcagcagctataataagatccttgggtctgtacctgttggcttcatttctcttattacctat

SEQ ID NO: 11580 - DNA, 119 bp, homo sapiens
attttaaggctactaccctgttgccaggccaccgggtccggcccagccttgattcttcgggaatcactttccctcgccgcgcctgttactgcctccacggatcactgtgaggaaaataa

SEQ ID NO: 11581 - DNA, 119 bp, homo sapiens
tacctcatcctcgcttcgcgttcttccactaaagaacctggggctcccacgccgcactacagcgccgcgccttccggggcagcgtgcgtcgcgacgcgggaaggggcctggaggcggga

SEQ ID NO: 11582 - DNA, 119 bp, homo sapiens
acctaagcacagctaaatttttcagtgtttctccaactcgaggatgcatccgacccaggctatcttcataatctttaatgctctttcatataatggcaaagcttcaacgtgttttttct

SEQ ID NO: 11583 - DNA, 119 bp, homo sapiens
cacaaaagaaatctctccttaccaagttgccttttttctttatagctttctgatgaattttaaaggatttttcctaaaatgttcagcttgttcatatcttaaaaaaaaattacagtaag

SEQ ID NO: 11584 - DNA, 119 bp, homo sapiens
acatttacaataccttagctgcaaggtgaaatagttgattagcttttgcctgtatgaagaagtaacagtgggccttccaggtactccaatctcactgtttcccaagcctagggagaaaa

SEQ ID NO: 11585 - DNA, 119 bp, homo sapiens
taaaataatcaccactcaccgcgcgatcattttgccgaaaagggtgacataaagggcattgcaggttgtgcagaacgacagtgtcgttctagcttcttctcctgcaccagtttaccaag

SEQ ID NO: 11586 - DNA, 119 bp, homo sapiens
aatacacacctgctctttactcaatttaatgtctacagagtggcattctgcaattataatagattttgctcttttggacttaagggatcaagatgaagtgtaggccacaaccttttatg

SEQ ID NO: 11587 - DNA, 119 bp, homo sapiens
tggcatcgtacctccatgctggagggcatgtttctacattcacagaaacaattactcttacattcactgcagtggatctatcagccatttcatgtgtttttcaacttgcttaaaaatat

SEQ ID NO: 11588 - DNA, 119 bp, homo sapiens
tacctttagagttagtcgtttaataatcaaggaggactctgagctggttgacatgggccttcccacaaatgggaaagaatcagtgtgttgggggaattcttctgttgtaattgaatcct

SEQ ID NO: 11589 - DNA, 119 bp, homo sapiens
catcataccactttgataaaagaagagacttcccagaacctggtcctccagacacgagaagaggtggaacggggctggtgctgccactagatcattaaggcgttggtaatactagaaaa

SEQ ID NO: 11590 - DNA, 119 bp, homo sapiens
acttacagagaatgcatatttacctgtttaataatcttttctacacaaatataagttttatatactcctctgcaggatctcctgagtgatcaatgatctagataaaaatcatttaagaa

SEQ ID NO: 11591 - DNA, 119 bp, homo sapiens
tttttgaagtctgcagatgcacttttggtggcaatcgactctgaagtagtgggagctgttgatatactattaatcatcgaccaaaacgatcatcaagaccaactatagtagttagtact

SEQ ID NO: 11592 - DNA, 119 bp, homo sapiens
ttgtatgagagaagggagtagtgtcaagagcaagaaagtaccttgagcctggtgcctggtagctggcagcaaagggcaacttcaggagaaaaagaaacagtcgaatagagattttcatt

SEQ ID NO: 11593 - DNA, 119 bp, homo sapiens
acattaattacttacttcaccaattgctgcataggctatttctgcagtagtcatatctcgattagcaacgccatagcagctagacaagcccacatggtttgctcctaaagtaaagtatg

SEQ ID NO: 11594 - DNA, 119 bp, homo sapiens
tacattagaagtagttaatgtccattaccttatgagaaagaaactttccatcacctaacggctttccggtgatgcctcaaagaggaagattacttgaaaaaaagtagaacattaattaa

SEQ ID NO: 11595 - DNA, 119 bp, homo sapiens
agtagttaaacataataaattacctttctgcctgcagaatcaaactaacagttccttctttgagatcaatataattggtgtgttccagttcttcgtgctaaaagacaagtaaaatggat

SEQ ID NO: 11596 - DNA, 119 bp, homo sapiens
cgagaacacgtaacattgaagagacgttgaaacaactaagtgtgcatagttcaaagatgctttaatgacctatcacggaattccagtaaatccactgcatcattaagaacattacgaac

SEQ ID NO: 11597 - DNA, 119 bp, homo sapiens
ctaaacattatataccttatatttacagtcttcaccagcagataaaataagatcattgaccgagttccatctacttttaaaataatgccatcatgagctttccactgtgagaaaaaaga

SEQ ID NO: 11598 - DNA, 119 bp, homo sapiens
agtacctgcaaaactttagcatttggttgaagaggtttaatgattagctgcttgcctgctgtataaagaccttttctgaatcagggccccacgctactgaatacactggtgttcctgta

SEQ ID NO: 11599 - DNA, 119 bp, homo sapiens
atgaaattgtcaattgtaaaacataccttgctgagctaaagttgatctaagcatcccagtctttgaccaatttttatttgtccatcttctccaactatacagggaaaaaaaaattaatc

SEQ ID NO: 11600 - DNA, 119 bp, homo sapiens
cttacctgtaactaatgctgttccttcataattccatcttcctgcaagtactgctccacagtgagcttcacacttttttccactcttcctaacttggaaatcagatgaaatttacctga

SEQ ID NO: 11601 - DNA, 119 bp, homo sapiens
cacttaatagttaaataagcaaacaagataatataaatgaaaacacctaccaatttaaaatgtctgaccaatgtttaaatcagtgctttcctagttctgatgaaggaccagatttttct

SEQ ID NO: 11602 - DNA, 119 bp, homo sapiens
tataagcattaaaaggatatgctttggttcttttaaaagagatatctttagtctcatgactccacttccgcaaaaatttaagatgccacttgattgtatttactgtaaaaataaaagga

SEQ ID NO: 11603 - DNA, 119 bp, homo sapiens
cttgtcttttagacttttgatcagtggaaagatatgataccggaccttagtgaatataaatggattgtgctgacattgtgtgggaaattgatgagtatatcgattttggtttgtatcat

SEQ ID NO: 11604 - DNA, 119 bp, homo sapiens
ttccagagaaaattagaaaagcccttcctagttcagaagaccttgtaaagttagcaccagactttgacagattgttgaaagccttagcttattgaaggacttttttacctcaggtaagg

SEQ ID NO: 11605 - DNA, 119 bp, homo sapiens
atttctatttccccttttgctgatttttcacaggtcacaaattggttagtgaagtcataggagcttctgcctacttctcttgttaggtgtgtaaacagacatttttgctgaccttaaca

SEQ ID NO: 11606 - DNA, 119 bp, homo sapiens
taaagggttgcatatttatctttaaggttctccggaagaaacggcgtttagagcaacagatcgtggatcgaaagtgacaagcattttagaaaggtaagtgtaaaagagaattgttcatg

SEQ ID NO: 11607 - DNA, 119 bp, homo sapiens
ggcagggtctgcttggtgagctcattctcttacaacaacaaattcaagagcatgaagaggaagcgcgcaagccgctggccaatatagcacgagctatgcccaacagaagcgcaaggtga

SEQ ID NO: 11608 - DNA, 119 bp, homo sapiens
ttctattcaactaaaattattttaaacatttaggtgtcagacaaagagaaaattgaccaacttcaggaaaacttctgcacactcaggtaatcatgatgactaagaaaaactagggactt

SEQ ID NO: 11609 - DNA, 119 bp, homo sapiens
tattgcagttgaagtatcagagaatcttggaacgattagaaaaggagaacaaagaattgagaaaattagattgcagaaagatgacaaaggcattcatcatagaaagcttaaggtattct

SEQ ID NO: 11610 - DNA, 119 bp, homo sapiens
ttttaaaatttttacagaaatctttgattgacatgtattctgaagttcttgatgttctctctgattatgtgccagttataatacgcaagatcatctgccacgggtatgtgaaaaattga

SEQ ID NO: 11611 - DNA, 119 bp, homo sapiens
aaggttgttgtggttggagatcagagtgctggaaagactagtgtgttggaaatgattgcccaagctcgatattcccaagaggatctggggagatgatgacacgttctccagttaaggta

SEQ ID NO: 11612 - DNA, 119 bp, homo sapiens
cagttttctgttactatcaggtgactctgagtgaaggtcctcaccatgtggccctatttaaagatagtttcgggagtttgatcttaccaaagaagaagatgtaagtaaaattcatctaa

SEQ ID NO: 11613 - DNA, 119 bp, homo sapiens
taggattttgtgttttccattagcttgcagcattaagacatgaaatagaacttcgaatgaggaaaaatggaaagaaggctgtaccgttagccctgaggtaagggttgcaattcatttca

SEQ ID NO: 11614 - DNA, 119 bp, homo sapiens
tttatttttatttttcctgagtagaccatatccttaaatgtaaaaggccctggactacagaggatggtgttgttgacttaccaggtgtgattaatgtaagtatatacaaaacatgtatt

SEQ ID NO: 11615 - DNA, 119 bp, homo sapiens
tttctttaagactgtgacatcaggcatggctcctgacacaaaggaaactattttcagtatcagcaaagctacatgcagaatcctaatgccatcatactgtgtattcaaggtaaatcata

SEQ ID NO: 11616 - DNA, 119 bp, homo sapiens
aatttttcccacttttaaaaatagattcagcagataattgaaggaaagctcttcccaatgaaagctttagttattttgctgttgtaacaggaaaaggtatgcaaagatggattataata

SEQ ID NO: 11617 - DNA, 119 bp, homo sapiens
aatttgaccatcattcttccccagggaacagctctgaaagcattgaagctataagagaatatgaagaaggttttttcagaattcaaagctcctaaagtaggtatcttgttaaaacattt

SEQ ID NO: 11618 - DNA, 119 bp, homo sapiens
aggacaagcatgctaaaggcacaccaagtgactacaagaaatttaagccttgcagtatcagactgctttggaaaatggtacgagagtctgttgaacaacaggctgatagtttcaaaggt

SEQ ID NO: 11619 - DNA, 119 bp, homo sapiens
caaacttgaacttttccttcttcctcagcaacacgttttaaccttgaaactgaatggaagaataactatctcgcctgcgggaacttgaccgggtaatatttggatactcgtgtattttg

SEQ ID NO: 11620 - DNA, 119 bp, homo sapiens
tacttgtatttatattgcctagaatgaactatttgaaaaagctaaaaatgaaatccttgatgaagttatagtctgagccaggttacaccaaaacattggtaagtatttgatattaatct

SEQ ID NO: 11621 - DNA, 119 bp, homo sapiens
tttcagagggttattcaacacaatgctttggaagaccgatccatatctgataaacagcaatgggatgcactatttattttatggaagaggctctgcaggctcgtctcaaggatagtaag

SEQ ID NO: 11622 - DNA, 119 bp, homo sapiens
taattaatttttttttctagctgaaaatgcaattgaaaacatggtgggtccagactggaaaaagaggtgttatactggaagaatcggacccaagaacaggtagaaataaacaagtctct

SEQ ID NO: 11623 - DNA, 119 bp, homo sapiens
agattaaggatacttggcatcaagtttatagaagacattttttaaaaacagctctaaaccattgtaaccttgtcgaagaggtttttattactaccaaaggcattttgtagattctgagg

SEQ ID NO: 11624 - DNA, 119 bp, homo sapiens
cttaatatttcagttggaatgcaatgatgtggtcttgttttggcgtatacagcgcatgcttgctatcacgcaaatactttaaggcaacaacttacaaatactgaaggtaagccacatag

SEQ ID NO: 11625 - DNA, 119 bp, homo sapiens
aacagttaggcgattagagaaaaatgttaaagaggtattggaagattttgctgaagatggtgagaagaaattaaattgcttactggtaaacgcgttcaactggcggaagacctcagtga

SEQ ID NO: 11626 - DNA, 119 bp, homo sapiens
tttttctttatttttatctccacagagaaagttagagaaattcaagaaaaacttgatgctttcattgaactcttcatcaggagaaataaattaagtgagtaaaaattctctaactgtat

SEQ ID NO: 11627 - DNA, 119 bp, homo sapiens
caattcctgtttcaggtgttcttgaagtacctgaattttgccacgttgtacctgaagatctatcacctggctacctccacaactgcgagacgcgccgcggccaggtacccacacgctga

SEQ ID NO: 11628 - DNA, 119 bp, homo sapiens
accctcacctcttctctgcccaggaattttttgacgtgtggtctgtgctgatgggagagtcccagccgtctcgggcccacgcacgcctgatggccgggtgagtcttaggggaggggccc

SEQ ID NO: 11629 - DNA, 119 bp, homo sapiens
cccccgaccagtgtcttctgcttctcaggaaattgtcttctacaaagtgatcgactacgtcctccacggaaggaggagatcaaggtcattccgtaagtgcaggattttaccagaagcgt

SEQ ID NO: 11630 - DNA, 119 bp, homo sapiens
tatctgacccctgctctctgcccacagcacaccctcagccgatcactgggccctggccagcggccttccagctacgtggcagaaagcggctttgtgagtcccgtgctgtctggagtccc

SEQ ID NO: 11631 - DNA, 119 bp, homo sapiens
gttttggatgaaatcgtttttctgatgctttttcagatttgtaacatcatgaatgcttccgctgacgaatgttcaaatttcaggtatctgtctgtgccttggtagaaattatacttact

SEQ ID NO: 11632 - DNA, 119 bp, homo sapiens
tcgtgacacatctgtgtctctgtgtagccaaccagagcgcgcctggggaaggagcctgctgactgcgataggacgagctgggcgaaatcctggtaagaaccttgctcccgtccctccca

SEQ ID NO: 11633 - DNA, 119 bp, homo sapiens
ccccaggtcctggtgcggttcctgttctccatcagcaaagggtaccggagaatcacctaccacaactgggccacggcttcaacgtggcccagacgatgttcacgctgctcatggtacgt

SEQ ID NO: 11634 - DNA, 119 bp, homo sapiens
tacagaccggcaaactgaagagctactacacggacctggaggccttcgccatggtgacagccggcctgtccatgacatcgaccaccgcggcaccaacaacctgtaccagatgaagtagg

SEQ ID NO: 11635 - DNA, 119 bp, homo sapiens
accacctgtgtaacaggtcccagaaccccttggctaagctccacggctcctcgattttggagcggcacccctggagtttgggaagttcctgctctcggaggaggttggtatactcaccc

SEQ ID NO: 11636 - DNA, 119 bp, homo sapiens
acctccgcagaccctgaacatctaccagaacctgaaccggcggcagcacgagcacgtgatccacctgatgacatcgccatcatcgccacggacctggccctgtacttcaagtgcgcgcc

SEQ ID NO: 11637 - DNA, 119 bp, homo sapiens
gttcaggaagagagcgatgtttcagaagatcgtggatgagtccaagaactaccaggacaagaagagctggtggagtacctgtccctggagacgacccggaaggagatcgtcatgtgagc

SEQ ID NO: 11638 - DNA, 119 bp, homo sapiens
agcactcgtgcccggtttgtgtctgcagggccatgatgatgacagcctgcgacctgtctgccatcaccagccctgggaagtccagagcaaggttagaacagagggccctccagacccag

SEQ ID NO: 11639 - DNA, 119 bp, homo sapiens
cagctgccttcctgtgcctccaggtcgcacttctcgtggctgctgagttctgggagcaaggtgacttggaaggacagtcttggatcagcagcccattgtgagtgctgcttctggaacct

SEQ ID NO: 11640 - DNA, 119 bp, homo sapiens
ctctgttcctcccaccagcctatgatggaccggaacaaggcggccgagctccccaagctgcaagtgggctcatcgacttcgtgtgcacattcgtgtacaaggcgagtggttcacgggtg

SEQ ID NO: 11641 - DNA, 119 bp, homo sapiens
tgtttcttctgtgttaaagggcctacaaagggagacatggaaatcccctttgaagaagtcctggagaggccaaggccggggaccccaaggcacagactgaggtgaggactgcggtgccg

SEQ ID NO: 11642 - DNA, 119 bp, homo sapiens
atccaccctgtcccctgcagatggaggggcgcagccaggccccgtgcccaagtccctgcagaagcagagcgcatgctggagcgcctggtcagcagcgagtgtgagtgcagcccctgccc

SEQ ID NO: 11643 - DNA, 119 bp, homo sapiens
aaatgcctgacttcttcattgttctttgtcagggacccatcccagccaaaatgaatcccagggaagaaaagtaaaaataattacagaggtaagtggccactttgatgtcctctagggat

SEQ ID NO: 11644 - DNA, 119 bp, homo sapiens
ttttgcattttcacaaaggagttcattgaaaatgatgaggatgcagacatgggaagacagaataagaaccaaaggttcgaagacagccaagaaagaaacaggtaagaagtgacaagaaa

SEQ ID NO: 11645 - DNA, 119 bp, homo sapiens
gaggcagaagccaactcctttctcccgagcctgctggcagatcctcccccacctctccgcaggagttccctcctaggctgggagcatcccgtgcagggtaaatcttttcaaggtaagtc

SEQ ID NO: 11646 - DNA, 119 bp, homo sapiens
tgtttttgttttttaggcttacctccaattccttcaacttccagaacaggctttgcagaattttccatgggggacgcatgagggagaaattgcaagcagcgagggtgagagaaaccaca

SEQ ID NO: 11647 - DNA, 119 bp, homo sapiens
actttttagtccaaagcagaaagtgcattgctgcaggaaatccccactcctcggcccagacgcttacgagtcccagtaagaaagaattggagactgaatttggcacagaggtgagaaat

SEQ ID NO: 11648 - DNA, 119 bp, homo sapiens
ctcatatagccagggaaagaggtagaaaggactcaacaagaagttgactcccaaagttactcaagagtcagttccatgattctgcacgaaaaatcaagcctaaaccccaggtgagaaat

SEQ ID NO: 11649 - DNA, 119 bp, homo sapiens
ttttaagctccaagctttaagaaatgctgttcagactggccttgatccagaaaaacctcatcagtctctgataccatccaaaaaaccatcaatgagtataaatctgaaattcggtgagt

SEQ ID NO: 11650 - DNA, 119 bp, homo sapiens
ctttttaattttaggactatgagaaacggttacgagacagaaatgtaatagaaaccaaggaacacatagcacccatagggccatagtagccaagtacctccagcaggtaagaaaaatca

SEQ ID NO: 11651 - DNA, 119 bp, homo sapiens
atttctttccccaggttagagaatcagtgataaatcgtttcttaattgcaaaacaatattttcttcttgtgatatgatagtagaagaagaagttcccaatatcaggtaaaaataatcaa

SEQ ID NO: 11652 - DNA, 119 bp, homo sapiens
ctcctagcaaattccagcagccgtcgaggtcttcaaggatgttcagtgaaaagcatgctgcttccccaacacgtacagcccaacccacaatgctgactaccccctcggccaggtgagag

SEQ ID NO: 11653 - DNA, 119 bp, homo sapiens
ttaaggttttagtacgtccctttgtagaagtctcttttcaacgaacagtttgccatacgactacggctgaggaccaaaccctagctggaatgaagaactagaacttccatttaggtaag

SEQ ID NO: 11654 - DNA, 119 bp, homo sapiens
gctgtcttgcagggctcctaatggagattatagcacagccagtctgcagtcagtgaaagatgttgtgttattaacatttttgatgaagtactgcatgatgtcttagaggtaagttctca

SEQ ID NO: 11655 - DNA, 119 bp, homo sapiens
ccttcctttaggatgaccgtgaaagaggaagtggaatccatactcgtattgagagacactggctgggattgtgaaaatgccatttagcacaatatatttccaagcaagggtaagtatct

SEQ ID NO: 11656 - DNA, 119 bp, homo sapiens
attttgattatacaggaactggtggctcgatatgtgtccttgattcccttcttgcctgacactgtctcattggtggtatctgtgacctctggagcacatctgatgtaagtagttcttct

SEQ ID NO: 11657 - DNA, 119 bp, homo sapiens
cagcaatttcttgatctcctggcaggggatgaagaagaacatgcagtactattgtgtaattactttctgctctgggtaagaaggcctggctgttgatgggcaatgctattcctgaggta

SEQ ID NO: 11658 - DNA, 119 bp, homo sapiens
tatactttctgaactattttctcttctatagcctgaagagctaatttaccagcgctcagacaaagcagcgcagctgagctacaagacaggtaacataacatccataaatccacatgtaa

SEQ ID NO: 11659 - DNA, 119 bp, homo sapiens
tagtcctgtagattctcttcaatgaaagcatcaaacttacctcaagcagtttcaacatcagctatcaatttgtgatgggctaaaaaacaaaaaaataaagaaatataatacccccaaca

SEQ ID NO: 11660 - DNA, 119 bp, homo sapiens
gcatgcacttccagactttgctttaccttgtcataacaggattgtgaataccatatacatgatctttatataaccattattaccattttccatactgtaacagaaataaatacaccaaa

SEQ ID NO: 11661 - DNA, 119 bp, homo sapiens
aacctcccccatcccatctaggaatatagtttttttaaaaaggcttactttttcatgggtatagtttcacactataaaatacaaaaaagggagataaaattaatttttttaattattat

SEQ ID NO: 11662 - DNA, 119 bp, homo sapiens
actcatcgtacacgtcctccgaatccattcgacgatagtacttagccagttttaccgcaaaaattagagcggaagtaaaaatacagtagcttttcctatgccaaaccaaaacaaattct

SEQ ID NO: 11663 - DNA, 119 bp, homo sapiens
agatgaaatcttaccaaggggtcgataatgtagctacacagaaagacatcaacagcagtatctagagcgtggccacaggtttgcacgatgccactttctcactgatctaggggggtgga

SEQ ID NO: 11664 - DNA, 119 bp, homo sapiens
acattcataaaagataaactacttacagagaactcgatccactgcagataatgttcaaaatatcctattttgttctcccatacttcttagtttcctggaaagaaacaaaagatgagtag

SEQ ID NO: 11665 - DNA, 119 bp, homo sapiens
ctttaaaaaagaaggctcacctcaataataacagaggaagtattgtttgtgatgaagttctgagcaaaaccagagaagctagaatcctagttactctctcctgaaagacacagccacag

SEQ ID NO: 11666 - DNA, 119 bp, homo sapiens
aaccccatgacagaaaacaaagtaaacccttaccaacaatccattccctgtgcgttgaagtatcttgacctttggtatagagtgctctggcaagaaacagataatatttccaaaattat

SEQ ID NO: 11667 - DNA, 119 bp, homo sapiens
tcgttgactgttaccagtgattgttctataggaaggactcgttgctggtgaattgttttaatagtttgtcatctcttttcagggagttcctcaaatttcctgggggctacaaaaagaat

SEQ ID NO: 11668 - DNA, 119 bp, homo sapiens
tttaaccggacgatttgaactcaccaaactgtttgcttttgcttctagatcatatgcaaatgataaaagttcactcctgcgggggatttaccagtctacaatagaagtgaaaaaaattg

SEQ ID NO: 11669 - DNA, 119 bp, homo sapiens
atgacgagttctaattacctcattaatgttgagatgttcactgatattgaagctgttctgcaggtgaaggtgccgtaagtgcctctattttttttgcagtcactgtgggaatgaacaga

SEQ ID NO: 11670 - DNA, 119 bp, homo sapiens
attgatacctgtaaacttgttcaaaagtgagcttcatttttgatttattaaatagcttcccagagagatgtattcccagtcttcatttagtaagtagggtgtatccaaaacctagaaca

SEQ ID NO: 11671 - DNA, 119 bp, homo sapiens
caaaatcacctcaaactgtgaatctcacctgctacgacagtcgtggtttggcgttgtactctgtcaggttatcattaagggattgatagccctgaaaaatatttcaaaataaaaggatg

SEQ ID NO: 11672 - DNA, 119 bp, homo sapiens
ttgtattttttccaaaagcatacctgttggaccaggccatccaaatctgtcctaagaacgttattaacgtgtcaagttctgcatccacgggtggaagctgaaaatttataaaacaaaat

SEQ ID NO: 11673 - DNA, 119 bp, homo sapiens
ttgcccactgcttacctgttgccatggacttaatctcatcaagaacagggatgatgttgggtctcagtcgtcaagaattccgcctcctagcactgaattgatacctacatgcaaataag

SEQ ID NO: 11674 - DNA, 119 bp, homo sapiens
atgtgaagcaactttaaattttactcactgttcagatctgtgaacgccttgtccttggtagtgttgtacgggccaatatatatttgatttgctgaaaaaagaacattctgtgaaacctc

SEQ ID NO: 11675 - DNA, 119 bp, homo sapiens
aggaactccaaaaaaccaaaaatataaagcatcgcggtacatagagatgatggtttttacctctggagttcattcaagagagttcgcaagtccttgaaattgctatctgccagtttccg

SEQ ID NO: 11676 - DNA, 119 bp, homo sapiens
actccttttgatccgggttcttacctggtgatttgccacaaaaccatagaagatgccaatgctgcaggaaaggcagagagaagaaagagcatttactgtgtggtccatggttctttgtc

SEQ ID NO: 11677 - DNA, 119 bp, homo sapiens
agaaaggctttccaagagcaacttgaaatagcagacaaggactttacctttagacctaagattacagttctggctgtagaagtcaacgcaggtgaggaattttggcagaggcagcatgc

SEQ ID NO: 11678 - DNA, 119 bp, homo sapiens
ttttaataataaatacaccaatgaaaaattaccttgtcataatcaattttggattcatatgccttctgtagaattttctcaaagtatctggaaaaaaagccacaaaatagcaatattat

SEQ ID NO: 11679 - DNA, 119 bp, homo sapiens
cctaggtatggggccgccgtaatggaaaggattccttaaacatactcaccgcggcgggagagctgagagatggccaggtgccgcgtggggatctgcctcagtcacttaaagatcgcgaa

SEQ ID NO: 11680 - DNA, 119 bp, homo sapiens
tgtttattttttagcgtattttctcactgctagaaaagacttggcttggcgcaccaatacagtttgcctgcaaaaaacatcaggaaactaccttgcagtaacagggtaagaaaccaatg

SEQ ID NO: 11681 - DNA, 119 bp, homo sapiens
atatctttatgttctgattgctttcagagctgattatattgtgaaaatctttgatcgccatggtcaaaaagaagtgaaattaacttacctgggtaagtacagaagtagatttaaaaaaa

SEQ ID NO: 11682 - DNA, 119 bp, homo sapiens
agggatcaaatgtctttccttctttggtcaaaagttggaagtttcctggctgttggaactgttaaaggaatttgcttatttataatcatcagacatctcgaaagattcctgtccttggt

SEQ ID NO: 11683 - DNA, 119 bp, homo sapiens
aggaaaacatactaagagaatcacttgtggatgttggaatgcagaaaatctgcttgctttaggtggtgagataaaatgattacagttagtaatcaggaaggtgacacgataagacaggt

SEQ ID NO: 11684 - DNA, 119 bp, homo sapiens
tgatgtttttactcctttagacacaagtgagatcagagcctagcaacatgcagtttttcttgatgaagaggatgaccgaacctctgctgctgaaagcatggtaagaattctaatcaaat

SEQ ID NO: 11685 - DNA, 119 bp, homo sapiens
gcagataagtgtggtgcttggcaagaaaactttgttttttttaaatctgaatgaaccagataacccagcgatcttgaatttcagcaggactttggcaacattgtctgctataattggta

SEQ ID NO: 11686 - DNA, 119 bp, homo sapiens
ttaataatgcatttttgtttttcagcattaaaatccaagacttggttgacttaaaagacatgtatgttaactcaacctggatgaggaaaataaaggtattgatttttctgaagcagatt

SEQ ID NO: 11687 - DNA, 119 bp, homo sapiens
taggagctaccaatcacagtttctgttgatgtggaacccaactttgtggcagtaggtctttatcatctgctgtaggaatgaataatcgagcttggttttatgtccttggagaaaatggc

SEQ ID NO: 11688 - DNA, 119 bp, homo sapiens
gctacagctgtgaaaaaattgaaagatatggagtatctgggaacagtagccagtatttgccttcattctactatgctgctgcactttttgaaggcaaagtccagttacatttggtaagt

SEQ ID NO: 11689 - DNA, 119 bp, homo sapiens
tgtagggaatagaggactacaatcttttggcaggacaccttgccatgtttaccaacgattataacctggtcaggacttgtaccttgcatccagctgtcctattgctgccctggaggtat

SEQ ID NO: 11690 - DNA, 119 bp, homo sapiens
aacagatgagaagggatttacagcattgggacagtgctctacaactggcaaagcatttggccccagaccgataccttttatatcaaaagaatatgctattcagcttgaattcgcgtaag

SEQ ID NO: 11691 - DNA, 119 bp, homo sapiens
ttattaaaattcactcttatttttttttcaggggtgattatgtaaatgctttggctcattatgagaaagaataacaggtgataataaggtaaccttggataaagataagatatgcctaa

SEQ ID NO: 11692 - DNA, 119 bp, homo sapiens
taatcctgtcttattttagcaattttcagaagcggcccaactgtatgaaaaaggtctctactacgataagcagcatctgtttacatccgctctaagaattggtaagagctgcctgcggt

SEQ ID NO: 11693 - DNA, 119 bp, homo sapiens
ctggacctacctttccagggcaaaagttggtgatcttctgccccacgtttcttctcctaagatccatttcagtatgccaaagccaaggaagcagatggaaggtttgtacactttctcaa

SEQ ID NO: 11694 - DNA, 119 bp, homo sapiens
acaggttctgaagacactactaatgaagactatcaaagcattgccttatactttgaaggagaaaagagaatcttcaggctggaaaattcttcttgctgtgtggccaatattcacgagtt

SEQ ID NO: 11695 - DNA, 119 bp, homo sapiens
tttaattgctgtaattcgcttttcaggcacttaaacacttcctgaaatgcccaagctcggaagataatgggcaatagaaatggcaattgaaactgtaagtacgctttcaatgaaacttt

SEQ ID NO: 11696 - DNA, 119 bp, homo sapiens
tttttctctcttattaaacaggttggtcaggccaaagatgaactgctgaccaatcagctgatagaccattcctgggggagaacgatggcatgcctaaggtactgaacacgtgggcttcg

SEQ ID NO: 11697 - DNA, 119 bp, homo sapiens
tttatgtgtcaggatgccaagtacctgttccgcttgtacatggctctgaagcaataccgagaagctgccagactgccatcatcattgccagagaagagcagtctgcaggtaggtccgtg

SEQ ID NO: 11698 - DNA, 119 bp, homo sapiens
aatatgtcatttgtttcagattcatgttaaaaatggagatcacatgaaaggggctcgcatgctcattcggtggccaacaacatcagcaaatttccatcacgtaagtaccactgaccaga

SEQ ID NO: 11699 - DNA, 119 bp, homo sapiens
ctcttaaacatcctgtttccagggtcgacacatgttgaaagatgactggacggtgtgtccacattgtgattccctgctctatactcagaattgaagatgtaagtgtgcatcacgtcact

SEQ ID NO: 11700 - DNA, 119 bp, homo sapiens
tatttacctgtccttgttcgtacaaacatatcgattaaatagactatgtctgatacgtaatccaaaatggccaatattctaggtaatcagattgaagttcatcaaaacatgctctataa

SEQ ID NO: 11701 - DNA, 119 bp, homo sapiens
agacacctggcaataaccattgtccagttgtacataacaggtaatgtgatgcaaaacagccagttgtaaatgtgtttcccgagggatcaataaccacaacttctttcttctccctagcg

SEQ ID NO: 11702 - DNA, 119 bp, homo sapiens
gtattatggaaaatcatccctgcatctaaaacccatcacaatttccttctatttcaatgccactaaaaggcttactcttctttcttatctttgcttttctcctctttctttttcttctc

SEQ ID NO: 11703 - DNA, 119 bp, homo sapiens
tttttcttctctttgtcctttttcttctttttcttctctgggtcgtttttattttcgtttttatcatctacttgctgaaaaaattaagcaagtagtattaaaatacagaaatgttatgg

SEQ ID NO: 11704 - DNA, 119 bp, homo sapiens
tacctcttcttttcttttttctttttctttttttcttctggttccctaaagaaaaaaataatatatctgcacataatcacagtcttccactcttatttactttctttttcattgagcaa

SEQ ID NO: 11705 - DNA, 119 bp, homo sapiens
ctttggttttctattgtaaatatacttactggtccttattgctgctgttgttcacattaaaaagtgcaaggcaccaggcaggtactgctccctgggaaatgaaaaacatgcagtgaaat

SEQ ID NO: 11706 - DNA, 119 bp, homo sapiens
acctctgtgatggtcctccctttctgagtgacttataactaaaggaaccccttgcatgagggttttcatctctgattcttcagatgtagaggcactgtcatcatcctcagaaaaggagc

SEQ ID NO: 11707 - DNA, 119 bp, homo sapiens
tagttaaattaaagaactgtagctaataataaaaatgcatgggaaaatgtttggatttacctgcatgctcattttccatccttcgtatttccttttcaatatctggtacaatcacattg

SEQ ID NO: 11708 - DNA, 119 bp, homo sapiens
ggcatggttacaaaagactgctgtgtattgataatattgttcttcatggatagtttcatatctgaggagaagaagtcttattagtggaaaggctatttttatatatttacatatataat

SEQ ID NO: 11709 - DNA, 119 bp, homo sapiens
tcttacctttggttgtttaagtaatataactttgtcttctagaagtggacgtcactggtgtatccaaacaacagggatatacggtaaatcttgacattgtcaaaatccaggccctaatt

SEQ ID NO: 11710 - DNA, 119 bp, homo sapiens
caccaggtcaaagagttctactcatatcaaaatgaggcagtggccatagaaaatatcaagagaggtctgctagcctatttcagacacagttaagctctggaaccaccaatgaggtactt

SEQ ID NO: 11711 - DNA, 119 bp, homo sapiens
aggtagatatctctggaaattgtaaagtgacctaccaggctcatcaagacaaagtgatcaaaattaaggcttggattcatgcaaaatagcgaggtctggatttacgaccccaaatcagg

SEQ ID NO: 11712 - DNA, 119 bp, homo sapiens
taatagagtaagttcaaaggttctattggtagcagtgacatcagagaaactgttatgatcatcactgggcacttgtcagaaagttgtgtcagaatgaaggctgcaaactcaaagtaagt

SEQ ID NO: 11713 - DNA, 119 bp, homo sapiens
atatgttgcagcaaaattgtccgtcgagttctgaaggaaatggtcgctcacaattatgaccgtttctccggagtggatcttcttctgcctacactggctacatagaacgtatgtacacc

SEQ ID NO: 11714 - DNA, 119 bp, homo sapiens
accccacaacttagcattgctggaactgctattaaattacagttattgtgtgtcatcaggtagtccccgtcggcatctacttacagcctagacattctctactcgggttctggcattct

SEQ ID NO: 11715 - DNA, 119 bp, homo sapiens
aaggagaagtaacctgaacatctttcagtacattgggaaggctggtcttcacggtagccaggtaactcattctcatggattttgcttaataaagtatgcaagaaatcaggctgaggtaa

SEQ ID NO: 11716 - DNA, 119 bp, homo sapiens
gtacttacttttaaagcatcaattaactgcactttcttagccaaaagcaactggtactccagctttgggggattagctttaaagtgtgtttgactgatacttcatttatctctagaagg

SEQ ID NO: 11717 - DNA, 119 bp, homo sapiens
tttaccgtatgatatgttgaggttaattttcctttttgtagcttctttagaaagcacatcttttaggatgagatagtagaaatgttgtcagatttaaaaactccctctccttttctata

SEQ ID NO: 11718 - DNA, 119 bp, homo sapiens
agtaaaggtaatttctaatatttttaccttgagttccagccttgtagtatctgcctggcaccgataagtgcaagaaggaagttgtcgtttgactgggaagaatacaaagtggaggaaaa

SEQ ID NO: 11719 - DNA, 119 bp, homo sapiens
aattcttttatatttttactcacctcagaatcacagctgctaaagctaacaacagcagaatttttatcccatcaagtaaatctattggaacatcactctatagtcaatattaaaaaaaa

SEQ ID NO: 11720 - DNA, 119 bp, homo sapiens
caaagttaccgtaaggaagaaattttattctgcatctcctgattaatttttagttcttctcctggtccatttccttatgaatgggctctgttgtcagacctgtaacccagcctgtagag

SEQ ID NO: 11721 - DNA, 119 bp, homo sapiens
tattatcatttactttacctgaatatgtggacaccacgatttcatcatagctgtcttttcctacacaacaccctggatagatgtgacgctttcagacaacatctaaaaaagtttaagac

SEQ ID NO: 11722 - DNA, 119 bp, homo sapiens
acctcctctctttttctcattttgaatttcccacttgcgtactggtttggatgtagtaatctgtataaggcaagttttccgtctgatgtcccaaacaaaaggtcttctccagagtcacc

SEQ ID NO: 11723 - DNA, 119 bp, homo sapiens
tgtgaaaaataaaatcctgattaccgccatttccattgtgtagtgctaagacagtagggggtccaggaattcaactgcatacatcacatcagatccctgaaggagaagtatttaaaaac

SEQ ID NO: 11724 - DNA, 119 bp, homo sapiens
atttttccccttcacaaagctatacttactgctgcttctcctttcttcatgccaaagcacataactacccatcatgatctccaataaccacctgtaatagatggaagataatctaaaat

SEQ ID NO: 11725 - DNA, 119 bp, homo sapiens
gtggagaaatcagaatctatacagtaccttttgtgtagctctgtgtcttgaggcaggaattagcttcatgtcttctgagatgttactcccacctaaagaaaaacaccagatgcctagtg

SEQ ID NO: 11726 - DNA, 119 bp, homo sapiens
caagctttactttcactttcgagagtgccgtctatttgccacacacttccctgatgaaatgtctggattggactaaagaaaaaaggaaaggctagcagtcatccaagtaagtgaaggtg

SEQ ID NO: 11727 - DNA, 119 bp, homo sapiens
ccagaattttttcagcagatcattgagtacacagaggaataccgccacatgccgctgctgaagctctggtcgggccagtgcccatggtggccctttataatgcagaaaatgtggaggtg

SEQ ID NO: 11728 - DNA, 119 bp, homo sapiens
gtttttctcttcctaaggtaattttaactagttcaaagcaaattgacaaatcctctatgtacaagttttagaaccatggcttggcctaggacttcttacaaggtatgccagtgtacctt

SEQ ID NO: 11729 - DNA, 119 bp, homo sapiens
gttgcttctcacccatattttatagaaacagctatggggaagaatattggtgctcaaagtaatgatgatccgagtatgtccgtgcagtttataggtaaatggagtcctttcagttattt

SEQ ID NO: 11730 - DNA, 119 bp, homo sapiens
catttgtaggggcacgatacaactgcagctgcaataaactggtccttatacctgttgggttctaacccaaagtccagaaaaaagtggatcatgaattggatgacgtgtttggtatgttt

SEQ ID NO: 11731 - DNA, 119 bp, homo sapiens
acaccatcaagagaaattggaggctagtgactgtgatcaccagcagaactcacctactctagaaaggccggaaggaagaggaagtggactgaaacacaagattctagtcaaaagaaatc

SEQ ID NO: 11732 - DNA, 119 bp, homo sapiens
aggctagtgactgtgatcaccagcagaactcacctactctagaaaggcctggaaggaagaggaagtggatgaaacacaagattctagtcaaaagaaatccctagagccaaaaacaaaag

SEQ ID NO: 11733 - DNA, 119 bp, homo sapiens
caacaagggaggtgtcacagttttccatttagatcaacaacttcaagttcttaccatggaaaattccgaaagactgaagtggttctccttgcttgtggttcattcaatcccatcaccaa

SEQ ID NO: 11734 - DNA, 119 bp, homo sapiens
ttaccatggaaaattccgagaagactgaagtggttctccttgcttgtggttcattcaatcccatcaccacatgcacctcaggttgtttgagctggccaaggactacatgaatggaacag

SEQ ID NO: 11735 - DNA, 119 bp, homo sapiens
gaaggtacacagttgtcaaaggcatcatctctcctgttggtgatgcctacaagaagaaaggactcattctgcctatcaccgggtcatcatggcagaacttgctaccaagaattctaaat

SEQ ID NO: 11736 - DNA, 119 bp, homo sapiens
cctgttggtgatgcctacaagaagaaaggactcattcctgcctatcaccgggtcatcatggcagaacttctaccaagaattctaaatgggtggaagttgatacatgggaaagtcttcag

SEQ ID NO: 11737 - DNA, 119 bp, homo sapiens
cattcctgcctatcaccgggtcatcatggcagaacttgctaccaagaattctaaatgggtggaagttgaacatgggaaagtcttcagaaggagtggaaagagactctgaaggtgctaag

SEQ ID NO: 11738 - DNA, 119 bp, homo sapiens
ctgtgccaaaggtcaagctgctgtgtggggcagatttattggagtcctttgctgttcccaatttgtggagagtgaagacatcacccaaatcgtggccaactatgggctcatatgtgtta

SEQ ID NO: 11739 - DNA, 119 bp, homo sapiens
ccaatttgtggaagagtgaagacatcacccaaatcgtggccaactatgggctcatatgtgttactcgggtggaaatgatgctcagaagtttatctatgaatcggatgtgctgtggaaac

SEQ ID NO: 11740 - DNA, 119 bp, homo sapiens
gtgttactcgggctggaaatgatgctcagaagtttatctatgaatcggatgtgctgtggaaacaccggacaacattcacgtggtgaatgaatggatcgctaatgacatctcatccacaa

SEQ ID NO: 11741 - DNA, 119 bp, homo sapiens
ggaaacaccggagcaacattcacgtggtgaatgaatggatcgctaatgacatctcatccacaaaaatccgagagccctcagaaggggccagagcattcgctacttggtaccagatcttg

SEQ ID NO: 11742 - DNA, 119 bp, homo sapiens
ccacaaaaatccggagagccctcagaaggggccagagcattcgctacttggtaccagatcttgtccaagatacattgaaaagcataatttgtacagctctgagagtgaagacaggaatg

SEQ ID NO: 11743 - DNA, 119 bp, homo sapiens
atcttgtccaagaatacattgaaaagcataatttgtacagctctgagagtgaagacaggaatgctggggcatcctggcccctttgcagagaaacactgcagaagctaagacataggaat

SEQ ID NO: 11744 - DNA, 119 bp, homo sapiens
ggaatgctggggtcatcctggcccctttgcagagaaacactgcagaagctaagacataggaattctacacatgatatttcagacttcccatttggggatctgaaacaatctgggagtta

SEQ ID NO: 11745 - DNA, 119 bp, homo sapiens
aggaattctacagcatgatatttcagacttcccatttggggatctgaaacaatctgggagttaataactgggaaagaagttgtgatctgttgcctaaactaaagcttaaaagtttagta

SEQ ID NO: 11746 - DNA, 119 bp, homo sapiens
ctagcaggtttcaggatccatctgccaagttagtgaaaggctggagcctcaaatcatacagatgagggtattttctcctccttagcttcttggagtttaagagttgaaggagtcctgaa

SEQ ID NO: 11747 - DNA, 119 bp, homo sapiens
caaatcatacagatgagggtcattttctcctccttagcttcttggagtttaagagttgaaggagtcctgaaagtaatgatagagcaagatgaagctatcagaactgaatttggacttcc

SEQ ID NO: 11748 - DNA, 119 bp, homo sapiens
taagagttgaaggagtcctgaaaagtaatgatagagcaagatgaagctatcagaactgaatttggacttctctgggaaactacacctagttcatctgaagtgtcacgtaaactgcagaa

SEQ ID NO: 11749 - DNA, 119 bp, homo sapiens
tcagaactgaatttggacttcctctgggaaactacacctagttcatctgaagtgtcacgtaaactgcagaagtttccaatgctggaaacttctctcatactatcgtgccttcctactca

SEQ ID NO: 11750 - DNA, 119 bp, homo sapiens
aagtgtcacgtaaactgcagaaagtttccaatgctggaaacttctctcatactatcgtgccttcctactagaagtgcctgtgccctgctcagctgtgactactgacctcaggacctcac

SEQ ID NO: 11751 - DNA, 119 bp, homo sapiens
tactatcgtgccttcctactcagaagtgcctgtgccctgctcagctgtgactactgacctcaggacctcctggacaaggcatgtggggacccttgcaggagccctggtaagggtacaat

SEQ ID NO: 11752 - DNA, 119 bp, homo sapiens
tattgttgcactatttatggagcaacaactttgtacaaagaacaagctttgtacagagaacaagcttggtttttctcccaacgccgaggatgctgttgatgctgccacgtaatagcata

SEQ ID NO: 11753 - DNA, 119 bp, homo sapiens
agaacaagcttggctttttctcccaacgccgaggatgctgttgatgctgccacgtaatagcataattttggtgtcctcaaggacagaacttccactttgaataatggaagttagaacaa

SEQ ID NO: 11754 - DNA, 119 bp, homo sapiens
atagcataattttgggtgtcctcaaggacagaacttccactttgaataatggaagttagaacaatgaattcacaggggaataaatattaatgactgacgtgaagaaaatatgccattgt

SEQ ID NO: 11755 - DNA, 119 bp, homo sapiens
tagaacaatgaatttcacaggggaataaatattaatgactgacgtgaagaaaatatgccattgtttattcctcctgcatcatttccataatttgcttttgtactgtcaatttagaggaa

SEQ ID NO: 11756 - DNA, 119 bp, homo sapiens
gccattgtttattccctcctgcatcatttccataatttgcttttgtactgtcaatttagaggaaatgtggatgctggtgttttgtttggcctgtttgtttgatgctgggggttttatgt

SEQ ID NO: 11757 - DNA, 119 bp, homo sapiens
tagaggaaatgtgtgatgctggtgttttgtttggcctgtttgtttgatgctgggggttttatgtgttgtccctttaccccttacattgtgtaatttgaaagtggcaaacaaacctgcag

SEQ ID NO: 11758 - DNA, 119 bp, homo sapiens
ttttatgtgttgtaccctttaccccttacattgtgtaatttgaaagtggcaaacaaacctgcagtaaaatccttgattggcatcttcattcggatgatggagagcctttgtggtagtgt

SEQ ID NO: 11759 - DNA, 119 bp, homo sapiens
acctgcagtaaaagtccttgattggcatcttcattcggatgatggagagcctttgtggtagtgtttgctatgtgaacagcaggcctttcagataagagaagtggcttttccttggtgat

SEQ ID NO: 11760 - DNA, 119 bp, homo sapiens
ggtagtgtttgcttatgtgaacagcaggcctttcagataagagaagtggcttttccttggtgatgaagggtagagattgagccatggggatggtttaggttaaagaatgcttttttttg

SEQ ID NO: 11761 - DNA, 119 bp, homo sapiens
ttggtgatgaaggggtagagattgagccatggggatggtttaggttaaagaatgcttttttttggccatatgaggatctaacaacagagtagaaggaaggatgccctaggtcagcatgc

SEQ ID NO: 11762 - DNA, 119 bp, homo sapiens
tttttttggccatcatgaggatctaacaacagagtagaaggaaggatgccctaggtcagcatgcagggtgtgggagggctttcatcttccttacccaagcctctcttttcacttttcta

SEQ ID NO: 11763 - DNA, 119 bp, homo sapiens
cagcatgcagggtggtgggagggctttcatcttccttacccaagcctctcttttcacttttctagaagtcagaagttgttatatgatgaaatagcctcctttaacgtttatttctgggt

SEQ ID NO: 11764 - DNA, 119 bp, homo sapiens
cttttctagaagtccagaagttgttatatgatgaaatagcctcctttaacgtttatttctgggtgccaaggaggcccattcctctaacattctcataatttttctcaaaggcctatgat

SEQ ID NO: 11765 - DNA, 119 bp, homo sapiens
ttctgggtgccaacggaggcccattcctctaacattctcataatttttctcaaaggcctatgatctaaaatttcaccacggcatccactcagctgtgaggctgcgtacacagtctccac

SEQ ID NO: 11766 - DNA, 119 bp, homo sapiens
cctatgatctaaacatttcaccacggcatccactcagctgtgaggctgcgtacacagtctccacctctgaatctgaacttcgtttaccagtggtgctgtttgaacttcataatgtcagc

SEQ ID NO: 11767 - DNA, 119 bp, homo sapiens
tggcttgtgctcctgagtgccttatatcataaggaaacggcaaaatcaggggactggtataaatggtgactgagcttgaatctaagctttgtcttcagagccagtacccctaatctctc

SEQ ID NO: 11768 - DNA, 119 bp, homo sapiens
ttgtgctcctgagtgccttatatcataaggaaacggcaaaatcaggggactggtataaatggtgagctggcttgaatctaagctttgtcttcagagccagtacccctaatctctctttc

SEQ ID NO: 11769 - DNA, 119 bp, homo sapiens
gccccctggaaccaatgagagtgcgaccgagatgttccactcgctggcgtccgggccgctggtgatctcggtagcactcgggccggcggacagtgagggcgcggtaagctccccgcaag

SEQ ID NO: 11770 - DNA, 119 bp, homo sapiens
gaattacctctgcttcatgtagtgtcagcttttctgtttctttatcttgggctttttatttacatactttggttttattcctttgaagataatttctggttgatcatttatacttaaaa

SEQ ID NO: 11771 - DNA, 119 bp, homo sapiens
gggggtaaacaataaacaaaataatgtttctgccctcttgcagctatattctaatggatatgggctgacttaacaagtaagtatgtatgttgagtggtaataagtactgtgaaaaaatc

SEQ ID NO: 11772 - DNA, 119 bp, homo sapiens
tacccgtccctcctgggatcagggccctgggtgggactgaagcaaggacaagaaccatcccttcccctgggaagggtgatgccaagctcgtgatctctgtgaccttccacatacccagt

SEQ ID NO: 11773 - DNA, 119 bp, homo sapiens
tggcgcggaggtaagggggcccggggtggaggaggtttcgcgggccgcctctaggtgtcacgatggggcgctccggtcggcgctggctgcagcccggcgccagcgccgccgccgggggg

SEQ ID NO: 11774 - DNA, 119 bp, homo sapiens
gcatgctagtggggttgataaagaaggaccagggtcttctgggggagaatcatcgctcagtaataaggaggactttgtcggggcaagtttttagggaacgctgctgtccctccccaggc

SEQ ID NO: 11775 - DNA, 119 bp, homo sapiens
ccggagacgccgggtggccggagccgtggagcggcggcggagcgggcgccgcggggggtgtggcgcggagtaagggggcccggggtggaggaggtttcgcgggccgcctctaggtgtca

SEQ ID NO: 11776 - DNA, 119 bp, homo sapiens
taataaggagggactttgtcggggcaagtttttagggaacgctgctgtccctccccaggcctcgggatgctctggcagatgagctcttagctgatctcgaagaggcagcagaagaggag

SEQ ID NO: 11777 - DNA, 119 bp, homo sapiens
gaagatgtggctgaggccgagagcacaggtgaaatgccaggcgaagagggcgaaactgctggtgaaggtaaactgaagagaaaagtggaggtgaaactcaaccagaaggtgaaggtgaa

SEQ ID NO: 11778 - DNA, 119 bp, homo sapiens
cctgctcgctgcccttcttggcggcggcggcgttgcccatcgcggcggcggcggccggggccggtcccgagctgcggcgcggcgggtgctggctgcggccggcggccccggagcgcgct

SEQ ID NO: 11779 - DNA, 119 bp, homo sapiens
caatttaaaatgtctgaccaaatgtttaaatcagtgctttcctagttctgatgaaggaccagatttttcttatttcgaatccattgcatatggatatttcgtaagatacaataaaaata

SEQ ID NO: 11780 - DNA, 119 bp, homo sapiens
gagcggaaagaatgtcggagcgggccgcggatgacgtcaggggggagccgcgccgcgcggcggcggcgggggcggagcagcggccgcggccgcccggcagcagcagcagcagcagcagc

SEQ ID NO: 11781 - DNA, 119 bp, homo sapiens
ccaaatccacaggccgtgcgcccttatccgggcaccagtcgggtctcaacctgcgggccacgcgccctccccaggcgctgatcagattccaacccgcgggccgcgcgcgcccttaccca

SEQ ID NO: 11782 - DNA, 119 bp, homo sapiens
accgatagccgcggcggtgccttcttacccggcctcccgccctcgcctttctctcccggagccccgggccgccgtcgcggccgtcgcggccatcgcggcccggcaagccctggctgcca

SEQ ID NO: 11783 - DNA, 119 bp, homo sapiens
cgcgccctcacccaggcgctgatcagattccaacccgcgggccgcgcgcgcccttacccaggcagccgaaaggtcgcaggcagcggcagcgcgcaggatgcggaccgaggccggcgggg

SEQ ID NO: 11784 - DNA, 119 bp, homo sapiens
ggcagccgagaaggtcgcaggcagcggcagcgcgcaggatgcggaccgaggccggcggggacgtcgcggggacccggggcccgcgggccggcggccgggcagcagctgcagaaggccca

SEQ ID NO: 11785 - DNA, 119 bp, homo sapiens
ctctgggatctctgacaagcgatcacatttaaaatcatactttgccatggatttggatattatgggtttgtctctttttcatttccttgttcaatcaatttcctgccataccgtatgtt

SEQ ID NO: 11786 - DNA, 119 bp, homo sapiens
ggcgcgggcccgtccggccgccggacaacatggaggcagcgccgcccgggccgccgtggccgctgctgcgctgctgctgctgctgctggcgctgtgcggctgcccggcccccgccgcgg

SEQ ID NO: 11787 - DNA, 119 bp, homo sapiens
ccaagttgtgacttcctgtcaggaccaagaggcagcctgctgtggcgcaaaagttggacctgggttcaattcttctcttccacttgcaggctgtgagatttaaccccagtcttggttgt

SEQ ID NO: 11788 - DNA, 119 bp, homo sapiens
aaggactccaggtgcttgagctgctgcagctgctgcgcgtcgtgtcgccgccgcttctgctcccgacgtgctgcagctcctgctccggcggctcacgcggccgccgcgcgcccgcagcc

SEQ ID NO: 11789 - DNA, 119 bp, homo sapiens
ccgcttctgctcccgacgtcgctgcagctcctgctccggcggctcacgcggccgccgcgcgcccgcagccccacgtcctcgcgcccaggccgggacgacatgtcagcccccgcagcgcc

SEQ ID NO: 11790 - DNA, 119 bp, homo sapiens
tcaacaacaagatagtttcagatagtgatacatatgatggagaaataaaatagggtaatgggattttgatgatctctgagtggatgggcatggtcaggaaagtgaaacgagctgacacc

SEQ ID NO: 11791 - DNA, 119 bp, homo sapiens
gggattttgagtgatctctgagtggatgggcatggtcaggaaagtgaaacgagctgacacctgaatgttagaaggaaatcaccctttaaagatctacagaaagaactttccagggaaaa

SEQ ID NO: 11792 - DNA, 119 bp, homo sapiens
taatttatctttttcagaaaaccagaactgatggctctatttgcagtctttcagacaacattcttcttacattgctgtccttgaggacttaccagagtgaaggtaagaagtggaaggaa

SEQ ID NO: 11793 - DNA, 119 bp, homo sapiens
acttttctttggttaatttcagctccctcagaggcccctgatgtctggagaattgtgagcttggagccagaaatcatactgtgaccttattctggaaggtaagatgtgcagattccaaa

SEQ ID NO: 11794 - DNA, 119 bp, homo sapiens
ttccctagatgcttttaggccaggagttcgatatgacttcagaatttatgggttatctacaaaaaggatgcttgtttattagagaaaaaaacaggatactctcaggaacttggtaagtt

SEQ ID NO: 11795 - DNA, 119 bp, homo sapiens
tttctttttcctcgttcagcctcgatgctgattcatatcctactgcccatggttttctgcgtcttgctctcatggtcatgtgctacttgaaaagtcagtggtaagtgtgtgaggaaggt

SEQ ID NO: 11796 - DNA, 119 bp, homo sapiens
tctcattttcgcttttttttctaggatcaaggagacctgttatcctgacatccctgacccttacaagagagcatcctgtcattaataaaattcaaggtaaatgttggcaaattgtatgt

SEQ ID NO: 11797 - DNA, 119 bp, homo sapiens
aaagtcataattatatttggtttttatttttgttttagctggaaagtgaaatttcaaccacagcagatgctgcagttcagaggtaagactaaattatattgatttctaatatcataaat

SEQ ID NO: 11798 - DNA, 119 bp, homo sapiens
atcataatatatcaggaaattgtttttatacaggtaaatggttgcagttttgtgatgagaacaggaaagctacaaatttattaagggtacagtatttaaaactacttgtgatactaatg

SEQ ID NO: 11799 - DNA, 119 bp, homo sapiens
tccattatctgttctattaggtgatgaaggaaagcctttacatctgctcattggaaaacttcaaaaggcgtgtctgaagaatgttcttattttttacaggtaaaatgtttaaaagtact

SEQ ID NO: 11800 - DNA, 119 bp, homo sapiens
gtttgtttaccatccagactttcaagaaaatatgcacactcttctcaacaaagtaacagaagaatacaaaaactcttggtacttcaaacacgactaagcaaggtctgtgagatggaaaa

SEQ ID NO: 11801 - DNA, 119 bp, homo sapiens
tagatctggggacagcagacagatggtatgaaacttgaatttggagaagaaaaccttccaaaagaggaacagagtttttatcaatccattctcagatgaccaatttggaagacattggt

SEQ ID NO: 11802 - DNA, 119 bp, homo sapiens
atttatattcagcttacctgttgattcggtggtaattacagaatctgatgcacagagaacaatgtacccggaagttgtgtgaaaaagaatattgatggtacaatagaggtattatattt

SEQ ID NO: 11803 - DNA, 119 bp, homo sapiens
gcttttaaatgtagttttctggtgaatttggagtgaaagaggaaacaaatatcgttaagttgcttgaaaacaataccaagaacaattagaagaagaagtagctaaggtaggcttatagc

SEQ ID NO: 11804 - DNA, 119 bp, homo sapiens
ttaaacagaatggaaatgaaaaccaaggagaagttgaagaacaaacatttaaagaaaaggaattagacaaaaacctgaagatgtgcctcctgagattttgtctaatgaaaggtatacaa

SEQ ID NO: 11805 - DNA, 119 bp, homo sapiens
gagcaagccattgacagagaacatgagagagatgtattccaacaggaaatacagaaactagaacagcaattaaggttgttcctcgattccagcctatcagtgaacatcaaactagagag

SEQ ID NO: 11806 - DNA, 119 bp, homo sapiens
atttaaaggtagaggaccgaaaacactttggagctgtagaagctaaaccagaattgtccctagaagtacattgcaggctgaacgagatgccatagacagaaaggaaaaagaggtaagga

SEQ ID NO: 11807 - DNA, 119 bp, homo sapiens
atatgtactttttgttttctctaattagggatcctcaattcctgagctagcacattctgatgcttaccaactagagaaatatgctccagtggtaagttatataaatatttgtaatgttt

SEQ ID NO: 11808 - DNA, 119 bp, homo sapiens
cttgaagactacagtttgaaacagcagatgatgaagatttcatttgggttcaggaaaatattgatgaaatattttacaactacagaaattaactggccagcaaggtgaagaggtaatac

SEQ ID NO: 11809 - DNA, 119 bp, homo sapiens
cttggaatcttttttagaatgaaatttttggttcgacggtggcatcgagtcacaggttctgtttccatcatattaacagagatggctttggactgaatcaaggtgaagtcaaaatagca

SEQ ID NO: 11810 - DNA, 119 bp, homo sapiens
agactccaagaactttcccctcagagcacaggtaacagaggcttcctcttctgcctcttcaacctcctctcctctgcagatgaagaatttgatccccagctttccttgcagttaaaggt

SEQ ID NO: 11811 - DNA, 119 bp, homo sapiens
attggttttcataggagaagaagacacttagaagaagaaagaagctagaaaaagcaatgaagcagttggtaagcaagaagaattgaaaagactctataaggctcaggtcagtaaataaa

SEQ ID NO: 11812 - DNA, 119 bp, homo sapiens
cctggtgttgcaggccatccagaggcagctggaggaggtggaggagcggcagagggcttctgagatccaggtgtgaggctggagaaggcgttgcgaggagaagcaggtacggcatccca

SEQ ID NO: 11813 - DNA, 119 bp, homo sapiens
tcttaagcagattcaggcacacaggatgaagcacagcttttgcaggaatggtttaagctggttctggagagaataaattaatgcgatatgagtcggagctcctaatcatgtaagtaagg

SEQ ID NO: 11814 - DNA, 119 bp, homo sapiens
aatttgaacattttctcacccagggcccaggaactggaattagaagatcatcaaagcagactggagcagaactgagagagaaaatgctcaaggagggtgagtatgcttgggcctttgtt

SEQ ID NO: 11815 - DNA, 119 bp, homo sapiens
aaaaggtaaattaattttcttctggttttgtttcatttccaggtggaggtttagccgttggaacagttctctaattggttagtacaaaatacatgctttgctctcctctatcattgttt

SEQ ID NO: 11816 - DNA, 119 bp, homo sapiens
cacttcttttaccaacagttctttgacccctggctacacaaagctgcttcagtttatccagaacatcattatgaggaaggatttgatggatccaatcctcaggtattaaatagcttcaa

SEQ ID NO: 11817 - DNA, 119 bp, homo sapiens
ttgcagaataaagccattattgcccgtgtcacaaccttgtcagatgtagtagttggtctggaatcatttttggttctgagagagaaactaacccattgtataaggattatcatggtaag

SEQ ID NO: 11818 - DNA, 119 bp, homo sapiens
ccacaaggattgattcatatacggcagattcctcggcttaataacttgatctgtgatgaatcagatgtcaagacttagcttttaaattaaaaaggaagctattcaccattgaggtaaga

SEQ ID NO: 11819 - DNA, 119 bp, homo sapiens
ttcctcaaccaggcgagcgaggaggaggggccctcggcgctcttcatctaccgcactatggtgccggagaggtggaggtggagattggtgagcctcgacgcgccgctcccttccccggg

SEQ ID NO: 11820 - DNA, 119 bp, homo sapiens
atttatgtggccataaagatgagatacctgtcctgtctgaagagggagaagaggaagaagagacttatttcaaaaagtggagtccgtggataaagtgcgaggtgtggagttgggagggg

SEQ ID NO: 11821 - DNA, 119 bp, homo sapiens
ctgttttgcagctaagcgtgtgtcactgagaaccgaatctctaggccaacctctaaacagagaggatgagaaatggacaaagagatttcagaaaaactcccttccaaagtaagcatggc

SEQ ID NO: 11822 - DNA, 119 bp, homo sapiens
tttcagagaactgcgaagcacatcatggaaaagatgcatctccacatgctctgtacccctcttcccgagagttcctggaccaaaacgtggtgtttttcctcagaaataccaaaggtaca

SEQ ID NO: 11823 - DNA, 119 bp, homo sapiens
agaggcaatctctgaagctaccgacatgaaggaagctatggaaattatgccagaaacactggagtatggattataaacgctaatgtgctccattttctgaagaatattatatgtcaggt

SEQ ID NO: 11824 - DNA, 119 bp, homo sapiens
agcctcctgatgcagagaaagaactggttgataagattgagagcatatggtccaatctgtttaatgattagtgaatgtggagcatgctcttggggacataaagagaactttcacagagg

SEQ ID NO: 11825 - DNA, 119 bp, homo sapiens
ttttctcagcttactcgaggcgaaataatgaactacagagttcagatagaggagtttgcaaagcgttttacagtgaaggccctggttctgttggtgatgatcttgataaaggtaagaat

SEQ ID NO: 11826 - DNA, 119 bp, homo sapiens
ggtggataaagtggttcaaatgttcgagaccatgttaacccgccacacgacgatggtggtggggcccacagagggggcaagtccgtcgtcattaacactctgtgtcaggcccagaccaa

SEQ ID NO: 11827 - DNA, 119 bp, homo sapiens
gtcaacttccaaccttgtatgactttcattttgataacaaacggaatcaatgggtcccatggagtaaatagttccagagtatattcatgcccccgagaggaaattcatcaacatcctgg

SEQ ID NO: 11828 - DNA, 119 bp, homo sapiens
ttccattctgcagattccagacggtggcccagatggtgagagtctggaggaatgagtgtctgagagtctccacgaccggctgatcagtgaaacagacaagcagctggtcagtacatcca

SEQ ID NO: 11829 - DNA, 119 bp, homo sapiens
aatctctctttcctttcaaggtatggtaaataacactggtattgactggttcatgccctggcctccccagccctccatgcggtcgcaaagtcctttctaggtaagtcacagctgttatg

SEQ ID NO: 11830 - DNA, 119 bp, homo sapiens
ccctccagggctgtttgagaggcacaagctactcttttcttttaatatgaccatcaagatagaacaagcgaagggagagtccctcaagaagaactagatttctttttaaaaggtaatga

SEQ ID NO: 11831 - DNA, 119 bp, homo sapiens
tcttctttcaaggtctgcatggaaattctgaacacgtacttaacgaaagccttccagcaacgggacccaggatcccgtggggcagcctcaagtacctaattggagaggtaggggtgacc

SEQ ID NO: 11832 - DNA, 119 bp, homo sapiens
aggactttgaaaatgacgtctctgaatttaaccagaaagtagaagatcttgaccgaagattggggactactttattcaagcttttgatgatgcacctggcttggagcatgcctttaagg

SEQ ID NO: 11833 - DNA, 119 bp, homo sapiens
cagggttctccccggtgcacaagaacatgcccaccgtggctggcggcctccgctgggcacaggagctgagcagcgcatccagggtcctttcagcaactttggacgcatcacacacccgt

SEQ ID NO: 11834 - DNA, 119 bp, homo sapiens
tcactttttctcttttgtacgagtagttgcatggaatctgcagaaggaaagcgaatgcaacaaaaatataagatatgctgtcattgctagaaaagtaagcaacttctggcattgcgtgg

SEQ ID NO: 11835 - DNA, 119 bp, homo sapiens
tcttgcagtcttgtggcaacatctacaaaggccttgctcagactggtgcctggggctgctttgatgagttaatcgaatctccgtggaggtcttgtcagtggtggcagtgcaggtaaggg

SEQ ID NO: 11836 - DNA, 119 bp, homo sapiens
ctccaggtgctgacattggccagcaatgagaggattcctctgaaccccaccatgaagctcctctttgagtcagccacctgcgcacagccactccagcaactgtctctagagcaggtacg

SEQ ID NO: 11837 - DNA, 119 bp, homo sapiens
ctgttccaggtatgatcggagcaagctgtccctaaaggagatcacaaatgtacagtatgtttcctgtataaccccacggcaggcagcttcaccatcaacccccggcttcaggtacagga

SEQ ID NO: 11838 - DNA, 119 bp, homo sapiens
caccttaatgaaaacctggcaaagctcacagccaggtttgagaaagcaacagcagacaaactcaaatgtagcaagaagccgaagtgaccgcagtcaccatctcccttgccaaccgcctg

SEQ ID NO: 11839 - DNA, 119 bp, homo sapiens
gcgacacatggttcgagcacgtgagcatgctggtaatcatgctcaactgcgtgaccctgggcatgttccgccctgtgaggacgttgagtgcggctccgagcgctgcaacatcctggagg

SEQ ID NO: 11840 - DNA, 119 bp, homo sapiens
cccgcccccagcatgatggagtactcgttggacggacacaacgtgagcctctcggctatcaggaccgtggggtgctgcggcccctccgcgccatcaaccgcgtgcctagtaagtgaccg

SEQ ID NO: 11841 - DNA, 119 bp, homo sapiens
cactgcccccccaggtgatcacgctggaaggctgggtggacatcatgtactacgtcatggacgcccactattctacaacttcatctatttcatcctgctcatcatcgtgagtgtgggcg

SEQ ID NO: 11842 - DNA, 119 bp, homo sapiens
gcatcctgggcatgcaccttttcggctgcaagttcagcctgaagacagacaccggagacaccgtgcctgcaggaagaacttcgactccctgctgtgggccatcgtcaccgtgttccagg

SEQ ID NO: 11843 - DNA, 119 bp, homo sapiens
ctttgttgggtttagggcgatgccaacagatccgacacggacgaggacaagacgtcggtccacttcgagaggacttccacaagctcagagaactccagaccacaggtgcgtgtggtcgg

SEQ ID NO: 11844 - DNA, 119 bp, homo sapiens
catcccacagagctgctgcctccgcctgcataaagtgctggagccctacaagccccagtggtgccggagcgcgaggcctgggccctctacctcttctccccacagaaccggtgaggcgg

SEQ ID NO: 11845 - DNA, 119 bp, homo sapiens
agccccccaccgtcctctcccggcaggagcgggtcttcctcagcgtctccaattacatcttcacggccacttcgtggcggagatgatggtgaaggtaccgcggggcccggggactgccc

SEQ ID NO: 11846 - DNA, 119 bp, homo sapiens
ggctctggccctcaggccctgatgtcgctgttcgtgctgtcatccaaggatggatgggtgaacatcatgacgacgggctggatgccgtgggtgtcgaccagcaggtgcgcacaggcggg

SEQ ID NO: 11847 - DNA, 119 bp, homo sapiens
gcccgagtgcgccacgccctcggccctcagaccatctccttgtctttccaggcactttccccagcccagtaccggccctgtcccgcatgcctcaggccccgcttctgcggccgctgctc

SEQ ID NO: 11848 - DNA, 119 bp, homo sapiens
cccagtcgctggacgaggccctcaagtactgcaactacgtcttcaccatcgtgtttgtcttcgaggctgactgaagctggtagcatttgggttccgtcggttcttcaaggacaggtgtg

SEQ ID NO: 11849 - DNA, 119 bp, homo sapiens
gctgacgctcagctcccggccctagtgctgaagctgctgaagatggctacgggcatgcgcgccctgctgacactgtggtgcaagctctcccccaggtaggtggagcccgcgccatcctc

SEQ ID NO: 11850 - DNA, 119 bp, homo sapiens
ctctgcttctctcttgtgtaggtggggaacctgggccttcttttcatgctcctgttttttatctatgctcgctgggagtggagctgttcgggaggctgggtgagtggctcctgcgccct

SEQ ID NO: 11851 - DNA, 119 bp, homo sapiens
tagtgttcctttagcaatggaggtcacctgtttgctgcagtcaatggaaatgtgattcacgtttacaccccacgagcctagagaacatctcaagcctgaaaggacacacagggaaggta

SEQ ID NO: 11852 - DNA, 119 bp, homo sapiens
gactctgttttaggtcttaagaacagaaaaagagaagcaggatgtttatcaccatgagcacatagaagactcctagacaagcaaagccgggaactgcaggacatgggtgagcccacaag

SEQ ID NO: 11853 - DNA, 119 bp, homo sapiens
ttctgctttagaatgaccccattctaaagtggccccagagggtcgagattcacttatacaacttcagaagcaggtgaggaaggtgcttctctggggaaccctgcctcaggtgagagttg

SEQ ID NO: 11854 - DNA, 119 bp, homo sapiens
agatggaagctgaactggagaatttccataagcagaacactcaactggagctgaacatcacagaattgtgcagaaactgagagccaccgatcaggagatgcgcagagagagacagaagg

SEQ ID NO: 11855 - DNA, 119 bp, homo sapiens
gcggccgcctccccccgggactgaagggagggaattcctgtgggtcccaggagtgccaagagtgcgcagaagacgggaaattgcaaaagacctcacccctctgccctcccccgcggttt

SEQ ID NO: 11856 - DNA, 119 bp, homo sapiens
agagtgcgcagcaagacgggaaattgcaaaagacctcacccctctgccctcccccgcggttttccagtactcccgcccctccgcgcttgccccgcagctgattcatagccccggcccgg

SEQ ID NO: 11857 - DNA, 119 bp, homo sapiens
gttttccagtaactcccgcccctccgcgcttgccccgcagctgattcatagccccggcccgggccgccttgcacgtccgccccggagcccgcacccgcgccccacgcgccgccgaggac

SEQ ID NO: 11858 - DNA, 119 bp, homo sapiens
ccgggccgcctctgcacgtccgccccggagcccgcacccgcgccccacgcgccgccgaggactcggcccgctcgtggagcccttcgcccgcggcgtgagtacccccgacccgcccgtcc

SEQ ID NO: 11859 - DNA, 119 bp, homo sapiens
ggactcggcccggctcgtggagcccttcgcccgcggcgtgagtacccccgacccgcccgtccccgctctctcgcgccctgccgctgcgccgccctcggtggcttttccgacgggcgagc

SEQ ID NO: 11860 - DNA, 119 bp, homo sapiens
gtccccgctctgctcgcgccctgccgctgcgccgccctcggtggcttttccgacgggcgagccccgtgcgtgcgggaaagaatccgacaacttcgcagcccatcccggctggacgcgac

SEQ ID NO: 11861 - DNA, 119 bp, homo sapiens
gagccccgtgctgtgcgggaaagaatccgacaacttcgcagcccatcccggctggacgcgaccgggagtcagcagcccgttcccctcctcggtgccgcctctgcccagcgtttgcttgg

SEQ ID NO: 11862 - DNA, 119 bp, homo sapiens
cgaccgggagtgcagcagcccgttcccctcctcggtgccgcctctgcccagcgtttgcttggctgggctccacctgcgctcggacggcgctcggagggtcctcgcccccggcctgccta

SEQ ID NO: 11863 - DNA, 119 bp, homo sapiens
tcttggctgaacgtttaccattgactcctgtatcacttaaagtttccaccaattctacgcgtcagagttgcacttacaatggactgtccacaaccttccttatcatcaggaattgaaaa

SEQ ID NO: 11864 - DNA, 119 bp, homo sapiens
tctacgcgtcagagtttgcacttacaatggactgtccacaaccttccttatcatcaggaattgaaaatgtatttcagatccagatcagtaggattgaaacatccaatgtcatctgggtg

SEQ ID NO: 11865 - DNA, 119 bp, homo sapiens
gggaattacagcaccactgtgaagtggaaccaggttctgcattggagctgggaatctgagctccctttgaatgtgccacacactttgtaagaataaagagtttggtggacgatgccaag

SEQ ID NO: 11866 - DNA, 119 bp, homo sapiens
aatctgagctccctttggaatgtgccacacactttgtaagaataaagagtttggtggacgatgccaagtccctgagccaaatttctggagcaactggagttcctgggaggaagtcagtg

SEQ ID NO: 11867 - DNA, 119 bp, homo sapiens
tacaagattctactggacaggatatattgttcgttttccctaaagataagctggtggaagaaggcaccatgttaccatttgttacgtttctaggaacattcaaaataatgtatcctgtt

SEQ ID NO: 11868 - DNA, 119 bp, homo sapiens
ggaagaaggcaccaatgttaccatttgttacgtttctaggaacattcaaaataatgtatcctgttatttgaagggaaacagattcatggagaacaacttgatccacatgtaactgcatt

SEQ ID NO: 11869 - DNA, 119 bp, homo sapiens
gtatcctgttatttggaagggaaacagattcatggagaacaacttgatccacatgtaactgcattcaactgaatagtgtgcctttcattaggaataaagggacaaatatctattgtgag

SEQ ID NO: 11870 - DNA, 119 bp, homo sapiens
taactgcattcaacttgaatagtgtgcctttcattaggaataaagggacaaatatctattgtgaggcaatcaaggaaatgtcagtgaaggcatgaaaggcatcgttctttttgtctcaa

SEQ ID NO: 11871 - DNA, 119 bp, homo sapiens
aagtacttgaggagcccaaggacttttcttgtgaaaccgaggacttcaagactttgcactgtacttgggtcctgggacggacactgccttggggtggtctaaacaaccttcccaaagct

SEQ ID NO: 11872 - DNA, 119 bp, homo sapiens
caaggacttttcttgtgaaaccgaggacttcaagactttgcactgtacttgggatcctgggacggacacgccttggggtggtctaaacaaccttcccaaagctacactttatttgaatc

SEQ ID NO: 11873 - DNA, 119 bp, homo sapiens
attttctggggaaaagaaactttgtacacacaaaaactggtgtaattggcaaataactcaagactcacagaaacctataacttcacactcatagctgaaaattacttaaggaagagaag

SEQ ID NO: 11874 - DNA, 119 bp, homo sapiens
actcaagactcacaagaaacctataacttcacactcatagctgaaaattacttaaggaagagaagtgtcatatcctttttaacctgactcatcgaggtgagactagagttgtcacagcc

SEQ ID NO: 11875 - DNA, 119 bp, homo sapiens
ggaagagaagtgtcaatatcctttttaacctgactcatcgaggtgagactagagttgtcacagcccacctggccactaacgtgtctttgtttcacagactgtgtgatcaagtaaatgtg

SEQ ID NO: 11876 - DNA, 119 bp, homo sapiens
tgtcacagcccaccgtggccactaacgtgtctttgtttcacagactgtgtgatcaagtaaatgtgctgtgatctttgcctcattcacagcggaggtgagagttagaatttatacctatt

SEQ ID NO: 11877 - DNA, 119 bp, homo sapiens
agtaaatgtgctgtagatctttgcctcattcacagcggaggtgagagttagaatttatacctattgttctgccacgtttctcctcatggatgcacgcatcccctattatttgtttcttt

SEQ ID NO: 11878 - DNA, 119 bp, homo sapiens
tttatttaatgaatccttttagtgtcaactttgaaaatgtaaatgccacaaatgccatcatgacctggaggtgcactccataaggaataatttcacatatttgtgtcagattgaactcc

SEQ ID NO: 11879 - DNA, 119 bp, homo sapiens
gtcaactttgaaaatgtaaatgccacaaatgccatcatgacctggaaggtgcactccataaggaataattcacatatttgtgtcagattgaactccatggtgaaggaaaaatgatgcaa

SEQ ID NO: 11880 - DNA, 119 bp, homo sapiens
tacaatgtttccatcaaggtgaacggtgagtacttcttaagtgaactggaacctgccacagagtacatgcgcgagtacggtgtgctgatgccagccacttctggaaatggagtgaatgg

SEQ ID NO: 11881 - DNA, 119 bp, homo sapiens
acttcttaagtgaactggaacctgccacagagtacatggcgcgagtacggtgtgctgatgccagccactctggaaatggagtgaatggagtggtcagaacttcaccacacttgaagctg

SEQ ID NO: 11882 - DNA, 119 bp, homo sapiens
ccattatcaaaactgcatgccaatggaaagatcctgttctataatgtagttgtagaaaacctagacaaacatccagttcagagctccattccattccagcaccagccaacagcacaaaa

SEQ ID NO: 11883 - DNA, 119 bp, homo sapiens
gtagaaaacctagacaaaccatccagttcagagctccattccattccagcaccagccaacagcacaaaataatccttgacaggtgttcctaccaaatctgcgtcatagccaacaacagt

SEQ ID NO: 11884 - DNA, 119 bp, homo sapiens
ccagccaacagcacaaaactaatccttgacaggtgttcctaccaaatctgcgtcatagccaacaacagttgggtgcttctcctgcttctgtaatagtcatctctgcagaccccgaaaac

SEQ ID NO: 11885 - DNA, 119 bp, homo sapiens
aagaggttgaggaagaaagaattgcaggcacagagggtggattctctctgtcttggaaaccccaacctgagatgttataggctatgttgtggactggtgtgaccatacccaggatgtgc

SEQ ID NO: 11886 - DNA, 119 bp, homo sapiens
cccaacctggagatgttataggctatgttgtggactggtgtgaccatacccaggatgtgctcggtgattccagtggaagaatgtaggtcccaataccacaagcacagtcattagcacag

SEQ ID NO: 11887 - DNA, 119 bp, homo sapiens
ctccttcagacaaccctcacgtgctggtggatacattgacatcccactccttcactctgagttggaaagttactctactgaatctcaacctggttttatacaagggtaccatgtctatc

SEQ ID NO: 11888 - DNA, 119 bp, homo sapiens
ctctgagttggaaagattactctactgaatctcaacctggttttatacaagggtaccatgtctatctgaatccaaggcgaggcagtgccacccacgatttgaaaaggcagttctttcag

SEQ ID NO: 11889 - DNA, 119 bp, homo sapiens
atggttcagaatgttgcaaatacaaaattgacaacccggaagaaaaggcattgattgtggacaacctaagccagaatccttctatgagtttttcatcactccattcactagtgctggtg

SEQ ID NO: 11890 - DNA, 119 bp, homo sapiens
cattgattgtggacaacctaaagccagaatccttctatgagtttttcatcactccattcactagtgctgtgaaggccccagtgctacgttcacgaaggtcacgactccggatgaacact

SEQ ID NO: 11891 - DNA, 119 bp, homo sapiens
gagaaccctcacctaataataatgaatgtcagtgactgtatcccagatgctattgaagttgtaagcaagcagaagggacaaagatacagttcctaggcactaggaagtcactcacagaa

SEQ ID NO: 11892 - DNA, 119 bp, homo sapiens
gttgtaagcaagccagaagggacaaagatacagttcctaggcactaggaagtcactcacagaaaccgagtgactaagcctaactacctttatctccttccaacagaaaagaatcactct

SEQ ID NO: 11893 - DNA, 119 bp, homo sapiens
acagaaaccgagttgactaagcctaactacctttatctccttccaacagaaaagaatcactctggccctgcccctgcatctgttttgagaacttgacctataaccaggcagcttctgac

SEQ ID NO: 11894 - DNA, 119 bp, homo sapiens
cactctggccctggcccctgcatctgttttgagaacttgacctataaccaggcagcttctgactctggccttgtggccatgttccagtatccccaaaagccccaagtatgctgggacta

SEQ ID NO: 11895 - DNA, 119 bp, homo sapiens
tctgactctggctcttgtggccatgttccagtatccccaaaagccccaagtatgctgggactaatgacccacctgaaaatgtactaaaggcactagaaaaaaactacatgaactccctg

SEQ ID NO: 11896 - DNA, 119 bp, homo sapiens
ggactaatgacctcacctgaaaatgtactaaaggcactagaaaaaaactacatgaactccctgggagaatcccagctggagaaacaagtttgaattatgtgtcccagttggcttcaccc

SEQ ID NO: 11897 - DNA, 119 bp, homo sapiens
tccctgggagaaatcccagctggagaaacaagtttgaattatgtgtcccagttggcttcacccatgtttgagacaaggacagtctcccaacaaacccagtagaggcaccacactgttca

SEQ ID NO: 11898 - DNA, 119 bp, homo sapiens
tcacccatgtttggagacaaggacagtctcccaacaaacccagtagaggcaccacactgttcagagtataaatgcaaatggcagtctccctgcgtcttgccttgcctcccccgaccgag

SEQ ID NO: 11899 - DNA, 119 bp, homo sapiens
tgttcagagtataaaatgcaaatggcagtctccctgcgtcttgccttgcctcccccgaccgagaatagcgcctctcctcaattacccttttagatccaggtgaacactactgctaacca

SEQ ID NO: 11900 - DNA, 119 bp, homo sapiens
accgagaatagcagcctctcctcaattacccttttagatccaggtgaacactactgctaaccagcatgcgatttcataccttatgctacacagacattaagaagagcagagctggcacc

SEQ ID NO: 11901 - DNA, 119 bp, homo sapiens
taaccagcatgccgatttcataccttatgctacacagacattaagaagagcagagctggcaccctgtcacaccagtggccttggtccttaatcccagtacgatttgcaggtctggttta

SEQ ID NO: 11902 - DNA, 119 bp, homo sapiens
ggcaccctgtcatcaccagtggccttggtccttaatcccagtacgatttgcaggtctggtttatataagccactacagtctggctaggttaaaggccagaggctatggaacttaacact

SEQ ID NO: 11903 - DNA, 119 bp, homo sapiens
ggtttatataagaccactacagtctggctaggttaaaggccagaggctatggaacttaacactccccatggagcaagcttgccctagagacggcaggatcatgggagcatgcttacctt

SEQ ID NO: 11904 - DNA, 119 bp, homo sapiens
aacactccccattggagcaagcttgccctagagacggcaggatcatgggagcatgcttaccttctgctgttgttccaggctcacctttagaacaggagacttgagcttgacctaaggat

SEQ ID NO: 11905 - DNA, 119 bp, homo sapiens
taccttctgctgtttgttccaggctcacctttagaacaggagacttgagcttgacctaaggatatgcataaccactctacagactcccactcagtactgtacagggtggctgtggtcct

SEQ ID NO: 11906 - DNA, 119 bp, homo sapiens
aaggatatgcattaaccactctacagactcccactcagtactgtacagggtggctgtggtcctagaagtcagtttttactgaggaaatatttccattaacagcaattattatattgaag

SEQ ID NO: 11907 - DNA, 119 bp, homo sapiens
ggtcctagaagttcagtttttactgaggaaatatttccattaacagcaattattatattgaaggctttataaaggccacaggagacattactatagcatagattgtcaaatgtaaattt

SEQ ID NO: 11908 - DNA, 119 bp, homo sapiens
ttgaaggctttaataaaggccacaggagacattactatagcatagattgtcaaatgtaaatttactgaggtgttttataaaaaactcacaggtgtttgaggccaaaacagattttagac

SEQ ID NO: 11909 - DNA, 119 bp, homo sapiens
aaatttactgagcgtgttttataaaaaactcacaggtgtttgaggccaaaacagattttagacttacctgaacggataagaatctatagttcactgacacagtaaaattaactctgtgg

SEQ ID NO: 11910 - DNA, 119 bp, homo sapiens
ttagacttaccttgaacggataagaatctatagttcactgacacagtaaaattaactctgtgggtggggcggggggcatagctctaatctaatatataaaatgtgtgatgaatcaacaa

SEQ ID NO: 11911 - DNA, 119 bp, homo sapiens
ctgtgggtgggggcggggggcatagctctaatctaatatataaaatgtgtgatgaatcaacaagatttcacaattcttctgtcaagcttactacagtgaaagaatgggattggcaagta

SEQ ID NO: 11912 - DNA, 119 bp, homo sapiens
caacaagatttccacaattcttctgtcaagcttactacagtgaaagaatgggattggcaagtaacttctacttactgtcagttgtacttctgctccatagacatcagtattctgccatc

SEQ ID NO: 11913 - DNA, 119 bp, homo sapiens
caagtaacttctgacttactgtcagttgtacttctgctccatagacatcagtattctgccatcatttttatgactacctcagaacataaaaaggaacgtatatcacataattccagtca

SEQ ID NO: 11914 - DNA, 119 bp, homo sapiens
gccatcatttttgatgactacctcagaacataaaaaggaacgtatatcacataattccagtcacagttttggttcctcttttctttcaagaactatatataaatgacctgttttcactt

SEQ ID NO: 11915 - DNA, 119 bp, homo sapiens
cagtcacagtttttggttcctcttttctttcaagaactatatataaatgacctgttttcacttagcatctttggactctgcagtaggttgtctgggtcaagataactctcagtcacatt

SEQ ID NO: 11916 - DNA, 119 bp, homo sapiens
tcacttagcatcctttggactctgcagtaggttgtctgggtcaagataactctcagtcacatttatattatattatgctaaaatagtaaaatgaaacctcattgttggacataatttag

SEQ ID NO: 11917 - DNA, 119 bp, homo sapiens
gtcacatttctaaacaagcatgaaaggggttcatttttgtcttcttcttgcctgccgtcagcatggtggaatggctctgcctatgctcatgcttctggtgcccaatgccttgcactgtg

SEQ ID NO: 11918 - DNA, 119 bp, homo sapiens
cgtcagcatggtggaaatggctctgcctatgctcatgcttctggtgcccaatgccttgcactgtgccatcaacactatgaagagaaacaagtagccacacctcaaaataatgtggctgt

SEQ ID NO: 11919 - DNA, 119 bp, homo sapiens
ttgcactgtgccattcaacactatgaagagaaacaagtagccacacctcaaaataatgtggctgtcaacactggcctaaataaacctacacaaaccagtacttgccttttgctggaaac

SEQ ID NO: 11920 - DNA, 119 bp, homo sapiens
atgtggctgtcaacaactggcctaaataaacctacacaaaccagtacttgccttttgctggaaacattgttatgtgctcctcacgtagtagaaagcggtatcctgattagtctaacagt

SEQ ID NO: 11921 - DNA, 119 bp, homo sapiens
tgctggaaacattgattatgtgctcctcacgtagtagaaagcggtatcctgattagtctaacagttgtgtagactttagggccagtattgtcagcatttatttatttatgtacctttgt

SEQ ID NO: 11922 - DNA, 119 bp, homo sapiens
gtctaacagttgtgttagactttagggccagtattgtcagcatttatttatttatgtacctttgttatgtgggatatttttcatttgaaacttgttcataaaaatgtcaatgacattga

SEQ ID NO: 11923 - DNA, 119 bp, homo sapiens
gtacctttgttatgatgggatatttttcatttgaaacttgttcataaaaatgtcaatgacattgatgacgatttgtacatatttttcatatagttttgtttaaaaaataattcacgcaa

SEQ ID NO: 11924 - DNA, 119 bp, homo sapiens
atgacattgatgactgatttgtacatatttttcatatagttttgtttaaaaaataattcacgcaaaatctgaagtcatttttgctattgaaataaaccttaattaaaatatttcatcat

SEQ ID NO: 11925 - DNA, 119 bp, homo sapiens
cttcccgtgcggctgaggacgatccgccagtgagcgcggagactgcttccacttcgggcgggggagcgcggaccgaatcggctctctaggccgtggagcttgccgtcccacctccgtcc

SEQ ID NO: 11926 - DNA, 119 bp, homo sapiens
gggggagcgccggaccgaatcggctctctaggccgtggagcttgccgtcccacctccgtccaaatcgactttcctttctatccccaaccacccctcaacccctgttttcccctgccttc

SEQ ID NO: 11927 - DNA, 119 bp, homo sapiens
ccaaatcgacctttcctttctatccccaaccacccctcaacccctgttttcccctgccttccttgcagagccatggaggacgaggagagacagaagaagctggaggccggcaaagccaa

SEQ ID NO: 11928 - DNA, 119 bp, homo sapiens
cttgcccagtttcgacaaagaaaagctcagtcggatgggcagagtccttccaagaagcagaaaaaaaaggaaaaacgtcaagcagtaaacatgatgtgtcagcacaccatgatttgaat

SEQ ID NO: 11929 - DNA, 119 bp, homo sapiens
cttccaagaagcagaaaaaaaagagaaaaacgtcaagcagtaaacatgatgtgtcagcacaccatgattgaatattgatcaatcacagtgtaatgaaatgtacataaatagttctcaga

SEQ ID NO: 11930 - DNA, 119 bp, homo sapiens
tgatgtgtcagcacaccatgatttgaatattgatcaatcacagtgtaatgaaatgtacataaatagttccagagagtagaatcaactgtgattcctgaatctacaataatgagaactct

SEQ ID NO: 11931 - DNA, 119 bp, homo sapiens
aatgaaatgtacataaatagttctcagagagtagaatcaactgtgattcctgaatctacaataatgagactctacatagtggagaaataaccagtcatgagcagggcttctctgtggaa

SEQ ID NO: 11932 - DNA, 119 bp, homo sapiens
gaagaagaatttggtgttgatgattcttattctgaacaaggagcacaagacagtccgactcatctagagtgatggaaagtgagttggctgggaagcagcatgagattgaagagctaaac

SEQ ID NO: 11933 - DNA, 119 bp, homo sapiens
agtccgactcatctagagatgatggaaagtgagttggctgggaagcagcatgagattgaagagctaaacgagagctggaagaaatgagggttacctatgggactgaaggactgcagcag

SEQ ID NO: 11934 - DNA, 119 bp, homo sapiens
ttacaagaatttgaagctgccattaaacaaagagatggcattataacccagctcactgctaatttacaaaagcaagaagagaaaaggatgagacaatgagagaatttttagagttgaca

SEQ ID NO: 11935 - DNA, 119 bp, homo sapiens
ggcattataacccagctcactgctaatttacaacaagcaagaagagaaaaggatgagacaatgagagaattttagagttgacagaacagagtcaaaaattacagattcaatttcagcaa

SEQ ID NO: 11936 - DNA, 119 bp, homo sapiens
ttacaggctagtgaaactctgagaaacagcactcatagtagcacagctgcagacttactacaagccaaaaacagatcctcactcatcaacagcagcttgaagaacaagaccacttatta

SEQ ID NO: 11937 - DNA, 119 bp, homo sapiens
agcacagctgcagacttactacaagccaaacaacagatcctcactcatcaacagcagcttgaagaacaaaccacttattagaagattatcagaaaaagaaagaagacttcacaatgcaa

SEQ ID NO: 11938 - DNA, 119 bp, homo sapiens
ctcactcatcaacagcagcttgaagaacaagaccacttattagaagattatcagaaaaagaaagaagactcacaatgcaaattagtttcttgcaagagaaaattaaagtatatgaaatg

SEQ ID NO: 11939 - DNA, 119 bp, homo sapiens
taaaacagttaatggggacagtcgaagaacttcagaagagaaatcataaagacagccagttcgaaactgtatagtacaacgaatggaacaagaaacacaaagaaagttagaacaactcc

SEQ ID NO: 11940 - DNA, 119 bp, homo sapiens
ttcgaaactgatatagtacaacgaatggaacaagaaacacaaagaaagttagaacaactccgggcagagtggatgagatgtatgggcagcagatagtgcaaatgaaacaagaattaata

SEQ ID NO: 11941 - DNA, 119 bp, homo sapiens
ccgggcagagctggatgagatgtatgggcagcagatagtgcaaatgaaacaagaattaataagacaacaatggcacagatggaggaaatgaaaacacggcataagggagaaatggagaa

SEQ ID NO: 11942 - DNA, 119 bp, homo sapiens
taagacaacacatggcacagatggaggaaatgaaaacacggcataagggagaaatggagaatgctttaagtcatattcaaatattacagttaatgaagatcagataaagttaatgaatg

SEQ ID NO: 11943 - DNA, 119 bp, homo sapiens
aatgctttaaggtcatattcaaatattacagttaatgaagatcagataaagttaatgaatgtggcaataatgaactgaatataaaattgcaagatactaactctcaaaaggaaaaactc

SEQ ID NO: 11944 - DNA, 119 bp, homo sapiens
tgtggcaataaatgaactgaatataaaattgcaagatactaactctcaaaaggaaaaactcaaggaagactaggactaattttagaagaaaagtgtgctctacagagacagcttgaaga

SEQ ID NO: 11945 - DNA, 119 bp, homo sapiens
tcaaggaagaactaggactaattttagaagaaaagtgtgctctacagagacagcttgaagaccttgttgagaattgagcttttcaagggaacagattcagagagctagacagacaatag

SEQ ID NO: 11946 - DNA, 119 bp, homo sapiens
gaccttgttgaagaattgagcttttcaagggaacagattcagagagctagacagacaatagctgaacaaaaagtaaacttaatgaagcacataagtcccttagtacagtggaagatttg

SEQ ID NO: 11947 - DNA, 119 bp, homo sapiens
agctgaacaagaaagtaaacttaatgaagcacataagtcccttagtacagtggaagatttgaaagctgaattgtttctgcatctgaatccagaaaggaactagaattaaaacatgaagc

SEQ ID NO: 11948 - DNA, 119 bp, homo sapiens
tgaaagctgagattgtttctgcatctgaatccagaaaggaactagaattaaaacatgaagcagaagttaaaattacaagataaaacttgaaatgttagaaaaagaaaagaatgctgtgt

SEQ ID NO: 11949 - DNA, 119 bp, homo sapiens
gcagaagttacaaattacaagataaaacttgaaatgttagaaaaagaaaagaatgctgtgttagacagatggctgaatcacaagaagctgaattagagaggctgagaacacagcttcta

SEQ ID NO: 11950 - DNA, 119 bp, homo sapiens
gttagacagaatggctgaatcacaagaagctgaattagagaggctgagaacacagcttctatttagtcagaagaagagctttccaaactgaaggaagatttagaaattgaacatcgaat

SEQ ID NO: 11951 - DNA, 119 bp, homo sapiens
tatttagtcacgaagaagagctttccaaactgaaggaagatttagaaattgaacatcgaataaatattgaaaacttaaagataatttaggcattcactataaacagcagatagatggtt

SEQ ID NO: 11952 - DNA, 119 bp, homo sapiens
ataaatattgaaaaacttaaagataatttaggcattcactataaacagcagatagatggtttacagaataaatgagtcaaaagatagaaaccatgcagtttgaaaaggacaatttgata

SEQ ID NO: 11953 - DNA, 119 bp, homo sapiens
tttacagaatgaaatgagtcaaaagatagaaaccatgcagtttgaaaaggacaatttgataactaagcaaatcaattaattttggaaatttcaaagctaaaagatttacagcagtctct

SEQ ID NO: 11954 - DNA, 119 bp, homo sapiens
taactaagcagaatcaattaattttggaaatttcaaagctaaaagatttacagcagtctcttgtaaattaaagtcagaagaaatgactcttcaaatcaatgaacttcaaaaagaaattg

SEQ ID NO: 11955 - DNA, 119 bp, homo sapiens
cttgtaaattcaaagtcagaagaaatgactcttcaaatcaatgaacttcaaaaagaaattgaaatactcgacaagaagaaaaagaaaagggtacacttgaacaagaagttcaagaatta

SEQ ID NO: 11956 - DNA, 119 bp, homo sapiens
tgaaatactcagacaagaagaaaaagaaaagggtacacttgaacaagaagttcaagaattacaacttaaacagaattgttagaaaaacagatgaaggaaaaagagaatgatcttcaaga

SEQ ID NO: 11957 - DNA, 119 bp, homo sapiens
tacaacttaaaacagaattgttagaaaaacagatgaaggaaaaagagaatgatcttcaagaaaaatttgacaacttgaagcagagaatagcattcttaaagatgaaaagaaaacccttg

SEQ ID NO: 11958 - DNA, 119 bp, homo sapiens
gaaaaatttgcacaacttgaagcagagaatagcattcttaaagatgaaaagaaaacccttgaagacatgtgaaaatacatactcctgttagccaagaagaaagattgattttcttagac

SEQ ID NO: 11959 - DNA, 119 bp, homo sapiens
tgaagacatgttgaaaatacatactcctgttagccaagaagaaagattgattttcttagactccattaatccaaatccaaagactctgtgtgggaaaaagaaatagaaatacttataga

SEQ ID NO: 11960 - DNA, 119 bp, homo sapiens
actccattaagtccaaatccaaagactctgtgtgggaaaaagaaatagaaatacttatagaggaaaatgggacctcaaacaacaatgtattcagctaaatgaagagattgaaaagcaaa

SEQ ID NO: 11961 - DNA, 119 bp, homo sapiens
gaggaaaatgaggacctcaaacaacaatgtattcagctaaatgaagagattgaaaagcaaaggaacacttttcatttgctgaaaaaaactttgaagttaactatcaagagttacaagag

SEQ ID NO: 11962 - DNA, 119 bp, homo sapiens
aaggaacactttttcatttgctgaaaaaaactttgaagttaactatcaagagttacaagaggagtatgctgccttctcaaagtaaaagatgatttagaagacagtaaaaataaacagga

SEQ ID NO: 11963 - DNA, 119 bp, homo sapiens
aggagtatgcttgccttctcaaagtaaaagatgatttagaagacagtaaaaataaacaggaattagagttaaaagtaaacttaaagcacttaatgaagagcttcatttgcaaagaataa

SEQ ID NO: 11964 - DNA, 119 bp, homo sapiens
gaattagagtataaaagtaaacttaaagcacttaatgaagagcttcatttgcaaagaataaatccaactcagtgaaaatgaaaagttctgtctttgatgaagacaaaacttttgtagca

SEQ ID NO: 11965 - DNA, 119 bp, homo sapiens
aaatccaactacagtgaaaatgaaaagttctgtctttgatgaagacaaaacttttgtagcagaaacattgaaatgggtgaggttgttgaaaaggatacaacagaactcatggaaaaact

SEQ ID NO: 11966 - DNA, 119 bp, homo sapiens
cagaaacattggaaatgggtgaggttgttgaaaaggatacaacagaactcatggaaaaacttgaggtaacaagcgagagaaattagagctgtcacagagactgtctgatctttctgaac

SEQ ID NO: 11967 - DNA, 119 bp, homo sapiens
cttgaggtaaccaagcgagagaaattagagctgtcacagagactgtctgatctttctgaacaattgaaaagaaacatggtgagattagttttctaaatgaagaagttaaatctttaaag

SEQ ID NO: 11968 - DNA, 119 bp, homo sapiens
acaattgaaacagaaacatggtgagattagttttctaaatgaagaagttaaatctttaaagcaagagaagaacaagtttcattgagatgtagagagctagaaatcattattaaccacaa

SEQ ID NO: 11969 - DNA, 119 bp, homo sapiens
agcaagagaaagaacaagtttcattgagatgtagagagctagaaatcattattaaccacaacagggcagaaatgtacagtcatgtgatactcaagtaagctctttattagatggagttg

SEQ ID NO: 11970 - DNA, 119 bp, homo sapiens
aacagggcagaaaatgtacagtcatgtgatactcaagtaagctctttattagatggagttgtgaccatgcaagcaggggtgctgaaggatcagtttctaaagtaaataaaagttttggt

SEQ ID NO: 11971 - DNA, 119 bp, homo sapiens
tgtgaccatgacaagcaggggtgctgaaggatcagtttctaaagtaaataaaagttttggtgaagaatcaaaataatggtggaagataaagtttcttttgaaaatatgactgttggaga

SEQ ID NO: 11972 - DNA, 119 bp, homo sapiens
gtgaagaatcaaaaataatggtggaagataaagtttcttttgaaaatatgactgttggagaagaaagtagcaagaacagttgattttggatcacttaccatctgtaacaaaggaatcat

SEQ ID NO: 11973 - DNA, 119 bp, homo sapiens
gaagaaagtaagcaagaacagttgattttggatcacttaccatctgtaacaaaggaatcatcacttagacaactcaaccaagtgaaaatgataaacttcagaaagaactcaatgtactt

SEQ ID NO: 11974 - DNA, 119 bp, homo sapiens
aatgatttaaggctacagatggaagcccaacgcatttgcctctctctggtttattcaactcatgtggataggttcgtgaatatatggaaaatgaaaaagataaagctctttgcagtctt

SEQ ID NO: 11975 - DNA, 119 bp, homo sapiens
ggtttattcaactcatgtggatcaggttcgtgaatatatggaaaatgaaaaagataaagctctttgcagcttaaagaagagcttatttttgctcaagaggaaaagatcaaggaacttca

SEQ ID NO: 11976 - DNA, 119 bp, homo sapiens
aaaaagataaagctctttgcagtcttaaagaagagcttatttttgctcaagaggaaaagatcaaggaactcagaaaatacaccagttagaactacagactatgaaaacacaagaaacag

SEQ ID NO: 11977 - DNA, 119 bp, homo sapiens
actttatgcagtgtccttggtgaatattatactcctgctttaaaatgtgaagtaaatgcagaagacaaaagaattctggtgattacatttctgaaaatgaagatccagaattacaagat

SEQ ID NO: 11978 - DNA, 119 bp, homo sapiens
gtgaatattatactcctgctttaaaatgtgaagtaaatgcagaagacaaagagaattctggtgattacattctgaaaatgaagatccagaattacaagattatagatatgaagttcaag

SEQ ID NO: 11979 - DNA, 119 bp, homo sapiens
atgtcaatcataaaagcaagttatcttctctgcaagatcttgaaaaaactaaacttgaagaacaagttcagaattagaaagcctcatatcctctttgcagcaacagttgaaagaaactg

SEQ ID NO: 11980 - DNA, 119 bp, homo sapiens
cttgaaaaaactaaacttgaagaacaagttcaagaattagaaagcctcatatcctctttgcagcaacagtgaaagaaactgaacaaaactatgaggcagagatccactgtttacagaag

SEQ ID NO: 11981 - DNA, 119 bp, homo sapiens
agaaagcctcatatcctctttgcagcaacagttgaaagaaactgaacaaaactatgaggcagagatccatgtttacagaagaggcttcaagctgttagtgagtccacggttccgccaag

SEQ ID NO: 11982 - DNA, 119 bp, homo sapiens
gttattgtgtcaatgagtatagcatttgctcaacaaactgaactgtctagaatatctgggggaaaagaaatactgcatcatcaaagcaagcacatgctgtgtgtcagcaagaacaacat

SEQ ID NO: 11983 - DNA, 119 bp, homo sapiens
ggggaaaagaaaatactgcatcatcaaagcaagcacatgctgtgtgtcagcaagaacaacattattttatgaaatgaaattatcacaggatcaaattggttttcagacttttgagacag

SEQ ID NO: 11984 - DNA, 119 bp, homo sapiens
acattattttaatgaaatgaaattatcacaggatcaaattggttttcagacttttgagacagtggatgtaaatttaaagaagaatttaaaccacttagtaaagagttaggagaacatgg

SEQ ID NO: 11985 - DNA, 119 bp, homo sapiens
acagtggatgtgaaatttaaagaagaatttaaaccacttagtaaagagttaggagaacatggaaaggaattttattatcaaatagtgatccccatgatataccagaatcaaaggactgt

SEQ ID NO: 11986 - DNA, 119 bp, homo sapiens
atggaaaggaaattttattatcaaatagtgatccccatgatataccagaatcaaaggactgtgtgctgatatttcagaagaaatgttctccaaagataaaacatttatagttagacagt

SEQ ID NO: 11987 - DNA, 119 bp, homo sapiens
attcatgatgagatttcagtgtcaagcatggatgcttctagacaactaatgttgaatgaagaacagttgaagatatgagacaggaacttgtacgacaataccaagaacatcaacaggca

SEQ ID NO: 11988 - DNA, 119 bp, homo sapiens
tgaatgaagaacagttggaagatatgagacaggaacttgtacgacaataccaagaacatcaacaggcaaggaattgttaaggcaagcacatatgcggcaaatggagagacagcgagaag

SEQ ID NO: 11989 - DNA, 119 bp, homo sapiens
agaacatcaacaggcaacggaattgttaaggcaagcacatatgcggcaaatggagagacagcgagaagacaggaacagctacaagaagagattaagagacttaatagacaattagccca

SEQ ID NO: 11990 - DNA, 119 bp, homo sapiens
agatcctccatagataatgaaaacctggtttcagagagagagagggtgcttttagaggagctggaagcataaagcagctgtctttagctggaagagagaagctgtgttgtgagctgcgc

SEQ ID NO: 11991 - DNA, 119 bp, homo sapiens
aacctggtttcagagagagagagggtgcttttagaggagctggaagcactaaagcagctgtctttagctgaagagagaagctgtgttgtgagctgcgcaacagcagtacgcaaacacag

SEQ ID NO: 11992 - DNA, 119 bp, homo sapiens
gtatgcactccagaaagctaataatagacttttgaagatcctcttagaagttgtaaagacaacagcagcgttgaagaaacaattggtcgccatgtccttgggattctagatagatctag

SEQ ID NO: 11993 - DNA, 119 bp, homo sapiens
ttagaagttgtaaagacaacagcagctgttgaagaaacaattggtcgccatgtccttgggattctagatgatctagtaaaagccagtcatctgccagcctaatttggaggtcagaagca

SEQ ID NO: 11994 - DNA, 119 bp, homo sapiens
gtcgccatgtccttgggattctagatagatctagtaaaagccagtcatctgccagcctaatttggaggtagaagcagaggcatctgtaaagtcatgtgtccatgaggaacatacaagag

SEQ ID NO: 11995 - DNA, 119 bp, homo sapiens
ttacagatgaatccattccctcttattctggaagtgatatgccaagaaatgacattaacatgtggtcaaagtaactgaggaaggaacagagctgtcacaacgacttgtgaggagtggtt

SEQ ID NO: 11996 - DNA, 119 bp, homo sapiens
aacatgtggtcaaaagtaactgaggaaggaacagagctgtcacaacgacttgtgaggagtggttttgctgaactgaaatagaccctgaaaatgaagaacttatgctgaacattagctct

SEQ ID NO: 11997 - DNA, 119 bp, homo sapiens
gagtggttttgctggaactgaaatagaccctgaaaatgaagaacttatgctgaacattagctctcgactcaagcagcagttgaaaaactcctagaagccataagtgaaactagcagtca

SEQ ID NO: 11998 - DNA, 119 bp, homo sapiens
cttgaacatgcgaaagtgacacagacagagttgatgcgtgagtcatttagacagaaacaagaagcaacaagtcccttaagtgccaagaggaacttcgagagcgccttcatgaggagtcc

SEQ ID NO: 11999 - DNA, 119 bp, homo sapiens
catttagacagaaacaagaagcaacagagtcccttaagtgccaagaggaacttcgagagcgccttcatgggagtccagggccagagaacagctagctgtggagctcagtaaggctgagg

SEQ ID NO: 12000 - DNA, 119 bp, homo sapiens
gcgtcattgatggctatgcagatgaaaaaactctttttgaaaggcaaattcaggaaaaaactgatataaagatcgtcttgagcaggagttgttatgtgcaagtaacaggttgcaagaat

SEQ ID NO: 12001 - DNA, 119 bp, homo sapiens
aattcaggaaaaaactgatataatagatcgtcttgagcaggagttgttatgtgcaagtaacaggttgcagaattggaggcagagcaacagcagatccaagaagaaagagaattactgtc

SEQ ID NO: 12002 - DNA, 119 bp, homo sapiens
ttatgtgcaagtaacaggttgcaagaattggaggcagagcaacagcagatccaagaagaaagagaattatgtccagacaaaaggaagctatgaaagcagaggcaggcccagttgaacaa

SEQ ID NO: 12003 - DNA, 119 bp, homo sapiens
aattactacaggagacagaaaaattaatgaaggaaaaactagaagtacaatgtcaagctgaaaaagtactgatgaccttcaaaaacaagtgaaagctctagaaatagatgtggaagaac

SEQ ID NO: 12004 - DNA, 119 bp, homo sapiens
gctgaaaaagtacgtgatgaccttcaaaaacaagtgaaagctctagaaatagatgtggaagaacaagtcgtaggtttatagagctggaacaagaaaaaaatactgaactaatggattta

SEQ ID NO: 12005 - DNA, 119 bp, homo sapiens
ggaagaacaagtcagtaggtttatagagctggaacaagaaaaaaatactgaactaatggatttaagacacaaaaccaagcattggaaaagcagttagaaaaaatgagaaaatttttaga

SEQ ID NO: 12006 - DNA, 119 bp, homo sapiens
gttgaacagttagcaaatcatctgaaagaaaaaacagacaaatgcagtgagcttttgctctctaaagagagcttcaaagggatatacaagaaaggaatgaagaaatagagaaactggag

SEQ ID NO: 12007 - DNA, 119 bp, homo sapiens
ctctctaaagagcagcttcaaagggatatacaagaaaggaatgaagaaatagagaaactggagttcagataagagaactggagcaggcgcttcttgtgagtgcagatacttttcaaaag

SEQ ID NO: 12008 - DNA, 119 bp, homo sapiens
attacaaacttagaagagcaattagaacagtttagagaagaactggaaaataagaatgaagaagttcaaaattacatatgcaattagaaatacagaaaaaggaatctactacccgccta

SEQ ID NO: 12009 - DNA, 119 bp, homo sapiens
agagaagaactggaaaataagaatgaagaagttcaacaattacatatgcaattagaaatacagaaaaagaatctactacccgcctacaagaacttgaacaggaaaacaaattatttaag

SEQ ID NO: 12010 - DNA, 119 bp, homo sapiens
gatgacatggagaaactgggacttgccataaaggaatctgatgccatgtctactcaagaccaacatgtgtatttgggaaatttgctcaaataatacaggaaaaagaggtagaaattgac

SEQ ID NO: 12011 - DNA, 119 bp, homo sapiens
caacatgtgctatttgggaaatttgctcaaataatacaggaaaaagaggtagaaattgaccaattaaataacaagttacgaaactccagcagcaacttaaaattacaacagataacaag

SEQ ID NO: 12012 - DNA, 119 bp, homo sapiens
gttattgaagaaaaaaatgaactgataagggatcttgaaacccaaatagaatgtttgatgagtgatcaaaatgtgtgaagagaaatagagaagaagaaatagagcagctcaatgaagtg

SEQ ID NO: 12013 - DNA, 119 bp, homo sapiens
gagtgatcaagaatgtgtgaagagaaatagagaagaagaaatagagcagctcaatgaagtgattgaaaacttcaacaggaattggcaaatattggacagaagacatcaatgaatgctca

SEQ ID NO: 12014 - DNA, 119 bp, homo sapiens
tgattgaaaaacttcaacaggaattggcaaatattggacagaagacatcaatgaatgctcattccctctagaagaagcagacagtttaaaacatcaattggatgtggttatagctgaaa

SEQ ID NO: 12015 - DNA, 119 bp, homo sapiens
cattccctctcagaagaagcagacagtttaaaacatcaattggatgtggttatagctgaaaagctggcctggaacagcaagtagaaaccgctaatgaagaaatgaccttcatgaaaaat

SEQ ID NO: 12016 - DNA, 119 bp, homo sapiens
aaagctggccttggaacagcaagtagaaaccgctaatgaagaaatgaccttcatgaaaaatgtacttaagaaaccaattttaaaatgaatcagctaacacaggaattattcagcttaaa

SEQ ID NO: 12017 - DNA, 119 bp, homo sapiens
atgtacttaaagaaaccaattttaaaatgaatcagctaacacaggaattattcagcttaaagagagaactgaaagtgtggaaaagattcaaagcataccagagaatagtgttaacgtgg

SEQ ID NO: 12018 - DNA, 119 bp, homo sapiens
aagagagaacgtgaaagtgtggaaaagattcaaagcataccagagaatagtgttaacgtggctatagatatctgagcaaagacaaacctgaactagaagtagtccttacagaggatgct

SEQ ID NO: 12019 - DNA, 119 bp, homo sapiens
ggctatagatcatctgagcaaagacaaacctgaactagaagtagtccttacagaggatgctcttaaatcctagaaaatcagacatacttcaaatcttttgaagaaaatggcaaaggttc

SEQ ID NO: 12020 - DNA, 119 bp, homo sapiens
ctcttaaatccctagaaaatcagacatacttcaaatcttttgaagaaaatggcaaaggttccataattatttggaaacaaggttgctacaacttgagagcactgttagtgcaaaggact

SEQ ID NO: 12021 - DNA, 119 bp, homo sapiens
tccataattaatttggaaacaaggttgctacaacttgagagcactgttagtgcaaaggacttagaacttcccagtgttataaacaaataaaagacatgcaagaacaaggccagtttgaa

SEQ ID NO: 12022 - DNA, 119 bp, homo sapiens
cttagaacttacccagtgttataaacaaataaaagacatgcaagaacaaggccagtttgaaacagaaatcttcaaaagaagattgtaaacctacagaaaatagttgaagaaaaagtggc

SEQ ID NO: 12023 - DNA, 119 bp, homo sapiens
aaacagaaatgcttcaaaagaagattgtaaacctacagaaaatagttgaagaaaaagtggctgctgctctgtcagtcaaatccaacttgaggcagttcaggaatatgcaaaattctgtc

SEQ ID NO: 12024 - DNA, 119 bp, homo sapiens
gctgctgctcttgtcagtcaaatccaacttgaggcagttcaggaatatgcaaaattctgtcaagataataaacaatttcatcagaacctgaaagaacaaatattcagaatttaaatcaa

SEQ ID NO: 12025 - DNA, 119 bp, homo sapiens
tcaagataatcaaacaatttcatcagaacctgaaagaacaaatattcagaatttaaatcaactaagagagatgagttggggtcagatatatcagcattaaccttgagaatatcagaatt

SEQ ID NO: 12026 - DNA, 119 bp, homo sapiens
aactaagagaagatgagttggggtcagatatatcagcattaaccttgagaatatcagaattagaaagccggttgttgaaatgcatactagtttgattttagaaaaagaacaagtagaaa

SEQ ID NO: 12027 - DNA, 119 bp, homo sapiens
ttagaaagccaggttgttgaaatgcatactagtttgattttagaaaaagaacaagtagaaattgcagaaaaaatgttttagaaaaagaaaagaagctgctagaactacagaagctattg

SEQ ID NO: 12028 - DNA, 119 bp, homo sapiens
aattgcagaaaaaaatgttttagaaaaagaaaagaagctgctagaactacagaagctattggagggcaagagaaaaaacagagagagaaagaaaagaaaagaagccctcaagatgttga

SEQ ID NO: 12029 - DNA, 119 bp, homo sapiens
acaactactgagctatttcatagcaatgaagaaagtggattttttaatgaactcgaggctcttagagctaatcagtggctaccaaagcagaacttgccagttataaagaaaaggctgaa

SEQ ID NO: 12030 - DNA, 119 bp, homo sapiens
agcaatgaagaaagtggattttttaatgaactcgaggctcttagagctgaatcagtggctaccaaagcaaacttgccagttataaagaaaaggctgaaaaacttcaagaagagcttttg

SEQ ID NO: 12031 - DNA, 119 bp, homo sapiens
gtaaaagaaacaaatatgacatctcttcagaaagacttaagccaagttagggatcacctcgcagaggcaaagagaaattgtccattttagaaaaagaagatgagactgaggtacaagaa

SEQ ID NO: 12032 - DNA, 119 bp, homo sapiens
atcacctcgcagaggcaaaagagaaattgtccattttagaaaaagaagatgagactgaggtacaagaaacaaaaaggcctgcatgtttgagccacttcctataaaactgagtaagagca

SEQ ID NO: 12033 - DNA, 119 bp, homo sapiens
gactgaggtacaagaaagcaaaaaggcctgcatgtttgagccacttcctataaaactgagtaagagcatgcatcccagacagatgggactctgaagatcagtagcagcaatcagactcc

SEQ ID NO: 12034 - DNA, 119 bp, homo sapiens
aaactgagtaagagcattgcatcccagacagatgggactctgaagatcagtagcagcaatcagactccaaaattcttgttaaaaatgcaggaatacaaattaatttacagagtgaatgt

SEQ ID NO: 12035 - DNA, 119 bp, homo sapiens
gcagcaatcagactccacaaattcttgttaaaaatgcaggaatacaaattaatttacagagtgaatgttctcagaagaagttactgaaataatcagtcagtttactgaaaaaattgaga

SEQ ID NO: 12036 - DNA, 119 bp, homo sapiens
tttacagagtgaatgttcctcagaagaagttactgaaataatcagtcagtttactgaaaaaattgagaaatgcaagaactacatgctgctgaaattttggacatggaatccagacatat

SEQ ID NO: 12037 - DNA, 119 bp, homo sapiens
actgaaaaaattgagaagatgcaagaactacatgctgctgaaattttggacatggaatccagacatattcagaaactgaaaccttaaagagggaacactatgttgccgttcagttactg

SEQ ID NO: 12038 - DNA, 119 bp, homo sapiens
tggaatccagacatatttcagaaactgaaaccttaaagagggaacactatgttgccgttcagttactgaagaggaatgtggtaccttgaaggcagtgatacagtgtctgagaagtaaag

SEQ ID NO: 12039 - DNA, 119 bp, homo sapiens
attctggatcagactggggtcagggaatttatcttacacacagtcagggatttgacatagcatcagaagccgaggagaagaaagtgaaagtgcaacagattcctttccaaagaaaataa

SEQ ID NO: 12040 - DNA, 119 bp, homo sapiens
tctggatcagactggggtcagggaatttatcttacacacagtcagggatttgacatagcatcagaaggcgaggagaagaaagtgaaagtgcaacagattcctttccaaagaaaataaag

SEQ ID NO: 12041 - DNA, 119 bp, homo sapiens
ggattactgagagctgtccataatgaaggcatgcaggtgctttctctcactgagtctccctatagtgatgagaggaccattctattcagcaggtttcagaaccttggctagaagagaga

SEQ ID NO: 12042 - DNA, 119 bp, homo sapiens
gtgctttctctcactgagtctccctatagtgatggagaggaccattctattcagcaggtttcagaacctggctagaagagagaaaagcttacatcaatacaatctcatctctaaaggat

SEQ ID NO: 12043 - DNA, 119 bp, homo sapiens
gaggaccattctattcagcaggtttcagaaccttggctagaagagagaaaagcttacatcaatacaatccatctctaaaggatttaattacaaagatgcaactgcaaagagaagccgag

SEQ ID NO: 12044 - DNA, 119 bp, homo sapiens
gtttatgatagttctcaatctcatgagagcttctcagactggcgaggtgaactactgcttgcccttcaaaagttttcttagaagagcgtagtgttttactagcagcatttcggacggag

SEQ ID NO: 12045 - DNA, 119 bp, homo sapiens
cagactggcgaggtgaactactgcttgcccttcaacaagttttcttagaagagcgtagtgttttactagagcatttcggacggagctgacagctctaggtactacagatgcagttggtt

SEQ ID NO: 12046 - DNA, 119 bp, homo sapiens
acaagttttcttagaagagcgtagtgttttactagcagcatttcggacggagctgacagctctaggtacacagatgcagttggtttactaaactgtttggaacagagaatacaagaaca

SEQ ID NO: 12047 - DNA, 119 bp, homo sapiens
ggtgttgaatatcaagcagctatggaatgcctccagaaagcagatagaaggagtttgttatctgaaattaggcactgcatgcacaaatgaatggtaggaaaattactctgaaaagagaa

SEQ ID NO: 12048 - DNA, 119 bp, homo sapiens
aatgcctccagaaagcagatagaaggagtttgttatctgaaattcaggcactgcatgcacaaatgaatgtaggaaaattactctgaaaagagaacaagagagtgagaaaccaagccaag

SEQ ID NO: 12049 - DNA, 119 bp, homo sapiens
aactcttggaatataatatacagcagaagcagtctcaaatgctggagatgcaagtggagctcagcagtagaaagacagagcaacggaactgcaggagcagctgagttctgagaaaatgg

SEQ ID NO: 12050 - DNA, 119 bp, homo sapiens
caagtggagctcagcagtatgaaagacagagcaacggaactgcaggagcagctgagttctgagaaaatgtggttgctgaactgaagagtgagcttgcacaaactaaattggaactagaa

SEQ ID NO: 12051 - DNA, 119 bp, homo sapiens
gctgagttctgagaaaatggtggttgctgaactgaagagtgagcttgcacaaactaaattggaactagaacaacactcaaggcacagcataaacacctaaaagaattggaggctttcag

SEQ ID NO: 12052 - DNA, 119 bp, homo sapiens
gttggaagttaaagataagacagatgaagtacatttgcttaatgacacattagcaagtgaacagaaaaatcaagagagctccagtgggctttggagaaagagaaagccaagttgggacg

SEQ ID NO: 12053 - DNA, 119 bp, homo sapiens
catttgcttaatgacacattagcaagtgaacagaaaaaatcaagagagctccagtgggctttggagaaaagaaagccaagttgggacgcagtgaagaacgggataaagaagaacttgag

SEQ ID NO: 12054 - DNA, 119 bp, homo sapiens
gatctgaagttttcacttgagagtcagaaacaaaggaatcttcagctaaatctacttttggaacaacagaacaactactgaacgaatcccagcaaaaaatagaatcacagagaatgcta

SEQ ID NO: 12055 - DNA, 119 bp, homo sapiens
cttttggaacaacagaaacaactactgaacgaatcccagcaaaaaatagaatcacagagaatgctatatatgcccagttgtcagaagaacaaggtcgaaacttagagcttcaggtactt

SEQ ID NO: 12056 - DNA, 119 bp, homo sapiens
cagagaatgctatatgatgcccagttgtcagaagaacaaggtcgaaacttagagcttcaggtacttcttaatctgagaaagttcgaattcgggaaatgagtagtaccctagatagggag

SEQ ID NO: 12057 - DNA, 119 bp, homo sapiens
cttcaggtacttcttgaatctgagaaagttcgaattcgggaaatgagtagtaccctagatagggagcggaattgcacgcacagctgcagagcagtgatggtactggacagtctcggcca

SEQ ID NO: 12058 - DNA, 119 bp, homo sapiens
ctagatagggagcgggaattgcacgcacagctgcagagcagtgatggtactggacagtctcggccaccctgccctcagaggacctactgaaagagctgcagaaacagctagaggaaaaa

SEQ ID NO: 12059 - DNA, 119 bp, homo sapiens
cagtctcggccacccttgccctcagaggacctactgaaagagctgcagaaacagctagaggaaaaacacgtcgcatagtagaattgttaaatgagactgaaaaatataaactggattct

SEQ ID NO: 12060 - DNA, 119 bp, homo sapiens
ctagaggaaaaacacagtcgcatagtagaattgttaaatgagactgaaaaatataaactggattctttgaaacacgacagcaaatggaaaaagataggcaggttcacaggaaaacactg

SEQ ID NO: 12061 - DNA, 119 bp, homo sapiens
aaactggattctttgcaaacacgacagcaaatggaaaaagataggcaggttcacaggaaaacactgcagcagaacaggaggccaacactgagggacagaaaaaaatgcatgagctccag

SEQ ID NO: 12062 - DNA, 119 bp, homo sapiens
aggaaaacactgcagacagaacaggaggccaacactgagggacagaaaaaaatgcatgagctccagtccaagtggaagatcttcagcgccagctggaagagaaaagacaacaagtttat

SEQ ID NO: 12063 - DNA, 119 bp, homo sapiens
catgagctccagtccaaagtggaagatcttcagcgccagctggaagagaaaagacaacaagtttataagtagaccttgaaggacagcgactacaaggaatcatgcaggaattccagaag

SEQ ID NO: 12064 - DNA, 119 bp, homo sapiens
caacaagtttataagttagaccttgaaggacagcgactacaaggaatcatgcaggaattccagaagcaaaactagaacgagaagaaaaacgagaaagtagaagaattctgtatcagaac

SEQ ID NO: 12065 - DNA, 119 bp, homo sapiens
ccaaccacgtggagcttaaccagtgatagaactagaaattgggttcttcaacagaaaatagaaggagaacaaaagaatcaaactacgctaaattgattgaaatgaatggaggaggaacc

SEQ ID NO: 12066 - DNA, 119 bp, homo sapiens
tcttcaacagaaaatagaaggagaaacaaaagaatcaaactacgctaaattgattgaaatgaatggaggggaaccggctgtaatcatgaattagaaatgatcagacaaaagcttcaatg

SEQ ID NO: 12067 - DNA, 119 bp, homo sapiens
ctaaattgattgaaatgaatggaggaggaaccggctgtaatcatgaattagaaatgatcagacaaaagctcaatgtgtagcttcaaaactacaggttctaccccagaaagcctctgaga

SEQ ID NO: 12068 - DNA, 119 bp, homo sapiens
cccagcttggtgtccccaagtacttcttgtggctcattgactgaaagactactgagacaaaatgctgagtgacagggcatatcagtcaactgactgaagagaagaatgacttaaggaac

SEQ ID NO: 12069 - DNA, 119 bp, homo sapiens
gctcattgactgaaagactactgagacaaaatgctgagctgacagggcatatcagtcaactgactgaaggaagaatgacttaaggaacatggttatgaagctggaagagcagatcaggt

SEQ ID NO: 12070 - DNA, 119 bp, homo sapiens
tgctgagctgacagggcatatcagtcaactgactgaagagaagaatgacttaaggaacatggttatgaactggaagagcagatcaggtggtatcgacagacaggagctggtagagataa

SEQ ID NO: 12071 - DNA, 119 bp, homo sapiens
tcttccaggttttcattgaatggtggtgccaacattgaagccatcattgcctctgaaaaagaagtatggacagagaaaaattgactctccagaaatctttgaaaagggcagaggctgaa

SEQ ID NO: 12072 - DNA, 119 bp, homo sapiens
ccatcattgcctctgaaaaagaagtatggaacagagaaaaattgactctccagaaatctttgaaaagggagaggctgaagtatacaaactgaaagctgaactaagaaatgactctttac

SEQ ID NO: 12073 - DNA, 119 bp, homo sapiens
attgactctccagaaatctttgaaaagggcagaggctgaagtatacaaactgaaagctgaactaagaaagactctttacttcaaactctgagccctgattctgaacatgtcactttaaa

SEQ ID NO: 12074 - DNA, 119 bp, homo sapiens
agaatttatggtaaatacttgagggcagaaagttttcgaaaggctctcatttaccagaagaaatacctgtgctgttactgggtgggttccaggaatgtgaagatgccaccttggccctg

SEQ ID NO: 12075 - DNA, 119 bp, homo sapiens
gaagaaatacctgctgctgttactgggtgggttccaggaatgtgaagatgccaccttggccctgcttgccggatgggggggcagccagctttcacggatctagaggtgatcaccaatcg

SEQ ID NO: 12076 - DNA, 119 bp, homo sapiens
tggccctgcttgcccggatgggggggcagccagctttcacggatctagaggtgatcaccaatcgcccaagggcttcaccaggtttcggtcggccgtcagagtatccattgcaatttcca

SEQ ID NO: 12077 - DNA, 119 bp, homo sapiens
gtgcagaaaagactgactcattttatcattcttctggtgggctggagttatatggagaaccaagacatatacgtatcgctcaagatcagatctggactatattaggtcccctttaccat

SEQ ID NO: 12078 - DNA, 119 bp, homo sapiens
gactgactcattttatcattcttctggtgggctggagttatatggagaaccaagacatactacgtatcgtcaagatcagatctggactatattaggtcccctttaccatttcagaatag

SEQ ID NO: 12079 - DNA, 119 bp, homo sapiens
gtacccaggcactccagctgatttcaatcctggttctttagcatgttctcagcttcagaattacgatccgacagagccctaacagattatatcactcggctagaggcactgcaaagacg

SEQ ID NO: 12080 - DNA, 119 bp, homo sapiens
atttcaatcctggttctttagcatgttctcagcttcagaattacgatcctgacagagccctaacagatttatcactcggctagaggcactgcaaagacgacttggaactatacagtcag

SEQ ID NO: 12081 - DNA, 119 bp, homo sapiens
gttcaactactcaatttcatgctggcatgagaagataatcctttgaaacatcattaattgaagtgatttaaatagatttccttttgtaaatcaatggttcttttgtgcttttgtattgt

SEQ ID NO: 12082 - DNA, 119 bp, homo sapiens
taattgaagtgattttaaatagatttccttttgtaaatcaatggttcttttgtgcttttgtattgtgaaattcaatgggaccaatatgaacacagcttatgattgtatacaaatccctt

SEQ ID NO: 12083 - DNA, 119 bp, homo sapiens
cttttgtattgtgaatattcaatgggaccaatatgaacacagcttatgattgtatacaaatcccttgccgcacatgaaaacaaactggaatttgtatatataagcattgtgtatgtatt

SEQ ID NO: 12084 - DNA, 119 bp, homo sapiens
tacaaatcccttgccagcacatgaaaacaaactggaatttgtatatataagcattgtgtatgtattcatcacaataattattgaattacctgtatatttgtggaatgctaatttaaaac

SEQ ID NO: 12085 - DNA, 119 bp, homo sapiens
tgtgtatgtattcatgcacaataattattgaattacctgtatatttgtggaatgctaatttaaaacattaattataaaccttgtgtatttatcaaatgggtgaaaagattaaactttta

SEQ ID NO: 12086 - DNA, 119 bp, homo sapiens
ctaatttaaaacattaaattataaaccttgtgtatttatcaaatgggtgaaaagattaaacttttacgcttacaatactgctgaatgtgtagctcgaggtgtcctgcacttttcttata

SEQ ID NO: 12087 - DNA, 119 bp, homo sapiens
attaaacttttacgcattacaatactgctgaatgtgtagctcgaggtgtcctgcacttttcttataaggtactgaagttacatgttttgcctaatatattctactggtgatgaagacag

SEQ ID NO: 12088 - DNA, 119 bp, homo sapiens
acttttcttataaggctactgaagttacatgttttgcctaatatattctactggtgatgaagacagatatatcacttgtagagacctatttttgtataatggtagaagttttgaatttt

SEQ ID NO: 12089 - DNA, 119 bp, homo sapiens
tgatgaagacagataatatcacttgtagagacctatttttgtataatggtagaagttttgaattttatgggtattttgtcaagtactgaaataaaaatgacttcaccattttcaccaca

SEQ ID NO: 12090 - DNA, 119 bp, homo sapiens
aagtttggtagagtgtgttgtggggacagcagtatggtgtgagggaaggagagagttcagtctattatatcattagtctattgacttgtggtaattgagctataggagataaattccta

SEQ ID NO: 12091 - DNA, 119 bp, homo sapiens
gagagagttcagtctattataatcattagtctattgacttgtggtaattgagctataggagataaattctacttactctacacatttaatggactcttcctcccaccccatcttccctg

SEQ ID NO: 12092 - DNA, 119 bp, homo sapiens
tgagctataggagataaattcctacttactctacacatttaatggactcttcctcccaccccatcttcctgtccctttctttttccacagcagctctgcaacgggccaatagcttccag

SEQ ID NO: 12093 - DNA, 119 bp, homo sapiens
cttcctcccaccccatcttccctgtccctttctttttccacagcagctctgcaacgggccaatagcttcagtctccaaccccaagcaaataccagaactggaggagagaattctggtgg

SEQ ID NO: 12094 - DNA, 119 bp, homo sapiens
atgacagcttctgagcccctctcgcaagtctcgagaggtcatccaagtcctcccaccccaaactttcggggcgagccgtagcccaaggagcacccagggaaattcccctgtatctgcct

SEQ ID NO: 12095 - DNA, 119 bp, homo sapiens
caaactttcggaggcgagccgtagcccaaggagcacccagggaaattcccctgtatctgcctcatcaccaaagccagagtgggcagagtactgcctggtgagccctggtgaagatggcc

SEQ ID NO: 12096 - DNA, 119 bp, homo sapiens
gcctcatcacccaaagccagagtgggcagagtactgcctggtgagccctggtgaagatggcctctcagacctgcagagatgacttctgatgagtgccagccagcagaggcccctcttgg

SEQ ID NO: 12097 - DNA, 119 bp, homo sapiens
ggcctctcagaccctgcagagatgacttctgatgagtgccagccagcagaggcccctcttggggacatcgaagcaaccacagagacccacaccccatctgggggaaggacaggagctgg

SEQ ID NO: 12098 - DNA, 119 bp, homo sapiens
ttggggacatcggaagcaaccacagagacccacaccccatctgggggaaggacaggagctggacagggcagagctatctcccttggctggagaagaccgggaaaaagggagtactggag

SEQ ID NO: 12099 - DNA, 119 bp, homo sapiens
ctggacagggcaagagctatctcccttggctggagaagaccgggaaaaagggagtactggagccaggaagaagaagagggagggccagtgctggtaaaggagaagttgggcctgaagaa

SEQ ID NO: 12100 - DNA, 119 bp, homo sapiens
ggagccaggaaggaagaagagggagggccagtgctggtaaaggagaagttgggcctgaagaagttagtctcactcaggagcagaagaccatgttgttggattggaatgactccatccct

SEQ ID NO: 12101 - DNA, 119 bp, homo sapiens
agaagttagtcctcactcaggagcagaagaccatgttgttggattggaatgactccatccctgagagtggcacctcaaagctggggagcgaatttcccagaaaagtgctgagaatggta

SEQ ID NO: 12102 - DNA, 119 bp, homo sapiens
ccctgagagtgtgcacctcaaagctggggagcgaatttcccagaaaagtgctgagaatggtagaggaggcgtgtgctaaaaccagtccgccccctgctgctccctagggcagcaggaga

SEQ ID NO: 12103 - DNA, 119 bp, homo sapiens
ggtagaggaggccgtgtgctaaaaccagtccgccccctgctgctccctagggcagcaggagagcccctgcaacccagagaggggcccaggagaagatggggacccctgcggaacaagct

SEQ ID NO: 12104 - DNA, 119 bp, homo sapiens
gagagcccctgccaacccagagaggggcccaggagaagatggggacccctgcggaacaagctcaagggggcgaaacgtgcctccacccaagtccccactgcggctcatagccaatgcca

SEQ ID NO: 12105 - DNA, 119 bp, homo sapiens
agctcaaggggagcgaaacgtgcctccacccaagtccccactgcggctcatagccaatgccatccgaagtctctagagcccctcctttccaactctgaaggcgggaagaaggcctgggc

SEQ ID NO: 12106 - DNA, 119 bp, homo sapiens
gccatccgaaggtctctagagcccctcctttccaactctgaaggcgggaagaaggcctgggccaagcaaaatccaaaactttgcccgcacaggcctgcactcgctcattcagccttcgg

SEQ ID NO: 12107 - DNA, 119 bp, homo sapiens
gggccaagcaagaatccaaaactttgcccgcacaggcctgcactcgctcattcagccttcggaaaaccattccaataaagacggggaccagcattcccctgggagaaaccagtcctcag

SEQ ID NO: 12108 - DNA, 119 bp, homo sapiens
tcggaaaaccaattccaataaagacggggaccagcattcccctgggagaaaccagtcctcagcctttagcctcctgaccctgccctccgcacccacagtttgcccaatcggccatccaa

SEQ ID NO: 12109 - DNA, 119 bp, homo sapiens
tcagcctttagccctcctgaccctgccctccgcacccacagtttgcccaatcggccatccaaggtctttctgcacttaggtccccaccctgcagcaagattgaagatgtccccacactc

SEQ ID NO: 12110 - DNA, 119 bp, homo sapiens
ccaaggtctttcctgcacttaggtccccaccctgcagcaagattgaagatgtccccacactcctcgagaagtgagtttgcaagagaacttcccagatgcttctaagcctccaaagaaaa

SEQ ID NO: 12111 - DNA, 119 bp, homo sapiens
actcctcgagaaagtgagtttgcaagagaacttcccagatgcttctaagcctccaaagaaaagaatctccttttttcctccctcagactcaaagacaaatcttttgagagtttcctcca

SEQ ID NO: 12112 - DNA, 119 bp, homo sapiens
aaaagaatctcacttttttcctccctcagactcaaagacaaatcttttgagagtttcctccaagaatccgacaaagaaaggacatcagggacctctttggcagccccaagaggaaggtg

SEQ ID NO: 12113 - DNA, 119 bp, homo sapiens
tccaagaatccagacaaagaaaggacatcagggacctctttggcagccccaagaggaaggtgctgcctgagatagtgcgcaggccctggagaagctgctgcagcctttcaaaagcacct

SEQ ID NO: 12114 - DNA, 119 bp, homo sapiens
agagccagaaagatgagaaggatctaaacgaagagcaagaagtattcaccgagctgatgcaagtgattggcaaagggacaaactcgtcgattccttagaggaacaacgcatcagagaaa

SEQ ID NO: 12115 - DNA, 119 bp, homo sapiens
atgcaagtgattgagcaaagggacaaactcgtcgattccttagaggaacaacgcatcagagaaaaagccaggaccagcactttgaaagcttcgtattctccagaggctgtcagctgagc

SEQ ID NO: 12116 - DNA, 119 bp, homo sapiens
cagagaaaaagccgaggaccagcactttgaaagcttcgtattctccagaggctgtcagctgagcaggactgaggaggcccgtagtccctctccctggctgcacgttgggaccggatcag

SEQ ID NO: 12117 - DNA, 119 bp, homo sapiens
agctgagcaggacttgaggaggcccgtagtccctctccctggctgcacgttgggaccggatcaggccaatgcaccacacaccctcatgggtctttctgcaggatttatcatccctggaa

SEQ ID NO: 12118 - DNA, 119 bp, homo sapiens
cggatcaggccaagtgcaccacacaccctcatgggtctttctgcaggatttatcatccctggaacttgtataccttactgcattttttaaaattaaaattctcttgcacgcatggcagc

SEQ ID NO: 12119 - DNA, 119 bp, homo sapiens
ccctggaacttgttataccttactgcattttttaaaattaaaattctcttgcacgcatggcagcttcccaggttcttccagagattcaaatgaagaaaacccaaagactctttggcaat

SEQ ID NO: 12120 - DNA, 119 bp, homo sapiens
atggcagcttcccaaggttcttccagagattcaaatgaagaaaacccaaagactctttggcaattggcatcaacttcagccaggctctcagactggaggtgttgttggcagatgaccag

SEQ ID NO: 12121 - DNA, 119 bp, homo sapiens
ttggcaattggcagtcaacttcagccaggctctcagactggaggtgttgttggcagatgaccagcattgtttccctagaaagtgacacaaagacttgactttcctgctacttttatcat

SEQ ID NO: 12122 - DNA, 119 bp, homo sapiens
atgaccagcattgttttccctagaaagtgacacaaagacttgactttcctgctacttttatcattttcctcccaattcattgagttacatactttaagatttttgagaagctgcctttt

SEQ ID NO: 12123 - DNA, 119 bp, homo sapiens
tttatcattttccttcccaattcattgagttacatactttaagatttttgagaagctgccttttcattatatatccatatttgccttttttgtatggatgaccagtttccaaatgtcag

SEQ ID NO: 12124 - DNA, 119 bp, homo sapiens
tgccttttcattaatatatccatatttgccttttttgtatggatgaccagtttccaaatgtcagaaagagcagccgcagtttaaagattaggttaatatttaaattgtgtttccagaga

SEQ ID NO: 12125 - DNA, 119 bp, homo sapiens
aatgtcagaaagaagcagccgcagtttaaagattaggttaatatttaaattgtgtttccagagaaagagagaaaccttgagattactgattacataaagcaaataactcatatagcagg

SEQ ID NO: 12126 - DNA, 119 bp, homo sapiens
tccagagaaagaggagaaaccttgagattactgattacataaagcaaataactcatatagcaggtgttattcaatccagggtgaatttaatttaccaggtgcatttataagccttaata

SEQ ID NO: 12127 - DNA, 119 bp, homo sapiens
atagcaggtgttaattcaatccagggtgaatttaatttaccaggtgcatttataagccttaatataataacataagcaatgagagcttaatagaacatttgagccttaattttatttta

SEQ ID NO: 12128 - DNA, 119 bp, homo sapiens
agagttcctattgggttaacactggaggctctaagatggcggcagtggcaacctgcggtagtgttgccggagtactgggtctgcagtggcgacagccagcaagagcaacgtcaccagtt

SEQ ID NO: 12129 - DNA, 119 bp, homo sapiens
ggcaacctgcggtagtgttgccgcgagtactgggtctgcagtggcgacagccagcaagagcaacgtcacagtttccagaggaggggtcctagagccagcgtgaccaacgacagcggccc

SEQ ID NO: 12130 - DNA, 119 bp, homo sapiens
acagccagcaagagcaacgtcaccagtttccagaggaggggtcctagagccagcgtgaccaacgacagcgccctcgactggtgtccattgcgggcacgcgaccgtcggtgcggaatgga

SEQ ID NO: 12131 - DNA, 119 bp, homo sapiens
gagccagcgtgaccaacgacagcggccctcgactggtgtccattgcgggcacgcgaccgtcggtgcggatggacagctgctggtatcaaccgggctcccagccctagaccagctcttag

SEQ ID NO: 12132 - DNA, 119 bp, homo sapiens
aggaggataaatataatatttactcacctttgctcttcaagtatttcctggcagaaggaattgtcaatggcatactttgttggttgcatctgctaaagaggatcctgccaacattttac

SEQ ID NO: 12133 - DNA, 119 bp, homo sapiens
gaggataaatataatatttactcacctttgctcttcaagtatttcctggcagaaggaattgtcaatgggatactttgttggttgcatctgctaaagaggatcctgccaacattttacag

SEQ ID NO: 12134 - DNA, 119 bp, homo sapiens
gaacttccagcaccattacttgatgataaatgtaaaaaggaatttgatgaagatgtatacaatcataaacaccagaatctaatattaagatgaaaatagcttggcgttaccagttatta

SEQ ID NO: 12135 - DNA, 119 bp, homo sapiens
ccattacttgatgataaatgtaaaaaggaatttgatgaagatgtatacaatcataaaacaccagaatctatattaagatgaaaatagcttggcgttaccagttattacccaagatggag

SEQ ID NO: 12136 - DNA, 119 bp, homo sapiens
attggaccagtatcatcttcaagatttggtcactattatgatgcatcaaaaagaatgccacaagaactattgaggcttcaaattggcatggattttttcttccagagaaaatatcttca

SEQ ID NO: 12137 - DNA, 119 bp, homo sapiens
aagatttggtcactattatgatgcatcaaaaagaatgccacaagaactaattgaggcttcaaattggcaggattttttcttccagagaaaatatcttcaactctcaaagtagaaccctg

SEQ ID NO: 12138 - DNA, 119 bp, homo sapiens
aaaaaacagagaaacattttaagaataggaattcagaatcttggctcacctttatggggagacgatattgctgtgcagaaaatggtggcaacagtcacagccttaccaagttcctctat

SEQ ID NO: 12139 - DNA, 119 bp, homo sapiens
agaatcttggctcacctttatggggagacgatatttgctgtgcagaaaatggtggcaacagtcacagcctaccaagttcctctatgttctccgtggtcttctgagaacctctctttcag

SEQ ID NO: 12140 - DNA, 119 bp, homo sapiens
ttgctgtgcagaaaatggtggcaacagtcacagccttaccaagttcctctatgttctccgtggtcttctagaacctctctttcagcctgcatcatcacaatgccaacacatctgatcca

SEQ ID NO: 12141 - DNA, 119 bp, homo sapiens
cgactgcatttgcctccagacttgtcagacacagtgagccgctcaagcaaaatggatctggcagaatccccaagcggctgggcccaggctgtggcatgatggccggaggcaagaagcac

SEQ ID NO: 12142 - DNA, 119 bp, homo sapiens
atctggcagaatccgccaagcggctgggcccaggctgtggcatgatggccggaggcaagaagcacctggcttctagggattcctccttagtcgctgcatgcagaattctatgacactct

SEQ ID NO: 12143 - DNA, 119 bp, homo sapiens
caagaagcacctggacttctagggattcctccttagtcgctgcatgcagaattctatgacactctaatttgattgctaatagcttatgtaaatatttttcttaacaatttgaccctcca

SEQ ID NO: 12144 - DNA, 119 bp, homo sapiens
atgacactctaattatgattgctaatagcttatgtaaatatttttcttaacaatttgaccctccactcctgaaaaacacaggattataaaatggtgccgccatttctcattttttaact

SEQ ID NO: 12145 - DNA, 119 bp, homo sapiens
tgaccctccactccttgaaaaacacaggattataaaatggtgccgccatttctcattttttaactttttcagaactagcacagcagaaatacttttaaatttttccttcatgctctaga

SEQ ID NO: 12146 - DNA, 119 bp, homo sapiens
gtttttttgccagcattgtccttcaatcagcacaggacgagtacaaccgtgggagtcacatctggagaatctctaattcctctgagcatgaatcagacctgccgcccatgcctggggag

SEQ ID NO: 12147 - DNA, 119 bp, homo sapiens
gggagtcacatctggagaagtctctaattcctctgagcatgaatcagacctgccgcccatgcctggggagcagtagaatatcacagtattcaattaatacgggatgaatttttaatgaa

SEQ ID NO: 12148 - DNA, 119 bp, homo sapiens
tgccgcccatgcctggggaggcagtagaatatcacagtattcaattaatacgggatgaatttttaatgacgtgcagaaatttgcaagtaatattcaaagaaccatgcagcaacttgaag

SEQ ID NO: 12149 - DNA, 119 bp, homo sapiens
gtgagatcaagttagaaatgccaatcatcagtgtggagggagaggtgtctgacctggcagctgacccggaaccgttgacatcttggagcagtgtgtgataaactggctgaatcagatat

SEQ ID NO: 12150 - DNA, 119 bp, homo sapiens
ggagaggtgtctgacctggcagctgacccggaaaccgttgacatcttggagcagtgtgtgataaactggtgaatcagatatccacagcggttgaggcccaactgaagaagacacctcag

SEQ ID NO: 12151 - DNA, 119 bp, homo sapiens
ggtaaaggccctctggctgaaattgaattctggagggaaagaaatgcaaccttaagtgcgctgcatgaaaaacaaagcttccaatagtcagaaaagtcttggatgtgatcaaggaatcc

SEQ ID NO: 12152 - DNA, 119 bp, homo sapiens
gtgcgctgcatgaacaaacaaagcttccaatagtcagaaaagtcttggatgtgatcaaggaatccgactcatgcttgtggctaatctgcagccagtgttcaccgagttattcaagttcc

SEQ ID NO: 12153 - DNA, 119 bp, homo sapiens
caaggaatccgactccatgcttgtggctaatctgcagccagtgttcaccgagttattcaagttccacacgaggcctcagacaatgtgcgctttctctccaccgtggagcgttatttcaa

SEQ ID NO: 12154 - DNA, 119 bp, homo sapiens
aacataacgcacgggtctggcttccacgtggtcctggacaccatccccgccatgatgagtgccctgcggtggtgtggatcatctcccgacactacaacaaagacgagaggatgattccg

SEQ ID NO: 12155 - DNA, 119 bp, homo sapiens
ggacaccatccccgccatgatgagtgccctgcggatggtgtggatcatctcccgacactacaacaaagagagaggatgattccgctcatggagcgcatcgcctgggaaatcgctgagag

SEQ ID NO: 12156 - DNA, 119 bp, homo sapiens
tggtgtggatcatctcccgacactacaacaaagacgagaggatgattccgctcatggagcgcatcgcctggaaatcgctgagagagtctgccgagtggtcaacctgcggactttgttca

SEQ ID NO: 12157 - DNA, 119 bp, homo sapiens
agaaaatcgagcgagtgcccaaagcaaaaccttggaagccaggaacaccctcaggctgtggaaaaaggctattttgacacccgggccaagatagaggcttcggggagggaagatcggtg

SEQ ID NO: 12158 - DNA, 119 bp, homo sapiens
caggaacaccctcaggctgtggaaaaaggcctattttgacacccgggccaagatagaggcttcggggaggaagatcggtgggagtttgaccggaagcggctgttcgagaggacggatta

SEQ ID NO: 12159 - DNA, 119 bp, homo sapiens
cacccgggccaagatagaggcttcggggagggaagatcggtgggagtttgaccggaagcggctgttcgaaggacggattatatggccaccatctgccaggacctctccgacgttctgca

SEQ ID NO: 12160 - DNA, 119 bp, homo sapiens
attttggaggaattttataacatatttggtccagaactaaaggcagtgacgggggaccccaagcgcattatgatgtcctatgcagagtggacggcctagtcacccccatggaaaacctg

SEQ ID NO: 12161 - DNA, 119 bp, homo sapiens
taaaggcagtgacgggggaccccaagcgcattgatgatgtcctatgcagagtggacggcctagtcaccccatggaaaacctgacctttgaccccttcagcatcaagtcctcccagttct

SEQ ID NO: 12162 - DNA, 119 bp, homo sapiens
tgtcctatgcagagtggacggcctagtcacccccatggaaaacctgacctttgaccccttcagcatcaatcctcccagttctggaaatatgtgatggatgaattcaagattgaagttct

SEQ ID NO: 12163 - DNA, 119 bp, homo sapiens
attgacatcattaataaaatctttgtccagaaccttgaaaatccaccactgtataagaatcaccctccatagcaggtgcaatatactgggaacgatctctgttctttcggattaagcat

SEQ ID NO: 12164 - DNA, 119 bp, homo sapiens
aatcaccctccagtagcaggtgcaatatactgggaacgatctctgttctttcggattaagcataccatctccgatttcaagaggtacaagagatactggacagtgatcgaggacaggag

SEQ ID NO: 12165 - DNA, 119 bp, homo sapiens
gtcaaacaaaaatatttggaagtaggtaggacaatgaaggagtatgaagacagaaagtatgagcagtggtggaggtgacggagcaggtgctgccagctctcatgaagaagagccttttg

SEQ ID NO: 12166 - DNA, 119 bp, homo sapiens
caaaaatatttggaagtaggtaggacaatgaaggagtatgaagacagaaagtatgagcagtggatggagtgacggagcaggtgctgccagctctcatgaagaagagccttttgaccaag

SEQ ID NO: 12167 - DNA, 119 bp, homo sapiens
tcttccatcgccacagaggagccttcgactttagaaaggggagctgtttttgcaatcaacttttcaccgctctcagagagattattaatgaaacaaagtacttagagcagctggggttc

SEQ ID NO: 12168 - DNA, 119 bp, homo sapiens
aatcaacttttcaccggctctcagagagattattaatgaaacaaagtacttagagcagctggggttcacgtccctgaattagcaagaaatgttgctctccaggaagacaaattccttag

SEQ ID NO: 12169 - DNA, 119 bp, homo sapiens
gtacacagctgggatacagcgcatgttggatcattatcacatgctcataggaacgttaaacgatgcggatctgtgcttctcaaagatcattcccaggaactgctccgagtgtttaggtc

SEQ ID NO: 12170 - DNA, 119 bp, homo sapiens
attatcacatgctcataggaacgttaaacgatgcggagtctgtgcttctcaaagatcattcccaggaacgctccgagtgtttaggtcgggatataagaggttgaactggaactcactag

SEQ ID NO: 12171 - DNA, 119 bp, homo sapiens
gtatcggtgactatataactggttgcaaacaggccattgggaaatttgagtctctcgtccaccagattctaagaatgcagatgacatttcttccaggctgacattaatagaggccataa

SEQ ID NO: 12172 - DNA, 119 bp, homo sapiens
ttgagtctctcgtccaccagattcataagaatgcagatgacatttcttccaggctgacattaatagaggcataaatctctttaaatatccagccgctaaaagtgaggaagaactcccag

SEQ ID NO: 12173 - DNA, 119 bp, homo sapiens
gcgtgaaggaattttttgaacacattgagcgagaaagggccagcgacgtggaccacatggtccggtggttcttgccattggaccactgctgaccaaagttgagggcctggtcgtccaca

SEQ ID NO: 12174 - DNA, 119 bp, homo sapiens
gacgtggaccacatggtccggtggtatcttgccattggaccactgctgaccaaagttgagggcctggtctccacaccaacacaggcaaggcccccaagctggcctcctactacaaatac

SEQ ID NO: 12175 - DNA, 119 bp, homo sapiens
gctgaccaaagttgagggcctggtcgtccacaccaacacaggcaaggcccccaagctggcctcctactaaaatactgggaaaagaaaatttatgaggtcctgacaaagctcatcctgaa

SEQ ID NO: 12176 - DNA, 119 bp, homo sapiens
gaacttgcagtcttttaattctttgatccttggaaatgtccctctgttccacactgaaaccattctgacgcacctgagatcatccttcatcccaacacaaatgagatcgacaagatgtg

SEQ ID NO: 12177 - DNA, 119 bp, homo sapiens
gtccctctgttccacactgaaaccattctgacggcacctgagatcatccttcatcccaacacaaatgagtcgacaagatgtgcttccattgtgtccggaattgcgtggagatcaccaag

SEQ ID NO: 12178 - DNA, 119 bp, homo sapiens
cattttgttcgttggatgaatggcagctgcatagaatgcccacctcagaagggggaggaagaggaagttttataataaacttttacaatgatatctctctgaaccctcagataattgaa

SEQ ID NO: 12179 - DNA, 119 bp, homo sapiens
agaggaagttgttataataaacttttacaatgatatctctctgaaccctcagataattgaacaagctgtatgatcccccaaaatgtccacaggattctgatcaatcttatgaagtatct

SEQ ID NO: 12180 - DNA, 119 bp, homo sapiens
aacaagctgttatgatcccccaaaatgtccacaggattctgatcaatcttatgaagtatctacaaaaatgaagcggtatcgacctctctggaaattggacaaagctattgtgatggaga

SEQ ID NO: 12181 - DNA, 119 bp, homo sapiens
ctacaaaaatggaagcggtatcgacctctctggaaattggacaaagctattgtgatggagaaatttgctccaagaaacctccttgtgtagcatatgatgaaaagttgcagttctattcc

SEQ ID NO: 12182 - DNA, 119 bp, homo sapiens
gaaatttgctgccaagaaacctccttgtgtagcatatgatgaaaagttgcagttctattccaagatagctatgaggttatgcgccaccctctaattaaggatgagcattgcatcagact

SEQ ID NO: 12183 - DNA, 119 bp, homo sapiens
ccaagatagcttatgaggttatgcgccaccctctaattaaggatgagcattgcatcagacttcagctcagcatctggcaaacacagtgcaggaaaatgccaagtcctgggtgatttcgc

SEQ ID NO: 12184 - DNA, 119 bp, homo sapiens
cttcagctcaggcatctggcaaacacagtgcaggaaaatgccaagtcctgggtgatttcgcttggaaaattctcaatgagtcagcaaaagaggagctctataatctccatgaagagatg

SEQ ID NO: 12185 - DNA, 119 bp, homo sapiens
cacctggccaaaaaccttaggaagatccccaatacccttgaagatctcaagtttgtccttgcaacaattcagaaattagaagtaaatctctagtcatggaactcagatatagggacgtc

SEQ ID NO: 12186 - DNA, 119 bp, homo sapiens
gaagatctcaagtttgtccttgcaacaattgcagaaattagaagtaaatctctagtcatggaactcagaatagggacgtccaggagcgataccgtaccatggcaatgtataacctcttt

SEQ ID NO: 12187 - DNA, 119 bp, homo sapiens
gagtagagcttttaggtgtttatgaaagagagctggcaagacatgaaaagagccgtcaggaactggctacgctgagaaacttttcgatcttcctattacaatgtacccagagctgctga

SEQ ID NO: 12188 - DNA, 119 bp, homo sapiens
gaactggctaacgctgagaaacttttcgatcttcctattacaatgtacccagagctgctgaaagtgcagaggaaatgagtgggctgaggatgatttacgagctctatgaaggactaaag

SEQ ID NO: 12189 - DNA, 119 bp, homo sapiens
gttgcaaaagaagaatggtctcagaccctttggatcaacctgaatgtgcagattctccaggaaggaattaaggttttctcagggctctcagaaagctacctcggccagtccgtggctta

SEQ ID NO: 12190 - DNA, 119 bp, homo sapiens
tgcagattctccaggaaggaattgaaggttttctcagggctctcagaaagctacctcggccagtccgtgcttatcagtgacctactacttggaagcaaaaatgaaggcattcaaagact

SEQ ID NO: 12191 - DNA, 119 bp, homo sapiens
aaagctacctcggccagtccgtggcttatcagtgacctactacttggaagcaaaaatgaaggcattcaagactcgattcctttacttcttgacttgaaaaacgaggcactaagagacag

SEQ ID NO: 12192 - DNA, 119 bp, homo sapiens
gcattggaaagaacttatggaaaaaacgtctgtcttttttgaaatgaccgaaacgttcaccttggaaaaatgtttgctatggaactgcacaaacacacagatgttctcaatgagattgt

SEQ ID NO: 12193 - DNA, 119 bp, homo sapiens
ttttttgaaatgaccgaaacgttcaccttggaaaatatgtttgctatggaactgcacaaacacacagatttctcaatgagattgtcacagcagcaatcaaggaggttgccattgagaag

SEQ ID NO: 12194 - DNA, 119 bp, homo sapiens
gctgtgaaggaaatcctagacacgtgggaaaatatgaaattcactgtagtcaagtattgcaaaggcacaaggagcgaggctacatcctgggttctgttgacgaaattattcagtctctt

SEQ ID NO: 12195 - DNA, 119 bp, homo sapiens
tgcaaaggcacacaggagcgaggctacatcctgggttctgttgacgaaattattcagtctcttgatgacacactttcaacctgcagagcatctcaggaagcagatttgtggggcctttt

SEQ ID NO: 12196 - DNA, 119 bp, homo sapiens
tctcttgatgacaacactttcaacctgcagagcatctcaggaagcagatttgtggggccttttctgcaactgttcacaaatgggaaaaaacgctttctctaataggggaagtcattgag

SEQ ID NO: 12197 - DNA, 119 bp, homo sapiens
atttggatgttggttcagagaaaatggatgtatcttgaaagtatttttattggtggagatataagatcaaacttccggaagaggcaaaaaagtttgacaacatcgataaagtatttaaa

SEQ ID NO: 12198 - DNA, 119 bp, homo sapiens
tggatgttggttcagagaaaatggatgtatcttgaaagtatttttattggtggagatataagatcacaattccggaagaggcaaaaaagtttgacaacatcgataaagtatttaaaagg

SEQ ID NO: 12199 - DNA, 119 bp, homo sapiens
atcatgggtgagaccttaaaagaccccgtgatcaagaggtgctgtgaagccccaaaccgcctcagtgactacagaacgtcagcgagggcctggagaaatgccagaaaagcctcaacgac

SEQ ID NO: 12200 - DNA, 119 bp, homo sapiens
cgcctcagtgacctacagaacgtcagcgagggcctggagaaatgccagaaaagcctcaacgactacttaattcgaagagaaatgctttcccaaggttcttcttcatttctgacgatgag

SEQ ID NO: 12201 - DNA, 119 bp, homo sapiens
aacgactacttagattcgaagagaaatgctttcccaaggttcttcttcatttctgacgatgagttgcttgcattctggggagcagcgacccactctgcgtccaggagcacatgatcaag

SEQ ID NO: 12202 - DNA, 119 bp, homo sapiens
atgtacgacaacatagcatcactgaggtttaatgacggcgatagtggagaaaaactggtgtccgcgatgtttcagcagaaggagaagtcatggagtttcggaagatcttgcgggctgaa

SEQ ID NO: 12203 - DNA, 119 bp, homo sapiens
aactggtgtccgcgatgatttcagcagaaggagaagtcatggagtttcggaagatcttgcgggctgaaggcgcgtggaggactggatgacggcagttttgaatgagatgagaagaacta

SEQ ID NO: 12204 - DNA, 119 bp, homo sapiens
gatcttgcgggctgaagggcgcgtggaggactggatgacggcagttttgaatgagatgagaagaactaaagactaattaccaaagaggctatttttagatactgtgaagacagaagcag

SEQ ID NO: 12205 - DNA, 119 bp, homo sapiens
agtcgactggatgctcctgtaccagggcatggtggtgctggccgctagccaggtgtggtggacctgggagtggaagacgtcttccacaaagcgcaaaaaggggagaagcaggccatgaa

SEQ ID NO: 12206 - DNA, 119 bp, homo sapiens
aggtgtggtggacctgggaggtggaagacgtcttccacaaagcgcaaaaaggggagaagcaggccatgagaactatggcaggaaaatgcaccggcagatcgatgagttggtaacgcgca

SEQ ID NO: 12207 - DNA, 119 bp, homo sapiens
ggggagaagcaggccatgaagaactatggcaggaaaatgcaccggcagatcgatgagttggtaacgcgctcaccatgccgctaagcaaaaacgacaggaaaaaatacaacactgttctc

SEQ ID NO: 12208 - DNA, 119 bp, homo sapiens
cgatgagttggtaacgcgcatcaccatgccgctaagcaaaaacgacaggaaaaaatacaacactgttctatcattgatgtgcatgccagagacatagttgattctttcataagaggcag

SEQ ID NO: 12209 - DNA, 119 bp, homo sapiens
tatcctggaggcccgagagtttgactgggaaagtcagttgcggttttattgggaccgggagccggatgactgaacatccgccagtgcacgggaacctttggctacggctacgagtacat

SEQ ID NO: 12210 - DNA, 119 bp, homo sapiens
gtcagttgcggttttattgggaccgggagccggatgagctgaacatccgccagtgcacgggaacctttgctacggctacgagtacatgggcctgaacggcaggctggtcatcacgcccc

SEQ ID NO: 12211 - DNA, 119 bp, homo sapiens
gatgagctgaacatccgccagtgcacgggaacctttggctacggctacgagtacatgggcctgaacggcggctggtcatcacgcccctcaccgatcggatttacctgacgctcacccag

SEQ ID NO: 12212 - DNA, 119 bp, homo sapiens
gcgctgtccatgtatctaggtggggcccccgccggcccagcaggaaccggcaaaaccgagaccaccaagacctggcgaaagccttgggcttgctctgtgttgtcaccaactgtggcgaa

SEQ ID NO: 12213 - DNA, 119 bp, homo sapiens
ctaggtggggcccccgccggcccagcaggaaccggcaaaaccgagaccaccaaggacctggcgaaagcctgggcttgctctgtgttgtcaccaactgtggcgaaggcatggattacagg

SEQ ID NO: 12214 - DNA, 119 bp, homo sapiens
gccgtggggaagattttctctggcctggcacagtgcggggcttggggctgctttgatgagtttaatcgatcgatgcttctgtgctctccgtgatctcctcccagatccagacgatccga

SEQ ID NO: 12215 - DNA, 119 bp, homo sapiens
tgcggggcttggggctgctttgatgagtttaatcgaatcgatgcttctgtgctctccgtgatctcctccagatccagacgatccgaaatgctctgatccatcagttaaccacgttccag

SEQ ID NO: 12216 - DNA, 119 bp, homo sapiens
tttgaagggcaggagatttccctggactcccgcatgggcatcttcatcaccatgaaccccggctacgcagccgcacggagctgcccgagtcggtgaaggcgctgttcaggcctgtggtc

SEQ ID NO: 12217 - DNA, 119 bp, homo sapiens
tgggcatcttcatcaccatgaaccccggctacgcaggccgcacggagctgcccgagtcggtgaaggcgcgttcaggcctgtggtcgtgatcgtgcccgacctgcagcagatctgtgaga

SEQ ID NO: 12218 - DNA, 119 bp, homo sapiens
aggccgcacggagctgcccgagtcggtgaaggcgctgttcaggcctgtggtcgtgatcgtgcccgacctcagcagatctgtgagatcatgctcttctctgagggcttcctggaggccaa

SEQ ID NO: 12219 - DNA, 119 bp, homo sapiens
actctggcgaaaaagatgacggttctgtataagctggcccgggagcagctgtccaagcagtatcactatattttggactcagagccctgaaatcggtgctggtcatggctggtgagctg

SEQ ID NO: 12220 - DNA, 119 bp, homo sapiens
tataagctggcccgggagcagctgtccaagcagtatcactatgattttggactcagagccctgaaatcgtgctggtcatggctggtgagctgaagagaggctcctctgaccttagggag

SEQ ID NO: 12221 - DNA, 119 bp, homo sapiens
gacgtggtgctgatgagggccttgcgagacatgaacttgcccaaatttgtgtttgaagatgttcctctttccttggtttgatttcggatctgtttcctgggctggactgccctcgcgtc

SEQ ID NO: 12222 - DNA, 119 bp, homo sapiens
ttgcccaaatttgtgtttgaagatgttcctcttttccttggtttgatttcggatctgtttcctgggctgactgccctcgcgtccgctaccctgacttcaacgatgcggtagagcaggtc

SEQ ID NO: 12223 - DNA, 119 bp, homo sapiens
cttggtttgatttcggatctgtttcctgggctggactgccctcgcgtccgctaccctgacttcaacgatcggtagagcaggtcctggaggagaacggctacgcggtcctacccatccag

SEQ ID NO: 12224 - DNA, 119 bp, homo sapiens
gcttgggctgacgacaaagttgtacatcctgaaccccaaagccgtgagtgtcatagaactctacggcatctggacccaaccacccgagactggacagatggggtgttgtcaaacatctt

SEQ ID NO: 12225 - DNA, 119 bp, homo sapiens
agccgtgagtgtcatagaactctacggcatcctggacccaaccacccgagactggacagatggggtgtttcaaacatcttcagggaaatcaacaagccaacagacaagaaggagcgaaa

SEQ ID NO: 12226 - DNA, 119 bp, homo sapiens
gtatattttatttgatggtgatgtggatgctctatgggtggaaaacatgaattctgtgatggatgacaaaggttgttgacattggccaacggggaacgcatccggctccaagcacactg

SEQ ID NO: 12227 - DNA, 119 bp, homo sapiens
ggtgatgtggatgctctatgggtggaaaacatgaattctgtgatggatgacaacaggttgttgacattgccaacggggaacgcatccggctccaagcacactgtgccctgctctttgag

SEQ ID NO: 12228 - DNA, 119 bp, homo sapiens
gttggagatttacagtatgcctcccctgcaactgtctctcgatgtggaatggtttatgtggatcctaaaacttgaaatatcgaccatactggaaaaaatgggttaatcaaataccaaac

SEQ ID NO: 12229 - DNA, 119 bp, homo sapiens
ggagatttacagtatgcctcccctgcaactgtctctcgatgtggaatggtttatgtggatcctaaaaactgaaatatcgaccatactggaaaaaatgggttaatcaaataccaaacaag

SEQ ID NO: 12230 - DNA, 119 bp, homo sapiens
gtggagcaatacaatttgaatagtctctttgagaagtatgtgccctatctcatggatgtgatagtggaagaattgtggatggaagacaagcagaaaagctgaagacaatagttcctcag

SEQ ID NO: 12231 - DNA, 119 bp, homo sapiens
ttgaatagtctctttgagaagtatgtgccctatctcatggatgtgatagtggaaggaattgtggatggagacaagcagaaaagctgaagacaatagttcctcagacagacctcaatatg

SEQ ID NO: 12232 - DNA, 119 bp, homo sapiens
gtaacccagttagccaagatgttggatgcgttgctagaaggagaaatagaagaccttgacctgctggaggctacttcctggaggctttgtactgctctctgggagcctccctgcttgag

SEQ ID NO: 12233 - DNA, 119 bp, homo sapiens
gaagaccttgacctgctggagtgctacttcctggaggctttgtactgctctctgggagcctccctgcttaggatggaaggatgaaatttgacgaatatatcaaacgccttgcttctttg

SEQ ID NO: 12234 - DNA, 119 bp, homo sapiens
tctctgggagcctccctgcttgaggatggaaggatgaaatttgacgaatatatcaaacgccttgcttcttgtctactgttgacacagaaggagtttgggccaaccctggggaactgcca

SEQ ID NO: 12235 - DNA, 119 bp, homo sapiens
ttcacacagtggataccactcggactacctggatattggaacaaatggttaaaattaagcaacctgttattttgttggtgaatctggcacttctaagacagccactacccagaatttcc

SEQ ID NO: 12236 - DNA, 119 bp, homo sapiens
acctggatattggaacaaatggttaaaattaagcaacctgttatttttgttggtgaatctggcacttctagacagccactacccagaatttcctcaaaaatctgagtgaagaaactaac

SEQ ID NO: 12237 - DNA, 119 bp, homo sapiens
attgtgttaatggtcaacttctcctcccgcaccacgtccatggatatccaaagaaatttagaagcaaattggaaaagcgaaccaaagatacttacggcccacccatgggaaaacgcctg

SEQ ID NO: 12238 - DNA, 119 bp, homo sapiens
acgtccatggatatccaaagaaatttagaagcaaatgtggaaaagcgaaccaaagatacttacggcccaccatgggaaaacgcctgctggtgttcatggatgacatgaatatgccaagg

SEQ ID NO: 12239 - DNA, 119 bp, homo sapiens
gtggatgaatatggcacgcagcagcccattgccttgctgaagctgctgttggaaaaaggctacttatataccgtgggaaggagctgaactgtaaaagcattcgagaccttggctttatt

SEQ ID NO: 12240 - DNA, 119 bp, homo sapiens
gttggaaaaaggctacttatatgaccgtgggaaggagctgaactgtaaaagcattcgagaccttggcttattgctgcaatgggaaaggctggaggaggccgcaatgaagttgacccaag

SEQ ID NO: 12241 - DNA, 119 bp, homo sapiens
aaagcattcgagaccttggctttattgctgcaatgggaaaggctggaggaggccgcaatgaagttgaccaagatttatttcgctattcagtgtcttcaatgtgccatttccttcagagg

SEQ ID NO: 12242 - DNA, 119 bp, homo sapiens
ggaggccgcaatgaagttgacccaagatttatttcgctattcagtgtcttcaatgtgccatttccttcaaggagtctctgcatttaatttattcctccatcctgaaaggccacacctcg

SEQ ID NO: 12243 - DNA, 119 bp, homo sapiens
acgtttcatgagagcattgtggctgtgagtggcaagctgacattctgcacgctagcactttacaaaaatttgtgcaagacctacctcccactccgtcaaagttccattacatcttcaac

SEQ ID NO: 12244 - DNA, 119 bp, homo sapiens
agcactttacaaaaatattgtgcaagacctacctcccactccgtcaaagttccattacatcttcaacctcgagatctctcacgggtttttaatggtcttgtcctcactaacccggagcg

SEQ ID NO: 12245 - DNA, 119 bp, homo sapiens
gtacaacagcacataggcagcttggttgtggaacattttaaagatgacgtggaggtggtgatgagggatccatattgtttggagacttccagatggctctgcacgaaggagaaccacgc

SEQ ID NO: 12246 - DNA, 119 bp, homo sapiens
gtggaggtggtgatgagggatcccatattgtttggagacttccagatggctctgcacgaaggagaaccagcatttatgaagacatccaggactacgaggcggccaaggctctgttccag

SEQ ID NO: 12247 - DNA, 119 bp, homo sapiens
gaaattcttgaagagtataatgaaagcaacaccaaaatgaacttggttctcttcgacgatgctctggagatttaacccgggtgcaccgtatcatccgcatggaccgcggccacgccctg

SEQ ID NO: 12248 - DNA, 119 bp, homo sapiens
aaatgaacttggttctcttcgacgatgctctggagcatttaacccgggtgcaccgtatcatccgcatggccgcggccacgccctgctggtcggggtagggggctcagggaagcagtctc

SEQ ID NO: 12249 - DNA, 119 bp, homo sapiens
gcatttaacccgggtgcaccgtatcatccgcatggaccgcggccacgccctgctggtcggggtagggggtcagggaagcagtctctttcgaggctggctgccttcacagccagctgtga

SEQ ID NO: 12250 - DNA, 119 bp, homo sapiens
gtgtttgagatcctgctgagccgaggctactcggagaacagtttccgggaagacctgaagagcctctattgaaacttgggattgagaacaaagcgatgatctttctgttcacggatgcc

SEQ ID NO: 12251 - DNA, 119 bp, homo sapiens
acctgaagagcctctatttgaaacttgggattgagaacaaagcgatgatctttctgttcacggatgccctgtggctgaggagggcttcctggagctcatcaacaacatgctgacctcag

SEQ ID NO: 12252 - DNA, 119 bp, homo sapiens
gaattgtacctgcgcttttttctgaagaggagaaagagtctatcctgagtcagattggacaggaagctcgaagcaaggcatggggccggccaaggagtctgtgtggcagtacttcgtga

SEQ ID NO: 12253 - DNA, 119 bp, homo sapiens
tcctgagtcagattggacaggaagctctgaagcaaggcatggggccggccaaggagtctgtgtggcagtcttcgtgaacaaaagtgcaaataacctgcacattgtcctgggcatgtcgc

SEQ ID NO: 12254 - DNA, 119 bp, homo sapiens
ggccggccaaggagtctgtgtggcagtacttcgtgaacaaaagtgcaaataacctgcacattgtcctggcatgtcgccagtgggggacaccctgaggacctggtgcagaaacttcccag

SEQ ID NO: 12255 - DNA, 119 bp, homo sapiens
ggtataatccaatgatcccggcagaaaatatagaaaatgtggtgaagcatgttgtcttggttcaccaatcgtggaccactacagccaacagtttctacagaaattgaggcgcagcaact

SEQ ID NO: 12256 - DNA, 119 bp, homo sapiens
tggtgaagcatgttgtcttggttcaccaatccgtggaccactacagccaacagtttctacagaaattgagcgcagcaactatgtcactcccaagaactaccttgattttattaacacct

SEQ ID NO: 12257 - DNA, 119 bp, homo sapiens
actacagccaacagtttctacagaaattgaggcgcagcaactatgtcactcccaagaactaccttgatttattaacacctattcaaaattgctggatgagaaaactcagtgtaatatag

SEQ ID NO: 12258 - DNA, 119 bp, homo sapiens
ctcagtgcaagcgtctggatgggggactggacaagctgaaggaggccaccatccagctggacgagctgaccagaagctggccgagcagaagatcgtgctggcggagaagtccgccgcct

SEQ ID NO: 12259 - DNA, 119 bp, homo sapiens
aggccaccatccagctggacgagctgaaccagaagctggccgagcagaagatcgtgctggcggagaagtcgccgcctgcgaggccttgctggaggagatcgccgtcaacaccgctgtag

SEQ ID NO: 12260 - DNA, 119 bp, homo sapiens
ccgaggagaagaagaaactggcagaggaaaaggccatggagatagaggagcagaacaaagtcattgccaggagaaggccgaggccgagacgaccctggcagaggtcatgcccatcctgg

SEQ ID NO: 12261 - DNA, 119 bp, homo sapiens
caaagtcattgccatggagaaggccgaggccgagacgaccctggcagaggtcatgcccatcctggaggcgccaagctggaactgcagaagctggacaagtcggacgtgactgagattag

SEQ ID NO: 12262 - DNA, 119 bp, homo sapiens
gtcgtttgctaagcccccgaagcaggtgcagacggtctgcgaatgcatcctcatcatgaaagggtacaagagctgaactggaaaacagccaagggcgtgatgtccgacccgaatttcct

SEQ ID NO: 12263 - DNA, 119 bp, homo sapiens
acggtctgcgaatgcatcctcatcatgaaagggtacaaagagctgaactggaaaacagccaagggcgtgtgtccgacccgaatttcctgcggtctctgatggagattgattttgattcg

SEQ ID NO: 12264 - DNA, 119 bp, homo sapiens
ggtacaaagagctgaactggaaaacagccaagggcgtgatgtccgacccgaatttcctgcggtctctgaggagattgattttgattcgattacccagagccaagtgaaaaacatcaaag

SEQ ID NO: 12265 - DNA, 119 bp, homo sapiens
gcctcttgaagactcttaataccacaactgaagaaatggaagctgtcagcaaagccgggctggggatgcgaaatttgttgaagctgtaatgggctactgtgatgttttcagagaaatca

SEQ ID NO: 12266 - DNA, 119 bp, homo sapiens
aataccacaactgaagaaatggaagctgtcagcaaagccgggctggggatgctgaaatttgttgaagcttaatgggctactgtgatgttttcagagaaatcaagcccaaaagagagaag

SEQ ID NO: 12267 - DNA, 119 bp, homo sapiens
gtggccaggctggagcggaatttttacctcactaaacgggaactggaaaggatccagaatgagttggcacaattcagaaagagctggaaacattgggtgccaaatatgaggccgccata

SEQ ID NO: 12268 - DNA, 119 bp, homo sapiens
ggatccagaatgagttggcagcaattcagaaagagctggaaacattgggtgccaaatatgaggccgccaactggaaaagcagaagctgcaggaagaagccgagatcatggagaggcggc

SEQ ID NO: 12269 - DNA, 119 bp, homo sapiens
tgccaaatatgaggccgccatactggaaaagcagaagctgcaggaagaagccgagatcatggagaggcgctgattgccgcagacaaactcatctcgggtctggggtcagaaaacatcag

SEQ ID NO: 12270 - DNA, 119 bp, homo sapiens
gtggctgaacgacctggatgagctgatgcaccggcgcgtgaagctgctgggggactgcctgctctgcgcgctttcctcagctacgagggagccttcacctgggagttccgtgacgagat

SEQ ID NO: 12271 - DNA, 119 bp, homo sapiens
ggactgcctgctctgcgcggctttcctcagctacgagggagccttcacctgggagttccgtgacgagatgtcaatcggatttggcaaaatgacatcctggagcgggagatccccctgag

SEQ ID NO: 12272 - DNA, 119 bp, homo sapiens
ggagttccgtgacgagatggtcaatcggatttggcaaaatgacatcctggagcgggagatccccctgagcagcctttccggctggaaagcctgctcacggatgatgttgagatcagcag

SEQ ID NO: 12273 - DNA, 119 bp, homo sapiens
atggggatcccagggccttccccccgatgagctctccgttcagaatggcatcctcaccacccgggccagcgcttccctctgtgtatcgacccccagcagcaggccctcaactggatcaa

SEQ ID NO: 12274 - DNA, 119 bp, homo sapiens
gagctctccgttcagaatggcatcctcaccacccgggccagccgcttccctctgtgtatcgacccccagagcaggccctcaactggatcaagagaaaagaggagaagaacaatctgcgg

SEQ ID NO: 12275 - DNA, 119 bp, homo sapiens
gtcgcttcctttaatgaccctgacttcctcaagcagctagagatgtccataaagtacgggacccctttctgttccgcgatgttgatgaatacatcgatcctgtgattgacaacgtctta

SEQ ID NO: 12276 - DNA, 119 bp, homo sapiens
gtacgggacccctttcctgttccgcgatgttgatgaatacatcgatcctgtgattgacaacgtcttagaaaaaatataaaagtctcccaaggacggcagtttattatcctgggagacaa

SEQ ID NO: 12277 - DNA, 119 bp, homo sapiens
ttgacaacgtcttagaaaaaaatataaaagtctcccaaggacggcagtttattatcctgggagacaaggagtggactatgattcaaatttcagactgtacctgaacaccaagctggcca

SEQ ID NO: 12278 - DNA, 119 bp, homo sapiens
atcctgggagacaaggaagtggactatgattcaaatttcagactgtacctgaacaccaagctggccaatccagatattccccatccgtgtttgggaaagctatggtgatcaattacact

SEQ ID NO: 12279 - DNA, 119 bp, homo sapiens
tcacgctgaagggcctggaggaccagctgctgagcgtgctggtggcttacgagaggcgggagctggagggcagcgggagcacctcatccaggagaccagcgagaacaagaacctgctca

SEQ ID NO: 12280 - DNA, 119 bp, homo sapiens
gcgggagctggaggagcagcgggagcacctcatccaggagaccagcgagaacaagaacctgctcaaggactggaagattccctccttcgggagctggccacgtccacggggaacatgct

SEQ ID NO: 12281 - DNA, 119 bp, homo sapiens
aacctgctcaaggacctggaagattccctccttcgggagctggccacgtccacggggaacatgctggacatgtggacctggtgcacaccctggaggagaccaaatccaaggcaacagag

SEQ ID NO: 12282 - DNA, 119 bp, homo sapiens
gtctcagagaaactcaagctggcggagaagacagccttggacatcgacaggctgcgggatggctaccggcagcagccaggaggggggccatcctgttcttcgtcctgtctgagatggcc

SEQ ID NO: 12283 - DNA, 119 bp, homo sapiens
ctgcgggatggctaccggccagcagccaggaggggggccatcctgttcttcgtcctgtctgagatggcctggtgaactccatgtaccagtactccctgattgccttcttagaggtcttc

SEQ ID NO: 12284 - DNA, 119 bp, homo sapiens
gtcctgtctgagatggccctggtgaactccatgtaccagtactccctgattgccttcttagaggtcttcggctgtcactgaagaagtcgctgcctgattccatcctcatgaaacgcctg

SEQ ID NO: 12285 - DNA, 119 bp, homo sapiens
gccttcttagaggtcttcaggctgtcactgaagaagtcgctgcctgattccatcctcatgaaacgcctgggaacatcatggacacgctgaccttcagcatctataaccacggctgcaca

SEQ ID NO: 12286 - DNA, 119 bp, homo sapiens
gaaacatttccctggagaaaagcaaaagaaaaaagccctgcgcttggttgtctgaccaaggatgggaagtatcattcttttatcagaaatgttttcagacaactttgggcaacttcctg

SEQ ID NO: 12287 - DNA, 119 bp, homo sapiens
ccctgcgcttggttgtctgaccaaggatgggaagatatcattcttttatcagaaatgttttcagacaacttgggcaacttcctgatgatgttgagaataatcagactgtctggcaggag

SEQ ID NO: 12288 - DNA, 119 bp, homo sapiens
tggtatgacctggattcactggagcagtttcccgtccccttgggttacgataacaacatcacccctttcagaagttgcttattttgcgctgtttccgtgtggatcgggtctatcgggcc

SEQ ID NO: 12289 - DNA, 119 bp, homo sapiens
ccccttgggttacgataacaacatcacccctttccagaagttgcttattttgcgctgtttccgtgtggacgggtctatcgggccgtgactgactatgtgactgtaacaatgggagagaa

SEQ ID NO: 12290 - DNA, 119 bp, homo sapiens
gtatgtgcagcccccaatgatcagctttgaagctatttttgagcagagcactccacattcgcccattgttttatcctgagtcctggctccgaccctgccactgatcttatgaaattagc

SEQ ID NO: 12291 - DNA, 119 bp, homo sapiens
ctatttttgagcagagcactccacattcgcccattgtgtttatcctgagtcctggctccgaccctgccatgatcttatgaaattagcagagcgaagtggttttggaggaaatcgcctca

SEQ ID NO: 12292 - DNA, 119 bp, homo sapiens
attgtgtttatcctgagtcctggctccgaccctgccactgatcttatgaaattagcagagcgaagtggtttggaggaaatcgcctcaaattccttgcaatgggtcaaggtcaagaaaag

SEQ ID NO: 12293 - DNA, 119 bp, homo sapiens
gtggccctgcagctgctggagacggcggtggctcgggggcagtggctgatgctgcagaactgccacctctggtcaagtggctgaaagatctggagaagtccctggagaggatcaccaag

SEQ ID NO: 12294 - DNA, 119 bp, homo sapiens
agtggctgatgctgcagaactgccacctcctggtcaagtggctgaaagatctggagaagtccctggagagatcaccaagccccacccagacttccgcctgtggctcaccacggacccca

SEQ ID NO: 12295 - DNA, 119 bp, homo sapiens
gctgaaagatctggagaagtccctggagaggatcaccaagccccacccagacttccgcctgtggctcacacggaccccaccaagggcttccccattgggattctgcagaagtccctaaa

SEQ ID NO: 12296 - DNA, 119 bp, homo sapiens
gttgtcaccgagccacccaatgggctgaaactcaacatgagggcaacttacttcaagatctctcacgaatgctggaccagtgcccgcaccctgccttcaagccgctggtctacgtgctg

SEQ ID NO: 12297 - DNA, 119 bp, homo sapiens
acttacttcaagatctctcacgaaatgctggaccagtgcccgcaccctgccttcaagccgctggtctactgctggcgttctttcatgctgtggtgcaggagagaaggaagtttgggaag

SEQ ID NO: 12298 - DNA, 119 bp, homo sapiens
cctgccttcaagccgctggtctacgtgctggcgttctttcatgctgtggtgcaggagagaaggaagtttggaagattggctggaacgtgtactatgacttcaatgagtctgacttccag

SEQ ID NO: 12299 - DNA, 119 bp, homo sapiens
gtcatgtatggaggacgggccatcgacagctttgatcgccgcatcctgaccatctacatggatgagtactgggggacttcatttttgatactttccagccattccacttcttccggaac

SEQ ID NO: 12300 - DNA, 119 bp, homo sapiens
tctacatggatgagtacctgggggacttcatttttgatactttccagccattccacttcttccggaacaggaagtggactacaaaatccctgttggtgatgaaaaggagaaatttgttg

SEQ ID NO: 12301 - DNA, 119 bp, homo sapiens
aagccatcgaggccctcccgcttgccaacacgccagaagtgtttggtctccaccccaacgctgagattgctattacacgcaggcggctcgagacatgtgggctcacctgctggagctgc

SEQ ID NO: 12302 - DNA, 119 bp, homo sapiens
ccctcccgcttgccaacacgccagaagtgtttggtctccaccccaacgctgagattggctattacacgcggcggctcgagacatgtgggctcacctgctggagctgcagcctcagacag

SEQ ID NO: 12303 - DNA, 119 bp, homo sapiens
gggaatccagcagtggtatcagccgcgatgattatattggccaagtggccaaagaaatagaaaacaagagcccaaagtctttgacttggaccaggtgaggaagcgcctcggaacaggac

SEQ ID NO: 12304 - DNA, 119 bp, homo sapiens
ggccaaagaaatagaaaacaagatgcccaaagtctttgacttggaccaggtgaggaagcgcctcggaacggactctcccccacttcggtggtgctcctgcaggaactggaacgcttcaa

SEQ ID NO: 12305 - DNA, 119 bp, homo sapiens
caggtgaggaagcgcctcggaacaggactctcccccacttcggtggtgctcctgcaggaactggaacgctcaacaagcttgtggtccggatgacgaagtctctggctgaacttcaaagg

SEQ ID NO: 12306 - DNA, 119 bp, homo sapiens
gccttggctggagaagttggaatgagcaatgagttagatgatgtggccaggtctctttttatcgggcattccctaatatctggagaaggcttgctcctgacaccttaaagtcccttgga

SEQ ID NO: 12307 - DNA, 119 bp, homo sapiens
aggtctctttttatcgggcatatccctaatatctggagaaggcttgctcctgacaccttaaagtcccttgaaactggatggtctacttcctgcggcggttcagccagtacatgttgtgg

SEQ ID NO: 12308 - DNA, 119 bp, homo sapiens
gtgaccgagagcgagcccagcgtgatgtggctctcggggctgcacatccctgagtcctacctcacggcgtggtgcaggccacctgccggaagaacggctggccactggaccgctccacc

SEQ ID NO: 12309 - DNA, 119 bp, homo sapiens
ctctcggggctgcacatccctgagtcctacctcacggcgctggtgcaggccacctgccggaagaacggcggccactggaccgctccaccttgttcacacaagtgaccaagttccaggat

SEQ ID NO: 12310 - DNA, 119 bp, homo sapiens
ctcacggcgctggtgcaggccacctgccggaagaacggctggccactggaccgctccaccttgttcacaaagtgaccaagttccaggatgcagatgaagtgaatgagcgggcgggacaa

SEQ ID NO: 12311 - DNA, 119 bp, homo sapiens
gatgctttgtctcaggactgtacctggaaggtgctgactgggatatagaaaaaggatgtcttatcaagacaaacccaaggtgctggttgtggacctgccgatcctgaagatcatcccca

SEQ ID NO: 12312 - DNA, 119 bp, homo sapiens
gaaggtgctgactgggatatagaaaaaggatgtcttatcaagagcaaacccaaggtgctggttgtggactgccgatcctgaagatcatccccattgaagcccatcgcctcaagctgcag

SEQ ID NO: 12313 - DNA, 119 bp, homo sapiens
aatactttccggacccccgtctacaccacctccatgagaaggaacgccatgggagtcggcttggtttttaagctgatctctttaccacgaggcacatttctcactgggtgctgcaagga

SEQ ID NO: 12314 - DNA, 119 bp, homo sapiens
agtcggcttggtttttgaagctgatctctttaccacgaggcacatttctcactgggtgctgcaaggagttgcctcaccctgaattctgattaacctttgggtgaagaaaactgcttaat

SEQ ID NO: 12315 - DNA, 119 bp, homo sapiens
gggtgctgcaaggagtatgcctcaccctgaattctgattaacctttgggtgaagaaaactgcttaatgattcggagcctggggttgtcagagtgatcgggtctgctgtcatttcttggg

SEQ ID NO: 12316 - DNA, 119 bp, homo sapiens
gaaaactgcttaatgaattcggagcctggggttgtcagagtgatcgggtctgctgtcatttcttggggctctcaagaggcaggagggggactgacactgatttttcatttgaaatcagc

SEQ ID NO: 12317 - DNA, 119 bp, homo sapiens
tgtcatttcttggggcctctcaagaggcaggagggggactgacactgatttttcatttgaaatcagccattaaatctctttccatacaaattaacctgaatggttttgtttttaatact

SEQ ID NO: 12318 - DNA, 119 bp, homo sapiens
catttgaaatcagccacttaaatctctttccatacaaattaacctgaatggttttgtttttaatactacttttaaaaggaatttatataatcaaaaagtaaatattggagagtatttta

SEQ ID NO: 12319 - DNA, 119 bp, homo sapiens
ttaaattattatagagattatattttaatgttttaaatgtatttgatacattacaaaattattttagttcaagcatatcattaaagctattctttattattacaaaatgcttttacaat

SEQ ID NO: 12320 - DNA, 119 bp, homo sapiens
tattttagttacaagcatatcattaaagctattctttattattacaaaatgcttttacaatgctattctgacaacaggaaaatacttaccctcactgaaatatgtggagtaccattttt

SEQ ID NO: 12321 - DNA, 119 bp, homo sapiens
atgctattcttgacaacaggaaaatacttaccctcactgaaatatgtggagtaccattttttggaaacctgtcaagcataatggcaatattcaggttcaatcttcctatagatctgctc

SEQ ID NO: 12322 - DNA, 119 bp, homo sapiens
tttggaaaccatgtcaagcataatggcaatattcaggttcaatcttcctatagatctgctcaatatttactaaaccttagcttctattcttttcacatgttattagctatattttcact

SEQ ID NO: 12323 - DNA, 119 bp, homo sapiens
tcaatatttatctaaaccttagcttctattcttttcacatgttattagctatattttcacttaaaaaatggaggctgaaggggtaagcaaacaaacttttgaagtagacaaagctcatc

SEQ ID NO: 12324 - DNA, 119 bp, homo sapiens
cttaaaaaattggaggctgaaggggtaagcaaacaaacttttgaagtagacaaagctcatctttaatcacagactttagagtccagtctttccaaatctgtttttaacgacagaaactt

SEQ ID NO: 12325 - DNA, 119 bp, homo sapiens
tctttaatcaacagactttagagtccagtctttccaaatctgtttttaacgacagaaacttctccctccctgccccattttgtcctccccattaaatggtactgtgtcaataaaattcc

SEQ ID NO: 12326 - DNA, 119 bp, homo sapiens
ttctccctcccctgccccattttgtcctccccattaaatggtactgtgtcaataaaattcccaagcgactctttaaatcagcgttctttccgatgctggctaccacagtcatggaaaag

SEQ ID NO: 12327 - DNA, 119 bp, homo sapiens
cccaagcgacctctttaaatcagcgttctttccgatgctggctaccacagtcatggaaaagggagatgtttggacaggcctgtcattacaggtagtagttggtggtacatccagtctgt

SEQ ID NO: 12328 - DNA, 119 bp, homo sapiens
agggagatgtgttggacaggcctgtcattacaggtagtagttggtggtacatccagtctgtatttcttaacaaaattacatctaaatatttgacatgaggccatttgctatcataagcc

SEQ ID NO: 12329 - DNA, 119 bp, homo sapiens
gtatttcttacacaaaattacatctaaatatttgacatgaggccatttgctatcataagccatcactagaacttctagtctgtctcactcgattgaggctacaatgttgttaggtgcta

SEQ ID NO: 12330 - DNA, 119 bp, homo sapiens
ccatcactaggaacttctagtctgtctcactcgattgaggctacaatgttgttaggtgctatgaccacatgaatacaacagacagcctctcagctgtgctgcaaagtattcataaccaa

SEQ ID NO: 12331 - DNA, 119 bp, homo sapiens
tatgaccacaatgaatacaacagacagcctctcagctgtgctgcaaagtattcataaccaaaagaccattttcaaattaaatcatagtagcgaatgacataccatttacatattacaat

SEQ ID NO: 12332 - DNA, 119 bp, homo sapiens
aaaagaccatatttcaaattaaatcatagtagcgaatgacataccatttacatattacaatctgagccttgaaacagggggaacatataatggtatccagaacatctttacatcaaaat

SEQ ID NO: 12333 - DNA, 119 bp, homo sapiens
atctgagcctctgaaacagggggaacatataatggtatccagaacatctttacatcaaaataacctatctactacaaagttttcacttccaaaaagtgtaacagagtttaaggcactgg

SEQ ID NO: 12334 - DNA, 119 bp, homo sapiens
ataacctatcatactacaaagttttcacttccaaaaagtgtaacagagtttaaggcactggtaactttgccactgttagagattaaaacttccaaagcaaatgaaagaaccaatgttca

SEQ ID NO: 12335 - DNA, 119 bp, homo sapiens
ggtaactttgtccactgttagagattaaaacttccaaagcaaatgaaagaaccaatgttcacctttaactggggaaagttggcaaaaagaaccccaggaggacacccaaaccttctctg

SEQ ID NO: 12336 - DNA, 119 bp, homo sapiens
cacctttaacgtggggaaagttggcaaaaagaaccccaggaggacacccaaaccttctctgtgtcctcttggaacctggcttttttctcttgtcctcagagaaagaaacaaatgccgat

SEQ ID NO: 12337 - DNA, 119 bp, homo sapiens
tgtgtcctctgtggaacctggcttttttctcttgtcctcagagaaagaaacaaatgccgatatcctctgttaaaatatgaaagtaccttacaccaataacccctaacagcctggggtct

SEQ ID NO: 12338 - DNA, 119 bp, homo sapiens
atatcctctgtttaaaatatgaaagtaccttacaccaataacccctaacagcctggggtctcagtggaataacttaagtgaaagaaaattaagacaggcatagaattaggcctttgttt

SEQ ID NO: 12339 - DNA, 119 bp, homo sapiens
ctcagtggaactaacttaagtgaaagaaaattaagacaggcatagaattaggcctttgttttgaggcttaggggagcagagctccattgtggcatctggagtttcacctgaggcctaca

SEQ ID NO: 12340 - DNA, 119 bp, homo sapiens
tttgaggctttaggggagcagagctccattgtggcatctggagtttcacctgaggcctacaggggtttcaatggttgcatttaaggtcagaatctttgtgttgggaaatgctagcgact

SEQ ID NO: 12341 - DNA, 119 bp, homo sapiens
caggggtttcaaatggttgcatttaaggtcagaatctttgtgttgggaaatgctagcgactgagccttgcagctgagcacgggttgcctcatccctctcatgctgtctatttcttaatc

SEQ ID NO: 12342 - DNA, 119 bp, homo sapiens
ctgagccttgacagctgagcacgggttgcctcatccctctcatgctgtctatttcttaatctaacaactggcaatgcgttaaactggcttttttgacttcccagaacaatatctaatta

SEQ ID NO: 12343 - DNA, 119 bp, homo sapiens
tctaacaactgggcaatgcgttaaactggcttttttgacttcccagaacaatatctaattagcaaataaacaattcagtgacattcagcaggatgcaaattccagacactgcaatcatg

SEQ ID NO: 12344 - DNA, 119 bp, homo sapiens
tagcaaataacacaattcagtgacattcagcaggatgcaaattccagacactgcaatcatgaacactgtaagacagtcttctccgtgggccgggacacaaagcagtccacagtgttggg

SEQ ID NO: 12345 - DNA, 119 bp, homo sapiens
tgaacactgtgaagacagtcttctccgtgggccgggacacaaagcagtccacagtgttgggacaaggccggcgttgcacttcaccagccgctgcatggagaagccgtcgtacatgacat

SEQ ID NO: 12346 - DNA, 119 bp, homo sapiens
ggacaaggccaggcgttgcacttcaccagccgctgcatggagaagccgtcgtacatgacatagaagacgacatgaaggcggcttcgaagatgacccggaagaagatgctgcttgtgtag

SEQ ID NO: 12347 - DNA, 119 bp, homo sapiens
atagaagacgtacatgaaggcggcttcgaagatgacccggaagaagatgctgcttgtgtaggtccaccaagggagccttcgatgcggaccttctgggttttgatctcctcgatgtcctt

SEQ ID NO: 12348 - DNA, 119 bp, homo sapiens
aggtccaccacagggagccttcgatgcggaccttctgggttttgatctcctcgatgtccttaaattcacctttatctcccccttgatgaacttcctcttcttctcatgtctccggtagg

SEQ ID NO: 12349 - DNA, 119 bp, homo sapiens
ttaaattcactctttatctcccccttgatgaacttcctcttcttctcatgtctccggtaggccacgtgctggccactaggagcgctggcgtggacacgaagatcagctgcagggcccat

SEQ ID NO: 12350 - DNA, 119 bp, homo sapiens
ggccacgtgcatggccactaggagcgctggcgtggacacgaagatcagctgcagggcccatagccggattgggagatggggaagtagtgatcgtagcacacgttcttgcagcctggctg

SEQ ID NO: 12351 - DNA, 119 bp, homo sapiens
atagccggatgtgggagatggggaagtagtgatcgtagcacacgttcttgcagcctggctgcagggtgtgcagacaaagtcggcctgctcatctccccacacctcctttgcagccacaa

SEQ ID NO: 12352 - DNA, 119 bp, homo sapiens
tgcagggtgttgcagacaaagtcggcctgctcatctccccacacctcctttgcagccacaacgaggatctaatgcgaaaaatgaagaggacggtgagccagatctttccaatgctggtg

SEQ ID NO: 12353 - DNA, 119 bp, homo sapiens
aacgaggatcataatgcgaaaaatgaagaggacggtgagccagatctttccaatgctggtggagtgtttttcacaccccccaggatcgtctgcagcgtgccccaatccatcttctactc

SEQ ID NO: 12354 - DNA, 119 bp, homo sapiens
tctcggcgttggggtctctgcgctggggctcctgcgctcctaggcgggtcctgggccgggcgccgccgagggctccgagtcggggagaggagcgcgcgggcgctgcggggccgcaacac

SEQ ID NO: 12355 - DNA, 119 bp, homo sapiens
gctcctaggcgggtcctgggccgggcgccgccgaggggctccgagtcggggagaggagcgcgcgggcgcgcggggccgcaacacctgtctcccgccgtggcgccttttaaccgcacccc

SEQ ID NO: 12356 - DNA, 119 bp, homo sapiens
agcagaggagtgagtcctggccgcgtccccgtcgctagggaaaccgatgcagctggaggccgcgcgcgagcggctcgcggaggagcgggccgcgctcgcggcggagaacgcggatgggg

SEQ ID NO: 12357 - DNA, 119 bp, homo sapiens
ctggaggccgcgcgcgatgcggctcgcggaggagcgggccgcgctcgcggcggagaacgcggatggggacccggcgccgaccgacgactgcgactcctggggacctacgtggccatgag

SEQ ID NO: 12358 - DNA, 119 bp, homo sapiens
gagaacgcggatggggaacccggcgccgaccgacgactgcgactcctggggacctacgtggccatgagctgcggccggctgcgggcgcctgggagcgttgcgcggggagtgctgaggcg

SEQ ID NO: 12359 - DNA, 119 bp, homo sapiens
cctacgtggccatgagcctgcggccggctgcgggcgcctgggagcgttgcgcggggagtgctgaggcgggcagctgctccaggccttcctgggccgcgatgctgccgaggggccgcggc

SEQ ID NO: 12360 - DNA, 119 bp, homo sapiens
ggggagtgctgaggcggagcagctgctccaggccttcctgggccgcgatgctgccgaggggccgcggccctgctggtggtgcggcccgggcccaggggcctggcaatacgccccgggct

SEQ ID NO: 12361 - DNA, 119 bp, homo sapiens
gccgaggggccgcggccgctgctggtggtgcggcccgggcccaggggcctggcaatacgccccgggctgaggtgggacctgagtcgggcctggctggcgctaaggcgctttttttcctt

SEQ ID NO: 12362 - DNA, 119 bp, homo sapiens
caatacgccccgggctggaggtgggacctgagtcgggcctggctggcgctaaggcgctttttttccttccaccgggcccgagcctccagggcccgacagcttccgcggcgcagtggtct

SEQ ID NO: 12363 - DNA, 119 bp, homo sapiens
ggcgctttttttccttcgcaccgggcccgagcctccagggcccgacagcttccgcggcgcagtggtctgggggacctgcccgcggcacctctggagcacctagccgcgctgttctcgga

SEQ ID NO: 12364 - DNA, 119 bp, homo sapiens
gttgttctacccgtcctggccaatgagaagaatcgcctaaactggccccacatgatatgtgaggatgtcggcggcacgcccacagcctccaatgtgacctctcagttatacttgagcaa

SEQ ID NO: 12365 - DNA, 119 bp, homo sapiens
aaactggccccacatgatatgtgaggatgtcaggcggcacgcccacagcctccaatgtgacctctcagtatacttgagcaagtgaagggaaaaactttgctgcctcttccagcaggctc

SEQ ID NO: 12366 - DNA, 119 bp, homo sapiens
acgcccacagcctccaatgtgacctctcagttatacttgagcaagtgaagggaaaaactttgctgcctctccagcaggctcagaaaaaatggagtttgcggattccaaaagtgagacag

SEQ ID NO: 12367 - DNA, 119 bp, homo sapiens
cttggattctatagataagtcagtcatctatgccattgagtctgcagtgatcaaatggagctaccaagtcaggtggtactcaagagagagtcttcccagccactcttacaaggggagaa

SEQ ID NO: 12368 - DNA, 119 bp, homo sapiens
gtctgcagtgatcaaatggagctaccaagtccaggtggtactcaagagagagtcttcccagccactcttcaaggggagaatcccacccctaaggtggagttggagttctggaagagcag

SEQ ID NO: 12369 - DNA, 119 bp, homo sapiens
gtatgaagatctgaaatacatctataatcaactgagaacaataacggtgaggggcatggccaagctcctgacaagcttcagagtagctactttccagctttcaaagccatgtacagaga

SEQ ID NO: 12370 - DNA, 119 bp, homo sapiens
tgaaatacatctataatcaactgagaacaataacggtgaggggcatggccaagctcctggacaagcttcgagtagctactttccagctttcaaagccatgtacagagatgttgttgcag

SEQ ID NO: 12371 - DNA, 119 bp, homo sapiens
ctctagcagaggcacaggacatccatgtgcacctgataccgctccagcgccacctggaagctctggagatgcagaatttccggaggtgaagccccagctgcggcccctgctccacgtgg

SEQ ID NO: 12372 - DNA, 119 bp, homo sapiens
gcgccacctggaagctctggagaatgcagaatttccggaggtgaagccccagctgcggcccctgctccagtggtctgtctgatttgggccacatgcaagtcctaccgctccccgggaag

SEQ ID NO: 12373 - DNA, 119 bp, homo sapiens
ccccagctgcggcccctgctccacgtggtctgtctgatttgggccacatgcaagtcctaccgctccccggaaggctgactgtgctgctccaggagatttgcaaccttctcatccagcag

SEQ ID NO: 12374 - DNA, 119 bp, homo sapiens
gcctctaattatctcagcccagaagacctgctgagaagtgaggtagaagaaagtcagagaaaactgcaatggtctcagacactttgagcttcttcaagcaagagtttcaggacagaagg

SEQ ID NO: 12375 - DNA, 119 bp, homo sapiens
agaaaactgcaagtggtctcagacactttgagcttcttcaagcaagagtttcaggacagaagggagaattccacacttacttcaaagagaaccaggaagtcaaggaatgggatttccag

SEQ ID NO: 12376 - DNA, 119 bp, homo sapiens
agaagggagaatctccacacttacttcaaagagaaccaggaagtcaaggaatgggatttccagtcttcttggtctttgtgcgattggatggcttcctgggacaactgcacgtggtggag

SEQ ID NO: 12377 - DNA, 119 bp, homo sapiens
ggtcttctgaagacggccctggatttccacaaactgggaaaggtggagttcagcggcgtcagagggaatctctgagtcagcaggtccagcaaatgcatgaagaatttcaagagatgtac

SEQ ID NO: 12378 - DNA, 119 bp, homo sapiens
ttcagcggcgtcagagggaatgctctgagtcagcaggtccagcaaatgcatgaagaatttcaagagatgacaggcttctctcaggatcctcctccgactgcctgtacctccaaagcacg

SEQ ID NO: 12379 - DNA, 119 bp, homo sapiens
ctgctagacatagcaggaaacctccttgaaagaccgctggtagcgagggatacatctgataaatacctgtcctcatccaaatgttcaacaaagatctggatgcagtgaggatgatctac

SEQ ID NO: 12380 - DNA, 119 bp, homo sapiens
gaccgctggtagcgagggatacatctgataaatacctggtcctcatccaaatgttcaacaaagatctggtgcagtgaggatgatctacagtcagcacgtccaggaggaagcagaacttg

SEQ ID NO: 12381 - DNA, 119 bp, homo sapiens
gtatgagacaagactttatgaggattggtgccggacagtatcagagaagtcacagtacaatctttcccaccacttctaaaacgtgacccagagacgaaggagatcactatcaactttaa

SEQ ID NO: 12382 - DNA, 119 bp, homo sapiens
acaagactttatgaggattggtgccggacagtatcagagaagtcacagtacaatctttcccaaccactttaaaacgtgacccagagacgaaggagatcactatcaactttaacccacag

SEQ ID NO: 12383 - DNA, 119 bp, homo sapiens
ctgatttcagtgctgaaagaaatgagctatcttgaacccagagagatgaaacacatgcctgagacagcacagccatgttctcctccagggatttctatcggcagcttgtggctaattta

SEQ ID NO: 12384 - DNA, 119 bp, homo sapiens
atgaaacacatgcctgagacagcagcagccatgttctcctccagggatttctatcggcagcttgtggctatttagagttgatggcaaattggtacaacaaggttatgaaaactctgctg

SEQ ID NO: 12385 - DNA, 119 bp, homo sapiens
gatttctatcggcagcttgtggctaatttagagttgatggcaaattggtacaacaaggttatgaaaacttgctggaggtggaatttccattagtggaggaagagctgcaaaatattgat

SEQ ID NO: 12386 - DNA, 119 bp, homo sapiens
tggtacaacaaggttatgaaaactctgctggaggtggaatttccattagtggaggaagagctgcaaaatttgatctccgcctcagagcagcagaggagactttgaactggaaaacagaa

SEQ ID NO: 12387 - DNA, 119 bp, homo sapiens
gcatttgcgattatgtcactgaaatcaccagtagtattcatgatcttgaacaaagaattcagaaaactaagacaatgtggaagagatccaaaacatcatgaaaacatgggtgactccaa

SEQ ID NO: 12388 - DNA, 119 bp, homo sapiens
tgatcttgaacaaagaattcagaaaactaaagacaatgtggaagagatccaaaacatcatgaaaacatggtgactccaatatttaagacaaaagatggaaaaagggaatcccttctttc

SEQ ID NO: 12389 - DNA, 119 bp, homo sapiens
gaagagatccaaaacatcatgaaaacatgggtgactccaatatttaagacaaaagatggaaaaagggaacccttctttctctggatgatcggcatgatcgaatggaaaaatattacaat

SEQ ID NO: 12390 - DNA, 119 bp, homo sapiens
tatttaagacaaaagatggaaaaagggaatcccttctttctctggatgatcggcatgatcgaatggaaaatattacaatctcatcaaggaatctggccttaagatccacgcccttgttc

SEQ ID NO: 12391 - DNA, 119 bp, homo sapiens
gaaaacctgggtctattttcagcagacccaacctccaatatctggaagacttatgttaactctattgacatttgttgctgaatggattctttcttgccattgagtgctccctcaagtat

SEQ ID NO: 12392 - DNA, 119 bp, homo sapiens
tttcagcagacccaacctccaatatctggaagacttatgttaactctattgacaatttgttgctgaatgattctttcttgccattgagtgctccctcaagtatcttctggaaaatactg

SEQ ID NO: 12393 - DNA, 119 bp, homo sapiens
agtgtaaggcaggacttaccccaatatttgaagcacaactgagtctagccatcccagagctagttttcttccgtctctggagtctggagtgaaggggggtttctgtgacattgttgagg

SEQ ID NO: 12394 - DNA, 119 bp, homo sapiens
ctgagtctagccatcccagagctagttttctatccgtctctggagtctggagtgaaggggggtttctgtacattgttgagggtctcatcaccagcatttttaggataccatctctggtg

SEQ ID NO: 12395 - DNA, 119 bp, homo sapiens
tctggagtctggagtgaaggggggtttctgtgacattgttgagggtctcatcaccagcatttttaggatccatctctggtgccacggctttccccacaaaatggctctcctcactatca

SEQ ID NO: 12396 - DNA, 119 bp, homo sapiens
gtcgacctggacggtataccagatttggcaaacatgcggcgcacactcatggagagagtccagagaatgtgggcctctgctgtggctatcagagcaccttcagccagtattcgtacctc

SEQ ID NO: 12397 - DNA, 119 bp, homo sapiens
ggagagagtccagagaatgatgggcctctgctgtggctatcagagcaccttcagccagtattcgtaccttatgtggaggaccggaaggaggttctgggtcagtttctgctgtacgggca

SEQ ID NO: 12398 - DNA, 119 bp, homo sapiens
tcagccagtattcgtacctctatgtggaggaccggaaggaggttctgggtcagtttctgctgtacgggccatcctcactccggaagaaattgaagaccatgtggaagatggcatcccag

SEQ ID NO: 12399 - DNA, 119 bp, homo sapiens
cagtttctgctgtacgggcacatcctcactccggaagaaattgaagaccatgtggaagatggcatcccaagaaccctcccctcctttctcagtttaaagtgcaaatcgactcctatgaa

SEQ ID NO: 12400 - DNA, 119 bp, homo sapiens
tgtggaagatggcatcccagagaaccctcccctcctttctcagtttaaagtgcaaatcgactcctatgaacgctctatgaagaggtgtgcaggctggaacccatcaaggtgtttgacgg

SEQ ID NO: 12401 - DNA, 119 bp, homo sapiens
tgcaaatcgactcctatgaaacgctctatgaagaggtgtgcaggctggaacccatcaaggtgtttgacgctggatgaaaattgatattcgaccctttaaggcatctctgctgaatatta

SEQ ID NO: 12402 - DNA, 119 bp, homo sapiens
cccatcaaggtgtttgacggctggatgaaaattgatattcgaccctttaaggcatctctgctgaatattttaagaggtggagcctcctgttcaaacagcatcttgtggaccacgtcact

SEQ ID NO: 12403 - DNA, 119 bp, homo sapiens
cttggccaacctggatgcgtttataaagaagagtgagagcggcttactcaagaaagttgaaaaaggagattccaaggcttggttgagatcatgggacaccttatggctgttaaagaacg

SEQ ID NO: 12404 - DNA, 119 bp, homo sapiens
gaaagttgaaaaaggagatttccaaggcttggttgagatcatgggacaccttatggctgttaaagaacgcagagtaacactgatgagatgtttgagcccttaaagcagactattgaatt

SEQ ID NO: 12405 - DNA, 119 bp, homo sapiens
tatggctgttaaagaacggcagagtaacactgatgagatgtttgagcccttaaagcagactattgaattctgaagacctatgaacaagaattgccagaaacagtgtttaagcagctgga

SEQ ID NO: 12406 - DNA, 119 bp, homo sapiens
gagctgcctgagaaatggaacaacataaaaaaggtggccattactgtgaagcagcaggtggccccactgaggcaaatgaagtgacactcctccgccagaggtgcacagccttcgatgca

SEQ ID NO: 12407 - DNA, 119 bp, homo sapiens
gaagcagcaggtggccccactgcaggcaaatgaagtgacactcctccgccagaggtgcacagccttcgagcagaacagcagcaattctgggagcaattccacaaagaagccccgttcag

SEQ ID NO: 12408 - DNA, 119 bp, homo sapiens
gtttgatagcatccaccctcatcaaatgctggatgccaggcacatcgagatccagcagatggaatccacatggcctccatttctgagtctgccagcttatttgaagtcaatgtccctga

SEQ ID NO: 12409 - DNA, 119 bp, homo sapiens
gatggaatccactatggcctccatttctgagtctgccagcttatttgaagtcaatgtccctgactataacagctgaggcagtgcaggaaggaggtctgccagctgaaggagctctggga

SEQ ID NO: 12410 - DNA, 119 bp, homo sapiens
ccctgactataagcagctgaggcagtgcaggaaggaggtctgccagctgaaggagctctgggacaccatggaatggtgacctccagcatccatgcctgggagaccacaccctggaggaa

SEQ ID NO: 12411 - DNA, 119 bp, homo sapiens
ctgggacaccattggaatggtgacctccagcatccatgcctgggagaccacaccctggaggaatatcaagtggaagccatggagttggagtgcaaacagtttgcccggcatatccgaaa

SEQ ID NO: 12412 - DNA, 119 bp, homo sapiens
gaggaatatcaacgtggaagccatggagttggagtgcaaacagtttgcccggcatatccgaaacctggaaaggaggtcagggcctgggatgcattcacaggcctggaaagcactgtgtg

SEQ ID NO: 12413 - DNA, 119 bp, homo sapiens
ccgaaacctggacaaggaggtcagggcctgggatgcattcacaggcctggaaagcactgtgtggaacacctgagctccctgagggcagtagctgagctgcagaatccagccatccggga

SEQ ID NO: 12414 - DNA, 119 bp, homo sapiens
tgtgtggaacacgctgagctccctgagggcagtagctgagctgcagaatccagccatccgggagcggcatggaggcagctgatgcaggccaccggtgtgagcttcactatggaccagga

SEQ ID NO: 12415 - DNA, 119 bp, homo sapiens
ccgggagcggcactggaggcagctgatgcaggccaccggtgtgagcttcactatggaccaggacaccacctagcgcacctgctgcagctccagctgcaccactatgaggatgaggtccg

SEQ ID NO: 12416 - DNA, 119 bp, homo sapiens
ccaggacaccaccctagcgcacctgctgcagctccagctgcaccactatgaggatgaggtccggggcatgtggacaaagctgcaaaagagatgggtatggagaaaaccttaaaggagct

SEQ ID NO: 12417 - DNA, 119 bp, homo sapiens
ggtccggggcattgtggacaaagctgcaaaagagatgggtatggagaaaaccttaaaggagctgcagacacctgggctggcatggaattccagtatgagccccacccacggaccaatgt

SEQ ID NO: 12418 - DNA, 119 bp, homo sapiens
ggagctgcagactacctgggctggcatggaattccagtatgagccccacccacggaccaatgtccccctctgtgctctgatgaggacctcatagaggttctggaggataatcaagttca

SEQ ID NO: 12419 - DNA, 119 bp, homo sapiens
caatgtccccctcctgtgctctgatgaggacctcatagaggttctggaggataatcaagttcaacttcaaacctggtgatgtccaagtatgttgctttcttcttggaggaggtgtcggg

SEQ ID NO: 12420 - DNA, 119 bp, homo sapiens
agttcaacttcagaacctggtgatgtccaagtatgttgctttcttcttggaggaggtgtcgggctggcaaagaagctgtccacagtggacgctgtcatctctatctggtttgaagtgca

SEQ ID NO: 12421 - DNA, 119 bp, homo sapiens
gtcgggctggcagaagaagctgtccacagtggacgctgtcatctctatctggtttgaagtgcagcgaactggactcacctggaaagcatattcactggatctgaagatattcgggcaca

SEQ ID NO: 12422 - DNA, 119 bp, homo sapiens
gattctaaaaggtttgaaggcatcgacattgactttaaagagctagcttatgatgcccagaaaattccaatgtagtgcaaaccaccaacaagccaggcctgtatgaaaagctggaggat

SEQ ID NO: 12423 - DNA, 119 bp, homo sapiens
gtttgaaggcatcgacattgactttaaagagctagcttatgatgcccagaaaattccaaatgtagtgcaaccaccaacaagccaggcctgtatgaaaagctggaggatattcagggcag

SEQ ID NO: 12424 - DNA, 119 bp, homo sapiens
attgtgcctgtgtgagaaggccctggcagagtacctcgacaccaagaggcttgccttcccgcggttttatttctctcctcctccgatctgttagacatcctttccaacggcacagctcc

SEQ ID NO: 12425 - DNA, 119 bp, homo sapiens
ctgtgtgagaaggccctggcagagtacctcgacaccaagaggcttgccttcccgcggttttactttctccctcctccgatctgttagacatcctttccaacggcacagctccacaacag

SEQ ID NO: 12426 - DNA, 119 bp, homo sapiens
gttcaacgtcacctttccaaactctttgacaacatggccaagatgcgattccagctagatgccagtgggaaccaaccaagacaagcctcggcatgtacagcaaagaagaggagtatgtg

SEQ ID NO: 12427 - DNA, 119 bp, homo sapiens
atggccaagatgcgattccagctagatgccagtggggaaccaaccaagacaagcctcggcatgtacagcaagaagaggagtatgtggctttcagtgagccctgtgactgcagcgggcag

SEQ ID NO: 12428 - DNA, 119 bp, homo sapiens
gtagaaatatggctgaaccatgtccttggtcacatgaaggccactgtgaggcatgagatgacagaaggttaactgcctatgaagaaaagccgagggagcagtggctttttgaccaccca

SEQ ID NO: 12429 - DNA, 119 bp, homo sapiens
atatggctgaaccatgtccttggtcacatgaaggccactgtgaggcatgagatgacagaaggtgtaactcctatgaagaaaagccgagggagcagtggctttttgaccacccagctcag

SEQ ID NO: 12430 - DNA, 119 bp, homo sapiens
gtggccctgacctgtactcagatctggtggacaacagaagtgggcatggcatttgccaggctggaggaagctatgagagtgccatgaaggactattataagaagcaagtggcccagctc

SEQ ID NO: 12431 - DNA, 119 bp, homo sapiens
ctggaggaaggctatgagagtgccatgaaggactattataagaagcaagtggcccagctcaaaaccctttcaccatgctgattggccagctctccaagggagaccggcagaagattatg

SEQ ID NO: 12432 - DNA, 119 bp, homo sapiens
aaaacccttatcaccatgctgattggccagctctccaagggagaccggcagaagattatgactatatgcccatcgatgtgcatgcccgggatgtggtagccaagatgattgctcagaag

SEQ ID NO: 12433 - DNA, 119 bp, homo sapiens
gtagacaatgcccaggctttcctctggctgtctcagctgcgccatcgttgggatgacgaggtcaaacacgctttgccaacatctgtgatgcccagtttttgtattcctatgagtacctg

SEQ ID NO: 12434 - DNA, 119 bp, homo sapiens
ccatcgttgggatgacgaggtcaaacactgctttgccaacatctgtgatgcccagtttttgtattcctagagtacctgggaaacacacctcgcttggtgatcacacctttgactgacag

SEQ ID NO: 12435 - DNA, 119 bp, homo sapiens
gtgctacatcaccctcacccagtccctgcacctgaccatgagtggggctcccgcaggacctgcaggcacggcaagaccgagaccaccaaggacctgggccgcgcactgggcatcctggt

SEQ ID NO: 12436 - DNA, 119 bp, homo sapiens
atgagtggggctcccgcaggacctgcaggcacaggcaagaccgagaccaccaaggacctgggccgcgcatgggcatcctggtctatgtgttcaactgctcggagcagatggattacaag

SEQ ID NO: 12437 - DNA, 119 bp, homo sapiens
gtaaaaagcattcaagatgcgattagagataagaagcagtggttcagcttccttggggaggagatcagctgaatccttctgtcggtatcttcatcaccatgaacccaggctatgctggc

SEQ ID NO: 12438 - DNA, 119 bp, homo sapiens
gtggttcagcttccttggggaggagatcagcctgaatccttctgtcggtatcttcatcaccatgaacccggctatgctggccgcacagagctgccagagaatctcaagtctctcttcag

SEQ ID NO: 12439 - DNA, 119 bp, homo sapiens
gccttgtgcaatggtggttccagactttgaattgatctgtgaaatcatgctggtggcagaaggattcatgaagcccagtcattagccagaaagttcatcactctttaccagttgtgcaa

SEQ ID NO: 12440 - DNA, 119 bp, homo sapiens
ccagactttgaattgatctgtgaaatcatgctggtggcagaaggattcattgaagcccagtcattagccgaaagttcatcactctttaccagttgtgcaaagagcttctctccaaacag

SEQ ID NO: 12441 - DNA, 119 bp, homo sapiens
gatcactacgactggggcctacgggccatcaagtccgtgctggtggtggcaggatccctgaagagaggaaccctgaccggcctgaggaccaggtcctgatgcgctccttgcgggatttc

SEQ ID NO: 12442 - DNA, 119 bp, homo sapiens
cctgaagagaggagaccctgaccggcctgaggaccaggtcctgatgcgctccttgcgggatttcaacatcccaagattgtgactgatgacatgcccatcttcatgggcctgatcgggga

SEQ ID NO: 12443 - DNA, 119 bp, homo sapiens
gggatttcaacatccccaagattgtgactgatgacatgcccatcttcatgggcctgatcggggacctcttcccgccctggatgtcccccggaggagagaccccaacttcgaagctttgg

SEQ ID NO: 12444 - DNA, 119 bp, homo sapiens
atcggggacctctttcccgccctggatgtcccccggaggagagaccccaacttcgaagctttggttaggaggcgatagtggatctgaagctccaggctgaggacaactttgtgctcaag

SEQ ID NO: 12445 - DNA, 119 bp, homo sapiens
gtggtccagctggaggagctcctggctgtgcggcactctgtatttgtggtgggtggcgctggtaccggcagtcacaggtgctgaggtccttgcacaagacctatcagatcatgaaacgg

SEQ ID NO: 12446 - DNA, 119 bp, homo sapiens
gtggtgggtggcgctggtaccggcaagtcacaggtgctgaggtccttgcacaagacctatcagatcatgaacggcgccccgtctggactgacctcaatcccaaagcagtcacaaatgat

SEQ ID NO: 12447 - DNA, 119 bp, homo sapiens
ttgcacaagacctatcagatcatgaaacggcgccccgtctggactgacctcaatcccaaagcagtcacaatgatgagctctttggcatcatcaatccagccacaggagaatggaaggat

SEQ ID NO: 12448 - DNA, 119 bp, homo sapiens
gattgttctcttccatcatgcgggagcttgccaacatcacccatgatgggcccaagtggattttactggtggcgacatagatccaatgtggattgaatccctgaatactgtcatggatg

SEQ ID NO: 12449 - DNA, 119 bp, homo sapiens
tcttccatcatgcgggagcttgccaacatcacccatgatgggcccaagtggattttactggatggcgactagatccaatgtggattgaatccctgaatactgtcatggatgataacaag

SEQ ID NO: 12450 - DNA, 119 bp, homo sapiens
ggatcttgtacatcaacccggcagacttgggatggaaccctccagtgagcagctggattgagaagagggaatccagacagagagagccaacttaaccattttgttcgacaagtatcttc

SEQ ID NO: 12451 - DNA, 119 bp, homo sapiens
gggatggaaccctccagtgagcagctggattgagaagagggaaatccagacagagagagccaacttaacattttgttcgacaagtatcttccaacctgcctagacacactcagaaccag

SEQ ID NO: 12452 - DNA, 119 bp, homo sapiens
gtttaagaagatcattcccatcccagagcagagcatggttcagatggtgtgtcaccttctggaatgtctctgaccacggaggacatccctgcagactgccctaaggaaatttatgagca

SEQ ID NO: 12453 - DNA, 119 bp, homo sapiens
cttctggaatgtctcctgaccacggaggacatccctgcagactgccctaaggaaatttatgagcattatttgtgtttgctgccatctgggctttcggcggagcaatggtccaagatcag

SEQ ID NO: 12454 - DNA, 119 bp, homo sapiens
cttgtggactaccgggcagagttcagcaaatggtggctgactgagttcaaaacagtcaagtttccttccaaggaaccatctttgactattacatcgacccagagaccaagaaattcgag

SEQ ID NO: 12455 - DNA, 119 bp, homo sapiens
gtcaagtttccttcccaaggaaccatctttgactattacatcgacccagagaccaagaaattcgagcctggtccaagctcgtcccccagttcgaatttgaccccgagatgcccttgcag

SEQ ID NO: 12456 - DNA, 119 bp, homo sapiens
gcgtgtttggtgcacacgagtgagaccatccgtgtgtgctacttcatggagcggttgatggcgcggcagggcctgtcatgctggtgggcacggctggcactggcaagtcggtgctggtg

SEQ ID NO: 12457 - DNA, 119 bp, homo sapiens
catggagcggttgatggcgcggcagcggcctgtcatgctggtgggcacggctggcactggcaagtcggtctggtgggagctaagctggccagccttgaccccgaggcatacctggtgaa

SEQ ID NO: 12458 - DNA, 119 bp, homo sapiens
gcacggctggcactggcaagtcggtgctggtgggagctaagctggccagccttgaccccgaggcataccggtgaaaaacgtgccattcaactactacaccacgtcagcaatgctgcagg

SEQ ID NO: 12459 - DNA, 119 bp, homo sapiens
ctgtcctggagaagcctctggaaaagaaggctggcagaaactatggccctccagggaacaagaaactcactatttcattgatgacatgaacatgcctgaggtggatgcctacgggacgg

SEQ ID NO: 12460 - DNA, 119 bp, homo sapiens
ccctccagggaacaagaaactcatctatttcattgatgacatgaacatgcctgaggtggatgcctacggacggtgcagccccacaccatcatccggcagcatctggactatggccactg

SEQ ID NO: 12461 - DNA, 119 bp, homo sapiens
cgtcacttcagcgtgtttgtcctctccttcccgggggcagatgccctgtcctctatctacagcatcatctcactcagcatctgaagctcggaaacttcccggcgtccctgcagaaatcc

SEQ ID NO: 12462 - DNA, 119 bp, homo sapiens
agcatcatcctcactcagcatctgaagctcggaaacttcccggcgtccctgcagaaatccatccccccatgatcgatctggccctcgccttccaccagaaaattgctaccaccttccta

SEQ ID NO: 12463 - DNA, 119 bp, homo sapiens
atccccccactgatcgatctggccctcgccttccaccagaaaattgctaccaccttcctacccacaggatcaaattccactacatcttcaacctcagagattttgccaacattttccag

SEQ ID NO: 12464 - DNA, 119 bp, homo sapiens
ggcattctcttctcctcagtggaatgtgtgaaatccacatgggatcttataaggctctatctgcatgaacaaatcgagtttatcgggataagatggtagaagaaaaggactttgatctt

SEQ ID NO: 12465 - DNA, 119 bp, homo sapiens
gatcttataaggctctatctgcatgaatcaaatcgagtttatcgggataagatggtagaagaaaaggacttgatctttttgataaaatccagacagaagtgctcaagaaaacttttgat

SEQ ID NO: 12466 - DNA, 119 bp, homo sapiens
gatattgaagaccctgtggagcagacccaaagcccgaacctgtattgtcactttgcaaatggtattgggagcccaaatacatgcctgtacagtcttgggaacttttgacccagactctg

SEQ ID NO: 12467 - DNA, 119 bp, homo sapiens
cctgtattgtcactttgcaaatggtattggggagcccaaatacatgcctgtacagtcttgggaacttttacccagactctggtggaggccttggagaaccacaatgaagtcaacacagt

SEQ ID NO: 12468 - DNA, 119 bp, homo sapiens
aatacatgcctgtacagtcttgggaacttttgacccagactctggtggaggccttggagaaccacaatgagtcaacacagtgatggacctagttctctttgaggatgccatgcgccatg

SEQ ID NO: 12469 - DNA, 119 bp, homo sapiens
ctgccatatcaatcgcatcttggagtccccgcggggaaatgctctgctggttggtgtaggtgggagcggaagcagagcctgacaaggctggcagctttcatcagctccatggatgtctt

SEQ ID NO: 12470 - DNA, 119 bp, homo sapiens
ctgctggttggtgtaggtgggagcggcaagcagagcctgacaaggctggcagctttcatcagctccatgatgtcttccagatcacactgcgcaaaggctaccagatccaggacttcaag

SEQ ID NO: 12471 - DNA, 119 bp, homo sapiens
atggacctggccagcctgtgtctgaaagctggagtgaagaatctcaacacagtgtttctcatgactgatcccaagtggctgatgagaggttccttgtgctcatcaatgatcttttggca

SEQ ID NO: 12472 - DNA, 119 bp, homo sapiens
acctggccagcctgtgtctgaaagctggagtgaagaatctcaacacagtgtttctcatgactgatgcccagtggctgatgagaggttccttgtgctcatcaatgatcttttggcatctg

SEQ ID NO: 12473 - DNA, 119 bp, homo sapiens
gggagatcccagatctctactctgatgatgaagttgaaaacatcataagcaatgtgaggaatgaagtcagagccagggtctggttgacaacagagagaactgttggaagttctttatag

SEQ ID NO: 12474 - DNA, 119 bp, homo sapiens
gatgatgaagttgaaaacatcataagcaatgtgaggaatgaagtcaagagccagggtctggttgacaacgagagaactgttggaagttctttatagatcggatccggcgacagctgaag

SEQ ID NO: 12475 - DNA, 119 bp, homo sapiens
gtgactctctgtttctcccctgtgggaaacaagctaagagtccgcagcaggaagttcccagccattgtgactgcacagccatccactggttccacgagtggcctcagcaagcattggag

SEQ ID NO: 12476 - DNA, 119 bp, homo sapiens
cgcagcaggaagttcccagccattgtgaactgcacagccatccactggttccacgagtggcctcagcaacattggagtctgtcagcctccgcttcttgcagaacacagagggcattgag

SEQ ID NO: 12477 - DNA, 119 bp, homo sapiens
cccacagtaaagcagtcgattagcaaattcatggcctttgtccacacaagtgtcaaccaaacatcccagcttatctgagcaatgaacagcgctacaactatacaactcccaagtccttt

SEQ ID NO: 12478 - DNA, 119 bp, homo sapiens
caaacatcccagtcttatctgagcaatgaacagcgctacaactatacaactcccaagtcctttctggagtcatcagactctaccagagcttgttgcacaggcacagaaaagagctcaag

SEQ ID NO: 12479 - DNA, 119 bp, homo sapiens
tcctttctggagttcatcagactctaccagagcttgttgcacaggcacagaaaagagctcaagtgcaagcagagcggttggagaacgggctgctgaagctgcatagcacctctgcccag

SEQ ID NO: 12480 - DNA, 119 bp, homo sapiens
gtggatgatctgaaagcaaagctggctgcccaggaagtagagctgaagcagaaaaatgaagatgcagacaactgattcaggtcgtgggtgtggagactgacaaagtgagcagagagaaa

SEQ ID NO: 12481 - DNA, 119 bp, homo sapiens
gcagaaaaatgaagatgcagacaaactgattcaggtcgtgggtgtggagactgacaaagtgagcagagaaaagccatggcagatgaagaggagcagaaggtggccgtcatcatgctaga

SEQ ID NO: 12482 - DNA, 119 bp, homo sapiens
agactgacaaagtgagcagagagaaagccatggcagatgaagaggagcagaaggtggccgtcatcatgcagaggtgaaacagaagcagaaggactgtgaggaggacctggcaaaggctg

SEQ ID NO: 12483 - DNA, 119 bp, homo sapiens
cagaaggtggccgtcatcatgctagaggtgaaacagaagcagaaggactgtgaggaggacctggcaaagctgagccagcactcacagcagcgcaggcagctctcaacaccctgaacaag

SEQ ID NO: 12484 - DNA, 119 bp, homo sapiens
accaacctgacagagctgaagtcatttggctctccgcctctggccgtcagcaatgtcagcgctgcggtgtggtactgatggctcccaggggtagggtgcccaaggaccggagctggaag

SEQ ID NO: 12485 - DNA, 119 bp, homo sapiens
aatgtcagcgctgcggtgatggtactgatggctcccaggggtagggtgcccaaggaccggagctggaagctgctaaggtcaccatggccaaagtggatggcttcctggactcgctaata

SEQ ID NO: 12486 - DNA, 119 bp, homo sapiens
aaggaccggagctggaaggctgctaaggtcaccatggccaaagtggatggcttcctggactcgctaataacttcaacaaagagaacattcacgagaactgcctcaaagccatcaggccg

SEQ ID NO: 12487 - DNA, 119 bp, homo sapiens
ttcctggactcgctaataaacttcaacaaagagaacattcacgagaactgcctcaaagccatcaggccgatctgcaagaccccgagttcaatcctgagtttgtggccaccaaatcctat

SEQ ID NO: 12488 - DNA, 119 bp, homo sapiens
ctcaaagccatcaggccgtatctgcaagaccccgagttcaatcctgagtttgtggccaccaaatcctatcggctgcaggcctctgctcctgggtcatcaatattgtgagattttatgag

SEQ ID NO: 12489 - DNA, 119 bp, homo sapiens
gtggccaccaaatcctatgcggctgcaggcctctgctcctgggtcatcaatattgtgagattttatgagtgttctgtgatgtggaacccaagcgccaggcactgaacaaagccaccgcg

SEQ ID NO: 12490 - DNA, 119 bp, homo sapiens
attgtgagattttatgaggtgttctgtgatgtggaacccaagcgccaggcactgaacaaagccaccgcgacctcacagctgcccaggagaagctggctgccatcaaagccaagatcgct

SEQ ID NO: 12491 - DNA, 119 bp, homo sapiens
gttggaggactcgcttctgaaaacgtgaggtgggcagatgccgtgcagaacttcaaacagcaggaaaggcgttatgtggagacattttacttataacggctttcatttcctaccttggc

SEQ ID NO: 12492 - DNA, 119 bp, homo sapiens
cagatgccgtgcagaacttcaaacagcaggaaaggacgttatgtggagacattttacttataacggcttcatttcctaccttggcttcttcacaaagaaataccggcagagcctcctgg

SEQ ID NO: 12493 - DNA, 119 bp, homo sapiens
gacgttatgtggagacattttacttataacggctttcatttcctaccttggcttcttcacaaagaaatacggcagagcctcctggacagaacttggaggccctacctgagccagctgaa

SEQ ID NO: 12494 - DNA, 119 bp, homo sapiens
actcccattccagtcaccccagccctggatcccctgaggatgctgatggatgatgctgacgtggctgccggcagaacgagggcctcccagccgaccgcatgtccgtggagaatgccacc

SEQ ID NO: 12495 - DNA, 119 bp, homo sapiens
acgtggctgcctggcagaacgagggcctcccagccgaccgcatgtccgtggagaatgccaccattctcacaactgtgagcgctggccactcatggttgaccctcagctacaaggcatca

SEQ ID NO: 12496 - DNA, 119 bp, homo sapiens
caccattctcatcaactgtgagcgctggccactcatggttgaccctcagctacaaggcatcaaatggataagaataaatatggtgaagatctccgggtcacgcagattggtcagaaagg

SEQ ID NO: 12497 - DNA, 119 bp, homo sapiens
ctaccttcaaatcatagagcaggccctggaagctggagctgtggtgctgattgaaaatctagaggagtcattgatcctgttctgggacccctgcttgggagagaagtcattaaaaaagg

SEQ ID NO: 12498 - DNA, 119 bp, homo sapiens
ccttcaaatcatagagcaggccctggaagctggagctgtggtgctgattgaaaatctagaggagtccatgatcctgttctgggacccctgcttgggagagaagtcattaaaaaaggacg

SEQ ID NO: 12499 - DNA, 119 bp, homo sapiens
attcattaaaattggagacaaagaatgtgaatacaatcccaagttccggctcatcctccacaccaagctgctaatcctcactaccagcctgagctgcaggctcaggccaccctgatcaa

SEQ ID NO: 12500 - DNA, 119 bp, homo sapiens
gttccggctcatcctccacaccaagctggctaatcctcactaccagcctgagctgcaggctcaggccacctgatcaacttcaccgtgaccagggatggcctggaggaccagttgctggc

SEQ ID NO: 12501 - DNA, 119 bp, homo sapiens
ccagcctgagctgcaggctcaggccaccctgatcaacttcaccgtgaccagggatggcctggaggaccattgctggccgctgtggtcagcatggagaggccagacttggagcagctgaa

SEQ ID NO: 12502 - DNA, 119 bp, homo sapiens
tggttggaacctccaacaggaaggttgttcttcccacgaatccaaaggctgtacaagggcaaagacactcagctgcctgaagttagtgctttaggatatggagcataaagagaggaaga

SEQ ID NO: 12503 - DNA, 119 bp, homo sapiens
gcaaagacactacagctgcctgaagttagtgctttaggatatggagcataaagagaggaagagatgagaccacttggataccagcaccccactccagcctcgaggaagcttttacacag

SEQ ID NO: 12504 - DNA, 119 bp, homo sapiens
aagagatgagatccacttggataccagcaccccactccagcctcgaggaagcttttacacagtctgccaggttttacacagtttaaaactggaagacagattctgctgattttttttta

SEQ ID NO: 12505 - DNA, 119 bp, homo sapiens
tccgatctcacaaagcagcagaatggattcaaaattaccctgaaaacgttggaagacagtcttctctctgcctctcctccgcctctgggaacttcctgggagaaacagtgctggtggaa

SEQ ID NO: 12506 - DNA, 119 bp, homo sapiens
acgttggaagacagtcttctctctcgcctctcctccgcctctgggaacttcctgggagaaacagtgctgtggaaaacctagagatcaccaagcagactgctgccgaagttgagaaaaag

SEQ ID NO: 12507 - DNA, 119 bp, homo sapiens
gtccaggaggccaaggtgactgaagtgaaaatcaacgaggcccgagagcactaccggccagcagctgccgggcctcactgctctacttcatcatgaacgacctcagcaagatccatcca

SEQ ID NO: 12508 - DNA, 119 bp, homo sapiens
gaagtgaaaatcaacgaggcccgagagcactaccggccagcagctgccagggcctcactgctctacttctcatgaacgacctcagcaagatccatccaatgtaccagttttctctcaag

SEQ ID NO: 12509 - DNA, 119 bp, homo sapiens
gccttcagtatcgtcttccagaaggctgtggagagggctgctcctgacgaaagcctcagggagcgggtgccaacctaatagacagcataaccttctctgtgtaccagtacaccatccgc

SEQ ID NO: 12510 - DNA, 119 bp, homo sapiens
agcctcagggagcgggtggccaacctaatagacagcataaccttctctgtgtaccagtacaccatccgcggctctttgagtgtgataagctgacctaccttgcccagctcacctttcag

SEQ ID NO: 12511 - DNA, 119 bp, homo sapiens
attctcctcatgaaccgagaagtcaatgcagtggagttggatttcctgcttcgatctccagtgcagacggcaccgccagccccgtggagttcctctcccatcaggcgtggggagctgtc

SEQ ID NO: 12512 - DNA, 119 bp, homo sapiens
ctcctcatgaaccgagaagtcaatgcagtggagttggatttcctgcttcgatctccagtgcagacgggcccgccagccccgtggagttcctctcccatcaggcgtggggagctgtcaag

SEQ ID NO: 12513 - DNA, 119 bp, homo sapiens
gtactttcatcaatggaagaattctctaatctggatcgggacatagagggatctgctaagagctggaaaagtttgtggagtccgaatgtcctgagaaagagaagctcccacaggagtgg

SEQ ID NO: 12514 - DNA, 119 bp, homo sapiens
gggacatagagggatctgctaagagctggaaaaagtttgtggagtccgaatgtcctgagaaagagaagccccacaggagtggaagaacaagacagccctgcagcgcctctgcatgctga

SEQ ID NO: 12515 - DNA, 119 bp, homo sapiens
tgtggagtccgaatgtcctgagaaagagaagctcccacaggagtggaagaacaagacagccctgcagcgctctgcatgctgagagccatgcggcccgaccggatgacctatgctttgcg

SEQ ID NO: 12516 - DNA, 119 bp, homo sapiens
agattttgttgaagagaagttaggaagcaaatacgtggtgggaagagccctagattttgcaacctcattgaagaatcgggaccagccactcctatgtttttcatcctgtctccaggggt

SEQ ID NO: 12517 - DNA, 119 bp, homo sapiens
aatacgtggtgggaagagccctagattttgcaacctcatttgaagaatcgggaccagccactcctatgttttcatcctgtctccaggggtggacccactgaaggatgtagaaagtcaag

SEQ ID NO: 12518 - DNA, 119 bp, homo sapiens
gaagaaaacttggatacaccttcaacaatcagaactttcacaacgtgtctttggggcaaggacaggaagggtggctgaggctgcgctggacctcgctgccaagaaaggtcactgggtta

SEQ ID NO: 12519 - DNA, 119 bp, homo sapiens
cttggatacaccttcaacaatcagaactttcacaacgtgtctttggggcaaggacaggaagtggtggctaggctgcgctggacctcgctgccaagaaaggtcactgggttattttgcag

SEQ ID NO: 12520 - DNA, 119 bp, homo sapiens
aacattcacctggtggccaagtggctcagcaccctggagaagaagctggaggagcacagtgagaacagcacccagagttcagggtcttcatgagtgcagagccagcaccctcccctgag

SEQ ID NO: 12521 - DNA, 119 bp, homo sapiens
cacagtgagaacagccacccagagttcagggtcttcatgagtgcagagccagcaccctcccctgagggcacatcatcccccagggcatcctggagaactccattaagatcaccaatgag

SEQ ID NO: 12522 - DNA, 119 bp, homo sapiens
ccctcccctgagggccacatcatcccccagggcatcctggagaactccattaagatcaccaatgagcccccacgggcatgcatgccaacctgcacaaggccctggacaacttcactcag

SEQ ID NO: 12523 - DNA, 119 bp, homo sapiens
gacactctggagatgtgttctcgggagacggagtttaagagcatcctctttgctctttgttacttccatcggtggtggcagaaagacgaaaatttgggccccagggatggaatcgctca

SEQ ID NO: 12524 - DNA, 119 bp, homo sapiens
aagagcatcctctttgctctttgttacttccatgcggtggtggcagaaagacgaaaatttgggccccaggatggaatcgctcatacccctttaacactggagacctcactatctctgtg

SEQ ID NO: 12525 - DNA, 119 bp, homo sapiens
gtggtggcagaaagacgaaaatttgggccccagggatggaatcgctcatacccctttaacactggagactcactatctctgtgaatgtcctctacaacttcctggaggccaacgcaaag

SEQ ID NO: 12526 - DNA, 119 bp, homo sapiens
gtcccctatgatgatttgcgctacctgtttggagagatcatgtatggaggccatatcacagatgactggacagaagactctgcagaacctacctgggggaattcattcgaccagaaatg

SEQ ID NO: 12527 - DNA, 119 bp, homo sapiens
atcatgtatggaggccatatcacagatgactgggacagaagactctgcagaacctacctgggggaattcttcgaccagaaatgttagaaggagaactgtctttggccccagggttccca

SEQ ID NO: 12528 - DNA, 119 bp, homo sapiens
agaagactctgcagaacctacctgggggaattcattcgaccagaaatgttagaaggagaactgtctttgccccagggttcccactcccaggcaacatggactacaatggttatcatcag

SEQ ID NO: 12529 - DNA, 119 bp, homo sapiens
tacatcgatgctgagctgcccccagaatccccctacctctatggcctccacccgaacgcagagattggctcctgacccaaacctcagaaaagctcttccgcactgtgctggagctgcag

SEQ ID NO: 12530 - DNA, 119 bp, homo sapiens
ccgaacgcagagattggcttcctgacccaaacctcagaaaagctcttccgcactgtgctggagctgcagctcgggacagccaggccagagacggagcgggcgccacaagagaagaaaag

SEQ ID NO: 12531 - DNA, 119 bp, homo sapiens
gtcaaggcacttctggaagaaatattggagcgggtgacagacgagtttaacatcccagaactgatggccaagtggaggagcgcaccccttacattgtagttgccttccaggagtgtggc

SEQ ID NO: 12532 - DNA, 119 bp, homo sapiens
gggtgacagacgagtttaacatcccagaactgatggccaaagtggaggagcgcaccccttacattgtagtgccttccaggagtgtggccggatgaatatcctcaccagagagattcagc

SEQ ID NO: 12533 - DNA, 119 bp, homo sapiens
gatggccaaagtggaggagcgcaccccttacattgtagttgccttccaggagtgtggccggatgaatatctcaccagagagattcagcgctcactgagggagctggagctcggcttaaa

SEQ ID NO: 12534 - DNA, 119 bp, homo sapiens
ggggagctgactatgaccagccacatggagaacttacagaatgccctgtacttcgatatggtgccagagcctgggctagacgagcctacccttccacagcaggcctggcagcctggttt

SEQ ID NO: 12535 - DNA, 119 bp, homo sapiens
gatatggtgccagagtcctgggctagacgagcctacccttccacagcaggcctggcagcctggtttccaacctcctcaacagaatcaaggagctagaggcttggacgggtgactttaca

SEQ ID NO: 12536 - DNA, 119 bp, homo sapiens
gcagcctggtttccagacctcctcaacagaatcaaggagctagaggcttggacgggtgactttacaatgcctccactgtgtggctgacaggcttcttcaacccccagtcgttcctgact

SEQ ID NO: 12537 - DNA, 119 bp, homo sapiens
ggtgactttacaatgccctccactgtgtggctgacaggcttcttcaacccccagtcgttcctgactgcctcatgcagtccacggctcgcaagaatgagtggccactggaccagatggcc

SEQ ID NO: 12538 - DNA, 119 bp, homo sapiens
tcgttcctgactgccatcatgcagtccacggctcgcaagaatgagtggccactggaccagatggccctgaatgtgacatgacgaagaagaacagagaagagtttaggagtcctcctcgg

SEQ ID NO: 12539 - DNA, 119 bp, homo sapiens
gaccagatggccctgcaatgtgacatgacgaagaagaacagagaagagtttaggagtcctcctcgggaagggcctacatccatggcctcttcatggaaggtgcctgctgggacacacag

SEQ ID NO: 12540 - DNA, 119 bp, homo sapiens
gctgggatcattacagaggcaaagctgaaggatctgacaccccctatgcctgtgatgttcatcaaggccttcctgcagataagcaggactgccgcagtgtctattcctgtcctgtgtac

SEQ ID NO: 12541 - DNA, 119 bp, homo sapiens
atgttcatcaaggccattcctgcagataagcaggactgccgcagtgtctattcctgtcctgtgtacaagctagtcagcggggacccacctacgtgtggactttcaacctgaagactaag

SEQ ID NO: 12542 - DNA, 119 bp, homo sapiens
tgtcctgtgtacaagactagtcagcggggacccacctacgtgtggactttcaacctgaagactaaggaaacccatccaagtgggttctggctggagtagccttgcttctccagatttag

SEQ ID NO: 12543 - DNA, 119 bp, homo sapiens
ctgaagactaaggaaaacccatccaagtgggttctggctggagtagccttgcttctccagatttagcatctgcagagccaccgagaaaataaaaaagctgggcttggaggctgcctaga

SEQ ID NO: 12544 - DNA, 119 bp, homo sapiens
ctccagatttagcatcctgcagagccaccgagaaaataaaaaagctgggcttggaggctgcctagagggcaggtgggtgaagggtcaccacagacacttagaacggtaagaaaccatga

SEQ ID NO: 12545 - DNA, 119 bp, homo sapiens
aggctgcctagagggacaggtgggtgaagggtcaccacagacacttagaacggtaagaaaccatgagcatcacaattctgtagaattcctctagggaacttggagaggtgtgcctaagg

SEQ ID NO: 12546 - DNA, 119 bp, homo sapiens
aagaaaccatgagcactcacaattctgtagaattcctctagggaacttggagaggtgtgcctaaggtgagctgagctgaaggaatgtgggcccaggtttcttaataaaatgatttactc

SEQ ID NO: 12547 - DNA, 119 bp, homo sapiens
ggcgcggagctgggtgcgcgccgagcctctgcctcccgccgcctcctcgccctccattcctcgctcccctcttctcccggccacaccgccactgctgccgcctccctgggaacagtagc

SEQ ID NO: 12548 - DNA, 119 bp, homo sapiens
cctcgctccccgtcttctcccggccacaccgccactgctgccgcctccctgggaacagtagccgggggaggggactggcgcggtcagagcctgcgaggaggtgcggggcgccggggcgt

SEQ ID NO: 12549 - DNA, 119 bp, homo sapiens
tagccgggggagggggactggcgcggtcagagcctgcgaggaggtgcggggcgccggggcgtaggggaggcgccgggccctgcccgagatcagataacagccggcgggggagggggtgg

SEQ ID NO: 12550 - DNA, 119 bp, homo sapiens
gcgtaggggagcgcgccgggccctgcccgagatcagataacagccggcgggggagggggtgggccggcctgctcacagccggaccgagggaccgacgccagccgccccggcccaagcga

SEQ ID NO: 12551 - DNA, 119 bp, homo sapiens
gtgggccggccgtgctcacagccggaccgagggaccgacgccagccgccccggcccaagcgagcgcccacggccgggggcgccgtccaggcgcgcgcccccgacccgtggctggaccag

SEQ ID NO: 12552 - DNA, 119 bp, homo sapiens
gcgagcgcccagcggccgggggcgccgtccaggcgcgcgcccccgacccgtggctggaccagggcgatcgctttgcagagaagacgcgcccctcggcatggagcgcccccgggagctgc

SEQ ID NO: 12553 - DNA, 119 bp, homo sapiens
ccagggcgatccgctttgcagagaagacgcgcccctcggcatggagcgcccccgggagctgccctgaggggtggcggcagcggcggcgatgcagccagcgcggcagctgccggggccag

SEQ ID NO: 12554 - DNA, 119 bp, homo sapiens
ctgccctgaggcggtggcggcagcggcggcgatgcagccagcgcggcagctgccggggccaggaacggcgcccggagcttggaggacgccgagcgcgccgcgcccgggccactgaccga

SEQ ID NO: 12555 - DNA, 119 bp, homo sapiens
gatgttctagtgactggatcctttccagttggtgcctgggaaatggcagccactactaattcagccttgagacagtaccgtgcccactcagcaccattacatagaagatagaactcaag

SEQ ID NO: 12556 - DNA, 119 bp, homo sapiens
tgttctagtgactggatcctttccagttggtgcctgggaaatggcagccactactaattcagccttgaaacagtaccgtgcccactcagcaccattacatagaagatagaactcaagag

SEQ ID NO: 12557 - DNA, 119 bp, homo sapiens
gagccgccctgcctggagctagcctgggggcgagccagggtcccccaacccccgggatgaccgcggccaccgggccaacccctacagcatcgtgtcatcggaggaggacgggctgcacc

SEQ ID NO: 12558 - DNA, 119 bp, homo sapiens
accgcggccagccgggccaacccctacagcatcgtgtcatcggaggaggacgggctgcacctggtcacctgtcgggcgccaacggcttcggcaacggcaaggtgcacacgcggcgcagg

SEQ ID NO: 12559 - DNA, 119 bp, homo sapiens
cctggtcaccatgtcgggcgccaacggcttcggcaacggcaaggtgcacacgcggcgcaggtgccgcaacgcttcgtcaagaagaatggccagtgcaacattgagttcgccaacatgga

SEQ ID NO: 12560 - DNA, 119 bp, homo sapiens
ggtgccgcaaccgcttcgtcaagaagaatggccagtgcaacattgagttcgccaacatggacgagaagtacagcgctacctggctgacatgttcaccacctgtgtggacatccgctggc

SEQ ID NO: 12561 - DNA, 119 bp, homo sapiens
gacgagaagtcacagcgctacctggctgacatgttcaccacctgtgtggacatccgctggcggtacatgtgctcatcttctcgctggccttccttgcctcctggctgctgttcggcatc

SEQ ID NO: 12562 - DNA, 119 bp, homo sapiens
gcggtacatgctgctcatcttctcgctggccttccttgcctcctggctgctgttcggcatcatcttctggtcatcgcggtggcacacggtgacctggagccggctgagggccggggccg

SEQ ID NO: 12563 - DNA, 119 bp, homo sapiens
tcatcttctgggtcatcgcggtggcacacggtgacctggagccggctgagggccggggccgcacacccttgtgatgcaggtgcacggcttcatggcggccttcctcttctccatcgaga

SEQ ID NO: 12564 - DNA, 119 bp, homo sapiens
cgcacaccctgtgtgatgcaggtgcacggcttcatggcggccttcctcttctccatcgagacgcagaccccatcggctacgggctgcgctgtgtgacggaggagtgcccggtggccgtc

SEQ ID NO: 12565 - DNA, 119 bp, homo sapiens
gacgcagaccaccatcggctacgggctgcgctgtgtgacggaggagtgcccggtggccgtcttcatggtgtggcccagtccatcgtgggctgcatcatcgactccttcatgattggtgc

SEQ ID NO: 12566 - DNA, 119 bp, homo sapiens
tcttcatggtggtggcccagtccatcgtgggctgcatcatcgactccttcatgattggtgccatcatggcaagatggcaaggcccaagaagcgggcacagacgctgctgttcagccaca

SEQ ID NO: 12567 - DNA, 119 bp, homo sapiens
gccatcatggccaagatggcaaggcccaagaagcgggcacagacgctgctgttcagccacaacgccgtgtggccctgcgtgacggcaagctctgcctcatgtggcgtgtgggtaacctg

SEQ ID NO: 12568 - DNA, 119 bp, homo sapiens
caacgccgtggtggccctgcgtgacggcaagctctgcctcatgtggcgtgtgggtaacctgcgcaagagcacattgtggaggcccatgtgcgcgcgcagctcatcaagccgcgggtcac

SEQ ID NO: 12569 - DNA, 119 bp, homo sapiens
tgcgcaagagccacattgtggaggcccatgtgcgcgcgcagctcatcaagccgcgggtcaccgaggaggcgagtacatcccgctggaccagatcgacatcgatgtgggcttcgacaagg

SEQ ID NO: 12570 - DNA, 119 bp, homo sapiens
accgaggagggcgagtacatcccgctggaccagatcgacatcgatgtgggcttcgacaagggcctggacgcatctttctggtgtcgcccatcaccatcttgcatgagattgacgaggcc

SEQ ID NO: 12571 - DNA, 119 bp, homo sapiens
gggcctggaccgcatctttctggtgtcgcccatcaccatcttgcatgagattgacgaggccagcccgctttcggcatcagccggcaggacctggagacggacgactttgagatcgtggt

SEQ ID NO: 12572 - DNA, 119 bp, homo sapiens
ccagcccgctcttcggcatcagccggcaggacctggagacggacgactttgagatcgtggtcatcctggaggcatggtggaggccacagccatgaccacccaggcccgcagctcctacc

SEQ ID NO: 12573 - DNA, 119 bp, homo sapiens
gtcatcctggaaggcatggtggaggccacagccatgaccacccaggcccgcagctcctacctggccaatagatcctgtggggtcaccgctttgagcccgtgctcttcgaggagaagaac

SEQ ID NO: 12574 - DNA, 119 bp, homo sapiens
cctggccaatgagatcctgtggggtcaccgctttgagcccgtgctcttcgaggagaagaaccagtacaaattgactactcgcacttccacaagacctatgaggtgccctctacgccccg

SEQ ID NO: 12575 - DNA, 119 bp, homo sapiens
accagtacaagattgactactcgcacttccacaagacctatgaggtgccctctacgccccgctgcagtggaaggatctggtagagaacaagttcctgctgcccagcgccaactccttct

SEQ ID NO: 12576 - DNA, 119 bp, homo sapiens
cgctgcagtgcgaaggatctggtagagaacaagttcctgctgcccagcgccaactccttctgctacgagacgagctggccttcctgagccgtgacgaggaggatgaggcggacggagac

SEQ ID NO: 12577 - DNA, 119 bp, homo sapiens
ctgctacgagaacgagctggccttcctgagccgtgacgaggaggatgaggcggacggagaccaggacggcgaagccgggacggcctcagcccccaggccaggcatgactttgacagact

SEQ ID NO: 12578 - DNA, 119 bp, homo sapiens
accaggacggccgaagccgggacggcctcagcccccaggccaggcatgactttgacagactccaggctgcggcggggtcctggagcagcggccctacagacgggagtcagagatctgag

SEQ ID NO: 12579 - DNA, 119 bp, homo sapiens
ctccaggctggcggcggggtcctggagcagcggccctacagacgggagtcagagatctgagccaaccttgccgacatgcagcatccacccccggctggggagaggccccgcggtcgctc

SEQ ID NO: 12580 - DNA, 119 bp, homo sapiens
agccaaccttggccgacatgcagcatccacccccggctggggagaggccccgcggtcgctcaggggcccgggtttgagcagaacgggcccagtgccctgggttgcagactcagtagcgt

SEQ ID NO: 12581 - DNA, 119 bp, homo sapiens
tcaggggccccgggtttgagcagaacgggcccagtgccctgggttgcagactcagtagcgttttagtcgtttatgtttctttgcaacggcctcagaagtttggccggagagggggcagc

SEQ ID NO: 12582 - DNA, 119 bp, homo sapiens
gttttagtcgttttatgtttctttgcaacggcctcagaagtttggccggagagggggcagccagagcggagcccccggcctcagaggctatcacaggctcagggcaaagaagtggcctc

SEQ ID NO: 12583 - DNA, 119 bp, homo sapiens
gccagagcggcagcccccggcctcagaggctatcacaggctcagggcaaagaagtggcctcctggggggcaggccacgagggccagggcttctgcctgaagatggagctgcagcctgcg

SEQ ID NO: 12584 - DNA, 119 bp, homo sapiens
tcctggggggccaggccacgagggccagggcttctgcctgaagatggagctgcagcctgcggggaagcactcagctcgatggtgggcccagcctctgctgtccaaggctggctagctgc

SEQ ID NO: 12585 - DNA, 119 bp, homo sapiens
cggggaagcagctcagctcgatggtgggcccagcctctgctgtccaaggctggctagctgcggtgctcctgctggtttttaacttggggagaaacaccgggtttcagctttcttgacct

SEQ ID NO: 12586 - DNA, 119 bp, homo sapiens
gcggtgctccttgctggtttttaacttggggagaaacaccgggtttcagctttcttgaccttagcttggtgagactgtttacaaaaaaaaaaaattaccatgcaattgaaaaaattttt

SEQ ID NO: 12587 - DNA, 119 bp, homo sapiens
cttagcttgggtgagactgtttacaaaaaaaaaaaattaccatgcaattgaaaaaatttttttttaattacagggggcaaaaagaacaattagaattccatgggtctgccaggatgcag

SEQ ID NO: 12588 - DNA, 119 bp, homo sapiens
ttttttaattcacagggggcaaaaagaacaattagaattccatgggtctgccaggatgcagcagctggcgaaggctccagagggttccccgaggtgggactggcctctccccgtgtgtg

SEQ ID NO: 12589 - DNA, 119 bp, homo sapiens
agcagctggctgaaggctccagagggttccccgaggtgggactggcctctccccgtgtgtgtgggcacccagtccctgggcaagcagggtgctctgggaccgcacttcatcgagctcac

SEQ ID NO: 12590 - DNA, 119 bp, homo sapiens
tgtgggcaccacagtccctgggcaagcagggtgctctgggaccgcacttcatcgagctcacgagccagcaggctctgtttgtgatagaaaaatcaagaccatgttaatgatcgtaataa

SEQ ID NO: 12591 - DNA, 119 bp, homo sapiens
acgagccagctaggctctgtttgtgatagaaaaatcaagaccatgttaatgatcgtaataaaagctttcactgtcgttggggtggtgggtggggctgggaagaaactggtttgagcttt

SEQ ID NO: 12592 - DNA, 119 bp, homo sapiens
aaaagctttctactgtcgttggggtggtgggtggggctgggaagaaactggtttgagcttttagagtttcctttgtaccttagagatgtgtctcagggccaggcatgggacctgccatc

SEQ ID NO: 12593 - DNA, 119 bp, homo sapiens
tttagagtttgcctttgtaccttagagatgtgtctcagggccaggcatgggacctgccatcgagggttctccccgcaccctcgattttcctgttttgcttctctctccatttctgtcca

SEQ ID NO: 12594 - DNA, 119 bp, homo sapiens
tcgagggttcctccccgcaccctcgattttcctgttttgcttctctctccatttctgtccaggcctccgccaattccacagtgaggggtggttaggagctataggccgggatggctcct

SEQ ID NO: 12595 - DNA, 119 bp, homo sapiens
caggcctccgcccaattccacagtgaggggtggttaggagctataggccgggatggctccttgggaaggaagtcgggatcccaggctaggaggaagctggcagccccgtccccactggg

SEQ ID NO: 12596 - DNA, 119 bp, homo sapiens
cttgggaagggaagtcgggatcccaggctaggaggaagctggcagccccgtccccactgggcccacagttgagtcgtgccttagagactccgggttgtcctgttctttctgggcttgct

SEQ ID NO: 12597 - DNA, 119 bp, homo sapiens
ggcccacagtgtgagtcgtgccttagagactccgggttgtcctgttctttctgggcttgctcatctcccccaaccctgtcccaccccacccctcccatacctccactgctgaagttcct

SEQ ID NO: 12598 - DNA, 119 bp, homo sapiens
ctcatctccccccaaccctgtcccaccccacccctcccatacctccactgctgaagttcctccagccccctgtctgccttgtgaaggtggcaggggccaggtctgcctgacataggacc

SEQ ID NO: 12599 - DNA, 119 bp, homo sapiens
ctccagcccctctgtctgccttgtgaaggtggcaggggccaggtctgcctgacataggaccacatcctgccctccctcacctggagcagcacagcagagttcaggcagggcacagccag

SEQ ID NO: 12600 - DNA, 119 bp, homo sapiens
ccacatcctgtccctccctcacctggagcagcacagcagagttcaggcagggcacagccaggccctggtagcgctgaatggcagaggaaagatcttaggaaaggagaggaatcgccacc

SEQ ID NO: 12601 - DNA, 119 bp, homo sapiens
aggccctggtcagcgctgaatggcagaggaaagatcttaggaaaggagaggaatcgccaccccctcctgcaactgggatgactggggagggccacgctcattcaaagctgaatcagaaa

SEQ ID NO: 12602 - DNA, 119 bp, homo sapiens
ccccctcctgccaactgggatgactggggagggccacgctcattcaaagctgaatcagaaaccagccgtgaacagaattcctgccgagtcttccagggccgctcctccaccaccctccc

SEQ ID NO: 12603 - DNA, 119 bp, homo sapiens
aaccagccgtggaacagaattcctgccgagtcttccagggccgctcctccaccaccctcccccaggttgggcactatggcaccctcatcaggaagaggtttggggtccccttgttgtca

SEQ ID NO: 12604 - DNA, 119 bp, homo sapiens
ccccaggttgaggcactatggcaccctcatcaggaagaggtttggggtccccttgttgtcactgctggcctgccaccccatcttgttcatggcagctggttgggtcaggtccatggtag

SEQ ID NO: 12605 - DNA, 119 bp, homo sapiens
cactgctggctctgccaccccatcttgttcatggcagctggttgggtcaggtccatggtagagccaggccttcccagggctgcggagaaaacctgctctcttctagtcgggcttctcca

SEQ ID NO: 12606 - DNA, 119 bp, homo sapiens
agagccaggcccttcccagggctgcggagaaaacctgctctcttctagtcgggcttctccagaagccagaatcagaaaggatgtgtctcctgctccaactctgcccccgagacagctca

SEQ ID NO: 12607 - DNA, 119 bp, homo sapiens
cagaagccagtaatcagaaaggatgtgtctcctgctccaactctgcccccgagacagctcagagccagaggcaccccgagacagctcagagccagaaggcaccccgagacagctcagag

SEQ ID NO: 12608 - DNA, 119 bp, homo sapiens
cagagccagaaggcaccccgagacagctcagagccagaaggcaccccgagacagctcagagccagaaggaccgaggactctggcccaagtggggaagctgaggcagagagcagaggggg

SEQ ID NO: 12609 - DNA, 119 bp, homo sapiens
agccagaaggcaccgaggactctggcccaagtggggaagctgaggcagagagcagagggggtcatgcaggagtgggtggggtgcaggagacagagaggggctgggggcgtggggtgggg

SEQ ID NO: 12610 - DNA, 119 bp, homo sapiens
ggtcatgcagtgagtgggtggggtgcaggagacagagaggggctgggggcgtggggtgggggtgtctgctcttccctccacctcctcccctccttagcagctgaagactcagccctgag

SEQ ID NO: 12611 - DNA, 119 bp, homo sapiens
gggtgtctgcctcttccctccacctcctcccctccttagcagctgaagactcagccctgaggtctggggaatggaagtcaagacacccgacccctacatcctggggtaggcccgactca

SEQ ID NO: 12612 - DNA, 119 bp, homo sapiens
aggtctggggcaatggaagtcaagacacccgacccctacatcctggggtaggcccgactcagcatcctgcccagcttcagccccacactcatttctggcatagaagattccgccgaggc

SEQ ID NO: 12613 - DNA, 119 bp, homo sapiens
cagcatcctgtcccagcttcagccccacactcatttctggcatagaagattccgccgaggcagctctttctctcggggtctgccaggggtgcctcagctggttcctgctcccaggccta

SEQ ID NO: 12614 - DNA, 119 bp, homo sapiens
gcagctctttcctctcggggtctgccaggggtgcctcagctggttcctgctcccaggcctagccccgaaccttaggggccttctcagccttagccctgggtactggggtgaagttggca

SEQ ID NO: 12615 - DNA, 119 bp, homo sapiens
tagccccgaagccttaggggccttctcagccttagccctgggtactggggtgaagttggcaggggagagttgacacttcgcctccctgatggccatgctgagggacagtggtgaccctg

SEQ ID NO: 12616 - DNA, 119 bp, homo sapiens
caggggagagcttgacacttcgcctccctgatggccatgctgagggacagtggtgaccctggtcacttgtgctggtgtaggggcctgtgcccttccagggccagtgagacagccttcta

SEQ ID NO: 12617 - DNA, 119 bp, homo sapiens
tggtcacttggtgctggtgtaggggcctgtgcccttccagggccagtgagacagccttctactcccccgcccagagctgagtccgaggaccccaggcccacctcctggccctcttggag

SEQ ID NO: 12618 - DNA, 119 bp, homo sapiens
tactcccccgacccagagctgagtccgaggaccccaggcccacctcctggccctcttggaggtctgtgccttacctcccagcccccaccctgcgggagagcagccccagcgcctcatct

SEQ ID NO: 12619 - DNA, 119 bp, homo sapiens
gcttgtgctaaagaccaaaatagtctccctctttagtgcacttgaagcgggagggcggatgggatgagcaggagcgaggaagacttggcccctggggagtgtgtgtgtggaggcgtgtg

SEQ ID NO: 12620 - DNA, 119 bp, homo sapiens
ggagggcggatgggatgagccaggagcgaggaagacttggcccctggggagtgtgtgtgtggaggcgtggcctgtgtgagcctgcatgcatacatgtgtggtgcacacatgcacactcg

SEQ ID NO: 12621 - DNA, 119 bp, homo sapiens
agtgtgtgtgtggaggcgtgtgcctgtgtgagcctgcatgcatacatgtgtggtgcacacatgcacactggctcttcatgtgtatgactgggttagtaatacagatacgtgatctatac

SEQ ID NO: 12622 - DNA, 119 bp, homo sapiens
caggcggttatgtgtctgtctacccccaggtgtttccgtgtacaagtttcctgtgagggagggcacccaccatcaggttgggcactggcacaggtgaaccccacagtccccgaccctct

SEQ ID NO: 12623 - DNA, 119 bp, homo sapiens
agggcacccacccatcaggttgggcactggcacaggtgaaccccacagtccccgaccctctgccctgatatgcacgtctgctcctgagtggagcttgtgttccaggatgagacatctgg

SEQ ID NO: 12624 - DNA, 119 bp, homo sapiens
ctgccctgattatgcacgtctgctcctgagtggagcttgtgttccaggatgagacatctggaggtgagctgtgcgtccggctcgtgtgtaggaggctgtgtgtgtgcccatgtgaaacc

SEQ ID NO: 12625 - DNA, 119 bp, homo sapiens
ggaggtgagcgtgtgcgtccggctcgtgtgtaggaggctgtgtgtgtgcccatgtgaaaccgtgtacttagtgtgtgtctgtgtgcagcctatgcctgctgctcagagcacggtggcca

SEQ ID NO: 12626 - DNA, 119 bp, homo sapiens
ccgtgtacttgagtgtgtgtctgtgtgcagcctatgcctgctgctcagagcacggtggccaccccctgacctctgctggtgctgtgctgcgtggtccccacccagagggtcctgggggg

SEQ ID NO: 12627 - DNA, 119 bp, homo sapiens
caccccctgagcctctgctggtgctgtgctgcgtggtccccacccagagggtcctggggggcggggagggccaccgttgggaggcccctgtacggggtgtctgccctgcgtgagggcat

SEQ ID NO: 12628 - DNA, 119 bp, homo sapiens
ggcggggaggagccaccgttgggaggcccctgtacggggtgtctgccctgcgtgagggcatagaatgtcaattattttaaatggtgaaactggagagttttcatgttattttcaataca

SEQ ID NO: 12629 - DNA, 119 bp, homo sapiens
atagaatgtcaaattattttaaatggtgaaactggagagttttcatgttattttcaatacatagcagtactaaagacgtaggcgatgagactagaccacattaaatgcattttgatctc

SEQ ID NO: 12630 - DNA, 119 bp, homo sapiens
gtgctgccggccgccaccatgaccgagggcgcacgggccgccgacgaggtccgggtgcccctgggcgcgcgccccctggccctgcggcgttggtgggggcgtccccggagagccccggg

SEQ ID NO: 12631 - DNA, 119 bp, homo sapiens
tccgggtgcccctgggcgcgccgccccctggccctgcggcgttggtgggggcgtccccggagagccccgggcgccgggacgcgaggcggagcgggggtccgagctcggcgtgtcaccct

SEQ ID NO: 12632 - DNA, 119 bp, homo sapiens
ggcgtccccggagagccccggggcgccgggacgcgaggcggagcgggggtccgagctcggcgtgtcacctccgagagcccggcggccgagcgcggcgcggagctgggtgccgacgagga

SEQ ID NO: 12633 - DNA, 119 bp, homo sapiens
tccgagctcggcgtgtcaccctccgagagcccggcggccgagcgcggcgcggagctgggtgccgacgagagcagcgcgtcccgtacccggccttggcggccacggtcttcttctgcctc

SEQ ID NO: 12634 - DNA, 119 bp, homo sapiens
cggagctgggtgccgacgaggagcagcgcgtcccgtacccggccttggcggccacggtcttcttctgcccggtcagaccacgcggccgcgcagctggtgcctccggctggtctgcaacc

SEQ ID NO: 12635 - DNA, 119 bp, homo sapiens
gcctttgacgccttcattttcgccttttttgcggtggagatggtcatcaagatggtggccttggggctgtcgggcagaagtgttacctgggtgacacgtggaacaggctggatttcttc

SEQ ID NO: 12636 - DNA, 119 bp, homo sapiens
cattttcgccttttttgcggtggagatggtcatcaagatggtggccttggggctgttcgggcagaagtgtacctgggtgacacgtggaacaggctggatttcttcatcgtcgtggcggg

SEQ ID NO: 12637 - DNA, 119 bp, homo sapiens
tgctcgggaacgtccttctgctgtgcttcttcgtcttcttcattttcggcatcgttggcgtccagctctggctggcctcctgcggaaccgctgcttcctggacagtgcctttgtcaggt

SEQ ID NO: 12638 - DNA, 119 bp, homo sapiens
gaacaacaacctgaccttcctgcggccgtactaccagacggaggagggcgaggagaacccgttcatctgtcctcacgccgagacaacggcatgcagaagtgctcgcacatccccggccg

SEQ ID NO: 12639 - DNA, 119 bp, homo sapiens
gaggagaacccgttcatctgctcctcacgccgagacaacggcatgcagaagtgctcgcacatccccggcgccgcgagctgcgcatgccctgcaccctgggctgggaggcctacacgcag

SEQ ID NO: 12640 - DNA, 119 bp, homo sapiens
agtgctcgcacatccccggccgccgcgagctgcgcatgccctgcaccctgggctgggaggcctacacgcgccgcaggccgagggggtgggcgctgcacgcaacgcctgcatcaactgga

SEQ ID NO: 12641 - DNA, 119 bp, homo sapiens
gggctgggaggcctacacgcagccgcaggccgagggggtgggcgctgcacgcaacgcctgcatcaactgaaccagtactacaacgtgtgccgctcgggtgactccaacccccacaacgg

SEQ ID NO: 12642 - DNA, 119 bp, homo sapiens
cgcaacgcctgcatcaactggaaccagtactacaacgtgtgccgctcgggtgactccaacccccacaacgtgccatcaacttcgacaacatcggctacgcctggattgccatcttccag

SEQ ID NO: 12643 - DNA, 119 bp, homo sapiens
gtgggctccttcttcatgatcaacctgtgcctggtggtgattgccacgcagttctcggagacgaagcaggggagagtcagctgatgcgggagcagcgggcacgccacctgtccaacgac

SEQ ID NO: 12644 - DNA, 119 bp, homo sapiens
cggagacgaagcagcgggagagtcagctgatgcgggagcagcgggcacgccacctgtccaacgacagcagctggccagcttctccgagcctggcagctgctacgaagagctgctgaagt

SEQ ID NO: 12645 - DNA, 119 bp, homo sapiens
gtccaacgacagcacgctggccagcttctccgagcctggcagctgctacgaagagctgctgaagtacgtggccacatattccgcaaggtcaagcggcgcagcttgcgcctctacgcccg

SEQ ID NO: 12646 - DNA, 119 bp, homo sapiens
ctgctgaagtacgtgggccacatattccgcaaggtcaagcggcgcagcttgcgcctctacgcccgctggagagccgctggcgcaagaaggtggaccccagtgctgtgcaaggccagggt

SEQ ID NO: 12647 - DNA, 119 bp, homo sapiens
tctacgcccgctggcagagccgctggcgcaagaaggtggaccccagtgctgtgcaaggccagggtcccggcaccgccagcgccgggcaggcaggcacacagcctcggtgcaccacctgg

SEQ ID NO: 12648 - DNA, 119 bp, homo sapiens
tttcagccatggcagcccccgcaggcccggccccgagccaggcgcctgcgacaccaggctggtccgagcggcgcgcccccctcgccaccttccccaggccgcggaccccccgacgcaga

SEQ ID NO: 12649 - DNA, 119 bp, homo sapiens
ctggtccgagctggcgcgcccccctcgccaccttccccaggccgcggaccccccgacgcagagtctgtgacagcatctaccatgccgactgccacatagaggggccgcaggagagggcc

SEQ ID NO: 12650 - DNA, 119 bp, homo sapiens
cagagtctgtgcacagcatctaccatgccgactgccacatagaggggccgcaggagagggcccgggtggacatgccgcagccactgccgctgccagcctcagactggccacagggctgg

SEQ ID NO: 12651 - DNA, 119 bp, homo sapiens
ggcccgggtggcacatgccgcagccactgccgctgccagcctcagactggccacagggctgggcaccataactaccccacgatcctgccctcaggggtgggcagcggcaaaggcagcac

SEQ ID NO: 12652 - DNA, 119 bp, homo sapiens
ctgggcaccatgaactaccccacgatcctgccctcaggggtgggcagcggcaaaggcagcaccagccccgacccaaggggaagtgggccggtggaccgccaggcaccggggggcacggc

SEQ ID NO: 12653 - DNA, 119 bp, homo sapiens
gcaccagccccggacccaaggggaagtgggccggtggaccgccaggcaccggggggcacggcccgttgacttgaacagccctgatccctacgagaagatcccgcatgtggtcggggagc

SEQ ID NO: 12654 - DNA, 119 bp, homo sapiens
gactgggccaggcccctggccatctgtcgggcctcagtgtgccctgccccctgcccagccccccagcggcacactgacctgtgagctgaagagctgcccgtactgcacccgtgccctgg

SEQ ID NO: 12655 - DNA, 119 bp, homo sapiens
ccagccccccagcgggcacactgacctgtgagctgaagagctgcccgtactgcacccgtgccctggaggcccggagggtgagctcagcggctcggaaagtggagactcagatggccgtg

SEQ ID NO: 12656 - DNA, 119 bp, homo sapiens
cccgtgccctggaggacccggagggtgagctcagcggctcggaaagtggagactcagatggccgtggcgctatgaattcacgcaggacgtccggcacggtgaccgctgggaccccacgc

SEQ ID NO: 12657 - DNA, 119 bp, homo sapiens
cagatggccgtggcgtctatgaattcacgcaggacgtccggcacggtgaccgctgggaccccacgcgacaccccgtgcgacggacacaccaggcccaggcccaggcagcccccagcggc

SEQ ID NO: 12658 - DNA, 119 bp, homo sapiens
gggaccccacgcgaccaccccgtgcgacggacacaccaggcccaggcccaggcagcccccagcggcgggacagcagagggcagccccgggcgagccaggctggatgggccgcctctggg

SEQ ID NO: 12659 - DNA, 119 bp, homo sapiens
gcccccagcggcgggcacagcagagggcagccccgggcgagccaggctggatgggccgcctctgggttacttcagcggcaagctgcgccgcatcgtggacagcaagtacttcagccgtg

SEQ ID NO: 12660 - DNA, 119 bp, homo sapiens
gccgcctctgggttaccttcagcggcaagctgcgccgcatcgtggacagcaagtacttcagccgtggcacatgatggccatccttgtcaacacgctgagcatgggcgtggagtaccatg

SEQ ID NO: 12661 - DNA, 119 bp, homo sapiens
cccgaggagctgactaatgctctggagatcagcaacatcgtgttcaccagcatgtttgccctggagatgtgctgaagctgctggcctgcggccctctgggctacatccggaacccgtac

SEQ ID NO: 12662 - DNA, 119 bp, homo sapiens
caacatcgtgttcaccagcatgtttgccctggagatgctgctgaagctgctggcctgcggccctctgggtacatccggaacccgtacaacatcttcgacggcatcatcgtggtcatcag

SEQ ID NO: 12663 - DNA, 119 bp, homo sapiens
cgtctgggagatcgtggggcaggcggacggtggcttgtctgtgctgcgcaccttccggctgctgcgtgtctgaagctggtgcgctttctgccagccctgcggcgccagctcgtggtgct

SEQ ID NO: 12664 - DNA, 119 bp, homo sapiens
cttgtctgtgctgcgcaccttccggctgctgcgtgtgctgaagctggtgcgctttctgccagccctgcgcgccagctcgtggtgctggtgaagaccatggacaacgtggctaccttctg

SEQ ID NO: 12665 - DNA, 119 bp, homo sapiens
tgtgctgaagctggtgcgctttctgccagccctgcggcgccagctcgtggtgctggtgaagaccatggaaacgtggctaccttctgcacgctgctcatgctcttcattttcatcttcag

SEQ ID NO: 12666 - DNA, 119 bp, homo sapiens
atcctgacccaggaggactggaacgtggtcctgtacaacggcatggcctccacctcctcctgggccgcctctacttcgtggccctcatgaccttcggcaactatgtgctcttcaacctg

SEQ ID NO: 12667 - DNA, 119 bp, homo sapiens
aacggcatggcctccacctcctcctgggccgccctctacttcgtggccctcatgaccttcggcaactattgctcttcaacctgctggtggccatcctcgtggagggcttccaggcggag

SEQ ID NO: 12668 - DNA, 119 bp, homo sapiens
agctgaagatgtgttccctggccgtgacccccaacgggcacctggagggacgaggcagcctgtcccctccctcatcatgtgcacagctgccacgcccatgcctacccccaagagctcac

SEQ ID NO: 12669 - DNA, 119 bp, homo sapiens
gagggacgaggcagcctgtcccctcccctcatcatgtgcacagctgccacgcccatgcctacccccaaggctcaccattcctggatgcagcccccagcctcccagactctcggcgtggc

SEQ ID NO: 12670 - DNA, 119 bp, homo sapiens
tgccacgcccatgcctacccccaagagctcaccattcctggatgcagcccccagcctcccagactctcgcgtggcagcagcagctccggggacccgccactgggagaccagaagcctcc

SEQ ID NO: 12671 - DNA, 119 bp, homo sapiens
gccagcctccgaagttctccctgtgccccctggggccccagtggcgcctggagcagccggcgctccagcggagcagcctgggccgtgcccccagcctcaagcgccgcggccagtgtggg

SEQ ID NO: 12672 - DNA, 119 bp, homo sapiens
gcagccggcgctccagctggagcagcctgggccgtgcccccagcctcaagcgccgcggccagtgtggggacgtgagtccctgctgtctggcgagggcaagggcagcaccgacgacgaag

SEQ ID NO: 12673 - DNA, 119 bp, homo sapiens
ccgcggccagtgtggggaacgtgagtccctgctgtctggcgagggcaagggcagcaccgacgacgaagcgaggacggcagggccgcgcccgggccccgtgccaccccactgcggcgggc

SEQ ID NO: 12674 - DNA, 119 bp, homo sapiens
agcaccgacgacgaagctgaggacggcagggccgcgcccgggccccgtgccaccccactgcggcgggccagtccctggacccacggcccctgcggccggccgccctcccgcctaccaag

SEQ ID NO: 12675 - DNA, 119 bp, homo sapiens
ccccactgcggcgggccgagtccctggacccacggcccctgcggccggccgccctcccgcctaccaagtccgcgatcgcgacgggcaggtggtggccctgcccagcgacttcttcctgc

SEQ ID NO: 12676 - DNA, 119 bp, homo sapiens
cctcccgcctaccaagtgccgcgatcgcgacgggcaggtggtggccctgcccagcgacttcttcctgcgatcgacagccaccgtgaggatgcagccgagcttgacgacgactcggagga

SEQ ID NO: 12677 - DNA, 119 bp, homo sapiens
gttccgcgtctcctgccagaaggtcatcacacacaagatgtttgatcacgtggtcctcgtcttcatcttctcaactgcgtcaccatcgccctggagaggcctgacattgatcccggcag

SEQ ID NO: 12678 - DNA, 119 bp, homo sapiens
cgcgtctcctgccagaaggtcatcacacacaagatgtttgatcacgtggtcctcgtcttcatcttcctcactgcgtcaccatcgccctggagaggcctgacattgatcccggcagcacc

SEQ ID NO: 12679 - DNA, 119 bp, homo sapiens
gtggtggccctggggctgctgtccggcgagcacgcctacctgcagagcagctggaacctgctggatgggtgctggtgctggtgtccctggtggacattgtcgtggccatggcctcggct

SEQ ID NO: 12680 - DNA, 119 bp, homo sapiens
cgcctacctgcagagcagctggaacctgctggatgggctgctggtgctggtgtccctggtggacattgtgtggccatggcctcggctggtggcgccaagatcctgggtgttctgcgcgt

SEQ ID NO: 12681 - DNA, 119 bp, homo sapiens
atgggctgctggtgctggtgtccctggtggacattgtcgtggccatggcctcggctggtggcgccaagacctgggtgttctgcgcgtgctgcgtctgctgcggaccctgcggcctctga

SEQ ID NO: 12682 - DNA, 119 bp, homo sapiens
ggtcatcagccgggccccgggcctcaagctggtggtggagacgctgatatcatcactcaggcccattggaacatcgtcctcatctgctgcgccttcttcatcatttttggcattttggg

SEQ ID NO: 12683 - DNA, 119 bp, homo sapiens
agccgggccccgggcctcaagctggtggtggagacgctgatatcatcactcaggcccattgggaacatctcctcatctgctgcgccttcttcatcatttttggcattttgggtgtgcag

SEQ ID NO: 12684 - DNA, 119 bp, homo sapiens
ctcttcaaagggaagttctactactgcgagggccccgacaccaggaacatctccaccaaggcacagtgcgggccgcccactaccgctgggtgcgacgcaagtacaacttcgacaacctg

SEQ ID NO: 12685 - DNA, 119 bp, homo sapiens
aaagggaagttctactactgcgagggccccgacaccaggaacatctccaccaaggcacagtgccgggcccccactaccgctgggtgcgacgcaagtacaacttcgacaacctgggccag

SEQ ID NO: 12686 - DNA, 119 bp, homo sapiens
cctgtgcagaaccacaacccctggatgctgctgtacttcatctccttcctgctcatcgtcagcttcttctgctcaacatgttcgtgggcgtcgtggtcgagaacttccacaagtgccgg

SEQ ID NO: 12687 - DNA, 119 bp, homo sapiens
ttcatctccttcctgctcatcgtcagcttcttcgtgctcaacatgttcgtgggcgtcgtggtcgagaactccacaagtgccggcagcaccaggaggcggaggaggcgcggcggcgagag

SEQ ID NO: 12688 - DNA, 119 bp, homo sapiens
ctcaacatgttcgtgggcgtcgtggtcgagaacttccacaagtgccggcagcaccaggaggcggaggagcgcggcggcgagaggagaagcggctgcggcgcctagagaggaggcgcagg

SEQ ID NO: 12689 - DNA, 119 bp, homo sapiens
aggcccagcgccggccctactatgccgactactcgcccacgcgccgctccattcactcgctgtgcaccaccactatctcgacctcttcatcaccttcatcatctgtgtcaacgtcatca

SEQ ID NO: 12690 - DNA, 119 bp, homo sapiens
tcgcccacgcgccgctccattcactcgctgtgcaccagccactatctcgacctcttcatcaccttcatctctgtgtcaacgtcatcaccatgtccatggagcactataaccaacccaag

SEQ ID NO: 12691 - DNA, 119 bp, homo sapiens
gtggaaccagctggacctggccatcgtgctgctgtcactcatgggcatcacgctggaggagatagagatagcgccgcgctgcccatcaaccccaccatcatccgcatcatgcgcgtgct

SEQ ID NO: 12692 - DNA, 119 bp, homo sapiens
acctggccatcgtgctgctgtcactcatgggcatcacgctggaggagatagagatgagcgccgcgctgccatcaaccccaccatcatccgcatcatgcgcgtgcttcgcattgcccgtg

SEQ ID NO: 12693 - DNA, 119 bp, homo sapiens
agtgcagtgaagacaacccctgcgagggcctgagcaggcacgccaccttcagcaacttcggcatggcctcctcacgctgttccgcgtgtccacgggggacaactggaacgggatcatga

SEQ ID NO: 12694 - DNA, 119 bp, homo sapiens
tgcagtgaagacaacccctgcgagggcctgagcaggcacgccaccttcagcaacttcggcatggccttctcacgctgttccgcgtgtccacgggggacaactggaacgggatcatgaag

SEQ ID NO: 12695 - DNA, 119 bp, homo sapiens
gacacgctgcgcgagtgctcccgtgaggacaagcactgcctgagctacctgccggccctgtcgcccgtcacttcgtgaccttcgtgctggtggcccagttcgtgctggtgaacgtggtg

SEQ ID NO: 12696 - DNA, 119 bp, homo sapiens
ggccctgtcgcccgtctacttcgtgaccttcgtgctggtggcccagttcgtgctggtgaacgtggtggtgccgtgctcatgaagcacctggaggagagcaacaaggaggcacgggagga

SEQ ID NO: 12697 - DNA, 119 bp, homo sapiens
tggtgaacgtggtggtggccgtgctcatgaagcacctggaggagagcaacaaggaggcacgggaggatgggagctggacgccgagatcgagctggagatggcgcagggccccgggagtg

SEQ ID NO: 12698 - DNA, 119 bp, homo sapiens
gaggcacgggaggatgcggagctggacgccgagatcgagctggagatggcgcagggccccgggagtgcagccgggtggacgcggacaggcctcccttgccccaggagagtccgggcgcc

SEQ ID NO: 12699 - DNA, 119 bp, homo sapiens
gggccccgggagtgcacgccgggtggacgcggacaggcctcccttgccccaggagagtccgggcgccaggacgccccaaacctggttgcacgcaaggtgtccgtgtccaggatgctctc

SEQ ID NO: 12700 - DNA, 119 bp, homo sapiens
agagtccgggcgccagggacgccccaaacctggttgcacgcaaggtgtccgtgtccaggatgctctcgcgcccaacgacagctacatgttcaggcccgtggtgcctgcctcggcgcccc

SEQ ID NO: 12701 - DNA, 119 bp, homo sapiens
tccaggatgctctcgctgcccaacgacagctacatgttcaggcccgtggtgcctgcctcggcgccccaccccgcccgctgcaggaggtggagatggagacctatggggccggcaccccc

SEQ ID NO: 12702 - DNA, 119 bp, homo sapiens
gctccgttgcctctgtgcactctccgcccgcagagtcctgtgcctccctccagatcccattggctgtgtgtccccagccaggagcggcgagcccctccacgccctgtcccctcggggca

SEQ ID NO: 12703 - DNA, 119 bp, homo sapiens
gcctccctccagatcccattggctgtgtcgtccccagccaggagcggcgagcccctccacgccctgtccctcggggcacagcccgctcccccagtctcagccggctgctctgcagacag

SEQ ID NO: 12704 - DNA, 119 bp, homo sapiens
gaggctgtgcacaccgattccttggaagggaagattgacagccctagggacaccctggatcctgcagagctggtgagaaaaccccggtgaggccggtgacccaggggggctccctgcag

SEQ ID NO: 12705 - DNA, 119 bp, homo sapiens
tcctgcagagcctggtgagaaaaccccggtgaggccggtgacccaggggggctccctgcagtccccacccgctccccacggcccgccagcgtccgcactcgtaagcataccttcggaca

SEQ ID NO: 12706 - DNA, 119 bp, homo sapiens
agtccccaccacgctccccacggcccgccagcgtccgcactcgtaagcataccttcggacagcgctgcgctccagccggccggcggccccaggcggagaggaggccgaggcctcggacc

SEQ ID NO: 12707 - DNA, 119 bp, homo sapiens
cagcgctgcgtctccagccggccggcggccccaggcggagaggaggccgaggcctcggacccagccgacaggaggtcagccacatcaccagctccgcctgcccctggcagcccacagcc

SEQ ID NO: 12708 - DNA, 119 bp, homo sapiens
cccagccgacgaggaggtcagccacatcaccagctccgcctgcccctggcagcccacagccgagccccaggccccgaagcctctccggtggccggcggcgagcgggacctgcgcaggct

SEQ ID NO: 12709 - DNA, 119 bp, homo sapiens
ccgagccccatggccccgaagcctctccggtggccggcggcgagcgggacctgcgcaggctctacagcgggatgctcagggcttcctggacaagccgggccgggcagacgagcagtggc

SEQ ID NO: 12710 - DNA, 119 bp, homo sapiens
ctctacagcgtggatgctcagggcttcctggacaagccgggccgggcagacgagcagtggcggccctcgcggagctgggcagcggggagcctggggaggcgaaggcctggggccctgag

SEQ ID NO: 12711 - DNA, 119 bp, homo sapiens
gcggccctcggcggagctgggcagcggggagcctggggaggcgaaggcctggggccctgaggccgagccgctctgggtgcgcgcagaaagaagaagatgagccccccctgcatctcggt

SEQ ID NO: 12712 - DNA, 119 bp, homo sapiens
aggccgagcccgctctgggtgcgcgcagaaagaagaagatgagccccccctgcatctcggtggaacccctgcggaggacgagggctctgcgcggccctccgcggcagagggcggcagca

SEQ ID NO: 12713 - DNA, 119 bp, homo sapiens
gtggaaccccctgcggaggacgagggctctgcgcggccctccgcggcagagggcggcagcaccacactgggcgcaggaccccgtcctgtgaggccacgcctcacagggactccctggag

SEQ ID NO: 12714 - DNA, 119 bp, homo sapiens
caccacactgaggcgcaggaccccgtcctgtgaggccacgcctcacagggactccctggagcccacagaggctcaggcgccgggggggaccctgcagccaagggggagcgctggggcca

SEQ ID NO: 12715 - DNA, 119 bp, homo sapiens
agcccacagagggctcaggcgccgggggggaccctgcagccaagggggagcgctggggccaggcctcctccgggctgagcacctgaccgtccccagctttgcctttgagccgctggacc

SEQ ID NO: 12716 - DNA, 119 bp, homo sapiens
caggcctcctgccgggctgagcacctgaccgtccccagctttgcctttgagccgctggacctcggggtcccagtggagaccctttcttggacggtagccacagtgtgaccccagaatcc

SEQ ID NO: 12717 - DNA, 119 bp, homo sapiens
cctcggggtccccagtggagaccctttcttggacggtagccacagtgtgaccccagaatccagagcttctcttcaggggccatagtgcccctggaacccccagaatcagagcctcccat

SEQ ID NO: 12718 - DNA, 119 bp, homo sapiens
ccagagcttcctcttcaggggccatagtgcccctggaacccccagaatcagagcctcccatgcccgtcgtgaccccccagagaagaggcgggggctgtacctcacagtcccccagtgtc

SEQ ID NO: 12719 - DNA, 119 bp, homo sapiens
atgcccgtcggtgaccccccagagaagaggcgggggctgtacctcacagtcccccagtgtcctctggagaaccagggtccccctcagccacccctgccccagggggtggtgcagatgac

SEQ ID NO: 12720 - DNA, 119 bp, homo sapiens
tcctctggagaaaccagggtccccctcagccacccctgccccagggggtggtgcagatgaccccgtgtactcggggcttggtgccgcccacggctttggccctggggtctgggggcccc

SEQ ID NO: 12721 - DNA, 119 bp, homo sapiens
accccgtgtagctcggggcttggtgccgcccacggctttggccctggggtctgggggccccgctggggtgaggcccaggcagaaccctgcatggaccctgacttgggtcccgtcgtgag

SEQ ID NO: 12722 - DNA, 119 bp, homo sapiens
ccgctggggtggaggcccaggcagaaccctgcatggaccctgacttgggtcccgtcgtgagcagaaaggccggggaggatgacggcccaggccctggttctctgcccagcgaagcagga

SEQ ID NO: 12723 - DNA, 119 bp, homo sapiens
agcagaaaggcccggggaggatgacggcccaggccctggttctctgcccagcgaagcaggagtagctgcgggccccacgagcctccgtccgttctggttcgggtttctccgagttttgc

SEQ ID NO: 12724 - DNA, 119 bp, homo sapiens
gagtagctgccgggccccacgagcctccgtccgttctggttcgggtttctccgagttttgctaccagccaggctgtgcgggcaactgggtcagcctcccgtcaggagagaagccgcgtc

SEQ ID NO: 12725 - DNA, 119 bp, homo sapiens
gctaccagccgaggctgtgcgggcaactgggtcagcctcccgtcaggagagaagccgcgtctgtgggacaagaccgggcacccgccagagaggggaaggtaccaggttgcgtcctttca

SEQ ID NO: 12726 - DNA, 119 bp, homo sapiens
tctgtgggacgaagaccgggcacccgccagagaggggaaggtaccaggttgcgtcctttcaggccccgcttgttacaggacactcgctgggggccctgtgcccttgccggcggcaggtt

SEQ ID NO: 12727 - DNA, 119 bp, homo sapiens
caggccccgcgttgttacaggacactcgctgggggccctgtgcccttgccggcggcaggttgcagccacgcggcccaatgtcaccttcactcacagtctgagttcttgtccgcctgtca

SEQ ID NO: 12728 - DNA, 119 bp, homo sapiens
ttgcagccaccgcggcccaatgtcaccttcactcacagtctgagttcttgtccgcctgtcacgccctcacaccctccccttccagccaccaccctttccgttccgctcgggccttccca

SEQ ID NO: 12729 - DNA, 119 bp, homo sapiens
cacgccctcaccaccctccccttccagccaccaccctttccgttccgctcgggccttcccagaagcgtctgtgactctgggagaggtgacacctcactaaggggccgaccccatggagt

SEQ ID NO: 12730 - DNA, 119 bp, homo sapiens
cagaagcgtcctgtgactctgggagaggtgacacctcactaaggggccgaccccatggagtaacgcgccggccccgatgcgaatcaggcctcccctacatctgggggcgttggccgcga

SEQ ID NO: 12731 - DNA, 119 bp, homo sapiens
gtaacgcgcccggccccgatgcgaatcaggcctcccctacatctgggggcgttggccgcgagattcccatgacacctttgtttcgtgtgcttttaaattcaggttaaatgttgcaataa

SEQ ID NO: 12732 - DNA, 119 bp, homo sapiens
gagattcccattgacacctttgtttcgtgtgcttttaaattcaggttaaatgttgcaataatctgatgcgaagactcagcttctcaagggagagggagggggcggagcggaataaatag

SEQ ID NO: 12733 - DNA, 119 bp, homo sapiens
acttccggtttgtcgttgctataggaaccgctacggcgtttgaaagtgtccgggttgcttaggatccctcaggtagcgcctctggatacatgcgtggtctgctgacccagagagaaacg

SEQ ID NO: 12734 - DNA, 119 bp, homo sapiens
ccggtttgtcgttgctataggaaccgctacggcgtttgaaagtgtccgggttgcttaggatccctacagtagcgcctctggatacatgcgtggtctgctgacccagagagaaacgaaag

SEQ ID NO: 12735 - DNA, 119 bp, homo sapiens
cagaactgtttggcgggagatcatgtcagccgtggtagctcagacgctgcatgtttttggtcttcgatccacgtggccaacaatatcttctacttcgatgaacagatcattatatttcc

SEQ ID NO: 12736 - DNA, 119 bp, homo sapiens
gtcttcgatcccacgtggccaacaatatcttctacttcgatgaacagatcattatatttccttcaggaatcactgtgtgaagtacaatgtggatcagaaatggcaaaaattcattccag

SEQ ID NO: 12737 - DNA, 119 bp, homo sapiens
gctcagagaagagtcagggcatgttggccttgtccatcagtcccaatcggcggtacctcgctatctctggactgtgcaagaaaaacctgccatcaccatttatgaattgtcatccatcc

SEQ ID NO: 12738 - DNA, 119 bp, homo sapiens
gcggtacctcgctatctctgagactgtgcaagaaaaacctgccatcaccatttatgaattgtcatccatccttgccggaagcgcaaagttcttaataattttgacttccaagttcagaa

SEQ ID NO: 12739 - DNA, 119 bp, homo sapiens
atttatgaattgtcatccatcccttgccggaagcgcaaagttcttaataattttgacttccaagttcagaatttattagcatggctttttctccagactccaaatacctattggctcag

SEQ ID NO: 12740 - DNA, 119 bp, homo sapiens
attttgacttccaagttcagaaatttattagcatggctttttctccagactccaaatacctattggctcgacgtcacctccagagtcaaatcttgtctactggctgtgggaaaaacaga

SEQ ID NO: 12741 - DNA, 119 bp, homo sapiens
ctccaaatacctattggctcagacgtcacctccagagtcaaatcttgtctactggctgtgggaaaaacaaaagtaatggccattgttagaatcgacactcagaacaaccctgtctacca

SEQ ID NO: 12742 - DNA, 119 bp, homo sapiens
gtgagcttcagtccacaggataacactcaggtgtgtgtcactggaaatgggatgtttaagcttctccgtttgctgagggaaccctgaagcaaaccagctttcagaggggagaaccccaa

SEQ ID NO: 12743 - DNA, 119 bp, homo sapiens
ttaagcttctccgttttgctgagggaaccctgaagcaaaccagctttcagaggggagaaccccaaaacttctagctcacacctgggtggctgatgacaagattgtcgttggcactgaca

SEQ ID NO: 12744 - DNA, 119 bp, homo sapiens
agaaccccaaaactatctagctcacacctgggtggctgatgacaagattgtcgttggcactgacacaggaaactcttcctctttgaatctggagatcagcgttgggagaccagcataat

SEQ ID NO: 12745 - DNA, 119 bp, homo sapiens
ggcactgacacaggcaaactcttcctctttgaatctggagatcagcgttgggagaccagcataatggtcaggaacctaccaatggctcaaagagcctggatgtcattcaggaatcagag

SEQ ID NO: 12746 - DNA, 119 bp, homo sapiens
cctgattgaatttccaccagtcagttctccactcccttcctatgaacagatggtggcggccagtagccaagccagatgtccatgccccaggtgtttgccattgcagcctattcaaaggg

SEQ ID NO: 12747 - DNA, 119 bp, homo sapiens
aacagatggtggcggccagtagccatagccagatgtccatgccccaggtgtttgccattgcagcctattaaagggatttgcctgttctgctgggccagggagagttctgctgtttgaga

SEQ ID NO: 12748 - DNA, 119 bp, homo sapiens
caggtgtttgccattgcagcctattcaaagggatttgcctgttctgctgggccagggagagttctgctgttgagaagatggaagaaaaggatttttaccgtgagagcagagaaatcagg

SEQ ID NO: 12749 - DNA, 119 bp, homo sapiens
attcctgtggacccgcagagcaatgatccaagtcagtctgacaaacaggacgttctctgcctgtgcttcgcccctcagaggaaactctggttgccagcaccagtaagaaccaactctac

SEQ ID NO: 12750 - DNA, 119 bp, homo sapiens
cagtctgacaaacaggacgttctctgcctgtgcttcagcccctcagaggaaactctggttgccagcaccgtaagaaccaactctacagcatcaccatgtccctgacagagatcagcaag

SEQ ID NO: 12751 - DNA, 119 bp, homo sapiens
ggggagcctgctcactttgagtatttgatgtatccattgcactcagcacccatcaccggtctagctaccgcatccgcaaaccccttatagccacctgttctctggatcgatccatccgc

SEQ ID NO: 12752 - DNA, 119 bp, homo sapiens
gtatttgatgtatccattgcactcagcacccatcaccggtctagctacctgcatccgcaaaccccttatgccacctgttctctggatcgatccatccgcctttggaattatgaaacaaa

SEQ ID NO: 12753 - DNA, 119 bp, homo sapiens
caccctggaactatttaaggaataccaagaagaggcatattccatcagccttcatccatctggacacttattgtagtagggtttgctgacaaactacgcctcatgaatctactcattga

SEQ ID NO: 12754 - DNA, 119 bp, homo sapiens
agccttcatccatctggacacttcattgtagtagggtttgctgacaaactacgcctcatgaatctactcttgatgatatacgttctttcaaagaatactctgttagaggatgcggagag

SEQ ID NO: 12755 - DNA, 119 bp, homo sapiens
attcgctcaattgtgtggaatgcagatgatagcaaactgatttctggtggcacagatggtgctgtgtataatggaatctgtccacaggaaagagagagacagaatgcgtgctcaagtct

SEQ ID NO: 12756 - DNA, 119 bp, homo sapiens
gtggcacagatggtgctgtgtatgaatggaatctgtccacaggaaagagagagacagaatgcgtgctcagtcttgcagctacaactgtgttactgtctcccccgatgccaaaattatct

SEQ ID NO: 12757 - DNA, 119 bp, homo sapiens
gagagagacagaatgcgtgctcaagtcttgcagctacaactgtgttactgtctcccccgatgccaaaatatctttgctgttggatcagaccacaccctcaaggagattgcagattcctt

SEQ ID NO: 12758 - DNA, 119 bp, homo sapiens
ccttcgagagatatcggcgtttgatgtcacctacaccgccattgtcatctcgcattctggacgcatgattttgtgggcacctcggtgggaaccattcgtgccatgaagtaccctctgcc

SEQ ID NO: 12759 - DNA, 119 bp, homo sapiens
tcgcattctggacgcatgatgtttgtgggcacctcggtgggaaccattcgtgccatgaagtaccctctgctctgcagaaggaattcaatgagtaccaggcccatgccggtcctatcacc

SEQ ID NO: 12760 - DNA, 119 bp, homo sapiens
gtgccatgaagtaccctctgcctctgcagaaggaattcaatgagtaccaggcccatgccggtcctatcacaaggtgagcagggccctctccccaggaacccagtcccacacctgcctgc

SEQ ID NO: 12761 - DNA, 119 bp, homo sapiens
ggcccatgccggtcctatcaccaaggtgagcagggccctctccccaggaacccagtcccacacctgcctctacgtgccttgttcatcccttcaacctcccaatgtcttttctctctcct

SEQ ID NO: 12762 - DNA, 119 bp, homo sapiens
acccagtcccacacctgcctgctacgtgccttgttcatcccttcaacctcccaatgtcttttctctctcttcttctctcttatttattcatccatcattcattgaatcaccatctattg

SEQ ID NO: 12763 - DNA, 119 bp, homo sapiens
atgttgcttacctttgatgatcagttcctgctgactgctgctgaggatggctgcctgttcacctggaagtctttgataaggatggccggggaatcaagcgagagagggaggtgggcttt

SEQ ID NO: 12764 - DNA, 119 bp, homo sapiens
gaggatggctgcctgttcacctggaaggtctttgataaggatggccggggaatcaagcgagagagggagtgggctttgccgaagaggtgcttgtgactaaaacagacatggaagaaaag

SEQ ID NO: 12765 - DNA, 119 bp, homo sapiens
gctcaggttatgttggagctaaagactcgtgtggaggaattaaaaatggagaatgagtatcaactccgataaaggacatgaactattctgagaagattaaggagctaacagacaagttc

SEQ ID NO: 12766 - DNA, 119 bp, homo sapiens
gaattaaaaatggagaatgagtatcaactccgactaaaggacatgaactattctgagaagattaaggagtaacagacaagttcatccaggaaatggagtccttgaaaacaaaaaaccag

SEQ ID NO: 12767 - DNA, 119 bp, homo sapiens
aatgttgcaacaaccaaaagttgcttctagaatatgagaagtaccaggagctgcagctcaagtcccagagatgcaggaagagtatgaaaaacagctccgggataacgatgagaccaaga

SEQ ID NO: 12768 - DNA, 119 bp, homo sapiens
gagaagtaccaggagctgcagctcaagtcccagaggatgcaggaagagtatgaaaaacagctccgggatacgatgagaccaagagccaggccctggaggagctgactgagttttacgag

SEQ ID NO: 12769 - DNA, 119 bp, homo sapiens
gatgcaggaagagtatgaaaaacagctccgggataacgatgagaccaagagccaggccctggaggagctactgagttttacgaggcaaaactgcaggagaaaaccacccttctggaaga

SEQ ID NO: 12770 - DNA, 119 bp, homo sapiens
gcacaggaagacgtcaggcagcagctgcgggagtttgaagagaccaagaagcagattgaggaagatgaaaccgagaaatccaagatatcaaaaccaagtatgagaaaaagcttcgggat

SEQ ID NO: 12771 - DNA, 119 bp, homo sapiens
attgaggaagatgaagaccgagaaatccaagatatcaaaaccaagtatgagaaaaagcttcgggatgaaaggaatcaaacctgcggctcaagggagaaacaggcatcatgaggaagaag

SEQ ID NO: 12772 - DNA, 119 bp, homo sapiens
ttcagcagcctacagaaggagattgaagaacgaaccaatgacatcgagaccctaaaaggagagcagatgagctgcaaggagtcattaagtctctggagaaggacatccaaggcctcaag

SEQ ID NO: 12773 - DNA, 119 bp, homo sapiens
gacatcgagaccctaaaaggagagcagatgaagctgcaaggagtcattaagtctctggagaaggacatcaaggcctcaagcgagagatccaggaaagagacgagactattcaagacaag

SEQ ID NO: 12774 - DNA, 119 bp, homo sapiens
gagaagcgaatttatgatctgaaaaagaaaaatcaagaactagggaaattcaagtttgtgcttgactacaaataaaggagctgaagaagcaaatagaacctcgagagaatgagatcagg

SEQ ID NO: 12775 - DNA, 119 bp, homo sapiens
aagaaaaatcaagaactagggaaattcaagtttgtgcttgactacaaaataaaggagctgaagaagcaatagaacctcgagagaatgagatcagggtgatgaaggaacagattcaggag

SEQ ID NO: 12776 - DNA, 119 bp, homo sapiens
gagcgagacttggaagcgctggtcaaaaggtttaaaacagacctccacaactgcgtagcctatattcagaaccgcggctgctgaaggagaaggttcgaggtctctttgagaagtacgtg

SEQ ID NO: 12777 - DNA, 119 bp, homo sapiens
gcgctggtcaaaaggtttaaaacagacctccacaactgcgtagcctatattcaggaaccgcggctgctgaggagaaggttcgaggtctctttgagaagtacgtgcagcgagcagacatg

SEQ ID NO: 12778 - DNA, 119 bp, homo sapiens
gtggagatcgcagggctgaacacagacctgcagcaggagtacacccggcagcgggagcacctggagaggacctggccactctcaagaagaaggtggtcaaggagggcgagctgcaccgc

SEQ ID NO: 12779 - DNA, 119 bp, homo sapiens
gacctgcagcaggagtacacccggcagcgggagcacctggagaggaacctggccactctcaagaagaagtggtcaaggagggcgagctgcaccgcacagactacgtccgcatcatgcag

SEQ ID NO: 12780 - DNA, 119 bp, homo sapiens
gaaaatgtctctctgatcaaggaaattaatgagctccgcagggagctgaagttcactcggtcccaagtcatgaccttgaagcagctctgaaactgaccaagaaagtccgaccacaagaa

SEQ ID NO: 12781 - DNA, 119 bp, homo sapiens
tgatcaaggaaattaatgagctccgcagggagctgaagttcactcggtcccaagtctatgaccttgaagagctctgaaactgaccaagaaagtccgaccacaagaagtttcagagacag

SEQ ID NO: 12782 - DNA, 119 bp, homo sapiens
aacccagcagggacatgctcagcacagctcccaccgcaaggttgaatgagcaagaagaaactgggaggacattgaaatgcagcgcctagaaatccagcgcctcagagaccagatccaag

SEQ ID NO: 12783 - DNA, 119 bp, homo sapiens
agaagaaactgggaggatcattgaaatgcagcgcctagaaatccagcgcctcagagaccagatccaagacaagagcaggtcacagggttccacaccctcgctggagttcggcttccttc

SEQ ID NO: 12784 - DNA, 119 bp, homo sapiens
agagaccagatccaagagcaagagcaggtcacagggttccacaccctcgctggagttcggcttccttcctctccaactccgaggtagacttagaggtgaagaccaactgaccccctctg

SEQ ID NO: 12785 - DNA, 119 bp, homo sapiens
gagttcggcttccttccctctccaactccgaggtagacttagaggtgaagaccaactgaccccctctgggagccatctccagccacagccagaagaaacacagcatgtctgtccccaag

SEQ ID NO: 12786 - DNA, 119 bp, homo sapiens
caactgaccccctctggtgagccatctccagccacagccagaagaaacacagcatgtctgtccccaagcagacttgcggttggagtctgtatggtccctgcagcactgaccccagcaac

SEQ ID NO: 12787 - DNA, 119 bp, homo sapiens
catgtctgtccccaagccagacttgcggttggagtctgtatggtccctgcagcactgaccccagcaaccctttctcttgccctggggaatttgggacacagaataaaggtgtttgccca

SEQ ID NO: 12788 - DNA, 119 bp, homo sapiens
cgaggccgccgccgtcgcctccgccgggcgagccggagccggagtcgagccgcggccgggagccgggcggctggggacgcgggccgggggcggaggcgctgggggccggggccggggcc

SEQ ID NO: 12789 - DNA, 119 bp, homo sapiens
ggccggggccgggggcggaggcgctgggggccggggccggggccgggcgccgagcggggtccgcggtgacgcgccgcccgggcgatgcccgcggggacgccgccggccagcagagcgag

SEQ ID NO: 12790 - DNA, 119 bp, homo sapiens
tacaccgccatgccggcccccatgagcgtgtactcgcaccctgcgcacgccgagcagtacccgggcggctggcccgcgcctacgggccctacacgccgcagccgcagcccaaggacatg

SEQ ID NO: 12791 - DNA, 119 bp, homo sapiens
acccgggcggcatggcccgcgcctacgggccctacacgccgcagccgcagcccaaggacatggtgaagcgccctatagctacatcgcgctcatcaccatggccatccagaacgccccgg

SEQ ID NO: 12792 - DNA, 119 bp, homo sapiens
catggtgaagccgccctatagctacatcgcgctcatcaccatggccatccagaacgccccggacaagaaatcaccctgaacggcatctaccagttcatcatggaccgcttccccttcta

SEQ ID NO: 12793 - DNA, 119 bp, homo sapiens
ccggacaagaagatcaccctgaacggcatctaccagttcatcatggaccgcttccccttctaccgggacacaagcagggctggcagaacagcatccgccacaacctctcgctcaacgag

SEQ ID NO: 12794 - DNA, 119 bp, homo sapiens
tctaccgggacaacaagcagggctggcagaacagcatccgccacaacctctcgctcaacgagtgcttcgcaaggtgccgcgcgacgacaagaagccgggcaagggcagctactggacgc

SEQ ID NO: 12795 - DNA, 119 bp, homo sapiens
cgagtgcttcgtcaaggtgccgcgcgacgacaagaagccgggcaagggcagctactggacgctggacccgactcctacaacatgttcgagaacggcagcttcctgcggcggcggcggcg

SEQ ID NO: 12796 - DNA, 119 bp, homo sapiens
acgctggacccggactcctacaacatgttcgagaacggcagcttcctgcggcggcggcggcgcttcaagagaaggacgcggtgaaggacaaggaggagaaggacaggctgcacctcaag

SEQ ID NO: 12797 - DNA, 119 bp, homo sapiens
agcaggccgacggcaacgcgcccggtccgcagccgccgcccgtgcgcatccaggacatcaagaccgagacggtacgtgcccctcgccgccccagcccctgtccccggccgccgccctgg

SEQ ID NO: 12798 - DNA, 119 bp, homo sapiens
gcgcatccaggacatcaagaccgagaacggtacgtgcccctcgccgccccagcccctgtccccggccgcgccctgggcagcggcagcgccgccgcggtgcccaagatcgagagccccga

SEQ ID NO: 12799 - DNA, 119 bp, homo sapiens
ccgccccagcccctgtccccggccgccgccctgggcagcggcagcgccgccgcggtgcccaagatcgaggccccgacagcagcagcagcagcctgtccagcgggagcagccccccgggc

SEQ ID NO: 12800 - DNA, 119 bp, homo sapiens
gcgccgccgcggtgcccaagatcgagagccccgacagcagcagcagcagcctgtccagcgggagcagcccccgggcagcctgccgtcggcgcggccgctcagcctggacggtgcggatt

SEQ ID NO: 12801 - DNA, 119 bp, homo sapiens
accatagccagggcttcagcgtggacaacatcatgacgtcgctgcgggggtcgccgcagagcgcggccgggagctcagctccggccttctggcctcggcggccgcgtcctcgcgcgcgg

SEQ ID NO: 12802 - DNA, 119 bp, homo sapiens
gctgcgggggtcgccgcagagcgcggccgcggagctcagctccggccttctggcctcggcggccgcgtctcgcgcgcggggatcgcacccccgctggcgctcggcgcctactcgcccgg

SEQ ID NO: 12803 - DNA, 119 bp, homo sapiens
tccggccttctggcctcggcggccgcgtcctcgcgcgcggggatcgcacccccgctggcgctcggcgccactcgcccggccagagctccctctacagctccccctgcagccagacctcc

SEQ ID NO: 12804 - DNA, 119 bp, homo sapiens
cgcaggctacccgggccagcagcagaacttccactcggtgcgggagatgttcgagtcacagaggatcggttgaacaactctccagtgaacgggaatagtagctgtcaaatggccttccc

SEQ ID NO: 12805 - DNA, 119 bp, homo sapiens
agaggatcggcttgaacaactctccagtgaacgggaatagtagctgtcaaatggccttcccttccagccgtctctgtaccgcacgtccggagctttcgtctacgactgtagcaagtttt

SEQ ID NO: 12806 - DNA, 119 bp, homo sapiens
ccttccagccagtctctgtaccgcacgtccggagctttcgtctacgactgtagcaagttttgacacacctcaaagccgaactaaatcgaaccccaaagcaggaaaagctaaaggaaccc

SEQ ID NO: 12807 - DNA, 119 bp, homo sapiens
ttgacacaccctcaaagccgaactaaatcgaaccccaaagcaggaaaagctaaaggaacccatcaaggcaaatcgaaactaaaaaaaaaaaatccaattaaaaaaaacccctgagaata

SEQ ID NO: 12808 - DNA, 119 bp, homo sapiens
ccatcaaggcaaaatcgaaactaaaaaaaaaaaatccaattaaaaaaaacccctgagaatattcaccacccagcgaacagaatatccctccaaaaattcagctcaccagcaccagcacg

SEQ ID NO: 12809 - DNA, 119 bp, homo sapiens
tattcaccacaccagcgaacagaatatccctccaaaaattcagctcaccagcaccagcacgaagaaaacctattttcttaaccgattaattcagagccacctccactttgccttgtcta

SEQ ID NO: 12810 - DNA, 119 bp, homo sapiens
cgaagaaaactctattttcttaaccgattaattcagagccacctccactttgccttgtctaaataaacaacccgtaaactgttttatacagagacagcaaaatcttggtttattaaagg

SEQ ID NO: 12811 - DNA, 119 bp, homo sapiens
taaataaacaaacccgtaaactgttttatacagagacagcaaaatcttggtttattaaaggacagtgttctccagataacacgtaagtttcttcttgcttttcagagacctgctttccc

SEQ ID NO: 12812 - DNA, 119 bp, homo sapiens
ggacagtgttactccagataacacgtaagtttcttcttgcttttcagagacctgctttcccctcctccctctcccctctcttgccttcttccttgcctctcacctgtaagatattattt

SEQ ID NO: 12813 - DNA, 119 bp, homo sapiens
ccctcctcccgtctcccctctcttgccttcttccttgcctctcacctgtaagatattattttatcctatttgaagggagggggaaagtccccgtttatgaaagtcgctttctttttatt

SEQ ID NO: 12814 - DNA, 119 bp, homo sapiens
tttatcctatgttgaagggagggggaaagtccccgtttatgaaagtcgctttctttttattcatggactgttttaaaatgtaaattgcaacatagtaatttatttttaatttgtagttg

SEQ ID NO: 12815 - DNA, 119 bp, homo sapiens
ttcatggacttgttttaaaatgtaaattgcaacatagtaatttatttttaatttgtagttggatgtcgtgaccaaacgccagaaagtgttcccaaaacctgacgttaaattgcctgaaa

SEQ ID NO: 12816 - DNA, 119 bp, homo sapiens
tggatgtcgtggaccaaacgccagaaagtgttcccaaaacctgacgttaaattgcctgaaactttaaatgtgctttttttctcattataaaaagggaaactgtattaatcttattctat

SEQ ID NO: 12817 - DNA, 119 bp, homo sapiens
aactttaaattgtgctttttttctcattataaaaagggaaactgtattaatcttattctatcctctttttttctttttgttgaacatattcattgtttgtttattaataaattaccatt

SEQ ID NO: 12818 - DNA, 119 bp, homo sapiens
atcctcttttctttctttttgttgaacatattcattgtttgtttattaataaattaccattcagtttgatgagacctatatgtctggatactttaatagagctttaattattacgaaaa

SEQ ID NO: 12819 - DNA, 119 bp, homo sapiens
ttcagtttgaatgagacctatatgtctggatactttaatagagctttaattattacgaaaaaagatttcgagataaaacactagaagttacctattctccacctaaatctctgaaaaat

SEQ ID NO: 12820 - DNA, 119 bp, homo sapiens
aaaagatttcagagataaaacactagaagttacctattctccacctaaatctctgaaaaatggagaaacctctgactagtccatgtcaaattttactaaaagtctttttgtttagattt

SEQ ID NO: 12821 - DNA, 119 bp, homo sapiens
atggagaaaccctctgactagtccatgtcaaattttactaaaagtctttttgtttagatttattttcctcagcatcttctgcaaaatgtactatatagtcagcttgctttgaggctagt

SEQ ID NO: 12822 - DNA, 119 bp, homo sapiens
ttattttcctgcagcatcttctgcaaaatgtactatatagtcagcttgctttgaggctagtaaaaagattttttctaaacagattggagttggcatataaacaaatacgttttctcact

SEQ ID NO: 12823 - DNA, 119 bp, homo sapiens
gtaaaaagatatttttctaaacagattggagttggcatataaacaaatacgttttctcactaatgacagccatgattcggaaattttaagcccatgaatcagccgcggtcttaccacgg

SEQ ID NO: 12824 - DNA, 119 bp, homo sapiens
ctaatgacagtccatgattcggaaattttaagcccatgaatcagccgcggtcttaccacggtgatgccttgtgccgagagatgggactgtgcggccagatatgcacagataaatatttg

SEQ ID NO: 12825 - DNA, 119 bp, homo sapiens
ggtgatgcctgtgtgccgagagatgggactgtgcggccagatatgcacagataaatatttggcttgtgtttccatataaaattgcagtgcatattatacatccctgtgagccagatgct

SEQ ID NO: 12826 - DNA, 119 bp, homo sapiens
tggcttgtgtattccatataaaattgcagtgcatattatacatccctgtgagccagatgctgaatagatttttcctattatttcagtcctttataaaaggaaaaataaaccagttttta

SEQ ID NO: 12827 - DNA, 119 bp, homo sapiens
ctgaatagatattttcctattatttcagtcctttataaaaggaaaaataaaccagtttttaaatgtatgatataattctcccccatttacaatccttcatgtattacatagaaggattg

SEQ ID NO: 12828 - DNA, 119 bp, homo sapiens
taaatgtatgtatataattctcccccatttacaatccttcatgtattacatagaaggattgcttttttaaaatatactgcgggttggaaagggatatttaatctttgagaaactatttt

SEQ ID NO: 12829 - DNA, 119 bp, homo sapiens
tgcttttttaaaaatatactgcgggttggaaagggatatttaatctttgagaaactattttagaaaatagtttgtagaacaattatttttgaaaaagatttaaagcaataacaagaagg

SEQ ID NO: 12830 - DNA, 119 bp, homo sapiens
ttagaaaatatgtttgtagaacaattatttttgaaaaagatttaaagcaataacaagaaggaaggcgagggagcagaacattttggtctagggtggtttctttttaaaccattttttct

SEQ ID NO: 12831 - DNA, 119 bp, homo sapiens
ggaaggcgagaggagcagaacattttggtctagggtggtttctttttaaaccattttttcttgttaattacagttaaacctaggggacaatccggattggccctcccccttttgtaaat

SEQ ID NO: 12832 - DNA, 119 bp, homo sapiens
cttgttaatttacagttaaacctaggggacaatccggattggccctcccccttttgtaaataacccaggaatgtaataaattcattatcttagggtgatctgccctgccaatcagactt

SEQ ID NO: 12833 - DNA, 119 bp, homo sapiens
ataacccaggaaatgtaataaattcattatcttagggtgatctgccctgccaatcagactttggggagaggcgatttgattacagacgttcgggggggtggggggcttgcagtttgttt

SEQ ID NO: 12834 - DNA, 119 bp, homo sapiens
tttggggagatggcgatttgattacagacgttcgggggggtggggggcttgcagtttgttttggagatatacagtttcctgctatctgccgctcctatctagaggcaacacttaagcag

SEQ ID NO: 12835 - DNA, 119 bp, homo sapiens
tttggagataatacagtttcctgctatctgccgctcctatctagaggcaacacttaagcagtaattgctttgcttgttgtcaaaatttgatcattgttaaaggattgctgcaaataaat

SEQ ID NO: 12836 - DNA, 119 bp, homo sapiens
tccccggcgcgggcagggagcggctggctgtcagctgagccgcgctgggcggggtcgccaggccgcgcacagccctaggcaccccagtcccggctgccccctccgccaccgccgccgcc

SEQ ID NO: 12837 - DNA, 119 bp, homo sapiens
cgccaggccgcgcatcagccctaggcaccccagtcccggctgccccctccgccaccgccgccgcccgccgcaggttccctggtcagcgtcccatcccggtcgggagttctctccaggcg

SEQ ID NO: 12838 - DNA, 119 bp, homo sapiens
cgccgccgcccgccggcaggttccctggtcagcgtcccatcccggtcgggagttctctccaggcggcacatgccgaggaaacagtgaccctgagcgaagccaagccgggcggcaggtga

SEQ ID NO: 12839 - DNA, 119 bp, homo sapiens
acaaggtgtggctttgatagctggtggtgccacttcctggccttggatgagccgtacgcctctgtaaaccaacttcctcacctttgaaacagctgcctggttcagcattaatgaagatt

SEQ ID NO: 12840 - DNA, 119 bp, homo sapiens
ttggatgagccgtacgcctctgtaaacccaacttcctcacctttgaaacagctgcctggttcagcattatgaagattagtcagtgacaggcctggtgtgctgagtccgcacatagtaag

SEQ ID NO: 12841 - DNA, 119 bp, homo sapiens
aacaggtgacttttccacaggaacttctgcaatgtcccatcaacctctcagctgcctcactgaaaaggagacagccccagtgaaagcacaggaaatggacccccccacctggcccaccc

SEQ ID NO: 12842 - DNA, 119 bp, homo sapiens
aacctctcagctgcctcactgaaaaggaggacagccccagtgaaagcacaggaaatggacccccccaccggcccacccaaacctggacacgtttaccccggaggagctgctgcagcaga

SEQ ID NO: 12843 - DNA, 119 bp, homo sapiens
gaaagcacaggaaatggacccccccacctggcccacccaaacctggacacgtttaccccggaggagctgtgcagcagatgaaagagctcctgaccgagaaccaccagctgaaaggtgag

SEQ ID NO: 12844 - DNA, 119 bp, homo sapiens
tgcagaagccatgaagctaaataatcaagccatgaaagggagatttgaggagctttcggcctggacagaaaacagaaggaagaacgccagttttttgagatacagagcaaagaagcaaa

SEQ ID NO: 12845 - DNA, 119 bp, homo sapiens
gaggagctttcggcctggacagagaaacagaaggaagaacgccagttttttgagatacagagcaaagaacaaaagagcgtctaatggccttgagtcatgagaatgagaaattgaaggaa

SEQ ID NO: 12846 - DNA, 119 bp, homo sapiens
tttttgagatacagagcaaagaagcaaaagagcgtctaatggccttgagtcatgagaatgagaaattgaggaagagcttggaaaactaaaagggaaatcagaaaggtcatctgaggtga

SEQ ID NO: 12847 - DNA, 119 bp, homo sapiens
tccaggaccccactgatgactccaggcttcccagggccgaagcggagcaggaaaaggaccagctcaggaccaggtggtgaggctacaagcagagaaggcagacctgttgggcatcgtgt

SEQ ID NO: 12848 - DNA, 119 bp, homo sapiens
ccgaagcggagcaggaaaaggaccagctcaggacccaggtggtgaggctacaagcagagaaggcagaccgttgggcatcgtgtctgaactgcagctcaagctgaactccagcggctcct

SEQ ID NO: 12849 - DNA, 119 bp, homo sapiens
aggtggtgaggctacaagcagagaaggcagacctgttgggcatcgtgtctgaactgcagctcaagctgactccagcggctcctcagaagattcctttgttgaaattaggatggctgtga

SEQ ID NO: 12850 - DNA, 119 bp, homo sapiens
aacagggcattgtctaaatataggagcagatctgcagatggggccaagaattacttcgaacatgaggagtaactgtgagccagctcctgctgtgcctaagggaagggaatcagaaggtg

SEQ ID NO: 12851 - DNA, 119 bp, homo sapiens
ccaagaattacttcgaacatgaggagttaactgtgagccagctcctgctgtgcctaagggaagggaatcgaaggtggagagacttgaagttgcactcaaggaggccaaagaaaggtatg

SEQ ID NO: 12852 - DNA, 119 bp, homo sapiens
cttaggtgtcaggcccttgaaaggaaaaattctgcaattccatcagagttgaatgaaaagcaagagctttttatactaacaaaaagttagagctacaagtggaaagcatgctatcagaa

SEQ ID NO: 12853 - DNA, 119 bp, homo sapiens
catcagagttgaatgaaaagcaagagcttgtttatactaacaaaaagttagagctacaagtggaaagcagctatcagaaatcaaaatggaacaggctaaaacagaggatgaaaagtgag

SEQ ID NO: 12854 - DNA, 119 bp, homo sapiens
ttcagtcagaaaaagtggacagggcagtgctgaaggaactgagtgaaaaactggaactggcagagaaggtctggcttccaaacagctgcaaatggatgaaatgaagcaaaccattgcca

SEQ ID NO: 12855 - DNA, 119 bp, homo sapiens
actggaactggcagagaaggctctggcttccaaacagctgcaaatggatgaaatgaagcaaaccattgcaagcaggaagaggacctggaaaccatgaccatcctcagggctcaggtgag

SEQ ID NO: 12856 - DNA, 119 bp, homo sapiens
aacagatggaagtttactgttctgattttcatgctgaaagagcagcgagagagaaaattcatgaggaaaggagcaactggcattgcagctggcagttctgctgaaagagaatgatgctt

SEQ ID NO: 12857 - DNA, 119 bp, homo sapiens
ctgattttcatgctgaaagagcagcgagagagaaaattcatgaggaaaaggagcaactggcattgcagcggcagttctgctgaaagagaatgatgctttcgaagacggaggcaggtaag

SEQ ID NO: 12858 - DNA, 119 bp, homo sapiens
cccaggagctgaggacagggactggcggcaacagcggaatattccgattcattcctgccccaagtgtgggaggttctgcctgacatagacacgttacagattcacgtgatggattgcat

SEQ ID NO: 12859 - DNA, 119 bp, homo sapiens
ttccgattcattcctgccccaagtgtggagaggttctgcctgacatagacacgttacagattcacgtgaggattgcatcatttaagtgttgatgtatcacctccccaaaactgttggta

SEQ ID NO: 12860 - DNA, 119 bp, homo sapiens
gacatagacacgttacagattcacgtgatggattgcatcatttaagtgttgatgtatcacctccccaaactgttggtaaatgtcagattttttcctccaagagttgtgcttttgtgtta

SEQ ID NO: 12861 - DNA, 119 bp, homo sapiens
ttaagtgttgatgtatcacctccccaaaactgttggtaaatgtcagattttttcctccaagagttgtgctttgtgttatttgttttcactcaaatattttgcctcattattcttgtttt

SEQ ID NO: 12862 - DNA, 119 bp, homo sapiens
gtttggttgatgcgagcagctgcactgctcatgcagttagctagcatgtgacatcatgtgacaaagttctgtaattagatggaagaaacctcactgattaattttaagaaccttttagg

SEQ ID NO: 12863 - DNA, 119 bp, homo sapiens
tgtgacaaagttcatgtaattagatggaagaaacctcactgattaattttaagaaccttttagggatgcggaacaatgaagtggccacagtatgtgctgtttttgaagcatttttaaaa

SEQ ID NO: 12864 - DNA, 119 bp, homo sapiens
cttttagggatgcaggaacaatgaagtggccacagtatgtgctgtttttgaagcatttttaaaaacgaatgtagttgtttttcttcatttaaaatggatctgttggaggttatgtgtgt

SEQ ID NO: 12865 - DNA, 119 bp, homo sapiens
ttttaaaaacgaattgtagttgtttttcttcatttaaaatggatctgttggaggttatgtgtgtatgtttagttttattgcagccacaataattttaccaaagttttcacataggcagt

SEQ ID NO: 12866 - DNA, 119 bp, homo sapiens
atgtgtgtatgttgtagttttattgcagccacaataattttaccaaagttttcacataggcagttagccttacttaatatcaagacaagtgaaaaaatattggcatcgatgaaaccgat

SEQ ID NO: 12867 - DNA, 119 bp, homo sapiens
taggcagttagcctttacttaatatcaagacaagtgaaaaaatattggcatcgatgaaaccgataacatggcctcattggatttctttacccattcacagtgtaaagaagttaccttca

SEQ ID NO: 12868 - DNA, 119 bp, homo sapiens
aaaccgataacattggcctcattggatttctttacccattcacagtgtaaagaagttaccttcatgcttcattgtacctgcaggcctgtgggcttgtacagtagataattaatttctaa

SEQ ID NO: 12869 - DNA, 119 bp, homo sapiens
taccttcatgctttcattgtacctgcaggcctgtgggcttgtacagtagataattaatttctaaaaagacagctgcctattttcttcctaggttaggttatatcttcataatcacaaga

SEQ ID NO: 12870 - DNA, 119 bp, homo sapiens
atttctaaaaagaacagctgcctattttcttcctaggttaggttatatcttcataatcacaagaattaggatggcaaaataaaattttgcttatgaatcttttacattgtttatatatg

SEQ ID NO: 12871 - DNA, 119 bp, homo sapiens
tcacaagaattagtgatggcaaaataaaattttgcttatgaatcttttacattgtttatatatgattaaatcatcatatatattttctgtattaagctcatttggcttcatttaagctg

SEQ ID NO: 12872 - DNA, 119 bp, homo sapiens
tatatatgattaatatcatcatatatattttctgtattaagctcatttggcttcatttaagctgtatactagtcatatatctttcattagttctatggatatgagcagatccctttact

SEQ ID NO: 12873 - DNA, 119 bp, homo sapiens
ttaagctgtatacttagtcatatatctttcattagttctatggatatgagcagatccctttactggagccagtatgtgctgtgtgagttagaagtcattcttgctgagaaggtgaatag

SEQ ID NO: 12874 - DNA, 119 bp, homo sapiens
cctttactggagcccagtatgtgctgtgtgagttagaagtcattcttgctgagaaggtgaataggtaggatttgccttgttttgtaagtctacaatttgccaagagtaaataacactgg

SEQ ID NO: 12875 - DNA, 119 bp, homo sapiens
gtgaataggtagggatttgccttgttttgtaagtctacaatttgccaagagtaaataacactggaccagtgtaaaagtaaacagtgtgtttatgcattgagatactaaagcatttaaga

SEQ ID NO: 12876 - DNA, 119 bp, homo sapiens
acacatactgtatacagcttttattcagaattagaataattgaatcaatgacagtgatttgccaggatgcaaatctctccatcatatcctgtcactaccagtttattttttgtgatcaa

SEQ ID NO: 12877 - DNA, 119 bp, homo sapiens
tgccaggatgtcaaatctctccatcatatcctgtcactaccagtttattttttgtgatcaaaatcaaaagacaactattttgtcacccgctatttcattagtactaaaaatcaggtttc

SEQ ID NO: 12878 - DNA, 119 bp, homo sapiens
aaaatcaaaaagacaactattttgtcacccgctatttcattagtactaaaaatcaggtttcttattctattttttagaatgtcgggtttatttttttcatttcttttaattctaaagac

SEQ ID NO: 12879 - DNA, 119 bp, homo sapiens
tcttattctatttttttagaatgtcgggtttatttttttcatttcttttaattctaaagacacagattctccccattttcttttcaaaataaagtttcagaattgatctgtcagttaaa

SEQ ID NO: 12880 - DNA, 119 bp, homo sapiens
acacagattcttccccattttcttttcaaaataaagtttcagaattgatctgtcagttaaaattaaaggctttatattaagcaaaggtgcttttaaattttaaagcaacttcaaaaaat

SEQ ID NO: 12881 - DNA, 119 bp, homo sapiens
aaattaaagggctttatattaagcaaaggtgcttttaaattttaaagcaacttcaaaaaattgatttagccatagataataaataatgttgtgcggatactccacaaaagctctgctat

SEQ ID NO: 12882 - DNA, 119 bp, homo sapiens
attgatttagtccatagataataaataatgttgtgcggatactccacaaaagctctgctatgtcctttgaagcattatgaacattctgaataaattcaaatgagtattttagtcagttt

SEQ ID NO: 12883 - DNA, 119 bp, homo sapiens
atgtcctttgaaagcattatgaacattctgaataaattcaaatgagtattttagtcagtttattattttataactctaacctttttcttaccgtgttgattcattttatacaacacaca

SEQ ID NO: 12884 - DNA, 119 bp, homo sapiens
ttattattttaataactctaacctttttcttaccgtgttgattcattttatacaacacacaatggaacattacatagcatttgacttgctgaaaaagagatacgaggtcatcagatatg

SEQ ID NO: 12885 - DNA, 119 bp, homo sapiens
caatggaacaattacatagcatttgacttgctgaaaaagagatacgaggtcatcagatatgtaaattgctgtcaaaatacttaataggtcattgatatacttccctggctaccatgtct

SEQ ID NO: 12886 - DNA, 119 bp, homo sapiens
tgtaaattgcttgtcaaaatacttaataggtcattgatatacttccctggctaccatgtctataaaattacagccaattactagttaatatatgctttgcaaatagataactactataa

SEQ ID NO: 12887 - DNA, 119 bp, homo sapiens
ctataaaattaacagccaattactagttaatatatgctttgcaaatagataactactataaaaattgaaatgcatatttgaacccttattttaaatataaaagaaacttttcaaactca

SEQ ID NO: 12888 - DNA, 119 bp, homo sapiens
aaaaattgaatatgcatatttgaacccttattttaaatataaaagaaacttttcaaactcagtaaaagtcattttgaataataagtgtacctgggctttccaaaaatcatatccaagtg

SEQ ID NO: 12889 - DNA, 119 bp, homo sapiens
cagtaaaagtgcattttgaataataagtgtacctgggctttccaaaaatcatatccaagtgctttgttttctaattcactgggccggctttgtaaaaataagctactggagaggggtgt

SEQ ID NO: 12890 - DNA, 119 bp, homo sapiens
tgctttgtttttctaattcactgggccggctttgtaaaaataagctactggagaggggtgtgtattttttcttcctctgataaaaacgcactctgaaaatgtgttttcctttcttctgg

SEQ ID NO: 12891 - DNA, 119 bp, homo sapiens
gtgtatttttgtcttcctctgataaaaacgcactctgaaaatgtgttttcctttcttctggaaacattattgttactcattatgttaataacttactacataaacatatctctcttcaa

SEQ ID NO: 12892 - DNA, 119 bp, homo sapiens
ggaaacattatttgttactcattatgttaataacttactacataaacatatctctcttcaataatgctacttaggtatagacaccattttgatacattatgaaatatacactccattaa

SEQ ID NO: 12893 - DNA, 119 bp, homo sapiens
aataatgctaccttaggtatagacaccattttgatacattatgaaatatacactccattaacagatttttttaattatcagcttgactcaaagatataaatacttaagaacaatgccaa

SEQ ID NO: 12894 - DNA, 119 bp, homo sapiens
aacagattttttttaattatcagcttgactcaaagatataaatacttaagaacaatgccaaacgtaatactgaaatgatatcttttaagtgtttctagtatatgaacttcaaaacccta

SEQ ID NO: 12895 - DNA, 119 bp, homo sapiens
aaacgtaatatctgaaatgatatcttttaagtgtttctagtatatgaacttcaaaaccctatatggtaccatttcttacactagatttgcctttctttaacatgagataaatattttga

SEQ ID NO: 12896 - DNA, 119 bp, homo sapiens
tatatggtactcatttcttacactagatttgcctttctttaacatgagataaatattttgactactgcatttgctcaggtgctcgggttctaagactttttgaatttccttttagtagc

SEQ ID NO: 12897 - DNA, 119 bp, homo sapiens
gactactgcagtttgctcaggtgctcgggttctaagactttttgaatttccttttagtagccaccatacatatctacttttctcttccatttattccttatgtccacctccaggatctt

SEQ ID NO: 12898 - DNA, 119 bp, homo sapiens
gccaccatacaatatctacttttctcttccatttattccttatgtccacctccaggatctttaaatactacagtagacaaaataaaactactttagaaggaagcgacactctgcaatca

SEQ ID NO: 12899 - DNA, 119 bp, homo sapiens
tttaaatactaacagtagacaaaataaaactactttagaaggaagcgacactctgcaatcaattccctgccatcttttaacaaatcagacacacataggcatacaaaaggagagtgggg

SEQ ID NO: 12900 - DNA, 119 bp, homo sapiens
caattccctgtccatcttttaacaaatcagacacacataggcatacaaaaggagagtggggggaccccctattcatttgtttaagcccattattaatgtcatttctaagacagcatgtt

SEQ ID NO: 12901 - DNA, 119 bp, homo sapiens
ggggacccccctattcatttgtttaagcccattattaatgtcatttctaagacagcatgttactgctttcaaagatagtcaccgtcaacattattgaaataagcagtactaaccctaag

SEQ ID NO: 12902 - DNA, 119 bp, homo sapiens
ttactgctttccaaagatagtcaccgtcaacattattgaaataagcagtactaaccctaagtacttacatttgaactttaaaaccgagcagttgagtcattcagtaccaagccaaaaca

SEQ ID NO: 12903 - DNA, 119 bp, homo sapiens
agtacttacactttgaactttaaaaccgagcagttgagtcattcagtaccaagccaaaacacagaaaaaaaaaaagcagatgaggtttattcttgagaaatgaaaaagagaagaatata

SEQ ID NO: 12904 - DNA, 119 bp, homo sapiens
cacagaaaaacaaaaaagcagatgaggtttattcttgagaaatgaaaaagagaagaatatatatttcgcttggtgagccaaacatacagagaagaaaaggctttttaaaatcttactag

SEQ ID NO: 12905 - DNA, 119 bp, homo sapiens
tatatttcgccttggtgagccaaacatacagagaagaaaaggctttttaaaatcttactagtatgagagcccagagtaaaaagaaataagcaaaagaatatagacacaatcctaagatg

SEQ ID NO: 12906 - DNA, 119 bp, homo sapiens
agtatgagaggcccagagtaaaaagaaataagcaaaagaatatagacacaatcctaagatgacattcacgaacaaagctgaatcttcaaataatactgtatgagtgaatcttaggaaac

SEQ ID NO: 12907 - DNA, 119 bp, homo sapiens
tgacattcacagaacaaagctgaatcttcaaataatactgtatgagtgaatcttaggaaacctagtgatatagtaagaagaaatggcagtgagctgtagcaagaaaccagttgttcacc

SEQ ID NO: 12908 - DNA, 119 bp, homo sapiens
acctagtgatgatagtaagaagaaatggcagtgagctgtagcaagaaaccagttgttcaccatttaaggttaggaggcatagctttgggggaaaaatattctagaaattcattgcagta

SEQ ID NO: 12909 - DNA, 119 bp, homo sapiens
ccatttaagggttaggaggcatagctttgggggaaaaatattctagaaattcattgcagtaaaatgcattttttacttagagcagtttgaacgtttattacttaaaacattcagctctt

SEQ ID NO: 12910 - DNA, 119 bp, homo sapiens
taaaatgcatttttttacttagagcagtttgaacgtttattacttaaaacattcagctcttattctattacctggttttcccaagtcagtcaagtttggagaaaaaatttagacgttta

SEQ ID NO: 12911 - DNA, 119 bp, homo sapiens
ttattctattcacctggttttcccaagtcagtcaagtttggagaaaaaatttagacgtttagtcctgggttctactgaagtcttcacaaataatctccatcctggaagatggtgtcaaa

SEQ ID NO: 12912 - DNA, 119 bp, homo sapiens
caacaatgagtaaaaggccaactcccaggcactgctaccacacagagcctgccatgctgtccccaagaggtgcctggagctctgtttggaaggacagctcatgtccctagggtgtgggc

SEQ ID NO: 12913 - DNA, 119 bp, homo sapiens
tccccaagagagtgcctggagctctgtttggaaggacagctcatgtccctagggtgtgggcagaaggcaggcagccgttcccatcctgccggaccagagggcttctgcagctgagcagc

SEQ ID NO: 12914 - DNA, 119 bp, homo sapiens
gcagaaggcaaggcagccgttcccatcctgccggaccagagggcttctgcagctgagcagccgcttcttagactataccagactgtgctactttgccctggcaatcctgaccttcagag

SEQ ID NO: 12915 - DNA, 119 bp, homo sapiens
gccgcttcttcagactataccagactgtgctactttgccctggcaatcctgaccttcagagcacacataacgtgcccaagtgcacacatacagaccctccgctcccacgtcactccttt

SEQ ID NO: 12916 - DNA, 119 bp, homo sapiens
agcacacatatacgtgcccaagtgcacacatacagaccctccgctcccacgtcactccttttctcccatcccacctcttgcacctggcgtgcgacatccgggtctccaaagtctctgct

SEQ ID NO: 12917 - DNA, 119 bp, homo sapiens
tttctcccattcccacctcttgcacctggcgtgcgacatccgggtctccaaagtctctgctgtctacacacagaaccgtgggccggaactggctgcctgaccgtggtggaaattacagc

SEQ ID NO: 12918 - DNA, 119 bp, homo sapiens
ctgtctacacaacagaaccgtgggccggaactggctgcctgaccgtggtggaaattacagccagcgagaggaagaagtaagccagccagcagctgtggcatgcactcccacatagccct

SEQ ID NO: 12919 - DNA, 119 bp, homo sapiens
gccagcgagaaggaagaagtaagccagccagcagctgtggcatgcactcccacatagcccttctctgacgttccctcagcacacagccctcagggaatgtaggctgcaaaatgtcagga

SEQ ID NO: 12920 - DNA, 119 bp, homo sapiens
cttctctgacagttccctcagcacacagccctcagggaatgtaggctgcaaaatgtcaggaggtagaaagtctgcaccggcaattgtaccaacagtgcgtatgtgtgctcactcccctg

SEQ ID NO: 12921 - DNA, 119 bp, homo sapiens
gaggtagaaatgtctgcaccggcaattgtaccaacagtgcgtatgtgtgctcactcccctgcagaaatggctgctgtgcagtgcaggctgacactgaacaaaactacatgcacacatac

SEQ ID NO: 12922 - DNA, 119 bp, homo sapiens
tgcagaaatgtgctgctgtgcagtgcaggctgacactgaacaaaactacatgcacacatacaaaaactgaacttaggaaggtgtctccaaatgtgcagcaactctggtggaataaaatt

SEQ ID NO: 12923 - DNA, 119 bp, homo sapiens
acaaaaactgcaacttaggaaggtgtctccaaatgtgcagcaactctggtggaataaaattattagtattttcatgccggagcaatgaatctcaattatctgttcacaagtaattcctt

SEQ ID NO: 12924 - DNA, 119 bp, homo sapiens
ttattagtatatttcatgccggagcaatgaatctcaattatctgttcacaagtaattccttaactaaaaacagtagatattgaacgagaaggtcatgtttaaatccttccattaatttc

SEQ ID NO: 12925 - DNA, 119 bp, homo sapiens
ttaactaaaaaacagtagatattgaacgagaaggtcatgtttaaatccttccattaatttctacatttcgatcatttgcttttggggatttttttaaagcagagtataattcagtggaa

SEQ ID NO: 12926 - DNA, 119 bp, homo sapiens
tctacatttctgatcatttgcttttggggatttttttaaagcagagtataattcagtggaagtgtgtcttgtccccagaggtttctgcatgtgcaagcattttaatctagactgccaga

SEQ ID NO: 12927 - DNA, 119 bp, homo sapiens
aagtgtgtctttgtccccagaggtttctgcatgtgcaagcattttaatctagactgccagaacccccagctttttagtgaagtttgcagaggaagacttatctgtattgacttatatgt

SEQ ID NO: 12928 - DNA, 119 bp, homo sapiens
gaacccccaggctttttagtgaagtttgcagaggaagacttatctgtattgacttatatgttgcacagacaaatgaaagtctcagacagtccttttttacccaacaaaggcttattttt

SEQ ID NO: 12929 - DNA, 119 bp, homo sapiens
gttgcacagaacaaatgaaagtctcagacagtccttttttacccaacaaaggcttatttttttccatccttgcttgggctcaagcactcctgccctgcgtgcctccactttaaacatga

SEQ ID NO: 12930 - DNA, 119 bp, homo sapiens
ttttccatcctttgcttgggctcaagcactcctgccctgcgtgcctccactttaaacatgatcagaacttgcttcattgcaaataacaactgaccaacaatgggccctgcttcatagat

SEQ ID NO: 12931 - DNA, 119 bp, homo sapiens
gatcagaactgtgcttcattgcaaataacaactgaccaacaatgggccctgcttcatagatttgggaattttggcttaagctgccaatgactgaaggcctttaattcccaccggccagt

SEQ ID NO: 12932 - DNA, 119 bp, homo sapiens
atttgggaatgtttggcttaagctgccaatgactgaaggcctttaattcccaccggccagtcacagtctctttgttgttgtctgttgatgtgtctgtgctcattattccttgacatgca

SEQ ID NO: 12933 - DNA, 119 bp, homo sapiens
gtcacagtctgctttgttgttgtctgttgatgtgtctgtgctcattattccttgacatgcaacatccccctccaccctccaaccatccacaaccgcacagaaagcaagattcaaatggg

SEQ ID NO: 12934 - DNA, 119 bp, homo sapiens
caacatcccccctccaccctccaaccatccacaaccgcacagaaagcaagattcaaatgggaacagctgagtggttcaatgggaaatgatgcctcttgtgcaaaggggagggagacaga

SEQ ID NO: 12935 - DNA, 119 bp, homo sapiens
ggaacagctgtagtggttcaatgggaaatgatgcctcttgtgcaaaggggagggagacagaaaagggaggggcctatttgaaaaaggcaacagctttcagaaagtctcctttaagaaat

SEQ ID NO: 12936 - DNA, 119 bp, homo sapiens
gaaaagggagagggcctatttgaaaaaggcaacagctttcagaaagtctcctttaagaaatctacttttaatatacttcagtgaaatcattgttgaaataggctgacaatggaaatctg

SEQ ID NO: 12937 - DNA, 119 bp, homo sapiens
atctacttttgaatatacttcagtgaaatcattgttgaaataggctgacaatggaaatctgcccagattaaaatgccagtcctaattcaaaaaacaattcctagctaatcgcttgttgc

SEQ ID NO: 12938 - DNA, 119 bp, homo sapiens
tgcccagattgaaaatgccagtcctaattcaaaaaacaattcctagctaatcgcttgttgcatttttaattatttctagactttgagctttagaattaaatggctaactgggaaatgtt

SEQ ID NO: 12939 - DNA, 119 bp, homo sapiens
gcatttttaaattatttctagactttgagctttagaattaaatggctaactgggaaatgttaccatttttatatatgttgtgggtataaatgggcacagatctacaccctgctgtaagt

SEQ ID NO: 12940 - DNA, 119 bp, homo sapiens
ttaccattttgtatatatgttgtgggtataaatgggcacagatctacaccctgctgtaagtggaattttttctaacacgtttttgatttatggtatctataaggattattttttaagga

SEQ ID NO: 12941 - DNA, 119 bp, homo sapiens
gtggaatttttttctaacacgtttttgatttatggtatctataaggattattttttaaggatcatcaggtgtaaaacagagtgtgtgtgaaagtaaccattggtttagaatgttgatct

SEQ ID NO: 12942 - DNA, 119 bp, homo sapiens
gatcatcaggatgtaaaacagagtgtgtgtgaaagtaaccattggtttagaatgttgatctaacatggaataaaatttgtaacaccacactataaggttaaaaagaaaactgtataata

SEQ ID NO: 12943 - DNA, 119 bp, homo sapiens
ctaacatggaaataaaatttgtaacaccacactataaggttaaaaagaaaactgtataataaaggaaatcaaaggctttggcatggttttttacaatcaacaatggttaattttgatat

SEQ ID NO: 12944 - DNA, 119 bp, homo sapiens
taaaggaaatacaaaggctttggcatggttttttacaatcaacaatggttaattttgatatgtagttgtaacaacttcaaaacacttaagtttaaaactcttgcaagcacttttaattg

SEQ ID NO: 12945 - DNA, 119 bp, homo sapiens
atgtagttgtgaacaacttcaaaacacttaagtttaaaactcttgcaagcacttttaattgattaggaagaactctagatgcacaaaatgattggaccgtgaacagtaatacaactata

SEQ ID NO: 12946 - DNA, 119 bp, homo sapiens
tgattaggaatgaactctagatgcacaaaatgattggaccgtgaacagtaatacaactatatctaagaaaattaacttttgctggccaaaaaagaaacgtatgattgcatgaaaatgtg

SEQ ID NO: 12947 - DNA, 119 bp, homo sapiens
tatctaagaacaattaacttttgctggccaaaaaagaaacgtatgattgcatgaaaatgtgtataaaactctatattcttgtcaaatataaatgaaattaactttattatagaaatcat

SEQ ID NO: 12948 - DNA, 119 bp, homo sapiens
tgtataaaacatctatattcttgtcaaatataaatgaaattaactttattatagaaatcattctgaggattctagggaagacaaatacttacattttgacataaaacaaattggattat

SEQ ID NO: 12949 - DNA, 119 bp, homo sapiens
attctgaggatttctagggaagacaaatacttacattttgacataaaacaaattggattatatcgaagaacactctaccttttagctatcaactttttttcttccttgaatttatatct

SEQ ID NO: 12950 - DNA, 119 bp, homo sapiens
atatcgaagacacactctaccttttagctatcaactttttttcttccttgaatttatatcttaccctttttgcacataaacttcatctgttaacaacctttggaaaaccaacagatatt

SEQ ID NO: 12951 - DNA, 119 bp, homo sapiens
cttacccttttttgcacataaacttcatctgttaacaacctttggaaaaccaacagatatttctgacataatctagtgcatgttgttccaggtttaattatatgcaaaggaatgataca

SEQ ID NO: 12952 - DNA, 119 bp, homo sapiens
tttctgacataaatctagtgcatgttgttccaggtttaattatatgcaaaggaatgatacaaacttggacatcagtccataaactatgaacagatgggtagaagtattcgatatatctt

SEQ ID NO: 12953 - DNA, 119 bp, homo sapiens
caaacttggaacatcagtccataaactatgaacagatgggtagaagtattcgatatatcttgataaaaccttaaattcgtggcaaagcttgttgatcatggttttctttttaaaaaaaa

SEQ ID NO: 12954 - DNA, 119 bp, homo sapiens
ttgataaaactcttaaattcgtggcaaagcttgttgatcatggttttctttttaaaaaaaaaaaaaacacttcatgaccaacacagatcaaacatccatccagtctacattgttctttt

SEQ ID NO: 12955 - DNA, 119 bp, homo sapiens
aaaaaaaacaacttcatgaccaacacagatcaaacatccatccagtctacattgttctttttttcattaaacatacaaatgcccatttacaaataatacaccaaaatgaataaaagttt

SEQ ID NO: 12956 - DNA, 119 bp, homo sapiens
tttttcattataacatacaaatgcccatttacaaataatacaccaaaatgaataaaagtttggataccaaatgaagatttgttccaactgatatcgtgccttctgtatacaaaggtcct

SEQ ID NO: 12957 - DNA, 119 bp, homo sapiens
ttggataccaaaatgaagatttgttccaactgatatcgtgccttctgtatacaaaggtccttgtttcaatccattccttccccagtggtacaatacaggacacaattgtagaactgaag

SEQ ID NO: 12958 - DNA, 119 bp, homo sapiens
cttgtttcaagtccattccttccccagtggtacaatacaggacacaattgtagaactgaagcggctctacagccatttttctttctttcctgaaagctcaactgttgtgtccccatagt

SEQ ID NO: 12959 - DNA, 119 bp, homo sapiens
gtaatcttggccagtattgagacatatcaggttcacttccgggaacttgaactggaactgacacaccagggaaatgagtcctagaagtggatgaaagaaatagccatgtagatattccc

SEQ ID NO: 12960 - DNA, 119 bp, homo sapiens
ctcacctgttgaagtggtgcccgaggtgcccattggctgactgttcatgtgtgtctgcatatgtggggggtgtaggtatcataactccgcccattcaccgaagggctggtgggcagcat

SEQ ID NO: 12961 - DNA, 119 bp, homo sapiens
tgttcatgtgtgtctgcatatgtgggggggtgtaggtatcataactccgcccattcaccgaagggctgggggcagcatgcaggagtatgaggaggtctggctggggactgggggctgtg

SEQ ID NO: 12962 - DNA, 119 bp, homo sapiens
attacccggtgtggtgggttgtggaattggttggtagacactggtgctgaaactactgctgataggaattgactaggtgtgttgctggcctgtcttctctgattcctcagtttttcttc

SEQ ID NO: 12963 - DNA, 119 bp, homo sapiens
tggtgctgaaactactgctgataggaatatgactaggtgtgttgctggcctgtcttctctgattcctcatttttcttctcttctccatttggcccttcgattagaaaaccatacctgga

SEQ ID NO: 12964 - DNA, 119 bp, homo sapiens
atcacctttctccagggcctcaatttgctcttgggtaaaggatgttctatttctttgcagcttccgcttagctgaagtcgcatttgagcctcatctgaatcttctccgttggaactgat

SEQ ID NO: 12965 - DNA, 119 bp, homo sapiens
tttctttgcagcttccgcttcagctgaagtcgcatttgagcctcatctgaatcttctccgttggaactgtggagttggtattctctccccctccttcctgttgctggcagccatctgga

SEQ ID NO: 12966 - DNA, 119 bp, homo sapiens
tttaccttgcgtaggttgccctggcaccgaagtccccggataccaaccagggcgggtgccccagcttccgtctgcccgttcaacatccttagtttatcatacatgccgtctgcgcccat

SEQ ID NO: 12967 - DNA, 119 bp, homo sapiens
tgccccagcttccggtctgcccgttcaacatccttagtttatcatacatgccgtctgcgcccatctgttcttttcgctagccaggttgcgaagaactctgtttattgatgacacctgca

SEQ ID NO: 12968 - DNA, 119 bp, homo sapiens
cttacgcttggtatgttatcgttggtacagaccccctcggacagtaatctgtctcggatttcccaagcaagatggacgggcactcccgcttatactgggctattttgcttacaacttct

SEQ ID NO: 12969 - DNA, 119 bp, homo sapiens
tcggatttcccaagcaaagatggacgggcactcccgcttatactgggctattttgcttacaacttctgggtcgctactctcggtttactaccaccgattgccctgggtctgatggagcc

SEQ ID NO: 12970 - DNA, 119 bp, homo sapiens
tgcttacaacttctggagtcgctactctcggtttactaccaccgattgccctgggtctgatggagccagctcgtaatacctgcccagaattttactcacacatccgttggacacctgca

SEQ ID NO: 12971 - DNA, 119 bp, homo sapiens
atcacctgcagaattcgggaaatgtcgcacggccgggccccgctgtgagctagctctacaatcttctgcgggtggagtccggcagtggccgcccgttgacaaagacaccaccgagctga

SEQ ID NO: 12972 - DNA, 119 bp, homo sapiens
atgtcgcacggccgggccccgctgtgagctagctctacaatcttctgccgggtggagtccggcagtggcgcccgttgacaaagacaccaccgagctgattcactccgctgtgacctgag

SEQ ID NO: 12973 - DNA, 119 bp, homo sapiens
ctcacctttatgaggcatcctttctggttgtcacagcttctgtcaagagttttgtttggttggggtttttgtgctgctgttgttgcttgaagaccacaatggtttgaaatgacggtgtt

SEQ ID NO: 12974 - DNA, 119 bp, homo sapiens
ttggggttttttgtgctgctgttgttgcttgaagaccacaatggtttgaaatgacggtgttttaaaggattgctggtgagagttttctccacggatgttgctgggttggtgtgtgagag

SEQ ID NO: 12975 - DNA, 119 bp, homo sapiens
ttttaaaggagttgctggtgagagttttctccacggatgttgctgggttggtgtgtgagagcaattctcgattcctgggaaggagacagagattgacaataaaatgggctgtcagcggc

SEQ ID NO: 12976 - DNA, 119 bp, homo sapiens
agcaattctcagattcctgggaaggagacagagattgacaataaaatgggctgtcagcggctggagagtagagataaagagtgtgggtgagggaagtggctgcagccagcacacctatg

SEQ ID NO: 12977 - DNA, 119 bp, homo sapiens
gctggagagtgagagataaagagtgtgggtgagggaagtggctgcagccagcacacctatgctgattgggatggctcaagtgtgttaatgtgtgtgtgccggcgcccggcctcgcctcc

SEQ ID NO: 12978 - DNA, 119 bp, homo sapiens
tgctgattggtgatggctcaagtgtgttaatgtgtgtgtgccggcgcccggcctcgcctccaccgctcccactggcccattagcgaagcctgacctctgtcatcatcctccagcaaaac

SEQ ID NO: 12979 - DNA, 119 bp, homo sapiens
ccaccgctcctcactggcccattagcgaagcctgacctctgtcatcatcctccagcaaaacacttcctctgcgcctgaaccagagcgggaaatgaggccgagccacggttcccttttca

SEQ ID NO: 12980 - DNA, 119 bp, homo sapiens
acacttcctcctgcgcctgaaccagagcgggaaatgaggccgagccacggttcccttttcaaacccactatcactccgcaacatgcaaatgcaccgctcgctctcacacaaaatattgc

SEQ ID NO: 12981 - DNA, 119 bp, homo sapiens
ttacctgggagcggagggcggggaggcaggtgagcctggcagcgccggttcccacacttctcaccgccgtcggcaggggaagtggcagatctgacagccgcgttctacgcgaggacctg

SEQ ID NO: 12982 - DNA, 119 bp, homo sapiens
cgccggttcccacacttctcaccgccgctcggcaggggaagtggcagatctgacagccgcgttctacgcaggacctgccccagagtttaaatgtcaatgataagaaaagagggtgctca

SEQ ID NO: 12983 - DNA, 119 bp, homo sapiens
tttgaataggtgatacatatggtacaaaattcaaaaaaatacaaaaggagatacagtgaaaagtctcccatcctgtacctatccaccctgtcaccctccccacaaaccaccattggttc

SEQ ID NO: 12984 - DNA, 119 bp, homo sapiens
acaatatctcaaggttggcaggaaggtggagattggagtgttgtgggggcagtgggaacagcagttacgaggtgtagtgccagcaggatatatttgggggatggtaagttctccgatgg

SEQ ID NO: 12985 - DNA, 119 bp, homo sapiens
gggcagtgggaacagcagttacgaaggtgtagtgccagcaggatatatttgggggatggtaagttctccatggtgaggtataaggcggagtggcaaggatgaggtgaacagacaaccgc

SEQ ID NO: 12986 - DNA, 119 bp, homo sapiens
atttgggggatggtaagttctccgatggtgaggtataaggcggagtggcaaggatgaggtgaacagacaccgcttctctttccccattctttagacaaatagtgttatgttacatgctg

SEQ ID NO: 12987 - DNA, 119 bp, homo sapiens
ggcaaggatgaggtgaacagacaaccgcttctctttccccattctttagacaaatagtgttatgttacagctgttatgcaaccctcccttttccccttaatttgttttggatatctttc

SEQ ID NO: 12988 - DNA, 119 bp, homo sapiens
tagacaaatagtgttatgttacatgctgttatgcaaccctcccttttccccttaatttgttttggatattttcttaaggaatttagagccaccttttttaagggttccatagcaattaa

SEQ ID NO: 12989 - DNA, 119 bp, homo sapiens
tatgtgatggctaacaatcagaggagcaggtaggacagggcagattaaattaagaaagtagcattcactccatgctccagtcacatggagccttgttcatttacattgccattcatcag

SEQ ID NO: 12990 - DNA, 119 bp, homo sapiens
tagcattcacttccatgctccagtcacatggagccttgttcatttacattgccattcatcagagaagtagaagtcagagctttccttgtcttttaatagtaaagagtcatttcccattg

SEQ ID NO: 12991 - DNA, 119 bp, homo sapiens
tcagagaagtacgaagtcagagctttccttgtcttttaatagtaaagagtcatttcccattggaacccacataggctatcagcagagctggccagggagtaggcacagcctcatctcta

SEQ ID NO: 12992 - DNA, 119 bp, homo sapiens
attggaacccatcataggctatcagcagagctggccagggagtaggcacagcctcatctctaatatttaacttagccaacatggtaaagaaatttaatctgatatgaaataaaaacaac

SEQ ID NO: 12993 - DNA, 119 bp, homo sapiens
tctaatatttagacttagccaacatggtaaagaaatttaatctgatatgaaataaaaacaacagaagagccagatgcacatttctttattccaccatggttctgaactcccagctagtt

SEQ ID NO: 12994 - DNA, 119 bp, homo sapiens
caacagaagagaccagatgcacatttctttattccaccatggttctgaactcccagctagtttgggttgagtgagtctctgcttgtaaactcagaggaatgcctgccatcgttttctga

SEQ ID NO: 12995 - DNA, 119 bp, homo sapiens
agtttgggttggagtgagtctctgcttgtaaactcagaggaatgcctgccatcgttttctgaagggaaaggcaggggtttctgagtggaggggaaaaacaacattggaaatctggctgc

SEQ ID NO: 12996 - DNA, 119 bp, homo sapiens
ctgaagggaaagggcaggggtttctgagtggaggggaaaaacaacattggaaatctggctgcttctgaaaagaccacactggaaaatagactttttacttttagcacatcaaactggtt

SEQ ID NO: 12997 - DNA, 119 bp, homo sapiens
ctgcttctgaacaagaccacactggaaaatagactttttacttttagcacatcaaactggttttcacaaaggagatcccagaagaggtttgtttcctgtaagaagcagtgtttatgtaa

SEQ ID NO: 12998 - DNA, 119 bp, homo sapiens
ggttttcacaaaaggagatcccagaagaggtttgtttcctgtaagaagcagtgtttatgtaatagaggttttgtagatgggtgctgtatcccatggcagcccttgctgctggtgcccac

SEQ ID NO: 12999 - DNA, 119 bp, homo sapiens
gtaatagaggtctttgtagatgggtgctgtatcccatggcagcccttgctgctggtgcccacaggctatactgggcggattcagctactgaatattttctttagacgtataaagccttg

SEQ ID NO: 13000 - DNA, 119 bp, homo sapiens
ccacaggctatcactgggcggattcagctactgaatattttctttagacgtataaagccttggctccccttctcatcaactccacgtatttttcatcatgtcctcttgctgctttctca

SEQ ID NO: 13001 - DNA, 119 bp, homo sapiens
cttggctcccctttctcatcaactccacgtatttttcatcatgtcctcttgctgctttctcaggctcttgttcttcttcatttgtgtctcttacattcaacaagctaatatcagccttg

SEQ ID NO: 13002 - DNA, 119 bp, homo sapiens
ctcaggctctttgttcttcttcatttgtgtctcttacattcaacaagctaatatcagccttgcttctctagtgaagggatcttctgccactccttggggtcagagaatgggctacagga

SEQ ID NO: 13003 - DNA, 119 bp, homo sapiens
cttgcttctctgagtgaagggatcttctgccactccttggggtcagagaatgggctacaggatggaggttggcaaaatcagggcccagaacagattggctgagtggtggtgatggttct

SEQ ID NO: 13004 - DNA, 119 bp, homo sapiens
aggatggaggtgtggcaaaatcagggcccagaacagattggctgagtggtggtgatggttcttaggaggggctctggagtcagtccccaagcttccccaaatcctttcttgctccacag

SEQ ID NO: 13005 - DNA, 119 bp, homo sapiens
ttcttaggagggggctctggagtcagtccccaagcttccccaaatcctttcttgctccacagattctgaggacctccctagggcagatgtagcctctgtcccagttgtgggatcgtcag

SEQ ID NO: 13006 - DNA, 119 bp, homo sapiens
acagattctgaaggacctccctagggcagatgtagcctctgtcccagttgtgggatcgtcaggatgatgtggattgtggctggaaaggggtgtctgcagtgtgaggccatggggccttg

SEQ ID NO: 13007 - DNA, 119 bp, homo sapiens
tcaggatgatggtggattgtggctggaaaggggtgtctgcagtgtgaggccatggggccttgcatgctccacagcttgggagggtggatgagggccatcctttggtaagcatcccatag

SEQ ID NO: 13008 - DNA, 119 bp, homo sapiens
cttgcatgctcgcacagcttgggagggtggatgagggccatcctttggtaagcatcccatagcaaggccggaaaggtggtggacagggcctcatgcggtggctgaagcattaaagcgat

SEQ ID NO: 13009 - DNA, 119 bp, homo sapiens
atagcaaggccaggaaaggtggtggacagggcctcatgcggtggctgaagcattaaagcgattggtggtcttgagccaagcaagggcatggaggcaatgaccgaagcttacagccagag

SEQ ID NO: 13010 - DNA, 119 bp, homo sapiens
cgattggtggtgcttgagccaagcaagggcatggaggcaatgaccgaagcttacagccagaggctaagcgggagagatgaaagcaggcaaggctgattggaaacctctggcctgatgtc

SEQ ID NO: 13011 - DNA, 119 bp, homo sapiens
agaggctaagctgggagagatgaaagcaggcaaggctgattggaaacctctggcctgatgtcacggtgtttcccagctaggaaatcatcctcaaggcccctgcctgtgactggaggcca

SEQ ID NO: 13012 - DNA, 119 bp, homo sapiens
tgtcacggtgtcttcccagctaggaaatcatcctcaaggcccctgcctgtgactggaggccatttccagtagttgccacactgacccctgactgctactccttggcagtgcagtggggg

SEQ ID NO: 13013 - DNA, 119 bp, homo sapiens
gccatttccaggtagttgccacactgacccctgactgctactccttggcagtgcagtgggggggccctgctcagccacatatcccggggagcagtggcagcggtaggagccctctgtgt

SEQ ID NO: 13014 - DNA, 119 bp, homo sapiens
ggggggccctgcctcagccacatatcccggggagcagtggcagcggtaggagccctctgtgttctcgcataaccatggacacagagcacagcaggcccgttcaagtcatcacactcatt

SEQ ID NO: 13015 - DNA, 119 bp, homo sapiens
cttacctacgcaggccatgtgggccgcatccagctggaagccctcaaaacagtcacaggtgtagccctccgcacgcgcacacagcggccattctcacagccgttcaggatgccgcactc

SEQ ID NO: 13016 - DNA, 119 bp, homo sapiens
ccctcaaaacagtcacaggtgtagccctcccgcacgcgcacacagcggccattctcacagccgttcaggtgccgcactcctccgcctgaagcccttcgaagccggctgggggctctggg

SEQ ID NO: 13017 - DNA, 119 bp, homo sapiens
cagacctggatggctggccacgtagtggggctggagttctgagggctgcaaaggagactcaaggatggggtgcggtccgctgagtgaccggctgtgttggggaaggcaggctcagggac

SEQ ID NO: 13018 - DNA, 119 bp, homo sapiens
ctcaaggatgggtgtgcggtccgctgagtgaccggctgtgttggggaaggcaggctcagggacggtgtctcggggcccaggtagttgtagaagggggccccatctgggccatagatgct

SEQ ID NO: 13019 - DNA, 119 bp, homo sapiens
agggacggtgtcctcggggcccaggtagttgtagaagggggccccatctgggccatagatgctgtagtgaggtcatcgggcccggggccatactcatagcctggccggaagtggacccc

SEQ ID NO: 13020 - DNA, 119 bp, homo sapiens
gatgctgtagtgcaggtcatcgggcccggggccatactcatagcctggccggaagtggaccccggcctccgctctgcctcaatgcgagccacgttgcacagctgagcatagacctctgt

SEQ ID NO: 13021 - DNA, 119 bp, homo sapiens
ctcaccagagctcctcgggggacacagagcacactgctggctccaggcctcgccgtcctggcagcagcatccgtgtaggtggtgcggtgcccacgcaggggttcgctgcacacatcatt

SEQ ID NO: 13022 - DNA, 119 bp, homo sapiens
tggcagcagcattccgtgtaggtggtgcggtgcccacgcaggggttcgctgcacacatcattggtgactttttccagcagatgtccatgtggatgtcgtggtcagggaggtcctctggt

SEQ ID NO: 13023 - DNA, 119 bp, homo sapiens
ctcacccgtgctgctggtgctgttcatgcagcgctgctggctgaggtccagggtgagcggggggctgcaaagcagtggaaggagccctccgtgttgacgcactcgccattctcacaggc

SEQ ID NO: 13024 - DNA, 119 bp, homo sapiens
cagcgctgctggctgaggtccagggtgagcggggggctgcagaagcagtggaaggagccctccgtgttgcgcactcgccattctcacaggccaggtcctggcactcatcgtgatctggg

SEQ ID NO: 13025 - DNA, 119 bp, homo sapiens
cttaccctcacacttcttgtgggaagcatcgtagtggaagccgggattgcacaggcagacataaccaggacggtgttgaggcaccggccgttcgggcagagaccaggcccgaatatcac

SEQ ID NO: 13026 - DNA, 119 bp, homo sapiens
tgggaagcatcgtagtggaagccgggattgcacaggcagacataaccaggcacggtgttgaggcaccggcgttcgggcagagaccaggcccgaatatcacacactcatccgcatctgtg

SEQ ID NO: 13027 - DNA, 119 bp, homo sapiens
cttacctgagtcctcagacgggcagaggtcacaggcatctccccagctagcgccctgggtgcagcagcatcagcctgtgtggtgttccggcccaggacactggagcagggcgcatggcc

SEQ ID NO: 13028 - DNA, 119 bp, homo sapiens
cccagctagcgccctgggtgcagcagcattcagcctgtgtggtgttccggcccaggacactggagcaggcgcatggcccttctgcccggagtagcagtccatgcgggtgggggccgggg

SEQ ID NO: 13029 - DNA, 119 bp, homo sapiens
gtgttccggcccaggacactggagcagggcgcatggcccttctgcccggagtagcagtccatgcgggtggggccggggcatggtcccccgttggggcctcagacatactctgacctgtg

SEQ ID NO: 13030 - DNA, 119 bp, homo sapiens
ctcacctccagccccccgtgggcggcagtgcccctcctgggcatcgtactcctccaggtcactggcacaaggcacaggaaggagccctccacgttctcacagagcgcggccccacatac

SEQ ID NO: 13031 - DNA, 119 bp, homo sapiens
tcctgggcatcgtactcctccaggtcactggcacagaggcacaggaaggagccctccacgttctcacaggcgcggccccacataccgccagcataagctcacactcgttcacatctgcc

SEQ ID NO: 13032 - DNA, 119 bp, homo sapiens
ctcacccacacagtcccagcctgagggagagatctcgaagccctggtcacagaggcagcggaaggagcctcagtgttgtcacagaagccgtggctgccacacatggtgtcgttggcgca

SEQ ID NO: 13033 - DNA, 119 bp, homo sapiens
cagcctgagggagagatctcgaagccctggtcacagaggcagcggaaggagccatcagtgttgtcacagagccgtggctgccacacatggtgtcgttggcgcactcgtctatgtctgtg

SEQ ID NO: 13034 - DNA, 119 bp, homo sapiens
ctcaccaatgcagtctccgttcggggccatgtggaagccaggctggcagcccagaacacagcggtaggaccagggctgttttcacacttccaggtgccacacaccgggtctccatagtc

SEQ ID NO: 13035 - DNA, 119 bp, homo sapiens
ggggccatgtggaagccaggctggcagcccagaacacagcggtaggagccagggctgttttcacacttcaggtgccacacaccgggtctccatagtcctcacactcgtcaatatctgtc

SEQ ID NO: 13036 - DNA, 119 bp, homo sapiens
cttacccacacactctccactctctggggagggctggaagccagtctcacatagacagttgaaggagcctcggtgttgacacagtgccctcccacacacgggtctgtggtggcacactc

SEQ ID NO: 13037 - DNA, 119 bp, homo sapiens
tctccactctctggggagggctggaagccagtctcacatagacagttgaaggagccctcggtgttgacaagtgccctcccacacacgggtctgtggtggcacactcgtccacatctaga

SEQ ID NO: 13038 - DNA, 119 bp, homo sapiens
ctcaccctggcagctggtgcccccctctgcgctgacgaagccaggcgcgcacagacagaagaaagaccctggctgttgaggcactcgccgtggggtgcgcagtgctcctcccccatgca

SEQ ID NO: 13039 - DNA, 119 bp, homo sapiens
gtgcccccctctgcgctgacgaagccaggcgcgcacagacagaagaaagacccgtggctgttgaggcaccgccgtggggtgcgcagtgctcctcccccatgcactcattcacatctgca

SEQ ID NO: 13040 - DNA, 119 bp, homo sapiens
ctcaccctcacacacggtgccattggccagctggaagccctggggacagaggcactggtaggagcccacgtgttcttgcactcgcctcccaggcagctgctctgggggtcttcacattc

SEQ ID NO: 13041 - DNA, 119 bp, homo sapiens
acggtgccattggccagctggaagccctggggacagaggcactggtaggagcccacagtgttcttgcaccgcctcccaggcagctgctctgggggtcttcacattcatccacatctgca

SEQ ID NO: 13042 - DNA, 119 bp, homo sapiens
cataccttcacaggagtcacccagggggctgggccggtagcccccatcgcagtccttgcaggagaaggaccagccgtgttggtgcagactccggaggggcagactcccgggaaggcaca

SEQ ID NO: 13043 - DNA, 119 bp, homo sapiens
tcacccagggggctgggccggtagcccccatcgcagtccttgcaggagaaggagccagccgtgttggtgagactccggaggggcagactcccgggaaggcacactcatctaggtctgca

SEQ ID NO: 13044 - DNA, 119 bp, homo sapiens
gttaccttcacaggcagtgccgtcttcattcacccagtacccgttctcacaggcagagcaggcgaaggaccctccgtgttgaggcagaggcctgtggggcatgaggcccggctggcaca

SEQ ID NO: 13045 - DNA, 119 bp, homo sapiens
gtgccgtcttcattcacccagtacccgttctcacaggcagagcaggcgaaggagccctccgtgttgaggagaggcctgtggggcatgaggcccggctggcacactcatccacatctgaa

SEQ ID NO: 13046 - DNA, 119 bp, homo sapiens
tgtaccttggcagcccttctcatctgaggtgacctcatagccctgctcacaagagcatctgaaggagcctctaggttggtgcactttccatgggcacagaccccgggagtcagacactc

SEQ ID NO: 13047 - DNA, 119 bp, homo sapiens
cccttctcatctgaggtgacctcatagccctgctcacaagagcatctgaaggagccttctaggttggtgactttccatgggcacagaccccgggagtcagacactcattcacatctgtg

SEQ ID NO: 13048 - DNA, 119 bp, homo sapiens
cttaccttgacactcctgtgtcgcccctgaggtggccagagtgtagccagggtagcagaagcaggagtagaccccacgcggttgatgcagcgcccttttcccttgcaggggtccctcag

SEQ ID NO: 13049 - DNA, 119 bp, homo sapiens
gtcgcccctgaggtggccagagtgtagccagggtagcagaagcaggagtaggaccccacgcggttgatgagcgcccttttcccttgcaggggtccctcagacactcgttgtcatctgac

SEQ ID NO: 13050 - DNA, 119 bp, homo sapiens
aatacctgtgcagtaggcctggctggggtgcagctggtagccagggctgcagacacatctgtatccatcgggaggttcacgcaggttccagggccacagacgttggtggctccagcagc

SEQ ID NO: 13051 - DNA, 119 bp, homo sapiens
tggctggggtgcagctggtagccagggctgcagacacatctgtatccatcggggaggttcacgcaggttcagggccacagacgttggtggctccagcagcgcatctgtcaatgcctgtg

SEQ ID NO: 13052 - DNA, 119 bp, homo sapiens
gatacccttgtcagggatggtcccggcctcaagccaggtgtccgtgacgacccggaggggctgcctctcgctggcccgggcagtgccccgctgctcctctgcccttgctcccttggggg

SEQ ID NO: 13053 - DNA, 119 bp, homo sapiens
ggaggggctgcctctctgctggcccgggcagtgccccgctgctcctctgcccttgctcccttgggggcctgccagttcctcctcctcggctttcctcatggacaggcggatgtcggagc

SEQ ID NO: 13054 - DNA, 119 bp, homo sapiens
tgctcccttgggggccttgccagttcctcctcctcggctttcctcatggacaggcggatgtcggagctccgtaggtgtagccgtggccggcagggcagatctctctgaaggcctctgca

SEQ ID NO: 13055 - DNA, 119 bp, homo sapiens
gttacctgtgccaggcagagggcatttctcacactcgctgccccatgctttgcccacgcggctgcagcacatatctgcttggtgatccgctgggccaaaggcagggtgcaggtgccggg

SEQ ID NO: 13056 - DNA, 119 bp, homo sapiens
acgcggctgcagcagcatatctgcttggtgatccgctgggccaaaggcagggtgcaggtgccgggccccgcgaccggtagcacagtccctgcagcatggagattgccttgtccgctgca

SEQ ID NO: 13057 - DNA, 119 bp, homo sapiens
ctcacacacacagcggctccgcgatggatccagcatgaggccaggtctgcatgtgcacaggtagctgccctggtattcacacactccgcgtccttgcacaggcccagggtcaagcactc

SEQ ID NO: 13058 - DNA, 119 bp, homo sapiens
cggctccgcgatggatccagcatgaggccaggtctgcatgtgcacaggtagctgcccctggtattcacaactccgcgtccttgcacaggcccagggtcaagcactcgttgatatctgca

SEQ ID NO: 13059 - DNA, 119 bp, homo sapiens
ctcacctgtccgttcacagtgttcaggtaacaccggcccagcagtcctcgaggcctgggtgctgctggggcagtggccgagggggctctccagaccgagcagggatgttgttgctgtcc

SEQ ID NO: 13060 - DNA, 119 bp, homo sapiens
tgctgctgggggcagtggccgagggggctctccagaccgagcagggatgttgttgctgtcccagaggcttggccagggctggcaggcagccagggcgggggtctggtctccacgctgtt

SEQ ID NO: 13061 - DNA, 119 bp, homo sapiens
cccagaggctgtggccagggctggcaggcagccagggcgggggtctggtctccacgctgttctccactaggcctcctccaccccgccccgcacctgggccacctggtggatctgcactg

SEQ ID NO: 13062 - DNA, 119 bp, homo sapiens
ttctccactagggcctcctccaccccgccccgcacctgggccacctggtggatctgcactgaggcctcggtgggtggtgaatgtgcaccttcaccagggaggggttcacggaggctggg

SEQ ID NO: 13063 - DNA, 119 bp, homo sapiens
ctcacccagctggttggagagcggcagtgtgaaagtggactgcttcagtggggcttccagcaaggccctgggcgggaccccctccctggaggctccctgtccggctgcgggataggcag

SEQ ID NO: 13064 - DNA, 119 bp, homo sapiens
tggggcttccagcaaggccctggggcgggaccccctccctggaggctccctgtccggctgcgggataggaggtggcagaacttcccggtggagttggcggggcaccagcattcgtccct

SEQ ID NO: 13065 - DNA, 119 bp, homo sapiens
cctgtccggctgcgggataggcaggtggcagaacttcccggtggagttggcggggcaccagcattcgtcctgccgatgcagcggcctccgttcaggcaggggatctggcagaaatctgc

SEQ ID NO: 13066 - DNA, 119 bp, homo sapiens
ctcacagatgcggaagccagacttgggatcgtgcccatggccgccctggctgtacagggtggtggtgtccccctctcacagctgttggcacagtgtccacgggcacaggtctgcttgca

SEQ ID NO: 13067 - DNA, 119 bp, homo sapiens
gtgcccatggccgccctggctgtacagggtggtggtgtcgcccctctcacagctgttggcacagtgtcccgggcacaggtctgcttgcagatggtgggagtgaagacgatcttgatctt

SEQ ID NO: 13068 - DNA, 119 bp, homo sapiens
ggtggtgtcgcccctctcacagctgttggcacagtgtccacgggcacaggtctgcttgcagatggtggggtgaagacgatcttgatcttcttgattttctccgtgaggttcagccctgc

SEQ ID NO: 13069 - DNA, 119 bp, homo sapiens
cttaccccagggggatgaggggtgctccagaggtaccgcctgttgggtgccatctctctgctcaaggccggtcccgggggcagggcgttggaagagagctggctactggccgtggcagt

SEQ ID NO: 13070 - DNA, 119 bp, homo sapiens
tgttgggtgccatctctctgctcaaggcctggtcccgggggcagggcgttggaagagagctggctactgccgtggcagtcgggtgaagtcggacagtgcgggacaaccccacgtgctgc

SEQ ID NO: 13071 - DNA, 119 bp, homo sapiens
gcagggcgttggaagagagctggctactggccgtggcagtcgggtgaagtcggacagtgcgggacaacccacgtgctgctgggaagggtgggtctggctgaggccactcagggtcctgt

SEQ ID NO: 13072 - DNA, 119 bp, homo sapiens
cttacccagctggtggcgactgtggtgcgggcggcgactgtggtgctggcggctgtgctctggccaagggccctctccagccgcactgctcctgcgcaggttgggtgaacgctcggccc

SEQ ID NO: 13073 - DNA, 119 bp, homo sapiens
gctgtgctctggccaaggtgccctctccagccgcactgctcctgcgcaggttgggtgaacgctcggcccgcgtcgaggtgccagcctggagttctgggggtcaaattcctcatcgggaa

SEQ ID NO: 13074 - DNA, 119 bp, homo sapiens
tgggtgaacgctcggcccagcgtcgaggtgccagcctggagttctgggggtcaaattcctcatcgggaagacctcctcgcagcgggctccacggaaaccagagcggcagacacagagct

SEQ ID NO: 13075 - DNA, 119 bp, homo sapiens
caaattcctcatcgggaatgacctcctcgcagcgggctccacggaaaccagagcggcagacacagagctcgggcggctgcaggagccccggttctggcacggcggctcgcaaacggctg

SEQ ID NO: 13076 - DNA, 119 bp, homo sapiens
ctcaccccgtgagccgccctcgcggcggggttgggggcgcagccccagaccgctgtggggtccccaggctgggagagccggcgcggcccgggtccggggtgctggttgctgctggccca

SEQ ID NO: 13077 - DNA, 119 bp, homo sapiens
gtccccaggcgtgggagagccggcgcggcccgggtccggggtgctggttgctgctggcccaggggagtgttctccgggtctgcgcaggtggctggacacgccgcgactgctgcgcgcgg

SEQ ID NO: 13078 - DNA, 119 bp, homo sapiens
caggggagtgcttctccgggtctgcgcaggtggctggacacgccgcgactgctgcgcgcgggacggcctctggcctccgcctcggtgggcctcctggggctcccccagcccggctgggc

SEQ ID NO: 13079 - DNA, 119 bp, homo sapiens
gggacggcctcctggcctccgcctcggtgggcctcctggggctcccccagcccggctgggcccgctccagggctgcaagcccgcgacaggcgcgtcctgctcccggaacagactgtaca

SEQ ID NO: 13080 - DNA, 119 bp, homo sapiens
gcccgctccacgggctgcaagcccgcgacaggcgcgtcctgctcccggaacagactgtacaccttggctcagccgctgccgggtagctgcccccagggcgccgcagtcgattcgcgtct

SEQ ID NO: 13081 - DNA, 119 bp, homo sapiens
caccttggctgcagccgctgccgggtagctgcccccagggcgccgcagtcgattcgcgtctccaccagcggctcgtatctccctacggggtccctttgggcatgacccgcgcccacgaa

SEQ ID NO: 13082 - DNA, 119 bp, homo sapiens
ctccaccagccggctcgtatctccctacggggtccctttgggcatgacccgcgcccacgaagagagccaggtgagcggcaggaagcctctccaggggttccgcagggcgcgccccgggc

SEQ ID NO: 13083 - DNA, 119 bp, homo sapiens
aagagagccagggtgagcggcaggaagcctctccaggggttccgcagggcgcgccccgggctgcgggcttggtccgcggcctcatggcgcggggcggctggagagtggtgcgcgcgggc

SEQ ID NO: 13084 - DNA, 119 bp, homo sapiens
gctgcgggctttggtccgcggcctcatggcgcggggcggctggagagtggtgcgcgcgggcaccgcgaaagctttgtggtcggcacgctggacgcccgcgggctgttctcccggccccg

SEQ ID NO: 13085 - DNA, 119 bp, homo sapiens
gcaccgcgaagagctttgtggtcggcacgctggacgcccgcgggctgttctcccggccccgcccggcggcagcttctctgagtctagggggccctgaagcggccgactgggggcccggc

SEQ ID NO: 13086 - DNA, 119 bp, homo sapiens
cgcccggcggccagcttctctgagtctagggggccctgaagcggccgactgggggcccggctctcggcgaacgagggctgcgcgccccgagcctcgagtccgcgctcctactccagctg

SEQ ID NO: 13087 - DNA, 119 bp, homo sapiens
gctctcggcggaacgagggctgcgcgccccgagcctcgagtccgcgctcctactccagctgggctcgcaggctgctgcaccttcgcgcctcctccctgtgcctgcagccgtctgaaggg

SEQ ID NO: 13088 - DNA, 119 bp, homo sapiens
tgggctcgcacggctgctgcaccttcgcgcctcctccctgtgcctgcagccgtctgaaggggacccggaggttttatttttggaaacctcccccggctttttcgtctcttttatccaca

SEQ ID NO: 13089 - DNA, 119 bp, homo sapiens
gggacccggacggttttatttttggaaacctcccccggctttttcgtctcttttatccacaccaggcccctcctcggagggacagctcagccccctcattaccggagagggagcgagga

SEQ ID NO: 13090 - DNA, 119 bp, homo sapiens
gaacgttgggtaagaaaattttatttcacaatgtaaagggttatgtgagacccaactgtattctatctgagcattagaagccaactgtagtaaatgcatcttacttatattcgatgctg

SEQ ID NO: 13091 - DNA, 119 bp, homo sapiens
attctatctgaagcattagaagccaactgtagtaaatgcatcttacttatattcgatgctggccagagggctattctgcttcctttagaagttatgctttttattgtggcttgtggtaa

SEQ ID NO: 13092 - DNA, 119 bp, homo sapiens
tggccagaggagctattctgcttcctttagaagttatgctttttattgtggcttgtggtaaccatgtaaatgcaagagcaatggttttcaggaagaaactattatgccttacagctttt

SEQ ID NO: 13093 - DNA, 119 bp, homo sapiens
aaccatgtaacatgcaagagcaatggttttcaggaagaaactattatgccttacagcttttgccccaaacacaagaaaacttgaactatgtcattaaacatcccataaatgctgacaga

SEQ ID NO: 13094 - DNA, 119 bp, homo sapiens
ttgccccaaatcacaagaaaacttgaactatgtcattaaacatcccataaatgctgacagaagataaagatatttattatatgaaattgtctacgccctcagactacaattcctgaata

SEQ ID NO: 13095 - DNA, 119 bp, homo sapiens
gaagataaaggatatttattatatgaaattgtctacgccctcagactacaattcctgaatagttagatgtgaccatgttcatccttctggattaatgaaaacttggaaagcagtcaaag

SEQ ID NO: 13096 - DNA, 119 bp, homo sapiens
tagttagatggtgaccatgttcatccttctggattaatgaaaacttggaaagcagtcaaagctgcctggccctggctggctggctctcccttcagcctgctccccccaggagccctgag

SEQ ID NO: 13097 - DNA, 119 bp, homo sapiens
agctgcctgggccctggctggctggctctcccttcagcctgctccccccaggagccctgagcatctcctctgccattgcctgtacagcttggaggcttttcacatcttggagagcttga

SEQ ID NO: 13098 - DNA, 119 bp, homo sapiens
agcatctccttctgccattgcctgtacagcttggaggcttttcacatcttggagagcttgatgtcataatgaccatgttcaagttgtcccaggcaaagagcttcttctccagggggttg

SEQ ID NO: 13099 - DNA, 119 bp, homo sapiens
gatgtcataagtgaccatgttcaagttgtcccaggcaaagagcttcttctccagggggttgtagtcaatatgctgctgtacttatagcggttcttgaatgggatggtcagggtcttgct

SEQ ID NO: 13100 - DNA, 119 bp, homo sapiens
tgtagtcaatcatgctgctgtacttatagcggttcttgaatgggatggtcagggtcttgctgatacctggcctgtgtcataagcaaagttgacggtagcatctgctgaggtgtagctgc

SEQ ID NO: 13101 - DNA, 119 bp, homo sapiens
ctgatacctgtgcctgtgtcataagcaaagttgacggtagcatctgctgaggtgtagctgctgacggtgacaaggtgccacagatgatgaaggcattggcgactgactgcttacggatg

SEQ ID NO: 13102 - DNA, 119 bp, homo sapiens
gctgacggtgtacaaggtgccacagatgatgaaggcattggcgactgactgcttacggatgtttgtctccaggtttgttcgagttccagattctctgggttcagtttggagaggacaat

SEQ ID NO: 13103 - DNA, 119 bp, homo sapiens
tgtttgtctcccaggtttgttcgagttccagattctctgggttcagtttggagaggacaatggcaccttggcctcatcggtgctgtaaatgacccagaggcctgcttcatccacagcca

SEQ ID NO: 13104 - DNA, 119 bp, homo sapiens
atggcacctttggcctcatcggtgctgtaaatgacccagaggcctgcttcatccacagccaagtcaatgccgtgtagccaccccaagaatacgggaactgtccgtggtagccagctcca

SEQ ID NO: 13105 - DNA, 119 bp, homo sapiens
caagtcaatgtccgtgtagccaccccaagaatacgggaactgtccgtggtagccagctccagggatttcttctcagccttcactgtctcggtattcagctcatatcttatgacagttct

SEQ ID NO: 13106 - DNA, 119 bp, homo sapiens
cagggatttccttctcagccttcactgtctcggtattcagctcatatcttatgacagttctggactcaggccctggaaatagaggctccccgagtacaccacagcacccgtgctttcca

SEQ ID NO: 13107 - DNA, 119 bp, homo sapiens
ctggactcagcgccctggaaatagaggctccccgagtacaccacagcacccgtgctttccagtggcctagcagtatgtgaaccttagaagggtagccctgcataaactggctgatgagg

SEQ ID NO: 13108 - DNA, 119 bp, homo sapiens
cagtggcctaggcagtatgtgaaccttagaagggtagccctgcataaactggctgatgaggtcatactcaaaacctggcggacatccgtgccaactgtgtcgattctccacgtggtctc

SEQ ID NO: 13109 - DNA, 119 bp, homo sapiens
ggtcatactcaaaaacctggcggacatccgtgccaactgtgtcgattctccacgtggtctcctgggtgtggggtaggtgggcttggggtctcgcatccacacaccatacttgccagtaa

SEQ ID NO: 13110 - DNA, 119 bp, homo sapiens
tcctgggtgtaggggtaggtgggcttggggtctcgcatccacacaccatacttgccagtaattgtttctctgttctcagcgtgagaggctctcctacccaaactagttctccacatcct

SEQ ID NO: 13111 - DNA, 119 bp, homo sapiens
cataccggtgtctccctctccactcctgagatagccagatgggctctccttcaaaattcgggaagcaggacttcagttagctcggacttcagttcctggaaggccaaagtgtccaaatt

SEQ ID NO: 13112 - DNA, 119 bp, homo sapiens
tctccactcctgagatagccagatgggctctccttcaaaattcgggaagcaggaacttcagttagctcgacttcagttcctggaaggccaaagtgtccaaattccacgtagaaactgca

SEQ ID NO: 13113 - DNA, 119 bp, homo sapiens
cttaccttctctggagcctggtggcacagcccgagcagtgtctcgggtctggggacactggccccttctagccttgctacctcctggctgctgctttccaacctcctggccagattctc

SEQ ID NO: 13114 - DNA, 119 bp, homo sapiens
ctggccccttctcagccttgctacctcctggctgctgctttccaacctcctggccagattctcattttctgccttagtcgcttcttctcttcctccagaactgacttgtctcggaggag

SEQ ID NO: 13115 - DNA, 119 bp, homo sapiens
attctcattttcttgccttagtcgcttcttctcttcctccagaactgacttgtctcggaggaggttgcttaggcagtctccaactctctggtttgggtttccagctggtcccgctcccg

SEQ ID NO: 13116 - DNA, 119 bp, homo sapiens
gaggaggttgctgtaggcagtctccaactctctggtttgggtttccagctggtcccgctcccgcctcaggtgcccagctccctctgcagcccctcctgggtctcctggggcctggcagc

SEQ ID NO: 13117 - DNA, 119 bp, homo sapiens
ctcccgcctcagggtgcccagctccctctgcagcccctcctgggtctcctggggcctggcagcctggtcaaggtcaattggtggaggaggctctccagggagctgagtcgagctttggt

SEQ ID NO: 13118 - DNA, 119 bp, homo sapiens
ggcagcctggtccaaggtcaattggtggaggaggctctccagggagctgagtcgagctttggtggcctcaggtctaagcgttgggtgctgctgtctctctgtaagttatggatgactga

SEQ ID NO: 13119 - DNA, 119 bp, homo sapiens
tttggtggcctccaggtctaagcgttgggtgctgctgtctctctgtaagttatggatgactgacatggctggctctgctctgggcagctggattcattgggactggccacactgaaggt

SEQ ID NO: 13120 - DNA, 119 bp, homo sapiens
gactgacatggcctggctctgctctgggcagctggattcattgggactggccacactgaaggtatactgcatcggccactctggtcattggccttcctgagctgagctgtcctggcccc

SEQ ID NO: 13121 - DNA, 119 bp, homo sapiens
gaaggtatactggcatcggccactctggtcattggccttcctgagctgagctgtcctggcccccacatccacaccaggcaggccagaagcagcagctggacagctggcatctcaggccc

SEQ ID NO: 13122 - DNA, 119 bp, homo sapiens
ggcccccacatcccacaccaggcaggccagaagcagcagctggacagctggcatctcaggcccaaagctcagcaacgtgcacagaagaacctcattgcagaggcttggtgaggcttcct

SEQ ID NO: 13123 - DNA, 119 bp, homo sapiens
cataacaagattatgaaagtgatttttattattttggtaatggtgtcccagtataagtaatgagatacatttttttttaatttggtatatcaaacagtaaaggctacatataaatgttg

SEQ ID NO: 13124 - DNA, 119 bp, homo sapiens
atgagatacaatttttttttaatttggtatatcaaacagtaaaggctacatataaatgttgtttccccaaatgtactttgtctacaactatgcactgtagctattatgcacacactaaa

SEQ ID NO: 13125 - DNA, 119 bp, homo sapiens
tgtttccccagaatgtactttgtctacaactatgcactgtagctattatgcacacactaaaagcattcagataaagtacaaaaataagaaaagattaaataagaaggtatccttgagtt

SEQ ID NO: 13126 - DNA, 119 bp, homo sapiens
aaagcattcatgataaagtacaaaaataagaaaagattaaataagaaggtatccttgagttataaatgttactaaagtataccttttaatcacacagttgtgtcacagctaaaaacaca

SEQ ID NO: 13127 - DNA, 119 bp, homo sapiens
ttataaatgtctactaaagtataccttttaatcacacagttgtgtcacagctaaaaacacacaaattaaatatactgctatgcaactatttgatctaatatagatctactaggaaaata

SEQ ID NO: 13128 - DNA, 119 bp, homo sapiens
cacaaattaacatatactgctatgcaactatttgatctaatatagatctactaggaaaatattaaggcttagtaacacttcacaggtaaaggctaagttctgggacatgaaagctttta

SEQ ID NO: 13129 - DNA, 119 bp, homo sapiens
tattaaggctgtagtaacacttcacaggtaaaggctaagttctgggacatgaaagcttttagaaaattccaaaacaaacctgagacatctttttgttttggaaaaaagcaatttgctta

SEQ ID NO: 13130 - DNA, 119 bp, homo sapiens
tagaaaattcacaaaacaaacctgagacatctttttgttttggaaaaaagcaatttgcttatagagtcaagctttgacatacaaatgaagcatttaataaacattatactttattgcaa

SEQ ID NO: 13131 - DNA, 119 bp, homo sapiens
tatagagtcaaagctttgacatacaaatgaagcatttaataaacattatactttattgcaataacctgggtaaaacttctgactttaatggttgtcagcaaatacattctctctccggt

SEQ ID NO: 13132 - DNA, 119 bp, homo sapiens
aataacctggagtaaaacttctgactttaatggttgtcagcaaatacattctctctccggtagaaacacatgagggtttctgattaaagcagtaatctgattactccagcctccaaatt

SEQ ID NO: 13133 - DNA, 119 bp, homo sapiens
gtagaaacacaatgagggtttctgattaaagcagtaatctgattactccagcctccaaattcagttatttcattcgttttttgttttcttttcctttctttaactaggttataagcata

SEQ ID NO: 13134 - DNA, 119 bp, homo sapiens
ttcagttattttcattcgttttttgttttcttttcctttctttaactaggttataagcatattaaataaccaggtaaactccaagcaccttactttcttccatataaacacagctttcc

SEQ ID NO: 13135 - DNA, 119 bp, homo sapiens
tattaaataagccaggtaaactccaagcaccttactttcttccatataaacacagctttccttttgccgaagcatctgatgacgactgggcctacatacgtaaaaacagattatagcac

SEQ ID NO: 13136 - DNA, 119 bp, homo sapiens
ccttttgccgcaagcatctgatgacgactgggcctacatacgtaaaaacagattatagcacatctggactggttgacataatgaggcatccagattggttcatgattatttttgcagct

SEQ ID NO: 13137 - DNA, 119 bp, homo sapiens
acatctggacctggttgacataatgaggcatccagattggttcatgattatttttgcagctacacattttcaatctaaaaaaataggctacagcagcccaaattcactgtctcagcctt

SEQ ID NO: 13138 - DNA, 119 bp, homo sapiens
ctacacatttctcaatctaaaaaaataggctacagcagcccaaattcactgtctcagccttggtggggctaatattttggaatggcaagtgccaaaaaatttaaatgtactgggcaagc

SEQ ID NO: 13139 - DNA, 119 bp, homo sapiens
ttggtggggcataatattttggaatggcaagtgccaaaaaatttaaatgtactgggcaagcctgctttggtagttgactctaatgcctttaaaaatactggcatgattttttatattca

SEQ ID NO: 13140 - DNA, 119 bp, homo sapiens
gcctgctttgtgtagttgactctaatgcctttaaaaatactggcatgattttttatattcaagaagtacgctatgaaattttaaaataaaattacatgaagttttttaatattccaaac

SEQ ID NO: 13141 - DNA, 119 bp, homo sapiens
caagaagtacagctatgaaattttaaaataaaattacatgaagttttttaatattccaaaccacaaaacgatctgctatgttgtagacttttttaatagcctatttgagatttaactct

SEQ ID NO: 13142 - DNA, 119 bp, homo sapiens
accacaaaacagatctgctatgttgtagacttttttaatagcctatttgagatttaactctgctacgccaacatctttcttctaaatgtccatgctttgaattttgtgctccaaattaa

SEQ ID NO: 13143 - DNA, 119 bp, homo sapiens
ctgctacgccaaacatctttcttctaaatgtccatgctttgaattttgtgctccaaattaattaattcaaatgagtgggaaaatgtttaaccatctttccttcttttcagtgtttctct

SEQ ID NO: 13144 - DNA, 119 bp, homo sapiens
aattaattcagaatgagtgggaaaatgtttaaccatctttccttcttttcagtgtttctctcttttctctaccatccccccaccccacacacacatacacacaactatcaaaaactccc

SEQ ID NO: 13145 - DNA, 119 bp, homo sapiens
ctcttttctcttaccatccccccaccccacacacacatacacacaactatcaaaaactcccttttttaaattttggtacaaagattccaaaaagcttaataaaatgtaataagcactta

SEQ ID NO: 13146 - DNA, 119 bp, homo sapiens
ccttttttaaaattttggtacaaagattccaaaaagcttaataaaatgtaataagcacttagcacttagacactgtagaactttctttggaagtttaattgcaatgaactttaaaactt

SEQ ID NO: 13147 - DNA, 119 bp, homo sapiens
tagcacttaggacactgtagaactttctttggaagtttaattgcaatgaactttaaaacttgaaacttcattcacttttctaaatgtgaatgcatacatttcatttgagctttatgctt

SEQ ID NO: 13148 - DNA, 119 bp, homo sapiens
ttgaaacttcaattcacttttctaaatgtgaatgcatacatttcatttgagctttatgctttcccagctccaaagtaattgccatcttaaaaaacacaactgacctcatctccactgtc

SEQ ID NO: 13149 - DNA, 119 bp, homo sapiens
tttcccagctaccaaagtaattgccatcttaaaaaacacaactgacctcatctccactgtcttttccaacagcttccaagactatcttctgattctgactttccaaaaagcaggcatta

SEQ ID NO: 13150 - DNA, 119 bp, homo sapiens
tcttttccaaacagcttccaagactatcttctgattctgactttccaaaaagcaggcattaatgttaacttcaaaaaatcatctagaagagaaacttggtcagttgtaatgggagttct

SEQ ID NO: 13151 - DNA, 119 bp, homo sapiens
taatgttaactttcaaaaaatcatctagaagagaaacttggtcagttgtaatgggagttctgtccccaatcttgtcacctcgtaaaaagaacatccaggtaattcatggcattttccat

SEQ ID NO: 13152 - DNA, 119 bp, homo sapiens
ctgtccccaactcttgtcacctcgtaaaaagaacatccaggtaattcatggcattttccattattcattggcagacacagcttagatttctctgccttccacaggagaatgttcagatt

SEQ ID NO: 13153 - DNA, 119 bp, homo sapiens
attattcattgggcagacacagcttagatttctctgccttccacaggagaatgttcagatttccactaattcaactggaactcaataatcagaatggctttaaaatttagttaaaattt

SEQ ID NO: 13154 - DNA, 119 bp, homo sapiens
tttccactaacttcaactggaactcaataatcagaatggctttaaaatttagttaaaatttaagcatgcatgaatttggaattttaatatattaattaggttattttcaaaacaagatt

SEQ ID NO: 13155 - DNA, 119 bp, homo sapiens
ttaagcatgccatgaatttggaattttaatatattaattaggttattttcaaaacaagattctgtattaaaatagaatttcaataaagatgttataaaaataagaacacatcttaggat

SEQ ID NO: 13156 - DNA, 119 bp, homo sapiens
ttctgtattataaatagaatttcaataaagatgttataaaaataagaacacatcttaggatctaattttagattcgccaaaatttgagtgaagaaaagaaaccctgcttcatttccatg

SEQ ID NO: 13157 - DNA, 119 bp, homo sapiens
atctaattttgagattcgccaaaatttgagtgaagaaaagaaaccctgcttcatttccatgtcaaaaatggtggttgatttaatcaagctcatttttagcacacttggttgcgttagtt

SEQ ID NO: 13158 - DNA, 119 bp, homo sapiens
tgtcaaaaataggtggttgatttaatcaagctcatttttagcacacttggttgcgttagttgtacttttaattttcaatattatacaaggcatatattattcaaccttttcctgaacaa

SEQ ID NO: 13159 - DNA, 119 bp, homo sapiens
ttgtacttttcaattttcaatattatacaaggcatatattattcaaccttttcctgaacaagataatacaatatactgcttacggacagttaagtaatatatttcacactatttggtga

SEQ ID NO: 13160 - DNA, 119 bp, homo sapiens
aagataatactaatatactgcttacggacagttaagtaatatatttcacactatttggtgactttttttttaacctatgagacttactgaaatcagtacattatggtcacataatttaa

SEQ ID NO: 13161 - DNA, 119 bp, homo sapiens
gacttttttttttaacctatgagacttactgaaatcagtacattatggtcacataatttaaagcttggcggcttttttttttttctttgctgataattcaaattctgtactttggcaag

SEQ ID NO: 13162 - DNA, 119 bp, homo sapiens
aaagcttggctggcttttttttttttctttgctgataattcaaattctgtactttggcaagcaaaagagtacaacatcaccttggagttttacaatttaataatgcatactttaaaatt

SEQ ID NO: 13163 - DNA, 119 bp, homo sapiens
agcaaaagaggtacaacatcaccttggagttttacaatttaataatgcatactttaaaattcatgataatcatggaaccccactatactcactaattcaactattgatttctttttgag

SEQ ID NO: 13164 - DNA, 119 bp, homo sapiens
ttcatgataactcatggaaccccactatactcactaattcaactattgatttctttttgagcaactgacttatgatttatccttaaaagtaaggaagtataccagaaggcaaaaggata

SEQ ID NO: 13165 - DNA, 119 bp, homo sapiens
agcaactgactttatgatttatccttaaaagtaaggaagtataccagaaggcaaaaggataaatccaccataaatactagagtctaagttattttcctgaaaaggtgaaaagggaattt

SEQ ID NO: 13166 - DNA, 119 bp, homo sapiens
taaatccacccataaatactagagtctaagttattttcctgaaaaggtgaaaagggaatttctggtcttatcttttcccttatcaccttcaatcacacactttacactgaaattacttg

SEQ ID NO: 13167 - DNA, 119 bp, homo sapiens
ttctggtctttatcttttcccttatcaccttcaatcacacactttacactgaaattacttgtctctgtccttcaacaatatactctgaaactttgtttaatatactttttgtctatttc

SEQ ID NO: 13168 - DNA, 119 bp, homo sapiens
tgtctctgtctcttcaacaatatactctgaaactttgtttaatatactttttgtctatttctgcatatggagaccaatcttggattcccaccaaaaatggcctggttaccaaaatactg

SEQ ID NO: 13169 - DNA, 119 bp, homo sapiens
tctgcatatgggagaccaatcttggattcccaccaaaaatggcctggttaccaaaatactgcttcattcgtagtttggtgtaagtgtttgggtgtatgtgtctatatgtgcattttaac

SEQ ID NO: 13170 - DNA, 119 bp, homo sapiens
tgcttcattcagtagtttggtgtaagtgtttgggtgtatgtgtctatatgtgcattttaactccaaagatgctaccttcagaaataaccaagatgcagtatgtatataataattcattg

SEQ ID NO: 13171 - DNA, 119 bp, homo sapiens
actccaaagaatgctaccttcagaaataaccaagatgcagtatgtatataataattcattgggccctttagtctttgactcaaaaaaatctcccagaagctcctgcatagcccactact

SEQ ID NO: 13172 - DNA, 119 bp, homo sapiens
tgggccctttaagtctttgactcaaaaaaatctcccagaagctcctgcatagcccactactcatgaagaccgctgggtatggagcacacctcacctgatggacagttgatttatgctca

SEQ ID NO: 13173 - DNA, 119 bp, homo sapiens
ctcatgaagaaccgctgggtatggagcacacctcacctgatggacagttgatttatgctcaccttaaacctaattgagaagcagcacaaaagaggaactggaaaaaaactgaattttac

SEQ ID NO: 13174 - DNA, 119 bp, homo sapiens
caccttaaacgctaattgagaagcagcacaaaagaggaactggaaaaaaactgaattttactcctcatcccgaagatgtgaatatttctaaaatttcagcttgcctcttgcttcttatt

SEQ ID NO: 13175 - DNA, 119 bp, homo sapiens
actcctcatctccgaagatgtgaatatttctaaaatttcagcttgcctcttgcttcttattggcaagttccttggcttgtaaattttggacagcactatcaaggagctccatggactct

SEQ ID NO: 13176 - DNA, 119 bp, homo sapiens
ttggcaagtttccttggcttgtaaattttggacagcactatcaaggagctccatggactctctgagagtacattgactttaaatgacttgggtttaatggttagaccataactgaaatt

SEQ ID NO: 13177 - DNA, 119 bp, homo sapiens
ctctgagagtgacattgactttaaatgacttgggtttaatggttagaccataactgaaattcattttcgaggctcatttgggttggccctgaaatcgcactggtgagccaggatggaga

SEQ ID NO: 13178 - DNA, 119 bp, homo sapiens
ttcattttcgcaggctcatttgggttggccctgaaatcgcactggtgagccaggatggagatgaagagaaaagctgcatcttagaaagttcttcgccaatgcaccgccttttgcccact

SEQ ID NO: 13179 - DNA, 119 bp, homo sapiens
gatgaagagaaaaagctgcatcttagaaagttcttcgccaatgcaccgccttttgcccactgaaaaaatatcactctgctggtcaggtccttgttgatgaggccatccttgtccaagaa

SEQ ID NO: 13180 - DNA, 119 bp, homo sapiens
ctgaaaaaatcatcactctgctggtcaggtccttgttgatgaggccatccttgtccaagaatcgagctgatcaaagttctccgggttaggccacttcactgggtcatgattcacagacc

SEQ ID NO: 13181 - DNA, 119 bp, homo sapiens
aatcgagctggatcaaagttctccgggttaggccacttcactgggtcatgattcacagaccactggttgcaaaaaccacagtgtccttgggaatgtggtagcccaagacagaggtgttg

SEQ ID NO: 13182 - DNA, 119 bp, homo sapiens
ccactggttgacaaaaaccacagtgtccttgggaatgtggtagcccaagacagaggtgttggcagtggtgcatgaggaatagtgacaggcacaaagctggagaagcgcatggcttcata

SEQ ID NO: 13183 - DNA, 119 bp, homo sapiens
tggcagtggtggcatgaggaatagtgacaggcacaaagctggagaagcgcatggcttcataaaggaaggcaggacatagggcaggttgggctggtcacccatacaaggcagacggtccc

SEQ ID NO: 13184 - DNA, 119 bp, homo sapiens
tttacctggtgaagaggaggagcagccactgcagcgcggtggacagggtgtcctggctggcgccgaagagtcagtgatagtggccggtacgttctccaaatccagccgcgcgccaccac

SEQ ID NO: 13185 - DNA, 119 bp, homo sapiens
tggcgccgaagatgtcagtgatagtggccggtacgttctccaaatccagccgcgcgccaccaccgtgcggtccccggccgccttcttttccgcagagaggataaaggcgtccatcatgt

SEQ ID NO: 13186 - DNA, 119 bp, homo sapiens
aaggctttcgcagtgcctcaagaacttgtccaggatgaagttgctgaagttgcggttgagctgctcgaatcgcggaaaacggtgcgcaccgggttggggaagtactgcagccagggcat

SEQ ID NO: 13187 - DNA, 119 bp, homo sapiens
tgagctgctcgaattcgcggaaaacggtgcgcaccgggttggggaagtactgcagccagggcatcacgtcaccaggctgcccgcgcccaccgtgcgcccgaactcttcgttgtggctga

SEQ ID NO: 13188 - DNA, 119 bp, homo sapiens
cagggcatcacgtccaccaggctgcccgcgcccaccgtgcgcccgaactcttcgttgtggctgagcagccacggaactcggggtcgtcgtggctgtagcggcagccgaaacacacggca

SEQ ID NO: 13189 - DNA, 119 bp, homo sapiens
gtggctgagcagctcacggaactcggggtcgtcgtggctgtagcggcagccgaaacacacggcactcatacgttggccacggccacgacggtcagcggcctcgggtcgaggaaggcgcc

SEQ ID NO: 13190 - DNA, 119 bp, homo sapiens
acacggcactcatgacgttggccacggccacgacggtcagcggcctcgggtcgaggaaggcgccgtccggctgccgcgcaccagcagcgccaccagctcgcgcgcctcgctcagcacgt

SEQ ID NO: 13191 - DNA, 119 bp, homo sapiens
aaggcgccgtccgcgctgccgcgcaccagcagcgccaccagctcgcgcgcctcgctcagcacgtggccccgaggacttggcggctgcgcggctggcgcgtgaagaagttgcgcatcatg

SEQ ID NO: 13192 - DNA, 119 bp, homo sapiens
cagcacgtggccctcgaggacttggcggctgcgcggctggcgcgtgaagaagttgcgcatcatgctgtggctgcgcgccgctgcaccttccagtgctccgagtagtggccgaaagccat

SEQ ID NO: 13193 - DNA, 119 bp, homo sapiens
gcatcatgctgtgggctgcgcgccgctgcaccttccagtgctccgagtagtggccgaaagccatgctgcgccgccggacaccacacggaaggaggcgaaggccggccggtcggcgaagg

SEQ ID NO: 13194 - DNA, 119 bp, homo sapiens
aaagccatgctgcggccgccggacaccacacggaaggaggcgaaggccggccggtcggcgaaggccgagcctgctgcaccagggcctggtggatggcgcgctcgccattcagcaccact

SEQ ID NO: 13195 - DNA, 119 bp, homo sapiens
ggcgaaggccgagccctgctgcaccagggcctggtggatggcgcgctcgccattcagcaccactatgggcagctgcccaggcggatctggaaaacgtcgccgtagcgccgcgccaggcg

SEQ ID NO: 13196 - DNA, 119 bp, homo sapiens
gcaccactatggggcagctgcccaggcggatctggaaaacgtcgccgtagcgccgcgccaggcgagcgacgagaggtgagccgcctggcccaccgccgccgcgtttccgatcagtggcc

SEQ ID NO: 13197 - DNA, 119 bp, homo sapiens
gccaggcgagcgaacgagaggtgagccgcctggcccaccgccgccgcgtttccgatcagtggccacgcaacgggcccgggggcgcggaccggagctgccgcctccgttgcctcagcagc

SEQ ID NO: 13198 - DNA, 119 bp, homo sapiens
cagtggccacgcaaacgggcccgggggcgcggaccggagctgccgcctccgttgcctcagcagccgctgcccacatgcacagtggccagcaccgacaggagtagcaggagcgtggtctg

SEQ ID NO: 13199 - DNA, 119 bp, homo sapiens
tcagcagccgctggcccacatgcacagtggccagcaccgacaggagtagcaggagcgtggtctgctggaggacagcgggtttagcggccaagggtcgttcgggctgaggctggtgccca

SEQ ID NO: 13200 - DNA, 119 bp, homo sapiens
ctgacctgcggggaggtgcggtttccagtggcgcgggacagccggctccgagaaggaactgggacctttcctagggcaagacgtcaacaggaacccgcagcccggcctggacacctgct

SEQ ID NO: 13201 - DNA, 119 bp, homo sapiens
ctgggacctttgcctagggcaagacgtcaacaggaacccgcagcccggcctggacacctgctgccctcatggaagctttaactcccactcgagtctcttggcgtcgtcagtgccaggag

SEQ ID NO: 13202 - DNA, 119 bp, homo sapiens
tgctgccctcactggaagctttaactcccactcgagtctcttggcgtcgtcagtgccaggagcgcttggttgggatggggacggagaagggtgcctcgctcgccgagccccgctgccct

SEQ ID NO: 13203 - DNA, 119 bp, homo sapiens
ggagcgcttggattgggatggggacggagaagggtgcctcgctcgccgagccccgctgcccttggggactggcaaagtcgaggtttcctcacagcgttgagattgagactgggggtcgg

SEQ ID NO: 13204 - DNA, 119 bp, homo sapiens
cccttggggacctggcaaagtcgaggtttcctcacagcgttgagattgagactgggggtcggtgagtgggtcaattcccatgcccttgcggctctcacaactggagtcgcagaagcgct

SEQ ID NO: 13205 - DNA, 119 bp, homo sapiens
tcggtgagtggcgtcaattcccatgcccttgcggctctcacaactggagtcgcagaagcgctcgctcccctcccactccagagtcaaagcgcgccatcccgctcctccgggttttaagg

SEQ ID NO: 13206 - DNA, 119 bp, homo sapiens
cgttcgtgctgcccgcctagaaagggtgaagtggttgtttccgtgacggactgagtacgggtgcctgtcggctcttgcggaagtccatgcgccattgggagggcctcggccgcggctct

SEQ ID NO: 13207 - DNA, 119 bp, homo sapiens
gagtacgggtgcctgtcaggctcttgcggaagtccatgcgccattgggagggcctcggccgcggctctggcccttgctgctgagggccacttcctgggtcattcctggaccgggagccg

SEQ ID NO: 13208 - DNA, 119 bp, homo sapiens
cctcggccgcggctctgtgcccttgctgctgagggccacttcctgggtcattcctggaccgggagccggctggggctcacacgggggctcccgcgtggccgtctcggcgcctgcgtgac

SEQ ID NO: 13209 - DNA, 119 bp, homo sapiens
cctggaccgggagccgggctggggctcacacgggggctcccgcgtggccgtctcggcgcctgcgtgaccccccgccggcgggatgtggcgactacgtcgggccgctgtggcctggtaag

SEQ ID NO: 13210 - DNA, 119 bp, homo sapiens
ttcagtgaggtctgccagtctttagtgaaacacagctctggaataaaaggaagtttaccactacaaaaatacatctggtttcacgaagcatttatcattcacatcatcctaccttaaag

SEQ ID NO: 13211 - DNA, 119 bp, homo sapiens
atatggctaccagcctcgcaggaatttttggccagcaagattagctacgagactcttaaaacttcgctactcatactaggatcggctgttgggggtggctacacagccaaaaaggtgaa

SEQ ID NO: 13212 - DNA, 119 bp, homo sapiens
ttcagatggatctgtggatgctgaacgcagtattgttacagacttggtcagtcaaatggaccctcatggaggagaaccatattcgttttgaccaaagtagacctggcagagaaaaatgt

SEQ ID NO: 13213 - DNA, 119 bp, homo sapiens
tgaacgcagtattgttacagacttggtcagtcaaatggaccctcatggaaggagaaccatattcgttttaccaaagtagacctggcagagaaaaatgtagccagtccaagcagggtgag

SEQ ID NO: 13214 - DNA, 119 bp, homo sapiens
ttcagggaggaaatccttcaacaatctttgtgggaaagagtatcaactcatgtgattgaaaacatctacttccagctgcgcagaccatgaattcaggaacttttaacaccacagtggat

SEQ ID NO: 13215 - DNA, 119 bp, homo sapiens
tgaaaacatctaccttccagctgcgcagaccatgaattcaggaacttttaacaccacagtggatatcaacttaaacagtggactgataaacaacttcctaataaagcagtagaggttag

SEQ ID NO: 13216 - DNA, 119 bp, homo sapiens
tataggttgcttgggagaccctacaagaagaattttcccgctttatgacagaaccgaaagggaaagagctgatgacatatttgataaacttaaagaggctgttaaggaagaaagtatta

SEQ ID NO: 13217 - DNA, 119 bp, homo sapiens
tatgacagaaccgaaagggaaagagcatgatgacatatttgataaacttaaagaggctgttaaggaagaagtattaaacgacacaagtggaatgactttgcggaggacagcttggtatg

SEQ ID NO: 13218 - DNA, 119 bp, homo sapiens
taaagtgtgttcacaatgaaaccaagaatgaattggagaagatgttgaaatgtaatgaggagcacccagttatcttgcaagtgatgaaataaccacagtccggaagaaccttgaatccc

SEQ ID NO: 13219 - DNA, 119 bp, homo sapiens
attggagaagatgttgaaatgtaatgaggagcacccagcttatcttgcaagtgatgaaataaccacagtcggaagaaccttgaatcccgaggagtagaagtagatccaagcttggtaat

SEQ ID NO: 13220 - DNA, 119 bp, homo sapiens
tacagaatcgtactcataatcagctctgcatacatctgaagaacaaaaacatcaacgtcttttgtccagctctttttcttctgctgttccacctttctaaacatacaataaagtcatgg

SEQ ID NO: 13221 - DNA, 119 bp, homo sapiens
gtcttttgtccagcctctttttcttctgctgttccacctttctaaacatacaataaagtcatgggataaaataatcgatgtatgttacgggcgctttaaccatcagctgcctctcgaat

SEQ ID NO: 13222 - DNA, 119 bp, homo sapiens
agtcatgggataaaaataatcgatgtatgttacgggcgctttaaccatcagctgcctctcgaatggaagacagtggtaatggattaacatcctattttgttgtactaaagtgacaaatc

SEQ ID NO: 13223 - DNA, 119 bp, homo sapiens
tctcgaatggaagaacagtggtaatggattaacatcctattttgttgtactaaagtgacaaatcggaatatataattggtatggccattaggttcagtccttgaagataagaaacttgt

SEQ ID NO: 13224 - DNA, 119 bp, homo sapiens
gacaaatcggaataatataattggtatggccattaggttcagtccttgaagataagaaacttgttctcttttgttgtcttatttgtggtggcactcgtttaatggattaactgaggttg

SEQ ID NO: 13225 - DNA, 119 bp, homo sapiens
aaacttgttctctgtttgttgtcttatttgtggtggcactcgtttaatggattaactgaggttgctcaagttcagtttcttttccagaaatacaatgctaggtgttttgaaataaaact

SEQ ID NO: 13226 - DNA, 119 bp, homo sapiens
tgaggttgctcaatgttcagtttcttttccagaaatacaatgctaggtgttttgaaataaaacttatatgcaattgtttaaagttatcaattgtatataaaatcacagtagcctgctaa

SEQ ID NO: 13227 - DNA, 119 bp, homo sapiens
ataaaacttatatagcaattgtttaaagttatcaattgtatataaaatcacagtagcctgctaaatcatgtatgtgtctgtagtattctattcccagaaactatttgaccatgataatt

SEQ ID NO: 13228 - DNA, 119 bp, homo sapiens
cctgctaaatcattgtatgtgtctgtagtattctattcccagaaactatttgaccatgataattcagttatattcaccacatgaaagaaaaatgggtaacagaagaacccttaaaacag

SEQ ID NO: 13229 - DNA, 119 bp, homo sapiens
tgataattcagtttatattcaccacatgaaagaaaaatgggtaacagaagaacccttaaaacaggttaattggattgtaacgttcagtgaaagaaatttcaacccttcatagccagcga

SEQ ID NO: 13230 - DNA, 119 bp, homo sapiens
taaaacaggttaatttggattgtaacgttcagtgaaagaaatttcaacccttcatagccagcgaagaaattgccttggaagccaagtcagtaccagcttacctatttgattcagttgct

SEQ ID NO: 13231 - DNA, 119 bp, homo sapiens
gccagcgaagaaatttgccttggaagccaagtcagtaccagcttacctatttgattcagttgctgtttttcactctctatatccatttgaaattgatttattttagatgttgtatactt

SEQ ID NO: 13232 - DNA, 119 bp, homo sapiens
cagttgctgttttctcactctctatatccatttgaaattgatttattttagatgttgtatacttacgttggctttctgttaatagtggtttttctcctgttgacagagccaccggatta

SEQ ID NO: 13233 - DNA, 119 bp, homo sapiens
gtatacttacgttaggctttctgttaatagtggtttttctcctgttgacagagccaccggattatgacaaggatgaggaagattaaggataatcaattgactaatttcatttagaatat

SEQ ID NO: 13234 - DNA, 119 bp, homo sapiens
ccggattatgacacaggatgaggaagattaaggataatcaattgactaatttcatttagaatattatcaacatttcaactaggtatcagaaaaaggctttctttcataagactatttta

SEQ ID NO: 13235 - DNA, 119 bp, homo sapiens
tagaatattatcaaacatttcaactaggtatcagaaaaaggctttctttcataagactattttaaatagaattatttcaacaattaaagtaatgttgaccatccccctctcagctgaat

SEQ ID NO: 13236 - DNA, 119 bp, homo sapiens
ctattttaaatagaaattatttcaacaattaaagtaatgttgaccatccccctctcagctgaataaagaaaatttagttcaatttattgcaatttaattacaatactaccttcacaaca

SEQ ID NO: 13237 - DNA, 119 bp, homo sapiens
ccaatttgtatgcagtatattttactcccatgaaataaaacacatttgtttcatatttgctgaaaagtaaacaataatattgtacgaaatgttatacacagggtaggttgtacatagca

SEQ ID NO: 13238 - DNA, 119 bp, homo sapiens
tgctgaaaagtaaaacaataatattgtacgaaatgttatacacagggtaggttgtacatagcagtttcaaaacatcattgcatccaccagagaaactattctaaaactgatattcacac

SEQ ID NO: 13239 - DNA, 119 bp, homo sapiens
gttagaaacatacagtgtggcatttagtatatacactcccttgctcgcaagcgaaaaatcctaatcgctctgtataacatgctttattttaaagcctaacctttaaaaacactgttgtg

SEQ ID NO: 13240 - DNA, 119 bp, homo sapiens
cctaatcgcttctgtataacatgctttattttaaagcctaacctttaaaaacactgttgtgatattactacaactgcttttataaaattaatttgacatttcgatatatatacatcctt

SEQ ID NO: 13241 - DNA, 119 bp, homo sapiens
tgatattactaacaactgcttttataaaattaatttgacatttcgatatatatacatcctttcagtcattaaatgttaacaatgctaaacttaaaaaataacaagcttatagtaatgtt

SEQ ID NO: 13242 - DNA, 119 bp, homo sapiens
tttcagtcatttaaatgttaacaatgctaaacttaaaaaataacaagcttatagtaatgttaaaatgtctatccagtcaaacatttgtttgtgtatgtgtccttgcaactgttagaaat

SEQ ID NO: 13243 - DNA, 119 bp, homo sapiens
ttaaaatgtcatatccagtcaaacatttgtttgtgtatgtgtccttgcaactgttagaaatacttgtaggaaagatgtcagacactgaggacatccctttgaaatcaaaggagctctct

SEQ ID NO: 13244 - DNA, 119 bp, homo sapiens
atacttgtagtgaaagatgtcagacactgaggacatccctttgaaatcaaaggagctctctctttgattagtggtttccttttctctatatagcttctctttctctccctttctttagt

SEQ ID NO: 13245 - DNA, 119 bp, homo sapiens
ctctttgattcagtggtttccttttctctatatagcttctctttctctccctttctttagtgcccacgacttctagcataattcccagtctttcaagggcggagttgccccatccggca

SEQ ID NO: 13246 - DNA, 119 bp, homo sapiens
gtgcccacgaccttctagcataattcccagtctttcaagggcggagttgccccatccggcaaggtcctagatcccggcgctgtgggtgcggctcacacgggccggtccactgcatactg

SEQ ID NO: 13247 - DNA, 119 bp, homo sapiens
caaggtcctaggatcccggcgctgtgggtgcggctcacacgggccggtccactgcatactggcaagcaccaggttggaggccgggttctgcacgctggcgtagccgaagctggagtgct

SEQ ID NO: 13248 - DNA, 119 bp, homo sapiens
tggcaagcactcaggttggaggccgggttctgcacgctggcgtagccgaagctggagtgctgctttgcttcagtctcaggctggccaggctcgagttacacgtgtccctataaacatac

SEQ ID NO: 13249 - DNA, 119 bp, homo sapiens
ctgctttgctttcagtctcaggctggccaggctcgagttacacgtgtccctataaacatacggaggagtggcggcgcgtaaggacaggcaggcgtcggcaccgcggaattcagcgacgg

SEQ ID NO: 13250 - DNA, 119 bp, homo sapiens
acggaggagtcggcggcgcgtaaggacaggcaggcgtcggcaccgcggaattcagcgacgggctactcagttgttcaagttattcaggctgttgagactggagcccgggacgcctgtca

SEQ ID NO: 13251 - DNA, 119 bp, homo sapiens
gggctactcaggttgttcaagttattcaggctgttgagactggagcccgggacgcctgtcactgctgaggcaccatgctggacgacatgctcatggacgagatagagttgggtggggaa

SEQ ID NO: 13252 - DNA, 119 bp, homo sapiens
cactgctgagggcaccatgctggacgacatgctcatggacgagatagagttgggtggggaaaacatgcttgtgatgacagggggttgacgttcatagagttgaagaaggggaagctctt

SEQ ID NO: 13253 - DNA, 119 bp, homo sapiens
aaaacatgctctgtgatgacagggggttgacgttcatagagttgaagaaggggaagctcttggtggataggaggcggatgtaaggcccttggcggcccagttgttgtaggaatagcctg

SEQ ID NO: 13254 - DNA, 119 bp, homo sapiens
ttggtggatagggaggcggatgtaaggcccttggcggcccagttgttgtaggaatagcctgggtacatgcgtcgtagggctgcatgagcccattgaactgcggcccgaagccattcttg

SEQ ID NO: 13255 - DNA, 119 bp, homo sapiens
tgggtacatgtcgtcgtagggctgcatgagcccattgaactgcggcccgaagccattcttgcatagctcgcctgctggttgcgctccctctttctccatttggcccgacgattcttgaa

SEQ ID NO: 13256 - DNA, 119 bp, homo sapiens
cctacccggactcgggcttccgtaaggttggtccacacagcgatttcttcgcgtgtggacatgtccgggagcggttcctctggaaagtggcctccagctcctggagctgctggctggta

SEQ ID NO: 13257 - DNA, 119 bp, homo sapiens
tcgcgtgtggacatgtccgggtagcggttcctctggaaagtggcctccagctcctggagctgctggctgtaaagtgagtccgctgccgcctttgccgcttcttcttagacgggtcctcg

SEQ ID NO: 13258 - DNA, 119 bp, homo sapiens
agctcctggagctgctggctggtaaagtgagtccgctgccgcctttgccgcttcttcttagacgggtcccggcgcccacgtcctcattcttcccctgctggcttttatctttctctgaa

SEQ ID NO: 13259 - DNA, 119 bp, homo sapiens
cttacctgcggcctccgggctggaggtgtcggagatggtgtgcacctccagcctgtgcttggaggagtcagcgaccggggctgaccgggagccagaaccgaagccatggctaacggctg

SEQ ID NO: 13260 - DNA, 119 bp, homo sapiens
gcttggaggagtccagcgaccggggctgaccgggagccagaaccgaagccatggctaacggctggggatgtgacaggaagatgaggagacggccgacagcttggtccccgctgctcggt

SEQ ID NO: 13261 - DNA, 119 bp, homo sapiens
aacggctggggatggtgacaggaagatgaggagacggccgacagcttggtccccgctgctcggtgctccagtgaagcgggcctttcatgcagttcatggacgagggagcgcgacgctct

SEQ ID NO: 13262 - DNA, 119 bp, homo sapiens
tgctcggtgctccaagtgaagcgggcctttcatgcagttcatggacgagggagcgcgacgctctactagccttggctactgccccgccgagcccccgtagccgccgctgcccgctccgg

SEQ ID NO: 13263 - DNA, 119 bp, homo sapiens
gacgctctactagtccttggctactgccccgccgagcccccgtagccgccgctgcccgctccgggtcgcctctaggcgcggagtttccccgctgcggggagagccaggggacgcaaccc

SEQ ID NO: 13264 - DNA, 119 bp, homo sapiens
cgctccgggtcgcgctctaggcgcggagtttccccgctgcggggagagccaggggacgcaacccccgccagttctcaagccaagctgcccccgtctcctccggaaggctcaagcgaaaa

SEQ ID NO: 13265 - DNA, 119 bp, homo sapiens
cgcaacccccgccgagttctcaagccaagctgcccccgtctcctccggaaggctcaagcgaaaaagtccgagacggaaagtcagcgggcaaacgaagacatgggatgtgggcagaaggg

SEQ ID NO: 13266 - DNA, 119 bp, homo sapiens
agcgaaaaagtccggagacggaaagtcagcgggcaaacgaagacatgggatgtgggcagaagggcaccatcagagcgtctttagggagcaggcttccaagctccaaagcgaaacaagag

SEQ ID NO: 13267 - DNA, 119 bp, homo sapiens
cagaagggcaccactcagagcgtctttagggagcaggcttccaagctccaaagcgaaacaagagtgggcaagacccccttcttctctccctccctcccccaagaacccctccaataagg

SEQ ID NO: 13268 - DNA, 119 bp, homo sapiens
aacaagagtgggcaaagacccccttcttctctccctccctcccccaagaacccctccaataaggaaagcaacgccgaccgcgctctgcccgccccccccccacgcggcagccctgacag

SEQ ID NO: 13269 - DNA, 119 bp, homo sapiens
caataaggaaagctaacgccgaccgcgctctgcccgccccccccccacgcggcagccctgacagagaaggtcaagagtgacagggacaggtaggtgatattagatcccctgcggcggca

SEQ ID NO: 13270 - DNA, 119 bp, homo sapiens
cctgacagagaagtgtcaagagtgacagggacaggtaggtgatattagatcccctgcggcggcagcagcgctgcagccacgacgcggccctctgagcgcaccctccgcaacgcgcacac

SEQ ID NO: 13271 - DNA, 119 bp, homo sapiens
cggcggcagcagccgctgcagccacgacgcggccctctgagcgcaccctccgcaacgcgcacacgcacaccctcgggcggtcgaacaggagccgggccttgccgcagctcagctccagg

SEQ ID NO: 13272 - DNA, 119 bp, homo sapiens
gcgcacacgcacacccctcgggcggtcgaacaggagccgggccttgccgcagctcagctccaggcacccggcgagcgacggaccagatctgcggctccgcgcttccctgttggcctaac

SEQ ID NO: 13273 - DNA, 119 bp, homo sapiens
cttaccattggcgccaggatgctgccgcgggaagaacttgctgctggctgcctcttttcggctctcagggagtccgtgaactcgacctttttgatttcggagtctttggagaagagaca

SEQ ID NO: 13274 - DNA, 119 bp, homo sapiens
gggaagaacttgctgctggctgcctcttttcggctctcaggagagtccgtgaactcgacctttttgattcggagtctttggagaagagacattcaacggccgccggctgcacgcctggg

SEQ ID NO: 13275 - DNA, 119 bp, homo sapiens
agtaccgtttccctgcgtctcggcctctcctgaagggagctgggccctggggagcctctggccaaggtcctgcctacaggaggggctgcccggcgctgtggcgtggggatccagggtgg

SEQ ID NO: 13276 - DNA, 119 bp, homo sapiens
gggccctggggagcctctggccaaggtcgctgcctacaggaggggctgcccggcgctgtggcgtggggaccagggtggggacggccaggcggttcccccacccgctagcgagaacgcgg

SEQ ID NO: 13277 - DNA, 119 bp, homo sapiens
ggggctgcccggcgctgtggcgtggggatccagggtggggacggccaggcggttcccccacccgctagcagaacgcgggcggggactctgccgattcgatccttgtgggcccgtgggcc

SEQ ID NO: 13278 - DNA, 119 bp, homo sapiens
cggccaggcggttcccccacccgctagcgagaacgcgggcggggactctgccgattcgatccttgtgggccgtgggcccagaagtagcagtttggcggctccagatttagtgattctgc

SEQ ID NO: 13279 - DNA, 119 bp, homo sapiens
cttaccggctaccgggagagagctgctgtctccgcgtcccactgcttcccggggcgatttccagcgagcgagcctccggctgcacggcaagcgcccgaaagccgggcctgagaggactg

SEQ ID NO: 13280 - DNA, 119 bp, homo sapiens
cactgcttcccggggcgatttccagcgagccgagcctccggctgcacggcaagcgcccgaaagccgggctgagaggactgcagggctcctgagggtgccaagttccgaaggagtccacg

SEQ ID NO: 13281 - DNA, 119 bp, homo sapiens
ggctgcacggcaagcgcccgaaagccgggcctgagaggactgcagggctcctgagggtgccaagttccgaggagtccacgggtgcactggggcctccgaaatctagccgccactggcag

SEQ ID NO: 13282 - DNA, 119 bp, homo sapiens
tggcgatccaggagcgagcacagcgcccgggcgagcgccggggggagcgagcaggggcgacgagaaacgggcaggggagggaagcagatgccagcgggccgaagagtcgggagccggag

SEQ ID NO: 13283 - DNA, 119 bp, homo sapiens
gacgagaaacgaggcaggggagggaagcagatgccagcgggccgaagagtcgggagccggagccgggaggcgaaaggagaggggacctggcggggcacttaggagccaaccgaggagca

SEQ ID NO: 13284 - DNA, 119 bp, homo sapiens
ggagccgggagagcgaaaggagaggggacctggcggggcacttaggagccaaccgaggagcaggagcacgactcccactgtggaaaggaggaccagaagggaggatgggatggaagaga

SEQ ID NO: 13285 - DNA, 119 bp, homo sapiens
agcaggagcacggactcccactgtggaaaggaggaccagaagggaggatgggatggaagagaagaaaaacaatctgcgccaacccggcagccctaataaatcaaagggggagcgccagg

SEQ ID NO: 13286 - DNA, 119 bp, homo sapiens
gagaagaaaaagcaatctgcgccaacccggcagccctaataaatcaaagggggagcgccagggcagcgggagacagaaacgtacttttggggagcaaatcaggacgggctgggaggaag

SEQ ID NO: 13287 - DNA, 119 bp, homo sapiens
cagggcagcggggagacagaaacgtacttttggggagcaaatcaggacgggctgggaggaagcgacaggaaagtggcccaagagacggaacaaaggacaatgttcatggggttgtttgg

SEQ ID NO: 13288 - DNA, 119 bp, homo sapiens
gaagcgacagggaaagtggcccaagagacggaacaaaggacaatgttcatggggttgtttgggacgagggtgtggagtgtgggtgtgagcgtgcgtgtgtgaccttctttcaggcctgc

SEQ ID NO: 13289 - DNA, 119 bp, homo sapiens
ttgggacgaggcgtgtggagtgtgggtgtgagcgtgcgtgtgtgaccttctttcaggcctgcagagttgggaaagaggtcacagcaaagagggactgcggagggaggaaagtgagagac

SEQ ID NO: 13290 - DNA, 119 bp, homo sapiens
ctgcagagttgaggaaagaggtcacagcaaagagggactgcggagggaggaaagtgagagaccggtagaggcgggagtggaggtgggcgcggtggggatgggagaggatgagtgaagag

SEQ ID NO: 13291 - DNA, 119 bp, homo sapiens
agaccggtagagggcgggagtggaggtgggcgcggtggggatgggagaggatgagtgaagagaaatctaaagaatggagtgagctagtgggagagggtgggagggccacagccgggagc

SEQ ID NO: 13292 - DNA, 119 bp, homo sapiens
agagaaatctagaagaatggagtgagctagtgggagagggtgggagggccacagccgggagcgaacgagtaggcttgtcagctggggaaggccgggacgctgggcccagcttagctggg

SEQ ID NO: 13293 - DNA, 119 bp, homo sapiens
gagcgaacgagctaggcttgtcagctggggaaggccgggacgctgggcccagcttagctgggacaccgccccgaggtcaaggcgggtggaccaggcatgctgagagtgtcggcgcacag

SEQ ID NO: 13294 - DNA, 119 bp, homo sapiens
tgggacaccgcgcccgaggtcaaggcgggtggaccaggcatgctgagagtgtcggcgcacaggtgggcaggccacgcactgacccagtgttcacgaagggtttgcactggacaaggctc

SEQ ID NO: 13295 - DNA, 119 bp, homo sapiens
acaggtgggcacggccacgcactgacccagtgttcacgaagggtttgcactggacaaggctcagacgctatagagtctagaatttcctctgctgtacctacattcaacaagttcaccct

SEQ ID NO: 13296 - DNA, 119 bp, homo sapiens
gctcagacgctcatagagtctagaatttcctctgctgtacctacattcaacaagttcaccctgggtcacgatatctcattttttaaaatgacgaggttaaggttcctggcgaggatggt

SEQ ID NO: 13297 - DNA, 119 bp, homo sapiens
ccctgggtcacggatatctcattttttaaaatgacgaggttaaggttcctggcgaggatggtattaaatgcacgggatagaagtgggggtgggggagagagtttccctcaagtccacat

SEQ ID NO: 13298 - DNA, 119 bp, homo sapiens
cttacctctcagtggcttcccttctgcagcagttttctattcgaaccttttccccgcctttccgtggtaggcctgtatattgatccctctgacctttggcacatctgggccctctgaaa

SEQ ID NO: 13299 - DNA, 119 bp, homo sapiens
ttttccccgcctttccgtggtagggcctgtatattgatccctctgacctttggcacatctgggccctctaaatctctcaatcttttcagatttgaggatggcaggctccaccctctcca

SEQ ID NO: 13300 - DNA, 119 bp, homo sapiens
ctttggcacatctgggccctctgaaatctctcaatcttttcagatttgaggatggcaggctccaccctcccactgtgtgcacacactcagagatatgaaaacttacacagactgccttc

SEQ ID NO: 13301 - DNA, 119 bp, homo sapiens
tctgaagctacatataccttttttgtttaaaaggaagaatcaaaaatgtccaaaatgtaactggagagaagtgggcaacttttggagtaagtattagcaatcgccaatgggtttgtggg

SEQ ID NO: 13302 - DNA, 119 bp, homo sapiens
cccttgcatttctgttttcacaggaaggagaagcagaagggtcagtaaaagaaatcaagcatagtcctggcccacgagaacagtctccactggcacgtatgtgaaggaagactcgggct

SEQ ID NO: 13303 - DNA, 119 bp, homo sapiens
attttccagagtttcagattttgaaaagaaaacaagtaatcgttctgagattgaaacccagacagagggagcacagagaaagagaatgatgaagagaaaggcccggagactgtgagtcc

SEQ ID NO: 13304 - DNA, 119 bp, homo sapiens
agaggtttgtttaatgtcagatgataattgtacagatatgtttgggatttcccgtatgataggttggaacgaagtggaagcactgaacctccaggtgacatctctgtttaaggagcttc

SEQ ID NO: 13305 - DNA, 119 bp, homo sapiens
aagaggctcatacaaaactcagcaaagctgagctaatgaagaagagacttcaagaaaagtaagaatgaggagcaattttatcctcctttgaaatatacatttttacaaagtatactact

SEQ ID NO: 13306 - DNA, 119 bp, homo sapiens
tcttttttaataggtccaaattaactgtgctacagatgacacacaacaagcttcttcaagaacataatatgcattgaaaacaattgaggaactaacaagaaaagaggtattcactgaaa

SEQ ID NO: 13307 - DNA, 119 bp, homo sapiens
gttgcttttcgtcctggcaggcagtccttgatggagatgcagagtcgtcatggggcgagaacaagtgacctgaccagcaggcttaccttgttcaaagaggtgagtcccgtgtgatcctg

SEQ ID NO: 13308 - DNA, 119 bp, homo sapiens
cctgagccactcctcacttctctggggcctgggttatgcaggccaccaccagccgcacttacttgcatagcaggttatttgccatggtgaagctgggcataggcggcagagcgctgtag

SEQ ID NO: 13309 - DNA, 119 bp, homo sapiens
gtgtttgtgagggctgtgtctgttcggcccaacatggagccagatgtgaaggaggaaactgagggcaaggaaatgacagtagtcagagtgagagtcagagcccggagcaaacaggttta

SEQ ID NO: 13310 - DNA, 119 bp, homo sapiens
ctgcacagtctctcggtacctgtattcttgcttcaggtagatctattttggctgctagtctttctcgggaaacacatctggataatgggttctctcaaactctgaaagagtaagttgat

SEQ ID NO: 13311 - DNA, 119 bp, homo sapiens
aaaattgtttaagtatgcattaaacaatgacaagcttacgttttgattgtccagcacttggacttttgctctgcatgggtctataacacaaaaatataccttcaatggtatgagaactt

SEQ ID NO: 13312 - DNA, 119 bp, homo sapiens
cgaagtcccagaaagaccagaggcacttactgttctgcatgctggctctggctgggggccgcgggattcacggggctcgaatatggggctctgttagcaagaaaataggagttaatcct

SEQ ID NO: 13313 - DNA, 119 bp, homo sapiens
aagcagccaccacagaacttgcctgaaatctcggatgtctgtccactctcacaataaaaggcctcacactctgcgcgcccctagttaaagtcttccccctaagacaaaacagaaggaga

SEQ ID NO: 13314 - DNA, 119 bp, homo sapiens
aaacacgccacttactttgtgtacagagggttcttgtgaaaagccctgaagagtcctcaccaaacactcccaacttctcccacgtgccatttgttgactaagtgcggctgcttttcgca

SEQ ID NO: 13315 - DNA, 119 bp, homo sapiens
gaggatggagcagattacctgtgtacatggtctgtccaaacgtccaggctccttccacaggaatgtagcttttccactagggcagatctcgctgaattcagctatgtagagaggcgttt

SEQ ID NO: 13316 - DNA, 119 bp, homo sapiens
gctcaaccagaggtcccaaggccgaatggctggctcagtgccttggccagcagccctcacctacacagccccactctggccccggtagccctcctcacaggccagacaagtgtaggagc

SEQ ID NO: 13317 - DNA, 119 bp, homo sapiens
caggggaattgacgcatctcccatcagggcaggtaccggggtgacggcattcgttgatatctgcaaaacgcagcccctcccttggtcatccctgggaacatagcaaatgggtaggtctg

SEQ ID NO: 13318 - DNA, 119 bp, homo sapiens
gtagggagggacaggtgggtggtggggtggcagggcgcttccctccttcccgttccttaccttggcagttcctttcctgaccatgatgtagccctgatcacactcgcagtggtacgagc

SEQ ID NO: 13319 - DNA, 119 bp, homo sapiens
cctcggtgttggtgcactgccccccgctgcacacccctggctgctcacactcattgatatctgtgaacaacagaaaagccctgagtcacagccagccctggaggatggtggagggggcg

SEQ ID NO: 13320 - DNA, 119 bp, homo sapiens
tgcagctacctggggtgctcagggtcaccagcacatcagtggagggggtcacttgttcttcctgtatcttgcaatcccctgttcaggcattggtggggttgtggcattccctgtggagg

SEQ ID NO: 13321 - DNA, 119 bp, homo sapiens
cttctcttttgcctaggagccgccaggaagagggactcacctgtgacccaggcaggtgcatgagtgacatggtcgtgacctgcacagaaacaggagaaggtcacttttggctcctctgc

SEQ ID NO: 13322 - DNA, 119 bp, homo sapiens
cctgctctctgccatgcttgcccggccccctagtgggaggacgcactcacctggccagcctgagagtcactggaagggaaaggtaacagcgtgagctcagggaggagggtctggctgcc

SEQ ID NO: 13323 - DNA, 119 bp, homo sapiens
agccctggccctgggggtcctaccttggcagtgagtgaggttcagtctcttgtacccctgaggacactcagctggccattctcaatcaccggggaggctgaagagtggagatacggaca

SEQ ID NO: 13324 - DNA, 119 bp, homo sapiens
agcactcacctggtctgggtgggcatggggcacacaaagtcaccccccagaaggctcccacactgccacgcagtcctcctgggtagtcagctccagcagagggttggcacactggaagg

SEQ ID NO: 13325 - DNA, 119 bp, homo sapiens
gtctgctactggtggaggcactcacgtttgatacagtggttggtgctgtttgctgttgtccatcctgggagcactgtcccccgcagacgttcctcctgtggggtcaccaaaacagagtc

SEQ ID NO: 13326 - DNA, 119 bp, homo sapiens
cacccttggtttaacattattctcctccccaatttcctcttctcctcattgtgaactcgtggcagggtcgcttggtgagctcattctcttacaacaacaaattcaagagcatgaagagg

SEQ ID NO: 13327 - DNA, 119 bp, homo sapiens
aagcgcgcagagccgctggccaatatagcacgagctatgcccaacagaagcgcaaggtgatggatggttaagggggctaccgatacattcacactaatcagccatttctgccaagatca

SEQ ID NO: 13328 - DNA, 119 bp, homo sapiens
tttaaaatttttacagaaatctttgattgacatgtattctgaagttcttgatgttctctctgattatgagccagttataatacgcaagatcatctgccacgggtatgtgaaaaattgat

SEQ ID NO: 13329 - DNA, 119 bp, homo sapiens
taggttttaattttaatttggtatcagaaaaatatgaataagtgttctttgttttgtgggaaggttgtttggttggagatcagagtgctggaaagactagtgtgttggaaatgattgcc

SEQ ID NO: 13330 - DNA, 119 bp, homo sapiens
caagctcgaatattcccaagaggatctggggagatgatgacacgttctccagttaaggtaagaacatagccgtctcagtgaggttccttaggagagtaactgcttcagtgagacctgtt

SEQ ID NO: 13331 - DNA, 119 bp, homo sapiens
tagtattgttgtcctttttgtcattttaatatactttagctcttgttatttttttttaataggacaagctgctaaaggcacaccaagtgactacaagaaatttaagccttgcagtatca

SEQ ID NO: 13332 - DNA, 119 bp, homo sapiens
gactgcttttggaaaatggtacgagagtctgttgaacaacaggctgatagtttcaaaggtaagttggatttttaaagaagcaagcaaattaagacattttattagctggcaatctttgg

SEQ ID NO: 13333 - DNA, 119 bp, homo sapiens
agtgtggttgatcaacatgaagaatatacagtaactctgggctttcttttttctcattttagattaaggtacttggcatcaagtttatagaagacattttttaaaaacagctctaaacc

SEQ ID NO: 13334 - DNA, 119 bp, homo sapiens
attgtaacctttgtcgaagaggtttttattactaccaaaggcattttgtagattctgaggtaaggtttcaaaaacaaagagaagtatttttaagcaacagttgtcaaaatatgcttaaa

SEQ ID NO: 13335 - DNA, 119 bp, homo sapiens
attttatcatctttattcatttataaaaacgatgctcctcaggttttttaactttctttaaacagttagcgattagagaaaaatgttaaagaggtattggaagattttgctgaagatgg

SEQ ID NO: 13336 - DNA, 119 bp, homo sapiens
tgagaagaagattaaattgcttactggtaaacgcgttcaactggcggaagacctcagtgagtagttcttctgccctctaccttactacctttccacctttcccatttccatttgtttgt

SEQ ID NO: 13337 - DNA, 119 bp, homo sapiens
cgatgacccgggcaggagaagggggttcttacctaattgcacacacgccgacaccagtttgcggcagttgtctccattccccgttatctgcaaaacagaagagaaggaaggctgtaaga

SEQ ID NO: 13338 - DNA, 119 bp, homo sapiens
aggggtggggaaaagccaggggagggagcagcgaggaagggacagggtcgtaagagagaccccagccagttcgtgcatacctggctccgcgatgcagcgtgcgccgcggccgaggtact

SEQ ID NO: 13339 - DNA, 119 bp, homo sapiens
cagacctctccatgccccagggttcccggcggagaccagcgcctgcaacagggacacacaagcctgtaagtcagctttgagacatccagaccccgaacactacagttgactttgccctg

SEQ ID NO: 13340 - DNA, 119 bp, homo sapiens
accccgaacactacagttgactttgccctgtttaggaaaccctaggacaaactctccgctccttcgccccccctgcccgacatgtcccggggcctcactcgggtcagccagcggactcc

SEQ ID NO: 13341 - DNA, 119 bp, homo sapiens
gctcaatgccgccatgtttcccgcaggaagtcgcgtgggaagtgacgcctgaagctggcgcggccccgtccccgacttccggcctgtactgagttcctggtatttctctctctgcgcca

SEQ ID NO: 13342 - DNA, 119 bp, homo sapiens
gttgccatggagacaagccccagtcctttcattccttctggtacctctctctccaacgcaggcggaaagaggcggcttagcccaaacatgctgggggaggggctggcggcctcgacggc

SEQ ID NO: 13343 - DNA, 119 bp, homo sapiens
agctgcggaactaggccgagggacaaaggctaaggtcagccgcggttcaagccctttcgtctgccgacgccagcggccagacgctgcgggagcactgctgggctggaggagggctcgag

SEQ ID NO: 13344 - DNA, 119 bp, homo sapiens
ggggcagaggcatgcacaagtggggggcggaaggagggggtggatgaggaggctcgggcccttccaccccgcgtccattgggcggcgccgccatcactctcttctgggctacaccgcct

SEQ ID NO: 13345 - DNA, 119 bp, homo sapiens
ccggcccgccctgcccccccttccggcccaccctgtccccttccggccccgccgccgtttttcccgcgccggacactgtccccgcacggtggtccctcgttggtgcgtggcctgacatc

SEQ ID NO: 13346 - DNA, 119 bp, homo sapiens
cggctggaggcctcgggtgctccgaaagcggtaccttcgggggcccccccgcacccattggtatgcactcccgcttgttggagtggagggcttttccccaggacctgtcctcccttttc

SEQ ID NO: 13347 - DNA, 119 bp, homo sapiens
gccccttcccctctcttcggccggacacaaagcgggcttttccacctagagtcccagcgctctcacctggcaccagccgtcgcgccgccccaggccgccaccgccagaggccccagaaa

SEQ ID NO: 13348 - DNA, 119 bp, homo sapiens
cagatctcaagcagccgctgctgccgcggatcccgacaaccttcgcgtcgcgcgagggcacggagcacggcagctctgcggtcgacgccgggccgcccccactccgcttctccgggttt

SEQ ID NO: 13349 - DNA, 119 bp, homo sapiens
ttttaaacacaatccctgggtgattctcacacacacacacacacacacacacacacacacacacacgatgtggatgagtgctggcttaaaaggatgtcacacttaccagggatgagggc

SEQ ID NO: 13350 - DNA, 119 bp, homo sapiens
tgcagtcattggtatctgcaaagaaaagacaacttaatagtgaggacttcaacagggaaagcggtcttaccctaagtaaaaccaccacttattttcctaatacccaaatgataaagtcg

SEQ ID NO: 13351 - DNA, 119 bp, homo sapiens
tccccagcgtggtatcttggcacaaggatccttagaatggacacaggctgaaaattggacttacttgtaagcatgtggggccggtccagcctggggaacactcacactcaaagcccagg

SEQ ID NO: 13352 - DNA, 119 bp, homo sapiens
gaggtctccttacagctgcctctgttgtgacagggatcagagaggcaggcgtgctcagctgcaaaaaccggatggcagtcagagagggatgcctgcacaccgttacctccccacacccc

SEQ ID NO: 13353 - DNA, 119 bp, homo sapiens
cagggctcggccaggcgcgggtgtgaggctccgcccggcctccttcccgagtagtcactcaccggccagcgaaactgaaaggcagcacgatgcggttgcggtcgttgccgcggctggcc

SEQ ID NO: 13354 - DNA, 119 bp, homo sapiens
ttgaggttgaaggtgttgcccccgatgacaggcgtggaccctgagccgaagctgcagggccccccggcctgacgcgggactgatactccttgaggcacactttgaagtatgtgtcacac

SEQ ID NO: 13355 - DNA, 119 bp, homo sapiens
cggggctcaaccgcccagggcgccgcgaggggagggagaggacggctgggagggaggcccggagaagggtcctaccttggctcgcagggcacagagcagggcgagcaggaggcttaggg

SEQ ID NO: 13356 - DNA, 119 bp, homo sapiens
ggcgcccggaccggccgcgcgtccgtggggaacgcatcgctgcgccgcgcgccgcgggcactcgggacgcgccgctgctgttcgcgctggtgctgccgccggtgctgccgtcgccgctg

SEQ ID NO: 13357 - DNA, 119 bp, homo sapiens
taacacaatgacgcgtgcccgcccggctctcggagaaggacccggagagcccgtctggcagcagcggccgggctggccacctctacccagcacgccgggcagggcgcatgcgcgcttat

SEQ ID NO: 13358 - DNA, 119 bp, homo sapiens
cgtcgttgaccccaaaggctacctgacggatttaaattccatgatcccgacacacggaggagacatcaatgagtgctttgcagaatcgctgggctgggatggagactctagttgcctag

SEQ ID NO: 13359 - DNA, 119 bp, homo sapiens
gcagatggtggagaagatcatcgaccgagccatcacctcgctgcgggccaacggtgtggagatcaaccggagcagtggatccaggtgggccgcaggcgggtgtcgtggtgtctgcttta

SEQ ID NO: 13360 - DNA, 119 bp, homo sapiens
gtgatcaggcgctggtccctgtgttctgacccctcttgacgctgctgtacttgcccttcaggccaacccaacagtgaggagatctggctggcagccgtgaagctggagtccgagaatga

SEQ ID NO: 13361 - DNA, 119 bp, homo sapiens
tgagtacgagcgggcccggaggctgctggccaaggcgcggagcagtgcccccaccgcccgggtacgcagggcaggcagggctgggccgtctggggtgcatggtgtgcacatgcgggccc

SEQ ID NO: 13362 - DNA, 119 bp, homo sapiens
aaggcttcccagaagctaccagaatatgtgctgttggtagacggctgtgggacctccgggggcctgtctctcaggttggagtccgtgcggctggagtaccgtgcggggctgaagaacat

SEQ ID NO: 13363 - DNA, 119 bp, homo sapiens
cgcaaatacactcatggccaaggcgctgcaggagtgccccaactccggtaagggggtgccccgactccgtaagggggtgccctgactccggtaagggggtgccttgactccggtaaggg

SEQ ID NO: 13364 - DNA, 119 bp, homo sapiens
gcctgacgtgccctgtggtccccccaggagcagcaggaggaggtgaggaagcgctgtgagagtgcagagctcggcatggggagctgtggtgcgccgtgtccaaggacatcgccaactgg

SEQ ID NO: 13365 - DNA, 119 bp, homo sapiens
tcaagactcagccgccgggcagacctacctcccacttggggtaatcgtggggcttcagggagcccttgttgtgcctgggagcacaaccagacagccgttgttccggctgatgtgctcca

SEQ ID NO: 13366 - DNA, 119 bp, homo sapiens
tccggctgatgtgctccatcgccgtccaggcgcaaacgatgagatcgctgggcctgaaggggaaatagtcaggtcctggtgcagggggtgacgggacgtcttcttgcctgaaaagaaaa

SEQ ID NO: 13367 - DNA, 119 bp, homo sapiens
gtctctggacagctgccggggtcacgcgccgccggtgaaacgacgtctccacaaagagaggagcagaggccccagggatcccggagggcagggcaacgcggcaattgccccgaccccag

SEQ ID NO: 13368 - DNA, 119 bp, homo sapiens
cttcatgatataggtgaactcctccgcggtgccggccgtcacactgctggtcagaatgaccatgctcttttggagccatagcgttcacctggaagacataaggcccttcaggatggggg

SEQ ID NO: 13369 - DNA, 119 bp, homo sapiens
tcggccgcagagccactggtgtggctcatcaggatgtagaggtccttgtgtgagccgtagcgctggccgcgacctggggcaaggtccacacctccgtgacttttgaggtggccctgtca

SEQ ID NO: 13370 - DNA, 119 bp, homo sapiens
gcgcagagtgaggatggccagggctttctccagggcctgctcggccggagtccccacacagggcagcacccgctgccctcccacgtctggctgcctccaccaaggggccccagggacct

SEQ ID NO: 13371 - DNA, 119 bp, homo sapiens
taaggatgtgcgcgatgtcctcggccacgcccctggtctggctgctggtgaggaccaccacatccttgtggcaccgtacctttctcccaggacctggggcaaggtccagatctccgtgg

SEQ ID NO: 13372 - DNA, 119 bp, homo sapiens
ccgacattcggccgggacccccgaacactcacccagggccgcgcgagcgcccacaaggaaacagagacgtaccgccgccagccgccttggaacccagctcgacgggccgtggcgcctgc

SEQ ID NO: 13373 - DNA, 119 bp, homo sapiens
cgccttggaacccagctcgacgggccgtggcgcctgcgccctcagctcaaccatagacaccgcccccaaagcgactccgacttctgctggtgcggggaggcccgtggcgcatgcgcctg

SEQ ID NO: 13374 - DNA, 119 bp, homo sapiens
acggtctacttacattgagctgtctccaagttcttcatagagatgcgcacctggcggaggcggcggcggggcgggggcgctgccactggtgcaggagccggcactgctggtttagccgc

SEQ ID NO: 13375 - DNA, 119 bp, homo sapiens
gggtaatgcggcctgaattcgtgcagtctttgtacactcagcttgacgtcttggataaagtaaggatggttgtaaaactcattttagaaatcataatgcttatcaataagccacctttt

SEQ ID NO: 13376 - DNA, 119 bp, homo sapiens
aggatcaatgtgttggatgtcaacgacaacgtgcccaccttccagaaggatgcctacgtgggtgctctggggagaacgagccttctgtcacacagctggtgcggctccgggtaaggtgc

SEQ ID NO: 13377 - DNA, 119 bp, homo sapiens
cccggcgcccgttctgccccgcagtgctggatgtgaacgacgagacgcccaccttcttcccggccgtgtcaatgtgtctgtgtccgaggacgtgccacgcgagttccgggtggtctggc

SEQ ID NO: 13378 - DNA, 119 bp, homo sapiens
tccccgcttcccctggccgggagctctgtttcccagccggaagcttcctctccttcacccacaggtggcacgtggatgggaagttcagcgtgggttaccgcgatgccgttgtgagaacc

SEQ ID NO: 13379 - DNA, 119 bp, homo sapiens
gtggtgggcctggaccgggagaccacagccgcctacatgctcatcctggaggccatcggtatgcaccagcccgcacccaccaacacagtgatctgggcagagttcacacagggtgcctc

SEQ ID NO: 13380 - DNA, 119 bp, homo sapiens
atgcgtgaagggaaggaaaggaactctaaaaacctcttctctccctgctgggtggcattcaagaagtaatcgtgtctcattcttcctcagctgaaagccacggacgcagatgagggcga

SEQ ID NO: 13381 - DNA, 119 bp, homo sapiens
gtttgggcgtgtgtggtaccgcatcctccatggtaagtggggctgccctaggatggggggcggtcctccgcccaggggagggcagagcttctctaggctgccaaaggtctgggagatga

SEQ ID NO: 13382 - DNA, 119 bp, homo sapiens
tgttcacacagcagcagtacagccgtctggggcttcgagagaccgcaggcattggaacgtcagtcatcgggtccaagccacagaccgagactctggtgaggctggcaggaggaagccgg

SEQ ID NO: 13383 - DNA, 119 bp, homo sapiens
ggaccctgacaagggccttaatgggctggtcacctacaccctgctggacctggtgcccccagggtatgtcagctggaggactcctcggcaggtaggttagaaatctgtcagaggagggc

SEQ ID NO: 13384 - DNA, 119 bp, homo sapiens
ctgccagaggccttccatgtggacatggactcgggcttggtgaccacacagcggccactgcagtcctacagaagttcagtctgaccgtggtggccacagatggtggagagcccccactc

SEQ ID NO: 13385 - DNA, 119 bp, homo sapiens
gggaagtccccaagccaatcccctctcccagtcttttcctctgactgtgctcttccgctcctagctcatttggtggccagcgacctgggccagccagtgccatacgagactatgcagcc

SEQ ID NO: 13386 - DNA, 119 bp, homo sapiens
gctgcaggtggccctggaggacatcgatgacaacgaaccccttttcgtgaggcctccagtgagcttgccacctcctgcgctggtcacacccacacagggactcacctgcctgcaagcac

SEQ ID NO: 13387 - DNA, 119 bp, homo sapiens
aggcttgaggcaggagcagagcagactgtcggtggtgggggaatggctgaggaggagagctgagaccccgcccctcgcccagggtgatccagatgatcgatgagaacaaggagcagcta

SEQ ID NO: 13388 - DNA, 119 bp, homo sapiens
agggagtgggcgaggggcggggcaggcaggggagggccttggtgggggttaaccctttccctcccccaggctcgctgctgaaggtggtcctggaggattacctgcggctcaaaaagctc

SEQ ID NO: 13389 - DNA, 119 bp, homo sapiens
tttgcacagcggatggtgcaaaaagcctcctcctgccactcctccatctctgaggtagccggctgggtgctgggagctgtgtgctgtgccccagcctggggatgctctctgtctcttgc

SEQ ID NO: 13390 - DNA, 119 bp, homo sapiens
tgatgggtgcgtggggcagggagagctccatccagccacaggggtcctatggcgtgtcagactcctggaactcactcagtccctgtgcttcacagagggaagatgagattgaagccatc

SEQ ID NO: 13391 - DNA, 119 bp, homo sapiens
atcagcatttctgatggcctgaatctggtgagtgcacgtccaaggcagtccctggcagcctgcagtattgggcctgagaagggtgaggctggcacgattcctccccaagccttcatggg

SEQ ID NO: 13392 - DNA, 119 bp, homo sapiens
gtgatagaggtcgctatccattcatccttcagaaggtctcattgcactggctcttgacccctctgcccctctcaggtggccgaaaaagtcgtgatcctggtgaccgatgccaatgatga

SEQ ID NO: 13393 - DNA, 119 bp, homo sapiens
ggcgcccaggttcatccaggagccttatgttgccctggttcccgaggtaagtgaggagctgctagagggctgattttcccacccaggcccatagcctacccctggggctgccctgtggc

SEQ ID NO: 13394 - DNA, 119 bp, homo sapiens
tgcatgcccctatgcctctgtccccctgagaatgctgtcactgtctctgaccctcccctgtggctgtgacccctcaggacatacctgctgggagcatcatctttaaggtccatgcagtg

SEQ ID NO: 13395 - DNA, 119 bp, homo sapiens
gacagggacacaggctctggagggagtgtcacctacttcctgcaggtaaggcaggacacacaggacctacctggggctgggccggaggggacacctagatggcccctacctccatcgcc

SEQ ID NO: 13396 - DNA, 119 bp, homo sapiens
gcaaaatgtcaaagctggagctatagaggtagccctaaaggcaactagaagagcatcagggctgctctcgaggagctgccccaccagccatccttgaagagacaattcagggcagttga

SEQ ID NO: 13397 - DNA, 119 bp, homo sapiens
ctgcatgtgcctccacgcacatgggatggccctttaaaagggagggcctggctgtgggaagccagagacgctgggccactggcagtgagggagagtgaggatggcagagaccagtgccc

SEQ ID NO: 13398 - DNA, 119 bp, homo sapiens
tgcccactggcttcggggagctcgaggtgctggctgtggggatggtgctactggtggaaggtgagccagcagaacctggggtgcagcgggggcccagtgggttctgaggacccaggcca

SEQ ID NO: 13399 - DNA, 119 bp, homo sapiens
ggcaccctgctcctgactcaccgttgtggacgatcagcctgtactgcctggccaggcacagctcctcctccgctgccttacaatcttctgcgcttctgggggcaggccgttggggtccc

SEQ ID NO: 13400 - DNA, 119 bp, homo sapiens
gacccccgccgccgtatcccacctcaccccaccccaccccaccccggcccatcccgccgccggccccgagccccggccgcgactcaccaccgggaggggaaccgcgcgcaagcctggcc

SEQ ID NO: 13401 - DNA, 119 bp, homo sapiens
gccgagtccgggcgcgcgtggagcgagggaggcgagcgcgccgcggccgccccgctgctttatagcgccgggggagggggtcgcgctttcgtaaccgcgcggggtgaaagaccgaaggg

SEQ ID NO: 13402 - DNA, 119 bp, homo sapiens
tctggccttccgaggcttgtggtagcgcccattggtcatgctgggggcaggggtaggcaccggggatgggagcgtctacctggagacttgccttgaccccggctgctgcggctgcggct

SEQ ID NO: 13403 - DNA, 119 bp, homo sapiens
tggggaaagaagtagaaggcccatcctcctttccctaatctccccagggctgtgcccctccctgggctcgggactctgactgaccaggcacgggggtgataaggtgacgcttgggtggc

SEQ ID NO: 13404 - DNA, 119 bp, homo sapiens
gtgtcctgccgggctggtctcaaagcaggaggccggactggttggagagatgaacaggtcagcggcaagtaccccgccaggctccgggacggaggcagctcaaggggctcggcaatctc

SEQ ID NO: 13405 - DNA, 119 bp, homo sapiens
ccctctccaccacggggtcccatccccacccccagcagggctcaggacccagaagccccgccccccactctgacctgccctgctcttgagggcctcaaaagcctccagctccacaagca

SEQ ID NO: 13406 - DNA, 119 bp, homo sapiens
tcaccatgctgtcgaagcggcccaggtctgtgggggccaccacactcctgggagagggcgagagacagcggggtgggaggggcaggcaggatttcagttccggaggtgccaggatgccc

SEQ ID NO: 13407 - DNA, 119 bp, homo sapiens
cactttgccttcctgtttgatcagcccactacttacctttctctatgtccaggcgagggtaagttttggcaggctcccgctgtccagtgtccaggcctctctgcgcccgtcccgcgcta

SEQ ID NO: 13408 - DNA, 119 bp, homo sapiens
caagcctggcccttttcttcttcagagagccgggccccaccctaaggcctcagccctttccctccaacctgggagatctgagccacttacgtcggtccagccagcagtactcagaaacc

SEQ ID NO: 13409 - DNA, 119 bp, homo sapiens
atctccttgtaggcaggataccggccggtctcctggggaggggatggtgggcataggagggaagggggacagtgaggagggagagtgagaatggggcgggggtgacaggatgggagtaa

SEQ ID NO: 13410 - DNA, 119 bp, homo sapiens
tctgggacctagaatgaagcaccccaacatcaactcggccctccaggccccccacccctttgtgcctggcggcctcacctggtcgctggtgtggcgccgccagccttgtcaaaccaccc

SEQ ID NO: 13411 - DNA, 119 bp, homo sapiens
gcaggcgagagctactgccgcagccggcaaaccccacccacgctgcgcggaggctgcgggaattgggctgcctgcaccgccccgggctcccattggctggtagggccgccagtcattct

SEQ ID NO: 13412 - DNA, 119 bp, homo sapiens
ctcccgccatccggccagcccccatcccgggcgccgtgcccgtccccaaggcggctcgtcaccgctgcgggccaatgggctgggccgcgcggccgcgcgcactcgcacccgctgccccc

SEQ ID NO: 13413 - DNA, 119 bp, homo sapiens
gaggccctcctgcactctccccggcgccgctctccggccctcgccctgtccgccgccaccgccgccgccccagagtcgccatgcagatcccgcgcgccgctcttctcccgctgctgctg

SEQ ID NO: 13414 - DNA, 119 bp, homo sapiens
cttccttttaaggtgaataatcatcacaaaacagacatttgaaatataagctttattttaaatttaaagagtattgaaaataaacattttttacaaattataatcaagcactcaaaaca

SEQ ID NO: 13415 - DNA, 119 bp, homo sapiens
ttagaagaagaaagaagctagaaaaagcaatgaagcagttggttaagcaagaagaattgaaaagactcttaaggctcaggtcagtaaataaactggacatgagtgagtgggcctgggtc

SEQ ID NO: 13416 - DNA, 119 bp, homo sapiens
taagtggcagaatcagcccctcttgggactctatgtggaaagtccttgtgtgacatctgatcctggtgtgcaggccatccagaggcagctggaggaggtggaggagcggcagagggctt

SEQ ID NO: 13417 - DNA, 119 bp, homo sapiens
ctgagatccagggtgtgaggctggagaaggcgttgcgaggagaagcaggtacggcatcccagcagatccgagcagtgggcatggtctgagaatagtgctagcgtaaccatctgaggaaa

SEQ ID NO: 13418 - DNA, 119 bp, homo sapiens
acctgctgtcttttagcaggggttgtgatgcgtaggcatcctaaactgtgctttgaagtaaactcgtaatctgaggcctttgcattttgccttccagttctggccgggaatgattcaaa

SEQ ID NO: 13419 - DNA, 119 bp, homo sapiens
cagggcagccaggatcctcacaagagtaagtctgaggaggggtgggcactgacaactacgggctggtccagcccacgtggggagagctcttcctggaccatagtgtctcagggcctgga

SEQ ID NO: 13420 - DNA, 119 bp, homo sapiens
tgggcagcagatggccactgcaagcagcagggacacacagggccctgtggcccgcctgcctattcaccggggctccagctgcaggaggaacccgtgtctgtgcacggcagcacggtctt

SEQ ID NO: 13421 - DNA, 119 bp, homo sapiens
caaggagctttcggaccggttgggggctttcagctacggaggagggaagagaagctctatatatacagacagagcaagaaacacaaaacaggcttggttactcccaggcagagctccat

SEQ ID NO: 13422 - DNA, 119 bp, homo sapiens
aggagtgaccttgagagtagaggcaggagaccaagggaggaggggcaggcacagagagggatggcggccaccggcctccacatgcccaggtaccttcttgatgcgtaggagccggacat

SEQ ID NO: 13423 - DNA, 119 bp, homo sapiens
ccttccccatgatctgctctggggtgaactagagagaaaaagacagtgggaagctttgagctggcctgaggatggcgcttggggtagggctggaaggggaatccaggcacctatgggac

SEQ ID NO: 13424 - DNA, 119 bp, homo sapiens
aggggaggtagccctggtctgctcctctagagacaacctggaggggacccaaggggcttaccagaacttagatttcacagctggcctgtagatgaaattgggctcctggtggaccatga

SEQ ID NO: 13425 - DNA, 119 bp, homo sapiens
caggtttggagatggtggacacgccagggcctcgtggaggctgtgggcttgggcaaaatgtctaaggagtagtttaacagggacccaggtgaggtcatggtggggtggccaaggccagc

SEQ ID NO: 13426 - DNA, 119 bp, homo sapiens
gctgggtgtctgcactgcggtcaggaggaggcgggcagggtaaagcagagcagccaggccagggagcaagcggggacgcgaacctgctctccctgctcctccgtgcctccatccaggtc

SEQ ID NO: 13427 - DNA, 119 bp, homo sapiens
atctgcgggctcgagctcaggttccactccctgatcatctacccagggaaaagaggaggaagctggtgaccaaaagggacttgggagcccaagaggccggagaaccttctcaggagttt

SEQ ID NO: 13428 - DNA, 119 bp, homo sapiens
gggacagggcatccagggctggctgcactcactgccgctccatctcctgctgctcctggaggatcttgtggactccatcgccagccgcttctgcatgagaagctcctgccgctgcagct

SEQ ID NO: 13429 - DNA, 119 bp, homo sapiens
gccagccgcttctgcatgagaagctcctgccgctgcagctcacgctgccgcgcctctgccagccgctccggtctgtcatgaacagctcccggccctcatgggagaaaagaggccccttg

SEQ ID NO: 13430 - DNA, 119 bp, homo sapiens
cctgcccctgtcaccgcgggatcacagtctgacccaatttccagtgggcccccactggggccggcccaggtcactcacctccaatcccacctcagcagacagggagccaggtttcacat

SEQ ID NO: 13431 - DNA, 119 bp, homo sapiens
ggctgataaagatgccaggcttctggatggggccgctggaaatgctgcgggaggtgggaaatgtgtgctgggattcaggtaacccatgtccagtgctcaggatacaggtcactcatgag

SEQ ID NO: 13432 - DNA, 119 bp, homo sapiens
ctccactggcccagaagcagggctggcatggtgggagccggaccccagggctgtaccaggatcctgggccacagggaagagttggcctgcagaggaggggcctctcaccttttcacggg

SEQ ID NO: 13433 - DNA, 119 bp, homo sapiens
gatcaggccgatgtctgcgggagaaaggcacaggggttaggacagctcccccgccctccctccctcccacgtcatggagtactgacctgctcccccgccctccctccctcccaccgtca

SEQ ID NO: 13434 - DNA, 119 bp, homo sapiens
caaattgcaaggagacagaggagtcagggaggtgcttgcatgcatgcgccttccagcactacagtcatccgtccccatccctgcttacttgtgaccaggccaacgccagggacgtggtc

SEQ ID NO: 13435 - DNA, 119 bp, homo sapiens
ggccagcaactggagcaggaagaggatcctggccctgggggaggcaataaatggggagcaagctgagtgggtgggggtgggtccctgcaaaccaggaggcccagaggccttcactgacc

SEQ ID NO: 13436 - DNA, 119 bp, homo sapiens
ccggagcaccagtgcccgcttgccagccctctccctggctcagggtgtcctgggtgcttactcggagaacggtcatagaaaggagagcgcagcaggtagtagagcagcaggatggtccg

SEQ ID NO: 13437 - DNA, 119 bp, homo sapiens
gcgccgcagctcccgccgctccctccgggtcaggccctttctgtcactcaggaggctcaggctgggaggagggaggacatggtcagggccaggggcatgatctaggcccacggaagggg

SEQ ID NO: 13438 - DNA, 119 bp, homo sapiens
gctggttggatctaaatcctcaagttagtcccatggcccattccgctccagggcttggggaagtagctccccgggggctgtgcctgggtctctctgtccagtggaacgatagggggtga

SEQ ID NO: 13439 - DNA, 119 bp, homo sapiens
agtctggaggccagccttgaaccagagcagcaggagcatccgcagtacagccctgggtcggggagtatgcagggttgtggggaggtggctagccggcgggaggccagggatgctctgct

SEQ ID NO: 13440 - DNA, 119 bp, homo sapiens
cgggcagcccaggtcctcgggctggggtgctcaccctctctggggaactcaccaggggccaggcagccgtcccccatcccccacccccagagcccggctcacccagctctgacagctcg

SEQ ID NO: 13441 - DNA, 119 bp, homo sapiens
tgcgaatcggcgaatcgacctggggagagggtacagaaggaggtgtgagtgagcatctgcctcacatttgtcttcgggtcccggaaatcccctccctacgccctttgggaacctggacg

SEQ ID NO: 13442 - DNA, 119 bp, homo sapiens
gcctctaagagtgggcaggggcactggccacagagtcccagggagtcccaccagcctagtcgccagacctctgtgggatcatcggacccacctggaaccccacctgtgagtacaaggtg

SEQ ID NO: 13443 - DNA, 119 bp, homo sapiens
gaaagcttggcgcccggaacctttgtactcgcccttccctgtgctcgggcactattgggcgttacgcgaggcggggccggttgccaggacgacgcctgcgaagatggccgctgcgtcct

SEQ ID NO: 13444 - DNA, 119 bp, homo sapiens
catcggattccgacgcctgcggagctgagaggtgaaggcagggctcctcaaggcctcttttcccacccggtaaagagggtcccttggtccccgggctctgggctcctgctgttctcggg

SEQ ID NO: 13445 - DNA, 119 bp, homo sapiens
tgagcctagaatgagccatcctctccctgcagctggtggtaggggaccttggccctggtgggcagcagcccgcctgaaggtgctcaaaggaccactggtgatgaccgaaagcccgctac

SEQ ID NO: 13446 - DNA, 119 bp, homo sapiens
tgccatggccactcctccataggtgctggtgcttcgagaaggccaaagtgcacccctgctgagtgcccagtcaacatgcctgggagcgaggggctggcggccgcctgagacctgagctg

SEQ ID NO: 13447 - DNA, 119 bp, homo sapiens
ctgatggggctgggccctgcccaggccaacatgagcaggggatgaaggaggaaggatgacagagccgtgctggccctggggacatcctggactctccccctgcaggaccgcgaactggg

SEQ ID NO: 13448 - DNA, 119 bp, homo sapiens
ccccgaggagctagacggtgagtggctcttgctgctggcagggggtgggagctgtccctgagcctggcccctgggcttgacctccctcctccacagagcttcaggccgccttcgaggag

SEQ ID NO: 13449 - DNA, 119 bp, homo sapiens
ccaccgggagctgggtgactgcatgcggaccctgggctacatgcccaccgagatggagctcctggaggttcgcagcacatcaagatgcgcagtcagtcagggagcccgcccgcccgggc

SEQ ID NO: 13450 - DNA, 119 bp, homo sapiens
ggatgtccctccttgggcttcagaccttatgccctcaccattgtgacactcttcctgggtctgcagtggcggccgtgtggactttgaggagtttgtagaactgataggcccaaagctga

SEQ ID NO: 13451 - DNA, 119 bp, homo sapiens
gggaggagacggcgcacatgctgggggtgcgagagctgcgcatcgccttccgagaggtgcggagtgtgggaggtgggcagaggggggcagggctgggtggcatccttgctggcctctca

SEQ ID NO: 13452 - DNA, 119 bp, homo sapiens
aagcaggcgtgtagtctctctccagggtgtgaaaaactggaaaaaaaccctgccgctcccaaaggggaattgtgataaaaattacagattattgggctgggagtggtggctcacgcctg

SEQ ID NO: 13453 - DNA, 119 bp, homo sapiens
acaagcgcactggggggaagaggaaggagatcctgagtgccctctactcacccatggacatccaggtgcgagccaggagcggcagcctttctgtgagtgccggctggggcgcgggggcg

SEQ ID NO: 13454 - DNA, 119 bp, homo sapiens
tggagcctctgtgttcgcttccaggaaccaacccgtgtgcggacaggaacggggggtgcagccacctgtcttcttcacaccccacgcaacccggtgtggctgccccatcggcctggagc

SEQ ID NO: 13455 - DNA, 119 bp, homo sapiens
cagcactgctcaggggggcccacgggctgcttgcaggggccaaccgcctgaccctggaggacgccaacacgtgcagcctctgggcctgaccatccttggcaagcatctctactggatcg

SEQ ID NO: 13456 - DNA, 119 bp, homo sapiens
gtgccagcgctatgcgggggccaacgggcccttcccgcacgagtatgtcagcgggaccccgcacgtgccctcaatttcatagccccgggcggttcccagcatggccccttcacaggtaa

SEQ ID NO: 13457 - DNA, 119 bp, homo sapiens
ttttaaatatgaacaaagaaaaaaatatattttatgatttaaaaaataaatataattgggattttaaaacatgagaaatgtgaactgtgatggggtgggcagggctgggagaactttgt

SEQ ID NO: 13458 - DNA, 119 bp, homo sapiens
gagtgaggaggggagggcagcagtgctggctggacagctgctctgggcaggagagagagggagagacaaagacacacacagagagacggcgaggaagggaaagacccagagggacgcct

SEQ ID NO: 13459 - DNA, 119 bp, homo sapiens
ggctgggcccgtgacccagcttcctgagtcctccgtgcaggtggcagctgtaccaggctggcaggtcacgagagtgggcagctgggccccaggtaaggatgggctgcccactgtcctgg

SEQ ID NO: 13460 - DNA, 119 bp, homo sapiens
tgcctggaaggggctccaatccccctccctgctcacctgggctgagactctctctcgcccatagggggacatgtgtggatggacctgagattggggcaggagttcgacgtgcccatcgg

SEQ ID NO: 13461 - DNA, 119 bp, homo sapiens
ggcggtggtgaagctctgcgactctgggcaggtccaggtggtggatgatgaagacaatgtgagtagtccctccctcctcctgccccatgccttggggtcagacctgggctgacagctgc

SEQ ID NO: 13462 - DNA, 119 bp, homo sapiens
gggtgtgggtggagggaggggcaggctggcaggtgagcacctggggtgttgcctgtaccaggtgaacccccagacctgatgagctgcctgactagccgcaccctcatcacccgcgggga

SEQ ID NO: 13463 - DNA, 119 bp, homo sapiens
gacggtgtccaccccactgagcagggaacaggcactggacgtgcgcgacgccttcgtaaaggtgggctgagggaaggggccgcttgctcgccctaccccttgggaagttgggctcttga

SEQ ID NO: 13464 - DNA, 119 bp, homo sapiens
cagatgttatgggtttggggagggcctgccagagctggtgagaggtgactgctgtttgctgcttgcaggttcctggagaagaaccgagacaccctgcatggggacattatccagctggt

SEQ ID NO: 13465 - DNA, 119 bp, homo sapiens
ccactcctccaggaacaagttcatcaagcagatcttccaggccgatgtcgccatggtaagccgggtgcgtttctgttgttcgggaagggcccccacgggccaggcctgagtctaagccc

SEQ ID NO: 13466 - DNA, 119 bp, homo sapiens
ctggtgggaatccctgcaacaacagctacacacatttccatgccctctggatgcccccttccctcagtactgtggcgcctcgaggctgagaaaatgcggctggcggaggaagagaagct

SEQ ID NO: 13467 - DNA, 119 bp, homo sapiens
tcggaaggagatgagcgccaagaaggccaaggaggaggccgagcgcaagcatcaggtgagctgagagccccaggcaccttaggtgtccacttgctggcttgtcccctccccgaggctgg

SEQ ID NO: 13468 - DNA, 119 bp, homo sapiens
accccaattgcccaggagcgcctggcccagctggctcgtgaggacgctgagcgggagctgaaggagaagaggccgctcggcggaagaaggagctcctggagcagatggaaagggcccgc

SEQ ID NO: 13469 - DNA, 119 bp, homo sapiens
tcagacatggtggacaagatgtttggcttcctggggacttcaggtggcctgccaggccaggagggccagcacctagtggctttgaggtaccaggctagggacaggggctccagaggccc

SEQ ID NO: 13470 - DNA, 119 bp, homo sapiens
ggcagtgagaagatccctgtgatgaccaagatttatgagaccctgggcaagaagacgtacaagagggagtgcaggccctgcagggcgagggcgaggtgaggccaaggtgccctctggat

SEQ ID NO: 13471 - DNA, 119 bp, homo sapiens
gcaaagtcttgctgtcgggggtctcgacattgctttctgctcagccacttgaccctgatccctgctggtctgcaggcccagctccccgagggccagaagaagagcagtgtgaggcacaa

SEQ ID NO: 13472 - DNA, 119 bp, homo sapiens
gctggtgcatttgactctgaaaaagaagtccaagctcacagaggaggtgagggcagacgctgggggtctgcagcccaggggtggctgccttaggtggcctaggctggagcacagctgag

SEQ ID NO: 13473 - DNA, 119 bp, homo sapiens
ctgccctcaaaatccacatggggagccccaggggccgcctcagcgggtactctggctgcagtacctgcgaacttcatccacgggggcccgcccggctacgccccgtactgtgaggagcg

SEQ ID NO: 13474 - DNA, 119 bp, homo sapiens
cctgagaaggacctttgtcaatgggacacggacacagccgcccagctggctggagctgcaggttcgtgctgtgtatgcacgtgctcgtgtgcatgtgtgcgcacgtgtgtaaatgcgtg

SEQ ID NO: 13475 - DNA, 119 bp, homo sapiens
gctcccctcccctctgtgcccacaggtgtcctccctgggcagcggcagtgaccacgtcatggacgccattcccagtgcgagcagtacgccaaggagcagggcgcccaggagcgcaacgc

SEQ ID NO: 13476 - DNA, 119 bp, homo sapiens
tgctcgcttatcttctcacccctgcttccagggctacaagatggatgacctcctgacttcctacattagcagatgctcacagccatgagcaaacagcggggctccaggagcggcaagtg

SEQ ID NO: 13477 - DNA, 119 bp, homo sapiens
ccaatccattgtcacagctctcagccggcgacctattggctcctgctggaggcgggactcccggttgctggcggtaccttttccggaagtgtttgttgcgcgctgcagggcaacacccc

SEQ ID NO: 13478 - DNA, 119 bp, homo sapiens
ggcgtccctggaagctgggggagcgggtgggtgttgggtggcgttgggggagctgcgcctcgcccagagctcgcccggagcctcgcccggagccttccggggtgggggatagttgagga

SEQ ID NO: 13479 - DNA, 119 bp, homo sapiens
ttggaataggttcagagtctccagatccagccatttcctttctaggccagatcttgactttttttttttttttttcaaccaggagaaataactttatttggactgagagctggagaatg

SEQ ID NO: 13480 - DNA, 119 bp, homo sapiens
agaataggacctgagagtatattgggctaaggaggagaggtaaggttccaaaacggcggtcaaagctcacgactaaacggactctacttcccaccaaacttgcagttagtgcaaccaac

SEQ ID NO: 13481 - DNA, 119 bp, homo sapiens
cagaggacacagtagatgcaggagaggagggttccaggagggaagaggcagccaaggagccaaagaagaggcttctgctctggaagagggcagttcagacgccagccaagtaagtcact

SEQ ID NO: 13482 - DNA, 119 bp, homo sapiens
agttggggtagtgaagaggcctggtgggtgttgactgtgacagaggcagagttgacctttgcatctccatgtctccaggacttcggttttcgcagccggatctcggagcacctgctgga

SEQ ID NO: 13483 - DNA, 119 bp, homo sapiens
tgttgatgtgctttccccagtcctgggtggagcttgtcggcaggtgagtttctgtgggtggtgggctgactggggcctcattttccctcacaactttttcggatgacccagaactgagc

SEQ ID NO: 13484 - DNA, 119 bp, homo sapiens
gagagccagcaggaggatggagggacccaaatgcagtccctccaacacaaactttttattgcttctctctacaggcccagcaaccactgggaatagaagacaaggatgacagccagtcc

SEQ ID NO: 13485 - DNA, 119 bp, homo sapiens
agccaagatgagctgcagagcaagcagtccaaaggcctggaggagaggtaccataggtgggaggctatcccagcgctgtgccttcagggtggtgtggacttgggcagaattcttggctt

SEQ ID NO: 13486 - DNA, 119 bp, homo sapiens
cacccatggtaggcgatccacagagcctgtggctcccccagagcagctctcagaggctgcactaaaggcatggaagaggcagtggcccaagtactcgagcaagaccagaggcacctgct

SEQ ID NO: 13487 - DNA, 119 bp, homo sapiens
gcagcaactgcgggagaagctgtgccaagaggaggaagaggagatcctccggcttcaccagcagaaagacaatctctcaggtcctgcccttccccttaggcatgcttcctggggccttt

SEQ ID NO: 13488 - DNA, 119 bp, homo sapiens
acaggcccgttaccattccactgtgtccacccagggctgagcaagaggcttccctgcagaaactgagagagagttggagtctcaacagaaggctgagagggccagcttggaacagaaaa

SEQ ID NO: 13489 - DNA, 119 bp, homo sapiens
cggagaagagcgagcaggctgccctgaatgctgcaaaggagaaggctctgcagcagctgagggagcagcggaaggggagaggaaagaagtgagctagtcaagtggggacctcaccctct

SEQ ID NO: 13490 - DNA, 119 bp, homo sapiens
ggtcggtagtcttcctggctccgcctcccaccatgatcagtacctggccagcttcactcacagtcccttgctcctccccaggctgtggcaacgctggagaaggagcacagtgctgagct

SEQ ID NO: 13491 - DNA, 119 bp, homo sapiens
ggagcggctctgctcctcattggaggccaagcaccgggaggtaagatgcagcatcctgggcccccttcaggctgattagcagaattcagccccatccctggctactaggcagcgagcct

SEQ ID NO: 13492 - DNA, 119 bp, homo sapiens
cctcagctaatgccttacactctttctatgcttatgtgtttccctttctgggcaggaaaggaagctccagatttagagttggaccttgaaaccagagctaaagatgtcaaggccagatt

SEQ ID NO: 13493 - DNA, 119 bp, homo sapiens
gtctgtgtgggtagtcatttctcctctgttttctccttggctgcaggagaccaggcacctggatgagataagtcggccatgcggaaaggccacaacctgctgaagaagaaagaggagaa

SEQ ID NO: 13494 - DNA, 119 bp, homo sapiens
tattgtttattctggggaggcaagaggtgctggtgggcagggtggtgaccactgcccatttctgagtccgtccccatgctcttccagctggcatcccgctgctcagcaacagccccacc

SEQ ID NO: 13495 - DNA, 119 bp, homo sapiens
ccgctggagagcaggctgggttacatgtctgccaggtgagcctccctgggggctggttggggtggaacgcatagtcgagctgctcactgtgcctccctgggcaggtggacctctgaggg

SEQ ID NO: 13496 - DNA, 119 bp, homo sapiens
catcagcaggctctggggtgggggctttgcaggggatgctctctgatgtttgttccgttgtttaaataaatgcacttatttttgtttttttttttgcaagctgtggggttgcccttgct

SEQ ID NO: 13497 - DNA, 119 bp, homo sapiens
cgccagactcaccccccctcccggctccccgatggcctccttcggggcgctcgctactccggaccctccgttggtggtgctccagcccccgcgcttctccccggccaggcgccccctgc

SEQ ID NO: 13498 - DNA, 119 bp, homo sapiens
gcagagaccaaggaccagaccccatttcagggagaaatacgcagagagatgagggtggagagttctagagcagacagccagttggatccctagggcctaggacaggggcctgccacatg

SEQ ID NO: 13499 - DNA, 119 bp, homo sapiens
gttgaatcaaggaaaaggtcagaaggcaggcgatggagaagctgaaaaagcagatggaaaggggaagagcctggatgggaagtggtctcgattgtccggtggcacagtgtggggccagt

SEQ ID NO: 13500 - DNA, 119 bp, homo sapiens
actcgtcctgagcctccaggctgaagttgtggaactgtagttctatgctgtgtccggcaggcaccgagaatgccaggtgcagagctgggggagggcataggtggagcaattcatggccc

SEQ ID NO: 13501 - DNA, 119 bp, homo sapiens
ccatgccattcccattacactaacttggggatcaggtgcttccgtgtgtgcccctcccgttctgcatgggcactgtgcttaccagttggtgagggtactgctgcaggtagctgggagta

SEQ ID NO: 13502 - DNA, 119 bp, homo sapiens
gagaaagtgccctggaggccagtcagattccccccacaccctgtagagaggtggaagggctcatgagttgctaggatctgtgcctccatccaatagggctggcggtgattacagagcga

SEQ ID NO: 13503 - DNA, 119 bp, homo sapiens
aggtcctttattctcaaggtgcctcttcctcaccctcccctcaaccccaccccgtcatcttgggccctttcccggaagatctgcccccagtactcactggactgtggggaggggctcac

SEQ ID NO: 13504 - DNA, 119 bp, homo sapiens
gcctgactcctgctgccctttaggggtcccagctgcctgagaggtggtgatggtgggggtggtggtggtgtggtaaggcctccggcaggcagtgggctatgggacgccccagatggggg

SEQ ID NO: 13505 - DNA, 119 bp, homo sapiens
tgggagagcggctcatggagtttcattccaaagccctcgtttcaagctgtccccgggtacttacgggccggatgatggccaccagcagcccaagcagcaggaggagcaggctggagagc

SEQ ID NO: 13506 - DNA, 119 bp, homo sapiens
aggaggacacagagccaggagaagcggcagtctggccgtagccctcgaggacgccgacctgcgggttggaggtggggttttgaaagccccttctgttgggtattcctcatgctgtcctt

SEQ ID NO: 13507 - DNA, 119 bp, homo sapiens
gtattcctcatgctgtccttggctcctgggcctctctgtcctcccccaggtcaccccctgggatggttacatgccagggagctgggacgctgtagctggcatcctctgggaaaactggg

SEQ ID NO: 13508 - DNA, 119 bp, homo sapiens
ggagggcagggtggcccagactcaggctcgaaggcaggattgcagaactcggtctggaagggggagatattgagggctgagggcagcagtgaccactggtgctgggtcttaggagcacg

SEQ ID NO: 13509 - DNA, 119 bp, homo sapiens
cttgccaaaacacaggtcaggctgggtggtgtcaccgcaggagttggggcagtagcccccaggcacacaaggcagcaggagtaggggcggcgaggctgaggtgtccgaggcgccgccgc

SEQ ID NO: 13510 - DNA, 119 bp, homo sapiens
ctgtctgcaggggcacagacccaggcacagagggtttggggatgaaaatccagcccaccctcgatccgctcaacccgcacctctggatggaaggcgtggcaggagtctggtcgccggcg

SEQ ID NO: 13511 - DNA, 119 bp, homo sapiens
gagcttctgggagcgcatccggtcacatttgacagaggcattatgtgcagaagccactgttaaggtcaaatctcaggaccggagcccattctgcagactggaaaaaggtctggaagaac

SEQ ID NO: 13512 - DNA, 119 bp, homo sapiens
ttccgccttgccgagggcgggaggagtgtggcgggacgggcggcgccgccctgcggtcttacttctggcgggcccgcactccacgatcccgttggcctcccggatggccggctggtaca

SEQ ID NO: 13513 - DNA, 119 bp, homo sapiens
cgaacacggggtactccgtgtcgcagggctgcagcgggtcctgcttcttgtgtttgtgggctgcgggcgagaaaggacatcacgccaccgaaggggcctctggcctgcggtgacctcgc

SEQ ID NO: 13514 - DNA, 119 bp, homo sapiens
agccctgcttggggtcattcctgggacaggtcatggagggtgggttctttgtagctcctgctgcgtcccaacccaccgccagcagggatggcctcagctgggctacttacagtgatgga

SEQ ID NO: 13515 - DNA, 119 bp, homo sapiens
agacacttttggctggccggaacataagcccagcacagggtggacacggcacaggaaaacatggtggcaatgagggcaggatgtcatggggtggtgatgatggcacatggagtggcggt

SEQ ID NO: 13516 - DNA, 119 bp, homo sapiens
aacagggaccagtgacctcattccaggacagggcagaggactggctggctggctggcagagggaagggcgggtgacactcacgctgaccaggggctgggctgcactgtggtggtgactc

SEQ ID NO: 13517 - DNA, 119 bp, homo sapiens
gagggtttgcacatggcctgatagtcatacatagtcactctgaaaatcagaagcgggctgtgatgagtcaaagccacccccaccccctgcccctgcctcaggaggctttactagcagag

SEQ ID NO: 13518 - DNA, 119 bp, homo sapiens
ggaaggagggcatttgggagagggaagctggcctgccaggaggaccgggcggagggccatggctccctctccaccttcctcacacgggcagaacttacactgtcctcgcagctctgtgt

SEQ ID NO: 13519 - DNA, 119 bp, homo sapiens
gcacggcccatccacagtgctgcactggaaggaagaggagagactgaatgtggacactgcatgtgtagtgaaatggcacgtgtaagtgggaatgctgtgtgtgtggtacgtctgcagtg

SEQ ID NO: 13520 - DNA, 119 bp, homo sapiens
gtggagcatccaaggggagggagagggggtctcacacccaggggagcgtggtgagtccccagccccgactggcccgacatcacacctacctgccgcgttgccgcccagaatttgcgctg

SEQ ID NO: 13521 - DNA, 119 bp, homo sapiens
gaggaattccagcttcatttggacgcccgcggctacagggcagaaagagagagggcaaggccagggaaggacggggagagaaaaaaatagagtcaagttaaagagaggaggtgcttccg

SEQ ID NO: 13522 - DNA, 119 bp, homo sapiens
ccttctcggagcccacgaacaagctgcttctcaggaggccagcccgggtgcccaggaaggccatgtccacacgtgttcagactccctgtgtggcagacagagcgggaatggtcaccaca

SEQ ID NO: 13523 - DNA, 119 bp, homo sapiens
tccagtaggcttccatgggggctgtcaccaccgcgtcaaacagcacctcccggaccagctcctcgtcactgggtgcaaaacatcagggaaccaggccacatgcttcctccatgctcatg

SEQ ID NO: 13524 - DNA, 119 bp, homo sapiens
gtgtttgttgttttaatcgtttttgtgaattacccccaaatcccatacagtaaggatcccaaggcaaagagatctgtacctaccaggggccggaggtcgggatgggagaggatgtagcc

SEQ ID NO: 13525 - DNA, 119 bp, homo sapiens
attgttggtgttcagaaaggcgtatccgtgcactccaagctgccagagtccagggtggaggcgcattagcctgctgtttgtgctgggcatctggagttgggcaggggtttgggggccac

SEQ ID NO: 13526 - DNA, 119 bp, homo sapiens
gggggagggagtttgctcctggggaacctgtgatccccacagggaacagacccaggctcaccttgtaccgggcgccagcttcatcagctctctcagggccacatctgagcccaccacac

SEQ ID NO: 13527 - DNA, 119 bp, homo sapiens
gtcaagaatcactggtctaaagatggcactgaagccccaggttctaatccctgctacaacgtctccagggcggccactcaccgtttcgttcttcttgctgaagactggcatggccacag

SEQ ID NO: 13528 - DNA, 119 bp, homo sapiens
tggtgagcagtgtcaggctctgagcctgcgagctgaggagctgtaagggaggggagaacaggggtcagaggtgcggcctagggccactggtttgccgcactcggagcacccagtgcgga

SEQ ID NO: 13529 - DNA, 119 bp, homo sapiens
gcgggggcgggcccctgtctccatggagacagtgacgctaccccgctaggggttatttggaagcggggcggcctaggaggctgaagaaggcttcggactggactccccagcccctggtg

SEQ ID NO: 13530 - DNA, 119 bp, homo sapiens
tctctttccctttccttgatcccacactgaatgaacctgtgtgatttccccacttctctgctccttgcaaccccttgtctgtgtcccctgcccgctgggctgaggaatatttggagcaa

SEQ ID NO: 13531 - DNA, 119 bp, homo sapiens
tcagaggagaagctgtggctgggagaacctgagggaacagccaccgatcgctggtgagttcagataccttttccgaatcccgtgaaaggagtatggacagttttcccagcctcctccat

SEQ ID NO: 13532 - DNA, 119 bp, homo sapiens
gcatggttgagagtgcacacctggaagtcctttcccaagtggcctgtgtgtgtctctgtgccccagttctgaaattcgtgcggcagattggcgaagggcaggtgtccctggagtccggt

SEQ ID NO: 13533 - DNA, 119 bp, homo sapiens
gcagggtcgggccgagctcaggcagaacagtgggcagcagagtttatacagcagcaggtaggacattgtactttccagtcccacttcagagccagctgatgccccaggccatgggttca

SEQ ID NO: 13534 - DNA, 119 bp, homo sapiens
ttaacagctctcattcctcttcttccttacagggaggctgtggagcactttctggaggccctgaacatgagaggaaaagccggggcccccggggtgaaggaggtgccatgtcggagaac

SEQ ID NO: 13535 - DNA, 119 bp, homo sapiens
agggagctcaagtgggctctgtgtggcaggaggcctcgggaagtcccacgcaggcagtgacactcacagagggccgggcagaccctgcagaccagtgaagccacggtgtcccttcaggc

SEQ ID NO: 13536 - DNA, 119 bp, homo sapiens
ctctctcgccaggctctccagcctctcctttgtcacctctggggccttgaggaccctgggaacaagacaacaccgattgagtcaggtcagggccaggacaggagccccctcctgtccca

SEQ ID NO: 13537 - DNA, 119 bp, homo sapiens
acacagggctggaggcccaggaaccacctggaggctggctgccctcccagcctatccctggtggggactagtgcaggacacttggatactcacctggattccccgggctccagctggtc

SEQ ID NO: 13538 - DNA, 119 bp, homo sapiens
ctgagggtcccatggggccttgtgcaccctgaggagagagtgagcgcagcgtcagagaaaagccaggacggtgggggcctcctctgcatctgaggccactgctccttagtccagagact

SEQ ID NO: 13539 - DNA, 119 bp, homo sapiens
cccagcacagagactcacagggcccctctccccaatcagggccaccccagggggtctcactgctcaccttcgtccaggttcacctgcaggacccgtcaggccaggaggacccacggggc

SEQ ID NO: 13540 - DNA, 119 bp, homo sapiens
caggaggacctctgtctccagatgctccaggagcaccctgcttgccgggctcaccctggagggacagagcaaggatgatgagtgcaagtggtaagcacccctgcccagggcccactgac

SEQ ID NO: 13541 - DNA, 119 bp, homo sapiens
ggaggccgggttcaccagctcggccaggggggccgctgtctcctcgagcacctttgggaccatcttttcagaaggaccagggggaccagggggtccagggttgccctagaaggagaaaa

SEQ ID NO: 13542 - DNA, 119 bp, homo sapiens
tgaaggccagcctggagctctccagaccctgttgggtgctgggccaggctattccatgcctgcctgtgctctcatgccaggagcatcacttacattggagcctgggggtccaacgcggc

SEQ ID NO: 13543 - DNA, 119 bp, homo sapiens
cagcagctccagggaatccagtggctccctgtgtggggagaggagagcccctgagaacctcaagccctcggaggtttgagattaaaatgggcggggggcgggggtggtctcagagcctg

SEQ ID NO: 13544 - DNA, 119 bp, homo sapiens
agtcgggggcatcccagaacacccccgccatgggagcctctggggccaggcctctttgtgaggtgcaggtggggtgtcagaggcctcactcaccggggggccttgggcacctcgggctc

SEQ ID NO: 13545 - DNA, 119 bp, homo sapiens
ctttaggaccagtcactccagtaggaccctggaaaggaaagagggagacagtgaggcccagtggcccaagaagacggtgggcttctgtctgagccccaacaatggacccctgaggtttt

SEQ ID NO: 13546 - DNA, 119 bp, homo sapiens
gccttcccatctgcacgccaggagcccttccttgagggaacaattcttggagtgcagcgttacccacctaggcccaggtgctccagaggggccctgaggaccaggggcaccagcatcgc

SEQ ID NO: 13547 - DNA, 119 bp, homo sapiens
ctttctggccggcctctccttgctcacccttggccccaggctggccatcagcaccctataatgggaaggggaagcaggtgaatgaggggcaggctaaaaccctggagctcttccagaag

SEQ ID NO: 13548 - DNA, 119 bp, homo sapiens
catttccctccctgacaagctccgatgcccgagggtgctggatgtggaactggcctgagtggagggaccaggaggatggacagagatactcacaggaggcccagcaaatcccgctggtc

SEQ ID NO: 13549 - DNA, 119 bp, homo sapiens
cggggggcccagtctctccacgttcaccctgtgagagaagggggcatggcgagaggtcaggccccgctgctgacctgcttctgctcccctccaagagccccttgggccctgcccagcct

SEQ ID NO: 13550 - DNA, 119 bp, homo sapiens
gccaccaggcagcatgagggcctgcactgactccctggctctctggttcccaggggcctcgggcagagcaggctcagaggggcagacactcaccggagcgccacgagcaccagcacttc

SEQ ID NO: 13551 - DNA, 119 bp, homo sapiens
ctgcaggaccaggaggtccaacttctccctgagggtggggaagggaggaagagctggggtaagaaggtgggaggcagagtgggagagggcaaagtgcatttggggggccttgctcgtgg

SEQ ID NO: 13552 - DNA, 119 bp, homo sapiens
tgagggaggacaagacagaaccgcctttggcaggagataagaaggaggtgtgacagggaggcaaggtgtgagaggaaaggagccgggactcaccttctcgccattagcaccagctgggc

SEQ ID NO: 13553 - DNA, 119 bp, homo sapiens
caggggggccaatgggacctgtcaggccctgcggggagagcaggtagaggtgagggaggcaggctgagcagccgagcacgtgcggcccggcaccaagccaaccttggtgcgtgctccca

SEQ ID NO: 13554 - DNA, 119 bp, homo sapiens
cgatcacaaggggcaggaatgtggcaaagccacagctttggtgagaggctgtaacctcagtacttacccgtcgcctttgggcccagcgataccagctgctcccctctcgccaggcattc

SEQ ID NO: 13555 - DNA, 119 bp, homo sapiens
cctgaagacctggagggccctgagccccaggggggcctgctgggccagatgcaccctggggagggaggtagagggagtctgtagtggacagcacctctccctgaacccatgttcatgga

SEQ ID NO: 13556 - DNA, 119 bp, homo sapiens
aggagtgccggggaggccacggggaccctggaggccctgggcaccgggagagccacgttcacctgggaacctcgttcaccctgcggcagagacaccaagaagtgatcaaccaacagcag

SEQ ID NO: 13557 - DNA, 119 bp, homo sapiens
aaggtccagggagaagcagggaggtggggaaaggagcaggagcataggacccagggcaggcccaaggagcagcccgcattggccaacaggatactcaccctgggacccacgaggccagg

SEQ ID NO: 13558 - DNA, 119 bp, homo sapiens
ggctccagcttcaccgggaacaccctggagaacaaagaaagatgtgtgagagtgaaggcttcatatcacgacccctgaacaattctccacagcagggctgaatatcactcctcccatgg

SEQ ID NO: 13559 - DNA, 119 bp, homo sapiens
agggctcctcatgccctcttgcccttgcctcctaggcatcagaaaagaccttcccatctaaacaggttgaggtccaaagagccccatactcacctggtcacctggttttccaccttcac

SEQ ID NO: 13560 - DNA, 119 bp, homo sapiens
ctgggggaccaggagggccaggaagtccctagaagccgaagtgacaagcgttagcaaaggagtgagtttctgccctggcccccagggaggcacagtatagggcagacccaaagaaagga

SEQ ID NO: 13561 - DNA, 119 bp, homo sapiens
aggtgtgggccctccaccgatagtgcctgctgctgtcccagggagccctgggtatggcaaaggactgcaagagagcctggtccagccacctacctggaacccagatggcccaggagcac

SEQ ID NO: 13562 - DNA, 119 bp, homo sapiens
cctgctcgcctcgttcaccagcaggtccctgcagtggaaaagaaaaggtgagctgagccagtgttccaggaccctgagagccacagctagtagggcccaggggaggtcagcagggtggg

SEQ ID NO: 13563 - DNA, 119 bp, homo sapiens
atctgtcagctccattaatggatgggctctcccacccccacccctcccagcccctgcccccagggccactggggaggctgggcaggtacttacagcagggccagggggtcctgcagcac

SEQ ID NO: 13564 - DNA, 119 bp, homo sapiens
ctgtctcaccatctttgccaggaagaccctagacagaagagaaaaagaaaagtcaatgacacgcttttctcccacttgcagtccccctaggattgggcaaaggtacttctggcccagag

SEQ ID NO: 13565 - DNA, 119 bp, homo sapiens
gtcccgggaccatgccatggggaggccgttcccctgtcctccctgcagatgcccggccaacaccaagtctgggcagcggggaaggatacttaccctcagaccaggagcaccaggcagtc

SEQ ID NO: 13566 - DNA, 119 bp, homo sapiens
ccttctcaccagctttgccaggctcaccctgaaggaaagagagggcagggccatgaggcggatggtttggagggagttgggggcagagcgggctgcagggactgaggcctggggccaca

SEQ ID NO: 13567 - DNA, 119 bp, homo sapiens
caggcctccctaacccaaactccatctctcttttcccttgcttccccagggagatccccccaccctcctgcagccctcagaggatagacttacagaagggccaactttgccttgaggac

SEQ ID NO: 13568 - DNA, 119 bp, homo sapiens
cagcatcaccagggcggccagtgagaccctttgttcaggagagagaagagggtggggtcaggagccggcccaggacctcccaatcctggcagtgcagggctggaaggagccagccagga

SEQ ID NO: 13569 - DNA, 119 bp, homo sapiens
agggctggaaggagccagccaggaagggcctgagggtctgaagccaagggcaacagcagctctgctactacccgggctccaggaaggccaggttctccaggacggccagggtcaccgtt

SEQ ID NO: 13570 - DNA, 119 bp, homo sapiens
ggctcccttggggccagcaagaccactgggccctcgctctccaggggctccctacaagggtacacaggggtcagtgggataccatgtgacctcagcgatgcagggagggaccccagccc

SEQ ID NO: 13571 - DNA, 119 bp, homo sapiens
aggggctccctacaagggtacacagggagtcagtgggataccatgtgacctcagcgatgcagggagggacccagcccctcttctcccactcaccttgggacctgccagaccatcttgac

SEQ ID NO: 13572 - DNA, 119 bp, homo sapiens
ctgggaaaccgcggttgccgggagcaccctaaggagccacagggaggagaggcagtgagtgagaacagcccaacccagccaggctccagtgggtccatcccactaacccaccaacccca

SEQ ID NO: 13573 - DNA, 119 bp, homo sapiens
cacaaggactccacttccctctcgaggtcacaggccccatgggatggagcctccacattcacttaactcttctccagggggaccgatgggcccaacgccaccaggctctccacgggcac

SEQ ID NO: 13574 - DNA, 119 bp, homo sapiens
ctctcttgccttcttcaccagcgggtccaggggctccctgggggccagcagggccctgaggaccagcaaaaagagaaacagagtgagccttcacctggccttggagcaagcctcgactc

SEQ ID NO: 13575 - DNA, 119 bp, homo sapiens
atgggaaagaggggtgatggggtttgactccagagatgtcagtggaacttgggggtcactttgggctctaccgtctgacctttcgggcccagaggaccagttgcaccttgagggccagg

SEQ ID NO: 13576 - DNA, 119 bp, homo sapiens
agggccccgtggcccagggaagccaggagcaccagcaatgccaggagcaccctgtgggcatgagaagaaggaggggtgtcaggagaggggagaggcaggactgggctctcctggggtag

SEQ ID NO: 13577 - DNA, 119 bp, homo sapiens
caaagtacagagtcaagagttccaaagccacagaccccagacccccccaggccaaagagaagctgcactacggaggcaccagcaggcccaggggacccaggagtaccaggttcaccgcg

SEQ ID NO: 13578 - DNA, 119 bp, homo sapiens
aggaccttgagcaccttcaggaccacgggcaccagtggggccggcttcaccctgggaagagacagggagatgaaatgaagaagaagagaggggacacagacctctagtgggtgggcaat

SEQ ID NO: 13579 - DNA, 119 bp, homo sapiens
caggtggttgttgagggagcaatgagcaagggttacggggaaaggacagcttctcggcacccagaagttctgactggacaacagggcacgtaccttggctccaggagcaccagggaagc

SEQ ID NO: 13580 - DNA, 119 bp, homo sapiens
caggaccaccagcaggaccgacaggaccctggagagagtaggcggatgagaagagaggtgaatgccagtctggcctccaaagcgagccaccccgacacctcacactccttccctcctct

SEQ ID NO: 13581 - DNA, 119 bp, homo sapiens
cttacaggagcacctgcagggcctggaggtcctcgaggtcccatggggccctgcatcggaacagaaaataggggtttactacacatgcttcctcagtggcctccagtgtgccatcttct

SEQ ID NO: 13582 - DNA, 119 bp, homo sapiens
actggacaagtttttctgcccagcctaggctgccacctgtaggtcacttgggctccagctatgtggctgctcttctgctgggtgccttactctgggcagtgctgtggttgctcagggac

SEQ ID NO: 13583 - DNA, 119 bp, homo sapiens
tttataataagttgaaaatttcatataattttatttattaagaattccaatctaagtataaaggtacaagtagtgagaaggaaatactacagttcggagaactgcttatttccaagtat

SEQ ID NO: 13584 - DNA, 119 bp, homo sapiens
tttaagtcattcaaattatcagttagtgagttttctctgtttttacttgttttaagtgcttctttcaatttaaaagattttcatttaaatcttcaacttgtgtctaataagagaaaaag

SEQ ID NO: 13585 - DNA, 119 bp, homo sapiens
ccagcttttcgaggacctgctcaaccgcgacgacggccagggcgaggacctcatcttgcacttcctcaacaggcgagcgaggaggaggggccctcggcgctcttcatctaccgcactat

SEQ ID NO: 13586 - DNA, 119 bp, homo sapiens
ggtgccggaggaggtggaggtggagattggtgagcctcgacgcgccgctcccttccccgggcttccctctgcccgtcccggcctctccggcgggcgccggggctgctagagcctgccca

SEQ ID NO: 13587 - DNA, 119 bp, homo sapiens
gcctcttacaggtgtgcgttttctgcagagtcgactggatgctcctgtaccagggcatggtggtgctggcgctagccaggtgtggtggacctgggaggtggaagacgtcttccacaaag

SEQ ID NO: 13588 - DNA, 119 bp, homo sapiens
gaaggcgctgttcaggcctgtggtcgtgatcgtgcccgacctgcagcagatctgtgagatcatgctctttctgagggcttcctggaggccaaggtggggggccttggcagcgccaggtc

SEQ ID NO: 13589 - DNA, 119 bp, homo sapiens
caataaaactgcgtcagaaaaaagataatgttttagcccagctgccattgtttgtcccgcaggtggataagtggttcaaatgttcgagaccatgttaacccgccacacgacgatggtgg

SEQ ID NO: 13590 - DNA, 119 bp, homo sapiens
tggggcccaccagagggggcaagtccgtcgtcattaacactctgtgtcaggcccagaccaagtgagtatacctccgtagggagggcctggctgccacaggggctcacagtatatgtttg

SEQ ID NO: 13591 - DNA, 119 bp, homo sapiens
catgctgtggtgcaggagagaaggaagtttgggaagattggctggaacgtgtactatgacttcaatgagctgacttccaggtgacagtggctgcttctccttggaaatggcttccttag

SEQ ID NO: 13592 - DNA, 119 bp, homo sapiens
tccaccccaacgctgagattggctattacacgcaggcggctcgagacatgtgggctcacctgctggagcgcagcctcagacaggtaaactctactcaggaggacttcattagtttgatt

SEQ ID NO: 13593 - DNA, 119 bp, homo sapiens
ctcggctccatgctttgttcaggtgtggccctcactcggctccgtgctttgtttaggtgtggccctcaccggctgtgtgctttttctaggtgtggccatcaagatccccatcgtgtgcg

SEQ ID NO: 13594 - DNA, 119 bp, homo sapiens
tggtgctggagggcggcccgggcacgttgcacgtgagtatggccaggtgggagggggcatgtgtgggccgtcctgctgcaggcagatgactgtccaaaagtgcttgtctcagaactcaa

SEQ ID NO: 13595 - DNA, 119 bp, homo sapiens
caggtgctgcgggagctgctgggggacttcacgcagccgctttatccccggccccggcacaacgaccggtgcggctcctgctgcccgttccccacgtcaagctcaacgtgcgtgctggt

SEQ ID NO: 13596 - DNA, 119 bp, homo sapiens
ggccagctctccgtggacaatgggctgtggcgtgtgaccctgtgcatgctggccttcccgctgctcctcccggcctcatctccttcaggtgctgcagggctgcggggctgcgggactgt

SEQ ID NO: 13597 - DNA, 119 bp, homo sapiens
tggacgtcggcgcaatcttgctcttcgtggcagggctgacctgcaggtgagtggcctcaccccgatggcggcccgtctgaggcagccagccctgcaggggatgagcacaggccgggccc

SEQ ID NO: 13598 - DNA, 119 bp, homo sapiens
gggtctgttctgggtaaacaccctgacctcgaggtgttgctttctcctccctgacagctacaccttccacaggtgcaggagcacacggaccagatttggaagttccagcgccatgacct

SEQ ID NO: 13599 - DNA, 119 bp, homo sapiens
ccgccccccttcatcctcctcagccacctgcagctcttcatcaagagggtggtcctgaagactccggccagaggcacaagcagctcagtatgccagccccagtgcctctcctgaatgtc

SEQ ID NO: 13600 - DNA, 119 bp, homo sapiens
gctgtctgcagagcggtgtggcgttcccagggccccaaggtgtggtgtgcgtccagctcagctgcttccctttcagggttgacgccatggtggacctgctggacctggacccactgaag

SEQ ID NO: 13601 - DNA, 119 bp, homo sapiens
aggtcgggctccatggagcagaggttggcctccctggaggagcaggtgggtccgaggtcggggcctccgcaggaggtgccactgctgggcctggtgggcggctctgccatgtggtggca

SEQ ID NO: 13602 - DNA, 119 bp, homo sapiens
agtctcggtgggcagtggggtgtgtaccatgcgtgtgggtggcaggtgctcactgtgtctcgggccatgcttccaggtggcccagacagcccaagccctgcactggatcgtgaggacgc

SEQ ID NO: 13603 - DNA, 119 bp, homo sapiens
tgcgggccagcggcttcagctcggaggcggacgtccccactctgggtgagtgggtggccaggccagcagtggtctccagccgcctgtttcttttgggtctggggtcagttgggaggaga

SEQ ID NO: 13604 - DNA, 119 bp, homo sapiens
tgagcagccctttcaccctggtgcctggcccagctttgcagtgggggtaaaaatctgagggaaaactcctgttttgcgacagacggagttcctgatctatgacccacccttttacacgg

SEQ ID NO: 13605 - DNA, 119 bp, homo sapiens
cagagaggaaggacgcggccgccatggaccccatgggagagtgagtatgagccgctgtccgtgctcccactggccccaaacccagggcctcctaggggctcccttgagaatcccagtca

SEQ ID NO: 13606 - DNA, 119 bp, homo sapiens
tccctctgcctgtctgctctgtcccacctgcaacacgggcacacagacacgccttctcctctgctcccacaccctggagccactgtccacgatccagtacaacgtggtggatggcctga

SEQ ID NO: 13607 - DNA, 119 bp, homo sapiens
gggaccgccggagcttccacgggccgtacacagtgcaggccgggttgcccctgtgagtgtgccccctgcggccccgccccgtcagcctttggggtttgcctggggggcaggtttcctct

SEQ ID NO: 13608 - DNA, 119 bp, homo sapiens
cctctcagtccccctccctgccctgtcctgctcccccattggtggacggtggactgactcaacccctctcatcccaggaaccccatgggccgcacaggactgcgtgggcgcgggagcct

SEQ ID NO: 13609 - DNA, 119 bp, homo sapiens
cagctgcttcggacccaaccacacgctgtaccccatggtcacgcggtgagttcatgtgtgccgggcaccgcacctcagcaaggcggtcaccccaccttcacaaggggcggctgccattg

SEQ ID NO: 13610 - DNA, 119 bp, homo sapiens
ccgccgcggcgcaggggagggtggaggccgcagcgggtcctgggcagccatggccgctctctccgcaggggaggcggaacgaggatggagccatctgcaggaagagcataaagaagatg

SEQ ID NO: 13611 - DNA, 119 bp, homo sapiens
ctggaagtgctggtggtgaagctccctctctccgagcactgggccctgcctggggtaaggctgccgcgttgggacctctgtccactgggctgtctgtgggtcactcgtccattcatcca

SEQ ID NO: 13612 - DNA, 119 bp, homo sapiens
cgggtgccagggcagcctgaggtcccgcttcggtgccctgttgacctgcctccgtcctctgtctgtccaggctcccgggagccaggggagatgctacctcggaagctgaagcggatcct

SEQ ID NO: 13613 - DNA, 119 bp, homo sapiens
ccggcaggagcactggccgtcttttgaaaacttgctgaagtgcggcatggaggtattcctggcctgtttctctgttccacctgtgtgtccccagggctgcaggacaaacacagtgtgat

SEQ ID NO: 13614 - DNA, 119 bp, homo sapiens
ggtgggccggggcaccgctcaggtgtccctcgctgtcgggcttaccctgccctgcccatccaggtgtacaaggctacatggatgacccgaggaacacggacaatgcctggatcgagacg

SEQ ID NO: 13615 - DNA, 119 bp, homo sapiens
gtggccgtcagcgtccacttccaggaccagaatgacgtggagctgaacaggctgaactctgtatgtgccggcctccctggaggcgggagtggggaggcagggacgggtatgggcgtggc

SEQ ID NO: 13616 - DNA, 119 bp, homo sapiens
tagcgtgcccgccctgagatgctgttcctgatgtggttcaggccttcctaacctcttattgtctccttcgtctctgcagtgatccgggccaaggtggtggggaagaagctggtaaagga

SEQ ID NO: 13617 - DNA, 119 bp, homo sapiens
ggggcccttcggcacgctggtctacaccatcaagcagatgaaggtaggtaatgtcatcaccctggctccggaaggtttttgggtttttgccagaagagtcctggctaagggaggcaaag

SEQ ID NO: 13618 - DNA, 119 bp, homo sapiens
ctatcggtatcacctgggttgtaactgcaaggtaagctctggggtcactgggggaaggaggggaggtgcgacttgcagccctagaaacatcagctcccaatgcactgggtgccaggccc

SEQ ID NO: 13619 - DNA, 119 bp, homo sapiens
attagattttaaattattatagagattatattttaatgttttaaatgtatttgatacattacaaaattatttagttacaagcatatcattaaagctattctttattattacaaaatgct

SEQ ID NO: 13620 - DNA, 119 bp, homo sapiens
aatcctcccggcgcctgtcctgtgcagccaggggtgactccgctatctgcctctcaggcaatgtccggactctgaccttgggctggccgtggagctgctggacggacagagcaagacca

SEQ ID NO: 13621 - DNA, 119 bp, homo sapiens
agggctacgcagggaccccaggtaagggtctgagcgcagctggggaggctccgtgcatgggttacgtcctgtgtacatgtgtgtgcctgtgtgcacttgcacatacatgtgagtttgtg

SEQ ID NO: 13622 - DNA, 119 bp, homo sapiens
tgctggtgccgtgagcccccgactgcatatttcacgtcttttgctccatctcactgagaagacataagagctctccagagggagtaagccaaaaatctacaaactcttagggagcctcc

SEQ ID NO: 13623 - DNA, 119 bp, homo sapiens
tgggagaggaaccttcctgcgagcccaccacctcctgcgtggtcctagggtctgtgtttcaaactggattgacgtggagcctggccgagcaaccaacagagatggtcaggctgggggag

SEQ ID NO: 13624 - DNA, 119 bp, homo sapiens
gccggagggcggggtttgccctgggccgctgccggtcaggtcggccgcccctgacagctccgggagcctaagcgcgacagcggcgccctcacctcgggacatccacacaccgaccgctc

SEQ ID NO: 13625 - DNA, 119 bp, homo sapiens
cacaccgaccgctcctgctccagaggcaacaacccagcgcgcctagcctggcgccgtgcagcgaagcccagagctggcctcgccacgaaggtaagcgaggggctgggggactcgccgcc

SEQ ID NO: 13626 - DNA, 119 bp, homo sapiens
tggtgagggagatcacgctggggaaacggataggcttctaccgaattcgaggggaaatcggaagtggaacttctcccaagtgaagcttgggattcactccctaaccaaaggtaggatcc

SEQ ID NO: 13627 - DNA, 119 bp, homo sapiens
ggtctacttggggtgagaaccctgtatcgttttgagaaccagacaggcttccctccccctgatagcagattgatgcctactgctttaaacgtaagtgtttgatacctttttaaaaatta

SEQ ID NO: 13628 - DNA, 119 bp, homo sapiens
ggaggcaagggagggggagaaaggggaggaggatggagccctcctcctgatcctgtagtggtagtaagatcagcagcgcgggcaaggagtacggacgggagtcagaggcagagcgaggg

SEQ ID NO: 13629 - DNA, 119 bp, homo sapiens
tgtgtggagggccggcggggaccgccgggagcgcgcggatgtcggtgttcctggggccaggtaggctatgctgaggggtggtgctgcgagcatcgctgagccccaggggagcgcctcag

SEQ ID NO: 13630 - DNA, 119 bp, homo sapiens
actgggatgcccctcctcttgggtcagcaggagttcatacctggctctgcacctcccagggtttggtgaggctgagagatcacaggcggtcatcatcatggccctgggcacacaggaca

SEQ ID NO: 13631 - DNA, 119 bp, homo sapiens
tggtaggagtcgggtggcaccacccgggagaagaagtcatagcgtgtggagtcgctgagctccggggcttggaggcatagctgatctggggtatctgtggggcaggaaggacagctggg

SEQ ID NO: 13632 - DNA, 119 bp, homo sapiens
ggggacatgcccggccagcctcgcaggtcgggctccggctgggtcggacagagggtggtggccctgcagccgctggggattacctgtccgcgcctgctgcttacctcgttcgctccctt

SEQ ID NO: 13633 - DNA, 119 bp, homo sapiens
gtgaagctccggcgtcttgtgtgtttcatctcctaggaaacggcgggggcagcaggcgggcctacggccgcccagagagggcgtggcctcgcgggaaatccccgccaattcccgcaggc

SEQ ID NO: 13634 - DNA, 119 bp, homo sapiens
gaggaggcagagcctgatgggagggggctactcacctctgccttcctttgttcactcgcagctggccacgccccaacccaggcatttcactgggcgcagtgcggacaggcttccgcttt

SEQ ID NO: 13635 - DNA, 119 bp, homo sapiens
ggtcatggggacaaggtccgctatcgctgctcctcgaatcttgtgctcacggggtcttcggagcgggaggccagggcaacggggtctggagtggaacggagcccatctgccgccgtgag

SEQ ID NO: 13636 - DNA, 119 bp, homo sapiens
ctcttcaggtgtgaccaccactccatggtctttggcccggccccagggatcctgctctctggagggggtgagatcaaaggcggctccttccgacttctccaagagggccaggcactgga

SEQ ID NO: 13637 - DNA, 119 bp, homo sapiens
gcagacacgtacctgcagatctacggggtcctggagcaccctgaagactcaagaccaaaagactgtcagaaggcagagtgcagaggtttgagggcaatgagtgtgggcagtggcctaag

SEQ ID NO: 13638 - DNA, 119 bp, homo sapiens
tcagtgcttacctcgatgtctcatacctctgcagcggggtactgctccaacccgggcatccccattggccaaggaaggtgggcagccagtaccgccttgaagacagcgtcacctaccac

SEQ ID NO: 13639 - DNA, 119 bp, homo sapiens
acagcgtcacctaccactgcagccgggggcttaccctgcgtggctcccagcggcgaacgtgtcaggaagtggctcttggagcgggacggagccttcctgccaaggtgacctttgacctg

SEQ ID NO: 13640 - DNA, 119 bp, homo sapiens
atcccccgtctctttggtcactgtatccctgacactcccagacatttgacctcatttctgactctcccaactccttcatgtacgacacccctcaagaggtggccgaagctttcctgtct

SEQ ID NO: 13641 - DNA, 119 bp, homo sapiens
tccctgacagagaccatagaaggagtcgatgctgaggatgggcacggcccaggtttgaagacagagaaggaggcagggcagggaactgggggaaaatggagaagggacagaactgttaa

SEQ ID NO: 13642 - DNA, 119 bp, homo sapiens
agagatgacgggctatggccttttgctgacccaagtccccccagccccaggaagcccagccccacctcacttcccgatgaaattctcccctcctcgggacagattggtagggtcgatgg

SEQ ID NO: 13643 - DNA, 119 bp, homo sapiens
agatgaggtaattggctgtcttgctccgttttcgtttcctgccagccaagaggaacacctggggaaaagggagacaggtgagaggatgggaagagaaggtgggaaggggtggaggtgag

SEQ ID NO: 13644 - DNA, 119 bp, homo sapiens
cggggccctctcctccttctgggtgggggcagagggtacatcagccccagagcaccagctcccccgctccagcaggtcccagtgctgagacacgggcagcccggcaggacaactcaccg

SEQ ID NO: 13645 - DNA, 119 bp, homo sapiens
ctttctgtgtgcggagagaacagagaggctggctagagcaggggccgcatccctggaggcggggaagccctgcccctcatgctccctggcagcccggcacggccaagttaggaggctct

SEQ ID NO: 13646 - DNA, 119 bp, homo sapiens
cccgcgccggccctcaagcccctcccttccgcagcccacaccctgggggtccacccgggctctgcacccgcccacctccgggcttccggggcttggatcccgtggggcagggggattcg

SEQ ID NO: 13647 - DNA, 119 bp, homo sapiens
ggggcctccgtcctcttcttccttagcctctgtgccggggcgggtcgctgcggaacgggggtcaagaggggtcgaggaaggaaaggggggcgctgaggcccgcccatccccctctaatc

SEQ ID NO: 13648 - DNA, 119 bp, homo sapiens
cccttccccttccctccccatcccacccactccccatccctccatctaggccccccagggttcaggtgcacgaactgggggccttccagacctgtcagaggcccacacctctcggaggg

SEQ ID NO: 13649 - DNA, 119 bp, homo sapiens
tttcatcccgcagaggcatggtgcctttgcctatcgcacccctttctctgcaggtctaggagcctccctccgactcctgctaatctcggctcaacttcaccccccttccccctgctcaa

SEQ ID NO: 13650 - DNA, 119 bp, homo sapiens
tcctccccctgattccctttctctctaccccaggggaactctccctggaagagtttatagagggcgtccgaaggaccagatgctcctggacacactgacacgaagcctggaccttaccc

SEQ ID NO: 13651 - DNA, 119 bp, homo sapiens
agtggtggcaggggtctcggaatcacagcttgagcaggggatagtcctggtcctgggcgttgtttcttcgcgcccttcccagccaagaaggggcagcctgaacgctgcagattaaaagt

SEQ ID NO: 13652 - DNA, 119 bp, homo sapiens
ctttttcagttcctgcatgcattgtgtttatttatgtcagaaggatcaggctcccatgctgcccaccccccaccctctcccagggcttactcctcccacaaccctgctctttctcactc

SEQ ID NO: 13653 - DNA, 119 bp, homo sapiens
cagagagggagaacatgagctggggaggggaagtagctggggttctactctccagagaccctcaccttcgtaagtggagcccaaggtgactacaggcagcagcaactactgtggtcttc

SEQ ID NO: 13654 - DNA, 119 bp, homo sapiens
ccacagcctggggggccccgtagaaggacactgctagttcctgtcagcagggcacccctgcaaccagagacagacattcgtctccttcattttgcccaaacattagagtccccagtaac

SEQ ID NO: 13655 - DNA, 119 bp, homo sapiens
tgagaagctatcctccttaaaaggttaggtagctaacctgggtatctgaaagtgccggtaaagaacacctcataatttccattagtgctgtagtggggagaagacacaatttcgatgtg

SEQ ID NO: 13656 - DNA, 119 bp, homo sapiens
actcctgaccccagtcctttatcctacctgaattctgagctctcccatttccagggggtcacagccaagttaaaagccaaagtggcagggacaagcgccagtccgtcagcgaggggctc

SEQ ID NO: 13657 - DNA, 119 bp, homo sapiens
tgttgggctccattgttagtattaattatgagacaatatcaagaactcattaaagtgttgataaattacaaaattttgtaatttatccaagattctctggatatcaaaaaataatggca

SEQ ID NO: 13658 - DNA, 119 bp, homo sapiens
aaaacactaatattataaacatacacctatagaaccagtagttaagtaatgtttaatgtatctaaataactcagtaacttcttttcattgaacatgattatttataagaaaacatgcaa

SEQ ID NO: 13659 - DNA, 119 bp, homo sapiens
ccaggaggtcccgggggtccaggcactccaggaattcctgccacccctggggggcctcgctcaccgtctggccatttctgccatagctggcagggcctgggtcacctgaaacacacaga

SEQ ID NO: 13660 - DNA, 119 bp, homo sapiens
ggggtctctgcaccaggaaggctaatgcttaaagtaaaggctccattttatctgtggataatactcttaaatactggaagttattctcttaccctcatgcctggtaggcctggatatcc

SEQ ID NO: 13661 - DNA, 119 bp, homo sapiens
tgagcgacctggtggacaggcattgggacactgccagggagagagggaacaaagagaaagaaagacagaagagtgcataaactaggactcccgctttgtgacagtatcttttttaaggg

SEQ ID NO: 13662 - DNA, 119 bp, homo sapiens
aaggaaagcatcttaccaatggatctccatcatgaaagccaattgttccctaaagtaaacaaaatattaggttcagaatacaattaaataatgaattcaaacatactaatactagaaag

SEQ ID NO: 13663 - DNA, 119 bp, homo sapiens
tctctctccctccccccccacaaaacacacacttactcgtacccaccacacaccccaggctgggcgccccccagcactcgcctactcacatcagcgccaggtgtgccaggcttgcctgg

SEQ ID NO: 13664 - DNA, 119 bp, homo sapiens
agctcctggctttcccggttcacctgcaggaccctgagcaggggcagaagggtgcgggggcaggagagaaaaggtgcaaagttgagacccttcagaaacagggggctgcaaaacacgtc

SEQ ID NO: 13665 - DNA, 119 bp, homo sapiens
gcaggagagaaaaaggtgcaaagttgagacccttcagaaacagggggctgcaaaacacgtctaaaggaagaagtggagcgccatatgctccaatcaacttaccggggggcccggggggc

SEQ ID NO: 13666 - DNA, 119 bp, homo sapiens
ccttaggacctcggtcaccctggaggggtaggagaaaaagagagagcagtctatgagcgggataggctgggaccccactgggacaatcccaggagagctcacttcacagatggggatgg

SEQ ID NO: 13667 - DNA, 119 bp, homo sapiens
aaaaaaaaccccacaggagccctgggaaaagaataggaaagggcaggactggggaacagaggtggcctgagatagaaacttacgtcgatgccatcgatgcctggaactccaggggggcc

SEQ ID NO: 13668 - DNA, 119 bp, homo sapiens
cggaggcccgggaggaccctgctcacccgggggacctctctggcaaaaatagcagacataggttagtgggcacatcgggcaacagggagcaactgagcgcggtgccctgaagcccccgc

SEQ ID NO: 13669 - DNA, 119 bp, homo sapiens
cgcgcctttctcacagctccctcgaccgctgcgccccgacctgtcctcgtgtgcgcttgaaaaatgcaacactccctgcccccaacttacctcgtcggtggtctggctgggctggagaa

SEQ ID NO: 13670 - DNA, 119 bp, homo sapiens
gcccccaacttacctcgtcggtggtctggctgggctggagaagaaaagatggggagaaagtgagaaaagacccctcaaactcgatcgcaacttacttgagccgcgcacaagcagagccc

SEQ ID NO: 13671 - DNA, 119 bp, homo sapiens
gtggcaagatgggaaagtggtgaggtggagagggttgagctgggtagaagtggcctttgcaggtagtcagggactcaccgttattctggctggcagctcatggcaagtttctctcctgg

SEQ ID NO: 13672 - DNA, 119 bp, homo sapiens
gccgcagggggtcacaatggatcagcatccattgaagttcaaactggagaaaggtagtagacagtcaggaaggttttttggacgactgaagctggtcattcaagagagagatgagttgc

SEQ ID NO: 13673 - DNA, 119 bp, homo sapiens
actcagtcttcagtcagccacagccctgcctgatcatttctgggaataagtgatctttgaaagtctagaactatggcccttactggggcgacgcttgacagctgcagatgcccagggtt

SEQ ID NO: 13674 - DNA, 119 bp, homo sapiens
ccaggaaactgcacacaaagaagaaaactggaattttcctgaagaagagagaagaaaaatgactgaaacggagtccccgcagatggaaaacacttccatattttcaaacctagtaaacc

SEQ ID NO: 13675 - DNA, 119 bp, homo sapiens
gtgagggggaagcaggggcgcagctgctgggcgtgcatccgaaaggtgagagccagagagcgagcagaggggcgggcaggccacgaaaatgtcctcggccgtggggccccgcggtcctc

SEQ ID NO: 13676 - DNA, 119 bp, homo sapiens
agccacctgaccgaagaggagaggaacattatcatggcagtgatggaccggcagaaggaagaggaggaaaagaagaagccatgctcaagtaagccagccccagccgcgccatccatgcc

SEQ ID NO: 13677 - DNA, 119 bp, homo sapiens
aggcggcaagaagcggcagatgtcggtgagcagctctgaggaggagggcgtgtcgacgcccgagtacacagctgcgaggacgtggagctggagagcgagagcgtcagcgagaaaggtaa

SEQ ID NO: 13678 - DNA, 119 bp, homo sapiens
ctttttaaaaaaagtttgacagtgctctttacgtttcataaaccaaccagacacagaagtatctctttgcttactgttgtgcaggatctcagcgaatcagtgatagtgacatctcagat

SEQ ID NO: 13679 - DNA, 119 bp, homo sapiens
tatgaggttgatgatggtattggcgtagttcctccaggtgcgtgggtgaggagcatgaccctgcttcacgtgctgctttgcttgttttctctgtcagcttccggacctctttaggatac

SEQ ID NO: 13680 - DNA, 119 bp, homo sapiens
aaagatttttgtcagaccacattggaatttcattgtttcatgcccgctttgctttttgcctgcagaatgaccgacagagaagtccaacacaatctcctccagcagacacatcgttcagc

SEQ ID NO: 13681 - DNA, 119 bp, homo sapiens
agtcgcaggggaagacagctcccacaagtgccagtgagaagcggcagtatagaacaaggtatccgataagagagatcattgtccaaaaatcttggatttgagaacctcctctatttata

SEQ ID NO: 13682 - DNA, 119 bp, homo sapiens
agttggagcaggtggaaagaaacggagatccagccttagtgccaaagtggttgccatagtgtctcgaagagtagaagcacatcccagcttagtcaaacaggtgagtgatgtgaattcaa

SEQ ID NO: 13683 - DNA, 119 bp, homo sapiens
gtcaagaaaagaacaaaaaatgaatatcccattataatatcaaacttcaaaacatatagtctataataagacactattattctggaacttagaaaaaataaataatgcaatataataat

SEQ ID NO: 13684 - DNA, 119 bp, homo sapiens
agagtgaaaatcaaagtacatatgtaatacgtatgctcaaaaacatttaccttttgaggagctggagattttctattttagttttttcctcagggcttaaaggaggggatcgctccttt

SEQ ID NO: 13685 - DNA, 119 bp, homo sapiens
tgatatatcttgtagtatctattaaaatgtctctgggtcataaaatggattaaaatatgggagatcagtggttatacttatatagatagtgatatatttcatttttaatttgtcatttt

SEQ ID NO: 13686 - DNA, 119 bp, homo sapiens
tgatgtaaaatataatcactgctgtgataaataaactatctattgatcatttatcattttataacttccccaaaagactgctctttctaatacattgtatatgtgaatatagtactata

SEQ ID NO: 13687 - DNA, 119 bp, homo sapiens
gtgtacttttaaagtttaaaataatttataatttttaattataaactcatttataattttttaaatttcttcatacaggtaccaggtacttgcttttgcaacagatgcagataaaaggc

SEQ ID NO: 13688 - DNA, 119 bp, homo sapiens
aggagactgaacagcaaaaacttggttctggaaaaagactagttgtaaggcctttttttaatatataaaatttcaataatgctatatctaatcacatatgtttgtcaataataattcat

SEQ ID NO: 13689 - DNA, 119 bp, homo sapiens
tttagctggaaagtgaaatttcaaccacagcagatgactgcagttcagaggtaagactaaattatattgtttctaatatcataaatgtatatttatattattattgaaatcattgattg

SEQ ID NO: 13690 - DNA, 119 bp, homo sapiens
tgcagaagacaaagagaattctggtgattacatttctgaaaatgaagatccagaattacaagattatagtatgaagttcaaggtaataaaagcttaccatactattaaacagtatttaa

SEQ ID NO: 13691 - DNA, 119 bp, homo sapiens
acaagaaaggaatgaagaaatagagaaactggagttcagagtaagagaactggagcaggcgcttcttgtagtgcagatacttttcaaaaggtgtggcattttatttgggctaacttaat

SEQ ID NO: 13692 - DNA, 119 bp, homo sapiens
gccacttaccgtcggcgctgggcccggtgccccacgcccgcctggggatagtcggggacgcacggcggggctcatcggggcagggaacttcttcgcggagagccggagggctgcattgg

SEQ ID NO: 13693 - DNA, 119 bp, homo sapiens
ggaaagtctctgctaagccacctcccagcgccgctgtccctcccaagtcctctccgagtccggacgaggagcggcggcagccagggccagctgcacaaactctcagcgcatgctcgagc

SEQ ID NO: 13694 - DNA, 119 bp, homo sapiens
acttgatatacatctggggaacaaaggcgaggccccggggccagcgggcactcgctcacctcctgacaccaccttcctgggtgatgcagatggagccgcagcccatgcccacgcgcagc

SEQ ID NO: 13695 - DNA, 119 bp, homo sapiens
ccgtccacaccagcatcaatcaggttcttggcctgggctgctgtcaccactgggggtggggatggggcaaggaacaatgtgaggatgggatgcccctgcctgcccaacagcctcttggg

SEQ ID NO: 13696 - DNA, 119 bp, homo sapiens
gagggtagtctcggttcttcttcaggtcggtgcgggcgatgatggccaccagctcatcgcaatcattgagataggcagcttccctgacaaggaatgcaggggtgaaatgaagcaggctt

SEQ ID NO: 13697 - DNA, 119 bp, homo sapiens
cttggccccgcccacaaccctctttccaagcggcggcggcggcggcggcgcgaaggcgacagcggcggcggggcggggctggcctcacccggaatgaaaacaaacggcggccgctgccg

SEQ ID NO: 13698 - DNA, 119 bp, homo sapiens
catccgggcactctgctggtcgcggcgggagtggcgtggcgcaggtgaggacacggcggccgagtgtcccgaccccagcctcagcagcactgcttggcgccccggttcccggtccgact

SEQ ID NO: 13699 - DNA, 119 bp, homo sapiens
gggtgtccttgcggtagtgagaatgcctgggatggcctctcggggccactcggccaaggccagggctgcgggtgaggacattgcactggcccggcttctgtgccttctctgcccctgct

SEQ ID NO: 13700 - DNA, 119 bp, homo sapiens
ccgactgagctggcgtgtcctgagggtgcctgccaggagcagggcccaccggggggttgctaggaccagcctttctggcagccgtggcgtgctgcctggcggagaccgcgaatggatca

SEQ ID NO: 13701 - DNA, 119 bp, homo sapiens
ggcgagtcctacctatgttcccacggcaggaaggtgcagcctgtagacctggacaaagcccgtcggcgccgcggccctggctcagcagccgggccattagcgcgcactcaccgccccac

SEQ ID NO: 13702 - DNA, 119 bp, homo sapiens
cccgtagccgtcgctgctcccggcatgccccgccccccacggagcctagtggtcttcaggaatggcgaccgaagacgaggcgtgcggttcttctgagcaggagggtcacccagagcttc

SEQ ID NO: 13703 - DNA, 119 bp, homo sapiens
ggataatgactctggtctcttttaggttcccagcctccaggcagtgatcctgagctctggagctgtggtgcggcaggaagggagccatttaaaccaggaaattatgacatccaaaaata

SEQ ID NO: 13704 - DNA, 119 bp, homo sapiens
tttagcggcgctgctgaaggcactggatggccaaacaaccgcgaacgccgacaagccgaagagccgaaggccgaaaagccgaagcggacacccgcgcgcggtgattggccggttggccg

SEQ ID NO: 13705 - DNA, 119 bp, homo sapiens
tatgctttgtccattatagactctaggtgatgattaaattcaaaaaatgaagtgtactatatagaaaagaaaagaaatccaaaagcatgttagtcttaaatatatatatttaaataaaa

SEQ ID NO: 13706 - DNA, 119 bp, homo sapiens
tgctggaatttttatttttagtttaaaatatctgccccaaaatatatttttttcttgctaataaattaaaatatgatattaaaactcagattactgatctcaataactgaccaatgaaa

SEQ ID NO: 13707 - DNA, 119 bp, homo sapiens
gaaatccggtccggctgcgtagagtggcagccgtggagggacagtttgttttgagcaccaagtgggacaacccggaagtggcgcggtacaggagcagcactgccggcgggggcgggtgc

SEQ ID NO: 13708 - DNA, 119 bp, homo sapiens
cagggacttggaggtggaggggacgcggcggtactctggcgtgtgagccgagggtggagtgcagagggacgggagcgggacgggaggtcttctagctttggttctatggtggcagatcc

SEQ ID NO: 13709 - DNA, 119 bp, homo sapiens
gcaacggcaatttctcaggacacaactgtgggacgtgccgtcctggctggagaggagctgcctgtgaccgagggttctcataggtaagtggagatatgaatgagttcataagtcctgca

SEQ ID NO: 13710 - DNA, 119 bp, homo sapiens
cagcacgctgacgtctaaccttgttcagatttctttattgaaaaattaaagtcataagctctgtatataatacaatgacactgctggtcacctgcaaggcctctgggataggctggggg

SEQ ID NO: 13711 - DNA, 119 bp, homo sapiens
tccgtggctgtcatggagaggagagagccaccaggacctgagcacaccagggagagcagaaccaaagggcagccagggccttaccacggacacatctgggagggcgttgatattgccct

SEQ ID NO: 13712 - DNA, 119 bp, homo sapiens
ggacagcctcgccagtttcctccaggtccagagtgttctagaaatggacgagaaagcaaagtgagcaaaagaagctgagaagggaacactggtttgttctccagcacaccaaaattgag

SEQ ID NO: 13713 - DNA, 119 bp, homo sapiens
ctggctactaagccagggacaaggcagaagaagctcaccctggccgagctgacggtggtggaggtgccgggctgcctgtggatgaacccgtgtcactgtaggagaccatggagtaggtg

SEQ ID NO: 13714 - DNA, 119 bp, homo sapiens
tgggctgggaagcaaatgagggaagccaacatcaggtgcacagccagggagacggctcaagactcacctgacacaggccactgaacggcactcaggaggaagtagtcgtgggcctctgc

SEQ ID NO: 13715 - DNA, 119 bp, homo sapiens
tgcctaggagtttcccagcagccagcaggccctcagctggagttcaaaacacctgcgctggcggggagtggggtttacagaacagtccaaccccctgagaagcatttctctgcagaagc

SEQ ID NO: 13716 - DNA, 119 bp, homo sapiens
gctgcacgacaagccccagcatgctggggaggcggggctcagtgacggacagggagctctgcgaattgggcccggcaaggggtgctcaacggcgcgtgcgcagagggaggcaggcgggt

SEQ ID NO: 13717 - DNA, 119 bp, homo sapiens
gggctgccggcggtggactcgtcggagccgcgggcggtcaggtagggggcgggaaggagggttggggacggggaccgcggccggagtcgtgggccgtggctcagcggccaggcggggga

SEQ ID NO: 13718 - DNA, 119 bp, homo sapiens
taaataattaactaattaaaataaaatatagattgacctaccataataaaccatgtggtcttggctgcattctgacaggtttcaaagaacctccattgatatctgtttgcatctcaaga

SEQ ID NO: 13719 - DNA, 119 bp, homo sapiens
gtctgagcccgaggcatggggccgctcccagtggccgtgtacccagagagcttccctagtatttacctgagtcactgtcttttggaacaggatggggttcgccacgagaaccagcagca

SEQ ID NO: 13720 - DNA, 119 bp, homo sapiens
ggggcaggtacatggtgacatagtgggggatggcgtggtccaggccccgctcacacctgagagaggaaaccaaagtcattcttctcaaaagcaaagttttggctaaaagacatctactt

SEQ ID NO: 13721 - DNA, 119 bp, homo sapiens
ctcatgtattccctgcaagacaacacattatgagccaaggatggggctgcctggggcgctggagtcccacttacctggacacggaagggtagtagagcatggcggctccctccacacag

SEQ ID NO: 13722 - DNA, 119 bp, homo sapiens
agcagggtggccaggccccacgccatgatgtgatacagcaggatggtgctaggggacaagcacaacagcgccacagctcagtggggcacagaggcctgcctggaactgccaggccagct

SEQ ID NO: 13723 - DNA, 119 bp, homo sapiens
ttatttcaattttccacatataaaaatatattttttattgcaatactgaacagttaaggccacaacacttagggagaatttgagatacacatattttgaaatgacttgttaaaaatatt

SEQ ID NO: 13724 - DNA, 119 bp, homo sapiens
cacaacactttagggagaatttgagatacacatattttgaaatgacttgttaaaaatattagcataaataatatcaaaactggtcacacttatagaagctgaataaaacatattaagtc

SEQ ID NO: 13725 - DNA, 119 bp, homo sapiens
ttatatcttttaaagactactatcagaaactttacttcataagttataacatttttcaagtatacattaaatacacttggtgactgtgaaaacataaatatatatttatagtattgtac

SEQ ID NO: 13726 - DNA, 119 bp, homo sapiens
ttttattttacttgaaacattctgacaaggaacagacaaactgaaattacagaacagtcagtgaatacatgagggcatataacacataccagaaatgaaggctctgataaagtacagtt

SEQ ID NO: 13727 - DNA, 119 bp, homo sapiens
gtttcttgtgttctttccaaaaaccatccaaaaaattaacttaaactgctctcaccaacaataacgaaataaatcttcatattataccttttgtttctgaactggtgataattttaatg

SEQ ID NO: 13728 - DNA, 119 bp, homo sapiens
acttttcattggaattcaggctcatgatgtgtgtctgaaataaataaaaaatatatattataaaaagaaacagtatatatactatatatttgtatatagtacaaatatatagtatattt

SEQ ID NO: 13729 - DNA, 119 bp, homo sapiens
cactgggtgacctgtcctttctcccctcaggtaggggtcccacggctgggtggtcctaagccactgggtgatgaaaggccgagggatgttggtcctgcttctgcatggtgagttctcct

SEQ ID NO: 13730 - DNA, 119 bp, homo sapiens
actccacagttattcccagggctggccctagccacaaaggaactttagggcagggtagggaaaaaagggcagcagggggtgtgtttgtggacaaataaatttgtaaagtccgaggatta

SEQ ID NO: 13731 - DNA, 119 bp, homo sapiens
atccagggatgtggtccatgcctgcctcctgctggggaggggagggcaggaggtttattgagcagttgggaggggtgggaattcagagggcgtggacgcaggccatctcgtctcccaag

SEQ ID NO: 13732 - DNA, 119 bp, homo sapiens
tctcatccagcgtcaggcgacacgcatctgcaatctcctgcttggccagggccacgaaacgtgggtctcagcaaagaggcccagaccctctgagataagcacctgggggcacaggtggg

SEQ ID NO: 13733 - DNA, 119 bp, homo sapiens
aattcagcctaggctgcccccatctctccagaccccagaccccagcaccacctccacagcctcacctgaccctattgggccctgaatttcgcccacgatgataggtgcctgggatgggt

SEQ ID NO: 13734 - DNA, 119 bp, homo sapiens
aaatcctcacaactgccctggcgctgcagacactggatggtgaaggagggcttccgacctgggggtgggggggcaccaggggcaaatagcaatgtcagtgcttccccagatctctgtcc

SEQ ID NO: 13735 - DNA, 119 bp, homo sapiens
ttgataatacctgtgggtgttggatccagcctggggcacactgggctgactggaggtgggagtcccccttcatcatcactgggcccaaaggagagtgaatctggaagtctgtccccgac

SEQ ID NO: 13736 - DNA, 119 bp, homo sapiens
gagtgaatctggaagtctgtccccgacaggcagagacacagaaatcccggagccccggcgagctgagggtgggagaccatcgtggcctgtggagagtcacaggactgagtgttgcatgc

SEQ ID NO: 13737 - DNA, 119 bp, homo sapiens
ggcacagcttcccaaatcccagagggggctggatacgtctcagcagggcaaccacatccaagtgtttgagcggcccctggaggagttggggaggtaccactggattggcgatgccccca

SEQ ID NO: 13738 - DNA, 119 bp, homo sapiens
cctgccacccctactttggggctattcttaacccatcccctgccagcagaggagtgcttaagggatgctcctagggtccccacttgcctgcatgccaatgacggcatagatgaagaata

SEQ ID NO: 13739 - DNA, 119 bp, homo sapiens
tcattgcgatgagaagagccacatagggcaaggcctatagggatgggggaggggggcagagaatagatgacaggctcaggcaaagaactataagccccagaatgcactgctttccctgg

SEQ ID NO: 13740 - DNA, 119 bp, homo sapiens
atccactatgctgcccaccacaataagagcgtcaaacgtgttccaggcatcagtgaagtaatgctgcaataggagaaaagcagtgccctgtcttctcaaagctcgcaagccagggtagg

SEQ ID NO: 13741 - DNA, 119 bp, homo sapiens
gagtctggcgggggtcaggcagggatctcagacctgcatggctagggcaactgtgttgagcaggatgagaggaacatcaggtactcaaaggcagcagagttcacagtggcccacacacg

SEQ ID NO: 13742 - DNA, 119 bp, homo sapiens
gggactatatctttgggccttggtgagatctagaggctctaaagtctttgggaggggtcctgagctccgggacggcagggtcttgggcactcacttgcattcttgaggggtgtgtttgg

SEQ ID NO: 13743 - DNA, 119 bp, homo sapiens
cctcgtccgtgcaggtgtagaatttcccctgtagagaggatgtctgtcaagtaggttcacccttcatcaactcccgcccagacccctgcctggcattccctccagtgtttgccccacct

SEQ ID NO: 13744 - DNA, 119 bp, homo sapiens
gtcagtttgatcagtgatcctggccccaggggcagggcagggcctgggtcctgtgggtttgggtggggtgggttaccttgagtcccttggccctgttgatggctcggaggggccgcagt

SEQ ID NO: 13745 - DNA, 119 bp, homo sapiens
actcggagtactcgcagaatcttcaccaccgagatggcgctggagctggggaaggggcaatcctcaggcttggccctggctgggccctggctgtgagaggaatggggtgggctggggat

SEQ ID NO: 13746 - DNA, 119 bp, homo sapiens
tcaggcattggccctggctgggccctggctgtgagaggaatggggtgggctggggatctgtcacttactgatgccaaaggagatgagggacacactgaccaccagcagatccaacatat

SEQ ID NO: 13747 - DNA, 119 bp, homo sapiens
taaaccagctacggcagaaggagccgcggtgcaggaaggccccaaacactgtcatctggggacaggacagaggctagactcagacctggggatggtgggggttgggggaggtggggatg

SEQ ID NO: 13748 - DNA, 119 bp, homo sapiens
ggtggggatggggacaggagaggtgggctgcaagaaccggtggggagagtgccagggcaactgagggtagactggggtcccattagtcacctttagtagaatctccacagtgaaaatgg

SEQ ID NO: 13749 - DNA, 119 bp, homo sapiens
aggtgaaggcataatcgaagtaacccagaatctggggtgtgagaaagagcggggagccactgagtcacgctgagggggatcctaggtgacttctcaaaaggcttggccatcagaaagat

SEQ ID NO: 13750 - DNA, 119 bp, homo sapiens
tccatgctcctccacctgccctagcccctcctgcctcaccccctgccacttccggcactcacgggttggttggctgaggcagaagaaggcgctgccctcagggatgggtaccaccttct

SEQ ID NO: 13751 - DNA, 119 bp, homo sapiens
ccttgggtacaacttcctgcaggagttccacaccccctgcaccctcttcctcttcttcctcttcttcctttcttcctcctcctcctcctcctccatgtctggcaccagagaaaagcaaa

SEQ ID NO: 13752 - DNA, 119 bp, homo sapiens
ccctcccctaatacaaacctggtgaccttaaagatcctgaggaggcgcacacatcggagcactgagatgccaagggctgcatggcgcccacctccaccaaggtggtctctaggatgccc

SEQ ID NO: 13753 - DNA, 119 bp, homo sapiens
aagcctgccctggggggctcaggtgggggatccaaaggtcatgagggcttggaggtggggggtttcaaattatggagtcaaggatttgcacaactttcccaactcaccagactctggtt

SEQ ID NO: 13754 - DNA, 119 bp, homo sapiens
ttcatgatcttgtttctgaaaaagaagggggatgggaggtgtgtgtcgtaaagggcagaaggggtgtcatgactggggccagaggtcaaggactgagatcgaggcttgaggctaaagaa

SEQ ID NO: 13755 - DNA, 119 bp, homo sapiens
ttgaggctaaagaaaggacttgagtcagggtttggactggcttctgggctgggtcaggggctgggggcctcacaggcagcgtgtacagctggccagagccccctcctcctcatcctcat

SEQ ID NO: 13756 - DNA, 119 bp, homo sapiens
cgccttgggtctctgtcatggaaccggtgtcactggctgggaggctggctgtaggcaaggtggggatagggtcaggacctgaagaccccgaggtccaatctttggctttcacctctgcc

SEQ ID NO: 13757 - DNA, 119 bp, homo sapiens
tgaagaccccgaggtccaatctttggctttcacctctgcctacccacccccaccccagcctggctggaccccaccatggctgctggtggagtgtgtggagcgagtagaatgactgaacc

SEQ ID NO: 13758 - DNA, 119 bp, homo sapiens
agcgcagacgtccacgcctcctattggtcagctcggccagctgtggccctgcagggagagaaaggacaatagggaggacatactgggggcagggttagggccatgtctagggtaggggt

SEQ ID NO: 13759 - DNA, 119 bp, homo sapiens
cggcactcagtctggttcagcgtgcacgcacgccctgatcccgaagacgcacagggcgatgggtcctccccgcttccatgtctgcaggaagactggagcttggggcttcgaagcaggcc

SEQ ID NO: 13760 - DNA, 119 bp, homo sapiens
gggcatgttctgcctaggaggggcgggcagactaaccggatcccaggaagtagcacgtcttgtgcattctccaaggaacagctcgagcccaatgatggcataaatgatgatgacgaaga

SEQ ID NO: 13761 - DNA, 119 bp, homo sapiens
gcgactagggtggggtgcctcccgcagacgcgcacccgaccacgacgatgatgaagtcgagtaggttccgccattgcggatgtaggcgctggggtggagcaccagcccgtaggccacga

SEQ ID NO: 13762 - DNA, 119 bp, homo sapiens
gctggaaggagtgagctctactggggctctatttggctgggaactggctggggcggggcgggccttaccggttgtggttggcagtgttggagtcgtcctcagggaaggggatgtaaact

SEQ ID NO: 13763 - DNA, 119 bp, homo sapiens
cccagggccacgcagttggcaaagatggtcagcaggatgaggatgtcgaagggcctcaggtggacacagcaaggaccctggcagagtggcattggaacccccctactcccttgggaacc

SEQ ID NO: 13764 - DNA, 119 bp, homo sapiens
gtaaactgtctccatcaaggataatgtcttcaggatttggtggagggggacagaaatcttcattggggcgatttcctggaaaagtgtttcagcctggccaaggaagaaaagataaaatc

SEQ ID NO: 13765 - DNA, 119 bp, homo sapiens
taacagctcctgctgatgtctgacgaatctctcatattgaagtaaagagcccacagaattcttggctttctacttgttcattttctaaatatagaaataaattttatttacattctaaa

SEQ ID NO: 13766 - DNA, 119 bp, homo sapiens
ccgaaacatcttcatatatacaacttttattaaaaatatataggactgaatttacctgttgatctgaattgtttttaggacagatctatctgtaatcagcactgccctggagatctgcc

SEQ ID NO: 13767 - DNA, 119 bp, homo sapiens
atatatatgaatatatatatatgaatatatatatatgaatatatatatatatatatatgaaggttactttatcatccttactttctggattctttgtccactacaaggcactgtactga

SEQ ID NO: 13768 - DNA, 119 bp, homo sapiens
atggcgaagacaataaattccaccaaacacagcacacatcctagaaagagaacagaaaaataagaattaggtaattgggttgaaaataaaggtaaaagtattttcttttaagtatttta

SEQ ID NO: 13769 - DNA, 119 bp, homo sapiens
ttaagaattcaaaataaatcagtagaattttagattcctattgcaaaaaaatctttattttggtatgaaacattagagttggttcatttgaaggtaacaaataagttttcatcctgctt

SEQ ID NO: 13770 - DNA, 119 bp, homo sapiens
gcaatacccaacgtattaaatttaatgttgaaatgatcatgaaaacctttaagttgaataatacttcagatactttttaaataagtcatggtaatcaaaaaataactatcctatatatt

SEQ ID NO: 13771 - DNA, 119 bp, homo sapiens
tatttatattagaatacataatatataaatacaccctatatatttatattagaatacatatattagaatatattgcccaaatactttgacgtattttccaagcagtggtaatgggtttg

SEQ ID NO: 13772 - DNA, 119 bp, homo sapiens
gaagcttagggttttcttcagtgcagggttactatgtaacatacaataaaacaaagcaaattaaaaggtagatacaaactttacctggtattcctttagccaggacaatagtcctgaaa

SEQ ID NO: 13773 - DNA, 119 bp, homo sapiens
agctaaaactggcccagtttcctccatagtagcttcttctgtaacaattaaaaaaaaaaaaaaaagtaagaaaatggtataaaaatcaattcactgatcttcatcaacaaaccatcttt

SEQ ID NO: 13774 - DNA, 119 bp, homo sapiens
cctagcagagaccgtcatcgccagcactatcagcattgtgaaccaggtctctggctacttcgtgctgggcaccctatgtgtgtcctggagggctacaccgtctccctgtgtggtaagcc

SEQ ID NO: 13775 - DNA, 119 bp, homo sapiens
cactaactgttgctttgggctgaaccacagtgtgggcgtgcacccccacccccatgcagtcagcagcccttacctcccaggcaagcaccgaaggccagggcatacatgagcggcggtgc

SEQ ID NO: 13776 - DNA, 119 bp, homo sapiens
gggcaggccaacctcagggtcgtggctcaggttcaggagcacgggaatctgtggaggaagaggacattgtgccacgtcccatggacgctcagagaagctgccatactgtgaccaattta

SEQ ID NO: 13777 - DNA, 119 bp, homo sapiens
ccaggatgaagtgggtgtgggagttgttgagcacagagagcttacttagagggttggacatggtctggtcactcttgttacctgacaaagtgcacagcgcaaatcagacctgcaggact

SEQ ID NO: 13778 - DNA, 119 bp, homo sapiens
tatcgggagggaaagggcctgctcttacctgtgctgacacccccggtgaagatccaggccccggtggtctagcagccttgatcaggcctttcccaaagacttgtttcagcttgggctgc

SEQ ID NO: 13779 - DNA, 119 bp, homo sapiens
agtttgtccacgcttgagtttacccacacctgaggatacctgcacctgacctcccttcacctgtgcttaccgcatctgagcttacctgccacagcagtggaatggagagggcacagctc

SEQ ID NO: 13780 - DNA, 119 bp, homo sapiens
aggctctttcagcctcctccttggccagggcagggagctgggtgaggagggcccaccctttaagaggagagtccccatgaggagcatgtgagcacttgggcctgggccctcatgattgc

SEQ ID NO: 13781 - DNA, 119 bp, homo sapiens
gtatttcaacctgaggacttccgtggagaaagggatgtagggagaaagtgagggtctcgccacaacatccgtgactcctctccctgtttgcagccgggcgatggggccattgcggtgga

SEQ ID NO: 13782 - DNA, 119 bp, homo sapiens
tgagctacaggataacaagaagctgaaggtgggtgccgtatggagtctgcccagtggggacactgcaggtctcagtggatgatcacaggcccagggtattgtggccctgtgctggggac

SEQ ID NO: 13783 - DNA, 119 bp, homo sapiens
ggagaaggaggaggagagcttgaatcaaggggccagagcccaaccccaggccaaagcagaaagcaaaccgaaggtgagaggatggccagaccagtgggttttctcctgcccccctctcc

SEQ ID NO: 13784 - DNA, 119 bp, homo sapiens
aaatgtccaagcccatggctcagggcatgggagggacactgacccctggggtctcctcttcacctgcagtgccaggtgggggcagggatgtgccccgtggacaaggcccaccgcaacca

SEQ ID NO: 13785 - DNA, 119 bp, homo sapiens
gtgccaggcctgccggctgaagaagtgcctgcaggcggggatgaaccaggacggtgaggcgggggctggccggggggaggtgacaagaaatgggcagcgggactggcgtgtcgtcctga

SEQ ID NO: 13786 - DNA, 119 bp, homo sapiens
aggcagagggcagctactgcaggtttccgagcagagggtcatacacagggctggacctcacgcagactgcatggccatgggtccagaggatactactgggaaggggatggcagctactg

SEQ ID NO: 13787 - DNA, 119 bp, homo sapiens
cttgtctcattgtctgggcggcccacgtactcaccctctcaagcagcttgctcttcaagaagggcttgacacattgtaggtcgtggtgaagtaccatggctggtggatgaagtggatgg

SEQ ID NO: 13788 - DNA, 119 bp, homo sapiens
ttcacactttctgctacccaggagctggtggagaagagttcggggttctagagtactggatgaggctgctttccccataaaacccagcctacaggcgtgcaataaacgaaagaaagccc

SEQ ID NO: 13789 - DNA, 119 bp, homo sapiens
cagcctacaggcgtgcaataaacgaaagaaagcccaggtctacctgtcaaccgatgtgcttggaggccgaaggcccaggaagaggaggtgagaaaaaagatgtgccgaggcatctcaga

SEQ ID NO: 13790 - DNA, 119 bp, homo sapiens
cctgcctcccctcaggccagcttgctgaccactcacctggacgtgctgggctcctgtctcctctgggctcctgggtagtagccatggggcccatcaacagggactgggccctgaccctg

SEQ ID NO: 13791 - DNA, 119 bp, homo sapiens
agagcaggtgttaaagagggggttctaggtgagcggcctgacacccaggtaggccctggatatactcactcagaaatggccgagaggatgtggtcagtgccagagccagacaggcacag

SEQ ID NO: 13792 - DNA, 119 bp, homo sapiens
cttcccaggagactgaaggctccatggagcagggcctggtgcctctgctcagctccagggggctgtgggacagagcccaaagggcattcttaaagggccagctctctgaggtcatctgt

SEQ ID NO: 13793 - DNA, 119 bp, homo sapiens
aaaccttgactccatcccctccccaccaggactacatctcccagcaggctgtgctctgacagctcttggtttaaataggattctgggctctgctcagagtcaggctgctgctcagcacc

SEQ ID NO: 13794 - DNA, 119 bp, homo sapiens
acaaatgtgcagcttcctggcaaggtagtggtgatcactggcgccaacacgggcattggcaaggagacgccagagagctcgctagccgaggtaagtgtttcccctttagtctccaaagg

SEQ ID NO: 13795 - DNA, 119 bp, homo sapiens
attctcattcctggaatttactgtctttctctgccctccagtgactgcaagaggacctgggtgtctccagggcccgaaataacaaaacagctgagcgcctatggaatgtcagctgtgag

SEQ ID NO: 13796 - DNA, 119 bp, homo sapiens
ctaattaggtactaatgtttcttacagttttcagaataagtaaggaataatttttatgctatatattgcttccttttacagtgaagaagaactgttgtatctgagtttcattgaagatg

SEQ ID NO: 13797 - DNA, 119 bp, homo sapiens
taacagatgaaattttgaaacttggtttattttcaaacaggttagtttttttaatggtgttatgttaatcaggagtacattaaatattcttcatatttcttcatatgatgttaaaattt

SEQ ID NO: 13798 - DNA, 119 bp, homo sapiens
agcgcaaggctggactccctcaccccggattttaatacgcttgtagatattttttaaaaataaaaatctacctgtgcattcccagggcttggaagacagagagccagaatggtaacagt

SEQ ID NO: 13799 - DNA, 119 bp, homo sapiens
gcgtctgccagggcccagtgctcggcgctgggaggagagcccttccccggccgcgctcggctgcgagcgccgggcagaaggcgaggggcgggcgcgcgcaggggtgcgggggctgggag

SEQ ID NO: 13800 - DNA, 119 bp, homo sapiens
tttattattatattttattcaggatgacaagccatcaggaggtcaacaacacaagcacagacagagggaagaggccaaactgctgaatgtcagcggcctgtctggaggggctgaggctt

SEQ ID NO: 13801 - DNA, 119 bp, homo sapiens
tcccagccccgcccaggctgtacctcattctgcaggttccagaccccgtccttgtgggtgaactcctcaagctggtgcggcacttaggcaggatgcggcactcgaagccacacatgttg

SEQ ID NO: 13802 - DNA, 119 bp, homo sapiens
gtagtccggtagcggggctagagggccaggcaccgggttacccggccctcgataaggaaacactccggcatatccggagaatctggggagcggcgggatagaaaaattcactaaccaca

SEQ ID NO: 13803 - DNA, 119 bp, homo sapiens
aaccccttcggtcactcggcccgacccgaccacgcctcccgcagcccggccttaaacgcctgccacgcacccacaggccctcacacaagaggccgctttccccgcagcgcaatggcggc

SEQ ID NO: 13804 - DNA, 119 bp, homo sapiens
cagactgcgtccgctccgcgttcccagcgccgggaagtgcgcaacccgagttcagcagttgatccagtcgcgccgaggtgctcagatggattagtgagacgaccaattagagttgcaca

SEQ ID NO: 13805 - DNA, 119 bp, homo sapiens
aggtttccagggcacttggcacccaaaccccccccccccgcccgccgatgggattcggtgggaaagttgttgtttaaggcggggtcagggcacccctcccggggctgcacctgggctag

SEQ ID NO: 13806 - DNA, 119 bp, homo sapiens
agtggccacgtgggcagccccacacagcaggtgtgggcctgggccagggagtcggggttttccaggatgaggaaagcagtgcccaggccaaggttcagcagcaggagggcctgagcagg

SEQ ID NO: 13807 - DNA, 119 bp, homo sapiens
ggtcacaggacactcggagggacccttaggcctgaagagcctcaatgggccaaactgcaggacatcttggagtcaaagactcacaccaatctcagctagggggacccctccaataacag

SEQ ID NO: 13808 - DNA, 119 bp, homo sapiens
aggatgtggcccagggcagcagggaaatgggctcgtgtgaccttctccagcacggagctgaaggtgtggtgtcggctgccttgcaggacgggtccccggcacccgtgtccaggatgttt

SEQ ID NO: 13809 - DNA, 119 bp, homo sapiens
cccccatgcaggaccagcaggaggacatgtgtcttgcaggagcgctgcgggcagccttcctgagagccaggcggttggaatacagagagagaggcggctggggtcgggggaggcacaca

SEQ ID NO: 13810 - DNA, 119 bp, homo sapiens
acgaggccgcctatgatccgagggctcttgctaaaatcctggcctctgagttgagcccagacaccctccaagcccagcctacctcgctgtcttcgtggatctcgatgcttccctgggct

SEQ ID NO: 13811 - DNA, 119 bp, homo sapiens
gggaacctctgtcttctcaaggaaacccggtacagttctcctgcagagggaaagaggggagctcagcattccaggcttccctacagtgaccagacactccctgggcccagctggcccta

SEQ ID NO: 13812 - DNA, 119 bp, homo sapiens
ctttcaggctctgagtggatgagaggggacccaggctcaatgagcttgcacccatccaaggggaagaaagaccccacagggtcaggcttgactcacgctgcttctcctggaggatgctg

SEQ ID NO: 13813 - DNA, 119 bp, homo sapiens
gatgtgcacggcgcggtcccttctcctgcagaaaaagaaaagaaacatgagcagatccttgacactgttccaggcactgtgtttcccagggaggctgcttggagctgcctctgaccctc

SEQ ID NO: 13814 - DNA, 119 bp, homo sapiens
catctgagctctccacagagtcactgaggacatttcgaaggtgccagggggcaccgccgcccgggggagaccacctgttaaagggaacacatctgttaaccaagcctgagatgttgtcc

SEQ ID NO: 13815 - DNA, 119 bp, homo sapiens
atcagcttggggagattaagggctctggccggctgtacccacgcccccgccctggcctgggctggcaagaagacctgtgggcgggcgtcaaaagggggaccggccctgtgacccctcac

SEQ ID NO: 13816 - DNA, 119 bp, homo sapiens
cgggggccgtgggcccgagcccccggacttccctgtaaatgtcagaggcccctccgctgggatagggtcgtctgagggcgcaggcgagtccctgctgacccctgacgcctccgacgggg

SEQ ID NO: 13817 - DNA, 119 bp, homo sapiens
gggcttggagaaactcggggttacggggagaaccctaggggaggccggggtctcagtcgctcagcctgcccgtctgtgttcgcagaagccggcaatgaccgcctgcgcccgccgagcgg

SEQ ID NO: 13818 - DNA, 119 bp, homo sapiens
gtgggcttccggaccccgggctctgcggtcccgcgtggtgggctccgtccctgccccgcctcccccgggcctgccccggctcccgctcctgctgctcctgcttctgctgcagccccccg

SEQ ID NO: 13819 - DNA, 119 bp, homo sapiens
cactgtccctctgaaggcagcgtgctggacagcctgcgcagggctcaagagcgccgcgagctgccctctacctcaatctgcagcaggtagacggtcccgggaggagggaagaaggcaag

SEQ ID NO: 13820 - DNA, 119 bp, homo sapiens
agcatgtggcatgcctccctagagaagaggcctcccctggcatcgctcctcagtatacctcctgtcacttcccttcaggactggagccgggcctcgtctttcttggcttcctcctggtg

SEQ ID NO: 13821 - DNA, 119 bp, homo sapiens
gttgggatggggctggctggggccttcctggcccattatgtgaggtgagtagtggaatgaggtaagtagaagtgagcttgtgccagaaatggaagtctgcagcaaaaacagcaggctgg

SEQ ID NO: 13822 - DNA, 119 bp, homo sapiens
gcctgacctcaacccaggactctgacaccagaatatattttgacctcttgcattgacctctacctgctagtggcccaggggagtcgatcaagtctgggtgcccgcagcatgtcagacat

SEQ ID NO: 13823 - DNA, 119 bp, homo sapiens
tcgcagcggccccagccaacacttggacagccccaacattggtgtctatgaggtgagcctgaccccagcagacagagagacagtgggggaagaatgctcaggccctgggcagaggggag

SEQ ID NO: 13824 - DNA, 119 bp, homo sapiens
agaaattcccaggggatcagcacatagctatccgcccagcaaccaagacggccttctccaaggtgagactgggcctgtgatggggcctaggtggccatcggtttctccctccttgcctt

SEQ ID NO: 13825 - DNA, 119 bp, homo sapiens
actctccccctctcagctccaggagctccggcatgagaacgtggccctctacctggggcttttcctggccggggagcagaaggccctgcggccctctgggagggcaacctggctgtggt

SEQ ID NO: 13826 - DNA, 119 bp, homo sapiens
ggcagattcgtactcaagatcactgaccacggccacgggagactgctggaagcacagaaggtgctaccgagcctcccagagcggagggtaagagtcccctgtgcagacgaggatccacc

SEQ ID NO: 13827 - DNA, 119 bp, homo sapiens
cccccgaggccctacctaggtgcagcccagggccggccctgctagccccgccgacccccagcatctccaaggtccatgcgtggcaggcgtggtgggcctcaccatgccgcggtactgcc

SEQ ID NO: 13828 - DNA, 119 bp, homo sapiens
tgtttggggacacggtcaacaccgcctcgcgcatggagtccaccgggctgcgtgagtgtgacggggacagacggggaggtgggagggggacacgggaggtgagtcccgagctcacggcg

SEQ ID NO: 13829 - DNA, 119 bp, homo sapiens
ggggacaagacggggaggtgggagggggacacgggaggtgagtcccgagctcacggcgtcccccaccgcacagcttaccgcatccacgtgaacttgagcactgtggggattctccgtgc

SEQ ID NO: 13830 - DNA, 119 bp, homo sapiens
tctggactcgggctaccaggtggagctgcgaggccgcacggagctgaaggtgaggcagggccccaaccctcccggaggccccgccctgtcctgaggcaccgcccatcccgggccgcggc

SEQ ID NO: 13831 - DNA, 119 bp, homo sapiens
ccagttccacgcagactcgagatcccccacccctcaccccagtccgcctaagtccttccctctcccatgctccccagggcaagggcgccgaggacactttctggctagtgggcagacgc

SEQ ID NO: 13832 - DNA, 119 bp, homo sapiens
ggcttcaacaagcccatccccaaaccgcctgacctgcaaccggggtgaggggccggcctccgcggcaggcgagggacgagggacccctgcctcctgctctgtgtctgaccccccgcgcg

SEQ ID NO: 13833 - DNA, 119 bp, homo sapiens
tgacgtgggccctgccctcccacgccccattccccttccctgaggccaccgccccctccttgcaggtccgcaaccacggcatcagcctgcaggagatcccacccgagcggcgacggaag

SEQ ID NO: 13834 - DNA, 119 bp, homo sapiens
ctggagaaggcgcggccgggccagttctcttgagaagtgaggcccggccccggacaggtactgccccctagccccaaccccagctgccgcgtcccctctgctgcctgcagaacgtccca

SEQ ID NO: 13835 - DNA, 119 bp, homo sapiens
cttctccttagggtctgggccctgctccctgtcccatctgcagtggaccccaggcacccccctttgaggggtggggtgaactgctccttggcagggatttgtgacactgcattgctggg

SEQ ID NO: 13836 - DNA, 119 bp, homo sapiens
ctcttctggaccttgcaccgtggataccaggccatgtgccatggtatttgggtcctgggagggtgggtgaataaaggcatgctgtcttccatgttgtggtgtgtgctgcttttagccag

SEQ ID NO: 13837 - DNA, 119 bp, homo sapiens
cctggtcctcatccaaatgttcaacaaagatctggatgcagtgaggatgatctacagtcagcacgtccagaggaagcagaacttggtaggcttgttaaaggggattttgatggggacat

SEQ ID NO: 13838 - DNA, 119 bp, homo sapiens
agcaccttgggaatctgaccacactgaggtttcctttgcaggagctgcctgagaaatggaacaacataaaaaggtggccattactgtgaagcagcaggtggccccactgcaggcaaatg

SEQ ID NO: 13839 - DNA, 119 bp, homo sapiens
agcactgtgtggaacacgctgagctccctgagggcagtagctgagctgcagaatccagccatccgggagggcactggaggcagctgatgcaggccaccggtgtgagcttcactatggac

SEQ ID NO: 13840 - DNA, 119 bp, homo sapiens
ggcaggcttattgtgctcccattccaggcgtgtttggtgcacacgagtgagaccatccgtgtgtgctactcatggagcggttgatggcgcggcagcggcctgtcatgctggtgggcacg

SEQ ID NO: 13841 - DNA, 119 bp, homo sapiens
gcaagtcggtgctggtgggagctaagctggccagccttgaccccgaggcatacctggtgaaaaacgtgcattcaactactacaccacgtcagcaatgctgcagggtaagcagcccaggg

SEQ ID NO: 13842 - DNA, 119 bp, homo sapiens
ctgacaaggctggcagctttcatcagctccatggatgtcttccagatcacactgcgcaaaggctaccagtccaggacttcaaggtaaaaggtcaggcagctgcagggaggaggctcagc

SEQ ID NO: 13843 - DNA, 119 bp, homo sapiens
cctgtattgagggggggctccttccttcccactagaacattcacctggtggccaagtggctcagcacccggagaagaagctggaggagcacagtgagaacagccacccagagttcaggg

SEQ ID NO: 13844 - DNA, 119 bp, homo sapiens
gcatcctggagaactccattaagatcaccaatgagccccccacgggcatgcatgccaacctgcacaaggcctggacaacttcactcaggtacggccccgggagggaggcaaaaacagca

SEQ ID NO: 13845 - DNA, 119 bp, homo sapiens
agcccagccagacatgctgtcgtctctgttgcaggagccgccctgcctggagctagcctgggggcgagcagggtcccccaacccccgggatgaccgcggccagccgggccaacccctac

SEQ ID NO: 13846 - DNA, 119 bp, homo sapiens
gagaggctgagaagggcccactcacaccctctccctcacccccaccaccacccatagcccagcgactcagtggctcccacctgcctcaggcggaggaaggcaggcgtgaactggtagcg

SEQ ID NO: 13847 - DNA, 119 bp, homo sapiens
gacaaagcgcccagcattggggtccaggtcccgccggttgatgggcaaccgttctgcaatgtaccccagtggggctcagtgggcttcaggctgggcccttgtccacccagggttctacc

SEQ ID NO: 13848 - DNA, 119 bp, homo sapiens
cgccccgcaagccgctcgccgtgaaggggcggggcccagagtgggtgggtccgcgcacgcgccgcgtggggacggaagtgaaactctaagaaatgagatggagaagtacgagcggatcc

SEQ ID NO: 13849 - DNA, 119 bp, homo sapiens
gagtggtggggagaggtgccttcgggtgagccagggctctgggggaggaaactgctaggggatagggaaataagccccaattccgcccgcgaagtcgccgcccgcctaatcccgcccca

SEQ ID NO: 13850 - DNA, 119 bp, homo sapiens
tgttgaagccagatggctccagaccctttgcccagtttctccttgcttcctctcctctctagcccaccatgtggaggctttgctgggctatgaaatggtgcaggtggcctgtggggcct

SEQ ID NO: 13851 - DNA, 119 bp, homo sapiens
ctcacgtgctggccctgtccactgagcgagaactatttgcctggggccgtggagacagcggtaagctccgcctttaggccccatctcacagcatcctcagccatgacttgctccccttc

SEQ ID NO: 13852 - DNA, 119 bp, homo sapiens
ccctcaggttcaacaagctgggcctggaccacctctccctgggggaggagcctgtcccccaccagcaagggaggaggccctgagcttcacactactaggctctgcacccctggaccagg

SEQ ID NO: 13853 - DNA, 119 bp, homo sapiens
tttccaggctggaacccaggtgaacgagggcttccagccactggtggaggcactgtctaatatccccaacctggtgagtcaggatgggggagaagggcttggggtgaggggggggattc

SEQ ID NO: 13854 - DNA, 119 bp, homo sapiens
gccaggctctcacccaagtgccctgctgtgtcccacgggagggtgcagcccctgggggacgtgggccagagctgccacgattgaaatccaagagagtagcaaagtaagaacccgaaggg

SEQ ID NO: 13855 - DNA, 119 bp, homo sapiens
acacgcatacatgcacacaaacatgcacacgcacacagccctggtgacctggggacaatctgcagtttaaggatccactttctccagtgtccacatcgcaggacttacccaccccaggc

SEQ ID NO: 13856 - DNA, 119 bp, homo sapiens
tgcagggctggcaactgtgaggacctcgagaccccaccataggttgtggcaacttgcaattcattttggctggggagaggagcccccggttatctgtggaggaagagacagaaagaaac

SEQ ID NO: 13857 - DNA, 119 bp, homo sapiens
tggacactcacagctctgtgtcctccagggccggcgggcgctccatcgcctgccgccgcctcctcacggccccaagatcttctttcggggccccagtgggacgctgatgctgcggaggt

SEQ ID NO: 13858 - DNA, 119 bp, homo sapiens
atagcccaatgcggcctggacctgtggagggacagtgaggggctgggcacagccatagctcttcctcccactcttgcctcccacagagagcccagcgacgtggatggggcagctagggg

SEQ ID NO: 13859 - DNA, 119 bp, homo sapiens
cagcagcttggatgcggaccctcagtcctcaggcaggtaaggcaggagtctgggctgggggagggaggggctgccaaggaagctgtggctgtgcatgcctgggggtgcacgtgtgtgcc

SEQ ID NO: 13860 - DNA, 119 bp, homo sapiens
gggaggaggaggaagaggagagtcagaaacatgggaaggtcgtgcccttcaatcctgaccccagtgcttcctctgtttagggagaaagaacctctgaagtaagccctcacctctgcagg

SEQ ID NO: 13861 - DNA, 119 bp, homo sapiens
tggggctcaggcccagagactgggatcagctggctcaggcaggtagggcagggctgggagccggggaggcagagggcaaggcttgggacaggcaggaagcaacaggcaagtcccggcca

SEQ ID NO: 13862 - DNA, 119 bp, homo sapiens
aacatccactctgaaatgcgagtcccatccccaggtgtgggagaagtgctgatctgctctggttttctgttcagctcaggtcctggttcgtcccctagcccaggaggatgctgtgggag

SEQ ID NO: 13863 - DNA, 119 bp, homo sapiens
ctgcagcagcggcaagagggagaatggggggaagcagcactagagaaggtagacgcctccctctcagccgggacctgccagtctccccttcccccaggccctgggtgtgggctcctgag

SEQ ID NO: 13864 - DNA, 119 bp, homo sapiens
caggcctgggtccctaagtccaggtgtggcgtttcccagggcccccaccccgcccggcctggacagggaggtggcgggaggggcagcgcagcagacgctctccccgccaggcaaggacg

SEQ ID NO: 13865 - DNA, 119 bp, homo sapiens
gctccaaccagctggacaccaaccgctccgtctacgacgtcttccacctgagcttcagcgacggcgcctccggatccgaggtgcgtggcggggcgggtgggcacgcgggagcgggggtg

SEQ ID NO: 13866 - DNA, 119 bp, homo sapiens
cctgtcccatgcacaaatatgccacagacaggcaaggacacactaattttattttgaaatagggactgcagggcaggctgtattgagaaggatggccccctggtgtgatgagcttgggg

SEQ ID NO: 13867 - DNA, 119 bp, homo sapiens
gggaggtgggggccgaggtgggctgcaatgggccccgggcgtgctgggtgtgcctggggggacctgggcgacctcgggttggtactggcagccgtcatacctgttcccaggccttccat

SEQ ID NO: 13868 - DNA, 119 bp, homo sapiens
tccagggatgtcgtccccaaacctgcaaggacagagcactcagggacatggccgggcccagtcctggctagtcagcctgaggcccgaggtcatctctagccttcctaggagatgaggtg

SEQ ID NO: 13869 - DNA, 119 bp, homo sapiens
ccaccctggtggctgaccggaactcagccttgggcggttccaggttcatggtgaggctgacggagacacgcggcaaccttggctcctggactccctcctgctgcggtctgggggcagac

SEQ ID NO: 13870 - DNA, 119 bp, homo sapiens
gcatttggagggccccatgggagcgggtcccgggccgcgccggtgtgctccttaacccgcggcgacacaggttcgagcacgtgagcatgctggtaatcatgctcaactgcgtgaccctg

SEQ ID NO: 13871 - DNA, 119 bp, homo sapiens
ggcatgttccggccctgtgaggacgttgagtgcggctccgagcgctgcaacatcctggaggtgaggggctgggtcggggtggggaaggagcgtgggtcgctacgaggtttatggttcaa

SEQ ID NO: 13872 - DNA, 119 bp, homo sapiens
atccccaggaacaacaacctgaccttcctgcggccgtactaccagacggaggagggcgaggagaacccgtcatctgctcctcacgccgagacaacggcatgcagaagtgctcgcacatc

SEQ ID NO: 13873 - DNA, 119 bp, homo sapiens
ccagcccagaccccaggggcacggggaggaggaggaggggtcgtgcgggcccaagtcaagccactgccccccaggtgatcacgctggaaggctgggtggacatcatgtactacgtcatg

SEQ ID NO: 13874 - DNA, 119 bp, homo sapiens
gacgcccactcattctacaacttcatctatttcatcctgctcatcatcgtgagtgtgggcggcagtgttgccatgatgggccctggtgttagctggctgggggtggggtggggtacctg

SEQ ID NO: 13875 - DNA, 119 bp, homo sapiens
accttcttccgctcagcacacccctgcctccaccctcaacacgcccctgcccccaccctcagcatcctggcatgcaccttttcggctgcaagttcagcctgaagacagacaccggagac

SEQ ID NO: 13876 - DNA, 119 bp, homo sapiens
accgtgcctgacaggaagaacttcgactccctgctgtgggccatcgtcaccgtgttccaggtagtgcccgggtccccgcagcagtgttgggtgctgagtgtggtccccagagaggtgga

SEQ ID NO: 13877 - DNA, 119 bp, homo sapiens
ttcctggatgcagcccccagcctcccagactctcggcgtggcagcagcagctccggggacccgccactggagaccagaagcctccggtagggaccatctcctgccccagctctcaggcc

SEQ ID NO: 13878 - DNA, 119 bp, homo sapiens
gcacagagggccctgatggggggccgggcaggcaggcgcaggctctgagaagccgccgcctcatcccacgagctgctgcctccgcctgcataaagtgctggagccctacaagccccagt

SEQ ID NO: 13879 - DNA, 119 bp, homo sapiens
ggtgccggagccgcgaggcctgggccctctacctcttctccccacagaaccggtgaggcggccgggtcagaggctgcatggctagttccaccccacgggacccccgcccccaggtccct

SEQ ID NO: 13880 - DNA, 119 bp, homo sapiens
tccaggacaccctggagcgagagggccggcgaccccagctctaaccctcgccagtgaccctggctctggcctcaggccctgatgtcgctgttcgtgctgtcatccaaggatggatgggt

SEQ ID NO: 13881 - DNA, 119 bp, homo sapiens
gaacatcatgtacgacgggctggatgccgtgggtgtcgaccagcaggtgcgcacaggcgggtcgagctggtcacctcagggtctcccgcgagcggctgccttggcctctggggactcgg

SEQ ID NO: 13882 - DNA, 119 bp, homo sapiens
caagtgccggcagcaccaggaggcggaggaggcgcggcggcgagaggagaagcggctgcggcgcctagaaggaggcgcaggagtaaggcgctcccggtggcggtggcggtggcgggtcg

SEQ ID NO: 13883 - DNA, 119 bp, homo sapiens
tggaggagatagagatgagcgccgcgctgcccatcaaccccaccatcatccgcatcatgcgcgtgcttccattgcccgtggtaggtgcccgcgtgcccgccaggttctctctgcgggtg

SEQ ID NO: 13884 - DNA, 119 bp, homo sapiens
gtgggagtgaggggcggggcggccagggtccccgcgcagcagggagggtccgcccagccctgctgacgccagctcccggccctagtgctgaagctgctgaagatggctacgggcatgcg

SEQ ID NO: 13885 - DNA, 119 bp, homo sapiens
cgccctgctggacactgtggtgcaagctctcccccaggtaggtggagcccgcgccatcctcagcgcaggccccggaagacggggttgcagggagcgcctcgccgtccccctctccccct

SEQ ID NO: 13886 - DNA, 119 bp, homo sapiens
ccgaggcgccgagtgccctgcagggtgggctgaggcctccctgcccgcccgtctgacccagctctgctttctcttgtgtaggtggggaacctgggccttcttttcatgctcctgttttt

SEQ ID NO: 13887 - DNA, 119 bp, homo sapiens
tatctatgctgcgctgggagtggagctgttcgggaggctgggtgagtggctcctgcgccctcctcctggacacatggggtcctgacaggcgcccctgtgcccatccactcacacgcagg

SEQ ID NO: 13888 - DNA, 119 bp, homo sapiens
ctacatgttcaggcccgtggtgcctgcctcggcgccccacccccgcccgctgcaggaggtggagatggaacctatggggccggcacccccttgggtatggtagccagcaggaagatatg

SEQ ID NO: 13889 - DNA, 119 bp, homo sapiens
gcttttaaattcaggttaaatgttgcaataatctgatgcagaagactcagcttctcaagggagagggaggggcggagcggaataaatagtaacttatttaagaaatgcacttggattcc

SEQ ID NO: 13890 - DNA, 119 bp, homo sapiens
cccacggccgcgcccctcggcctcccaatgggctgtgcggctgccagcgcttgcgccggacgccacttcggtccccgtggtcacgtgaccgtcacttcacgtgaccgcgcggcggccgc

SEQ ID NO: 13891 - DNA, 119 bp, homo sapiens
tgcggcgcgatggcggcggggctggcgcggctcctgttgctcctcgggctctcggccggcggtgagtggccggccgtccgcgtccccaggccccgcgcgcgctctgcaccccggcctcc

SEQ ID NO: 13892 - DNA, 119 bp, homo sapiens
ggccggcggtgagtggcccggccgtccgcgtccccaggccccgcgcgcgctctgcaccccggcctccccctcacggtctcgctccccgtagggcccgcgccggcaggtgcagcgaagat

SEQ ID NO: 13893 - DNA, 119 bp, homo sapiens
gaaggtggtggaggagcccaacgcgtttgggtgagcagcctcgcgggctggcggctcgagcgggggacgcccgggcccgttccccgctgaccttgccgcttcccgtagggtgaacaacc

SEQ ID NO: 13894 - DNA, 119 bp, homo sapiens
gcgtttgggtgagcagcctcgcgggctggcggctcgagcgggggacggcccgggcccgttccccgctgacttgccgcttcccgtagggtgaacaacccgttcttgcctcaggccagtcg

SEQ ID NO: 13895 - DNA, 119 bp, homo sapiens
cctccaggccaagagggatccttcacccgtgtctggtgagtgaggagcgctgttggccggcgcgggggtgccgcggggagcagcaacagtggaggatggatgagtgaccctgagagtta

SEQ ID NO: 13896 - DNA, 119 bp, homo sapiens
gccagtctttgcagacaggttctgtgcttggaccctggggatcagtgtgaggtctcttccaggacccgtcatctcttccgactctcgggcaagtgcttcagcctggtggagtccacgtg

SEQ ID NO: 13897 - DNA, 119 bp, homo sapiens
ccccagcatctggcacgagtgggagatcgccaacaacaccttcacgggcatgtggatgagggacggtgagcctgccgttcccggagccggcagagcaaggtggggcctcagacgggagc

SEQ ID NO: 13898 - DNA, 119 bp, homo sapiens
gtctccccaacccacctacccacgttccctccccaggtggagctggcgtgtggaaaaagcaaccggctgcccatgtgtccgagccgagcacctgcgtctacgcgctgacgttcgagacc

SEQ ID NO: 13899 - DNA, 119 bp, homo sapiens
atggggtgcagctgagcctggcttctcttgggtcctcagtgtacccaaccctgccagaggccctgcagcgcagtgggaccaggtagagcaggacctggccgatgagctgatcacccccc

SEQ ID NO: 13900 - DNA, 119 bp, homo sapiens
ggtgaggactggccacctggtgttttggcagaaacttccaacttggagcacttgggccacgagacgcccgagccaagtctccagagcagctgcggggtgacccaggactgcgtgggagt

SEQ ID NO: 13901 - DNA, 119 bp, homo sapiens
ccaggagccccgacagggagatccccagtgtgtcagagatgcaggtggccgccattgcaaactcccggtctcatcactggtctgggagggcagagagcaggggtgaggcttcagtccca

SEQ ID NO: 13902 - DNA, 119 bp, homo sapiens
cagggggtttggggaagctgggagccaagctgggagccaaggtgggagtgaagtgaggggcaggggtttgtacctgcagcagggccagggcccaggtgaaacggatgcgacagcagcgg

SEQ ID NO: 13903 - DNA, 119 bp, homo sapiens
agagaagagcgggaggcaaagacgccagcctggtacagcatctggtacctgaggttagggttggggggagagaggaggctcctccagggaccatcccgctccccccggtgcctactggg

SEQ ID NO: 13904 - DNA, 119 bp, homo sapiens
cagagaggaaaaggccaaacccagagagaaagaaagtgacctctctgagggtctgtgtctcctacctggttcgactccggggcctcggttcttatgaggggctgccgggctgcgctctc

SEQ ID NO: 13905 - DNA, 119 bp, homo sapiens
tgcttcttcttcccctccagggtcctgggcctcaggagatgtgagcaacaagaaatagctaggagtaggtgaaggcagggtcagaaaaccctactggctgggaaggtccccagggacca

SEQ ID NO: 13906 - DNA, 119 bp, homo sapiens
tctactctcagcatctcagccatcccagcctcccctttctcagctcctgcccaccctgcctcccactacctcacccagacctgtagggcagcaggtgaaggccaagaggagccaacaat

SEQ ID NO: 13907 - DNA, 119 bp, homo sapiens
ttgatgacgagtgtggggaggatgtccgccaggagcacagcctgggacaggagaatagagtgagaccgcgagcttccaggggacaaccctcccaaccacgtggccaaggagaggcagga

SEQ ID NO: 13908 - DNA, 119 bp, homo sapiens
tcctccggtcacttccctcttctcatgccattgtcactcgctgaagtctcaggccactcaccagaagccaccgcgttcttccaatgcgcgccctgatggtccaacagagggagccgggg

SEQ ID NO: 13909 - DNA, 119 bp, homo sapiens
caccgcgttcttccaatgcgcgccctgatggtccaacagagggagccggggctccgggacggtctcctccctgggagagcgagaagagggcatgacccccacctactctcaggtgcacg

SEQ ID NO: 13910 - DNA, 119 bp, homo sapiens
ctactctcaggtgcacgaccgctccttgcgtgtcctcccggggccgagtcagctctcattcccctcagggggctgcgagccagaggtggtcgttccatgagggtgggcgggaatactca

SEQ ID NO: 13911 - DNA, 119 bp, homo sapiens
ccctcggaatccgaaaagcgccgccgcgagcctgcacagcctcccatcgcatcaagttcaggtcccccggggtccagggtcatagagtgtccaaagggggctcccacgggagggatgag

SEQ ID NO: 13912 - DNA, 119 bp, homo sapiens
ttttaaactggagcgggtgggagcagcaagcagagccgtgaccttagatcagtggcgcccaagaccgagcagtagcctgccagcaccagttatgactgtgggaggcttcagctcctttc

SEQ ID NO: 13913 - DNA, 119 bp, homo sapiens
agagcggaccctaggaccccggcccgcgctgcagtggggagggtcagcaacctccacccaccctcatcccccccatcctcccgggtactcaccgtgccactggccctgcagctagctac

SEQ ID NO: 13914 - DNA, 119 bp, homo sapiens
cgttgctatagcgccgacagcgtggcgggcggctggccgagaggagcacgggagaaacatggcaggctccgtagcctcctgggaaatgtagttctccttggactctagcctgtttgctc

SEQ ID NO: 13915 - DNA, 119 bp, homo sapiens
gtcatctgtgttgtgtgtgtattgcgtgtgttgtgtgtttgtgagtgtcatgtgtgtgtgcatgcatgccatgcagggggagtctcacctgtacacgtaggctttgctgaggatggatt

SEQ ID NO: 13916 - DNA, 119 bp, homo sapiens
ccaggcggctgttaaactcgaagaaggccatgtactggagggagaggagggcgtgagagcagcccaccgccataggtagcatgctgctcccacgcccacgggcgccgagactcagggct

SEQ ID NO: 13917 - DNA, 119 bp, homo sapiens
ggcagacacgaagatgccagtgtcggtgcagagcagggatgagctgaaggcctggggtggtgggcccagagtcctacctttaaacagcggggcaggcggaggagggggttcacaccgac

SEQ ID NO: 13918 - DNA, 119 bp, homo sapiens
tttcaaatagagaaaatccaagggcaggaggctgagcaggtccatctgaaatcccagtgggacaccatggggtaaaacggatgactccagggtggaaggtgaggggagtgagaggcgga

SEQ ID NO: 13919 - DNA, 119 bp, homo sapiens
aaagtggacaaggtccccatccttccaccaatgccaagccaggcctcagaggtgccagtgcctggtgctctcatacctgatctgaagtgctctggggccgggtcccgtcttcttcactc

SEQ ID NO: 13920 - DNA, 119 bp, homo sapiens
tggcccacgcccacctgcgacaccacacagctatccagcagcaccctgtgacccggggcggggtggggagataaaaggactgggttagggtgttaaaggtttccccagccctgctgagg

SEQ ID NO: 13921 - DNA, 119 bp, homo sapiens
cacgcccggctatgggccttttccacagccctctgggggtaagtcctgctgtctagcctaaatcttgcagctgcccatggctggccttccccttgttctggtctgggaggctctggggc

SEQ ID NO: 13922 - DNA, 119 bp, homo sapiens
cgagctcccctccctgtacctgggtctgaggcagcacctgtagcaactgcaggctcatctctccagaccgggtgacaaacagggcgcaaggtcatgggccatagcaagctctgtgcgct

SEQ ID NO: 13923 - DNA, 119 bp, homo sapiens
cctgctggaggaggcagtccctcctggggccccagaagcccccccatatactcaactccctgcctctccttccttggctcacctcagaggatttggggggctgaggaagcactctttcc

SEQ ID NO: 13924 - DNA, 119 bp, homo sapiens
agattctgctccagccacagaagcagccgcagcccaggcctgcagaggggccagtgatcagcagagtgcctgagggaaccggccagcgcactaacagcccacctcggggccaggcctca

SEQ ID NO: 13925 - DNA, 119 bp, homo sapiens
ccctcacctttcctcccccgccctctactcgccgcccggccggtccccccacccgtcccttcccttatcgcacccgcggccccggcagcgccgacgcaggcgcactgcaccgcgccgcc

SEQ ID NO: 13926 - DNA, 119 bp, homo sapiens
gccattttgtgtctgagcctgtggagcgattaaaccgtgcgcggagctgcttctttggcggcagcggcgcggcggtggccggtgcggacgcgcggagctcgccggagacgccgggtggc

SEQ ID NO: 13927 - DNA, 119 bp, homo sapiens
aaaggggcaagagctgagcggaacaccggcccgccgtcgcggcagctgcttcacccctctctctgcagcatggggctccctcgtggacctctcgcgtctctcctccttctccaggtact

SEQ ID NO: 13928 - DNA, 119 bp, homo sapiens
gtggggagtgcagggccgggcacgcctggacccagcctccttcactctctgccctcgggcgcaggtttgtggctgcagtgcgcggcctccgagccgtgccgggcggtcttcagggaggc

SEQ ID NO: 13929 - DNA, 119 bp, homo sapiens
tgaagtgaccttggaggcgggaggcgcggagcaggagcccggccaggcgctggggaaaggtaagatcctagggtggaaccgcagggtaggggccgcacgtgaccattttggtgtggacc

SEQ ID NO: 13930 - DNA, 119 bp, homo sapiens
cgggcaccactgagacctcacctgagctcggggttgtcgatctccacagtcaccgtgtgctgtgtgttggggggttcttaagcacaaactcaaagaactcggcgacccccagcgtggcg

SEQ ID NO: 13931 - DNA, 119 bp, homo sapiens
aggctggcgatgctctcggccttcgtgcgttcccggtaggcggcgatgacctgtaggtcccgcaagtgcgtgtgcggacgctctgctgcgccagcagacaagaggacatgggtggacag

SEQ ID NO: 13932 - DNA, 119 bp, homo sapiens
gacagctgaacaaacccttaccaacacgctcgtcccgcgccggcccaagtctcccccggcctcctgcagcgcacagacctcatccgctccagcttacgcctgcgggtggcatccgactc

SEQ ID NO: 13933 - DNA, 119 bp, homo sapiens
acccaaaatgaggagctgtggagccattccttggtggaaggcaaggcggcaggtgggcggcacttactgctgggccggggaggcctgagagccatggggtagctgtgaagtaggcctgg

SEQ ID NO: 13934 - DNA, 119 bp, homo sapiens
ccaagcagtgctgagtcggggaccgcggggaggccgccagctgggaaattgacaactggaaggaaagaggcacaggtgaggggctcagaagcttgccagtccgtccacaaagctcccaa

SEQ ID NO: 13935 - DNA, 119 bp, homo sapiens
gatccactgtgcttaaggggggacagagggttttcttgcaagtaattgactctggaattctgaaggaggcgtggggggcctggacttacccctggtcccacaggtgagttctgcggggc

SEQ ID NO: 13936 - DNA, 119 bp, homo sapiens
agcgagaactcgaggtactggcgctggcgggcctgggaggaagcacagtggggtaggagagggaatgtgcagcctgtgttgggggcagtgggcccctgaacccccacgcagtcaggtct

SEQ ID NO: 13937 - DNA, 119 bp, homo sapiens
agaaagatcccattcagagctaaaggtggggaacactcagggaaggcacgagagcagtgagtgctgccaggccaggtctggctcttacgctctgcggggtcctggagaagcgggtgcag

SEQ ID NO: 13938 - DNA, 119 bp, homo sapiens
gagggctctgggggtgccatggtacagccgcaacctggaagacaggacccagagaacagtcgtcagccagtgcgcacttctcagaaggaaagcacatggaggcctcagccaccaccacg

SEQ ID NO: 13939 - DNA, 119 bp, homo sapiens
gagggcactggcctggcggaccgcgccgggggagcacttccgctggacgcacgcacttccggccccctgaaccaatgagagtgcgaccgagatgttccactcgctggcgtccgggccgc

SEQ ID NO: 13940 - DNA, 119 bp, homo sapiens
tggtgatctccggtagcactcgggccggcggacagtgagggcgcggtaagctccccgcaaggagcccctagaaactggtcgctttttgtcctagatataggggagtccaggatggtgtg

SEQ ID NO: 13941 - DNA, 119 bp, homo sapiens
cccctacatcgacaggctctgttccggctaccttagtctgggcgggagggcgagagcgagggcgcctggagaaacctcgcccagcggcggttgattagtcaggcctcagaaagatggcg

SEQ ID NO: 13942 - DNA, 119 bp, homo sapiens
tcctcggagcaggcagagcagccgagccaggtaaggggagtgggactgccccgctgtgcggcggagacccggctggagggggcgctcagcatacggctgggagccgggtagggaccccg

SEQ ID NO: 13943 - DNA, 119 bp, homo sapiens
cggtcacctaccacttgctgggcccccaggaggaaggcgagggggtggtggacgtcaagggccaggtgcgatggaggtgcaaggcgaggaggagaagagggaggacaaggaggacgagg

SEQ ID NO: 13944 - DNA, 119 bp, homo sapiens
ccgccctcccactagctcgcaggcgcaggcgcagggcagggtcccctcagtttgggtgacggaaggggctgtcgcagcgcccaaagatgacgtgttctgccagcgccacgtcatgagga

SEQ ID NO: 13945 - DNA, 119 bp, homo sapiens
agtgccggcccactgaagccgtggggacgcgcccagcggagctaatcaggtgccactgaactgaagggggaactagaggagaagagggtgactgggcggggagcagctgcgggagaagc

SEQ ID NO: 13946 - DNA, 119 bp, homo sapiens
gaccgagaaatccaagatatcaaaaccaagtatgagaaaaagcttcgggatgaaaaggaatcaaacctgggctcaagggagaaacaggcatcatgaggaagaaggtagcaggctgttct

SEQ ID NO: 13947 - DNA, 119 bp, homo sapiens
cttacaatatctctcacttctctctcatctcacccccaggagaagcgaatttatgatctgaaaaagaaaatcaagaactagggaaattcaagtttgtgcttgactacaaaataaaggag

SEQ ID NO: 13948 - DNA, 119 bp, homo sapiens
actagaattaagatataaaacattatttttgtcaatatttatttttaaacaatctctggaagaaaagaatttaaaaacaaaaggcttaaaatgtattaatacctcaatgttaataattt

SEQ ID NO: 13949 - DNA, 119 bp, homo sapiens
atttttaagcattttatgctgtttttttaaatatagtcactactatatgtacttgcttttatgttacatagcttttaatatataacttaatctctgagatgttatttggttgagaggcc

SEQ ID NO: 13950 - DNA, 119 bp, homo sapiens
actcaagcccagtgaaccagctgggctctgagccaaggaactgcctcaagctgtggactgcataagcagaggggtacctgggcttgtcgactggctccagcagctcgagggtgcagagg

SEQ ID NO: 13951 - DNA, 119 bp, homo sapiens
gaggtcatgactttcagtctgctgtttagcaaaatttacaaacacctagaggtaagagaagagcgagataggtagatatttccaggaaaacagcaccctacacccacctacccactttg

SEQ ID NO: 13952 - DNA, 119 bp, homo sapiens
cgttgtttggaggtcaggtacctgggggggcgggaggcccccggcaccctcggggcactctggcagcatgtgagcttctccctggtgctgcacctgcaggatggtgaagggttgacctg

SEQ ID NO: 13953 - DNA, 119 bp, homo sapiens
gtccatttctgcttctggaacagctgggtgatgtttggggacacagaaggagtcttccagggtgttgagtgccacaggggtactccctcatggaagacaagaaaatattccataatcag

SEQ ID NO: 13954 - DNA, 119 bp, homo sapiens
gcatcacaacaggacacacccagcaatactgggagatggctgccagacggaacccaagtatggcccgtcagtccttaccatccaggacttgttctggagttaggtcatcgacgtgggct

SEQ ID NO: 13955 - DNA, 119 bp, homo sapiens
ggacacgtggtggagaaacccttagacgagcagctgcaggtcccctgcaacagatggatgggatgactgcaagatgcacatcccttccatgacagcctctccctgatgccagctgctgt

SEQ ID NO: 13956 - DNA, 119 bp, homo sapiens
gggaaatgatgcttgagagcactgcagtcatgcttacctgcaattctctccgggtgagtccggagggtgccatgaattgggacaagatgtgtagctctgtccaaatacggccaaggtgc

SEQ ID NO: 13957 - DNA, 119 bp, homo sapiens
caattaatttaacactttatataagaaataaaacatttattttcaagtcttacatatattacttaaaatgatacaaaattcagtttttaatttttaaattgtattgctatttcaagcta

SEQ ID NO: 13958 - DNA, 119 bp, homo sapiens
aaaagtagatcagtttatgcatgaaattttcaaatataataccttgtatatataatatataatatatatatgtatatattattttttttttaccttagcacctttttcaccttgtcttc

SEQ ID NO: 13959 - DNA, 119 bp, homo sapiens
cctctgcacctgcagctccaggaggaccctatagacataagatttattgtaaaatatgtatcacatataaagtaatgttaatgagcacttgtttacaaacactaaactttagtttgtaa

SEQ ID NO: 13960 - DNA, 119 bp, homo sapiens
atacttactgcagggccaggttccccaggaggaccaggatctccaggaaaaccaacaggaccctagaatacgttttgaaagaaaaagaaataaatgaaaaataaatttttataaaatta

SEQ ID NO: 13961 - DNA, 119 bp, homo sapiens
ttaccccacaaaattgactggttatgggacagtatacaaatttaatcagggagctgtaaggatttagattgctgaacaatgtggaatactcacagcaattccaggggcaccaactggtc

SEQ ID NO: 13962 - DNA, 119 bp, homo sapiens
cttgaagacctgggggaccgggagggccctgcagtgagataaaaataagtaatttttaaagtgaagccaaagagcctcagccatatgaaacagaacatttagcctaccaagatcaaaca

SEQ ID NO: 13963 - DNA, 119 bp, homo sapiens
attgaataaaaagtaataacgtgtacagggtagcagcataatatattttctcctagacattacttacagagcacctttctctccagctggaccaggaggaccctgaggtcccgggcgcc

SEQ ID NO: 13964 - DNA, 119 bp, homo sapiens
ctggtaaaccaattgggccagctgtacctgctgacccacgttctcctggtgagccctagtatacaggaaagaagtattttgttattaaagaaagtaatactggcttaagaatcacttat

SEQ ID NO: 13965 - DNA, 119 bp, homo sapiens
tactaacctcatataatcatttctaaaacacatgtaaaatctatttttaaagataatgtaaagaaatttaatgaccaggtagctgttacttacaggaggcccatcagcaccaggaagtc

SEQ ID NO: 13966 - DNA, 119 bp, homo sapiens
cagcaagtcctggttttccttgtggtcccttatagagaaaaaaaaaatattaaaaagataaaaataatttaaaaagctttaacgtgtacatatactatgaatgaaattcttatcctgag

SEQ ID NO: 13967 - DNA, 119 bp, homo sapiens
actacatagaaaattgtgagactgtcgattttcttatagaaagatagcatcttccccccattatttcaaggagctgcagtggcttagacttacctgaggtcctggattcccttgttgac

SEQ ID NO: 13968 - DNA, 119 bp, homo sapiens
ctggaggcccaggctccccttggggaccctgccagaggaaaatataaaaagtttttaatgggctatattcacaatagatttttgttcttctcaattggaaaatacctctacccaccctc

SEQ ID NO: 13969 - DNA, 119 bp, homo sapiens
gctgcgcgaattggcggcccggccctccttggtcacgtgttgggagacagcggcgtggcggcggcggtgcggtagcgacggcacgccgtagggcggtcagaaggtttccggttccggtg

SEQ ID NO: 13970 - DNA, 119 bp, homo sapiens
taacgttcgggctccgtctcaggggctgaagtttgtgaggtgagtagtggccccgggcccacagagggtattccagtccgcgccactgtggccggggactcagtccaaggggaggaccg

SEQ ID NO: 13971 - DNA, 119 bp, homo sapiens
atgcggtcgccatggtgactgaggaccagtgaggcgggatggggttgagaatgggggtgggggtgtggcggggctgaggcactgagagaccggaaagcctggcattccagagggaggga

SEQ ID NO: 13972 - DNA, 119 bp, homo sapiens
aacgcagcggcatccccaggctccaggtaagggagcgggggagctgacagttctgaagggagggggcgggccattgtctggtgctggctctgccctaaagagggggctgacagaggggt

SEQ ID NO: 13973 - DNA, 119 bp, homo sapiens
gaagttgggaagggatctgtggatgagatgagatgacttccactctctctgtctccccatagccacaggtcgctccacaaggctgtggtaagtggggacagcagtgctcatctggtgga

SEQ ID NO: 13974 - DNA, 119 bp, homo sapiens
agagattcagctgttccctgaccctgaacctgttcgcaacctgcagctggcccccacccaggtgggaaggacctgaccatcaaatggccttccagtggggctggccttgggggcctgtt

SEQ ID NO: 13975 - DNA, 119 bp, homo sapiens
ctcccttcctccttcctcttcccactttcagctcttttgaaggataatttttactttctctgctctcttggaactcctggaagcaggacatggagcgggggaacccagagtgggcatgt

SEQ ID NO: 13976 - DNA, 119 bp, homo sapiens
gccagtggccccatgagcaggagccttcggcctcagagccgcccgcaaatcagtgagtgtaggaccactaccaggggaggtgcaaaggctctggaagacttttgggcaggggtgggcat

SEQ ID NO: 13977 - DNA, 119 bp, homo sapiens
tgcccatcccctccccatcccttaagggggtggaatttatactttggcagtgtctcctggcgatctctttggggccccgaagcatcaggggccgtggtggtagaagggggtgctgggga

SEQ ID NO: 13978 - DNA, 119 bp, homo sapiens
ggaggagaggagagtggggagtatgtctgcactgccaccaatacagccggctacgccaaaaggaaagtgagctaacagtctatggtgagagctggtggaggaatggtttttattgacat

SEQ ID NO: 13979 - DNA, 119 bp, homo sapiens
ctccagattgcccggtctcagcattcagatagtggaaactatacatgtattgcttcaaatatggagggaaagcccagaaatattactttctttcaattcaaggtatgtattgtccacta

SEQ ID NO: 13980 - DNA, 119 bp, homo sapiens
ggctctgttttcatctcagattattctgtcttgtagcccatggtaactggagtccttggagtggctgggaacatgcagccggacgtgtaacggagggcagatgcggcggtaccgcacat

SEQ ID NO: 13981 - DNA, 119 bp, homo sapiens
catgtgataaccctcctccctccaatgggggaagagcttgtgggggaccagactcccagatccagaggtcaacactgacatgtgtcctggtgagcctcttgatttctggcagttgaata

SEQ ID NO: 13982 - DNA, 119 bp, homo sapiens
gtgctttttatacctttgatttcttttctgctcagtccaacccctgtcacaatggaggtgtttgccattccggtgggatgacttctcctgttcctgtcctgccctcacaagtgggaaag

SEQ ID NO: 13983 - DNA, 119 bp, homo sapiens
tgcctgcctatgaggctgtgtgtgacccacctgcagtggtgagctcagccagtcactagcaagaaggcaaccagccaacaggtcccttctcattggggatgggggtaggggggtgaatg

SEQ ID NO: 13984 - DNA, 119 bp, homo sapiens
ggaagacactgtctcctggggagacctccatcttacctctgaggtcagcctctgctcaggtgcagcgtccagcagggggcctgcgttctgcttcccagtctgggagaagagagtgtctg

SEQ ID NO: 13985 - DNA, 119 bp, homo sapiens
tgtgtaggtgtgtgtgtgtgtgtgtgtgtgtgtgtgtgtgtgtgtgtgtgtatgcgtgtatgtatcccggaggctggagccacagcttccctgatgaaccatggaggcgggccagctcc

SEQ ID NO: 13986 - DNA, 119 bp, homo sapiens
tgagctgcggttgccctggagacccacctaagcctctttgcctggagcagcattatctgtagagggagtgctgatctgacacaaaagcctgaggcgacccaggcccaggcagtgaggga

SEQ ID NO: 13987 - DNA, 119 bp, homo sapiens
gtgttcatcctgggcttgccctcccgcatcgcctcagtgtggtttgggcccaaagaggtgtccacagctgtgccaccgccgtgctgggcaatcaggtaagtactggagtggtaggtgaa

SEQ ID NO: 13988 - DNA, 119 bp, homo sapiens
gagtttacatctggcaagatttttagagagtcgtttgaggtagcagaactccaaaaaagtgtgtaatatcaacttcaccttgtaggtcttgaacagctgtcaacaataaatgcaggaca

SEQ ID NO: 13989 - DNA, 119 bp, homo sapiens
ggtggacccgcgggtggctgccagggcaacggcaatgtgattgggcatgcaatctgagaagatctccaggaagacttccagaatctctctgtgggagtcaagagggagactgtaaggac

SEQ ID NO: 13990 - DNA, 119 bp, homo sapiens
aggcccaagcccttcaggcccagcaaagagagcaggagctgacacagaagatacagcaaatggaggcccgcatgacaaaactggtaggtggtagggaaagattagagcctgggcactag

SEQ ID NO: 13991 - DNA, 119 bp, homo sapiens
ttgctcagagctcttgggcgatgcggctgggttggacagagcagatgctggccatgcctccactggggaatgcacagggcctggggtctgtggggacgtgaggaacggtctgacgatga

SEQ ID NO: 13992 - DNA, 119 bp, homo sapiens
cacacccagcatcagcccgcctccacctggaggcccaccagcacctggcccgggacccaccctctctccgaacctgtcgctgtgccccggacggtaggaccggtgatgggtctgaaagg

SEQ ID NO: 13993 - DNA, 119 bp, homo sapiens
atcccttctcacgccctaagccctccaccctgaggggatctctgcccccaccacctcctacccaggcccccagtgcccaccccgcactcaccgcccacggcagcccctccgtcgatttc

SEQ ID NO: 13994 - DNA, 119 bp, homo sapiens
cacgggacacctgccccagcgggcctggcgctgcgtctgctgtggcctggccctgccggagccgagccagtcggggctgcgtgggggaggattagctcaaggtgattaattgaggcggc

SEQ ID NO: 13995 - DNA, 119 bp, homo sapiens
gaccacccctggccagggtccgggccctgctgggggttgagggtggggagtatgcatggcctgagctggtgttgggactcaccaggtgctgggtgcccgtttcacgaaggccgcaaagg

SEQ ID NO: 13996 - DNA, 119 bp, homo sapiens
cagagctgggttgtctgaaggccagctgctgggtgtaccctgcagagaagagagaggaacccccaaaaggccggggctgagcagagggggcacgccagaaagggcaggggcggggtgca

SEQ ID NO: 13997 - DNA, 119 bp, homo sapiens
cacctccagaatgagatggaatttggctccatccatgccctcctgggacccatggggtcggggtcaaggtgtctcaccttgcaggagaattctggtctcagactcggtgtccgggactt

SEQ ID NO: 13998 - DNA, 119 bp, homo sapiens
ggtcactgaggtctgcaggtgggatgtcctctttctgcactccttctgcagggtgagtgagagataccgtggctctagctccctcccgccctatcctacctcactaaacccaggtcatt

SEQ ID NO: 13999 - DNA, 119 bp, homo sapiens
gaacaacagagtagggtagccgcaggtcgatgaagaagtcctgcattactgtgacctcgaaggggtctgcacacagatccctgctcgggcagagacagaacacggagtgtcaaggtcgg

SEQ ID NO: 14000 - DNA, 119 bp, homo sapiens
ccccctgtccccaccccgtgggacctactcctggccaggcccaggtggctggcccgcgcgtgctgccgcgcagctctgtgatgtagttgcagcagtccaggaagaccttcttgcacgcc

SEQ ID NO: 14001 - DNA, 119 bp, homo sapiens
tggcccgcgcgtgctgccgccgcagctctgtgatgtagttgcagcagtccaggaagaccttcttgcacgctcgcccagggagatgaaacgggtccggcgctggcacgagaacctcatgg

SEQ ID NO: 14002 - DNA, 119 bp, homo sapiens
ggttctcccgcatgccgtcctcgcagcacttgcgcagctccttggggtacttgccgactgcgggagcactgttcccccaggccacaccctcagccgggggccggcagcaggagggacgc

SEQ ID NO: 14003 - DNA, 119 bp, homo sapiens
tcctccctctctggctcctgcacggccgggctggggtctcctggggtggggctcgggggcaggagtgggaggaaaggctcccacctttgtccattcgcttctccgtgagctgcacggaa

SEQ ID NO: 14004 - DNA, 119 bp, homo sapiens
cggcgtcggcgggcggctggctgcgggcactgaagttctgcagggcaggcggaccgagaagaagatggagaggcacctactaggtgtcctcggttcacccctcacgatcgtgtgaggtg

SEQ ID NO: 14005 - DNA, 119 bp, homo sapiens
ggtgtgtctttctctgtctctctcgatctctttgcctctcctaagcctgtgcccctgcttcccctggggcccctctggctggcacctcaatgttgaccatgaccgtccggcccacgggt

SEQ ID NO: 14006 - DNA, 119 bp, homo sapiens
agcagcttgtggttgacggtgaagatccgatagagaactggggagagacaaagaggcctcgtgagacccagcccgcccacgccggtgccccgccctctccagccgcccccagcctcacc

SEQ ID NO: 14007 - DNA, 119 bp, homo sapiens
ccaaagcgcttggtgagatctacctgcaggaggttccgcagcaggtccttcaagtcagagctgaagtggaagggaagcgcacctggaggaaggggtacaaggacagggtgggaagctgg

SEQ ID NO: 14008 - DNA, 119 bp, homo sapiens
cgtgcactgccacctgtggacaccctgacagcctgatgtgatggggggtggcccgcttacctgaaccttcgatccgccgtaggtgtgagaacatctccccgccgggcacgtactccatg

SEQ ID NO: 14009 - DNA, 119 bp, homo sapiens
ccatcgctggagttggaagccatcactcagtcctgttctcagggcaccggcactacggtggctgggaagctcatgagacctgccgtgtctgttcggctgtctgtccccagaaccctgcc

SEQ ID NO: 14010 - DNA, 119 bp, homo sapiens
acagcccacctcgtgactgggggctggcccagcccgccctatccctgggggagggggcgggacaggggggccctataattggacaagtctgggatccttgagtcctactcagccccagc

SEQ ID NO: 14011 - DNA, 119 bp, homo sapiens
ggaggtgaaggacgtccttccccaggagccggtgagaagcgcagtcgggggcacggggatgagctcagggcctctagaaagagctgggaccctgggaacccctggcctccaggtagtct

SEQ ID NO: 14012 - DNA, 119 bp, homo sapiens
cactcagggaggggaggatgtcaatgacaggtactaagatggattaaggtcaggagccgcagggtggtgctcattggagctaacgcagtccaggattcacccccacctttccccctaag

SEQ ID NO: 14013 - DNA, 119 bp, homo sapiens
ataagcacatacactacatataatagatgatgttatgttacacatgacataaaatatatattttatattcattatatattgtgtcacataatatatgaattatacacttttaaaataca

SEQ ID NO: 14014 - DNA, 119 bp, homo sapiens
tagaattgtaaattattgtataaatatgcacacgatggattacataaactctgcttttttttttttttggacagggtctcactttgtctcccaggttgaggtgctgtggcctgatctca

SEQ ID NO: 14015 - DNA, 119 bp, homo sapiens
gagggaggattccggattcagcccagcccctgcttcctaaacaactatggggtggggcagggaacactgaaaagaaatgtacgtgtgagcatctgtaagacccggtgacggcagggctg

SEQ ID NO: 14016 - DNA, 119 bp, homo sapiens
gtggggcagagagtgggtaactcagtgagttttgtgttttattttttttattttttttttttttgcggggacgccctaccaaggacactgggtccatgtcccggtgcgggaccacctca

SEQ ID NO: 14017 - DNA, 119 bp, homo sapiens
gtgagttttttgagtgaaagaataaataaaggatatttttcctaaggttgacatggaccttatttattttttatttatttatttatttagagatgaagtctcgctctgtcacccaggct

SEQ ID NO: 14018 - DNA, 119 bp, homo sapiens
caatggtgatctgttatggcagtccaaggaaattaatcaagcagttaaggccaactgctggcctaattgtaggatgggggtgggaccgggggctatggaggcaggagggtactgctaca

SEQ ID NO: 14019 - DNA, 119 bp, homo sapiens
cagcgccagcgccaggtggcccacctcgtcccgcagcgcgttccaggcagcacgctgctcctcctcctttggcgctgctgcgcctggtggcgccagtactccagcactaggcagccgcc

SEQ ID NO: 14020 - DNA, 119 bp, homo sapiens
agcgacagcagcagaaacagcagcagcagcccccagggggccaggccaaggcccggcctgccaagaggaggcgggcacgtccccaagaccctccacagatgtgtgtccagaccctctgg

SEQ ID NO: 14021 - DNA, 119 bp, homo sapiens
cctccgcctcctccagctgcgggacccgagagggggtagggatttagatactcacacccatgcctccgttcctcacagtgatgggaccagtggaggccgcgcctgaataccgcgtcatc

SEQ ID NO: 14022 - DNA, 119 bp, homo sapiens
gtggatgccaacaacctgaccgtggagatcgaaaacgagctgagtgagtgctggggggcaggcggagacgccccgtgtgacgtccctcacgccccctctcccttccccactggcctttc

SEQ ID NO: 14023 - DNA, 119 bp, homo sapiens
gcgcgcgcggttgctttgctgttacctctgtctgtctgtctcacacagattccacccccgttttccgttctccaggatctgcggcggaaagcggcccggctggtggccgccaagtgcac

SEQ ID NO: 14024 - DNA, 119 bp, homo sapiens
actggcagcccgtgtggacagtttccacgagagcacagaagggaaggtgaggagggaaaggtgaggggcgccgggcgtcttttcctctgggcctggggtgtctctgcagggagaccctc

SEQ ID NO: 14025 - DNA, 119 bp, homo sapiens
cggtaggcatgggggtcatggaggggagaagccggcgtcctcctcccagccgactccctggcgccgccccccacccgtccccaggtaccgcaagatgaaggagcggctggggctgacgg

SEQ ID NO: 14026 - DNA, 119 bp, homo sapiens
agatccggaagcaggccaaccgtatgagcttcggagaggtcagactcccagagcgccctcctcaacccccagccagccagccgccaccgccctctgcctcctgccaccgcccctcctct

SEQ ID NO: 14027 - DNA, 119 bp, homo sapiens
ccactgaagggacacagaggtccagtccttctgaagggctaggatcgggttctggcagggagaacctgcctgccactggccccattgctgggactgcccagggaggaggccttggaaga

SEQ ID NO: 14028 - DNA, 119 bp, homo sapiens
gctcctctcccctcaaggcccctgacccctgacctttgaccccctcgcatttcacgggctgcgggtggcttgcttccttcggggcatcgtgaccggctccagcccgacgcgcctccggc

SEQ ID NO: 14029 - DNA, 119 bp, homo sapiens
ctgcggccgcccgaccccgcccctcctatctcggcccgcctgtctgcccttcctctcagggcccgcgggcgcccccatgcagcggcgcgggccctgggcagcccccggccctggccccg

SEQ ID NO: 14030 - DNA, 119 bp, homo sapiens
tgctggggctgcgcctctggctgggatttgtcctggatgtggccggtccgaggctccggttgcagcccgggcccagcacacagaactctgggggagatgcacgcctggtgccgccctgc

SEQ ID NO: 14031 - DNA, 119 bp, homo sapiens
agttcaggggaacaggggctgctccccggctctgtgtccttcttagggctctcctcgctgctgctgccggagaaaggacaagtgcaggtcagacactcctcctctgctgctccttcctg

SEQ ID NO: 14032 - DNA, 119 bp, homo sapiens
agtccagggggctcacagaggccctcagctttggggaagcccatgttctcctggtggggccagcctctccggccctggctcctgggtttccttgggggagttctctgtggacttgctgc

SEQ ID NO: 14033 - DNA, 119 bp, homo sapiens
ttggagggaataaagtttcctctttgttccagatgaatattttataatactgaactttacagttttatataattccaaaaaatataaagtaagcttacactctgccagcttctgcttct

SEQ ID NO: 14034 - DNA, 119 bp, homo sapiens
tttctaagttaccatgctctgtcgctgatattgtggcagaagggatagaaagaaaaaaacaaaagtagatttatttttattataatgccttgtattttaatatgtacatgtataaggta

SEQ ID NO: 14035 - DNA, 119 bp, homo sapiens
gatcaggatggtcaccagcagggcgggcaggatgcttgctgggtatacccaccacgggttcttcccaaaggggccacgaaccagcctcggtcaggccgcgttggctgagtgggagcaaa

SEQ ID NO: 14036 - DNA, 119 bp, homo sapiens
ttgggaaaagtccctagagggcagctgagaagggagaagtctaaaggacagcagggtcactgggaggccggggtgggcaccttcctgtccagataagttcctccccgatttcatgcatg

SEQ ID NO: 14037 - DNA, 119 bp, homo sapiens
gctggcatctctccatcatccccgctgcttgttccgccggccccgccactgccagccccgccgccactgcaccaccaccaccacctccattgcctcctccaggagctccgccgcctcct

SEQ ID NO: 14038 - DNA, 119 bp, homo sapiens
tcatccccgctgcttgttccgccggccccgccactgccagccccgccgccactgccaccaccaccaccactccattgcctcctccaggagctccgccgcctcctcccacagagccattc

SEQ ID NO: 14039 - DNA, 119 bp, homo sapiens
atctggcccagctctgctagggagaacacagatttcctggaagagaagggggatgaaggagagtgggtccccagagcacccctcacctctccaaccaaaattatgaaatatcttaaaag

SEQ ID NO: 14040 - DNA, 119 bp, homo sapiens
atggcaatgtggccatgtcacagctgccacagcctgaataaagctgccacagagcggcagagcacacaccacacagacgtccgtaatttgcactctgccgcatccgcaggtcttccgtg

SEQ ID NO: 14041 - DNA, 119 bp, homo sapiens
gagtggtgtagactcgggccagcaccagggctccgggcaggactgcgatctgggaggagaatcagaaggacttggcttcgacagccttgctggtgtagcgaagcctcttgggttagttc

SEQ ID NO: 14042 - DNA, 119 bp, homo sapiens
cctgcatgtcccatgcctaccagcgtaaggcctgactcacttgtggtggagactgacttcccaatgtcactaaggagcggtggatgggcttcttggtttggtggcggtgcctcctcagg

SEQ ID NO: 14043 - DNA, 119 bp, homo sapiens
tggtttggtggcggtgcctcctcaggaggacgtaactgaccctctcccggagctctggccgcaggagacatcctcaatctgcttctcaatgacatcatctgtgtggaaaacatacacac

SEQ ID NO: 14044 - DNA, 119 bp, homo sapiens
gagttgacacctgaccaagccagctaccaggacgcacctgcgggaagagaggcgcaatgacagggcctggacttcctcctctcgctccagctgcaccagcaccacaactggcccgccac

SEQ ID NO: 14045 - DNA, 119 bp, homo sapiens
gcgaagagctgagtgccacaatgcgaatgggccgctcaatctgggaggagatgtagcgcattcgggagcgatcacttctaagacaggctggaaagagggagggagggagggtcactgca

SEQ ID NO: 14046 - DNA, 119 bp, homo sapiens
aactgaagaaagcaattcacttacttcttctgagccaaagggcttgggcttcagagcaggcacatgcactcttcatagcccttacgctggcgacggaaggatccatcaggaagctgaca

SEQ ID NO: 14047 - DNA, 119 bp, homo sapiens
aaggatccatcaggaagctgacagcgtttattggccataaagtggctcccttgggtaaaaaccaggtccccaagtccagaacctgccgtggagccagtgcctgggaatgtgaaagacaa

SEQ ID NO: 14048 - DNA, 119 bp, homo sapiens
ggtcggcggaccggcccgcgggcgcctcctcctggcggcgccggtgctgctggtgctgctgtgggcgctggggcccggggccagggcagcccccagcagggcacgatcgtgggcatgag

SEQ ID NO: 14049 - DNA, 119 bp, homo sapiens
ctaactccagccctgtgttttttcaggggaaggtggaggtggaggcagggaaggagaacatgaagtttggacgggcgccttctcctactatgggactatggccctgacctcggtcccct

SEQ ID NO: 14050 - DNA, 119 bp, homo sapiens
ggggagggagcgagcggaactgcgcctaggaggccgagggaggaggcgctccgcagaccctggcgcgcccggagaagctcaaactttggcagggtaaggatttttaggggctcttgagc

SEQ ID NO: 14051 - DNA, 119 bp, homo sapiens
ggctgtgtccaggaggtagatgggcttgaaatcaattctgcttgctgcatatctgatttcctagagcccctcgtcaagtgaggagacatcgtcagtgctgcagccggggatcgccatgg

SEQ ID NO: 14052 - DNA, 119 bp, homo sapiens
agaccagaggactggctgactccgggcagggctccttcaccggccaggggatcgccaggtaactgaccacctcagtccctaccttggcctgggggacactgttgcagaaagaaggtagt

SEQ ID NO: 14053 - DNA, 119 bp, homo sapiens
atcagttagatgatttgcaaatatgttttcccattctgtaggttgtttttttcactttcttgaataatctaaatttagtttttgacaaaatcttgcttttatagaaatctataccatta

SEQ ID NO: 14054 - DNA, 119 bp, homo sapiens
acttaagtagctgtttttgaaaaaataaatactgtttaaatttagatataacagtattccttataaaaattattttatggttttaaaaaatatttaaattattgtataaacatttcttt

SEQ ID NO: 14055 - DNA, 119 bp, homo sapiens
tataactgcttccataagccagcaggtttccattgcaatgcatgctacccaccctgagagcatccatcaatcaggctgctccaagagcatggggaaggtggccagcatgggatggctaa

SEQ ID NO: 14056 - DNA, 119 bp, homo sapiens
aaataaataaataaataaaagaatataacaaaaacactttaaaagagaacaatgcattttaaatatattcctgaaataatattccttagaaaagatacagggtatttaattacctagat

SEQ ID NO: 14057 - DNA, 119 bp, homo sapiens
agcttgagtctcggcgcccgccgtagacgtcgtgacagaggcggcccgttgccttggagccagagagaccagctaggcctgcacggctgtggagagatcctgccacgggccttgttcac

SEQ ID NO: 14058 - DNA, 119 bp, homo sapiens
catgtcggtgctggatgcgctttgggaggatcgggatgtccgtttcgacctgtccgcgcagtgagtttcaagattcccgagggatcttcaaccctgtagagggcgccgccgtgcgcgtt

SEQ ID NO: 14059 - DNA, 119 bp, homo sapiens
atgacttcttttgggtggaggaagtctccaattctgaaaacaaaataaatttaacttttcaaataactaaacataaaaagaaaagtaatgtacaagacttgtataagagaaaagaactt

SEQ ID NO: 14060 - DNA, 119 bp, homo sapiens
tgctatcacaacttaaccttggtttcttcacataccaagaggtagccttgtctttttctgtcttctttgacaggagcctctgggtgctctttgagttctttagttgatggctcattgcc

SEQ ID NO: 14061 - DNA, 119 bp, homo sapiens
ggtgctctttgagttctttagttgatggctcattgccctcagagggccttcgaccagcagtctgagcaagccttccaaagaagcacttgctatagaaaaacagagtagaaaaaaatgag

SEQ ID NO: 14062 - DNA, 119 bp, homo sapiens
cccaacctctaatcctcaaaagtaggacggctcaactgaagacaaaaatcctaacaattaaaagtagctaggctcgcttaccacaggattcttccccattctgcgtttagccggcctcg

SEQ ID NO: 14063 - DNA, 119 bp, homo sapiens
gcggccgccggcccccaagcacctggcgccccacccctcccggctcggtcgcgcgcgcaggcgcaatgctcatcgggccgcgccgcctggctagtaccccgcgcgcagcgccctgcggg

SEQ ID NO: 14064 - DNA, 119 bp, homo sapiens
gggtccaccctgccaactcgggaggtccccgtcctcctggcctccttgctggagggggcaggctggtcacgcagctctgaggcgccgcgtctctttcaggtgccggtgagtccgggaag

SEQ ID NO: 14065 - DNA, 119 bp, homo sapiens
agcaccatcgtcaagcagatgaagtgagtgcccctgcctgtcccgaggcccctgggtctgggtccttcccacttccccacgaggcgctgattctgctctcctcggcctcaggattatcc

SEQ ID NO: 14066 - DNA, 119 bp, homo sapiens
gagatgtcggacatcatccagcggctgtggaaggactccggtatccaggcctgttttgagcgcgcctcgagtaccagctcaacgactcggcgggctagtgagcgcgcgggcagcgcggg

SEQ ID NO: 14067 - DNA, 119 bp, homo sapiens
ggtttactgcattaggcctgccagatgtagactgtccaccttctctcttaggagtacgtaatgcacctggtgacgctgcagtcagaggagagccgtcgggcaggcaagggctggtcttc

SEQ ID NO: 14068 - DNA, 119 bp, homo sapiens
ttcctggggttttcctggccctgctacactcagagacgctttcctcactgaagggcctgaaaaggcaaaatccccagtagttgtttgtggtgggctgccccagttgaaaagggctttgt

SEQ ID NO: 14069 - DNA, 119 bp, homo sapiens
gcggccgcccccttccttcctgggctcggcgggtgcgggaaaaagggtgaaagagaaacttggcgacctccggaggagttcgcgaagcgaccaggagcgtgttgccatcgtcctcaccc

SEQ ID NO: 14070 - DNA, 119 bp, homo sapiens
ctcctttcctgaaggatctagaaccctgactgggcatgccagtgtgggagtcagcaagcacgcggctatttttctcttgcagttttgcacatttgggagccggcagataggaagaggct

SEQ ID NO: 14071 - DNA, 119 bp, homo sapiens
aaattttaattactgtgatattgattatacaccttttttatagatgatttgtttaaattatatctggaaatagagttgatttactttcagacatgaactatacaaacaggatatattta

SEQ ID NO: 14072 - DNA, 119 bp, homo sapiens
acggcgttgcctgaagacttgaactttgggtgttccaaactagatcttcagtttggtgacgcaaaactctctcactgaggaaagaacaatattaaagaacatttttagatgaggcccta

SEQ ID NO: 14073 - DNA, 119 bp, homo sapiens
cctggcctcctggtaggcgccctggggccctctccctccccagccaccacctcagataagttacctcatctcgcttcgcgttcttccactaaagaacctggggctcccacgccgcacta

SEQ ID NO: 14074 - DNA, 119 bp, homo sapiens
cagcgccgcggccttccggggcagcgtgcgtcgcgacgcgggaaggggcctggaggcgggactaggagctcggagtcaaggggcggagcgccctttgctaataagccaatcagaacgtg

SEQ ID NO: 14075 - DNA, 119 bp, homo sapiens
cagtggggtctgtgctgaccgcctgctgactgccttgcaggtgaaattgccctgtggtccttggtggtctggccatcgagcggtacgtggtggtgtgtaagcccatgagcaacttccgc

SEQ ID NO: 14076 - DNA, 119 bp, homo sapiens
tgagcaacttccgcttcggggagaaccatgccatcatgggcgttgccttcacctgggtcatggcgctggctgcgccgcacccccactcgccggctggtccaggtaatggcactgagcag

SEQ ID NO: 14077 - DNA, 119 bp, homo sapiens
gtcgcggcccagcccggcgttacctgcagttcggcccgcagccgcttgttctccgtgtccagcttggcccgcggcggcccatggacaacaactcctggttcttgctgacgcgaaagatc

SEQ ID NO: 14078 - DNA, 119 bp, homo sapiens
ctccttcctgagccgctcgtactcggccgccgcgtactccagctctggcaccgacgagccagtggacttaagctggcccccagcagcccgcccgcgcccaccccgcggggcagcgaccc

SEQ ID NO: 14079 - DNA, 119 bp, homo sapiens
atgatggcggccctgtacccgagcacggacctctcgggcgcctcctcctcctccctgccttcctctccacctcttcctcgccgaacgaggtgatggcgctgaaggatgtgcgggaggtg

SEQ ID NO: 14080 - DNA, 119 bp, homo sapiens
aaggaggagaatacgctgaatgagaagcttttcttgctggcgtgcgacaagggtgagagttaggccccttctcctctggacgcccctgtcctccagacctttagtcctctcccccgcct

SEQ ID NO: 14081 - DNA, 119 bp, homo sapiens
tttttaatgtttttttcacttaatattttatatatacatttccatgtattgatgtagttagtccacattaaatttttatagaattatatagtttttgaaaaatacagtcagtagatgtt

SEQ ID NO: 14082 - DNA, 119 bp, homo sapiens
tatagcaaacggttcactttggagaattacttacaacacatgatcttaaatactttaaaacaatttaggaaacagccactaaaggaatgaaaaaaaaaatctattcttcaactaggata

SEQ ID NO: 14083 - DNA, 119 bp, homo sapiens
gagcgcaggcccccatttgtaggagtgagtcagctgacccgcccccggggttcctaatctcactaagaagactttgctgatgacagggtttcctgggagtccatgcgtgcctggagcag

SEQ ID NO: 14084 - DNA, 119 bp, homo sapiens
cagcgtctccagggacaggcagccaccatgagcctcagtgaggagcaggcccggagctttctggaccagaccccgattttgcccgccagtactttgggaagaaactgagccctgagaat

SEQ ID NO: 14085 - DNA, 119 bp, homo sapiens
aggcttccgtggctcagggaccccctgcctggcccgacccaggtcccgcagtgaccgccccaccctcactcttctctgcccaggaattttttgacgtgtggtctgtgctgatgggagag

SEQ ID NO: 14086 - DNA, 119 bp, homo sapiens
tcccagccgtactcgggcccacgcacgcctgatggccgggtgagtcttaggggaggggcccagggcctgccacacgcctctgtttccctgactccaactccagggcaggagagggaggg

SEQ ID NO: 14087 - DNA, 119 bp, homo sapiens
ggggctgtggcaggccaacctccctcagcccacaatccctcccacagaaggaggagctgccagggcccacacatttgacatctacgaattccacttctctgacctggagtgcaccgaac

SEQ ID NO: 14088 - DNA, 119 bp, homo sapiens
tggacctggtcaaatgtggcatccagatgtactacgagctgggcgtggtccgaaagttccagatcccccggaggtgggagacaccgcagggcgcatagtcaggtccctgaggccgccca

SEQ ID NO: 14089 - DNA, 119 bp, homo sapiens
acaggtgccgctctggcgggacttacacgcttgccgccggagccctgtgtcctctcggctcccccaggtctggtgcggttcctgttctccatcagcaaagggtaccggagaatcaccta

SEQ ID NO: 14090 - DNA, 119 bp, homo sapiens
ccacaactggcgccacggcttcaacgtggcccagacgatgttcacgctgctcatggtacgtggctgccaaatcaccagggttgtgcaggccctcctggtaccaagggcagcactcaagc

SEQ ID NO: 14091 - DNA, 119 bp, homo sapiens
gacgggcgcttggggcggggtctccacacttgctcccacctgcacctcccttgttccctgggttcaggagagagcgatgtttcagaagatcgtggatgagtccaagaactaccaggaca

SEQ ID NO: 14092 - DNA, 119 bp, homo sapiens
agaagagctgggtggagtacctgtccctggagacgacccggaaggagatcgtcatgtgagcgcgggcgggggggcacgaggggtccttccctcgcagggaccgggcccactcaccagct

SEQ ID NO: 14093 - DNA, 119 bp, homo sapiens
caagactccatctcaaaaaagaaaacacatataaaccacctgccctcaggagacgcccatcagcactcggcccggtttgtgtctgcagggccatgatgatgacagcctgcgacctgtct

SEQ ID NO: 14094 - DNA, 119 bp, homo sapiens
gccatcaccaagccctgggaagtccagagcaaggttagaacagagggccctccagacccagagtcagtgctctcagcacatgggactgccgggcgggcgggagcctcggatggcaacgg

SEQ ID NO: 14095 - DNA, 119 bp, homo sapiens
ggggccccaggagctgcctccctggtcactgttctcccgccctctgttcctcccaccagcctatgatggccggaacaaggcggccgagctccccaagctgcaagtgggcttcatcgact

SEQ ID NO: 14096 - DNA, 119 bp, homo sapiens
ctcatgccttgtcccctccatcctgacaagtgacaaagtctggctttgtgacatgtgtgtttgtttctttgtgttaaagggcctacaaagggagacatggaaatcccctttgaagaagt

SEQ ID NO: 14097 - DNA, 119 bp, homo sapiens
cctggagagggccaaggccggggaccccaaggcacagactgaggtgaggactgcggtgccggcagggactcgggacgcggcccccggcacaacaggcctggccacgagctccacagccc

SEQ ID NO: 14098 - DNA, 119 bp, homo sapiens
agggcacacaaggcctttgaccacatcctatccctcaggcatcacgtccgagaacgaacgggaggtgagcagctctcctccgagaccgacctggagagggccgtgcgcaaggcagccct

SEQ ID NO: 14099 - DNA, 119 bp, homo sapiens
tactggaagctcaaccccaagaagaagaagcaggtggccgtggcggagctgctggagaatgtcggccagtcaacgagcacggtgcgaggattcaccctgggcaccagccttccctgggc

SEQ ID NO: 14100 - DNA, 119 bp, homo sapiens
agtgcgccagtttctggtgggctgcagggcacgaggagatagtcaacttgtctgactgttaatccacccgtcccctgcagatggaggggcgcagccaggccccgtgcccaagtccctgc

SEQ ID NO: 14101 - DNA, 119 bp, homo sapiens
agaagcagaggcgcatgctggagcgcctggtcagcagcgagtgtgagtgcagcccctgccccgtctcaccatgcctcccagcctgcacctgcagggcgacctctccttcctgtgcgact

SEQ ID NO: 14102 - DNA, 119 bp, homo sapiens
gtgggggaggtccctgccagtgtttagaagagcctgactgtgttcagtgccttggagcagaaagccaggtcctgagtggctgaaataaaagcctctggtggaacctgcagcgctttcct

SEQ ID NO: 14103 - DNA, 119 bp, homo sapiens
atgaggatgcagacatgggaagacagaataagaactcaaaggttcgaagacagccaagaaagaaacaggaagaagtgacaagaaactgtgtctgcgtattgtcattgatcaacaacccg

SEQ ID NO: 14104 - DNA, 119 bp, homo sapiens
agacatagagcgggaactaatcaagaggaggaggaaggggaagaagaagaaccacctgcacaaggaggagaaaggaaatggtatttaatatcaggatggtaatgaggtgtgggtggagg

SEQ ID NO: 14105 - DNA, 119 bp, homo sapiens
atagagcaggaggtgagggagagagcagcccagagcaggaggaggccttgggagcccacgctggtcccgagctaagcctggcaggaagcgtaacacccaatgaccagtgccccaggtga

SEQ ID NO: 14106 - DNA, 119 bp, homo sapiens
aaaacctgtctgatggagacataaagctgctggtgaacattgtgcgagcttacgacattccagtgaggagccggcagtgaggtgagagccctcccaacagcccgagatgcagtgtgcag

SEQ ID NO: 14107 - DNA, 119 bp, homo sapiens
tcctggccttcattcagcacctcaggactgcgaagaaagaagagatccttcaaatactaaagatggaaataaggaagtattgtaagttccccaacctttgtgtggggttgtctgtcaga

SEQ ID NO: 14108 - DNA, 119 bp, homo sapiens
ttcctttttgtagcttctttagaaagcacatcttttaggatggagatagtagaaatgttgtcagatttaaaactccctctccttttctataaaattaatatattttttaaaagaatagc

SEQ ID NO: 14109 - DNA, 119 bp, homo sapiens
cctccgacccagtcagaaggctgcccgcgcccctcaaaagccagccccagctaccgcgcctaggtcctggctgcacaggcggggcgacagggcagtggcgtcctgcgtgacgtcagtac

SEQ ID NO: 14110 - DNA, 119 bp, homo sapiens
cagcctcgtcggattggcttcctgcgcgttggcgcaacggaagaggcggccggccgagggcgcgcctctctctggctggactgccgcggaggaggcgagaaggaatccgacgctggggg

SEQ ID NO: 14111 - DNA, 119 bp, homo sapiens
gcgcgcctctgctctggctggactgccgcggaggaggcgagaaggaatccgacgctggggggcttgctcggcggcagcgactgctgctgcggatgggagggggccggctcggcgcgccc

SEQ ID NO: 14112 - DNA, 119 bp, homo sapiens
gggcttgctcgggcggcagcgactgctgctgcggatgggagggggccggctcggcgcgcccatggagcgcacggcagggcttccgccacctccgtctcgtcggctggggagcaggcggc

SEQ ID NO: 14113 - DNA, 119 bp, homo sapiens
ccatggagcgccacggcagggcttccgccacctccgtctcgtcggctggggagcaggcggccggggacccgaagggcggcggcaggagccactgcggcgccgggcgagcagcgcgtcgg

SEQ ID NO: 14114 - DNA, 119 bp, homo sapiens
gccggggaccccgaagggcggcggcaggagccactgcggcgccgggcgagcagcgcgtcggtgcccgcgtcggggcctcggctgagggcacgaggcgggatcgactgggctcttacagc

SEQ ID NO: 14115 - DNA, 119 bp, homo sapiens
ggtgcccgcggtcggggcctcggctgagggcacgaggcgggatcgactgggctcttacagcggccccactcggtctcccgccagcgcgtcgaaagcctgaggaaaaagcggccgcgtaa

SEQ ID NO: 14116 - DNA, 119 bp, homo sapiens
ccatacctttgtcacagagctggccgccccagttggtctcacagaggcactgccagggctcattacagagccgtggacgcatcccgggtgtgggatgcacttatcacagtacaggcctt

SEQ ID NO: 14117 - DNA, 119 bp, homo sapiens
gccgccccagttggtctcacagaggcactgccagggctcattacagatgccgtggacgcatcccgggtggggatgcacttatcacagtacaggccttgccagccgtactggcacctgga

SEQ ID NO: 14118 - DNA, 119 bp, homo sapiens
tcacagagtgaagatgtctggctggaagcagccaggttgcagcctggggacacagccaaggccgtggtacccaagctgtccgtcatctcccacagtctgtcaggatttacatcagagcc

SEQ ID NO: 14119 - DNA, 119 bp, homo sapiens
gccaaggccgtggtagcccaagctgtccgtcatctcccacagtctgtcaggatttacatcagagccgcaagctggaaacggacattcgtgcaaagaagcgggttcttcggaaaggtgag

SEQ ID NO: 14120 - DNA, 119 bp, homo sapiens
ttgcagggagtccctggaagcactcctgcagagggctgtggcccactgccccaaagcagaggtgctgtgctcatgggcgccaagtccaagtggctggcaggggatgtgcctgcagcaag

SEQ ID NO: 14121 - DNA, 119 bp, homo sapiens
gagggctgtggcccactgccccaaagcagaggtgctgtggctcatgggcgccaagtccaagtggctggcggggatgtgcctgcagcaaggagcatcctggccctggccttccaggtggg

SEQ ID NO: 14122 - DNA, 119 bp, homo sapiens
ccacaggtgttcatgaagtctgtgaagctggagtgggtgcaagacaacatcagggcagcccaagatctggcgaggaggccctgcggcactatgaggacttccccaagctgtggatgatg

SEQ ID NO: 14123 - DNA, 119 bp, homo sapiens
gggtgcaagacaacatcagggcagcccaagatctgtgcgaggaggccctgcggcactatgaggacttcccaagctgtggatgatgaaggggcagatcgaggagcagaaggagatgatgg

SEQ ID NO: 14124 - DNA, 119 bp, homo sapiens
gtgcgaggaggccctgcggcactatgaggacttccccaagctgtggatgatgaaggggcagatcgaggacagaaggagatgatggagaaggcgcgggaagcctataaccagggggtacg

SEQ ID NO: 14125 - DNA, 119 bp, homo sapiens
gaacaggctgttttggagtcagcggaagatcaccaaggccagggagtggttccaccgcactgtgaagatgactcggacctgggggatgcctgggccttcttctacaagtttgagctgca

SEQ ID NO: 14126 - DNA, 119 bp, homo sapiens
tcagcggaagatcaccaaggccagggagtggttccaccgcactgtgaagattgactcggacctgggggagcctgggccttcttctacaagtttgagctgcagcatggcactgaggtgag

SEQ ID NO: 14127 - DNA, 119 bp, homo sapiens
cctcacccgctgtccttccccaaatagtgtctttatataactcagtggcaatgccgtagtccagcagggggccgccctgggcagcgcctgcctggccagctcctgcccgggagggcacc

SEQ ID NO: 14128 - DNA, 119 bp, homo sapiens
actcagtggcaatgccgtagtccagcagggaggccgccctgggcagcgcctgcctggccagctcctgccgggagggcaccgtcctctcccctccggagaggtcccggtcactgcctgcc

SEQ ID NO: 14129 - DNA, 119 bp, homo sapiens
ggatacgacagccccggccgaggggcggccgaggtggcccagaacaatctgcagacgggcggcggcgcgagctgctccatggctgcggcgcggggaacccccacccctcccggcctctg

SEQ ID NO: 14130 - DNA, 119 bp, homo sapiens
acgggcggcggcgcgaagctgctccatggctgcggcgcggggaacccccacccctcccggcctctgcccatttagcccagcgggcggctccgcctccaggcgccgccccggactggacg

SEQ ID NO: 14131 - DNA, 119 bp, homo sapiens
tacacacctccagctgtaacctaaccagagctcagcaggcccctttgctgctcctgggaacctcaggccggccacctgcaggagtgcccttggtgtgtgtcccagaggttctgtctgcc

SEQ ID NO: 14132 - DNA, 119 bp, homo sapiens
gcaggcccctttgctgctcctgggaacctcaggccgggccacctgcaggagtgcccttggtgtgtgtccagaggttctgtctgccctggggctctgcctatggggcccttccctacagg

SEQ ID NO: 14133 - DNA, 119 bp, homo sapiens
cgggccacctgcaggagtgcccttggtgtgtgtcccagaggttctgtctgccctggggctctgcctatgggcccttccctacaggtggtcctgcaggcctgggctccgcttcaccctca

SEQ ID NO: 14134 - DNA, 119 bp, homo sapiens
cctcaataaggtaggtgagctcctctggagaggggacagcagggggtggtgggggtgcttcctctaccacagctcgccagggctgtggaacactagcaagcggtggtccccagacacct

SEQ ID NO: 14135 - DNA, 119 bp, homo sapiens
gcttcctctaccaccagctcgccagggctgtggaacactagcaagcggtggtccccagacacctcctggggtctgctgtgagctgagaggccagagactccaagtccacagctgtgcgg

SEQ ID NO: 14136 - DNA, 119 bp, homo sapiens
agacacctcctggaggtctgctgtgagctgagaggccagagactccaagtccacagctgtgcggtaggcccctgggccagcttggcccgcaggagggcactggtctgccccacgacctc

SEQ ID NO: 14137 - DNA, 119 bp, homo sapiens
ctgtgcggtaggcgccctgggccagcttggcccgcaggagggcactggtctgccccacgacctctggccagcatagtgggcctccagcaggtgccctgtgccctccaccaaggccccca

SEQ ID NO: 14138 - DNA, 119 bp, homo sapiens
acgacctctggccgagcatagtgggcctccagcaggtgccctgtgccctccaccaaggcccccaggcttggtggaactccagcacttcctgggctttgtccagggcctcctcggccagc

SEQ ID NO: 14139 - DNA, 119 bp, homo sapiens
ggcccccaggctttggtggaactccagcacttcctgggctttgtccagggcctcctcggccagcacgatgcatcgggcaccactccaccacccagccaggcctcgccgtgattgtcgat

SEQ ID NO: 14140 - DNA, 119 bp, homo sapiens
cggccagcacgatggcatcgggcaccactccaccacccagccaggcctcgccgtgattgtcgatgaagggaggaccggcacggtgagcgcgaggctgccttcgggtgtgtccagcagcg

SEQ ID NO: 14141 - DNA, 119 bp, homo sapiens
ttgtcgatgaaggtgaggaccggcacggtgagcgcgaggctgccttcgggtgtgtccagcagcggcacctgcgggtgtgcagcaggttgcccgcggtgatctcacctaccagtgtggcc

SEQ ID NO: 14142 - DNA, 119 bp, homo sapiens
cagcagcggcaccgtgcgggtgtgcagcaggttgcccgcggtgatctcacctaccagtgtggcccagccagcgactgcataaggaaggcgaactcctccgcggccgtggcggtgcggtg

SEQ ID NO: 14143 - DNA, 119 bp, homo sapiens
gtgtggcccagcccagcgactgcataaggaaggcgaactcctccgcggccgtggcggtgcggtggctgggagcagatacaccccacgttgggtgctgtagcgtgggcccgggagctcca

SEQ ID NO: 14144 - DNA, 119 bp, homo sapiens
gtgcggtggctggtgagcagatacaccccacgttgggtgctgtagcgtgggcccgggagctccatgtggtgaagtgctcctgcgtgatgttggtgcggcgatcataggtggtgaagagg

SEQ ID NO: 14145 - DNA, 119 bp, homo sapiens
gagctccatgtggctgaagtgctcctgcgtgatgttggtgcggcgatcataggtggtgaagaggtgcacgggccggcctcagggccctggaagtaggacaggagcaggggcacagcaga

SEQ ID NO: 14146 - DNA, 119 bp, homo sapiens
tgaagaggtgcacggggccggcctcagggccctggaagtaggacaggagcaggggcacagcagaggatgccctccagggttgtggcgcaggtccatgatgaggtgctccgtgtcctgta

SEQ ID NO: 14147 - DNA, 119 bp, homo sapiens
acagcagaggatggccctccagggttgtggcgcaggtccatgatgaggtgctccgtgtcctgtagcggccccacacctggcgcaggacatatggggccaacacacccaggacggaggcg

SEQ ID NO: 14148 - DNA, 119 bp, homo sapiens
gtcctgtagcggctcccacacctggcgcaggacatatggggccaacacacccaggacggaggcgtcagcaaactatcgaagcgcaggtagcccacattgcctggcagcaccgacacctg

SEQ ID NO: 14149 - DNA, 119 bp, homo sapiens
ttctgtgggcccgatggctcgcaccaggagcctgggatcctcagacgcagcctgcaggccggcattgagttggtgaccagatcttcctcggagaccaccgtggagaagtccatgctggc

SEQ ID NO: 14150 - DNA, 119 bp, homo sapiens
agcctgcaggccggcattgagcttggtgaccagatcttcctcggagaccaccgtggagaagtccatgctgccaagtgctgcagcagggtgggcacacggtccaccagcgtgtagtagtc

SEQ ID NO: 14151 - DNA, 119 bp, homo sapiens
caccgtggagaagtccatgctggccaagtgctgcagcagggtgggcacacggtccaccagcgtgtagtatccttcaggacctcctggaggcagtggactacccctggaagggcgctgcg

SEQ ID NO: 14152 - DNA, 119 bp, homo sapiens
atccaagaggaccttggccatgtccagcaccaggcttggctggaacaggtgtgtggggccagccaggcccagagcagcacggacatgagcagaacccattctctcatcatggggaccca

SEQ ID NO: 14153 - DNA, 119 bp, homo sapiens
ttggctggaacaggtgtgtggggccagccaggccacagagcagcacggacatgagcagaacccattctccatcatggggacccagggggaggcctggctcctgcacaaaagctccctgg

SEQ ID NO: 14154 - DNA, 119 bp, homo sapiens
cagagcagcacggacatgagcagaacccattctctcatcatggggacccagggggaggcctggctcctgacaaaagctccctggactgtgtgcaaggccgtggccctgctctgtgcagc

SEQ ID NO: 14155 - DNA, 119 bp, homo sapiens
tcttacttttttcctgctggtgcaccagaaatccccctgtggccagtccaggtgggaacaccagacactctcccagacaccgctgacgagagagcctcagtgctttcagggcatcctgg

SEQ ID NO: 14156 - DNA, 119 bp, homo sapiens
ccaggtgggaacaccagacactgctcccagacaccgctgacgagagagcctcagtgctttcagggcatctgggccactcggttggcttctgcctccaccagtacataatctgggctggc

SEQ ID NO: 14157 - DNA, 119 bp, homo sapiens
gcctcagtgctttcagggcatcctgggccactcggttggcttctgcctccaccagtacataatctgggcggctccatccatgatggcatcgtgcttcatgacactgtgcacgccaacta

SEQ ID NO: 14158 - DNA, 119 bp, homo sapiens
acttgagcggcggcggcggctcgggagagagggacgcgggctgcaggcgcgatgcttggctagaggacggtccgacggcggccggacgctgaggtggtcggggctagtcagcccggcct

SEQ ID NO: 14159 - DNA, 119 bp, homo sapiens
ctgcaggcgcgatgcttggctagaggacgcgtccgacggcggccggacgctgaggtggtcggggctagtagcccggcctgggcatggagcgcggggtggcagagcctctggacgtttgg

SEQ ID NO: 14160 - DNA, 119 bp, homo sapiens
ggccggacgctgaggtggtcggggctagtcagcccggcctgggcatggagcgcggggtggcagagcctcggacgtttggggcgcgcccagtccgagcccccggcgcgcctgaagttgcg

SEQ ID NO: 14161 - DNA, 119 bp, homo sapiens
agcggcccgcggagacccaggagctgccggcacgccgcggatgagccttcgcgccggcgggaagacgcgcggtggccagggccagagcaggcggcccgcgggggccgatccggcggaga

SEQ ID NO: 14162 - DNA, 119 bp, homo sapiens
ggcgggaagacgcggcggtggccagggccagagcaggcggcccgcgggggccgatccggcggagagcaggcccgaggcgaggcgaggcgcggcgccgctgcacacacgcacacggtacc

SEQ ID NO: 14163 - DNA, 119 bp, homo sapiens
ccatccttgagaagggcaaccctctccatgtgagcacaggcaccagagaggggcaggcgcctggagggtccggggcacccccagctgcccatggctggacttgccctttgacaaggggc

SEQ ID NO: 14164 - DNA, 119 bp, homo sapiens
agggcaaccctctccatgtgagcacaggcaccagagaggggcaggcgcctggagggtaccggggcaccccagctgcccatggctggacttgccctttgacaaggggccctcccagtgtc

SEQ ID NO: 14165 - DNA, 119 bp, homo sapiens
cctcaggtggtggccatcgacctcgatgagggcctgaacggcctggtgtcctaccgcatgccggtgggctgccccgcatggacttcctcatcaacagcagcagcggcgtggtggtcacc

SEQ ID NO: 14166 - DNA, 119 bp, homo sapiens
gcatgccggtgggcatgccccgcatggacttcctcatcaacagcagcagcggcgtggtggtcaccaccacgagctggaccgcgagcgcatcgcggagtaccagctgcgggtggtggcca

SEQ ID NO: 14167 - DNA, 119 bp, homo sapiens
ggtggtcaccaccaccgagctggaccgcgagcgcatcgcggagtaccagctgcgggtggtggccagtgagcaggcacgcccaccaagagctccaccagcacgctcaccatccatggtga

SEQ ID NO: 14168 - DNA, 119 bp, homo sapiens
ccacaggtggtcttctccctggcctctggcaacatcgcgggggcctttgagatcgtcaccaccaatgacccattggcgaagtgtttgtggccaggcccctggacagagaagagctggat

SEQ ID NO: 14169 - DNA, 119 bp, homo sapiens
ggcctctggcaacatcgcgggggcctttgagatcgtcaccaccaatgactccattggcgaagtgtttgtgccaggcccctggacagagaagagctggatcactacatcctccaggtggg

SEQ ID NO: 14170 - DNA, 119 bp, homo sapiens
tcccagaacgtgggtggaggtactgctgtggtccaggtgagagccactgaccgtgacatcgggatcaacgtgttctgtcctactacatcaccgagggcaacaaggacatggccttccgc

SEQ ID NO: 14171 - DNA, 119 bp, homo sapiens
cgggatcaacagtgttctgtcctactacatcaccgagggcaacaaggacatggccttccgcatggaccgatcagcggtgagatcgccacacggcctgccccgcctgaccgcgagcgcca

SEQ ID NO: 14172 - DNA, 119 bp, homo sapiens
gcatggaccgcatcagcggtgagatcgccacacggcctgccccgcctgaccgcgagcgccagagcttctccacctggtggccactgtggaggacgagggcaccccaaccctgtcggtga

SEQ ID NO: 14173 - DNA, 119 bp, homo sapiens
gcccaggcacccctctcacggtgctcaatgggcccatcctggccctggatgcagaccaagacatctacgcgtggtgacctaccagctgctgggtgcccagagtggcctctttgacatca

SEQ ID NO: 14174 - DNA, 119 bp, homo sapiens
acggtgctcaatgggcccatcctggccctggatgcagaccaagacatctacgccgtggtgacctaccagtgctgggtgcccagagtggcctctttgacatcaacagcagcaccggtgag

SEQ ID NO: 14175 - DNA, 119 bp, homo sapiens
ctgcagaaaggcagcccccagtaccagctgctgacagtgcctgagcactcaccacgcggcaccctcgtggcaacgtgacaggcgcagtggatgcagatgagggccccaacgcgatcgtg

SEQ ID NO: 14176 - DNA, 119 bp, homo sapiens
taccagctgctgacagtgcctgagcactcaccacgcggcaccctcgtgggcaacgtgacaggcgcagtgatgcagatgagggccccaacgcgatcgtgtactacttcatcgcaggtggg

SEQ ID NO: 14177 - DNA, 119 bp, homo sapiens
ctgcaggggtggccaccgacgccaaggtgggctcagagttgatccaggtgctggccctggatgcagacatggcaacaacagccttgtcttctacagcattctggccatccactacttcc

SEQ ID NO: 14178 - DNA, 119 bp, homo sapiens
gccctggatgcagacattggcaacaacagccttgtcttctacagcattctggccatccactacttccggcccttgccaacgactctgaagatgtgggccaggtcttcaccatgggtagg

SEQ ID NO: 14179 - DNA, 119 bp, homo sapiens
ttgcagctgatacagactgagctggacgaggagccaggagaccacagcccagggcagggtagcctgcgctccgccacaagccaccagtggagctcaaggggcccgatgggatccatgtg

SEQ ID NO: 14180 - DNA, 119 bp, homo sapiens
agctggacgaggagccaggagaccacagcccagggcagggtagcctgcgcttccgccacaagccaccagggagctcaaggggcccgatgggatccatgtggtgcacggcagcacgggca

SEQ ID NO: 14181 - DNA, 119 bp, homo sapiens
gtcgccgctacccccattgtggtctctgccctccccgcgggcccagggcatgctccgtgcccctgcgccggtctcggcggcggcaggcgacactccgcgccggcggagacatgaggcgc

SEQ ID NO: 14182 - DNA, 119 bp, homo sapiens
gctccgtgcccctgcgcccggtctcggcggcggcaggcgacactccgcgccggcggagacatgaggcgcgccggtgggccgccctggccctggggctgctgcgcctctgcttgggtgag

SEQ ID NO: 14183 - DNA, 119 bp, homo sapiens
gtggggtgaggccagccaagtccctgtgttacgaatggtgggccaaggggctgtctgctaggtcccagtggacaggcagagctccaggctggcaccatggtaggcctccagggaaagag

SEQ ID NO: 14184 - DNA, 119 bp, homo sapiens
aggggctgtctgctaggtcccagtaggacaggcagagctccaggctggcaccatggtaggcctccagggaagagctgggaggcaggaatggcacactgggcaggcttgcccattcctgg

SEQ ID NO: 14185 - DNA, 119 bp, homo sapiens
tggcaccatggtaggcctccagggaaagagctgggaggcaggaatggcacactgggcaggcttgcccatcctggccctgagaatggagctgtagcctcatggacaataaatggatgtga

SEQ ID NO: 14186 - DNA, 119 bp, homo sapiens
cttggcaggtgtgggaggtggaaaggatcggaggagaggtcactggtgcccagtgtctcccacaggcgcggccctacggctcggacggctgccaggctcacggcttccagggctttgtg

SEQ ID NO: 14187 - DNA, 119 bp, homo sapiens
tggtgcccagtgtctcccacaggcgctggccctacggctcggacggctgccaggctcacggcttccaggctttgtgacagcgttggccagcatctgcagcagtgcagccatcgcatggg

SEQ ID NO: 14188 - DNA, 119 bp, homo sapiens
cggctgccaggctcacggcttccagggctttgtgacagcgttggccagcatctgcagcagtgcagccatgcatgggggcgttatcaccactactgcacccgtatgtatctgggctcctg

SEQ ID NO: 14189 - DNA, 119 bp, homo sapiens
gccagcatctgcagcagtgcagccatcgcatgggggcgttatcaccactactgcacccgtatgtatctggctcctggagtggagggacaccgatgcagtgtggagaggataagaggcag

SEQ ID NO: 14190 - DNA, 119 bp, homo sapiens
gtgcaggtagccagctggcctggaactcagccgtctctctggtgctcttcgtgtggctgtcttctgcctctgggcagctctgccccttctgggttggggtcactacgactatgagccac

SEQ ID NO: 14191 - DNA, 119 bp, homo sapiens
tcttcgtgtggctgtcttctgccttctgggcagctctgccccttctgggttggggtcactacgactatggccactggggacatgctgcaccctggactactccaagggggacaggtgag

SEQ ID NO: 14192 - DNA, 119 bp, homo sapiens
actgacttcaaaagacggactcggcccttggctgtggcgctcatctggccggtctcgtccacggagaacccgcgacgatgttgtcctgcagaaagaggccctcggggtccttcttggcc

SEQ ID NO: 14193 - DNA, 119 bp, homo sapiens
tggctgtggcgctcatctggccggtctcgtccacggagaactccgcgacgatgttgtcctgcagaaagagccctcggggtccttcttggccatggcgtaccaggtcccagagaactgtg

SEQ ID NO: 14194 - DNA, 119 bp, homo sapiens
acctacgcgagccttgtcgaagttctccttgactcggaagctgctcactcggcagtcgcgctccgcgcgccgctgcccagcgccgccaacagcaagagcgcccacacccacttcatctt

SEQ ID NO: 14195 - DNA, 119 bp, homo sapiens
agttctccttgactcggaagctgctcactcggcagtcgcgctccgcgcggccgctgcccagcgccgccacagcaagagcgcccacacccacttcatcttgcccaggaatccgccctgcg

SEQ ID NO: 14196 - DNA, 119 bp, homo sapiens
aggagggaagaaagtggaaagatgtgagccaccagtgtggcactgggaggaggcagggtgggcaggagcggagagtcctgaagaagttggtaggagaggtcctggggataacgggatgc

SEQ ID NO: 14197 - DNA, 119 bp, homo sapiens
gggtgggcaggagctggagagtcctgaagaagttggtaggagaggtcctggggataacgggatgctggatcagtgggtgaatctgaggttagggggagggtcatgggatgcgtggggag

SEQ ID NO: 14198 - DNA, 119 bp, homo sapiens
aacgggatgctggagtcagtgggtgaatctgaggttagggggagggtcatgggatgcgtggggagggtggggcttagaatcaggagtctggagggctggggagggggctgggctgggag

SEQ ID NO: 14199 - DNA, 119 bp, homo sapiens
gcgtggggagggtgcgggcttagaatcaggagtctggagggctggggagggggctgggctgggagttggtggaggagcctggcatcagtgggaggagtctggggattggtgggaggttc

SEQ ID NO: 14200 - DNA, 119 bp, homo sapiens
gggctgggagttggctggaggagcctggcatcagtgggaggagtctggggattggtgggaggttctggggccagtgggcaggaactggagcagcatcaaggggttggtgggcaggcaag

SEQ ID NO: 14201 - DNA, 119 bp, homo sapiens
tgggaggttctgggagccagtgggcaggaactggagcagcatcaaggggttggtgggcaggcaagtggtagcaggaaggcccccatcagtaagggctgatgagtcagagggtgagggcc

SEQ ID NO: 14202 - DNA, 119 bp, homo sapiens
acggctctgagcccggccccggatctggctctgcggagggtgctctcggctcaggggttctgtcagcagcagttaggccgcaggggccggggagccacggggggtagctggggaggggg

SEQ ID NO: 14203 - DNA, 119 bp, homo sapiens
ctcaggggttctgtcagcagccagttaggccgcaggggccggggagccacggggggtagctggggaggggtgtgcaggcaattcggaggggggtgaaggcatctactggcacgtcttgt

SEQ ID NO: 14204 - DNA, 119 bp, homo sapiens
cggggggtagctggggagggggtgtgcaggcaattcggaggggggtgaaggcatctactggcacgtctttagaggggggatccctttatgggggtggcgaggggcagaggcacttgggg

SEQ ID NO: 14205 - DNA, 119 bp, homo sapiens
cgaggggcagaggcacttggggagaccttgagggcccccagccgctccctcagctccccattatcttcccttccgggaagccgttcaccggcagcaggtagaagcctccgcggctgtct

SEQ ID NO: 14206 - DNA, 119 bp, homo sapiens
gcttacccgggagcagtggcgggtgacagccagcacctcgtcatcagtcagcagcctctgggccaggtctgaatgaggggccgccggctctcccaggcctgaacctgctcatccacatt

SEQ ID NO: 14207 - DNA, 119 bp, homo sapiens
cacctcgtcatcagtcagcagcctctgggccaggtcctgaatgaggggccgccggctctcccaggcctgacctgctcatccacattaggcagctggctggagggactcccagacctggc

SEQ ID NO: 14208 - DNA, 119 bp, homo sapiens
gtcctgaatgaggggccgccggctctcccaggcctgaacctgctcatccacattaggcagctggctggaggactcccagacctggcagacagcagggcccggcccctctcctggtctgc

SEQ ID NO: 14209 - DNA, 119 bp, homo sapiens
acgtaccccacaaggtcagatagctctgggagcgcgtgatggggggccggggtcggctgagggccagcacaaagccgtcttgggagactcagagagcgcagagtcaaggcggcggccgg

SEQ ID NO: 14210 - DNA, 119 bp, homo sapiens
tgagggccagcagcaaagccgtcttgggagactcagagagcgcagagtcaaggcggcggccgggatggggccgtccgagcggatggcggtgtccctgaggatgactgtgggccgcacgc

SEQ ID NO: 14211 - DNA, 119 bp, homo sapiens
ggccgggatgggggccgtccgagcggatggcggtgtccctgaggatgactgtgggccgcacgctgcaccggtctccacccggcctcccgcatcgggctccgtctgcatggctgtgtccg

SEQ ID NO: 14212 - DNA, 119 bp, homo sapiens
tgtccgcccgcccccagcctgggccgcggctgccgggctcctcctgcccgaggcagatgtccatgcggtcgacggcagggagcccgagctgtagggggcgctggaggcgcacgaagaga

SEQ ID NO: 14213 - DNA, 119 bp, homo sapiens
tgtccatgcggtccgacggcagggagcccgagctgtagggggcgctggaggcgcacgaagagacgctgggctgctctcagaggccggggacagctgctgcagcaccccgttgctcactg

SEQ ID NO: 14214 - DNA, 119 bp, homo sapiens
ccctaccttcgatgggggagttgatgaggatgacgcgtcccatgggcgatgaggctcggattccgcggggggcccgttcagcagccgttgttgcttccttagcaggtatcgcgttgcgg

SEQ ID NO: 14215 - DNA, 119 bp, homo sapiens
cggattccgcgggggggcccgttcagcagccgttgttgcttccttagcaggtatcgcgttgcggtggagctgagtcgctgcctaggtggcctcgggaggagagggagctcagagagccg

SEQ ID NO: 14216 - DNA, 119 bp, homo sapiens
cgttgcggtggagcctgagtcgctgcctaggtggcctcgggaggagagggagctcagagagccggagctaggtctcctaggcccagtgggtcgaagcccactgcgaaaccctgcgccat

SEQ ID NO: 14217 - DNA, 119 bp, homo sapiens
tgcgccatggcggctgggctagggcggcaccctacaggtccagaaggaatctgctagctctggagaggcagccctgcgtgcttcgagctccatgagcctctgtgcggggctggggtctc

SEQ ID NO: 14218 - DNA, 119 bp, homo sapiens
gctctggagaggccagccctgcgtgcttcgagctccatgagcctctgtgcggggctggggtctcagtaagtgaaggccctcgcttgcgatgcctctcagaagtgtgagctccaggcctg

SEQ ID NO: 14219 - DNA, 119 bp, homo sapiens
gccgccagagtcgccatgcagatcccgcgcgccgctcttctcccgctgctgctgctgctgctggcggcgccgcctcggcgcagctgtcccgggccggccgctcggcgcctttggccgcc

SEQ ID NO: 14220 - DNA, 119 bp, homo sapiens
tgctgctgctggcggcgcccgcctcggcgcagctgtcccgggccggccgctcggcgcctttggccgccggtgcccagaccgctgcgagccggcgcgctgcccgccgcagccggagcact

SEQ ID NO: 14221 - DNA, 119 bp, homo sapiens
ggcgcctttggccgccgggtgcccagaccgctgcgagccggcgcgctgcccgccgcagccggagcactggagggcggccgggcccgggacgcgtgcggctgctgcgaggtgtgcggcgc

SEQ ID NO: 14222 - DNA, 119 bp, homo sapiens
ccgcagccggagcactgcgagggcggccgggcccgggacgcgtgcggctgctgcgaggtgtgcggcgcgccgagggcgccgcgtgcggcctgcaggagggcccgtgcggcgaggggctg

SEQ ID NO: 14223 - DNA, 119 bp, homo sapiens
gcgaggtgtgcggcgcgcccgagggcgccgcgtgcggcctgcaggagggcccgtgcggcgaggggctgcgtgcgtggtgcccttcggggtgccagcctcggccacggtgcggcggcgcg

SEQ ID NO: 14224 - DNA, 119 bp, homo sapiens
gtgcggcgaggggctgcagtgcgtggtgcccttcggggtgccagcctcggccacggtgcggcggcgcgccaggccggcctctgtgtgtgcgccagcagcgagccggtgtgcggcagcga

SEQ ID NO: 14225 - DNA, 119 bp, homo sapiens
cggtgtgcggcagcgacgccaacacctacgccaacctgtgccagctgcgcgccgccagccgccgctccggaggctgcaccggccgccggtcatcgtcctgcagcgcggagcctgcggcc

SEQ ID NO: 14226 - DNA, 119 bp, homo sapiens
gccgcgtccaggcacaggccatgcagtgacgcccccccacccctccacctttgcccggagcgcgggcagagcccagcgcgccagccggccccggggcaggagcggtgctaggcaggggt

SEQ ID NO: 14227 - DNA, 119 bp, homo sapiens
ctccacctttgcccggagcgcgggcagcagcccagcgcgccagccggccccggggcaggagcggtgctagcaggggtggggtggccgggcccagggaccgggagccggggagggagccg

SEQ ID NO: 14228 - DNA, 119 bp, homo sapiens
gccggccccggggcaggagcggtgctaggcaggggtggggtggccgggcccagggaccgggagccgggggggagccgggcaccgagcagagggcgggggaagcggcgccgaagtttgcc

SEQ ID NO: 14229 - DNA, 119 bp, homo sapiens
gccgggcccagggaccgggagccggggagggagccgggcaccgagcagagggcgggggaagcggcgccgagtttgcctcggactcgccgggcgctgcggtggctccctgggccgaggta

SEQ ID NO: 14230 - DNA, 119 bp, homo sapiens
cattacctttggggtgggtgggaagctctgttcagggacaggggagttagtgggcttcccactgtggtttttgcctcccagtcctccactggattgcctgtgtccccagtgcggaaggg

SEQ ID NO: 14231 - DNA, 119 bp, homo sapiens
ggcttcccactgtggttctttgcctcccagtcctccactggattgcctgtgtccccagtgcggaagggaggttgctcagtgcttcttccagcgccgagggcagtgggcgggtgggagtg

SEQ ID NO: 14232 - DNA, 119 bp, homo sapiens
ccccagtgcggaagggatggttgctcagtgcttcttccagcgccgagggcagtgggcgggtgggagtgagtcttgggtgggaacggatggcgggggagggatgggaatggggggtggag

SEQ ID NO: 14233 - DNA, 119 bp, homo sapiens
tgggcgggtgggagtgaggtcttgggtgggaacggatggcgggggagggatgggaatggggggtggagtcgctgcacccatggagaggatgaggcgctcacatggccagataagggaag

SEQ ID NO: 14234 - DNA, 119 bp, homo sapiens
ggaatggggggtggagtgcgctgcacccatggagaggatgaggcgctcacatggccagataagggaaggcagggggcgccgggaccttgtggggtgggttggagggtggagggtggggc

SEQ ID NO: 14235 - DNA, 119 bp, homo sapiens
ggccagataagggaaggacagggggcgccgggaccttgtggggtgggttggagggtggagggtggggcacacaggcaaggcagagggagtcttggggggatagtagaacatgtccaaag

SEQ ID NO: 14236 - DNA, 119 bp, homo sapiens
tagaacatgtccaaagggatgtcgtccaggtcagtggtgtgcaggtgcagtccgcctgcgaagcgtctcagggtggggccaggggagacacagaaggcgggggaggcgggggccctgtg

SEQ ID NO: 14237 - DNA, 119 bp, homo sapiens
gctcacctggagcccgacgctgtctgcctgaccgcctttgatgaggtgggagatgaagagcccacagccaactccaggccaccacgcacactcaggccgaggccttcggggtgcagacg

SEQ ID NO: 14238 - DNA, 119 bp, homo sapiens
accgcctttgatgaggtgggagatgaagagcccacagccaaactccaggccaccacgcacactcaggccaggccttcggggtgcagacggtccagacgcacctccttcagcttcctgcc

SEQ ID NO: 14239 - DNA, 119 bp, homo sapiens
ctgcacctggagcgccggggggtcagctgatcatattccacctggtgcttcagtgggatcagcggccgatggcatcaaacagaggcagacggctgggttcattgatgaccagcttcagg

SEQ ID NO: 14240 - DNA, 119 bp, homo sapiens
ttccacctggtgcttcagtgggatcagcggccgaatggcatcaaacagaggcagacggctgggttcattatgaccagcttcaggtctcccacgagcacggccacgtccatggtcctgtg

SEQ ID NO: 14241 - DNA, 119 bp, homo sapiens
tctgaccttatgccggaattctcgggccacttttcggtccatggctgggccaggtccagctgcgtcgttcacgacccgttccttcgggtgcccggctgccaggagctggaaagagccgc

SEQ ID NO: 14242 - DNA, 119 bp, homo sapiens
gtccatggctgggccaggtccagctgcgtcgttgcacgacccgttccttcgggtgcccggctgccaggactggaaagagccgcgaccgcgaccgggccagccgccctcggagctggggg

SEQ ID NO: 14243 - DNA, 119 bp, homo sapiens
gttcccagagttcctattgggttaacactggaggctctaagatggcggcagtggcaacctgcggtagtgtgccgcgagtactgggtctgcagtggcgacagccagcaagagcaacgtca

SEQ ID NO: 14244 - DNA, 119 bp, homo sapiens
agtggcaacctgcggtagtgttgccgcgagtactgggtctgcagtggcgacagccagcaagagcaacgtaccagtttccagaggaggggtcctagagccagcgtgaccaacgacagcgg

SEQ ID NO: 14245 - DNA, 119 bp, homo sapiens
ccagcgtgaccaacgacagcggccctcgactggtgtccattgcgggcacgcgaccgtcggtgcggaatgacagctgctggtatcaaccgggctcccagccctagaccagctcttaggtc

SEQ ID NO: 14246 - DNA, 119 bp, homo sapiens
tttttctaagggagaaaagccttttactctcaaccgaggatgcagggcttaaagtgccacttgcgtggggccaggctcactgttcaccaggctctgtcacagggaggctggcaacgcca

SEQ ID NO: 14247 - DNA, 119 bp, homo sapiens
cttgcgtgggagccaggctcactgttcaccaggctctgtcacagggaggctggcaacgccatggcctgggctgccagagccacagggccctgcggagaaggggcagacggagggcccca

SEQ ID NO: 14248 - DNA, 119 bp, homo sapiens
catggcctggggctgccagagccacagggccctgcggagaaggggcagacggagggccccagccagaagcacgctgggcagcgttcagccatcacccgggttcaggcttcctgtcctca

SEQ ID NO: 14249 - DNA, 119 bp, homo sapiens
cagccagaagacacgctgggcagcgttcagccatcacccgggttcaggcttcctgtcctcaccaggggcagcgagagagcagcagtgttcgctcctatggctgccgaggcgagcagctt

SEQ ID NO: 14250 - DNA, 119 bp, homo sapiens
caccaggggccagcgagagagcagcagtgttcgctcctatggctgccgaggcgagcagcttcccgggctcatgaggtgaagtcaccgctttctgtgggagaggagcctggatcccactc

SEQ ID NO: 14251 - DNA, 119 bp, homo sapiens
ttcccgggctccatgaggtgaagtcaccgctttctgtgggagaggagcctggatcccactcctagtgaagcttcttggcccagcagtgacaaggtgcgggctgcagtggcatcgtcaca

SEQ ID NO: 14252 - DNA, 119 bp, homo sapiens
caggagagcgcagtcaagggtgtcctgggaggaacgctggtggcgaccagggctgtgtgtggggcctggcggtaggcacggagaggccgcacgctgggacgctgccggagtcagtttta

SEQ ID NO: 14253 - DNA, 119 bp, homo sapiens
tggggcctggccggtaggcacggagaggccgcacgctgggacgctgccggagtcagttttattagggaaaggggctccctgccccacccctccccacaccctccttccgggaggtctgt

SEQ ID NO: 14254 - DNA, 119 bp, homo sapiens
tattagggaagaggggctccctgccccacccctccccacaccctccttccgggaggtctgtcagccccactgtagaagtagattttctgccaggtgggcaagtaatccatgagcggccc

SEQ ID NO: 14255 - DNA, 119 bp, homo sapiens
ggatacagtgcagcagcggccgggcaatgtacaaaaactctgcgatggtctcctgcagccccagggggggggggtcgcactcagctcctcgtgatgctgctgctgccgtccctcccgct

SEQ ID NO: 14256 - DNA, 119 bp, homo sapiens
atggtctcctgcagccccaggggggtgggggtcgcactcagctcctcgtgatgctgctgctgccgtccccccgctgctggggagctccccagtgcctggagtgcagggacggcgctaga

SEQ ID NO: 14257 - DNA, 119 bp, homo sapiens
gcccaggcttctacgtgacgctggtcgtgacccgctggtggaaccagtacgagaacctgccgtggcccgccgcctcatgagcctggtgtcgggcttcgtcgaaggcaaggacgagcaag

SEQ ID NO: 14258 - DNA, 119 bp, homo sapiens
aaccagtacgagaacctgccgtggcccgaccgcctcatgagcctggtgtcgggcttcgtcgaaggcaagacgagcaaggccggctgctgcggcgcacgctcatccgctacgccaacctg

SEQ ID NO: 14259 - DNA, 119 bp, homo sapiens
cctggtgtcgggcttcgtcgaaggcaaggacgagcaaggccggctgctgcggcgcacgctcatccgctagccaacctgggcaacgtgctcatcctgcgcagcgtcagcaccgcagtcta

SEQ ID NO: 14260 - DNA, 119 bp, homo sapiens
ggctgctgcggcgcacgctcatccgctacgccaacctgggcaacgtgctcatcctgcgcagcgtcagcacgcagtctacaagcgcttccccagcgcccagcacctggtgcaagcaggtg

SEQ ID NO: 14261 - DNA, 119 bp, homo sapiens
ggccgcttggtaacccctccctgtccgggcctcgccgctcagtacgggggcggggctagccggctgacccctggcctactcccggcctccggctccaggcccttcccggatccccgccc

SEQ ID NO: 14262 - DNA, 119 bp, homo sapiens
gggctagccggctgaccccctggcctactcccggcctccggctccaggcccttcccggatccccgccccggattcccaggggacggggaagggagcgcccgccccgatatctccgcccc

SEQ ID NO: 14263 - DNA, 119 bp, homo sapiens
tcccggatccccgcccccggattcccaggggacggggaagggagcgcccgccccgatatctccgcccccagcccctaacccctcagggttgagcggaccaaccccaccacttccgcgag

SEQ ID NO: 14264 - DNA, 119 bp, homo sapiens
ccgatatctccgccccccagcccctaacccctcagggttgagcggaccaaccccaccacttccgcgagggcaggggcggggtcacaaaacgggccctcggcctaggggcggagtttctc

SEQ ID NO: 14265 - DNA, 119 bp, homo sapiens
ccaccacttccgcgaggggcaggggcggggtcacaaaacgggccctcggcctaggggcggagtttctcgaaggggcaaggccaaggcatcttgtattggggctgacaggggggcgggtt

SEQ ID NO: 14266 - DNA, 119 bp, homo sapiens
aggggcggagtttctcgtaaggggcaaggccaaggcatcttgtattggggctgacaggggggcgggttatagggctgaggatgggaggatgctcagggtattggggtcagggtggcatt

SEQ ID NO: 14267 - DNA, 119 bp, homo sapiens
gacaggggggcgggttattagggctgaggatgggaggatgctcagggtattggggtcagggtggcattacccagctcaagccgggccgggctgactcagcatcctgccccagccagctt

SEQ ID NO: 14268 - DNA, 119 bp, homo sapiens
tgggtgtaggagccagccgggcaagtctgaatgcagctctataccctccctggcgaggggtcctgggccgctgctggtggctggcacggctggtgggggggggctcctggtcgtcggcc

SEQ ID NO: 14269 - DNA, 119 bp, homo sapiens
gggtcctgggcccgctgctggtggctggcacggctggtgggggggggctcctggtcgtcggcctcgggcagccctggctttgcctgggagtctggatgaggcgctggaggagggcctgg

SEQ ID NO: 14270 - DNA, 119 bp, homo sapiens
tcggcctcgggctagccctggctttgcctgggagtctggatgaggcgctggaggagggcctggtgactgcttggctcactacaaggacacagaggtgcctgggcactgtcaggccaaaa

SEQ ID NO: 14271 - DNA, 119 bp, homo sapiens
gcctggtgactgccttggctcactacaaggacacagaggtgcctgggcactgtcaggccaaaaggctggggatgagctgcaactgaggtaccactgctgcgggcgccacgggtacaagg

SEQ ID NO: 14272 - DNA, 119 bp, homo sapiens
ccaaaaggctggtggatgagctgcaactgaggtaccactgctgcgggcgccacgggtacaaggattggttggggtccagtgggtcagcagccgttacctggatcccggtgaccgggatg

SEQ ID NO: 14273 - DNA, 119 bp, homo sapiens
ccacaggctctggtgctccttggcctgcggtacctgcaaacagcactggaggggcttggaggggtcattatgcgggaggagagacccagggctatctctttcccagtgggctgaaagat

SEQ ID NO: 14274 - DNA, 119 bp, homo sapiens
aggggcttggaggggtcattgatgcgggaggagagacccagggctatctctttcccagtgggctgaaagtatgctgaaaacagcatggctacagggaggggttgcctgcaggccagcac

SEQ ID NO: 14275 - DNA, 119 bp, homo sapiens
ggggtgcataagcagctttatgggtcctgaaagccaagggtgcccaggggtgtggtgtctctgagccctttatccctcccccatgaccacagagcaggcaagggggcagcagggcccaa

SEQ ID NO: 14276 - DNA, 119 bp, homo sapiens
ggtgtggtgtctctgagccctgttatccctcccccatgaccacagagcaggcaagggggcagcagggccaaatctggccattggccgtcagaagccccctgcgggggttgtgactccca

SEQ ID NO: 14277 - DNA, 119 bp, homo sapiens
aggcaagggggcagcagggcccaaatctggccattggccgtcagaagccccctgcgggggttgtgactccaagagtgatgcagaggagcccccgttgaccaggaagaggagcaagaagg

SEQ ID NO: 14278 - DNA, 119 bp, homo sapiens
cccctgcgggggttgtgactcccaagagtgatgcagaggagcccccgttgaccaggaagaggagcaagaggagagggggctccgagggtctcgaaagcgcactggcagctctggggagc

SEQ ID NO: 14279 - DNA, 119 bp, homo sapiens
tgaccaggaagaggagcaagaaggagagggggctccgagggtctcgaaagcgcactggcagctctgggggcagacaggccccgaggccccggggagcagcaataaccctcccagcactg

SEQ ID NO: 14280 - DNA, 119 bp, homo sapiens
agcgcactggcagctctggggagcagacaggccccgaggccccggggagcagcaataaccctcccagcatggagaggggccggcgggcgcaccccctgcatcccctgggccggcctctt

SEQ ID NO: 14281 - DNA, 119 bp, homo sapiens
ccttagtttgacagggacagggatggacgaattacggtggcggagctgcgggaggcggtaccggctctgtcggggagccgctggcgggtcctgagctggacgagatgctccgagaagtg

SEQ ID NO: 14282 - DNA, 119 bp, homo sapiens
gcggagctgcgggaggcggtaccggctctgctcggggagccgctggcgggtcctgagctggacgagatgtccgagaagtggacctcaatggggatggcaccgtagactttgacggtgag

SEQ ID NO: 14283 - DNA, 119 bp, homo sapiens
ccacagcctcgccgctcctgctatttgccaaccgccgggacgtacggctggtggacgccggcggagtcagctggagtccaccatcgtggtcagcggcctggaggatgcggccgcagtgg

SEQ ID NO: 14284 - DNA, 119 bp, homo sapiens
acggctggtggacgccggcggagtcaagctggagtccaccatcgtggtcagcggcctggaggatgcggcgcagtggacttccagttttccaagggagccgtgtactggacagacgtgag

SEQ ID NO: 14285 - DNA, 119 bp, homo sapiens
tctcagtccacactcgctgtgaggaggacaatggcggctgctcccacctgtgcctgctgtccccaagcggcctttctacacatgcgcctgccccacgggtgtgcagctgcaggacaacg

SEQ ID NO: 14286 - DNA, 119 bp, homo sapiens
gaggacaatggcggctgctcccacctgtgcctgctgtccccaagcgagcctttctacacatgcgcctgcccacgggtgtgcagctgcaggacaacggcaggacgtgtaaggcaggtgag

SEQ ID NO: 14287 - DNA, 119 bp, homo sapiens
ccacaggagccgaggaggtgctgctgctggcccggcggacggacctacggaggatctcgctggacacgcggacttcaccgacatcgtgctgcaggtggacgacatccggcacgccattg

SEQ ID NO: 14288 - DNA, 119 bp, homo sapiens
cgctggacacgccggacttcaccgacatcgtgctgcaggtggacgacatccggcacgccattgccatcgctacgacccgctagagggctatgtctactggacagatgacgaggtgcggg

SEQ ID NO: 14289 - DNA, 119 bp, homo sapiens
ccattgccatcgactacgacccgctagagggctatgtctactggacagatgacgaggtgcgggccatcccagggcgtacctggacgggtctggggcgcagacgctggtcaacaccgaga

SEQ ID NO: 14290 - DNA, 119 bp, homo sapiens
ccgagatcaacgaccccgatggcatcgcggtcgactgggtggcccgaaacctctactggaccgacacggcacggaccgcatcgaggtgacgcgcctcaacggcacctcccgcaagatcc

SEQ ID NO: 14291 - DNA, 119 bp, homo sapiens
ggaccgacacgggcacggaccgcatcgaggtgacgcgcctcaacggcacctcccgcaagatcctggtgtggaggacctggacgagccccgagccatcgcactgcaccccgtgatggggt

SEQ ID NO: 14292 - DNA, 119 bp, homo sapiens
ctccagcctcatgtactggacagactggggagagaaccctaaaatcgagtgtgccaacttggatgggcagagcggcgtgtgctggtcaatgcctccctcgggtggcccaacggcctggc

SEQ ID NO: 14293 - DNA, 119 bp, homo sapiens
gagaaccctaaaatcgagtgtgccaacttggatgggcaggagcggcgtgtgctggtcaatgcctccctcggtggcccaacggcctggccctggacctgcaggaggggaagctctactgg

SEQ ID NO: 14294 - DNA, 119 bp, homo sapiens
atgggcaggagcggcgtgtgctggtcaatgcctccctcgggtggcccaacggcctggccctggacctgcggaggggaagctctactggggagacgccaagacagacaagatcgaggtga

SEQ ID NO: 14295 - DNA, 119 bp, homo sapiens
ctgcaggtgatcaatgttgatgggacgaagaggcggaccctcctggaggacaagctcccgcacatttttggttcacgctgctgggggacttcatctactggactgactggcagcgccgc

SEQ ID NO: 14296 - DNA, 119 bp, homo sapiens
gctcccgcacatttttgggttcacgctgctgggggacttcatctactggactgactggcagcgccgcagatcgagcgggtgcacaaggtcaaggccagccgggacgtcatcattgacca

SEQ ID NO: 14297 - DNA, 119 bp, homo sapiens
actggcagcgccgcagcatcgagcgggtgcacaaggtcaaggccagccgggacgtcatcattgaccagcgcccgacctgatggggctcaaagctgtgaatgtggccaaggtcgtcggtg

SEQ ID NO: 14298 - DNA, 119 bp, homo sapiens
tgccagaccatcagccgcgccttcatgaacgggagctcggtggagcacgtggtggagtttggccttgacaccccgagggcatggccgttgactggatgggcaagaacctctactgggcc

SEQ ID NO: 14299 - DNA, 119 bp, homo sapiens
ttggccttgactaccccgagggcatggccgttgactggatgggcaagaacctctactgggccgacactggaccaacagaatcgaagtggcgcggctggacgggcagttccggcaagtcc

SEQ ID NO: 14300 - DNA, 119 bp, homo sapiens
ggccgacactgggaccaacagaatcgaagtggcgcggctggacgggcagttccggcaagtcctcgtgtgagggacttggacaacccgaggtcgctggccctggatcccaccaaggggta

SEQ ID NO: 14301 - DNA, 119 bp, homo sapiens
ttccagctacatctactggaccgagtggggcggcaagccgaggatcgtgcgggccttcatggacgggacaactgcatgacgctggtggacaaggtgggccgggccaacgacctcaccat

SEQ ID NO: 14302 - DNA, 119 bp, homo sapiens
ccgaggatcgtgcgggccttcatggacgggaccaactgcatgacgctggtggacaaggtgggccgggccacgacctcaccattgactacgctgaccagcgcctctactggaccgacctg

SEQ ID NO: 14303 - DNA, 119 bp, homo sapiens
gcatgacgctggtggacaaggtgggccgggccaacgacctcaccattgactacgctgaccagcgcctctctggaccgacctggacaccaacatgatcgagtcgtccaacatgctgggtg

SEQ ID NO: 14304 - DNA, 119 bp, homo sapiens
ccccagagccgcccacctgctccccggaccagtttgcatgtgccacaggggagatcgactgtatccccgggcctggcgctgtgacggctttcccgagtgcgatgaccagagcgacgagg

SEQ ID NO: 14305 - DNA, 119 bp, homo sapiens
ccacaggggagatcgactgtatccccggggcctggcgctgtgacggctttcccgagtgcgatgaccagacgacgaggagggctgccccgtgtgctccgccgcccagttcccctgcgcgc

SEQ ID NO: 14306 - DNA, 119 bp, homo sapiens
acggctttcccgagtgcgatgaccagagcgacgaggagggctgccccgtgtgctccgccgcccagttccctgcgcgcggggtcagtgtgtggacctgcgcctgcgctgcgacggcgagg

SEQ ID NO: 14307 - DNA, 119 bp, homo sapiens
gccccgtgtgctccgccgcccagttcccctgcgcgcggggtcagtgtgtggacctgcgcctgcgctgcgcggcgaggcagactgtcaggaccgctcagacgaggcggactgtgacggtg

SEQ ID NO: 14308 - DNA, 119 bp, homo sapiens
tgccaggcatcgcatgcggaaagtccatgatgagctccgtgagcctgatggggggccggggcggggtgccctctacgaccggaaccacgtcacaggggcctcgtccagcagctcgtcca

SEQ ID NO: 14309 - DNA, 119 bp, homo sapiens
gagctccgtgagcctgatggggggccggggcggggtgcccctctacgaccggaaccacgtcacaggggctcgtccagcagctcgtccagcacgaaggccacgctgtacccgccggtgag

SEQ ID NO: 14310 - DNA, 119 bp, homo sapiens
tgagttccagttggtggggagtccctgtgggttgtgacaggtcctgccactccctccctctgcagtgggaatctggggccgggaagacggagagcacaaagctgatcctgcagttcctg

SEQ ID NO: 14311 - DNA, 119 bp, homo sapiens
tccctctgcagtggggaatctggggccgggaagacggagagcacaaagctgatcctgcagttcctggcaccatcagtgggcagcactcgtggattgagcagcaggtcttggaggccacc

SEQ ID NO: 14312 - DNA, 119 bp, homo sapiens
ctgcagttcctggcagccatcagtgggcagcactcgtggattgagcagcaggtcttggaggccacccccttctggaaggtaggaccagagttccgagggtgggaccaggcagtggggcg

SEQ ID NO: 14313 - DNA, 119 bp, homo sapiens
ccccagggcgccgagaccaggaagcgctcgcccacacttagcagccagttcaagcggtcactggagctgtgatgcgcacgctgggtgcctgccagcccttctttgtgcgatgcatcaag

SEQ ID NO: 14314 - DNA, 119 bp, homo sapiens
gcccacacttagcagccagttcaagcggtcactggagctgctgatgcgcacgctgggtgcctgccagccttctttgtgcgatgcatcaagcccaatgagttcaagaagcccatggtgag

SEQ ID NO: 14315 - DNA, 119 bp, homo sapiens
ttgcagatgcgtctgggcttcctgcggctgcaggccctgcaccgctcccggaagctgcaccagcagtacgcctggcccgccagcgcatcatccagttccaggcccgctgccgcgcctat

SEQ ID NO: 14316 - DNA, 119 bp, homo sapiens
ctgcaccagcagtaccgcctggcccgccagcgcatcatccagttccaggcccgctgccgcgcctatctgtgcgcaaggccttccgccaccgcctctgggctgtgctcaccgtgcaggcc

SEQ ID NO: 14317 - DNA, 119 bp, homo sapiens
tgccgcgcctatctggtgcgcaaggccttccgccaccgcctctgggctgtgctcaccgtgcaggcctatcccggggcatgatcgcccgcaggctgcaccaacgcctcagggctgaggtg

SEQ ID NO: 14318 - DNA, 119 bp, homo sapiens
atgctggaggaccggcccacctccaacctggagaagctgcacttcatcatcggcaatggcatcctgcggcagcactccggtcagtgccgggaggcggggacaccagggcctgaaagtct

SEQ ID NO: 14319 - DNA, 119 bp, homo sapiens
gctgcacttcatcatcggcaatggcatcctgcggccagcactccggtcagtgccgggaggcggggacacagggcctgaaagtcttttggtggctgagtggtgcctctgtcaacctagca

SEQ ID NO: 14320 - DNA, 119 bp, homo sapiens
cttcagggagtgccgtgtctggctctcactgggctgctctgatcttggctgtgctgcgcctcactcaggtgggcaggactgaccccggcggggccctgttctccgtgttggtcctgcag

SEQ ID NO: 14321 - DNA, 119 bp, homo sapiens
actgggctgctctgatcttggctgtgctgcgcctcactcaggctgggcaggactgaccccggcggggcctgttctccgtgttggtcctgcaggggagcgaaaacgacggcccccagctt

SEQ ID NO: 14322 - DNA, 119 bp, homo sapiens
ccctaggccctggtcaccatgactcccgatcagaggcaggacgttgtccggctcttgcagctgcgaacgcggagcccgaggtgcgtgccaagccctacacgctggaggagttttcctat

SEQ ID NO: 14323 - DNA, 119 bp, homo sapiens
ccatgactcccgatcagaggcaggacgttgtccggctcttgcagctgcgaacggcggagcccgaggtgctgccaagccctacacgctggaggagttttcctatgactacttcaggtgat

SEQ ID NO: 14324 - DNA, 119 bp, homo sapiens
cggcaggcccccacccaagcacacgctgagccgtgtcatggtgtccaaggcccgaggcaaggaccggcttggagccacacgcgggaaccgctcaagcaggcgctgctcaagaagctcct

SEQ ID NO: 14325 - DNA, 119 bp, homo sapiens
gcccgaggcaaggaccggctgtggagccacacgcgggaaccgctcaagcaggcgctgctcaagaagctctgggcagtgaggagctctcgcaggaggcctgcctggccttcattgatatc

SEQ ID NO: 14326 - DNA, 119 bp, homo sapiens
tgacaggagttgcccaagtatctccgaggctaccacaagtgcacgcgggaggaggtgctgcagctggggcgctgatctacagggtcaagttcgaggaggacaagtcctacttccccagc

SEQ ID NO: 14327 - DNA, 119 bp, homo sapiens
gtgcacgcgggaggaggtgctgcagctgggggcgctgatctacagggtcaagttcgaggaggacaagtctacttccccagcatccccaagctgctgcgggagctggtgccccaggacct

SEQ ID NO: 14328 - DNA, 119 bp, homo sapiens
tctacagggtcaagttcgaggaggacaagtcctacttccccagcatccccaagctgctgcgggagctgggccccaggaccttatccggcaggtctcacctgatgactggaagcgggtga

SEQ ID NO: 14329 - DNA, 119 bp, homo sapiens
ggctgcaacctccgtcccgcagtccaattagcagccgcgacccggcgcccgcccacgccgcgtcacgagcagccaaagatggctgcgcccaggtaatttgagcaaaggccacagtgaac

SEQ ID NO: 14330 - DNA, 119 bp, homo sapiens
cagccgcgacccggcgcccgcccacgccgcgtcacgagtcagccaaagatggctgcgcccaggtaatttagcaaaggccacagtgaactccggcgtggctgaggaaggaggaggcaccc

SEQ ID NO: 14331 - DNA, 119 bp, homo sapiens
tcacgagtcagccaaagatggctgcgcccaggtaatttgagcaaaggccacagtgaactccggcgtggcgaggaaggaggaggcacccacaggctgctgggaggagagcataaggtact

SEQ ID NO: 14332 - DNA, 119 bp, homo sapiens
gcccacctgcagctggctggagcagccgtactggatgagcggtgtgaaagttgtcagctgcagctcggctccgtctgcagctcgtgcccaaccaggttgggcatcttggtcacgttgta

SEQ ID NO: 14333 - DNA, 119 bp, homo sapiens
tgtgaaagttgtcagctgcagctcggcgtccgtctgcagctcgtgcccaaccaggttgggcatcttggtacgttgtagccgaggttctggcacatggagatgcggatggggtcgcagcg

SEQ ID NO: 14334 - DNA, 119 bp, homo sapiens
gtgcccaaccaggttgggcatcttggtcacgttgtagccgaggttctggcacatggagatgcggatgggtcgcagcgccgctcttcctcgtccccgaagccccgcgccggccccaggag

SEQ ID NO: 14335 - DNA, 119 bp, homo sapiens
gttctggcacatggagatgcggatggggtcgcagcgccgctcttcctcgtccccgaagccccgcgccggcccaggagcagcagcaactgcaggagcaaccccagactgagaccgacgcc

SEQ ID NO: 14336 - DNA, 119 bp, homo sapiens
cccgccaggccatggccagcatcgggggtagcagcggcagcggctggggctgctctggcagacacccccgtttgcacgggggcgccggctgcccgcgctgctcccagctcccgggacgg

SEQ ID NO: 14337 - DNA, 119 bp, homo sapiens
ctctggcagacacccccagtttgcacgggggcgccggctgcccgcgctgctcccagctcccgggacggggtgtgatgcggcgacgagggggcagcggccggctctccagcagctgcgcg

SEQ ID NO: 14338 - DNA, 119 bp, homo sapiens
ccagctcccgggacgggagtgtgatgcggcgacgagggggcagcggccggctctccagcagctgcgcgcactgtgtgggattttagacgtcccgggccgaggccgagggacaggctgcg

SEQ ID NO: 14339 - DNA, 119 bp, homo sapiens
cgagggacaggctgcgagggtcatggctgcaggcggcgagcccacaagccggcgccggccgcgtccgttggcgtctccgcgaggccagccagcagccagcgctgcgcagctctcaccgc

SEQ ID NO: 14340 - DNA, 119 bp, homo sapiens
ttgaagccttcacagggtctcaagacctctgcttatacaaagggtctcttgggctccatatatgaggacagactgctctcagcctcttgggtttaggagaagaaaccaatgaggaggat

SEQ ID NO: 14341 - DNA, 119 bp, homo sapiens
ctctgcttatacaaagggtctcttgggctccatatatgaggacaagactgctctcagcctcttgggtttggagaagaaaccaatgaggaggatgaggaggaaagtgacaaccaggtaat

SEQ ID NO: 14342 - DNA, 119 bp, homo sapiens
gaccaggttatctcctccacttccacacgaggagcgggcccagagtccccctcgcagcctggccactgagaagagcctccccagggccccgaggggcagcccgagtggaaggaggcaga

SEQ ID NO: 14343 - DNA, 119 bp, homo sapiens
tggccactgaagaagagcctccccagggccccgaggggcagcccgagtggaaggaggcagaggagcttgggaggactctgcagccagcctcagcctgcagctgtccctccagaggtaag

SEQ ID NO: 14344 - DNA, 119 bp, homo sapiens
atcaagggagcaggccccaagcccacctgctgcctgtgagaagggcaaggagcagcattcccaggccgagagctgggccctgggcaggaagaggcagaggatcctgaggagaaggtggc

SEQ ID NO: 14345 - DNA, 119 bp, homo sapiens
agaagggcaaggagcagcattcccaggccgaggagctgggccctgggcaggaagaggcagaggatcctgggagaaggtggcggtcagccccaccccgccagtctctccagaggtgtaag

SEQ ID NO: 14346 - DNA, 119 bp, homo sapiens
tctcagttccttgagggagcggctgcagaaagccattgaggaggaggaggcccggatgagagaggaggaagccagaggctatcctggctccgagctcaggtccagtccagcacacaagc

SEQ ID NO: 14347 - DNA, 119 bp, homo sapiens
tgcagaaagccattgaggaggaggaggcccggatgagagaggaggaaagccagaggctatcctggctccagctcaggtccagtccagcacacaagcagatgaggaccaaatcaggtaag

SEQ ID NO: 14348 - DNA, 119 bp, homo sapiens
ctgcagctcagcagtctcctgcgagagaagcgccaggaagtggaaggggagcatgagaggaggttggacagatgaaggaggagcaccagcaagtgatggctaaggccagagagcagtat

SEQ ID NO: 14349 - DNA, 119 bp, homo sapiens
tctcctgcgagagaagcgccaggaagtggaaggggagcatgagaggaggttggacaagatgaaggaggacaccagcaagtgatggctaaggccagagagcagtatgaagctgaggtagc

SEQ ID NO: 14350 - DNA, 119 bp, homo sapiens
ttgcaggagaggaagcagcgggctgagcttctggggcacctgaccggagagctggagcgcctgcagaggcccatgaacgagaactggagactgtgaggcaggagcaacacaagcgtctt

SEQ ID NO: 14351 - DNA, 119 bp, homo sapiens
gcacctgaccggagagctggagcgcctgcagagggcccatgaacgagaactggagactgtgaggcaggacaacacaagcgtcttgaggacttgcggcgccggcacagggagcaggtgag

SEQ ID NO: 14352 - DNA, 119 bp, homo sapiens
ccctaggaagccacagccacccatcagcagctggaggaggcacagaaggagcacacccacctgttgcagcaaaccagcagctccgagaaattcttgatgagctgcaggcccgcaagctg

SEQ ID NO: 14353 - DNA, 119 bp, homo sapiens
gaggaggcacagaaggagcacacccacctgttgcagtcaaaccagcagctccgagaaattcttgatgagtgcaggcccgcaagctgaagctggagtcccaagtggatctgctgcaggct

SEQ ID NO: 14354 - DNA, 119 bp, homo sapiens
cagtcaaaccagcagctccgagaaattcttgatgagctgcaggcccgcaagctgaagctggagtcccaatggatctgctgcaggctcagagccagcaactgcagaaacacttcaggtgg

SEQ ID NO: 14355 - DNA, 119 bp, homo sapiens
ctccagcctgtcctcccacaatgtctggcacctcctctctgctgagggggtagccctccgtagtgccaagagttccttgtgcagcagacacgctccatgcggaggcggcagacagctct

SEQ ID NO: 14356 - DNA, 119 bp, homo sapiens
tccgtagtgccaaggagttccttgtgcagcagacacgctccatgcggaggcggcagacagctctgaaagtgcccagcagcattggcgccatgagctggccagtgcgcaggaggtggcca

SEQ ID NO: 14357 - DNA, 119 bp, homo sapiens
acagctctgaaagctgcccagcagcattggcgccatgagctggccagtgcgcaggaggtggccaaagaccaccaggcatcaaggccctggaagatatgcgcaagaacctggagaaggtc

SEQ ID NO: 14358 - DNA, 119 bp, homo sapiens
aagggtgcgtcagacggcggaggcacccggctctcggagcgcttggcgctgaaggcggatcgcggaggcccgagcactccccggcaggcccggtgggccccgcgggtcccgcctctcct

SEQ ID NO: 14359 - DNA, 119 bp, homo sapiens
gagcgcttggcgctgaaggcggatcgcggaggcaccgagcactccccggcaggcccggtgggccccgcggtcccgcctctcctcgcggcccggggtcccctcgaggtcccggcagtcct

SEQ ID NO: 14360 - DNA, 119 bp, homo sapiens
gcggcccggcaagccctggctgccatggtggcccggcgtgcctggaaggccggggtgccccgggcagagctggggatcttgttgtcgtccagtgggggcgagccggccgccaggcccag

SEQ ID NO: 14361 - DNA, 119 bp, homo sapiens
gtgcctggaaggccggggtgccccgggcagaggctggggatcttgttgtcgtccagtgggggcgagccgccgccaggcccaggagcagcaggacgaggagtggcctcatagcgctggca

SEQ ID NO: 14362 - DNA, 119 bp, homo sapiens
ggatcttgttgtcgtccagtgggggcgagccggccgccaggcccaggagcagcaggacgaggagtggcccatagcgctggcaccgggagcccggacgccggggtcctctcgcagtctgt

SEQ ID NO: 14363 - DNA, 119 bp, homo sapiens
ccaggtcagctgcctctggcagcctgttgcagttgaagggccagggggtgcccagtagtgccaggccagctggcactggtgctccgcttcctggcagacagagcggcaagggggcagaa

SEQ ID NO: 14364 - DNA, 119 bp, homo sapiens
cagggggtgcccagtagtgccaggccagactggcactggtgctccgcttcctggcagacagagcggcaaggggcagaacactgcctagtggggtgcaacggggcacaagcagcccacac

SEQ ID NO: 14365 - DNA, 119 bp, homo sapiens
ctccgcttcctggcagacagagcggcaagggggcagaacactgcctagtggggtgcaacggggcacaagagcccacacaggagcctccggaaatgctggtagcagggcaggcttgtcag

SEQ ID NO: 14366 - DNA, 119 bp, homo sapiens
acctactctccgtggcattgaaggccaggtaggtggctgagaagcctccactgctgatgccatgatctgcctaaacagcacagccagctcatggtgcgaggagacgaggtgggggggtg

SEQ ID NO: 14367 - DNA, 119 bp, homo sapiens
ggccaggtaggtggctgagaagcctccactgctgatgccatgatctgtcctaaacagcacagccagctctggtgcgaggagacgaggtgggggggtggctctgctccacagaacctgcc

SEQ ID NO: 14368 - DNA, 119 bp, homo sapiens
actcaccgcgcccaggggccatagcctggtaccaggcatggaaaccaaatccttccacactgctgtcaggacgaagaccaccaggaggtggctggcattggtgttgagcgtggggggag

SEQ ID NO: 14369 - DNA, 119 bp, homo sapiens
agcctggtaccaggcatggaaaccaaatccttccacactgctgtcagagacgaagaccaccaggaggtgctggcattggtgttgagcgtggggggaggcacccttccacaaaccctgca

SEQ ID NO: 14370 - DNA, 119 bp, homo sapiens
acctacctgaggagggggccttcaggctcaggggagagttccaagcgatcaaaaaggcaagaggccacatctctatgctgagggcttcgatcttgagctgtattgcatggtctgtggcc

SEQ ID NO: 14371 - DNA, 119 bp, homo sapiens
aaaggcaagaggccacactctctatgctgagggcttcgatcttgagctgtattgcatggtctgtggccactggatatgccacacgcagtgggtgttgggggggtaagggtctgggtagt

SEQ ID NO: 14372 - DNA, 119 bp, homo sapiens
tgcatggtctgtggccacctggatatgccacacgcagtgggtgttgggggggtaagggtctgggtagttgggctgctgaagaagccccttgggccagagaggaggcctccacaggctgc

SEQ ID NO: 14373 - DNA, 119 bp, homo sapiens
ggcacaaggctctgcatggctttctggagtccctgtgacagcccaagacccccaagggcccactcgctgccacaaactccctgtcagaggggcagcctctactacccgagggaaaaggc

SEQ ID NO: 14374 - DNA, 119 bp, homo sapiens
agacccccaagggcccactcgctgaccacaaactccctgtcagaggggcagcctctactacccgagggaaaggctgccaggctagaccagttcttgggctgtccttggtagagtggttt

SEQ ID NO: 14375 - DNA, 119 bp, homo sapiens
tttcagcaaccaccccatgtgtctctagaaccccagtgtagcgagctggagagaggactgtcctgagggagcaggcctggttgcagctggcgtgggggtctcagaatggagccctcagc

SEQ ID NO: 14376 - DNA, 119 bp, homo sapiens
agaggactgtcctgagggcagcaggcctggttgcagctggcgtgggggtctcagaatggagccctcagcctgaggaaagctggctcggagcaggaggagggctttgaggggctgcccag

SEQ ID NO: 14377 - DNA, 119 bp, homo sapiens
ctttgaggggctgcccagaagggtcactgacctggggatggtctccaatctccggcgcagcaacagcagctcttcaagagctggaggctacagtgccccttcggcaacaatgacaaggt

SEQ ID NO: 14378 - DNA, 119 bp, homo sapiens
ccccaggggcctggatcatcacaggggggtcccacaccggcgtcatgaagcaggtaggcgaggcggtgcggacttcagcctgagcagcagctacaaggaaggcgagctcatcaccatcg

SEQ ID NO: 14379 - DNA, 119 bp, homo sapiens
cgaggcggtgcgggacttcagcctgagcagcagctacaaggaaggcgagctcatcaccatcggagtcgcacctggggcactgtccaccgccgcgagggcctgatccatcccacggtgag

SEQ ID NO: 14380 - DNA, 119 bp, homo sapiens
ccccagagccaggactgcatcgcagcggccttggcctgcagcaagatcctgaaggaactgtccaaggagaggaggacacggacagctcggaggagatgctggcgctggcggaggagtat

SEQ ID NO: 14381 - DNA, 119 bp, homo sapiens
gcagcggccttggcctgcagcaagatcctgaaggaactgtccaaggaggaggaggacacggacagctcgaggagatgctggcgctggcggaggagtatgagcacagagccatcggtgag

SEQ ID NO: 14382 - DNA, 119 bp, homo sapiens
gcccaggggtcttcaccgagtgctaccggaaggacgaagagagagcccagaaactgctcacccgcgtgtcgaggcctgggggaagaccacctgcctgcagctcgccctggaggccaagg

SEQ ID NO: 14383 - DNA, 119 bp, homo sapiens
agagagagcccagaaactgctcacccgcgtgtccgaggcctgggggaagaccacctgcctgcagctcgcctggaggccaaggacatgaagtttgtgtctcacgggggcatccaggtgac

SEQ ID NO: 14384 - DNA, 119 bp, homo sapiens
ctgcagatgaaggacgtcttcttcttcctcttcctgctggctgtgtgggtggtgtccttcggggtggccagcaggccatcctcatccacaacgagcgccgggtggactggctgttccga

SEQ ID NO: 14385 - DNA, 119 bp, homo sapiens
tcctgctggctgtgtgggtggtgtccttcggggtggccaagcaggccatcctcatccacaacgagcgccggtggactggctgttccgaggggccgtctaccactcctacctcaccatct

SEQ ID NO: 14386 - DNA, 119 bp, homo sapiens
ggtggccaagcaggccatcctcatccacaacgagcgccgggtggactggctgttccgaggggccgtctacactcctacctcaccatcttcgggcagatcccgggctacatcgacggtag

SEQ ID NO: 14387 - DNA, 119 bp, homo sapiens
tgacagagaacaagctggagaagaacgaggaggcggccctgctatcctgggagatctacctgaaggagactacctccagaaccgacagttccagcaaaagcagcggcccgagcagaaga

SEQ ID NO: 14388 - DNA, 119 bp, homo sapiens
acgaggaggcggccctgctatcctgggagatctacctgaaggagaactacctccagaaccgacagttccgcaaaagcagcggcccgagcagaagatcgaggacatcagcaataagtatg

SEQ ID NO: 14389 - DNA, 119 bp, homo sapiens
ccccagcctcccagaaggccgcggaggagccggatgctgagccgggaggcaggaagaagacggaggagcgggcgacagctaccacgtgaatgcccggcacctcctctaccccaactgcc

SEQ ID NO: 14390 - DNA, 119 bp, homo sapiens
caggaagaagacggaggagccgggcgacagctaccacgtgaatgcccggcacctcctctaccccaactgcctgtcacgcgcttccccgtgcccaacgagaaggtgccctgggaggtgag

SEQ ID NO: 14391 - DNA, 119 bp, homo sapiens
ctgtgaggaaggggccctgccactctccccaagagggcctccatgtttcgaggtgcctcaacatggagcttgcctggcctgggctaggggcactgtctgaactcctgactgtcaggata

SEQ ID NO: 14392 - DNA, 119 bp, homo sapiens
tgtttcgaggtgcctcaacatggagccttgcctggcctgggctaggggcactgtctgaactcctgactgcaggataaactccgtgggggtacaggagcccagacaaagcccaggcctgt

SEQ ID NO: 14393 - DNA, 119 bp, homo sapiens
aggggcactgtctgaactcctgactgtcaggataaactccgtgggggtacaggagcccagacaaagcccggcctgtcaagagacgcagagggcccctgccagggttggccccagggacc

SEQ ID NO: 14394 - DNA, 119 bp, homo sapiens
ggggtacaggagcccagacaaagcccaggcctgtcaagagacgcagagggcccctgccagggttggcccagggaccctgggacgaggctgcagaagctctccctccctactccctggga

SEQ ID NO: 14395 - DNA, 119 bp, homo sapiens
tgttacctggtccttctgcccagcggaggttgaagacgaagctgccagcaggatgctctgaggcctggcgtaccacagcgggaagcggtccagggtgaacacgctggcctcgtcctcag

SEQ ID NO: 14396 - DNA, 119 bp, homo sapiens
ccagcggaggttgaagacgaagctgccagcaggatgctctgaggcctggcggtaccacagcgggaagcgtccagggtgaacacgctggcctcgtcctcaggtgtcaggaacttcctgca

SEQ ID NO: 14397 - DNA, 119 bp, homo sapiens
ggctacctttgttgtacacgttggtgggcagctgcacgctgctgatggaggtgttcaccggcaggttgcgaagtgagcattggactccaggaggaactcggcgcccagctccacgaagt

SEQ ID NO: 14398 - DNA, 119 bp, homo sapiens
tcaccggcaggttgctgaagtgagcattggactccaggaggaactcggcgcccagctccacgaagttgccttctcgtccctctcgttgatcaggaccgagttgtaatagtcgaactggg

SEQ ID NO: 14399 - DNA, 119 bp, homo sapiens
gcttacgtttccagaggaatcttggcctgtccccacgcaggggacagggaggtgcctagaagcagcagcacaggagggccgaggtcttctgcacaaaggcccaggccacgggcattggc

SEQ ID NO: 14400 - DNA, 119 bp, homo sapiens
gaggtgcctagaagcagcagccacaggagggccgaggtcttctgcacaaaggcccaggccacgggcattgctggaggggaatccagcggctgctggagctggggtttgcgaggaagttg

SEQ ID NO: 14401 - DNA, 119 bp, homo sapiens
aaggcccaggccacgggcattggctggaggggaatccagcggctgctggagctggggtttgcgaggaagtgggagttgcaggcatggtgggcctggggttggggaggggaaggagggca

SEQ ID NO: 14402 - DNA, 119 bp, homo sapiens
gagctggggtttgcgaggaagttgggagttgcaggcatggtgggcctggggttggggaggggaaggaggcagagcagccacagaccatgagctctgtctgccttcctcccagaccccag

SEQ ID NO: 14403 - DNA, 119 bp, homo sapiens
gggttggggaggggaaggagggcagagcagccacagaccatgagctctgtctgccttcctcccagacccaggacgccccaggcctttgtcttccgtgccttggcgagcctggggtctcc

SEQ ID NO: 14404 - DNA, 119 bp, homo sapiens
taagcctgagccccgccccctggctccccgccccctcttctcccctcccccaagccagcacctggtgcccggcgggtcgtgcggcgcggcgctccgcggtgagcgcctgaccccgaggg

SEQ ID NO: 14405 - DNA, 119 bp, homo sapiens
cctggtgccccggcgggtcgtgcggcgcggcgctccgcggtgagcgcctgaccccgagggggcccggggcgcgtccctgggccctccccacccttgcggtggcctcgcgggtcccaggg

SEQ ID NO: 14406 - DNA, 119 bp, homo sapiens
gaagggctccggtgacttaaggggagggaatgctcctctgccgtgctcaccgcgtgctggggctgcgcgggctaggtatggtcgggctgttttcccactgtcccttcttcgggcagtgt

SEQ ID NO: 14407 - DNA, 119 bp, homo sapiens
accgcgtgctggggctgcgcggggctaggtatggtcgggctgttttcccactgtcccttcttcgggcaggtcgccgtccagcctggttgttgaagcgtccccgtggtcccccggggtcc

SEQ ID NO: 14408 - DNA, 119 bp, homo sapiens
cactgtcccttcttcgggcagtgtcgccgtccagcctggttgttgaagcgtccccgtggtcccccggggccaggcccctttgtggaggcagctgctggcccccagcccatgggaccgta

SEQ ID NO: 14409 - DNA, 119 bp, homo sapiens
tggcccccagcccatgggaccgtagtcgcggaggcctctgcagaggcgcaggctggaagcggtggccttgaggggggcggcaggagagagtaccgacctccctcgaactcctggcagag

SEQ ID NO: 14410 - DNA, 119 bp, homo sapiens
catcagagagctggcggtcaccatggcaatgcgggagctggtggaggccgaatgcgggggtgccaacccctcatgaagctcgccgggcacttcacccaggacaaggcccttcggcagga

SEQ ID NO: 14411 - DNA, 119 bp, homo sapiens
gaatgcgggggtgccaacccgctcatgaagctcgccgggcacttcacccaggacaaggcccttcggcagagggattgaggcctggcccctggccccccggagccccggcctctgaggca

SEQ ID NO: 14412 - DNA, 119 bp, homo sapiens
aggacaaggcccttcggcaggagggattgaggcctggcccctggccccccggagccccggcctctgaggagtgagtgttcttgaggtggaaagcccaggtgcagcctctgaggcagtga

SEQ ID NO: 14413 - DNA, 119 bp, homo sapiens
tttaagcccctggtgtggcagacttggccttgtctgagaactgggcccaggagtttcttgcagctggagtgctgtggatgtaactcaggattataatgagactgactggtcccaagaat

SEQ ID NO: 14414 - DNA, 119 bp, homo sapiens
ttggccttgtctgagaactgggcccaggagtttcttgcagctggagatgctgtggatgtaactcaggatataatgagactgactggtcccaagaattcatctctgaagttacaggtgaa

SEQ ID NO: 14415 - DNA, 119 bp, homo sapiens
ttgtaggggtaccagtttgaggaggagaaccccttgcgtgatcaccctcagccttttgaagaagggctgggcgccttcaggagggggacctgccaaatgctgtgctgctttttgaggca

SEQ ID NO: 14416 - DNA, 119 bp, homo sapiens
gcgtgatcaccctcagccttttgaagaagggctgcggcgccttcaggagggggacctgccaaatgctgtctgctttttgaggcagctgtgcagcaggatcctaagcacatggaagtgag

SEQ ID NO: 14417 - DNA, 119 bp, homo sapiens
gcttaccactcttccactcagggtggcagagtttcaggtctctgcaggtgcgagcagggttcttgcggggccctcggggctgcggatgctctcaatctggttgttgagggacttgagtg

SEQ ID NO: 14418 - DNA, 119 bp, homo sapiens
ttcttgcgggagccctcggggctgcggatgctctcaatctggttgttgagggacttgagtgtggcatcccctcggcgtcatgctgtctcaggccaccggctgcctggtcggcccgcatg

SEQ ID NO: 14419 - DNA, 119 bp, homo sapiens
tgtactgcagggggtcggggcccttctctctcgggcctaagccagcaaaggcggacatgtcgatgccaggccagggggacctggaggaccagggggtccaggatttccaggaggaccct

SEQ ID NO: 14420 - DNA, 119 bp, homo sapiens
ccaggtaagtgcaagcagcaatttaaaagccacatttctggagggacagcctgaaggaatgggaagtaagatacttactccaccaagaccagggggaccaggggggccgggaggaccag

SEQ ID NO: 14421 - DNA, 119 bp, homo sapiens
ctgaaggaatgggaagtaaggatacttactccaccaagaccagggggaccaggggggccgggaggaccagggggccaggatttccaggggtcccaggttctccatctctgccacgaggt

SEQ ID NO: 14422 - DNA, 119 bp, homo sapiens
aggggggccgggaggaccaggggggccaggatttccaggggtcccaggttctccatctctgccacgaggccaggggcacccttggcataaagagaaaaaggcatcaatgggaagcagtg

SEQ ID NO: 14423 - DNA, 119 bp, homo sapiens
acttacggacatcctggccctgacaccgaaggacagcggcgacgagcagcgtcagcagcaccagcgtctgggagccccgaggcgaatcatggctcaccgcggggcctggctgagccggg

SEQ ID NO: 14424 - DNA, 119 bp, homo sapiens
tcagcagcaccagcgtctggggagccccgaggcgaatcatggctcaccgcggggcctggctgagccgggccgggcggagcgcagcgaaacggcaggagcacggcgcgggtccgggtctc

SEQ ID NO: 14425 - DNA, 119 bp, homo sapiens
ggcgcgggtccgggtctctaccgcgccctcatgcaggaggcccttggagcaggagggggaagcgggagaccggcagcccagcagcgctctgcgtcttctccccgccgcggcgcccgtta

SEQ ID NO: 14426 - DNA, 119 bp, homo sapiens
acacttaatacgcctggcatccaagtccacccactccggactttggccttagcagtagttagtgtgggagctgggaagactgggagcagtctcttaaacaaaagcaaaagaataagctt

SEQ ID NO: 14427 - DNA, 119 bp, homo sapiens
ttggccttagcagtagttagtgtgggaggctgggaagactgggagcagtctcttaaacaaaagcaaaagataagcttcgggcgctgtagtacctgccagctttcgccacaggaggtaag

SEQ ID NO: 14428 - DNA, 119 bp, homo sapiens
ttccgagtcctggccagctgcctgaccccctccggggccgaggacctgcagcgggtggcctcctcccgctccacaccaccctgttggatatcactgatccccagagcgtccagcaggca

SEQ ID NO: 14429 - DNA, 119 bp, homo sapiens
gccgaggacctgcagcgggtggcctcctcccgcctccacaccaccctgttggatatcactgatccccaggcgtccagcaggcagccaagtgggtggagatgcacgttaaggaagcaggt

SEQ ID NO: 14430 - DNA, 119 bp, homo sapiens
ccacagggctttttggtctggtgaataatgctggtgtggctggtatcatcggacccacaccatggctgaccgggacgatttccagcgggtgctgaatgtgaacacaatgggtcccatcg

SEQ ID NO: 14431 - DNA, 119 bp, homo sapiens
cggacccacaccatggctgacccgggacgatttccagcgggtgctgaatgtgaacacaatgggtcccatggggtcacccttgccctgctgcctctgctgcagcaagcccggggccgggt

SEQ ID NO: 14432 - DNA, 119 bp, homo sapiens
tgcagcaagcccggggccgggtgatcaacatcaccagcgtcctgggtcgcctggcagccaatggtggggctactgtgtctccaaatttggcctggaggccttctctgacagcctgaggt

SEQ ID NO: 14433 - DNA, 119 bp, homo sapiens
taacaggcgctgtccatgtatctaggtggggcccccgccggcccagcaggaaccggcaaaaccgagaccccaaggacctggcgaaagccttgggcttgctctgtgttgtcaccaactgt

SEQ ID NO: 14434 - DNA, 119 bp, homo sapiens
tggggcccccgccggcccagcaggaaccggcaaaaccgagaccaccaaggacctggcgaaagccttgggttgctctgtgttgtcaccaactgtggcgaaggcatggattacagggtaag

SEQ ID NO: 14435 - DNA, 119 bp, homo sapiens
cctcagctcagtgcaagcgtctggatgggggactggacaagctgaaggaggccaccatccagctggacggctgaaccagaagctggccgagcagaagatcgtgctggcggagaagtccg

SEQ ID NO: 14436 - DNA, 119 bp, homo sapiens
accatccagctggacgagctgaaccagaagctggccgagcagaagatcgtgctggcggagaagtccgcccctgcgaggccttgctggaggagatcgccgtcaacaccgctgtaggtgag

SEQ ID NO: 14437 - DNA, 119 bp, homo sapiens
ctgcagccgaggagaagaagaaactggcagaggaaaaggccatggagatagaggagcagaacaaagtcatgccatggagaaggccgaggccgagacgaccctggcagaggtcatgccca

SEQ ID NO: 14438 - DNA, 119 bp, homo sapiens
aaaaggccatggagatagaggagcagaacaaagtcattgccatggagaaggccgaggccgagacgacccggcagaggtcatgcccatcctggaggccgccaagctggaactgcagaagc

SEQ ID NO: 14439 - DNA, 119 bp, homo sapiens
tcattgccatggagaaggccgaggccgagacgaccctggcagaggtcatgcccatcctggaggccgccagctggaactgcagaagctggacaagtcggacgtgactgagattaggtaat

SEQ ID NO: 14440 - DNA, 119 bp, homo sapiens
ccacagtcacgctgaagggcctggaggaccagctgctgagcgtgctggtggcttacgagaggcgggagcggaggagcagcgggagcacctcatccaggagaccagcgagaacaagaacc

SEQ ID NO: 14441 - DNA, 119 bp, homo sapiens
gtggcttacgagaggcgggagctggaggagcagcgggagcacctcatccaggagaccagcgagaacaagacctgctcaaggacctggaagattccctccttcgggagctggccacgtcc

SEQ ID NO: 14442 - DNA, 119 bp, homo sapiens
ctccaggtgaccgagagcgagcccagcgtgatgtggctctcggggctgcacatccctgagtcctacctccggcgctggtgcaggccacctgccggaagaacggctggccactggaccgc

SEQ ID NO: 14443 - DNA, 119 bp, homo sapiens
gctctcggggctgcacatccctgagtcctacctcacggcgctggtgcaggccacctgccggaagaacggtggccactggaccgctccaccttgttcacacaagtgaccaagttccagga

SEQ ID NO: 14444 - DNA, 119 bp, homo sapiens
cggcgctggtgcaggccacctgccggaagaacggctggccactggaccgctccaccttgttcacacaaggaccaagttccaggatgcagatgaagtgaatgagcgggcgggacaaggta

SEQ ID NO: 14445 - DNA, 119 bp, homo sapiens
cgggggtctcggcgttggggtctctgcgctggggctcctgcgctcctaggcgggtcctgggccgggcgcgccgaggggctccgagtcggggagaggagcgcgcgggcgctgcggggccg

SEQ ID NO: 14446 - DNA, 119 bp, homo sapiens
taggcgggtcctgggccgggcgccgccgaggggctccgagtcggggagaggagcgcgcgggcgctgcgggccgcaacacctgtctcccgccgtggcgccttttaaccgcaccccacacc

SEQ ID NO: 14447 - DNA, 119 bp, homo sapiens
gggacgggccacaggccaagggcagcagtcaggcctgctctgtctgtgaacgctcccggcttggcctcgctgatgggccctcacgcctgaagcgggcaggaagctccgggatggatttc

SEQ ID NO: 14448 - DNA, 119 bp, homo sapiens
gctctgtctgtgaacgctcccggcttggcctcggctgatgggccctcacgcctgaagcgggcaggaagcccgggatggatttcgggtctttggagaccgtggtggccaactctgccttc

SEQ ID NO: 14449 - DNA, 119 bp, homo sapiens
cccagaccatcctggcccagtacctggacccccaggccaaactcttctgcagcttcctggatgaggggaagtggcgaagtttaaggaggggcctgtggagatccaggacgggctcttcc

SEQ ID NO: 14450 - DNA, 119 bp, homo sapiens
ttcctggatgaggggatagtggcgaagtttaaggaggggcctgtggagatccaggacgggctcttccagccctgctgcaggccaccctggcacacctgggccaagcccccttccaggag

SEQ ID NO: 14451 - DNA, 119 bp, homo sapiens
ggacgggctcttccagcccctgctgcaggccaccctggcacacctgggccaagcccccttccaggagtactgggcagcctgtacttcctgaggttcctgcagtggaagtggctggaagc

SEQ ID NO: 14452 - DNA, 119 bp, homo sapiens
cccccttccaggagtacctgggcagcctgtacttcctgaggttcctgcagtggaagtggctggaagcccgcccatgggggaggactggttcctggacttcagggtcctagggaaagggg

SEQ ID NO: 14453 - DNA, 119 bp, homo sapiens
aagtggctggaagcccagcccatgggggaggactggttcctggacttcagggtcctagggaaagggggctcggggaggtgtcggcctgccagatgaaggcgaccggcaagctgtatgcc

SEQ ID NO: 14454 - DNA, 119 bp, homo sapiens
cctagggaaagggggcttcggggaggtgtcggcctgccagatgaaggcgaccggcaagctgtatgcctgaagaagctgaacaagaagcggctgaagaagaggaagggctaccaggtgag

SEQ ID NO: 14455 - DNA, 119 bp, homo sapiens
ccccaggtaccacatctacaacgtgaatgaggagaaccctggcttcccggagccgcgcgccctcttctaacggcgcagatcatctgcggcctggagcacctgcaccagaggcggatcgt

SEQ ID NO: 14456 - DNA, 119 bp, homo sapiens
gagccgcgcgccctcttctacacggcgcagatcatctgcggcctggagcacctgcaccagaggcggatctctaccgcgacctcaagcccgagaacgtgctgctggacaatgacggtagg

SEQ ID NO: 14457 - DNA, 119 bp, homo sapiens
tgttagttggttctggtttgggtcagagacacccagtggcccaggtgggcgtggggccagggcgcagacagaaggggcacgagggctccgctccgaggacccagcggcaagcaccggtc

SEQ ID NO: 14458 - DNA, 119 bp, homo sapiens
gccagggcgcagacgagaaggggcacgagggctccgctccgaggacccagcggcaagcaccggtcccggcgcgccccagcccacccactcgcgtgcccacggcggcattattccctata

SEQ ID NO: 14459 - DNA, 119 bp, homo sapiens
agcaccggtcccgggcgcgccccagcccacccactcgcgtgcccacggcggcattattccctataaggactgaacgatccgggggcggccccgccccgttaccccttgcccccggcccc

SEQ ID NO: 14460 - DNA, 119 bp, homo sapiens
attccctataaggatctgaacgatccgggggcggccccgccccgttaccccttgcccccggccccgcccctttttggagggccgatgaggtaatgcggctctgccattggtctgagggg

SEQ ID NO: 14461 - DNA, 119 bp, homo sapiens
ccccggccccgccccctttttggagggccgatgaggtaatgcggctctgccattggtctgagggggcggccccaacagcccgaggcggggtccccgggggcccagcgctatatcactcg

SEQ ID NO: 14462 - DNA, 119 bp, homo sapiens
gtctgagggggcgggccccaacagcccgaggcggggtccccgggggcccagcgctatatcactcggccgccaggcagcggcgcagagcgggcagcaggcaggcggcgggcgctcagacg

SEQ ID NO: 14463 - DNA, 119 bp, homo sapiens
ttcgccgggaggccgcccgccgagtcctgcgccagcgccgaggcagcctcgctgcgccccatcccgtccgccgggcactcggagggcagcgcgccggaggccaaggttgccccgcacgg

SEQ ID NO: 14464 - DNA, 119 bp, homo sapiens
ccccatcccgtcccgccgggcactcggagggcagcgcgccggaggccaaggttgccccgcacggcccgggggcgagcgagctcgggctgcagcagccccgccggcggcgcgcacggcaa

SEQ ID NO: 14465 - DNA, 119 bp, homo sapiens
ccgcacggcccggcgggcgagcgagctcgggctgcagcagccccgccggcggcgcgcacggcaactttgagaggcgagcagcagccccggcagcggcggcagcagcggcaatgacccct

SEQ ID NO: 14466 - DNA, 119 bp, homo sapiens
tgaccccttggctcgggctcatcgtgctcctgggcagctggagcctgggggactggggcgccgaggcgtcacatgctcgcccagccacccccaggacgccttctgcaactccgacatcg

SEQ ID NO: 14467 - DNA, 119 bp, homo sapiens
acttacctgctacaacagtagccccattgaggtacagagccatgcccacgagcatcatgactcccaggggaggatgtagggtctccggcggccccacctggaccggcagtggtcgctgg

SEQ ID NO: 14468 - DNA, 119 bp, homo sapiens
agccatgcccacgagcatcatgactcccagggtgaggatgtagggtctccggcggccccacctggaccgcagtggtcgctggccgatccgaccacgggctgcagcaggaatcccaggat

SEQ ID NO: 14469 - DNA, 119 bp, homo sapiens
atagccccggcccgggccgcctctgcacgtccgccccggagcccgcacccgcgccccacgcgccgccgagactcggcccggctcgtggagcccttcgcccgcggcgtgagtacccccga

SEQ ID NO: 14470 - DNA, 119 bp, homo sapiens
cgcgccccacgcgccgccgaggactcggcccggctcgtggagcccttcgcccgcggcgtgagtacccccacccgcccgtccccgctctgctcgcgccctgccgctgcgccgccctcggt

SEQ ID NO: 14471 - DNA, 119 bp, homo sapiens
cccgcggcgtgagtacccccgacccgcccgtccccgctctgctcgcgccctgccgctgcgccgccctcgtggcttttccgacgggcgagccccgtgctgtgcgggaaagaatccgacaa

SEQ ID NO: 14472 - DNA, 119 bp, homo sapiens
ctgccgctgcgccgccctcggtggcttttccgacgggcgagccccgtgctgtgcgggaaagaatccgacacttcgcagcccatcccggctggacgcgaccgggagtgcagcagcccgtt

SEQ ID NO: 14473 - DNA, 119 bp, homo sapiens
tgtgcgggaaagaatccgacaacttcgcagcccatcccggctggacgcgaccgggagtgcagcagcccgtcccctcctcggtgccgcctctgcccagcgtttgcttggctgggctacca

SEQ ID NO: 14474 - DNA, 119 bp, homo sapiens
accgggagtgcagcagcccgttcccctcctcggtgccgcctctgcccagcgtttgcttggctgggctacacctgcgctcggacggcgctcggagggtcctcgcccccggcctgcctacc

SEQ ID NO: 14475 - DNA, 119 bp, homo sapiens
ttccaggtgatgtgttccacctcactgtccccagtaaattcaccttcgaggaggctgcaaaagagtgtgaaaccaggatgccaggctggcaacagtgggggaactccaggcggcatgga

SEQ ID NO: 14476 - DNA, 119 bp, homo sapiens
tgcaaaagagtgtgaaaaccaggatgccaggctggcaacagtgggggaactccaggcggcatggaggaaggctttgaccagtgcgattacgggtggctgtcggatgccagcgtgcgcca

SEQ ID NO: 14477 - DNA, 119 bp, homo sapiens
tttcagggagcctttcattttcccacggtgaacaaaggaaaggagttttcctgtggacgtttcctagcctggttggccagaggcctttgttcttcacctatcaggagtgcagagcagtg

SEQ ID NO: 14478 - DNA, 119 bp, homo sapiens
gtgaacaaaggaaaggagttttcctgtggacgtttcctagccctggttggccagaggcctttgttcttccctatcaggagtgcagagcagtgctcctggcggagctcaactccggtaag

SEQ ID NO: 14479 - DNA, 119 bp, homo sapiens
acccacctgcagggaggtgaggctgaaggtgatgaccagctgtgaggtggggctgatgaagggaggggggtgaccgagcgcttgccctgctcaaagatgcggtagatacggttggtctt

SEQ ID NO: 14480 - DNA, 119 bp, homo sapiens
gaagggagggggtgtgaccgagcgcttgccctgctcaaagatgcggtagatacggttggtcttggtgagagggcagagtagctgagggtcgtgcccaggcccaggaagagcctgcgggc

SEQ ID NO: 14481 - DNA, 119 bp, homo sapiens
ggtcttggtgagcagggcagagtagctgagggtcgtgcccaggcccaggaagagcctgcgggcggcacaaccgcggccccaggctcagccaccatgaggaaggtgatggcgtagatgag

SEQ ID NO: 14482 - DNA, 119 bp, homo sapiens
gcgggcggcacagaccgcggccccaggctcagccaccatgaggaaggtgatggcgtagatgaggaagatccggtgaggaggacgtagctgagctctcggcccgaggcccggacgatggg

SEQ ID NO: 14483 - DNA, 119 bp, homo sapiens
gatgaggaagatgccggtgaggaggacgtagctgagctctcggcccgaggcccggacgatgggcgtgttttgtaccgcacgaaggtggccaccaccgtggtagtggccacgatgcccag

SEQ ID NO: 14484 - DNA, 119 bp, homo sapiens
gatgggcgtgttgttgtaccgcacgaaggtggccaccaccgtggtagtggccacgatgcccagcacggcaggaggagcggcggggctgcccagggggaggaccagctcaggcgcaccac

SEQ ID NO: 14485 - DNA, 119 bp, homo sapiens
caccacaggtgtggggcggcagcccgtgtggttgggcgtgggcctcatgtccccaggacaggcctcgcagtgaactcgtccacctggaagcggtacccgtcacaggcctcgcagtgcca

SEQ ID NO: 14486 - DNA, 119 bp, homo sapiens
acaggcctcgcatgtgaactcgtccacctggaagcggtacccgtcacaggcctcgcagtgccaacagcagggacgcccttcaccatcttcttccgctcccccggcccgcagggcaggct

SEQ ID NO: 14487 - DNA, 119 bp, homo sapiens
gtgccaacagcaggggacgcccttcaccatcttcttccgctcccccggcccgcagggcaggctgcacaggacgagggcacctcgtgggggtcgccagaccactgcagggcctccacctg

SEQ ID NO: 14488 - DNA, 119 bp, homo sapiens
actcacatccagtctgagggtctctgcccactggcccactgcctggtacccgccactgctggcactgccttggtcgcctggtactggaagatgtcgtaccgcccgggcgcatctccgtt

SEQ ID NO: 14489 - DNA, 119 bp, homo sapiens
actgcctggtacccgccactgctggcactgccattggtcgcctggtactggaagatgtcgtaccgcccggcgcatctccgttctcgttgaacatcacaggggttcctgcgctgcctgga

SEQ ID NO: 14490 - DNA, 119 bp, homo sapiens
actcaccattgaagcggacagctcgaatgtactgcagaagcatccgcccatcagtgggttccatcgccggcacaggcctgtgtgcccagggcagagcgcctggtgcatgctgtggaggg

SEQ ID NO: 14491 - DNA, 119 bp, homo sapiens
gcccatcagtgggttccatcgccgggcacaggcctgtgtgcccagggcagagcgcctggtgcatgctgtgagggcgtgggcaatggcgtacaccgcatcaatcacaaactgcaccttgc

SEQ ID NO: 14492 - DNA, 119 bp, homo sapiens
ggcagagcgcctggtgcatgctgtggagggcgtgggcaatggcgtacaccgcatcaatcacaaactgcacttgccctcctgctcgtaggtggagtcccggccgatgcgttcctcgcctg

SEQ ID NO: 14493 - DNA, 119 bp, homo sapiens
actcaccgtcgatggaggcccttttgggcaggatggtgatggccccaacggccacgtcctccaggctcagatgggtgaggtcttggctccccagctgtctgagccgacccacaggaagt

SEQ ID NO: 14494 - DNA, 119 bp, homo sapiens
aacggccacgtcctccaggctcaagatgggtgaggtcttggctccccagctgtctgagccgacccacagaagtggccggtcaggttggcctggcgagctgcctccaggacccgcctggt

SEQ ID NO: 14495 - DNA, 119 bp, homo sapiens
cctcaccgcaaacaggcgcagcacgttggcgaccatgatggagacggagctggccgaggcgcccacgacgccacgacgcgctcggggggcgcggggcgcagcggagggacgcctcccgg

SEQ ID NO: 14496 - DNA, 119 bp, homo sapiens
aggcgcccacgacggccacgacgcgctcggggggcgcggggcgcagcggagggacgcctcccgggcagccacgcccacctcgtcgccgtcgccgcggccgcggatcagcgcctgcacga

SEQ ID NO: 14497 - DNA, 119 bp, homo sapiens
cctcccgggcagcgcacgcccacctcgtcgccgtcgccgcggccgcggatcagcgcctgcacgaagctcgcgcctgctccagcgcgtaggtgtcccgcgagcaggtgtccagcagccgc

SEQ ID NO: 14498 - DNA, 119 bp, homo sapiens
gcagccgcgcgcccaggcgcacgccgggcagcagctcggggtcggcgttgacgcggtccagcgcgtacacatggcctccagccggtgcacgccctgctccttcttcagctgcccgcacg

SEQ ID NO: 14499 - DNA, 119 bp, homo sapiens
cgcgcgtgcaccgggaacaggccgcccagcgtcaggccgcccgccaggcgcacagagcccgccgcgcgcccaggcccgcctgcgccagccacgccagcggcagcagcgccacgagcagc

SEQ ID NO: 14500 - DNA, 119 bp, homo sapiens
cagagcccgccgcgcgcgccaggcccgcctgcgccagccacgccagcggcagcagcgccacgagcagcgctcccgggctctccggggccgcgccatcggctcgtctagcgggctgcggg

SEQ ID NO: 14501 - DNA, 119 bp, homo sapiens
cagcgccacgagcagcggctcccgggctctccggggccgcgccatcggctcgtctagcgggctgcgggggacagaggggcggggagcgctctgagggcgggggaaggagagcgcgggct

SEQ ID NO: 14502 - DNA, 119 bp, homo sapiens
aaggagagcgcgggctcggggcgcggggagggacaccggggtcctggggagaaggcgctcggggcgcgcttccacttcggctctggggagttagctcagccggcctgcccgggcctccg

SEQ ID NO: 14503 - DNA, 119 bp, homo sapiens
catatcaaaaggatccaaagaactcatggagagaataacagggaaaaacatgaataaaaacatacctgttttcattaattgatagaggttttctttcatatattcaaatataaaataaa

SEQ ID NO: 14504 - DNA, 119 bp, homo sapiens
gagaataacagggaaaaacatgaataaaaacatacctgtctttcattaattgatagaggttttctttcaatattcaaatataaaataaagatggtcattttctctgataacttctttca

SEQ ID NO: 14505 - DNA, 119 bp, homo sapiens
gggtgggacttctgcagtttctgtttccttgactggcagctcagcggggccctcccgcttggatgttccggaaagtgatgtgggtaggacaggcggggcgagccgcaggtgccagaaca

SEQ ID NO: 14506 - DNA, 119 bp, homo sapiens
tttctgtttccttgactggcagctcagcggggccctcccgcttggatgttccgggaaagtgatgtgggtggacaggcggggcgagccgcaggtgccagaacacagattgtataaaaggc

SEQ ID NO: 14507 - DNA, 119 bp, homo sapiens
acccaggggaacaacagaagcggaagatcgtcctggacccttcaggctccatgaacatctacctggtgcagatggatcagacagcattggggccagcaacttcacaggagccaaaaagt

SEQ ID NO: 14508 - DNA, 119 bp, homo sapiens
cgtcctggacccttcaggctccatgaacatctacctggtgctagatggatcagacagcattggggccagaacttcacaggagccaaaaagtgtctagtcaacttaattgagaaggtgga

SEQ ID NO: 14509 - DNA, 119 bp, homo sapiens
ctccgcttggccaaggacgcggctttattggggatgtgggtgcctggccctcgtcccccatcacctacccctcctcctagcccgccccagctcctcggagccctagcgcggtcccgggg

SEQ ID NO: 14510 - DNA, 119 bp, homo sapiens
atcacctaccccctcctcctagcccgccccagctcctcggagccctagcgcggtcccggggagaggggagttaaaacaacaatgactactgctcccggacaggaagtgactggggcgcg

SEQ ID NO: 14511 - DNA, 119 bp, homo sapiens
ggagaggggaggttaaaacaacaatgactactgctcccggacaggaagtgactggggcgcggggaggagggggcacagcggcgcaggcgagctccgagaccagatgtgcggctccaact

SEQ ID NO: 14512 - DNA, 119 bp, homo sapiens
cggggaggaggggggcacagcggcgcaggcgagctccgagaccagatgtgcggctccaactccagatgtcttcatctccgtcctacccgccgtccgggctcctcctgcctcggcctgtg

SEQ ID NO: 14513 - DNA, 119 bp, homo sapiens
ctccagatgttcttcatctccgtcctacccgccgtccgggctcctcctgcctcggcctgtgccaggctgggagaggacggaggtcaccgagaggcagtgagaggtcagccccgacacag

SEQ ID NO: 14514 - DNA, 119 bp, homo sapiens
tgccaggctggggagaggacggaggtcaccgagaggcagtgagaggtcagccccgacacaggagcagtttccgcgggagctttgctggagggaccctgccagcctccactgaatccttt

SEQ ID NO: 14515 - DNA, 119 bp, homo sapiens
ttcccccacgctgacgggctctgggggcgctgaggggctgctggggtcactcgcaggccagcttcccgtgaaactggagagggcgatggcgaaggcctgcagggcgcacagcgggtacc

SEQ ID NO: 14516 - DNA, 119 bp, homo sapiens
agcttcccgtcgaaactggagagggcgatggcgaaggcctgcagggcgcacagcgggtaccggtagtctgggtgaaggcgtcctccgccacgcggccgaactgcagcacgatatagtcg

SEQ ID NO: 14517 - DNA, 119 bp, homo sapiens
acccaccttcttctccgtgtccaggtgcaggaagtaggagggatacatgcctcgatccatgcccttttttcccgggtcagccggcagcgcaccgtgcggccctggggggcaggccggag

SEQ ID NO: 14518 - DNA, 119 bp, homo sapiens
aagtaggagggatacatgcctcgatccatgccctttttgtcccgggtcagccggcagcgcaccgtgcggcctggggggcaggccggagcacaaactcccggggttcgtccacctccacg

SEQ ID NO: 14519 - DNA, 119 bp, homo sapiens
cctttttgtcccgggtcagccggcagcgcaccgtgcggccctggggggcaggccggagcacaaactcccgggttcgtccacctccacggggggagacggggccctctcctccttctggg

SEQ ID NO: 14520 - DNA, 119 bp, homo sapiens
tctcaccgtcctccgcgtctggggcacgggctaccagaaaggtttcccgggggtcgcgcttcttggcctggggtccctgaggaacctggcgtagaccgtctgcggcgcccgggcctggg

SEQ ID NO: 14521 - DNA, 119 bp, homo sapiens
gggtcgcgcttcttggcctcggggtccctgaggaacctggcgtagaccgtctgcggcgcccgggcctggctgggtctggggaaggctcctcccgcggcctccccgtccgcccagctgag

SEQ ID NO: 14522 - DNA, 119 bp, homo sapiens
ggcagcagcctgaggaggagcccttccttcccagatctctctgtgggctatcaaggtacctgcagccatctgagcggggtcccagaccctggggggctcctagcaggcagcaaacttgc

SEQ ID NO: 14523 - DNA, 119 bp, homo sapiens
acctgcagccatgctgagcggggtcccagaccctggggggctcctagcaggcagcaaacttgcgctggagcgcttgtaccggagcagctcctgctcactgactgagggttgcagccggg

SEQ ID NO: 14524 - DNA, 119 bp, homo sapiens
acttgcgctggatgcgcttgtaccggagcagctcctgctcactgactgagggttgcagccgggcggcagctgcagcaagtcctccatggtgagcatcagtgctgagctacctggctcca

SEQ ID NO: 14525 - DNA, 119 bp, homo sapiens
ggccacctgaggaaggtaaggctgcactcagtggctactgccttggccagaagggtcttgccggtgccaggggcccatggagcagaaggcctgagcgtctcaggcccaggctcagtagc

SEQ ID NO: 14526 - DNA, 119 bp, homo sapiens
ctcagtggctactgccttggccagaagggtcttgccggtgccagggggcccatggagcagaaggcctgacgtctcaggcccaggctcagtagctcagggtgctccagggggagctgaat

SEQ ID NO: 14527 - DNA, 119 bp, homo sapiens
actcactgcacaccgccgtgctagctgtgccaagttcacctcctggcccaggggaaggtgggcagtgaggcccgcaggatgctgagccgctgcccctctgacagagcaggcacctcgag

SEQ ID NO: 14528 - DNA, 119 bp, homo sapiens
tggcccaggggaaggtgggcagtgagggcccgcaggatgctgagccgctgcccctctgacagagcaggccctcgagctcatgaggaaatgctgtctgcacatcagcaggcaggtcctgg

SEQ ID NO: 14529 - DNA, 119 bp, homo sapiens
gccgctgcccctctgacagagcaggcacctcgagctcatgaggaaatgctgtctgcacatcagcaggcagtcctgggcccggcttgtggtggccacaaccatgaggggagggcagctgc

SEQ ID NO: 14530 - DNA, 119 bp, homo sapiens
aagtacctgttgagggggtcctcattgaggaggaggtgacgcagcacagccatcacacgggcatcctcaccagcccatcacggtcccggcccagaaggtccacagctgtgagcaacagg

SEQ ID NO: 14531 - DNA, 119 bp, homo sapiens
ccatcacacgggcatcctcacccagcccatcacggtcccggcccagaaggtccacagctgtgagcaacagactgcaggccggcaacggcgggcccgggagaagatggcctgcagttttg

SEQ ID NO: 14532 - DNA, 119 bp, homo sapiens
gtccacagctgtgagcaacaggactgcaggccggcaacggcgggcccgggagaagatggcctgcagtttgtctccacagccccactactttctgcacagaggctggagcagggcacctg

SEQ ID NO: 14533 - DNA, 119 bp, homo sapiens
actcaccctggctggaggcgaggcttcaggacagcacagagttcagacaccaaggcctccaggcctggagagacaaactgctccagagagtggattcctctgaagggagccatggaaca

SEQ ID NO: 14534 - DNA, 119 bp, homo sapiens
tcaggacagcacagagttcagacaccaaggcctccaggcctggaggagacaaactgctccagagagtggttcctctgaagggagccatggaacagggctcagggtagaacccacctgtg

SEQ ID NO: 14535 - DNA, 119 bp, homo sapiens
gaggacaccacgggcgggggtgggggccgactgctgtccccagactctggacacagtctggcccgcccgggagctcagtcacagccagccgagtccctgggcccagcagcccttgcaac

SEQ ID NO: 14536 - DNA, 119 bp, homo sapiens
cagactctggacacagtctggcccgcccgcggagctcagtcacagccagccgagtccctgggcccagcacccttgcaacgccggccgcgtctccagcacccgcggtccgggcactggga

SEQ ID NO: 14537 - DNA, 119 bp, homo sapiens
cacagccagccgagtccctgggcccagcagcccttgcaacgccggccgcgtctccagcacccgcggtccggcactgggagggtctctccgcgcctcaccagcagcggcccgactcgcgg

SEQ ID NO: 14538 - DNA, 119 bp, homo sapiens
gccggccgcgtctccagcacccgcggtccgggcactgggagggtctctccgcgcctcaccagcagcggccgactcgcggtccgagcccaggccccagcgaggtgccaagcagtgcccaa

SEQ ID NO: 14539 - DNA, 119 bp, homo sapiens
gcccgcacccaggccccggagcccagtgccaggagccgcagcagcgcgcggctaaccagtagctgcggcgcccgggaccctgctcttcggtgcccgcgtccggcccctccagggctgcc

SEQ ID NO: 14540 - DNA, 119 bp, homo sapiens
ctaaccagtagctgcggcggcccgggaccctgctcttcggtgcccgcgtccggcccctccagggctgccccagcagcgccggccctgccgggctctcccctgcaggcctcagggccagc

SEQ ID NO: 14541 - DNA, 119 bp, homo sapiens
ggcccctccagggctgccaccagcagcgccggccctgccgggctctcccctgcaggcctcagggccagcccaggcccagctccgccgccggccacgggcccccgggtggcagcagcact

SEQ ID NO: 14542 - DNA, 119 bp, homo sapiens
ccgggtggcagcagcactgccaacgggggtgtctcggtcggaaagggctccaggacccgcaagacagccgcgccatggtgacaggacaccaacgaggagggtgaaggagcgcagcttcc

SEQ ID NO: 14543 - DNA, 119 bp, homo sapiens
aggacccgcaagacagccagcgccatggtgacaggacaccaacgaggagggtgaaggagcgcagcttccgagccagagagccagacgactagtgtgcgcgagggccgcttccgcttccg

SEQ ID NO: 14544 - DNA, 119 bp, homo sapiens
actttattattcaaaaatgcttcatttaatgaagtttgttataataattttggtatgtgtatgggtaatcaatgatatgtactctagaattgcttaaatgaatgatttctatatcattt

SEQ ID NO: 14545 - DNA, 119 bp, homo sapiens
taatgaagtttgttataataattttggtatgtgtatgggtaatacaatgatatgtactctagaattgctaaatgaatgatttctatatcattttactataaggatttaagaaccaagat

SEQ ID NO: 14546 - DNA, 119 bp, homo sapiens
acttacctttaggtcccctcaaaccaagagcaccagggggccccttaatgcccggaaggccacgaattccatctggcctgggaaaccattctctccaggagggccggggggaccaggag

SEQ ID NO: 14547 - DNA, 119 bp, homo sapiens
gccccttaatgcccggaaggccacgaattcccatctggcctgggaaaccattctctccaggagggccgggggaccaggagggccaggccttccaggaagcccagtggcacctgagtctg

SEQ ID NO: 14548 - DNA, 119 bp, homo sapiens
ctgggaaaccattctctccaggagggccggggggaccaggagggccaggccttccaggaagcccagtggacctgagtctggacgcttaagactggcagccatctcagcaaaatgttcta

SEQ ID NO: 14549 - DNA, 119 bp, homo sapiens
acttacttgagccgcgcacaagcagagccccaacagcagcagccccagggccccgcggtcccgcgcagtcaggccatgcccgccgcccgccgctaatcccttggcccggctctgcagcc

SEQ ID NO: 14550 - DNA, 119 bp, homo sapiens
cccgcgcagtccaggccatgcccgccgcccgccgctaatcccttggcccggctctgcagcctggttccctctaggcttccagacccgccactagcataggtggcacttcgtccctgcag

SEQ ID NO: 14551 - DNA, 119 bp, homo sapiens
cctggttcccctctaggcttccagacccgccactagcataggtggcacttcgtccctgcagaaaaagcaccccgggagtagcggttgccaaagcgtccaggcccgggaggcgcgcgttc

SEQ ID NO: 14552 - DNA, 119 bp, homo sapiens
tcatagaaagaagaccccagggctttccgagcagaatggcaaaggagccctgaagagcgagcggaaacggtgccaaagacctcagcgcagcccgtggagggggccgtcgaagaacggga

SEQ ID NO: 14553 - DNA, 119 bp, homo sapiens
gagcgagcggaaacgcgtgccaaagacctcagcgcagcccgtggagggggccgtcgaagaacgggagcgaaagaaaggcgggaaagccgaaggcttgagaaagggcgatcacaggatta

SEQ ID NO: 14554 - DNA, 119 bp, homo sapiens
cgaagaacgggagcgcaaagaaaggcgggaaagccgaaggcttgagaaagggcgatcacaggattacccgacacgccggaaaaacgggatgagggcaaagcggcggatgaggaaaagca

SEQ ID NO: 14555 - DNA, 119 bp, homo sapiens
atcacaggattacccagacacgccggaaaaacgggatgagggcaaagcggcggatgaggaaaagcaaagaaagaggaggattatcagaccaggtaccgcagcgacccgaacctagctcg

SEQ ID NO: 14556 - DNA, 119 bp, homo sapiens
tgaggaaaagcaaagaaaagaggaggattatcagaccaggtaccgcagcgacccgaacctagctcggtaccggtgaaaccgccgcctgaggagcagcagatgcgcatgcacgcccgggt

SEQ ID NO: 14557 - DNA, 119 bp, homo sapiens
gaacctagctcggtacccggtgaaaccgccgcctgaggagcagcagatgcgcatgcacgcccgggtgtccgcgccaggcacgagcggcgccacagcgacgtggcgctcccgcgcaccga

SEQ ID NO: 14558 - DNA, 119 bp, homo sapiens
gcacgcccgggtgtcccgcgccaggcacgagcggcgccacagcgacgtggcgctcccgcgcaccgaggcggcgcggcgctgccggagggcaaggccggcaaacgcgcgccggcggcagc

SEQ ID NO: 14559 - DNA, 119 bp, homo sapiens
cccgcgcaccgaggcgggcgcggcgctgccggagggcaaggccggcaaacgcgcgccggcggcagccaggcctcgccgccggactcgccgcgggcttactcggctgagagaactgcgga

SEQ ID NO: 14560 - DNA, 119 bp, homo sapiens
gccggcggcagccagggcctcgccgccggactcgccgcgggcttactcggctgagagaactgcggagacagggcgccgggcgccaagcagctaacgaaccacagcccgccggcgcccag

SEQ ID NO: 14561 - DNA, 119 bp, homo sapiens
gagaactgcggagaccagggcgccgggcgccaagcagctaacgaaccacagcccgccggcgcccagacagggccggttcccgcagaagccccggagctcaaagcccaggagcccctcag

SEQ ID NO: 14562 - DNA, 119 bp, homo sapiens
caacccgcaggctcttcagcagagccgatgcggcgtcccgcctccttgccttccctcttaggaccaaaccccagctggggcctcggcgtctgaccgccaaagagcgggtgcctggttcc

SEQ ID NO: 14563 - DNA, 119 bp, homo sapiens
ccttccctcttaggaccaaactcccagctggggcctcggcgtctgaccgccaaagagcgggtgcctggtcctgcggaggctgccgggcgggtgccgaggttgccgagatgcgggaggtt

SEQ ID NO: 14564 - DNA, 119 bp, homo sapiens
gaggttgccgagatgcgggaggtttgaacacaaggatgggacagaggcgaggatcggggctcctgggtgcagcggcggtaacctgggctccagggtaacggaggcggaggcctagactg

SEQ ID NO: 14565 - DNA, 119 bp, homo sapiens
ctttacctgcgatggaccaggtccagcggtagaactctaccgtgtcgttgagtgccgtggacactacgttaggacactacccggctccgagtccaggagccccatcgcggcgatgagcg

SEQ ID NO: 14566 - DNA, 119 bp, homo sapiens
gtgccgtggacactacgtttaggacactacccggctccgagtccaggagccccatcgcggcgatgagcggcgctggcggcaggagaaagcggagacccagagagagggctgaccccgga

SEQ ID NO: 14567 - DNA, 119 bp, homo sapiens
ccatcgcggcgatgagcgggcgctggcggcaggagaaagcggagacccagagagagggctgaccccggagcggtggcggccgacggggcgagcggcggccgggaacccctctaacggcg

SEQ ID NO: 14568 - DNA, 119 bp, homo sapiens
gagagggctgaccccggaggcggtggcggccgacggggcgagcggcggccgggaacccctctaacggcgcggcccggctgcgtcttctcctgctcctcaaggcgccgcggcggcgggga

SEQ ID NO: 14569 - DNA, 119 bp, homo sapiens
ggaacccctctaacggcggcggcccggctgcgtcttctcctgctcctcaaggcgccgcggcggcggggagcggcagaaggcagggccaagcggaaggcgtcgtcaaggttcccgggaga

SEQ ID NO: 14570 - DNA, 119 bp, homo sapiens
gcgccgcggcggcggggatgcggcagaaggcagggccaagcggaaggcgtcgtcaaggttcccgggagaagacgaggaggtggaggaggcccagccgccagcacagtgcgctgcaccag

SEQ ID NO: 14571 - DNA, 119 bp, homo sapiens
gtcaaggttcccgggagaaagacgaggaggtggaggaggcccagccgccagcacagtgcgctgcaccagctgcagcctcgcgcagccgcccctccaatctcctcagccggcgtcacgtg

SEQ ID NO: 14572 - DNA, 119 bp, homo sapiens
actcacaaataattggatatccatcccggctggcacaagctgctgctaatattcttccattgtgggagaatcaagacaaaaacatcctcgttctcctgcatttagtgagaagaggtgtt

SEQ ID NO: 14573 - DNA, 119 bp, homo sapiens
cccggctggcacaagctgctgctaatattcttccattgtgggagaaatcaagacaaaaacatcctcgtttcctgcatttagtgagaagaggtgtttgtttgggatacggcaagcctaaa

SEQ ID NO: 14574 - DNA, 119 bp, homo sapiens
actcacggagaggggtacgcagaaccgcccgtcccgccggagccgacacccggagcagtgcaaatcaaccccccagcctagcggcgcgtgcgcgaagtgaggcggccacgcagccacct

SEQ ID NO: 14575 - DNA, 119 bp, homo sapiens
ccggagccgacacccggagcagtgcaaatcaactcccccagcctagcggcgcgtgcgcgaagtgaggcgccacgcagccacctaacccgccagcgacccgtgtcctgaaagcaagccgc

SEQ ID NO: 14576 - DNA, 119 bp, homo sapiens
cccagcctagcggcgcgtgcgcgaagtgaggcggccacgcagccacctaacccgccagcgacccgtgtctgaaagcaagccgcggctctgtgccgcagtgcggacagcgcgccgcctgc

SEQ ID NO: 14577 - DNA, 119 bp, homo sapiens
ggcgggatgagtgcggtgtgcggtggagcggcgcggatgctgcggacgccgggacgccacggctacgccccgagttctccccgtacctgccgggccgcctggcctgcgccaccgcgcag

SEQ ID NO: 14578 - DNA, 119 bp, homo sapiens
ggtggagcggcgcggatgctgcggacgccgggacgccacggctacgccgccgagttctccccgtacctgcgggccgcctggcctgcgccaccgcgcagcactacggcatcgcgggtgag

SEQ ID NO: 14579 - DNA, 119 bp, homo sapiens
ctcctcatagtgcccccgcctccttgcgcgaagtgcgcaggctcctgggcagggctcgggttctgcccgggacgcagcccagttggtagcgtcgctccctgagcgtttctaagggggcc

SEQ ID NO: 14580 - DNA, 119 bp, homo sapiens
agggctcgggttctgcccggggacgcagcccagttggtagcgtcgctccctgagcgtttctaagggggcgcccggccttgtctttcggcagtggccgagccaccgccgcctgccgcgcg

SEQ ID NO: 14581 - DNA, 119 bp, homo sapiens
tgagcgtttctaagggggccgcccggccttgtctttcggcagtggccgagccaccgccgcctgccgcgcttccagagctgggcgctgcagctgcactgccgatcgccgtgtttggtcga

SEQ ID NO: 14582 - DNA, 119 bp, homo sapiens
ccaccgccgcctgccgcgcgttccagagctgggcgctgcagctgcactgccgatcgccgtgtttggtcgtagaatccccagtgtgcccagagagtgcgacccctcgcccggcccggcga

SEQ ID NO: 14583 - DNA, 119 bp, homo sapiens
cgatcgccgtgtttggtcgatagaatccccagtgtgcccagagagtgcgacccctcgcccggcccggcggccccgggcgtgaaccgagctgagggaggatggcagcctctggggtggag

SEQ ID NO: 14584 - DNA, 119 bp, homo sapiens
cccctcgcccggcccggcgagccccgggcgtgaaccgagctgagggaggatggcagcctctggggtggaaagagcagcaagaagaagaccgagaagaaacttgctgctcgggaagaagc

SEQ ID NO: 14585 - DNA, 119 bp, homo sapiens
tggcagcctctggggtggagaagagcagcaagaagaagaccgagaagaaacttgctgctcgggaagaagtaaattgttggcgggtttcatgggcgtcatgaataacatgcggaaacagg

SEQ ID NO: 14586 - DNA, 119 bp, homo sapiens
gtttagcttgaacatgcgaaagtgacacagacagagttgatgcgtgagtcatttagacagaaacaagaacaacagagtcccttaagtgccaagaggaacttcgagagcgccttcatgag

SEQ ID NO: 14587 - DNA, 119 bp, homo sapiens
agacagaaacaagaagcaacagagtcccttaagtgccaagaggaacttcgagagcgccttcatgaggagccagggccagagaacagctagctgtggagctcagtaaggctgagggtgag

SEQ ID NO: 14588 - DNA, 119 bp, homo sapiens
ttaaagattacaaacttagaagagcaattagaacagtttagagaagaactggaaaataagaatgaagaattcaacaattacatatgcaattagaaatacagaaaaaggaatctactacc

SEQ ID NO: 14589 - DNA, 119 bp, homo sapiens
agaactggaaaataagaatgaagaagttcaacaattacatatgcaattagaaatacagaaaaaggaatcactacccgcctacaagaacttgaacaggaaaacaaattatttaaggtaat

SEQ ID NO: 14590 - DNA, 119 bp, homo sapiens
ggttacctgcagcagatgcagctgggccacgagacgccgcggcaggtggaggaagcagtcgcgagcgttgtgaaggccacagtcactgccgccccgcctcccccagcacccgccaggcg

SEQ ID NO: 14591 - DNA, 119 bp, homo sapiens
agtcgcgagcgttggtgaaggccacagtcactgccgccccgcctcccccagcacccgccaggcgatcgcgccccacatcgtcccggagcgtcgctctgggttcgcccaccctagcgccg

SEQ ID NO: 14592 - DNA, 119 bp, homo sapiens
gccaggcgatcgctgccccacatcgtcccggagcgtcgctctgggttcgcccaccctagcgccgcaaagacccgggacccggcaggccgaggacgtcggagccggaggagatcgatcgg

SEQ ID NO: 14593 - DNA, 119 bp, homo sapiens
tcaggaatgacaggcaggcggccatgaccagggcagtctcctacccatggccagggacaggggagcggctgaggagcaggacccaagggtagcccagggccggggaagggggcagagac

SEQ ID NO: 14594 - DNA, 119 bp, homo sapiens
ggacaggggagcggcctgaggagcaggacccaagggtagcccagggccggggaagggggcagagacctcccttggcctaggtcaggagctcagaagtgccacatggctgaggggcagcg

SEQ ID NO: 14595 - DNA, 119 bp, homo sapiens
gggggcagagacctccccttggcctaggtcaggagctcagaagtgccacatggctgaggggcagcggccgggaagggccagaggcagggccaggagagcaccatttcctgggaggctag

SEQ ID NO: 14596 - DNA, 119 bp, homo sapiens
tgaggggcagcggcccgggaagggccagaggcagggccaggagagcaccatttcctgggaggctaggggagggaggtgccctacaggagaagccaggaggggccgcctgcccctggggt

SEQ ID NO: 14597 - DNA, 119 bp, homo sapiens
ctgggaggctaggggcagggaggtgccctacaggagaagccaggaggggccgcctgcccctggggtggggccaggctggagcaggctgcagcaagaaagacctgaggcaggcgcagggc

SEQ ID NO: 14598 - DNA, 119 bp, homo sapiens
tgcccctggggtgggggccaggctggagcaggctgcagcaagaaagacctgaggcaggcgcagggcctggagcctggctggctgggctcggaggggggctcccagggcagcctggcccc

SEQ ID NO: 14599 - DNA, 119 bp, homo sapiens
caggcgcagggcctgagagcctggctggctgggctcggaggggggctcccagggcagcctggccccggggcagtcctgactctgcaggggatgccgagtgaggggcagcagtcccctca

SEQ ID NO: 14600 - DNA, 119 bp, homo sapiens
cagcctggccccgggagcagtcctgactctgcaggggatgccgagtgaggggcagcagtcccctcaggactcccctcctctctgcctggaaaggagctggagaacccgtagtgcaaatc

SEQ ID NO: 14601 - DNA, 119 bp, homo sapiens
gcagtcccctcaggacctcccctcctctctgcctggaaaggagctggagaacccgtagtgcaaatctgtgaccactcagttatggagggaggctgtgcccaaaagtggacactggggtg

SEQ ID NO: 14602 - DNA, 119 bp, homo sapiens
gtagtgcaaatctgtggaccactcagttatggagggaggctgtgcccaaaagtggacactggggtgcatccctccaccacctcggcctccaccgctgtcctcagtacagccgcttttcg

SEQ ID NO: 14603 - DNA, 119 bp, homo sapiens
cgagacccggcgcttacttgtaggtgaggccgtcggcgctggcgaagagctgctgcgcggtgagcccatctcgggcacgtagccggtgccgccgctgatcaggtagtccgccatgctgc

SEQ ID NO: 14604 - DNA, 119 bp, homo sapiens
gctgctgcgcggtgagcccatcctcgggcacgtagccggtgccgccgctgatcaggtagtccgccatgcgccgcgagaccccgcgacccgacataaacacccgcgcggccgcccgccgc

SEQ ID NO: 14605 - DNA, 119 bp, homo sapiens
cgtcacctctcgggctcgtagccggcctgcagcagtcgggcgctgtaccgctgcgccgccgtctcgtgtccgggtgttgccgggctccgggctccggaacagcggcggctccgcctccc

SEQ ID NO: 14606 - DNA, 119 bp, homo sapiens
ccgtctcgtgtcccgggtgttgccgggctccgggctccggaacagcggcggctccgcctccctgcagcgtggtggagtgagtggcccctccatgcggaggccgcagctcagggcgggcg

SEQ ID NO: 14607 - DNA, 119 bp, homo sapiens
tccctgcagcggtggtggagtgagtggcccctccatgcggaggccgcagctcagggcgggcgggagcctgaggctcccggggccccggctgggcagtgagcgcagcccggtcgagtccc

SEQ ID NO: 14608 - DNA, 119 bp, homo sapiens
ttatagggaaaacccttgaagaacaaggcgtggctcacaatgtgaaagcgatggtgcttgaactaaaacatctgaagaggacgcgaggaaaaacttccagttagaggaagaggagcaaa

SEQ ID NO: 14609 - DNA, 119 bp, homo sapiens
acaatgtgaaagcgatggtgcttgaactaaaacaatctgaagaggacgcgaggaaaaacttccagttagggaagaggagcaaaatgaggccaaactcaaagaaaaacaaattcagagga

SEQ ID NO: 14610 - DNA, 119 bp, homo sapiens
ctgaagaggacgcgaggaaaaacttccagttagaggaagaggagcaaaatgaggccaaactcaaagaaaacaaattcagaggaccaagagaggactagaaatactggcaaagagaggta

SEQ ID NO: 14611 - DNA, 119 bp, homo sapiens
gagaggtttcgcaggccccggagacggtgtctgcgctgctgggtctgcaggagcagctccccggtgaggcctcccttggaggctccagcaccatcctacccgcccggccctggagcttc

SEQ ID NO: 14612 - DNA, 119 bp, homo sapiens
tccccggtgagggcctcccttggaggctccagcaccatcctacccgcccggccctggagcttctggagcctctcttggtgctgtcctggaggcgttgggccacgtcctgctgcagctcg

SEQ ID NO: 14613 - DNA, 119 bp, homo sapiens
agcttctggagctctctcttggtgctgtcctggaggcgttgggccacgtcctgctgcagctcggccgcctctggtccagcagatcattgtcctgcaggccccagcgtgctcggagctca

SEQ ID NO: 14614 - DNA, 119 bp, homo sapiens
agctcggccgccatctggtccagcagatcattgtcctgcaggccccagcgtgctcggagctcagccacccactggcaaggtgggccaggaaggccttctccgtcttcttcagtaacacg

SEQ ID NO: 14615 - DNA, 119 bp, homo sapiens
agctcagccaccgcactggcaaggtgggccaggaaggccttctccgtcttcttcagtaacacggacaccagatggggtcgcagtccagagccgcgctgcaggccaccgaagagctcctc

SEQ ID NO: 14616 - DNA, 119 bp, homo sapiens
cgtggaggcagacacccggccaggaagtgcccgcaggctcaccctgcagcctgctggggcctctctgtcgctccggcctctgcaggggcctcggaaactccctctggagctgccccttg

SEQ ID NO: 14617 - DNA, 119 bp, homo sapiens
ccctgcagcctgctggggcctctctgtctgctccggcctctgcaggggcctcggaaactccctctggagtgccccttgggggacaccctctcctgattggggaccagtgtcactactcc

SEQ ID NO: 14618 - DNA, 119 bp, homo sapiens
gcaggggcctcggaaactccctctggagctgccccttgggggacaccctctcctgattggggaccagtgcactactccccaggagggctccctctggctctgggtcctggccggggtcc

SEQ ID NO: 14619 - DNA, 119 bp, homo sapiens
gacaccctctcctgattggggaccagtgtcactactccccaggagggctccctctggctctgggtcctgccggggtccccttccagggactgctgtcccgcctgagctggctcccccag

SEQ ID NO: 14620 - DNA, 119 bp, homo sapiens
tcggacagcccccgagaccccgcaccctggctggcactgcttctccttgatgcccctgaattggggcctgggacggcgtggggcctggctggcgtgtcccctcctgcgggctcccacct

SEQ ID NO: 14621 - DNA, 119 bp, homo sapiens
ctgaattggggcctggggacggcgtggggcctggctggcgtgtcccctcctgcgggctcccacctggccccgggcagtgctttggtggctgctgccggtgctcccacagctggaagagc

SEQ ID NO: 14622 - DNA, 119 bp, homo sapiens
gctcccacctggcccccgggcagtgctttggtggctgctgccggtgctcccacagctggaagagcgccttgggggcagggccgccccctgggcggggtgggacagtacctgccacacag

SEQ ID NO: 14623 - DNA, 119 bp, homo sapiens
ctggaagagcgcctctgggggcagggccgccccctgggcggggtgggacagtacctgccacacagccagtagcctcaggggagggtccccgctgggcctcttgggccggctgcgtccca

SEQ ID NO: 14624 - DNA, 119 bp, homo sapiens
tgccacacagccagctagcctcaggggagggtccccgctgggcctcttgggccggctgcgtcccaggcttgagcagcagtggcttcggtgggggcccaccgccccttgctcaggccgtc

SEQ ID NO: 14625 - DNA, 119 bp, homo sapiens
ctgcgtcccaggctgtgagcagcagtggcttcggtgggggcccaccgccccttgctcaggccgtccaactgcagaaccaagggtgaggagggctgaggcgtgtccctggcctcttcccc

SEQ ID NO: 14626 - DNA, 119 bp, homo sapiens
tcaggccgtccaacctgcagaaccaagggtgaggagggctgaggcgtgtccctggcctcttcccccaggtggcagccccagattttgagcaggagtcggatgtgtggggaggtatgggg

SEQ ID NO: 14627 - DNA, 119 bp, homo sapiens
cctcttcccccaggctggcagccccagattttgagcaggagtcggatgtgtggggaggtatgggggccgcgagcatgtcctggaccccgcgtcccctgcccacccggcagagggagcgt

SEQ ID NO: 14628 - DNA, 119 bp, homo sapiens
aggtatgggggccggcgagcatgtcctggaccccgcgtcccctgcccacccggcagagggagcgttgtgggggagactccagaaacaaaatccgagtggactgcaggggtgacagtggc

SEQ ID NO: 14629 - DNA, 119 bp, homo sapiens
gagggagcgttgtgcggggagactccagaaacaaaatccgagtggactgcaggggtgacagtggcactgtggttcccagaaggtcctgggaaggaagagagcccgaggagggaggtctc

SEQ ID NO: 14630 - DNA, 119 bp, homo sapiens
tgacagtggcactgctggttcccagaaggtcctgggaaggaagagagcccgaggagggaggtctcaggtcccagaggcctgtgtcctggtgctcgatgagcttccagaatatcgtggca

SEQ ID NO: 14631 - DNA, 119 bp, homo sapiens
gggaggtctcaggttcccagaggcctgtgtcctggtgctcgatgagcttccagaatatcgtggcactgaccatcctggcaggcccttcgccgctcaggaggcctcggcacttgcttggt

SEQ ID NO: 14632 - DNA, 119 bp, homo sapiens
gccttgcctggacagccctggggccgcccaccccattcgctggatccctcatgagagccggtgctggctacgagtccgaagaagccccctcctcactccgggccctcggtgtcaggcgg

SEQ ID NO: 14633 - DNA, 119 bp, homo sapiens
ggtgctggctgacgagtccgaagaagccccctcctcactccgggccctcggtgtcaggcggccgccttgtctgggccgcccagccctgctccatctatgcataggccggggtcctcacc

SEQ ID NO: 14634 - DNA, 119 bp, homo sapiens
ggccgccttgctctgggccgcccagccctgctccatctatgcataggccggggtcctcacccaggctcctccagctttccgctcagcccctatctgggcagaggggctggcactgtcca

SEQ ID NO: 14635 - DNA, 119 bp, homo sapiens
cccaggctccctccagctttccgctcagcccctatctgggcagaggggctggcactgtccaccccgtccccggggtcctggggcagcaggaggactctggctccgagccctcggggagg

SEQ ID NO: 14636 - DNA, 119 bp, homo sapiens
caccccgtcctccggggtcctggggcagcaggaggactctggctccgagccctcggggaggccggtgctgaggctgggctggcactgtcctggctgcatctctccctcccggcagtccc

SEQ ID NO: 14637 - DNA, 119 bp, homo sapiens
ggccggtgctggaggctgggctggcactgtcctggctgcatctctccctcccggcagtcccgtggcccccaggccactgcagcggacgtgctgggccagtccccacctcttccgagctg

SEQ ID NO: 14638 - DNA, 119 bp, homo sapiens
ccgtggccccacaggccactgcagcggacgtgctgggccagtccccacctcttccgagctgccactctcctccctgggaggcatgcaggggattcgtccagatttcatacttgggccct

SEQ ID NO: 14639 - DNA, 119 bp, homo sapiens
tgccactctctctccctgggaggcatgcaggggattcgtccagatttcatacttgggccctggctgccccctcggccaaagacttccctgcatcccaccctgcagggccggggtcccca

SEQ ID NO: 14640 - DNA, 119 bp, homo sapiens
ctggctgcccgcctcggccaaagacttccctgcatcccaccctgcagggccggggtccccacaccccagctctgagaagccccaagggtagccctcccacacacagcagagggggtcta

SEQ ID NO: 14641 - DNA, 119 bp, homo sapiens
ctctcctgtggccggcctggtccactgggggtcttggggggcttcttatcagagcagaggtagcagcctcatcttccagctgctccagggcgctgaggctatgcaggccccggggtgtg

SEQ ID NO: 14642 - DNA, 119 bp, homo sapiens
gcagaggtagcagcctccatcttccagctgctccagggcgctgaggctatgcaggccccggggtgtggtacagagcgcaccccaaaggagagaggcacgcgctgggagagctcgtccat

SEQ ID NO: 14643 - DNA, 119 bp, homo sapiens
ggccccggggtgtggtgacagagcgcaccccaaaggagagaggcacgcgctgggagagctcgtccatgaggcgctgaaggtcttaaaggcgcgctggtgaacggccaggcggaccccag

SEQ ID NO: 14644 - DNA, 119 bp, homo sapiens
gagagctcgtccatgagggcgctgaaggtcttaaaggcgcgctggtgaacggccaggcggaccccagcaaccgtggatcccctcgcttgaggaaggtgatcttcttggctggcgtgacc

SEQ ID NO: 14645 - DNA, 119 bp, homo sapiens
caggcggaccccagcaaaccgtggatcccctcgcttgaggaaggtgatcttcttggctggcgtgaccttgtgaccgagggggtgcgagccacagagggcaggaagcactcacggtggct

SEQ ID NO: 14646 - DNA, 119 bp, homo sapiens
tggctggcgtgaccttggtgaccgagggggtgcgagccacagagggcaggaagcactcacggtggctcgggcctgggcattcctgggggtgctgttcatggtgtgggggctctggccgc

SEQ ID NO: 14647 - DNA, 119 bp, homo sapiens
actcaccgtcctccagggagcacaagggcatggctcagcccctaagcctcagggggacgtcctttggagaaagtcaggccagggggaacaccgcctccttccctgccagtggctcagtc

SEQ ID NO: 14648 - DNA, 119 bp, homo sapiens
agggggacgtcctttggaggaaagtcaggccagggggaacaccgcctccttccctgccagtggctcagtcctctgggcagcagggctggccaccctcctccggacagtcctcggggcca

SEQ ID NO: 14649 - DNA, 119 bp, homo sapiens
tccctgccagtggctcagtccctctgggcagcagggctggccaccctcctccggacagtcctcggggccctctccttggcctgagagcctgaggccccagtcccttgggcaggagccca

SEQ ID NO: 14650 - DNA, 119 bp, homo sapiens
ttcaaattaatgtccatccaaatgaatattttactataaaataaaagaagtaaataatacagagtaatttttattacttattcatttctaggcaggatgagggtctgagagtataatac

SEQ ID NO: 14651 - DNA, 119 bp, homo sapiens
atacagagtaattatttattacttattcatttctaggcaggatgagggtctgagagtataatacagttcaataaagaagttacctggcttaaaaatagctacttgctaaagatagaaaa

SEQ ID NO: 14652 - DNA, 119 bp, homo sapiens
tataatacagttcaaataaagaagttacctggcttaaaaatagctacttgctaaagatagaaaattatttaaatcttaaaaacaaacaggcaaaacatcttgaaagttttataggcttt

SEQ ID NO: 14653 - DNA, 119 bp, homo sapiens
atagaaaattattataaatcttaaaaacaaacaggcaaaacatcttgaaagttttataggctttgcatttaaaattatagatgattagaaactatacttttcttctatactgatactaa

SEQ ID NO: 14654 - DNA, 119 bp, homo sapiens
taggctttgcattttaaaattatagatgattagaaactatacttttcttctatactgatactaaaatagttcattttcagcttaaattacaacagttaataatttatctgactgtatat

SEQ ID NO: 14655 - DNA, 119 bp, homo sapiens
gatactaaaatagtttcattttcagcttaaattacaacagttaataatttatctgactgtatataaacaaatattctttctacattttagtttaaaatagtacaatattaaaaagctta

SEQ ID NO: 14656 - DNA, 119 bp, homo sapiens
ttgcaggctgggtagttgggtctctggatattcttggcagccctgcaagcctggtgagaagcatcgggacggggtcgccgacttcttcaggcttccgtatgaggggctgacccggggcc

SEQ ID NO: 14657 - DNA, 119 bp, homo sapiens
tggcagccctgcaagcctggtgagaagcatcgggaacggggtcgccgacttcttcaggcttccgtatgagggctgacccggggccctggagccttcgtgagtggcgtctccagagggac

SEQ ID NO: 14658 - DNA, 119 bp, homo sapiens
aacggggtcgccgacttcttcaggcttccgtatgaggggctgacccggggccctggagccttcgtgagtgcgtctccagagggaccacatcgtttgtaaagcacatctccaaaggtagc

SEQ ID NO: 14659 - DNA, 119 bp, homo sapiens
cctcaggtaccctcacatccatcaccaacctcgccacaagcctggcccggaacatggaccggctctcacggatgaggagcactacaaccggcaggaggagtggcggcggcagctccccg

SEQ ID NO: 14660 - DNA, 119 bp, homo sapiens
cgccacaagcctggcccggaacatggaccggctctcactggatgaggagcactacaaccggcaggaggatggcggcggcagctccccgagagcctgggcgaggggcttcgacagggcct

SEQ ID NO: 14661 - DNA, 119 bp, homo sapiens
ctctcactggatgaggagcactacaaccggcaggaggagtggcggcggcagctccccgagagcctgggcaggggcttcgacagggcctgtcccggctgggcatcagcctgcttggtaag

SEQ ID NO: 14662 - DNA, 119 bp, homo sapiens
acagctgactgcgttcagaccctgcaggctgggctggcctgcccaggacctgagaaggggcagctccggggcaatgtctgagcccctagctgtgctggtccgggctggcctctctaaga

SEQ ID NO: 14663 - DNA, 119 bp, homo sapiens
ctggcctgcccaggacctgagaaggggcagctccggtggcaatgtctgagcccctagctgtgctggtccggctggcctctctaagacagtgcaggccacgtgatccatcctcctagagg

SEQ ID NO: 14664 - DNA, 119 bp, homo sapiens
cggtggcaatgtctgagcccctagctgtgctggtccgggctggcctctctaagacagtgcaggccacgtatccatcctcctagaggcagtgagcaggtgagggacccctaccacagcca

SEQ ID NO: 14665 - DNA, 119 bp, homo sapiens
ctaggcgtccactttccgcagccatgctcaaacagagtgagaggagacggtcctggagctacaggccctgaacacgacggagaatgagggcagccaacaccgcaggagcatttgctccc

SEQ ID NO: 14666 - DNA, 119 bp, homo sapiens
ggtcctggagctacaggccctggaacacgacggagaatgagggcagccaacaccgcaggagcatttgctcctgggtgcccgttccggctcccaggccagcatccacggctggacagagg

SEQ ID NO: 14667 - DNA, 119 bp, homo sapiens
aacaccgcaggagcatttgctccctgggtgcccgttccggctcccaggccagcatccacggctggacaggggcaactataactactacatcgaggaagacgaagacggcgaggaggagg

SEQ ID NO: 14668 - DNA, 119 bp, homo sapiens
ccgcatctgcttcgaggagcggcgcgacgagctgagcgaacggctcaagatccagcacgagctgcgcgccaggcgcaggtcgaggaggcggaggaactcttccgcgacatgcgcttcta

SEQ ID NO: 14669 - DNA, 119 bp, homo sapiens
acgagctgcgcgcgcaggcgcaggtcgaggaggcggaggaactcttccgcgacatgcgcttctacggccgcagcggcgccgcctctggaacctcatggagaagccattctcctcggtgg

SEQ ID NO: 14670 - DNA, 119 bp, homo sapiens
cgcttctacggcccgcagcggcgccgcctctggaacctcatggagaagccattctcctcggtggccgccaggccatcggggtggcctccagcaccttcgtgctcgtctccgtggtggcg

SEQ ID NO: 14671 - DNA, 119 bp, homo sapiens
ctcggtggccgccaaggccatcggggtggcctccagcaccttcgtgctcgtctccgtggtggcgctggcctcaacaccgtggaggagatgcagcagcactcggggcagggcgagggcgg

SEQ ID NO: 14672 - DNA, 119 bp, homo sapiens
tggtggcgctggcgctcaacaccgtggaggagatgcagcagcactcggggcagggcgagggcggcccagcctgcggcccatcctggagcacgtggagatgctgtgcatgggcttcttca

SEQ ID NO: 14673 - DNA, 119 bp, homo sapiens
gagggcggcccagacctgcggcccatcctggagcacgtggagatgctgtgcatgggcttcttcacgctcagtacctgctgcgcctagcctccacgcccgacctgaggcgcttcgcgcgc

SEQ ID NO: 14674 - DNA, 119 bp, homo sapiens
cttcttcacgctcgagtacctgctgcgcctagcctccacgcccgacctgaggcgcttcgcgcgcagcgcctcaacctggtggacctggtggccatcctgccgctctaccttcagctgct

SEQ ID NO: 14675 - DNA, 119 bp, homo sapiens
tcgcgcgcagcgccctcaacctggtggacctggtggccatcctgccgctctaccttcagctgctgctcggtgcttcacgggcgagggccaccaacgcggccagacggtgggcagcgtgg

SEQ ID NO: 14676 - DNA, 119 bp, homo sapiens
cagctgctgctcgagtgcttcacgggcgagggccaccaacgcggccagacggtgggcagcgtgggtaagtgggtcaggtgttgcgcgtcatgcgcctcatgcgcatcttccgcatcctc

SEQ ID NO: 14677 - DNA, 119 bp, homo sapiens
actcacctcggaggatgccggcgcaggcctggctggggcgctcgccgcgagctcccggcagcccagaaactaggtcggtgtcggcaggatccgcgaaggcgtacccggcgacttctccg

SEQ ID NO: 14678 - DNA, 119 bp, homo sapiens
cgccgcgagctcccggcagcccagaaagctaggtcggtgtcggcaggatccgcgaaggcgtacccggcgcttctccgcctaccctccgaagcgggagcaggcgggggcgcttcaccctc

SEQ ID NO: 14679 - DNA, 119 bp, homo sapiens
gcaggatccgcgaaggcgtacccggcgacttctccgcctaccctccgaagcgggagcaggcgggggcgctcaccctcctcgcgagacagcggagaccccagcggcggctgcgacccctg

SEQ ID NO: 14680 - DNA, 119 bp, homo sapiens
ggatgggaactacaattcccagaaggatgtgcggccgaaagcctcgggcggccttttgaggggctcggcagcttcagcgccgtggggtctgacctggctggatatagtgtaccggcccg

SEQ ID NO: 14681 - DNA, 119 bp, homo sapiens
agcctcgggcggccttttgaggggctcggctagcttcagcgccgtggggtctgacctggctggatataggtaccggcccggcaggaggggcggcccggtccgggttgcgcctcctggag

SEQ ID NO: 14682 - DNA, 119 bp, homo sapiens
cgccgtggggtctgacctggctggatatagtgtaccggcccggcaggaggggcggcccggtccgggttggcctcctggagccgcccccgggacgtcagtcctggaggaggcgagggtga

SEQ ID NO: 14683 - DNA, 119 bp, homo sapiens
ctgctggcaacgtggcccaaggccctgagccaagagacagcagaggatctccaggagggtctctaggcgagccctccagaaggagcagcatgtttcctcagatttgcagggaacaaact

SEQ ID NO: 14684 - DNA, 119 bp, homo sapiens
aaggccctgagccaagagacagcagaggatctccaggagggtctctaggcggagccctccagaaggagcgcatgtttcctcagatttgcagggaacaaactccagaaggccaaatggta

SEQ ID NO: 14685 - DNA, 119 bp, homo sapiens
acatacctgaatagtgacaatcctaggcaggggctggcgggtgttggcgccaccctcgatggcgatgccagggtggccgcacttttcttcacacggaccagagtggacgtgggctccag

SEQ ID NO: 14686 - DNA, 119 bp, homo sapiens
tgacaatcctaggcaggggctggcgggtgttggcgccaccctcgatggcgatgcccagggtggccgcactttcttcacacggaccagagtggacgtgggctccagaagtccaggctgtg

SEQ ID NO: 14687 - DNA, 119 bp, homo sapiens
actcactgcgcgtctggggcagcgccctcacttcattgacgtctggctcgctgtcggggcggtggacctcaccatgacaaagtgctggtttgtgcctgtctggtctgggtggccagagg

SEQ ID NO: 14688 - DNA, 119 bp, homo sapiens
tcggggcggtggacctccaccatgacaaagtgctggtttgtgcctgtctggtctgggtggccagagggtatgggggcagaaggcagcccccagccactgtggcctctgcagaggggctt

SEQ ID NO: 14689 - DNA, 119 bp, homo sapiens
tgggtggccagagggtgatgggggcagaaggcagcccccagccactgtggcctctgcagaggggcttttaggtgcgggggtgactggacccgtgggaaggggccgatggggtgttggtt

SEQ ID NO: 14690 - DNA, 119 bp, homo sapiens
ctgcagaggggcttttcaggtgcgggggtgactggacccgtgggaaggggccgatggggtgttggttgacagggccagatgggcgtccagcggcctcttggagctggggttggcagggg

SEQ ID NO: 14691 - DNA, 119 bp, homo sapiens
atggggtgttggttgaccagggccagatgggcgtccagcggcctcttggagctggggttggcaggggagcggaggcatagatgggggaagagggcaagtcctgtgcagaggaggtccct

SEQ ID NO: 14692 - DNA, 119 bp, homo sapiens
ggggttggcaggggagacggaggcatagatgggggaagagggcaagtcctgtgcagaggaggtccctgggtgggtgcggtgcccgctggcgggctgcggttctgtggagccgagaagac

SEQ ID NO: 14693 - DNA, 119 bp, homo sapiens
cagaggaggtccctggggtgggtgcggtgcccgctggcgggctgcggttctgtggagccgagaagacaggcccgagcaggaaggcatggaggaaggtggctggaggtcctctctcccca

SEQ ID NO: 14694 - DNA, 119 bp, homo sapiens
ggagccgagaagacagtgcccgagcaggaaggcatggaggaaggtggctggaggtcctctctccccagctccttggctggcctagtgggaggtcgttgccttgggccagaggtggtggg

SEQ ID NO: 14695 - DNA, 119 bp, homo sapiens
gtcctctctccccagcttccttggctggcctagtgggaggtcgttgccttgggccagaggtggtgggcgggcagtggcttgaagcttgacagcccctgggaggtggatctgacatcatc

SEQ ID NO: 14696 - DNA, 119 bp, homo sapiens
ggtcaccttggcgtgggtgttgagcagcttgaacagggccatgacgagggcctccacagagacgctgccccacggtactcatccaggtagtaggccatggtggcgtgttcctgctcgtt

SEQ ID NO: 14697 - DNA, 119 bp, homo sapiens
ctccacagagacgctgccaccacggtactcatccaggtagtaggccatggtggcgtgttcctgctcgttagcaggtgccgagcctgctcctccagcagcactcgtgtctggttccccag

SEQ ID NO: 14698 - DNA, 119 bp, homo sapiens
ggcgtgttcctgctcgttcagcaggtgccgagcctgctcctccagcagcactcgtgtctggttccccagctgctcagggtcacctgggagccggctgggcccttgtaaaatcctggctg

SEQ ID NO: 14699 - DNA, 119 bp, homo sapiens
cctcaccttgagcccgctgccttctgcttcagagcctgggtccacgccagtgatgtaaatgccaaggcctactcagctcccccacggatcgtgaggcccagggaccggccgtcccccag

SEQ ID NO: 14700 - DNA, 119 bp, homo sapiens
tgccttctgcttcagagcctgggtccacgccagtgatgtaaatgccaaggccgtactcagctcccccacgatcgtgaggcccagggaccggccgtcccccagcaccaggttcacctgtc

SEQ ID NO: 14701 - DNA, 119 bp, homo sapiens
actcacctttttctcatcccctccttgcaggaggtgcagggtgctcctccggtcaccctcctgctgcctagggcaccaccgtggggctggggcaggcccgagggtggggagatgctgcg

SEQ ID NO: 14702 - DNA, 119 bp, homo sapiens
accctcctgctgcctcagggcaccaccgtggggctggggcaggcccgagggtggggagatgctgcggcctgcgggtccacccaggtgtagatgtggttggtgacgtagcccccagggat

SEQ ID NO: 14703 - DNA, 119 bp, homo sapiens
ggagatgctgcggccctgcgggtccacccaggtgtagatgtggttggtgacgtagcccccagggatgcgcctgctgagtacacagacagcaccagcttcttggagcccttcagagccta

SEQ ID NO: 14704 - DNA, 119 bp, homo sapiens
ccttaccttgacggcctccgcgtgggtcacccgggccagggatttgtcgttgacgcgcagaatctggtcccgacccgcagtccttccttctcagctagagagcctggttccaccagaga

SEQ ID NO: 14705 - DNA, 119 bp, homo sapiens
agaatctggtccccgacccgcagtccttccttctcagctagagagcctggttccaccagagacacgtagtgcccacgccgtgctccgagcccccacggatgctgaagcccaagccctcg

SEQ ID NO: 14706 - DNA, 119 bp, homo sapiens
gagacacgtagatgcccacgccgtgctccgagcccccacggatgctgaagcccaagccctcgtgggcctggcacgccgcaaactcaccaggcgcacctcccctggccccgcgctgtcgg

SEQ ID NO: 14707 - DNA, 119 bp, homo sapiens
ctcgtgggccttggcacgccgcaaactcaccaggcgcacctcccctggccccgcgctgtcggggccgcccaggcgggctgcctgtagggggtggtggcgggcaggtagaggccctcggc

SEQ ID NO: 14708 - DNA, 119 bp, homo sapiens
tcggggccgccccaggcgggctgcctgtagggggtggtggcgggcaggtagaggccctcggccgtgtatggtcgaagagcagctggtcggagcgcgggatgaccagacgaagcatgggc

SEQ ID NO: 14709 - DNA, 119 bp, homo sapiens
cggccgtgtattggtcgaagagcagctggtcggagcgcgggatgaccagacgaagcatgggcagcaggcccgcttgaccggactgtccagcagcacgcgcagggtgcgcaccaggtcga

SEQ ID NO: 14710 - DNA, 119 bp, homo sapiens
tcgaagacgttgcggcgcgcgtggtaagcgttcaggcagtgggtgaactgctcccgctccgcctcgctcgcagcgcggtcagcgcttggtgcagctggcgcacgttggcagacagtaac

SEQ ID NO: 14711 - DNA, 119 bp, homo sapiens
ccgccgagcccagcgagccggtggaggacgagctcaccgacaggccgtccagcggcgcgttcatctccagccgaggcccggccgggctctgagcgcgcggggtgtgggcggtgccgctg

SEQ ID NO: 14712 - DNA, 119 bp, homo sapiens
gcgcgttcatctccacgccgaggcccggccgggctctgagcgcgcggggtgtgggcggtgccgctgtcccgcgggtactggcgcgacagctggatccccgggagcgcggagacgacggc

SEQ ID NO: 14713 - DNA, 119 bp, homo sapiens
gcggtgccgctgtcctcgcgggtactggcgcgacagctggatccccgggagcgcggagacgacggctgggcctgggtttggggagcacgggtacagtggctggatcctagggggtcgcg

SEQ ID NO: 14714 - DNA, 119 bp, homo sapiens
ggagacgacggctggagcctgggtttggggagcacgggtacagtggctggatcctagggggtcgcggagccgctgctagagtcccggaggcgcgaagacggcgggggtcgcgaacctgg

SEQ ID NO: 14715 - DNA, 119 bp, homo sapiens
tagggggtcgcggagaccgctgctagagtcccggaggcgcgaagacggcgggggtcgcgaacctggaatcgggggacgcggagacgtcggcgggttcctgagagacacaagagttggct

SEQ ID NO: 14716 - DNA, 119 bp, homo sapiens
tcgcgaacctggaatccgggggacgcggagacgtcggcgggttcctgagagacacaagagttggctgctgagcccggaggtggcggagactgctgctggagtccggggggcgcggggtc

SEQ ID NO: 14717 - DNA, 119 bp, homo sapiens
caagagttggctgctggagcccggaggtggcggagactgctgctggagtccggggggcgcggggtcagcgctacattctggagggcacggagacgacgggtggctggagtttgggggcg

SEQ ID NO: 14718 - DNA, 119 bp, homo sapiens
gggcgcggggtcagcagctacattctggagggcacggagacgacgggtggctggagtttgggggcgccgaaagctgacctgactgccccgtcacaccatgcccggggctcccccagccg

SEQ ID NO: 14719 - DNA, 119 bp, homo sapiens
agtttgggggcgccgcaaagctgacctgactgccccgtcacaccatgcccggggctcccccagccgggccccgttcctctagggctgggggaccccaaagtcagaagttggggcggagg

SEQ ID NO: 14720 - DNA, 119 bp, homo sapiens
ctcccccagccgggcgcccgttcctctagggctgggggaccccaaagtcagaagttggggcggagggcgtctagtcccagagcactccggggagtggcagccggtgaagcggcgcgggc

SEQ ID NO: 14721 - DNA, 119 bp, homo sapiens
ttggggcggagggcgctctagtcccagagcactccggggagtggcagccggtgaagcggcgcgggcgtcgacaaggggtgcggggcatgtccggggcagccccgggatgcagccgcccg

SEQ ID NO: 14722 - DNA, 119 bp, homo sapiens
agcggcgcgggcgtccgacaaggggtgcggggcatgtccggggcagccccgggatgcagccgcccgggggcctccgcgcctctgcgccgcccggccgcaagcccggactttgcgaactg

SEQ ID NO: 14723 - DNA, 119 bp, homo sapiens
cattaccttcagacagcatgctcagggcttcgtcagaagtctgcccacccacttgagacaccttcccggagcagggttttcatggggcatcagtggggatgggtgagccccctcagcag

SEQ ID NO: 14724 - DNA, 119 bp, homo sapiens
tgcccacccacttgagacaccttcccggaagcagggttttcatggggcatcagtggggatgggtgagcccctcagcagccgaggtggtcagtgattcccactggatctccttcctggga

SEQ ID NO: 14725 - DNA, 119 bp, homo sapiens
atggggcatcagtggggatgggtgagccccctcagcagccgaggtggtcagtgattcccactggatctcttcctgggagactgaaaacccaggctgcatcctgtccagccgtagaaggc

SEQ ID NO: 14726 - DNA, 119 bp, homo sapiens
aggtggtcagtgattcccactggatctccttcctgggagactgaaaacccaggctgcatcctgtccagcgtagaaggccaaagacaagagaaatccctgggctggattcaggattccct

SEQ ID NO: 14727 - DNA, 119 bp, homo sapiens
ccgggcagcagctgcagaaggcccagcgccaagcggagcccgccgctgcccaggcagagcgcgtggaagcccgcggctggaagctcagcacgagctgcgtggctgcgtcccgcgtgggg

SEQ ID NO: 14728 - DNA, 119 bp, homo sapiens
tgcccaggcagagcgcgtggaaggcccgcggctggaagctcagcacgagctgcgtggctgcgtcccgcgggggcagcagaaggtccctaggcgcggggaggccatgggctgtgttcgcg

SEQ ID NO: 14729 - DNA, 119 bp, homo sapiens
gagctgcgtggctgcgtcccgcgtggggcagcagaaggtccctaggcgcggggaggccatgggctgtgtcgcggacgcggctcgggtgtgccaggaccccgccggcctgcctgggtcat

SEQ ID NO: 14730 - DNA, 119 bp, homo sapiens
cgcggggaggccatgggctgtgttcgcggacgcggctcgggtgtgccaggaccccgccggcctgcctggtcatgtgctgggcgggctgggggcggcatcatgtgccctgggcctctccc

SEQ ID NO: 14731 - DNA, 119 bp, homo sapiens
caggaccccgccggcctgcctgggtcatgtgctgggcgggctgggggcggcatcatgtgccctgggccttcccccaccccaacccccagcgcctgcagtagagccaggctcggtggggg

SEQ ID NO: 14732 - DNA, 119 bp, homo sapiens
ttgtcctgtgtcctaaggccagggataagtccccccaccccccccccccacccccaacaccctgtgtgagtgtttatatttgagagaagattgggcggggaaaagcattttccgaagtt

SEQ ID NO: 14733 - DNA, 119 bp, homo sapiens
gccagggataagtccccccaccccccccccccacccccaacaccctgtgtgatgtgtttatatttgagaaagattgggcggggaaaagcattttccgaagttcaagcatacagcatagg

SEQ ID NO: 14734 - DNA, 119 bp, homo sapiens
agctgaggcaggcatcaggcacacttgctgacgcactccagcagctccatccggatggcaatgcggacggccagcccagcgggatgaggcggatgaagcgggagatgatggggggccgc

SEQ ID NO: 14735 - DNA, 119 bp, homo sapiens
ctgacgcactccagcagctccatccggatggcaatgcggacgtgccagcccagcgggatgaggcggatgagcgggagatgatggggggccgcagcaggttctgaaccgtggaggtgcgg

SEQ ID NO: 14736 - DNA, 119 bp, homo sapiens
taacagtggaactgaccagatatagtttattaaaatatgttcattataaacaattttacctcagttttgaaaaattgtaaatacatcaaaaactgttacagtgtcgtaagattgcaaat

SEQ ID NO: 14737 - DNA, 119 bp, homo sapiens
gttcattataaacaattttacctcagttttgtaaaaattgtaaatacatcaaaaactgttacagtgtcgaagattgcaaatattgccttataaaattataaagaagtaaaattgtttag

SEQ ID NO: 14738 - DNA, 119 bp, homo sapiens
tgtaaatacatcaaaaactgttacagtgtcgtaagattgcaaatattgccttataaaattataaagaagaaaattgtttagtaaaaactaggaaatatcttatttcaattttccacata

SEQ ID NO: 14739 - DNA, 119 bp, homo sapiens
tgttacctggttcctctggctgcatgaggtcctgttcagataagacactctcttggaggtttctctcagacatcgtggaaagactgaattggggagaaaacaagcagaaaggccaagag

SEQ ID NO: 14740 - DNA, 119 bp, homo sapiens
ttctctcagaacatcgtggaaagactgaattggggagaaaacaagcagaaaggccaagagtcccttctatggaggtagtgttctcctcattgaaaaagaatctggagacctctccttta

SEQ ID NO: 14741 - DNA, 119 bp, homo sapiens
actcaccgggcatcagctcttccggctccctcatgccacgggcagtacgggcagcctgcgccggggccagaggctgtagaggacggtttggtcggggctaaagcagctactccgcaccg

SEQ ID NO: 14742 - DNA, 119 bp, homo sapiens
agtacgggcagcctgcgccggggccaggaggctgtagaggacggtttggtcggggctaaagcagctactcgcaccgacgcgggccgcgaaagcccccaagttccgcatggcgaaactcc

SEQ ID NO: 14743 - DNA, 119 bp, homo sapiens
gtttggtcggggctaaagcagctactccgcaccgacgcgggccgcgaaagcccccaagttccgcatggcaaactccggagatcaactacaaccgcgctcccggaagtcaacaaacagcc

SEQ ID NO: 14744 - DNA, 119 bp, homo sapiens
ccgcagcggtggtcctcggcctgcccagcgcctgggccgtgggggcctgcgcccgcgcttgtcccgccgctgcgcctgcagcaccgtggagcgcggctgctcggtgcgctgcgaccgcg

SEQ ID NO: 14745 - DNA, 119 bp, homo sapiens
ttgtcccgccgcctgcgcctgcagcaccgtggagcgcggctgctcggtgcgctgcgaccgcgcgggcctctgcgggtgccggccgagctcccgtgcgaggcggtctccatcgacctgga

SEQ ID NO: 14746 - DNA, 119 bp, homo sapiens
cgcgcgggcctcctgcgggtgccggccgagctcccgtgcgaggcggtctccatcgacctggaccggaacgcctgcgcttcctgggcgagcgagccttcggcacgctgccgtccttgcgc

SEQ ID NO: 14747 - DNA, 119 bp, homo sapiens
tggaccggaacggcctgcgcttcctgggcgagcgagccttcggcacgctgccgtccttgcgccgcctgtgctgcgccacaacaacctgtccttcatcacgcccggcgccttcaagggcc

SEQ ID NO: 14748 - DNA, 119 bp, homo sapiens
gcgccgcctgtcgctgcgccacaacaacctgtccttcatcacgcccggcgccttcaagggcctgccgcgctggctgagctgcgcctggcgcacaacggcgacctgcgctacctgcacgc

SEQ ID NO: 14749 - DNA, 119 bp, homo sapiens
ggcctgccgcgcctggctgagctgcgcctggcgcacaacggcgacctgcgctacctgcacgcgcgcacctcgcggcgctcagccgcctgcgccgcctagacctagcagcctgccgcctc

SEQ ID NO: 14750 - DNA, 119 bp, homo sapiens
acgcgcgcaccttcgcggcgctcagccgcctgcgccgcctagacctagcagcctgccgcctcttcagcggcccgagcgcctcctggccgaactgccggccctgcgcgaactcgccgcct

SEQ ID NO: 14751 - DNA, 119 bp, homo sapiens
cctcttcagcgtgcccgagcgcctcctggccgaactgccggccctgcgcgaactcgccgccttcgacaactgttccgccgcgtgccgggcgcgctgcgcggcctggccaacctgacgca

SEQ ID NO: 14752 - DNA, 119 bp, homo sapiens
gccttcgacaacctgttccgccgcgtgccgggcgcgctgcgcggcctggccaacctgacgcacgcgcactggagcgcggccgcatcgaggcggtggcctccagctcgctgcagggcctg

SEQ ID NO: 14753 - DNA, 119 bp, homo sapiens
cgcacgcgcacctggagcgcggccgcatcgaggcggtggcctccagctcgctgcagggcctgcgccgccgcgctcgctcagcctgcaggccaaccgcgtccgtgccgtgcacgctggcg

SEQ ID NO: 14754 - DNA, 119 bp, homo sapiens
cctgcgccgcctgcgctcgctcagcctgcaggccaaccgcgtccgtgccgtgcacgctggcgccttcgggactgtggcgtcctggagcatctgctgctcaacgacaacctgctggccga

SEQ ID NO: 14755 - DNA, 119 bp, homo sapiens
ggcgccttcggggactgtggcgtcctggagcatctgctgctcaacgacaacctgctggccgagctcccgccgacgccttccgcggcctgcggcgcctgcgcacgctcaacctgggtggc

SEQ ID NO: 14756 - DNA, 119 bp, homo sapiens
ccgagctcccggccgacgccttccgcggcctgcggcgcctgcgcacgctcaacctgggtggcaacgcgcggaccgcgtggcgcgcgcctggttcgctgacctggccgagctcgagctgc

SEQ ID NO: 14757 - DNA, 119 bp, homo sapiens
tggcaacgcgctggaccgcgtggcgcgcgcctggttcgctgacctggccgagctcgagctgctctacctgaccgcaacagcatcgccttcgtggaggagggcgccttccagaacctctc

SEQ ID NO: 14758 - DNA, 119 bp, homo sapiens
ctgctctacctggaccgcaacagcatcgccttcgtggaggagggcgccttccagaacctctcgggtctctcgcgctgcacctcaacggcaaccgcctcaccgtgctcgcctgggtcgcc

SEQ ID NO: 14759 - DNA, 119 bp, homo sapiens
tctcgggtctcctcgcgctgcacctcaacggcaaccgcctcaccgtgctcgcctgggtcgccttccagccggcttcttcctgggccgcctcttcctcttccgcaacccgtggtgctgcg

SEQ ID NO: 14760 - DNA, 119 bp, homo sapiens
cgccttccagcccggcttcttcctgggccgcctcttcctcttccgcaacccgtggtgctgcgactgccgctggagtggctgagggactggatggagggctccggacgtgtcaccgacgt

SEQ ID NO: 14761 - DNA, 119 bp, homo sapiens
tgcgactgccgtctggagtggctgagggactggatggagggctccggacgtgtcaccgacgtgccgtgccctccccgggctccgtggccggcctggacctcagccaggtgaccttcggg

SEQ ID NO: 14762 - DNA, 119 bp, homo sapiens
acgtgccgtgcgcctccccgggctccgtggccggcctggacctcagccaggtgaccttcgggcgctcctcgatggcctctgtgtggaccccgaggagctgaacctcaccacgtccagtc

SEQ ID NO: 14763 - DNA, 119 bp, homo sapiens
cgggcgctcctccgatggcctctgtgtggaccccgaggagctgaacctcaccacgtccagtccaggccctccccagaaccagcggccaccaccgtgagcaggttcagcagcctcctctc

SEQ ID NO: 14764 - DNA, 119 bp, homo sapiens
agtccaggcccgtccccagaaccagcggccaccaccgtgagcaggttcagcagcctcctctccaagctgtggccccgagggtcccggtggaggaggcggccaacaccactggggggctg

SEQ ID NO: 14765 - DNA, 119 bp, homo sapiens
tctccaagctgctggccccgagggtcccggtggaggaggcggccaacaccactggggggctggccaacgctccctgtccgacagcctctcctcccgtggggtgggaggcgcgggccggc

SEQ ID NO: 14766 - DNA, 119 bp, homo sapiens
gctggccaacgcctccctgtccgacagcctctcctcccgtggggtgggaggcgcgggccggcagccctgtttctcctcgcctcttgtctcctgcccagcgtggcccagcacgtggtgtt

SEQ ID NO: 14767 - DNA, 119 bp, homo sapiens
cggcagccctggtttctcctcgcctcttgtctcctgcccagcgtggcccagcacgtggtgtttggcctgagatggactgacctggccagaggggggaaagtttgcttaactgggcttga

SEQ ID NO: 14768 - DNA, 119 bp, homo sapiens
tgtttggcctgcagatggactgacctggccagaggggggaaagtttgcttaactgggcttgagtgtgttgtggtaaggggagaggagccggaatggagggcagaggtgaaaatcccagt

SEQ ID NO: 14769 - DNA, 119 bp, homo sapiens
ttgagtgtgtttgtggtaaggggagaggagccggaatggagggcagaggtgaaaatcccagtggagggtgaaggaaccgtttgcctccagagatggccccagggagaacacagggacgt

SEQ ID NO: 14770 - DNA, 119 bp, homo sapiens
cagtggagggtggaaggaaccgtttgcctccagagatggccccagggagaacacagggacgtgccactcagggggaggatggtatggatttctgcttttgtcacacgggcatccattgg

SEQ ID NO: 14771 - DNA, 119 bp, homo sapiens
taggtggcagtgagtcgcatgccccctgagcatcgcagccgcagtgccttcagcttggaagtctggggcggcagcagtgacaggaggaacggaagggttgcttgaggacagtgctgaac

SEQ ID NO: 14772 - DNA, 119 bp, homo sapiens
atcgcagccgcagtgccttcagcttggaagtctggggccggcagcagtgacaggaggaacggaagggttcttgaggacagtgctgaacgacaccaaaggctcggagcgtgacgcctggc

SEQ ID NO: 14773 - DNA, 119 bp, homo sapiens
ctggggccggcagcagtgacaggaggaacggaagggttgcttgaggacagtgctgaacgacaccaaaggtcggagcgtgacgcctggctgcagtgcccctcgcacctggccaggagcac

SEQ ID NO: 14774 - DNA, 119 bp, homo sapiens
tgcgctgggtcgtcagggcgacgaaaaaggggaaggggtgctgggcctggcgggcaaactaaggctgcgaccgttgggcggttccgcggggcgttgtccggagagctgcgaggccgggg

SEQ ID NO: 14775 - DNA, 119 bp, homo sapiens
cctggcgggcaaactaaggctgcggaccgttgggcggttccgcggggcgttgtccggagagctgcgaggcggggttcccagggttcacgccacactctaggaagtgcctgagctagtga

SEQ ID NO: 14776 - DNA, 119 bp, homo sapiens
ggcgttgtccggagagctgcgaggccggggttcccagggttcacgccacactctaggaagtgcctgagcagtgagctggccaacgagctccgcgggctgggaccatgggctgcttcttc

SEQ ID NO: 14777 - DNA, 119 bp, homo sapiens
ccacactctaggaagtgcctgagctagtgagctggccaacgagctccgcgggctgggaccatgggctgctcttctccaagagacggaaggctgacaaggagtcgcggcccgagaacgag

SEQ ID NO: 14778 - DNA, 119 bp, homo sapiens
ccgcgggctgggaccatgggctgcttcttctccaagagacggaaggctgacaaggagtcgcggcccgagacgaggaggagcggccaaagcagtacagctgggatcagcgcgagaaggta

SEQ ID NO: 14779 - DNA, 119 bp, homo sapiens
ataatacacttttgtgtattagcaatggtttttactaatgctaaaacttttaaagtttattttttaataattgttgagtattacatcatttacttgaggttcaaaaataattcatttta

SEQ ID NO: 14780 - DNA, 119 bp, homo sapiens
aaaacttttaaagtttattttttaataaattgttgagtattacatcatttacttgaggttcaaaaataatcattttaaattaagtagttttaatcagcttaaaagctatttaacccatt

SEQ ID NO: 14781 - DNA, 119 bp, homo sapiens
catcatttacttgaggttcaaaaataattcattttaaattaagtagttttaatcagcttaaaagctattaacccattttaataagcttgcagttttgtttctctgcatatgatattctt

SEQ ID NO: 14782 - DNA, 119 bp, homo sapiens
gtagttttaatcagcttaaaagctatttaacccattttaataagcttgcagttttgtttctctgcatatatattcttattagaaaacagaagtagctaaaagtttattattttaatcct

SEQ ID NO: 14783 - DNA, 119 bp, homo sapiens
ctggccatgatgatattattaaacaccattattcacatttcaaataataacaatactttttgtttttcaaaataaaatgcaatgttatataaagctataaactaagttctttatgatat

SEQ ID NO: 14784 - DNA, 119 bp, homo sapiens
tttttgtttttcaaaaataaaatgcaatgttatataaagctataaactaagttctttatgatatttgagaacaactcaggaatataacatataagggagatgttaatttaaaaatttcc

SEQ ID NO: 14785 - DNA, 119 bp, homo sapiens
taaggacagtcatttggcttctgaatgtttgaaacgattttaaaaaataagtagtgctatggttgtttcataattctaacctttgatagtaatcagaatgtattacatttcatttctga

SEQ ID NO: 14786 - DNA, 119 bp, homo sapiens
agtgctatggttgtttctataattctaacctttgatagtaatcagaatgtattacatttcatttctgaaagcttttgaatttatgaaaaattattaacaatgaaaaattggtaatttta

SEQ ID NO: 14787 - DNA, 119 bp, homo sapiens
tacatttcatttctgaatagcttttgaatttatgaaaaattattaacaatgaaaaattggtaattttataagttatatgtgtttaaatattatattagcttatttctcttgcattaata

SEQ ID NO: 14788 - DNA, 119 bp, homo sapiens
aaaattggtaattttattaagttatatgtgtttaaatattatattagcttatttctcttgcattaatagactgctgtttttgttttgcttctttatatttatgtctagcttttatatgt

SEQ ID NO: 14789 - DNA, 119 bp, homo sapiens
ttctcttgcattaatagtactgctgtttttgttttgcttctttatatttatgtctagcttttatatgtatttatctagtgtttataaaatgtgatttgtaataaatgttgttaaaatga

SEQ ID NO: 14790 - DNA, 119 bp, homo sapiens
actcacagcctccaccaagctgtcggcactgcccctcttcccatggctggggtccgagtgggttccaggacgtgcagacaggtgaaggtgcgcagtgggccactggatctgccgaggta

SEQ ID NO: 14791 - DNA, 119 bp, homo sapiens
ggctggggtccgagtgggttccaggcacgtgcagacaggtgaaggtgcgcagtgggccactggatctgcgaggtacccctcccccgctgcgccctcttccaccaacaacagcggggcat

SEQ ID NO: 14792 - DNA, 119 bp, homo sapiens
gtgcgcagtgggccactggatctgccgaggtacccctcccccgctgcgccctcttccaccaacaacagcgggcatacaggagccgaccccgctgaggtggtgttgcccaggaaccctga

SEQ ID NO: 14793 - DNA, 119 bp, homo sapiens
tctcacctgcaggtgtggggggcagcagacggcggcgtggtaccaggtgcccatccatgtatctctgagtctgtgaggtggcaaaaggactgagcacgggggagtccctgcctgctcat

SEQ ID NO: 14794 - DNA, 119 bp, homo sapiens
gggcagcagacggcggcgtggtaccaggtgcccatccatgtatctctgagctctgtgaggtggcaaaagactgagcacgggggagtccctgcctgctcatctaggtaggaaagcctgtg

SEQ ID NO: 14795 - DNA, 119 bp, homo sapiens
gaagacctgaagggcggaagaggtgctaggggcggcgtcgttgcctagtagccctttttctttcctccgcggaatttgcggaaatagtcctggatcagaaatgtggcgtagaatttgcc

SEQ ID NO: 14796 - DNA, 119 bp, homo sapiens
gtgctaggggcggcgtcgttgcctagtagccctttttctttcctccgccggaatttgcggaaatagtccggatcagaaatgtggcgtagaatttgcccacggtgacctcctcctctagg

SEQ ID NO: 14797 - DNA, 119 bp, homo sapiens
gcatacttggccccagggtcatattcagaccagatcctcttgaattcatcaaggtgatgggggcccaggtggaccaatctctggtgagataatcaaagttgtccatgatcacagccaca

SEQ ID NO: 14798 - DNA, 119 bp, homo sapiens
catattcagaccagatcctcttgaattcatcaaggtgatgggggcccaggatggaccaatctctggtgaataatcaaagttgtccatgatcacagccacaaagagatttatgatctgtg

SEQ ID NO: 14799 - DNA, 119 bp, homo sapiens
cctcacgcaggccagccttcaaaggtggagacagtgaacagggccatcatggctgaaaggacattgtcaagttgaaatcactgttgacccagagccgctcccggaccaggggccgtgac

SEQ ID NO: 14800 - DNA, 119 bp, homo sapiens
cagggccatcatggctgaaaggacattgtcaaagttgaaatcactgttgacccagagccgctcccggacaggggccgtgacacgtctccatctgggtataccaggaaggagcccctgtg

SEQ ID NO: 14801 - DNA, 119 bp, homo sapiens
gctcacatggttgcggaaggagtgggctcggatggggtcctcagcggccagggacacactgctgaggatatgaacaccaggataagattggtgaagacatgatggtggatgagggtgtg

SEQ ID NO: 14802 - DNA, 119 bp, homo sapiens
gtgggctcggatggggtcctcagcggccagggacacactgctgaggatgatgaacaccaggataagattgtgaagacatgatggtggatgagggtgtggcagcccttcctcagcctgtg

SEQ ID NO: 14803 - DNA, 119 bp, homo sapiens
gtgtaccctggatctgggtgagccacacaggctgcccgtggtgctcagaggcgatggtcaacgtgttgagaagacgagcaacagcacagcccagtagcaggcattggacttcactgccc

SEQ ID NO: 14804 - DNA, 119 bp, homo sapiens
gatggtcaacgtgttgaggaagacgagcaacagcacagcccagtagcaggcattggacttcactgcccgcggcagcgtgcccgaaggacccggttggctcggcggaggcggcggctggg

SEQ ID NO: 14805 - DNA, 119 bp, homo sapiens
actcactcgggaccccagacaccagcctcagtggccgcagcacccgaaacgccctcaatgccttcacatgaagcctcctggctttcccccggtgtgcggggcgtcgcctggccgtccgg

SEQ ID NO: 14806 - DNA, 119 bp, homo sapiens
ccgcagcacccgaaacgccctcaatgccttcacatcgaagcctcctggctttcccccggtgtgcggggctcgcctggccgtccggggccctgctccagcagaacgctgaacagcctgat

SEQ ID NO: 14807 - DNA, 119 bp, homo sapiens
gtttcttcgcttaggggtccctaggcctgatgccccactgctttcaccttccacagctgggggcccgggcacagcccccattcgggaccagggcctgccccattggctggactgggctc

SEQ ID NO: 14808 - DNA, 119 bp, homo sapiens
ggtccctaggcctgatgccccactgctttcaccttccacagctgggggcccggggcacagcccccattcggaccagggcctgccccattggctggactgggctctggggtggtgtctat

SEQ ID NO: 14809 - DNA, 119 bp, homo sapiens
catgactgaaaaggatttaaaagtctttatttcctctgaaaacttactggtaaagtatacaatttatgataatcatatattcatgctttttgaaatatatctgaataaaagacaaatta

SEQ ID NO: 14810 - DNA, 119 bp, homo sapiens
aaagtctttatttcctctgaaaacttactggtaaagtatacaatttatgaataatcatatattcatgcttttgaaatatatctgaataaaagacaaattattcaatatcaatagcagta

SEQ ID NO: 14811 - DNA, 119 bp, homo sapiens
gtttaaatacttgaatcaaaattctttaatagcattttctgaaattttaaattagctactgaaaattttcactatgtacaatatattttattaatatgatttcaagcttaaggttttat

SEQ ID NO: 14812 - DNA, 119 bp, homo sapiens
ttagctactgaaaattttccactatgtacaatatattttattaatatgatttcaagcttaaggttttatacaagacttttctttttgatttaaaactataagaacaaatatttatttgc

SEQ ID NO: 14813 - DNA, 119 bp, homo sapiens
tcaagcttaaggttttataacaagacttttctttttgatttaaaactataagaacaaatatttatttgcgtaattaggatagctaaaatcaaagctctaagaataatttctgttacatt

SEQ ID NO: 14814 - DNA, 119 bp, homo sapiens
gaacaaatatttatttgcagtaattaggatagctaaaatcaaagctctaagaataatttctgttacatttgaggcaacaggaaatatataaagttcttaaagtcttttatcagttgtat

SEQ ID NO: 14815 - DNA, 119 bp, homo sapiens
ccatagggatcacaggtctctggtctctggccatcatttcctgggagaggtggctggtggtgtgcaagcctttggcaatgtgagatttgatgccaagctggccatcgtgggcattgcct

SEQ ID NO: 14816 - DNA, 119 bp, homo sapiens
tgtgcaagccctttggcaatgtgagatttgatgccaagctggccatcgtgggcattgccttctcctggactggtctgctgtgtggacagccccgcccatctttggttggagcaggtaag

SEQ ID NO: 14817 - DNA, 119 bp, homo sapiens
ttccagtttcgaaactgcatcttgcagcttttcgggaagaaggttgacgatggctctgaactctccagccctccaaaacggaggtctcatctgtgtcctcggtatcgcctgcatgaggt

SEQ ID NO: 14818 - DNA, 119 bp, homo sapiens
ctctgaactctccagcgcctccaaaacggaggtctcatctgtgtcctcggtatcgcctgcatgaggtctcctcctacccatcccgcccaccggggctttggccacctctcctttccccc

SEQ ID NO: 14819 - DNA, 119 bp, homo sapiens
cgcctgcatgaggtctgcctcctacccatcccgcccaccggggctttggccacctctcctttccccctcttctccatccctgtaaaataaatgtaatttatctttgccaaaaccaacaa

SEQ ID NO: 14820 - DNA, 119 bp, homo sapiens
gctgatcccactggccggtataaagcaccgtgaccctcaggtgacgcaccagggccggctgccgtcgggacagggctttccatagccatggcccagcagtggagcctccaaaggctcgc

SEQ ID NO: 14821 - DNA, 119 bp, homo sapiens
gacgcaccagggccggctgccgtcggggacagggctttccatagccatggcccagcagtggagcctccaaggctcgcaggccgccatccgcaggacagctatgaggacagcacccagtc

SEQ ID NO: 14822 - DNA, 119 bp, homo sapiens
agccatggcccagcagtggagcctccaaaggctcgcaggccgccatccgcaggacagctatgaggacagacccagtccagcatcttcacctacaccaacagcaactccaccagaggtga

SEQ ID NO: 14823 - DNA, 119 bp, homo sapiens
cctcaggccccttcgaaggcccgaattaccacatcgctcccagatgggtgtaccacctcaccagtgtctgatgatctttgtggtcattgcatccgtcttcacaaatgggcttgtgctgg

SEQ ID NO: 14824 - DNA, 119 bp, homo sapiens
gtgtaccacctcaccagtgtctggatgatctttgtggtcattgcatccgtcttcacaaatgggcttgtgtggcggccaccatgaagttcaagaagctgcgccacccgctgaactggatc

SEQ ID NO: 14825 - DNA, 119 bp, homo sapiens
cgtcttcacaaatgggcttgtgctggcggccaccatgaagttcaagaagctgcgccacccgctgaactgatcctggtgaacctggcggtcgctgacctggcagagaccgtcatcgccag

SEQ ID NO: 14826 - DNA, 119 bp, homo sapiens
agctgcgccacccgctgaactggatcctggtgaacctggcggtcgctgacctggcagagaccgtcatcgcagcactatcagcgttgtgaaccaggtctatggctacttcgtgctgggcc

SEQ ID NO: 14827 - DNA, 119 bp, homo sapiens
gacctggcagagaccgtcatcgccagcactatcagcgttgtgaaccaggtctatggctacttcgtgctggccaccctatgtgtgtcctggagggctacaccgtctccctgtgtggtaag

SEQ ID NO: 14828 - DNA, 119 bp, homo sapiens
ccatagggatcacaggtctctggtctctggccatcatttcctgggagagatggatggtggtctgcaagcctttggcaatgtgagatttgatgccaagctggccatcgtgggcattgcct

SEQ ID NO: 14829 - DNA, 119 bp, homo sapiens
tctgcaagccctttggcaatgtgagatttgatgccaagctggccatcgtgggcattgccttctcctggactgggctgctgtgtggacagccccgcccatctttggttggagcaggtaag

SEQ ID NO: 14830 - DNA, 119 bp, homo sapiens
ctccaggtactggccccacggcctgaagacttcatgcggcccagacgtgttcagcggcagctcgtacccggggtgcagtcttacatgattgtcctcatggtcacctgctgcatcacccc

SEQ ID NO: 14831 - DNA, 119 bp, homo sapiens
cagctcgtaccccggggtgcagtcttacatgattgtcctcatggtcacctgctgcatcaccccactcagatcatcgtgctctgctacctccaagtgtggctggccatccgagcggtaag

SEQ ID NO: 14832 - DNA, 119 bp, homo sapiens
ccttaggtggcaaagcagcagaaagagtctgaatccacccagaaggcagagaaggaagtgacgcgcatgtggtggtgatggtcctggcattctgcttctgctggggaccatacgccttc

SEQ ID NO: 14833 - DNA, 119 bp, homo sapiens
aggcagagaaggaagtgacgcgcatggtggtggtgatggtcctggcattctgcttctgctggggaccatcgccttcttcgcatgctttgctgctgccaaccctggctaccccttccacc

SEQ ID NO: 14834 - DNA, 119 bp, homo sapiens
ggcattctgcttctgctggggaccatacgccttcttcgcatgctttgctgctgccaaccctggctacccttccaccctttgatggctgccctgccggccttctttgccaaaagtgccac

SEQ ID NO: 14835 - DNA, 119 bp, homo sapiens
tttgctgctgccaaccctggctaccccttccaccctttgatggctgccctgccggccttctttgccaaagtgccactatctacaaccccgttatctatgtctttatgaaccggcaggta

SEQ ID NO: 14836 - DNA, 119 bp, homo sapiens
ctaaggcaggtggccctcctggccccttaaggtccatctgctggaggcccagagtccttggagtacagttacacctggaggggacccattcctgccagtctgtggcagggatggcgcgc

SEQ ID NO: 14837 - DNA, 119 bp, homo sapiens
agagtccttggagtacagtctacacctggaggggacccattcctgccagtctgtggcagggatggcgcgcacctctgccaggccaggaccccaagcccgatcagcatcagcatggtgca

SEQ ID NO: 14838 - DNA, 119 bp, homo sapiens
ctgtggcagggatggcgcgccacctctgccaggccaggaccccaagcccgatcagcatcagcatggtgcggtgcacaggcgtgagctgatcagtgacgaggggcaggcacacaaggtgg

SEQ ID NO: 14839 - DNA, 119 bp, homo sapiens
atcagcatcagcatggtgcaggtgcacaggcgtgagctgatcagtgacgaggggcaggcacacaaggtgagacaaagaccaagaggacggttgccagtgagaggcgcggactcaggaac

SEQ ID NO: 14840 - DNA, 119 bp, homo sapiens
ggggcaggcacacaaggtggagacaaagaccaagaggacggttgccagtgagaggcgcggactcaggaattgaacaacatctgcgggggacggctttggaggtgctccgctgcctccag

SEQ ID NO: 14841 - DNA, 119 bp, homo sapiens
agaggcgcggactcaggaacttgaacaacatctgcgggggacggctttggaggtgctccgctgcctccattgggtgacttgctgtagcatctccagcttggatattcggctcttgaagg

SEQ ID NO: 14842 - DNA, 119 bp, homo sapiens
aggtgctccgctgcctccagttgggtgacttgctgtagcatctccagcttggatattcggctcttgaagtctccgtgatctcctgcaggagacgaaaatgcacgcaccagaagtcagca

SEQ ID NO: 14843 - DNA, 119 bp, homo sapiens; identical to SEQ ID NO: 14820

SEQ ID NO: 14844 - DNA, 119 bp, homo sapiens; identical to SEQ ID NO: 14821

SEQ ID NO: 14845 - DNA, 119 bp, homo sapiens; identical to SEQ ID NO: 14822

SEQ ID NO: 14846 - DNA, 119 bp, homo sapiens; identical to SEQ ID NO: 14823

SEQ ID NO: 14847 - DNA, 119 bp, homo sapiens; identical to SEQ ID NO: 14824

SEQ ID NO: 14848 - DNA, 119 bp, homo sapiens; identical to SEQ ID NO: 14825

SEQ ID NO: 14849 - DNA, 119 bp, homo sapiens; identical to SEQ ID NO: 14826

SEQ ID NO: 14850 - DNA, 119 bp, homo sapiens; identical to SEQ ID NO: 14827

SEQ ID NO: 14851 - DNA, 119 bp, homo sapiens; identical to SEQ ID NO: 14828

SEQ ID NO: 14852 - DNA, 119 bp, homo sapiens; identical to SEQ ID NO: 14829

SEQ ID NO: 14853 - DNA, 119 bp, homo sapiens; identical to SEQ ID NO: 14830

SEQ ID NO: 14854 - DNA, 119 bp, homo sapiens; identical to SEQ ID NO: 14831

SEQ ID NO: 14855 - DNA, 119 bp, homo sapiens
ccttaggtggcaaagcagcagaaagagtctgaatccacccagaaggcagagaaggaagtgacgcgcatgtggtggtgatggtcctggcattctgcttctgctggggaccctacgccttc

SEQ ID NO: 14856 - DNA, 119 bp, homo sapiens
aggcagagaaggaagtgacgcgcatggtggtggtgatggtcctggcattctgcttctgctggggaccctcgccttcttcgcatgctttgctgctgccaaccctggctaccccttccacc

SEQ ID NO: 14857 - DNA, 119 bp, homo sapiens
ggcattctgcttctgctggggaccctacgccttcttcgcatgctttgctgctgccaaccctggctacccttccaccctttgatggctgccctgccggccttctttgccaaaagtgccac

SEQ ID NO: 14858 - DNA, 119 bp, homo sapiens; identical to SEQ ID NO: 14835

SEQ ID NO: 14859 - DNA, 119 bp, homo sapiens; identical to SEQ ID NO: 14817

SEQ ID NO: 14860 - DNA, 119 bp, homo sapiens
aactctccagcgcctccaaaacggaggtctcatctgtgtcctcggtatcgcctgcatgaggtctgcctctacccatcccgcccaccggggctttggccacctctcctttccccctcctt

SEQ ID NO: 14861 - DNA, 119 bp, homo sapiens
aggtctgcctcctacccatcccgcccaccggggctttggccacctctcctttccccctccttctccatcctgtaaaataaatgtaatttatctttgccaaaaccaacaaagtcacagag

SEQ ID NO: 14862 - DNA, 119 bp, homo sapiens
ccttctccatccctgtaaaataaatgtaatttatctttgccaaaaccaacaaagtcacagaggctttcatgcagtgtgggacgacctgagcctctgcgtgtgcaggcactgggtctcga

SEQ ID NO: 14863 - DNA, 119 bp, homo sapiens
agaggctttcactgcagtgtgggacgacctgagcctctgcgtgtgcaggcactgggtctcgagagggtgaagggggataaagaggagagagcgcttcatagactttaagttttcccgag

SEQ ID NO: 14864 - DNA, 119 bp, homo sapiens
tcgagagggtgcaagggggataaagaggagagagcgcttcatagactttaagttttcccgagcctcatgctaccgatggcgtgaaaggatcctggcaaaacagaagtgtgaggcaggtg

SEQ ID NO: 14865 - DNA, 119 bp, homo sapiens
cgagcctcatgtctaccgatggcgtgaaaggatcctggcaaaacagaagtgtgaggcaggtgggcgtcttatccatttcaccaggctggtggttacataatcggcaagcaagagctgtg

SEQ ID NO: 14866 - DNA, 119 bp, homo sapiens
ggtgggcgtctatatccatttcaccaggctggtggttacataatcggcaagcaagagctgtggaggggctgctggatgccctcagcacccaggaggagggagggagctagcaagctaag

SEQ ID NO: 14867 - DNA, 119 bp, homo sapiens
tgtggaggggcttgctggatgccctcagcacccaggaggagggagggagctagcaagctaaggcaggtgccctcctggccccttaaggtccatctgctggaggcccagagtccttggag

SEQ ID NO: 14868 - DNA, 119 bp, homo sapiens
taaggcaggtggccctcctggccccttaaggtccatctgctggaggcccagagtccttggagtacagtcacacctggaggggacccattcctgccagtctgtggcagggatggcgcgcc

SEQ ID NO: 14869 - DNA, 119 bp, homo sapiens
ggagtacagtctacacctggaggggacccattcctgccagtctgtggcagggatggcgcgccacctctgcaggccaggaccccaagcccgatcagcatcagcatggtgcaggtgcacag

SEQ ID NO: 14870 - DNA, 119 bp, homo sapiens
cgccacctctgccaggccaggaccccaagcccgatcagcatcagcatggtgcaggtgcacaggcgtgagtgatcagtgacgaggggcaggcacacaaggtggagacaaagaccaagagg

SEQ ID NO: 14871 - DNA, 119 bp, homo sapiens
acaggcgtgagctgatcagtgacgaggggcaggcacacaaggtggagacaaagaccaagaggacggttgcagtgagaggcgcggactcaggaacttgaacaacatctgcgggggacggc

SEQ ID NO: 14872 - DNA, 119 bp, homo sapiens
gaggacggttgccagtgagaggcgcggactcaggaacttgaacaacatctgcgggggacggctttggagtgctccgctgcctccagttgggtgacttgctgtagcatctccagcttgga

SEQ ID NO: 14873 - DNA, 119 bp, homo sapiens
cggctttggaggtgctccgctgcctccagttgggtgacttgctgtagcatctccagcttggatattcggtcttgaaggtctccgtgatctcctgcaggagacgaaaatgcacgcaccag

SEQ ID NO: 14874 - DNA, 119 bp, homo sapiens
cggtacctgtggaaggtgtgcagcctccgggcgagcaggtgctccagtgccagcaccttccccagcagcggcggcgcacagctgtctcctcgcggctggccgggctgatgcgctgagca

SEQ ID NO: 14875 - DNA, 119 bp, homo sapiens
tgctccagtgccagcaccttccccagcagcaggcggcgcacagctgtctcctcgcggctggccgggctgtgcgctgagcagtcaggcgccagacgtgaatctcgtgcttcagttctgca

SEQ ID NO: 14876 - DNA, 119 bp, homo sapiens
gcgtaccttatggtcacaggcgtgaagaggagcatggtggtgacgttgtccaagaaggcagagaggacgccgcgatgagacagagcatgatgatcatggcccacacccgtccccgggag

SEQ ID NO: 14877 - DNA, 119 bp, homo sapiens
caggcgtgaagaggagcatggtggtgacgttgtccaagaaggcagagaggacggccgcgatgagacagacatgatgatcatggcccacacccgtccccgggagagccggtatgcctggc

SEQ ID NO: 14878 - DNA, 119 bp, homo sapiens
cataacctgctgtggccgccgccacctggagcccaaagcgtcagcctgggtcagctccaccacgatgtgtcttccctcccaggacgactcggcccactggccactagggcccctgccag

SEQ ID NO: 14879 - DNA, 119 bp, homo sapiens
agctccaccacgatgtgctcttccctcccaggacgactcggcccactggccactagggcccctgccaggccacctgcagcagcgtggagtccacgtggctgctaaggttcacggctcgg

SEQ ID NO: 14880 - DNA, 119 bp, homo sapiens
actcacctcccttttgtgaggaatgaagcaaactcctggcctgcaggagcccaagagctctgcccggcacccccctggggcaggagtgcgaggggtcagctccaccggctccccgagga

SEQ ID NO: 14881 - DNA, 119 bp, homo sapiens
ggagcccaagagctctgcccggcagcccccctggggcaggagtgcgaggggtcagctccaccggctcccgaggaagcctgcgcttgccggccacaagttcagcgagtccgctgggcacg

SEQ ID NO: 14882 - DNA, 119 bp, homo sapiens
gccacaagttcagcgagtccgctgggcacggacgtctgcaggagctccaccgccggcgcgccggggtacgcctgccgtctctgccctccagatgcatgctccactgccagtcttctctc

SEQ ID NO: 14883 - DNA, 119 bp, homo sapiens
acgtacttgaacacagcaatcagcaggttcaccagcaggatgttggcgaccagtagatagcacgccatggtgctggagtgagccaggcgccggggatacagggaggaagccgcttgccc

SEQ ID NO: 14884 - DNA, 119 bp, homo sapiens
aggatgttggcgaccagtagatagcacgccatgagtgctggagtgagccaggcgccggggatacagggagaagccgcttgccctcctcatcatataggttctcaccacaaggagctgaa

SEQ ID NO: 14885 - DNA, 119 bp, homo sapiens
tcctacccgccttcttcacagtacttgtgcgcaaaggacaggatgtccgaggcacgtccgctgccatcaaaatcaccacagggatgggaggctcttcttgcaggtattccaagacgatg

SEQ ID NO: 14886 - DNA, 119 bp, homo sapiens
aaggacaggatgtccgaggcacgtccgctgccatcacaaatcaccacagggatgggaggctcttcttgcggtattccaagacgatggacaccacgttagggcccccctccaccacgaga

SEQ ID NO: 14887 - DNA, 119 bp, homo sapiens
tcacaaatcaccacagggatgggaggctcttcttgcaggtattccaagacgatggacaccacgttagggccccctccaccacgagacccacgaggggcacgccctgccccagtcctgca

SEQ ID NO: 14888 - DNA, 119 bp, homo sapiens
actcaccttctgcgaccctgatgtggagctcttgagcgagccccgcttgaaggagctcatctctctcaggagcctgtgagccaccctgctgactccctcgggtggccaggccagtggca

SEQ ID NO: 14889 - DNA, 119 bp, homo sapiens
cccgcttgaaggagctcatctctctcagtgagcctgtgagccaccctgctgactccctcgggtggccagccagtggcacaggggctgccctccctgggtgggcaggagcggagccacac

SEQ ID NO: 14890 - DNA, 119 bp, homo sapiens
caccctgctgactccctcgggtggccaggccagtggcacaggggctgccctccctgggtgggcaggagcgagccacacactcggcggcagccccacactcggcggcagccccacgcact

SEQ ID NO: 14891 - DNA, 119 bp, homo sapiens
cccgggagaaatctcctcaagccagagcctgtgctgtgaggggcttcgggaccttggggcagctcctgattcagacagagttcaggaagggagacaggggcacagagagacagaggttc

SEQ ID NO: 14892 - DNA, 119 bp, homo sapiens
gaccttggggcagctcctgagttcagacagagttcaggaagggagacaggggcacagagagacagaggtcatggactgaggcaaaggctgggccaggctcagcaacccaggcctcccgc

SEQ ID NO: 14893 - DNA, 119 bp, homo sapiens
gggcacagagagacagaggttcatggactgaggcaaaggctgggccaggctcagcaacccaggcctccccaggcaggcagaggctgccctgtaacccatggagaccagaccaacagctc

SEQ ID NO: 14894 - DNA, 119 bp, homo sapiens
atggagaccagaccaacagctctgatgagctccacagtggctgcagctgcgcctgcagctggggctgccccaggaaggagtctccaggcagatggggcctgggggaggatcccacaggt

SEQ ID NO: 14895 - DNA, 119 bp, homo sapiens
cctcaggcgtgagcccctcgctccagtgccgcgtgtgcggagacagcagcagcgggaagcactatggcactatgcctgcaacggctgcagcggcttcttcaagaggagcgtacggcgga

SEQ ID NO: 14896 - DNA, 119 bp, homo sapiens
cgctccagtgccgcgtgtgcggagacagcagcagcgggaagcactatggcatctatgcctgcaacggctcagcggcttcttcaagaggagcgtacggcggaggctcatctacaggtgag

SEQ ID NO: 14897 - DNA, 119 bp, homo sapiens
ccccagccgtgcagaacgagcgccagccgcgaagcacagcccaggtccacctggacagcatggagtccacactgagtcccggccggagtccctggtggctcccccggccccggcagggc

SEQ ID NO: 14898 - DNA, 119 bp, homo sapiens
agcatggagtccaacactgagtcccggccggagtccctggtggctcccccggccccggcagggcgcagccacggggccccacacccatgtctgcagccagagccctgggccaccacttc

SEQ ID NO: 14899 - DNA, 119 bp, homo sapiens
ggcagggcgcagcccacggggccccacacccatgtctgcagccagagccctgggccaccacttcatggcagccttataacagctgaaacctgtgctaagctggagccagaggatggtga

SEQ ID NO: 14900 - DNA, 119 bp, homo sapiens
gcacaggtgatcctgctggaagaggcgtggagtgaactctttctcctcggggccatccagtggtctctgctctggacagctgtcctctgctggcaccgcccgaggcctctgctgccggt

SEQ ID NO: 14901 - DNA, 119 bp, homo sapiens
gtgaactctttctcctcggggccatccagtggtctctgcctctggacagctgtcctctgctggcaccgccgaggcctctgctgccggtggtgcccagggccggctcacgctggccagca

SEQ ID NO: 14902 - DNA, 119 bp, homo sapiens
cacagccctacgacttccgcttgcctcgtcgtctgggaaaccgccgacttccggccgcgcagcggtgggtgagctaaaatggctgaggagagagtcgcgacggtgagcgccgagattct

SEQ ID NO: 14903 - DNA, 119 bp, homo sapiens
gccgacttccggccgcgcagcggtgggctgagctaaaatggctgaggagagagtcgcgacggtgagcgcgagattctctttagttgcccggccgcagggcaaggcaagctggcgggtgg

SEQ ID NO: 14904 - DNA, 119 bp, homo sapiens
cctcaccttctgcaaggtgtggcggggcagctggctgcacgggccaaagacaggtccatggtccttggtgtgagctgctccagttgggcacggagctcctgttcctcttcaggtaccat

SEQ ID NO: 14905 - DNA, 119 bp, homo sapiens
ggcggggcagctggctgcacgggccaaagacaggtccatggtccttggttgtgagctgctccagttgggacggagctcctgttcctcttcaggtaccatgcggaacgtgcccacctggg

SEQ ID NO: 14906 - DNA, 119 bp, homo sapiens
ccacaggctgaggaccaccttgctgcggttgaccgctgctggccgggacctgcgggtcgcggaggaggcgcgccgctctcggagaccgcaaggcgcgggcagaaggcgggatggcggca

SEQ ID NO: 14907 - DNA, 119 bp, homo sapiens
gggtcgcggaggaggcggcgccgctctcggagaccgcaaggcgcgggcagaaggcgggatggcggcagccctctccatgcaccagcgcccccagatgcaccgactgcaagggcatttcc

SEQ ID NO: 14908 - DNA, 119 bp, homo sapiens
gcaagggcatttccactgcgtcggccctgccagcccccgccgcgcccagcctcgcgtccaagtgggacaagacagctccacacagccggtgcaccggtgccggagaaacccaagagggg

SEQ ID NO: 14909 - DNA, 119 bp, homo sapiens
tgccagcatgctggacagcagtgacagctccagtcagccccactggagcaacgagctcatagcggaacactacagcagcaagtctctcagctgcaggatcagctggatgctgagctgga

SEQ ID NO: 14910 - DNA, 119 bp, homo sapiens
agcaacgagctcatagcggaacagctacagcagcaagtctctcagctgcaggatcagctggatgctgagtggaggacaagagaaaagttttacttgagctgtccagggagaaaggtagg

SEQ ID NO: 14911 - DNA, 119 bp, homo sapiens
gctctgaacggctcagaggaagaggtgggaggggtccccggacccggggccgctcgaggttagccggtccagcgagccttgtagagatcgcgctcccgggccaggcgggccacctcggc

SEQ ID NO: 14912 - DNA, 119 bp, homo sapiens
gaggttagccggtcacagcgagccttgtagagatcgcgctcccgggccaggcgggccacctcggcccgcgcgcgtccagctgggcggccaggcgggcgcgctcggcctccagcccgcgc

SEQ ID NO: 14913 - DNA, 119 bp, homo sapiens
ccacctcggcccgcagcgcgtccagctgggcggccaggcgggcgcgctcggcctccagcccgcgccgctctgcagccgcttggagcgacaggcctgcgcgtagccgcggttcttcagcg

SEQ ID NO: 14914 - DNA, 119 bp, homo sapiens
cagcccgcgccgctgctgcagccgcttggagcgacaggcctgcgcgtagccgcggttcttcagcgtgcgcgcctctgcttcagccgcagcgcctcgtcgcgcccgcagccccgcagctg

SEQ ID NO: 14915 - DNA, 119 bp, homo sapiens
ttcttcagcgtgcggcgcctctgcttcagccgcagcgcctcgtcgcgcccgcagccccgcagctgccggttagctcccgcacagacatcgagaccagcgccgcgtcggaaaaccgctct

SEQ ID NO: 14916 - DNA, 119 bp, homo sapiens
ctgaaggtgggtgaaggaggcactgagctgtaaggtgtggagcccagtgaggctgtaggggggccaggtggccctcagagggttcccgctttacctcaaacttcatcaagtcaaagtca

SEQ ID NO: 14917 - DNA, 119 bp, homo sapiens
tgtggagcccagtgaggctgtaggggggccaggtcggccctcagagggttcccgctttacctcaaacttatcaagtcaaagtcattgacatattccatggccagggggctggggggcag

SEQ ID NO: 14918 - DNA, 119 bp, homo sapiens
ggccctcagagggttcccgctttacctcaaacttcatcaagtcaaagtcattgacatattccatggccaggggctggggggcagggccattctggagctgggctgggaggagtgcacct

SEQ ID NO: 14919 - DNA, 119 bp, homo sapiens
acccaggagcccgagtctatattgcctgcagagatgtactgaagggggagtctgctgccagtgaaatccagtggatacaaagaactcccaggtgctggtgcggaaattggacctatccg

SEQ ID NO: 14920 - DNA, 119 bp, homo sapiens
gagtctgctgccagtgaaatccgagtggatacaaagaactcccaggtgctggtgcggaaattggacctaccgacaccaaatctatccgagcctttgctgagggctttctggcaggtgag

SEQ ID NO: 14921 - DNA, 119 bp, homo sapiens
tcccaggcaccggggtcaccacctacgcagtgcacccaggcgtcgtccgctctgagctggtccggcactctccctgctctgcctgctctggcggctcttctccccctttgtcaagacgg

SEQ ID NO: 14922 - DNA, 119 bp, homo sapiens
cgtcgtccgctctgagctggtccggcactcctccctgctctgcctgctctggcggctcttctcccccttgtcaagacggcacgggagggggcgcagaccagcctgcactgcgccctggc

SEQ ID NO: 14923 - DNA, 119 bp, homo sapiens
tgcctgctctggcggctcttctccccctttgtcaagacggcacgggagggggcgcagaccagcctgcacgcgccctggctgagggcctggagcccctgagtggcaagtacttcaggtgt

SEQ ID NO: 14924 - DNA, 119 bp, homo sapiens
gacgtcacaatagcgactcactggacccagcccttagcaacggcctggcaacggtttccctgctgctgcgcccccgtcggctcctcttttccagtcctccactgccggggctgggcccg

SEQ ID NO: 14925 - DNA, 119 bp, homo sapiens
gcctggcaacggtttccctgctgctgcagcccccgtcggctcctcttttccagtcctccactgccggggtgggcccggccgcgggaaggaccgaaggggatacagcgtgtccctgcggc

SEQ ID NO: 14926 - DNA, 119 bp, homo sapiens
ctcttttccagtcctccactgccggggctgggcccggccgcgggaaggaccgaaggggatacagcgtgtcctgcggcggctgcaagaggactaagcatggatggcagccggagaggtaa

SEQ ID NO: 14927 - DNA, 119 bp, homo sapiens
gagtcggacgccgccagctcttcactccacgcccacctctctcctggagcgctgggccttcgctggccgaccggcagccatgagctcggagatggagccgctgctcctggcctggagct

SEQ ID NO: 14928 - DNA, 119 bp, homo sapiens
tctcctggagcgctgggccttcgctggccgcaccggcagccatgagctcggagatggagccgctgctccggcctggagctattttaggcgcaggaagttccagctctgcgccgatctat

SEQ ID NO: 14929 - DNA, 119 bp, homo sapiens
ccatgagctcggagatggagccgctgctcctggcctggagctattttaggcgcaggaagttccagctctcgccgatctatgcacgcagatgctggagaagtccccttatgaccaggtac

SEQ ID NO: 14930 - DNA, 119 bp, homo sapiens
acccacctttttattcctggcatgtccaagacgcgcgaggaggagatgcgaaggcgagaagaaagctcggggcgggacccccggaggagctcgggcacgtcggcctcctctgggccctc

SEQ ID NO: 14931 - DNA, 119 bp, homo sapiens
tggcatgtccaagacgcgcgaggaggagatgcgaaggcgagaagaaagctcgcgggcgggacccccggagagctcgggcacgtcggcctcctctgggccctcggggctcgcgggtgttt

SEQ ID NO: 14932 - DNA, 119 bp, homo sapiens
ccctgggctggatacttcgtcgcccccctgccccaccccacacacctgggtggtgctagaggatgtcgcggcgtgatagcccctcctcgtacccgtcctttagggaggacgaagaggag

SEQ ID NO: 14933 - DNA, 119 bp, homo sapiens
cacacacctgggtggtgctagaggatgtcgctggcgtgatagcccctcctcgtacccgtcctttagggagacgaagaggagggagagagttggaaggggaaggtcccaacgctgccatg

SEQ ID NO: 14934 - DNA, 119 bp, homo sapiens
atagcccctcctcgtacccgtcctttagggaggacgaagaggagggagagagttggaaggggaaggtccaacgctgccatgctcatcagacacagaaggaggtcaccagactgaggcag

SEQ ID NO: 14935 - DNA, 119 bp, homo sapiens
aattaattttaaattttaaaaagtgacaccacgatcctggtcaatcgaaccagaagtgaccaggccactgctccctgcctgggtggctgtgggcctcagggggctcagtgctgcagcga

SEQ ID NO: 14936 - DNA, 119 bp, homo sapiens
aagtgacaccacgatcctggtcaatcgaaccagaagtgaccaggccacttgctccctgcctgggtggcttgggcctcagggggctcagtgctgcagcgagtgccctggggacgggggtg

SEQ ID NO: 14937 - DNA, 119 bp, homo sapiens
ctcccaagggagggcatgaggcagggctccgggaagaggaagccctggcctccagggccacagggaaatgtgaggacactgaggacaacgggggttggggacaatggacagctgcagga

SEQ ID NO: 14938 - DNA, 119 bp, homo sapiens
aagaggaagccctggcctccagggccacagggaaatggtgaggacactgaggacaacgggggttggggaaatggacagctgcaggacagaccgtcagcaccagaccccacccccgaggg

SEQ ID NO: 14939 - DNA, 119 bp, homo sapiens
tgccactcacacctccacaagacagcccagaggctgtgcctgccagcggcgcttggtgccgaggctgggctgcccccttgagggcctgcctagctcgctgtgaagcctggggacgcagg

SEQ ID NO: 14940 - DNA, 119 bp, homo sapiens
gccgaggctggggctgcccccttgagggcctgcctagctcgctgtgaagcctggggacgcaggagggtgtcgactttgcccaaacgcttcagccccgggcaagcctgcccccaggatga

SEQ ID NO: 14941 - DNA, 119 bp, homo sapiens
cgcaggagggtggtcgactttgcccaaacgcttcagccccgggcaagcctgcccccaggatgacacaaaatgaaccctgacttgggcttgcggtcgcaggcccgtgggaggcagcagtg

SEQ ID NO: 14942 - DNA, 119 bp, homo sapiens
ggatgacacaaacatgaaccctgacttgggcttgcggtcgcaggcccgtgggaggcagcagtggctgcacgagatccccggacctcaccccgtcgcagctcagggagccccccgggctc

SEQ ID NO: 14943 - DNA, 119 bp, homo sapiens
gcagtggctgcaccgagatccccggacctcaccccgtcgcagctcagggagccccccgggctcgggcagatccctccccgctctggtcggacactgctggacagacacgggagggaaaa

SEQ ID NO: 14944 - DNA, 119 bp, homo sapiens
gggctcgggcaggatccctccccgctctggtcggacactgctggacagacacgggagggaaaaagcaggaaacgcctgtgtcggggagagggcagccccctcccgtccccgcaggcagc

SEQ ID NO: 14945 - DNA, 119 bp, homo sapiens
ggaaaaagcaggaaaacgcctgtgtcggggagagggcagccccctcccgtccccgcaggcagcctgattggccccccgctccctgctctgagcacagcccacccctcagggcaccgact

SEQ ID NO: 14946 - DNA, 119 bp, homo sapiens
ggcagcctgattgggccccccgctccctgctctgagcacagcccacccctcagggcaccgactcgaactggggggcccacgcgcccagctgagcgccggcagcggccgctcgtggtctt

SEQ ID NO: 14947 - DNA, 119 bp, homo sapiens
ccgactcgaacttggggggcccacgcgcccagctgagcgccggcagcggccgctcgtggtctttgtccgctcgggctggctctgggcccgctcgggcttggggttggcggcgggcgggt

SEQ ID NO: 14948 - DNA, 119 bp, homo sapiens
gcgggtcgggctgctgcactgacatggttctgcgcaggtggttgcgcttccgcaggaactctggctgcggtgcagcccgaagctgcccttgcgcaggatcatgcgcgagttgttcttct

SEQ ID NO: 14949 - DNA, 119 bp, homo sapiens
actctggctgcgcgtgcagcccgaagctgcccttgcgcaggatcatgcgcgagttgttcttctttgggctgagcggtggctggcctccagcgcggccaggtgtgcggcgtagccctcgc

SEQ ID NO: 14950 - DNA, 119 bp, homo sapiens
acccacctggcactgggtttggtacttcttggtgggccggcccacaatgaagatctgggaggcaggcagcccagcacgctgtagacagagatgtccttcgtggagccataggccgcact

SEQ ID NO: 14951 - DNA, 119 bp, homo sapiens
ggtacttcttggtgggccggcccacaatgaagatctgggaggcaggcaggcccagcacgctgtagacaggatgtccttcgtggagccataggccgcactgattttgatgaagcactgaa

SEQ ID NO: 14952 - DNA, 119 bp, homo sapiens
actcaccggacaacatccactgcacccggccggaccttggggtcgcttcccatgatagacacgctggcccgaaggacccatcaatgctgaacactacacactccatgcccctgggcaac

SEQ ID NO: 14953 - DNA, 119 bp, homo sapiens
gtcgcttcccatgatagacacgctggccgcgaaggacccatcaatgctgaacactacacactccatgccctgggcaacaccgtgaggtagctcatggcacaggtctggtcgcccctgaa

SEQ ID NO: 14954 - DNA, 119 bp, homo sapiens
cagtacctgtctcaggatgaaggccaccacgtctgtggactcccagtaactggcgtggaagaggtggggagggccacggtggggaaggccgtgaggacatcagggcagtacagggcata

SEQ ID NO: 14955 - DNA, 119 bp, homo sapiens
tcccagtaactggcgtggaagaggtggggcagggccacggtggggaaggccgtgaggacatcagggcagacagggcatagtcgatcctcttgcttccccaccacttggctgtgactgtg

SEQ ID NO: 14956 - DNA, 119 bp, homo sapiens
actcactgcgggaggcacccacgggtgccatgctgtccgaggactccgagctctcgctgtgggagctccctcgctcatcctccgtcctgggcgctggaacctcgaggcctgagggggcg

SEQ ID NO: 14957 - DNA, 119 bp, homo sapiens
actccgagctctcgctgtgggagctcccctcgctcatcctccgtcctgggcgctggaacctcgaggcctagggggcgaggcaggggcatccagaagtggcgggctgtcccgggagctgc

SEQ ID NO: 14958 - DNA, 119 bp, homo sapiens
gtcctgggcgctggaacctcgaggcctgagggggcgaggcaggggcatccagaagtggcgggctgtcccggagctgccctccaggaagagggggctgtgggtgtgtagggcatcagctg

SEQ ID NO: 14959 - DNA, 119 bp, homo sapiens
acctaccgaggaggagggactgcccatcgcccagtgggaacctctggtagcgaggcacgctgacaggcgcaccaggtggaacttgggctccagcagtggctcgagccgtgaggcagagg

SEQ ID NO: 14960 - DNA, 119 bp, homo sapiens
cagtgggaacctctggtagcgaggcacgctgacaggcggcaccaggtggaacttgggctccagcagtggtcgagccgtgaggcagaggggtctgcgcaatggaagaagctgtagacctg

SEQ ID NO: 14961 - DNA, 119 bp, homo sapiens
acaggcggcaccaggtggaacttgggctccagcagtggctcgagccgtgaggcagaggggtctgcgcaaggaagaagctgtagacctggctgcaggcaggacgcacctggaagcctggg

SEQ ID NO: 14962 - DNA, 119 bp, homo sapiens
ccctaccgtccagcccaggcagcaccgtcctccgcatggccaggaccaggcccagtggcgagccgaagagaagaagtcggacacatcgaagtcaaagcggcccaggctgacctcaggga

SEQ ID NO: 14963 - DNA, 119 bp, homo sapiens
cgcatggccaggaccaggcccagtggcgagccgaagaggaagaagtcggacacatcgaagtcaaagcggccaggctgacctcagggagctgcggccccccagccgccggggtctcagac

SEQ ID NO: 14964 - DNA, 119 bp, homo sapiens
gaagaggaagaagtcggacacatcgaagtcaaagcggcccaggctgacctcagggagctgcggccccccgccgccggggtctcagactcatcctttagcacgctggagtggatgctgcg

SEQ ID NO: 14965 - DNA, 119 bp, homo sapiens
ctgtacctgggtgctgctgatgctccccttccggctgctgctggcagggctgtcccctgagggccccgcctgtagcagatggcatcgaaggccaggaggccccccacacagtccccgat

SEQ ID NO: 14966 - DNA, 119 bp, homo sapiens
tgctgatgctccccttccggctgctgctggcagggctgtcccctgagggccccgcactgtagcagatggatcgaaggccaggaggccccccacacagtccccgatgagacacacctgga

SEQ ID NO: 14967 - DNA, 119 bp, homo sapiens
tcctacctgcccactgaagccaatcccatcagaggacttcaggaactctctgtagacctggttggctcgtcgatgacggtggcgacagcatcctggtactgcggggaggagatggccaa

SEQ ID NO: 14968 - DNA, 119 bp, homo sapiens
aggaactctctgtagacctggttggctcgctcgatgacggtggcgacagcatcctggtactgcggggagagatggccaacaggggaagggcggccagagggacgtggtcctggctgctg

SEQ ID NO: 14969 - DNA, 119 bp, homo sapiens
tggcgacagcatcctggtactgcggggaggagatggccaacaggggaagggcggccagagggacgtggtctggctgctgctgaggcagccctcatcgtggctgtaggggttcaggctgc

SEQ ID NO: 14970 - DNA, 119 bp, homo sapiens
cctcacctgcacggcccgccttggccatgtcccgggcggcgggctccggcggcgctacgcgcgctcctccgcttcccgggcccggccccgaccgcctccggccccgaacggactccgag

SEQ ID NO: 14971 - DNA, 119 bp, homo sapiens
cgccttggccatgtcccgggcggcgggctccggcggcgctacgcgcgctcctcgcgcttcccgggcccgccccgaccgcctccggccccgaacggactccgagcgccgcgcccgcgccc

SEQ ID NO: 14972 - DNA, 119 bp, homo sapiens
ccgccgtgttcacggtgggggtcctgggcccctgggcttgcgaccccatcttctctcgggctcgcccggcctggccgcccgcctggccgccgcccgcctgaaccgcgaccccggcctgg

SEQ ID NO: 14973 - DNA, 119 bp, homo sapiens
cgggctcgcccggacctggccgcccgcctggccgccgcccgcctgaaccgcgaccccggcctggcaggcgtccccgcttcgaggtagcgctgctgcccgagccttgccggacgccgggc

SEQ ID NO: 14974 - DNA, 119 bp, homo sapiens
cggcctggcaggcggtccccgcttcgaggtagcgctgctgcccgagccttgccggacgccgggctcgctggggccgtgtcctccgcgctggcccgcgtgtcgggcctcgtgggtccggt

SEQ ID NO: 14975 - DNA, 119 bp, homo sapiens
cgccgggctcgctgggggccgtgtcctccgcgctggcccgcgtgtcgggcctcgtgggtccggtgaacctgcggcctgccggccagccgagctgctcgccgaagaagccgggatcgcgc

SEQ ID NO: 14976 - DNA, 119 bp, homo sapiens
ggtccggtgaaccctgcggcctgccggccagccgagctgctcgccgaagaagccgggatcgcgctggtgcctggggctgcccctggacgcaggcggagggcaccacggcccctgccgtg

SEQ ID NO: 14977 - DNA, 119 bp, homo sapiens
gatcgcgctggtgccctggggctgcccctggacgcaggcggagggcaccacggcccctgccgtgaccccgccgcggatgccctctacgccctgcttcgcgcattcggctgggcgcgcgt

SEQ ID NO: 14978 - DNA, 119 bp, homo sapiens
gcgcgcgtggccctggtcaccgccccccaggacctgtgggtggaggcgggacgctcactgtccacggcatcagggcccggggcctgcctgtcgcctccgtgacttccatggagcccttg

SEQ ID NO: 14979 - DNA, 119 bp, homo sapiens
actgtccacggcactcagggcccggggcctgcctgtcgcctccgtgacttccatggagcccttggaccttctggagcccgggaggccctgaggaaggttcgggacgggcccagggtcac

SEQ ID NO: 14980 - DNA, 119 bp, homo sapiens
ctccaggtctccccactctttggcaccatctatgacgcggtcttcttgctggcaaggggcgtggcagaacgcgggctgccgcaggtggcagatgggtgtccggagcagctgtggcccgc

SEQ ID NO: 14981 - DNA, 119 bp, homo sapiens
ctggcaaggggcgtggcagaagcgcgggctgccgcaggtggcagatgggtgtccggagcagctgtggccgccacatccgggatgcgcaggtccctggcttctgcggggacctaggagga

SEQ ID NO: 14982 - DNA, 119 bp, homo sapiens
gtgtccggagcagctgtggcccgccacatccgggatgcgcaggtccctggcttctgcggggacctaggagagacgaggagcccccattcgtgctgctagacacggacgcggcgggagac

SEQ ID NO: 14983 - DNA, 119 bp, homo sapiens
ggcttctgcggggacctaggaggagacgaggagcccccattcgtgctgctagacacggacgcggcgggaaccggctttttgccacatacatgctggatcctgcccggggctccttcctc

SEQ ID NO: 14984 - DNA, 119 bp, homo sapiens
ctagacacggacgcggcgggagaccggctttttgccacatacatgctggatcctgcccggggctccttctctccgccggtacccggatgcacttcccgcgtgggggatcagcacccgga

SEQ ID NO: 14985 - DNA, 119 bp, homo sapiens
gatcctgcccggggctccttcctctccgccggtacccggatgcacttcccgcgtgggggatcagcacccgacctgacccctcgtgctggttcgatccaaacaacatctgcggtggaggt

SEQ ID NO: 14986 - DNA, 119 bp, homo sapiens
ccccagaccagctgtggacagccccggagctgcttagggacccagccctggagcgccggggaacgctggcggcgacgtctttagcttggccatcatcatgcaagaagtagtgtgccgca

SEQ ID NO: 14987 - DNA, 119 bp, homo sapiens
ccagccctggagcgccggggaacgctggccggcgacgtctttagcttggccatcatcatgcaagaagtatgtgccgcagtgccccttatgccatgctggagctcactcccgagggtaag

SEQ ID NO: 14988 - DNA, 119 bp, homo sapiens
tgctagttcaagaacatcaacaagggccggaagacgaacatcattgactcgatgcttcggatgctggagagtactctagtaacctggaggatctgatccgggagcgcacggaggagctg

SEQ ID NO: 14989 - DNA, 119 bp, homo sapiens
ttcggatgctggagcagtactctagtaacctggaggatctgatccgggagcgcacggaggagctggagcggaaaagcagaagacagaccggctgcttacacagatgctgcctccgtggg

SEQ ID NO: 14990 - DNA, 119 bp, homo sapiens
ccccaggtggagacaataggggacgcctatatggtggcctcggggctgccccagcggaatgggcagcgaacgcggcagagatcgccaacatgtcactggacatcctcagtgccgtgggc

SEQ ID NO: 14991 - DNA, 119 bp, homo sapiens
gtggcctcggggctgccccagcggaatgggcagcgacacgcggcagagatcgccaacatgtcactggactcctcagtgccgtgggcactttccgcatgcgccatatgcctgaggttccc

SEQ ID NO: 14992 - DNA, 119 bp, homo sapiens
cgacacgcggcagagatcgccaacatgtcactggacatcctcagtgccgtgggcactttccgcatgcgcatatgcctgaggttcccgtgcgcatccgcataggcctgcactcgggtaac

SEQ ID NO: 14993 - DNA, 119 bp, homo sapiens
gaagggagcagaggagtgagtcctggccgcgtccccgtcgctagggaaaccgatgcagctggaggccgccgcgatgcggctcgcggaggagcgggccgcgctcgcggcggagaacgcgg

SEQ ID NO: 14994 - DNA, 119 bp, homo sapiens
tgcagctggaggccgcgcgcgatgcggctcgcggaggagcgggccgcgctcgcggcggagaacgcggatgggaacccggcgccgaccgacgactgcgactcctggggacctacgtggcc

SEQ ID NO: 14995 - DNA, 119 bp, homo sapiens
ggcggagaacgcggatggggaacccggcgccgaccgacgactgcgactcctggggacctacgtggccatagcctgcggccggctgcgggcgcctgggagcgttgcgcggggagtgctga

SEQ ID NO: 14996 - DNA, 119 bp, homo sapiens
ggacctacgtggccatgagcctgcggccggctgcgggcgcctgggagcgttgcgcggggagtgctgaggggagcagctgctccaggccttcctgggccgcgatgctgccgaggggccgc

SEQ ID NO: 14997 - DNA, 119 bp, homo sapiens
gcggggagtgctgaggcggagcagctgctccaggccttcctgggccgcgatgctgccgaggggccgcggcgctgctggtggtgcggcccgggcccaggggcctggcaatacgccccggg

SEQ ID NO: 14998 - DNA, 119 bp, homo sapiens
tgccgaggggccgcggccgctgctggtggtgcggcccgggcccaggggcctggcaatacgccccgggctgaggtgggacctgagtcgggcctggctggcgctaaggcgctttttttcct

SEQ ID NO: 14999 - DNA, 119 bp, homo sapiens
gcgctttttttccttcgcaccgggcccgagcctccagggcccgacagcttccgcggcgcagtggtctgcgggacctgcccgcggcacctctggagcacctagccgcgctgttctcggag

SEQ ID NO: 15000 - DNA, 119 bp, homo sapiens
tcacagcttggattctatagataagtcagtcatctatgccattgagtctgcagtgatcaaatggagctacaagtccaggtggtactcaagagagagtcttcccagccactcttacaagg

SEQ ID NO: 15001 - DNA, 119 bp, homo sapiens
cagtgatcaaatggagctaccaagtccaggtggtactcaagagagagtcttcccagccactcttacaagggagaatcccacccctaaggtggagttggagttctggaagagcaggtagg

SEQ ID NO: 15002 - DNA, 119 bp, homo sapiens
tggcaggtgctacatcaccctcacccagtccctgcacctgaccatgagtggggctcccgcaggacctgcggcacaggcaagaccgagaccaccaaggacctgggccgcgcactgggcat

SEQ ID NO: 15003 - DNA, 119 bp, homo sapiens
tggggctcccgcaggacctgcaggcacaggcaagaccgagaccaccaaggacctgggccgcgcactgggatcctggtctatgtgttcaactgctcggagcagatggattacaaggtaca

SEQ ID NO: 15004 - DNA, 119 bp, homo sapiens
gagcgaggcgcggagctgggtgcgcgccgagcctctgcctcccgccgcctcctcgccctccattcctcgtccccgtcttctcccggccacaccgccactgctgccgcctccctgggaac

SEQ ID NO: 15005 - DNA, 119 bp, homo sapiens
ccattcctcgctccccgtcttctcccggccacaccgccactgctgccgcctccctgggaacagtagccggggagggggactggcgcggtcagagcctgcgaggaggtgcggggcgccgg

SEQ ID NO: 15006 - DNA, 119 bp, homo sapiens
acagtagccgggggagggggactggcgcggtcagagcctgcgaggaggtgcggggcgccggggcgtagggagcgcgccgggccctgcccgagatcagataacagccggcgggggagggg

SEQ ID NO: 15007 - DNA, 119 bp, homo sapiens
ggggcgtaggggagcgcgccgggccctgcccgagatcagataacagccggcgggggagggggtgggccgccgtgctcacagccggaccgagggaccgacgccagccgccccggcccaag

SEQ ID NO: 15008 - DNA, 119 bp, homo sapiens
gggtgggccggccgtgctcacagccggaccgagggaccgacgccagccgccccggcccaagcgagcgccagcggccgggggcgccgtccaggcgcgcgcccccgacccgtggctggacc

SEQ ID NO: 15009 - DNA, 119 bp, homo sapiens
agcgagcgcccagcggccgggggcgccgtccaggcgcgcgcccccgacccgtggctggaccagggcgatcgctttgcagagaagacgcgcccctcggcatggagcgcccccgggagctg

SEQ ID NO: 15010 - DNA, 119 bp, homo sapiens
tgccctgaggcggtggcggcagcggcggcgatgcagccagcgcggcagctgccggggccaggaacggcccccggagcttggaggacgccgagcgcgccgcgcccgggccactgaccgag

SEQ ID NO: 15011 - DNA, 119 bp, homo sapiens
tcagagccagaaggcaccgaggactctggcccaagtggggaagctgaggcagagagcagagggggtcatcagtgagtgggtggggtgcaggagacagagaggggctgggggcgtggggt

SEQ ID NO: 15012 - DNA, 119 bp, homo sapiens
aagtggggaagctgaggcagagagcagagggggtcatgcagtgagtgggtggggtgcaggagacagagagggctgggggcgtggggtgggggtgtctgcctcttccctccacctcctcc

SEQ ID NO: 15013 - DNA, 119 bp, homo sapiens
gtcatgcagtgagtgggtggggtgcaggagacagagaggggctgggggcgtggggtgggggtgtctgcccttccctccacctcctcccctccttagcagctgaagactcagccctgagg

SEQ ID NO: 15014 - DNA, 119 bp, homo sapiens
gctcaccaccggtgatccgctgcagccccagcacgtcctccggcccgatcggctgcttcctctgcagcgccccggcctgggccctgggcctgcgtccggctccgactcggacccagatt

SEQ ID NO: 15015 - DNA, 119 bp, homo sapiens
cgatcggctgcttcctctgcagcggccccggcctgggccctgggcctgcgtccggctccgactcggaccagattcggattccgcaggcggctgtggtatgggggccacgctctggcccg

SEQ ID NO: 15016 - DNA, 119 bp, homo sapiens
ctgcgtccggctccgactcggacccagattcggattccgcaggcggctgtggtatgggggccacgctctgcccgagggccccggagcggactccgtcgccgtcccggccccaccgccgc

SEQ ID NO: 15017 - DNA, 119 bp, homo sapiens
gctgtggtatgggggccacgctctggcccgagggccccggagcggactccgtcgccgtcccggccccacgccgcccttcttcaccttcatggccttgcggggccgaggctcgcctgctg

SEQ ID NO: 15018 - DNA, 119 bp, homo sapiens
actccgtcgccgtcccggccccaccgccgcccttcttcaccttcatggccttgcggggccgaggctcgctgctgctgccgccgctgcctgcgccggctggagccgggggaagtgggagc

SEQ ID NO: 15019 - DNA, 119 bp, homo sapiens
ctgcaggtatcccccggggacctgtgaggccagccatcccaccaccactgtcgtcagtgtatgcctgggtggtgggctgggcacccccctgcggctgccaatgctcaacacagaggtgg

SEQ ID NO: 15020 - DNA, 119 bp, homo sapiens
tcccaccaccactgtcgtcagtgtatgcctggggtggtgggctgggcacccccctgcggctgccaatgccaacacagaggtggtccaggtggcagctgggcgcacgcagaaagccggcg

SEQ ID NO: 15021 - DNA, 119 bp, homo sapiens
gtgggctgggcacccccctgcggctgccaatgctcaacacagaggtggtccaggtggcagctgggcgcagcagaaagccggcgtcacgcgctctgggcgtctcatcctgtgggaggtga

SEQ ID NO: 15022 - DNA, 119 bp, homo sapiens
ctgcaggccccacccctaggtgcaggcggaggcagtctccttcctggggcagtggagcagccacagcccagttcatctcgcgtttcctggagggccagtcgggtgtgaccatcaagcac

SEQ ID NO: 15023 - DNA, 119 bp, homo sapiens
cctggggcagtggagcagccacagccccagttcatctcgcgtttcctggagggccagtcgggtgtgacctcaagcacgtggcctgtggggacttcttcactgcctgcctgactggtgag

SEQ ID NO: 15024 - DNA, 119 bp, homo sapiens
cggctccgctataaaacccaggccggcaggatcgctgcacccgcggcggcctcctcggtgcgcgaccccggctcagaggactctttgctgtcccgcaagatgcggatgctgctggcgct

SEQ ID NO: 15025 - DNA, 119 bp, homo sapiens
cggcggcctcctcggtgcgcgacccccggctcagaggactctttgctgtcccgcaagatgcggatgctgtggcgctcctggccctctccgcggcgcggccatcggccagtgcaggtgag

SEQ ID NO: 15026 - DNA, 119 bp, homo sapiens
ccgcccagccgcctccccgtcgacgcccagggctggggcgagccaggctgcctttcgaacttggggggctctcctcttgtctcccactggtgctctggctgtgaatccatccaggggcc

SEQ ID NO: 15027 - DNA, 119 bp, homo sapiens
ctggggcgagccaggctgcctttcgaacttggggggcttctcctcttgtctcccactggtgctctggcttgaatccatccaggggccaggatgacaatccgacaccaaggccagcagta

SEQ ID NO: 15028 - DNA, 119 bp, homo sapiens
ggggcttctcctcttgtctcccactggtgctctggctgtgaatccatccaggggccaggatgacaatccacaccaaggccagcagtacaggccgaggatggcatttctccaaaaggtaa

SEQ ID NO: 15029 - DNA, 119 bp, homo sapiens
acaggtacgatactgatagagaacattctctacaaaagtggcaatgagcctgcaggagggattcggggtcagtggtgggagcacagagcctgctccaccccagcaccagaagaaccagg

SEQ ID NO: 15030 - DNA, 119 bp, homo sapiens
ggattcggggtacagtggtgggagcacagagcctgctccaccccagcaccagaagaaccaggaggggctcggcagtaaacggacgaggaacaggagagaaggggcagcacctggggctc

SEQ ID NO: 15031 - DNA, 119 bp, homo sapiens
caggaggggctgcggcagtaaacggacgaggaacaggagagaaggggcagcacctggggctctgggagaacaagtcggcacttgggggtggccccaggctcaggcccagagaacaggga

SEQ ID NO: 15032 - DNA, 119 bp, homo sapiens
gggagaagagctgtggtgggctccagatggcggtggcaggcagccaagccctcagtgtcctgcagtaggcagggaccatctcctccatgccccctactctgggcacatgtgtgggaatg

SEQ ID NO: 15033 - DNA, 119 bp, homo sapiens
cctgcagtaggacagggaccatctcctccatgccccctactctgggcacatgtgtgggaatgggaaccccagacagaccagaaagaggcctttgagggctctctttcccctgccccagc

SEQ ID NO: 15034 - DNA, 119 bp, homo sapiens
aatgggaacccccagacagaccagaaagaggcctttgagggctctctttcccctgccccagccatggggccccaggagatgctgggggctgaggccatgctcccagcaggagctgcttc

SEQ ID NO: 15035 - DNA, 119 bp, homo sapiens
cagccatgggggccccaggagatgctgggggctgaggccatgctcccagcaggagctgcttcccaagctaggtcagggatggggggccatggctgagaaaggaggagagcacctctgca

SEQ ID NO: 15036 - DNA, 119 bp, homo sapiens
aaaagggggaggttggaggaagacaggccaggctccacccctggatgagctgggaagggcgtcagtaccccaccccaccccaacccggctttccagctccgggccttgaccactaggtg

SEQ ID NO: 15037 - DNA, 119 bp, homo sapiens
aagggcgtcagtacccccaccccaccccaacccggctttccagctccgggccttgaccactaggtgaagagggggagctggctatgcttgggatggggtacagactgaaagttggggca

SEQ ID NO: 15038 - DNA, 119 bp, homo sapiens
gcctgagtcggtgctgacctccgagtgggcaggctcggccgccagcgtggcacgggagacgctgtcctctccgagaggaacatgtcccggagcggggctcggccccactccttgggatt

SEQ ID NO: 15039 - DNA, 119 bp, homo sapiens
gcacgggagacgctgtcctcgtccgagaggaacatgtcccggagcggggctcggccccactccttgggatggcgtaggtgccctggcgcacgaacatcacgtcgctgcccagctgcagg

SEQ ID NO: 15040 - DNA, 119 bp, homo sapiens
ctcggccccactccttgggattggcgtaggtgccctggcgcacgaacatcacgtcgctgcccagctgcagcccgagagcgagcgggcgctcttgcgcccatcctcggagaccttgaagg

SEQ ID NO: 15041 - DNA, 119 bp, homo sapiens
tgcttgcgccgctccagcttcttctgcatcttggtcttgcccctggccgtgccgtgcagcgtggcctgaagtacggcaggtggctgcccagcgccagatgctgcagccggcggctcagg

SEQ ID NO: 15042 - DNA, 119 bp, homo sapiens
cgtggcctgagagtacggcaggtggctgcccagcgccagatgctgcagccggcggctcagggtgctggagtgaggctggagaagctgagggtgtcggaacgctcggccagctcgcgccg

SEQ ID NO: 15043 - DNA, 119 bp, homo sapiens
gggtgctggacgtgaggctggagaagctgagggtgtcggaacgctcggccagctcgcgccggtatcgccctccatgcgttcgtggtgcctccgctgcagcttggcgcactcgcggatgc

SEQ ID NO: 15044 - DNA, 119 bp, homo sapiens
actcacccgcggctcacaatgagacgcagcgactcgaggttgccatggtaggcagcccagagagtggggtcatgccatcctcgtcgggggcattcagctcctttcgggtggcctccttg

SEQ ID NO: 15045 - DNA, 119 bp, homo sapiens
aggcagcccagagagtgggggtcatgccatcctcgtcgggggcattcagctcctttcgggtggcctcctgaggagctccaggtagccatcccgggctgcccggtggtactggtcgttca

SEQ ID NO: 15046 - DNA, 119 bp, homo sapiens
gcccggtggtactggtcgttcatggcgcccgaagtggacggggcgggcgggggacacggagaaaggcccccgcaggggagggcggcggtattagggctgaggcatgaggttggaggacg

SEQ ID NO: 15047 - DNA, 119 bp, homo sapiens
agatgaatagacagggccgactgccggccaggaggagggtggggtggggaaagccctcggccctcggagtgagggtgagacccaggcatgtggtcccgccgacctgctgcccagcagcc

SEQ ID NO: 15048 - DNA, 119 bp, homo sapiens
ggggaaagccctcggccctcggagctgagggtgagacccaggcatgtggtcccgccgacctgctgcccacagcccggatcccccggggctgccctggtggccaaggcaggtggagctag

SEQ ID NO: 15049 - DNA, 119 bp, homo sapiens
tgccctggtggccaaggcaggtggagctagcggtcgaggtttctggactgaggcccctcccccagtgcgtcatcccacccagaacttcgctctgcccctgcccattctaggacagccgg

SEQ ID NO: 15050 - DNA, 119 bp, homo sapiens
aaccgcaggacagacggcagtggctcctgagagctggctggggccattttggcccctcgcctgtggcctctgcagacttggcctgggaggggatggggcagctgcgccatgtgcaccac

SEQ ID NO: 15051 - DNA, 119 bp, homo sapiens
tggctggggccattttggcccctcgcctgtggccttctgcagacttggcctgggaggggatggggcagcgcgccatgtgcaccacccttttcctgctcagcaccctggccatgctctgg

SEQ ID NO: 15052 - DNA, 119 bp, homo sapiens
ttctgcagacttggcctgggaggggatggggcagctgcgccatgtgcaccacccttttcctgctcagcacctggccatgctctggcgccgccgatttgccaaccgagtccaaccgtgag

SEQ ID NO: 15053 - DNA, 119 bp, homo sapiens
gcacttcagccgccactctgcctctgaagggaaggaagggaaagggtgagggatgccgcagagcagaggaaccgctggggaggcgctcagggtgggggaggaggtgcaccccgctgggg

SEQ ID NO: 15054 - DNA, 119 bp, homo sapiens
gggatgccgcagagcagagggaaccgctggggaggcgctcagggtgggggaggaggtgcaccccgctgggagggcctgctggtacctcggggagcctggctggggtgtgtgcgaaggca

SEQ ID NO: 15055 - DNA, 119 bp, homo sapiens
gaggaggtgcaccccgctggggagggcctgctggtacctcggggagcctggctggggtgtgtgcgaaggagttctgtgggagcctctcaaagtagggcaggcaggaggcagggggaaag

SEQ ID NO: 15056 - DNA, 119 bp, homo sapiens
ggctggggtgtgtgcgaaggcagttctgtgggagcctctcaaagtagggcaggcaggaggcagggggaagtcacactagggaaggagcctgcagaggcaaagccagagcgccagcctga

SEQ ID NO: 15057 - DNA, 119 bp, homo sapiens
agaggaagggcgggaaaaagagaggaaggggctgctggcggccagcggggctgtggctgcctgggcttgaggttgcctgggcagctggggtgccatgtgggccgggtgggggggctgtc

SEQ ID NO: 15058 - DNA, 119 bp, homo sapiens
ctgctggcggccagcggggctgtggctgcctgggcttggaggttgcctgggcagctggggtgccatgtggccgggtgggggggctgtctcccccagggagcaggctggctttggtggga

SEQ ID NO: 15059 - DNA, 119 bp, homo sapiens
gggcttggaggttgcctgggcagctggggtgccatgtgggccgggtgggggggctgtctcccccagggacaggctggctttggtgggagcagattgtgtttacaccttccccgcacacc

SEQ ID NO: 15060 - DNA, 119 bp, homo sapiens
gtcagagcaggcagggggttcgtgacgccggctgggtctgggggctgtgggccagccgagccgacccggcttctgggggaccgcgggggccgtgagcactcagagggcgcatcccaggc

SEQ ID NO: 15061 - DNA, 119 bp, homo sapiens
ggggttcgtgacgccggctgggtctgggggctgtgggccagccgagccgacccgggcttctgggggacccgggggccgtgagcactcagagggcgcatcccaggcccctccggggaccc

SEQ ID NO: 15062 - DNA, 119 bp, homo sapiens
caaggcacggctgtgctgctccgcagcagccacctgggccgctacctgtcggcagaagaggacgggcgctggcctgtgaggcagagcagccgggccgtgactgccgcttcctggtcctg

SEQ ID NO: 15063 - DNA, 119 bp, homo sapiens
gaagaggacgggcgcgtggcctgtgaggcagagcagccgggccgtgactgccgcttcctggtcctgccgagccagatgggcgctgggtgctgcggtccgagccgcacggccgcttcttc

SEQ ID NO: 15064 - DNA, 119 bp, homo sapiens
ttcctggtcctgccgcagccagatgggcgctgggtgctgcggtccgagccgcacggccgcttcttcggagcaccgaggaccagctgtcctgcttcgccacagccgtttccccggccgag

SEQ ID NO: 15065 - DNA, 119 bp, homo sapiens
ggccgcttcttcggaggcaccgaggaccagctgtcctgcttcgccacagccgtttccccggccgagctgggaccgtgcacctggccatccacccgcaggcccacctgctgagcgtgagc

SEQ ID NO: 15066 - DNA, 119 bp, homo sapiens
tccccggccgagctgtggaccgtgcacctggccatccacccgcaggcccacctgctgagcgtgagccggggcgctacgtgcacctgtgcccgcgggaggacgagatggccgcagacgga

SEQ ID NO: 15067 - DNA, 119 bp, homo sapiens
ctgagcgtgagccggcggcgctacgtgcacctgtgcccgcgggaggacgagatggccgcagacggagacagccctggggcgtggacgccctcctcaccctcatcttccggagccgacgg

SEQ ID NO: 15068 - DNA, 119 bp, homo sapiens
gccgcagacggagacaagccctggggcgtggacgccctcctcaccctcatcttccggagccgacggtacgcctcaagtcctgtgacagccgctacctgcgcagcgacggccgtctggtc

SEQ ID NO: 15069 - DNA, 119 bp, homo sapiens
cggagccgacggtactgcctcaagtcctgtgacagccgctacctgcgcagcgacggccgtctggtctggagcctgagccccgtgcctgctacacgctggagttcaaggcgggcaagctg

SEQ ID NO: 15070 - DNA, 119 bp, homo sapiens
ggccgtctggtctgggagcctgagccccgtgcctgctacacgctggagttcaaggcgggcaagctggcctcaaggactgcgacggccactacctggcacccgtggggcccgcaggcacc

SEQ ID NO: 15071 - DNA, 119 bp, homo sapiens
gcgggcaagctggccttcaaggactgcgacggccactacctggcacccgtggggcccgcaggcaccctcaggccggccgaaacacgcgacctggcaaggatgagctctttgatctggag

SEQ ID NO: 15072 - DNA, 119 bp, homo sapiens
cgggtagcactcaaagccagcaacgggcgctacgtgtgcatgaagaagaatgggcagctggcggctatcgcgattttgtcggtgagcactctgcctgccaggtactggggcaggggctg

SEQ ID NO: 15073 - DNA, 119 bp, homo sapiens
gcgctacgtgtgcatgaagaagaatgggcagctggcggctatcagcgattttgtcggtgagcactctgctgccaggtactggggcaggggctgtctccacccagggaaaggacctgccc

SEQ ID NO: 15074 - DNA, 119 bp, homo sapiens
ccccaggccgcgacggagggttctggtacacgggcagccacggcagcgtgtgcagcgacggcgaacgcgcgaggacttcgtcttcgagttccgtgagcgcggccgcctggccatccgcg

SEQ ID NO: 15075 - DNA, 119 bp, homo sapiens
tgtgcagcgacggcgaacgcgccgaggacttcgtcttcgagttccgtgagcgcggccgcctggccatcccgcccggagcggcaagtacctgcgcggcggcgcctcgggcctgctgcggg

SEQ ID NO: 15076 - DNA, 119 bp, homo sapiens
gcggcgcctcgggcctgctgcgggccgatgccgacgccccggccgggaccgcgctttgggagtactgagccgcgcccagaccagcctgtcgcgcattaaaaccgtgtctctcccgcagc

SEQ ID NO: 15077 - DNA, 119 bp, homo sapiens
ccaaactaagggcacccccctgggaagggatgcagagacggggagcttctctgtatccccttacaggcagacagggggctggggtgcagaagcactctggggagacctgccctagcttt

SEQ ID NO: 15078 - DNA, 119 bp, homo sapiens
tctgtatccccttacaggcaggacagggggctggggtgcagaagcactctggggagacctgccctagcttccagctgggaggaggggacgatctggggtccagcaggctcccgggctgg

SEQ ID NO: 15079 - DNA, 119 bp, homo sapiens
tggggagacctgccctagctttccagctgggaggaggggacgatctggggtccagcaggctcccgggctgggtccacttcccgttctccctgggagtggagaccgaccaagcctctctg

SEQ ID NO: 15080 - DNA, 119 bp, homo sapiens
ggagaccgaccaagcctctctgtgggcaggactgaggggtgggcctgtatctccagatgttgagcagggctggccagcccctgagggggcatcctagagggaggtggtgggctcctggt

SEQ ID NO: 15081 - DNA, 119 bp, homo sapiens
ctgcaggtgctgccggccgccaccatgaccgagggcgcacgggccgccgacgaggtccgggtgcccctggcgcgccgccccctggccctgcggcgttggtgggggcgtccccggagagc

SEQ ID NO: 15082 - DNA, 119 bp, homo sapiens
gaggtccgggtgcccctgggcgcgccgccccctggccctgcggcgttggtgggggcgtccccggagagcccggggcgccgggacgcgaggcggagcgggggtccgagctcggcgtgtca

SEQ ID NO: 15083 - DNA, 119 bp, homo sapiens
ggggcgtccccggagagccccggggcgccgggacgcgaggcggagcgggggtccgagctcggcgtgtcacctccgagagcccggcggccgagcgcggcgcggagctgggtgccgacgag

SEQ ID NO: 15084 - DNA, 119 bp, homo sapiens
gagctgggtgccgacgaggagcagcgcgtcccgtacccggccttggcggccacggtcttcttctgcctcgtcagaccacgcggccgcgcagctggtgcctccggctggtctgcaaccca

SEQ ID NO: 15085 - DNA, 119 bp, homo sapiens
tcacaggtgggctccttcttcatgatcaacctgtgcctggtggtgattgccacgcagttctcggagacgagcagcgggagagtcagctgatgcgggagcagcgggcacgccacctgtcc

SEQ ID NO: 15086 - DNA, 119 bp, homo sapiens
ttctcggagacgaagcagcgggagagtcagctgatgcgggagcagcgggcacgccacctgtccaacgacgcacgctggccagcttctccgagcctggcagctgctacgaagagctgctg

SEQ ID NO: 15087 - DNA, 119 bp, homo sapiens
ctgtccaacgacagcacgctggccagcttctccgagcctggcagctgctacgaagagctgctgaagtactgggccacatattccgcaaggtcaagcggcgcagcttgcgcctctacgcc

SEQ ID NO: 15088 - DNA, 119 bp, homo sapiens
tacgcccgctggcagagccgctggcgcaagaaggtggaccccagtgctgtgcaaggccagggtcccgggaccgccagcgccgggcaggcaggcacacagcctcggtgcaccacctggtc

SEQ ID NO: 15089 - DNA, 119 bp, homo sapiens
ctaccatttcagccatggcagcccccgcaggcccggccccgagccaggcgcctgcgacaccaggctggtcgagctggcgcgcccccctcgccaccttccccaggccgcggaccccccga

SEQ ID NO: 15090 - DNA, 119 bp, homo sapiens
cctgcgacaccaggctggtccgagctggcgcgcccccctcgccaccttccccaggccgcggaccccccgcgcagagtctgtgcacagcatctaccatgccgactgccacatagaggggc

SEQ ID NO: 15091 - DNA, 119 bp, homo sapiens
ccaggccgcggaccccccgacgcagagtctgtgcacagcatctaccatgccgactgccacatagaggggcgcaggagagggcccgggtggcacatgccgcagccactgccgctgccagc

SEQ ID NO: 15092 - DNA, 119 bp, homo sapiens
cgactgccacatagaggggccgcaggagagggcccgggtggcacatgccgcagccactgccgctgccagctcagactggccacagggctgggcaccatgaactaccccacgatcctgcc

SEQ ID NO: 15093 - DNA, 119 bp, homo sapiens
cagccactgccgctgccagcctcagactggccacagggctgggcaccatgaactaccccacgatcctgcctcaggggtgggcagcggcaaaggcagcaccagccccggacccaagggga

SEQ ID NO: 15094 - DNA, 119 bp, homo sapiens
aactaccccacgatcctgccctcaggggtgggcagcggcaaaggcagcaccagccccggacccaaggggagtgggccggtggaccgccaggcaccggggggcacggcccgttgagcttg

SEQ ID NO: 15095 - DNA, 119 bp, homo sapiens
cagccccggacccaaggggaagtgggccggtggaccgccaggcaccggggggcacggcccgttgagcttaacagccctgatccctacgagaagatcccgcatgtggtcggggagcatgg

SEQ ID NO: 15096 - DNA, 119 bp, homo sapiens
ccgcaggactgggccaggcccctggccatctgtcgggcctcagtgtgccctgccccctgcccagcccccagcgggcacactgacctgtgagctgaagagctgcccgtactgcacccgtg

SEQ ID NO: 15097 - DNA, 119 bp, homo sapiens
cctgcccagccccccagcgggcacactgacctgtgagctgaagagctgcccgtactgcacccgtgccctgaggacccggagggtgagctcagcggctcggaaagtggagactcagatgg

SEQ ID NO: 15098 - DNA, 119 bp, homo sapiens
tgcacccgtgccctggaggacccggagggtgagctcagcggctcggaaagtggagactcagatggccgtgcgtctatgaattcacgcaggacgtccggcacggtgaccgctgggacccc

SEQ ID NO: 15099 - DNA, 119 bp, homo sapiens
actcagatggccgtggcgtctatgaattcacgcaggacgtccggcacggtgaccgctgggaccccacgcaccaccccgtgcgacggacacaccaggcccaggcccaggcagcccccagc

SEQ ID NO: 15100 - DNA, 119 bp, homo sapiens
ctgggaccccacgcgaccaccccgtgcgacggacacaccaggcccaggcccaggcagcccccagcggcggcacagcagagggcagccccgggcgagccaggctggatgggccgcctctg

SEQ ID NO: 15101 - DNA, 119 bp, homo sapiens
agcccccagcggcgggcacagcagagggcagccccgggcgagccaggctggatgggccgcctctgggttccttcagcggcaagctgcgccgcatcgtggacagcaagtacttcagccgt

SEQ ID NO: 15102 - DNA, 119 bp, homo sapiens
ccgcagcgtctgggagatcgtggggcaggcggacggtggcttgtctgtgctgcgcaccttccggctgctcgtgtgctgaagctggtgcgctttctgccagccctgcggcgccagctcgt

SEQ ID NO: 15103 - DNA, 119 bp, homo sapiens
gcttgtctgtgctgcgcaccttccggctgctgcgtgtgctgaagctggtgcgctttctgccagccctgcgcgccagctcgtggtgctggtgaagaccatggacaacgtggctaccttct

SEQ ID NO: 15104 - DNA, 119 bp, homo sapiens
ctgaagctggtgcgctttctgccagccctgcggcgccagctcgtggtgctggtgaagaccatggacaactggctaccttctgcacgctgctcatgctcttcattttcatcttcaggtgg

SEQ ID NO: 15105 - DNA, 119 bp, homo sapiens
ccccaggccagcctccgaagttctccctgtgccccctggggccccagtggcgcctggagcagccggcgcccagctggagcagcctgggccgtgcccccagcctcaagcgccgcggccag

SEQ ID NO: 15106 - DNA, 119 bp, homo sapiens
tggagcagccggcgctccagctggagcagcctgggccgtgcccccagcctcaagcgccgcggccagtgtgggaacgtgagtccctgctgtctggcgagggcaagggcagcaccgacgac

SEQ ID NO: 15107 - DNA, 119 bp, homo sapiens
cgccgcggccagtgtggggaacgtgagtccctgctgtctggcgagggcaagggcagcaccgacgacgaactgaggacggcagggccgcgcccgggccccgtgccaccccactgcggcgg

SEQ ID NO: 15108 - DNA, 119 bp, homo sapiens
ccactgcggcgggccgagtccctggacccacggcccctgcggccggccgccctcccgcctaccaagtgcgcgatcgcgacgggcaggtggtggccctgcccagcgacttcttcctgcgc

SEQ ID NO: 15109 - DNA, 119 bp, homo sapiens
ccgcctaccaagtgccgcgatcgcgacgggcaggtggtggccctgcccagcgacttcttcctgcgcatcacagccaccgtgaggatgcagccgagcttgacgacgactcggaggacgtg

SEQ ID NO: 15110 - DNA, 119 bp, homo sapiens
ccgcaggtggtggccctggggctgctgtccggcgagcacgcctacctgcagagcagctggaacctgctgatgggctgctggtgctggtgtccctggtggacattgtcgtggccatggcc

SEQ ID NO: 15111 - DNA, 119 bp, homo sapiens
acgcctacctgcagagcagctggaacctgctggatgggctgctggtgctggtgtccctggtggacattgcgtggccatggcctcggctggtggcgccaagatcctgggtgttctgcgcg

SEQ ID NO: 15112 - DNA, 119 bp, homo sapiens
gctgctggtgctggtgtccctggtggacattgtcgtggccatggcctcggctggtggcgccaagatcctggtgttctgcgcgtgctgcgtctgctgcggaccctgcggcctctgaggtg

SEQ ID NO: 15113 - DNA, 119 bp, homo sapiens
ccgcagagtgcagtgaagacaacccctgcgagggcctgagcaggcacgccaccttcagcaacttcggcaggccttcctcacgctgttccgcgtgtccacgggggacaactggaacggga

SEQ ID NO: 15114 - DNA, 119 bp, homo sapiens
tgaagacaacccctgcgagggcctgagcaggcacgccaccttcagcaacttcggcatggccttcctcacctgttccgcgtgtccacgggggacaactggaacgggatcatgaaggtacc

SEQ ID NO: 15115 - DNA, 119 bp, homo sapiens
ccgcaggacacgctgcgcgagtgctcccgtgaggacaagcactgcctgagctacctgccggccctgtcgccgtctacttcgtgaccttcgtgctggtggcccagttcgtgctggtgaac

SEQ ID NO: 15116 - DNA, 119 bp, homo sapiens
acctgccggccctgtcgcccgtctacttcgtgaccttcgtgctggtggcccagttcgtgctggtgaacgggtggtggccgtgctcatgaagcacctggaggagagcaacaaggaggcac

SEQ ID NO: 15117 - DNA, 119 bp, homo sapiens
gttcgtgctggtgaacgtggtggtggccgtgctcatgaagcacctggaggagagcaacaaggaggcacggaggatgcggagctggacgccgagatcgagctggagatggcgcagggccc

SEQ ID NO: 15118 - DNA, 119 bp, homo sapiens
agcaacaaggaggcacgggaggatgcggagctggacgccgagatcgagctggagatggcgcagggccccggagtgcacgccgggtggacgcggacaggcctcccttgccccaggagagt

SEQ ID NO: 15119 - DNA, 119 bp, homo sapiens
ccccaggctccgttgcctctgtgcactctccgcccgcagagtcctgtgcctccctccagatcccattggtgtgtcgtccccagccaggagcggcgagcccctccacgccctgtcccctc

SEQ ID NO: 15120 - DNA, 119 bp, homo sapiens
cctccagatcccattggctgtgtcgtccccagccaggagcggcgagcccctccacgccctgtcccctcgggcacagcccgctcccccagtctcagccggctgctctgcagacaggtagg

SEQ ID NO: 15121 - DNA, 119 bp, homo sapiens
ccacaggaggctgtgcacaccgattccttggaagggaagattgacagccctagggacaccctggatcctcagagcctggtgagaaaaccccggtgaggccggtgacccaggggggctcc

SEQ ID NO: 15122 - DNA, 119 bp, homo sapiens
acaccctggatcctgcagagcctggtgagaaaaccccggtgaggccggtgacccaggggggctccctgcgtccccaccacgctccccacggcccgccagcgtccgcactcgtaagcata

SEQ ID NO: 15123 - DNA, 119 bp, homo sapiens
ggggggctccctgcagtccccaccacgctccccacggcccgccagcgtccgcactcgtaagcataccttggacagcgctgcgtctccagccggccggcggccccaggcggagaggaggc

SEQ ID NO: 15124 - DNA, 119 bp, homo sapiens
cgtaagcataccttcggacagcgctgcgtctccagccggccggcggccccaggcggagaggaggccgagcctcggacccagccgacgaggaggtcagccacatcaccagctccgcctgc

SEQ ID NO: 15125 - DNA, 119 bp, homo sapiens
gagaggaggccgaggcctcggacccagccgacgaggaggtcagccacatcaccagctccgcctgcccctgcagcccacagccgagccccatggccccgaagcctctccggtggccggcg

SEQ ID NO: 15126 - DNA, 119 bp, homo sapiens
ctccgcctgcccctggcagcccacagccgagccccatggccccgaagcctctccggtggccggcggcgacgggacctgcgcaggctctacagcgtggatgctcagggcttcctggacaa

SEQ ID NO: 15127 - DNA, 119 bp, homo sapiens
gtggccggcggcgagcgggacctgcgcaggctctacagcgtggatgctcagggcttcctggacaagccggccgggcagacgagcagtggcggccctcggcggagctgggcagcggggag

SEQ ID NO: 15128 - DNA, 119 bp, homo sapiens
tcctggacaagccgggccgggcagacgagcagtggcggccctcggcggagctgggcagcggggagcctgggaggcgaaggcctggggccctgaggccgagcccgctctgggtgcgcgca

SEQ ID NO: 15129 - DNA, 119 bp, homo sapiens
cagcggggagcctggggaggcgaaggcctggggccctgaggccgagcccgctctgggtgcgcgcagaaaaagaagatgagccccccctgcatctcggtggaaccccctgcggaggacga

SEQ ID NO: 15130 - DNA, 119 bp, homo sapiens
ggtgcgcgcagaaagaagaagatgagccccccctgcatctcggtggaaccccctgcggaggacgagggcctgcgcggccctccgcggcagagggcggcagcaccacactgaggcgcagg

SEQ ID NO: 15131 - DNA, 119 bp, homo sapiens
cggaggacgagggctctgcgcggccctccgcggcagagggcggcagcaccacactgaggcgcaggacccgtcctgtgaggccacgcctcacagggactccctggagcccacagagggct

SEQ ID NO: 15132 - DNA, 119 bp, homo sapiens
gaggcgcaggaccccgtcctgtgaggccacgcctcacagggactccctggagcccacagagggctcagggccgggggggaccctgcagccaagggggagcgctggggccaggcctcctg

SEQ ID NO: 15133 - DNA, 119 bp, homo sapiens
acagagggctcaggcgccgggggggaccctgcagccaagggggagcgctggggccaggcctcctgccggctgagcacctgaccgtccccagctttgcctttgagccgctggacctcggg

SEQ ID NO: 15134 - DNA, 119 bp, homo sapiens
tcccccagtgtcctctggagaaaccagggtccccctcagccacccctgccccagggggtggtgcagatgccccgtgtagctcggggcttggtgccgcccacggctttggccctggggtc

SEQ ID NO: 15135 - DNA, 119 bp, homo sapiens
ggtggtgcagatgaccccgtgtagctcggggcttggtgccgcccacggctttggccctggggtctggggccccgctggggtggaggcccaggcagaaccctgcatggaccctgacttgg

SEQ ID NO: 15136 - DNA, 119 bp, homo sapiens
ctggggtctgggggccccgctggggtggaggcccaggcagaaccctgcatggaccctgacttgggtccctcgtgagcagaaaggcccggggaggatgacggcccaggccctggttctct

SEQ ID NO: 15137 - DNA, 119 bp, homo sapiens
tgacttgggtcccgtcgtgagcagaaaggcccggggaggatgacggcccaggccctggttctctgcccacgaagcaggagtagctgccgggccccacgagcctccgtccgttctggttc

SEQ ID NO: 15138 - DNA, 119 bp, homo sapiens
ggttctctgcccagcgaagcaggagtagctgccgggccccacgagcctccgtccgttctggttcgggttctccgagttttgctaccagccgaggctgtgcgggcaactgggtcagcctc

SEQ ID NO: 15139 - DNA, 119 bp, homo sapiens
gctgacctccagggcgatgttgtggaaggtgttcacgtaggctgcgcctcccaggagcccctcatacagatgatcaggaagacgaggtagatgcttggcagaaagccgaaccacacgtc

SEQ ID NO: 15140 - DNA, 119 bp, homo sapiens
tcacgtaggctgcgcctcccaggagcccctcatacagaatgatcaggaagacgaggtagatgcttggcaaaagccgaaccacacgtctgccagcaggaacaccaggttgaggcactgtg

SEQ ID NO: 15141 - DNA, 119 bp, homo sapiens
gctcacctggccagcagcagggcagggatacccagcatggacagcagggtctgctgaggggagaggccgcctgggtgaggcccaggtaggacagggcccccagcagcccagctccccca

SEQ ID NO: 15142 - DNA, 119 bp, homo sapiens
catggacagcagggtctgctgaggggagaggccggcctgggtgaggcccaggtaggacagggcccccagagcccagctcccccagtccctgaggaccaccaggagatcacggccctggg

SEQ ID NO: 15143 - DNA, 119 bp, homo sapiens
ggttaccttgcccgtttgggtggcggccgccaggcacgggtgagtcccgtcgtagcgccctatggccacattcgggggctgattttgtggcgcagtttcagggtgaacacaggcagcag

SEQ ID NO: 15144 - DNA, 119 bp, homo sapiens
ctatggccaccattcgggggctgattttgtggcgcagtttcagggtgaacacaggcagcagcatgatggggcggcttaggggaggagggctggaagctggagacaagcgcagcggagct

SEQ ID NO: 15145 - DNA, 119 bp, homo sapiens
agcatgatggcggcggcttaggggaggagggctggaagctggagacaagcgcagcggagctggcctcaccgcccgggcaagaagtgcagggacactacctgcgcggccccagccgcctc

SEQ ID NO: 15146 - DNA, 119 bp, homo sapiens
tcaggccggacgcgaaacagcccgggacgaacccgtccaggtaccgcctgctcctcctgcggcggcgcaacccgtccgctctttttgcggctgcgcggtggagcctcggcgccttctgt

SEQ ID NO: 15147 - DNA, 119 bp, homo sapiens
ccctccggcctcccaagggaggcaggcggtggagagctcggtggagaccccgggggctcggggggcgtcggggcgcgggtgggtcggtggcggcctcctttgggtgcgtgtgctggtct

SEQ ID NO: 15148 - DNA, 119 bp, homo sapiens
cccgggggctcggggggcgtccggggcgcgggtgggtcggtggcggcctcctttgggtgcgtgtgctggctggggcggcggagccttcctctcccttgacgtcttgcgagctcttggcc

SEQ ID NO: 15149 - DNA, 119 bp, homo sapiens
gctcacctggcagggtccctggttggtggcagggaggaggtctgggcctgggagccgggctggggctctgagctggtgcctccttgggttcctccttgggctgcagggggatgggtgtg

SEQ ID NO: 15150 - DNA, 119 bp, homo sapiens
aggaggtctgggcctgggagccgggctggggctctggagctggtgcctccttgggttcctccttgggctcagggggatgggtgtgggcagggagggggtctcccgggcctgcagcttgg

SEQ ID NO: 15151 - DNA, 119 bp, homo sapiens
tggagctggtgcctccttgggttcctccttgggctgcagggggatgggtgtgggcagggagggggtctccgggcctgcagcttgggccccatttcctgggggcgtcctggaggcgctaa

SEQ ID NO: 15152 - DNA, 119 bp, homo sapiens
gaaaagaaaatgctgaaccagatctggacgacaatgaggatgaggaggagcctgccgtagaaattgaactgagccagagcctcagcctgtgaccccagccccaccacccgccaagaagc

SEQ ID NO: 15153 - DNA, 119 bp, homo sapiens
gccgtagaaattgaacctgagccagagcctcagcctgtgaccccagccccaccacccgccaagaagcgggaggacgaccccctggcagaaccaaccagcccaaacagaaccagcgtaag

SEQ ID NO: 15154 - DNA, 119 bp, homo sapiens
gctccagaaaagccaggagagcgcaggagggcatccgggaggccaggaggggttcgctggggcctcaacgcacccacatcggtcccacctgcgagggggcgggacctcgtggcgctgga

SEQ ID NO: 15155 - DNA, 119 bp, homo sapiens
ctggggcctcaaccgcacccacatcggtcccacctgcgagggggcgggacctcgtggcgctggaccaatagcacccacctgcgctcacctggcctcctcccgctggctcccgggggctg

SEQ ID NO: 15156 - DNA, 119 bp, homo sapiens
ttgcagtcctcctgctggtgctgcttttgttggtgagaaagaagcggaagatcaaggagcccctcctaccccagaagatgacacccgtgacaacgtcttctactatggcgaagaggggg

SEQ ID NO: 15157 - DNA, 119 bp, homo sapiens
gcttttgttggtgagaaagaagcggaagatcaaggagcccctcctactcccagaagatgacacccgtgaaacgtcttctactatggcgaagaggggggtggcgaagaggaccaggtggg

SEQ ID NO: 15158 - DNA, 119 bp, homo sapiens
acgtacctgcccggtcggctttgagtgcatcccagacgttgcagttgaagtcgtcgtacccagcaaggagaggcgcccgctcttggagaaggagacagaggtgatcccgcagatgatgt

SEQ ID NO: 15159 - DNA, 119 bp, homo sapiens
cgtcgtacccagcaaggaggaggcgcccgctcttggagaaggagacagaggtgatcccgcagatgatgtgtcatgggagtaagtcatgagctcctggtcagcacgaaggtcaaacagcc

SEQ ID NO: 15160 - DNA, 119 bp, homo sapiens
aggtacctgtgtgtcctgccagctcacgactcacgcgcacgttcccctcacgagttttcagattgtaaaggagcaaatgttatccaggccaccgcaggccacatagttcccagaagggg

SEQ ID NO: 15161 - DNA, 119 bp, homo sapiens
ttttcagattgtaaatggagcaaatgttatccaggccaccgcaggccacatagttcccagaaggggcattgcacaggtcatgacccaggaggagcgcagagggatggcgtggacctaat

SEQ ID NO: 15162 - DNA, 119 bp, homo sapiens
gctcacctcagcgccctcgtcgcggcctgacgcgcccacaccgccgcctcggccgccgctcggcaggtctcgcgctcgggccgcgctgcgcgctccgcgggcgctgcgggcaggtgcgc

SEQ ID NO: 15163 - DNA, 119 bp, homo sapiens
cccacaccgccgcctcggccgccgctcggcaggtcgtcgcgctcgggccgcgctgcgcgctccgcgggcctgcgggcaggtgcgcgccggcgaggctcggtccagtcccgccgcggcgg

SEQ ID NO: 15164 - DNA, 119 bp, homo sapiens
cgtcgcgctcgggccgcgctgcgcgctccgcgggcgctgcgggcaggtgcgcgccggcgaggctcggtcagtcccgccgcggcggctgctccactcccggccccgctccccactcgccg

SEQ ID NO: 15165 - DNA, 119 bp, homo sapiens
cctcaccttgctgctgcaccacgcggtgatgcactcccagcagaacaggtggccgcagggcgtggctgtgggtgcctgcgctcctccaggcacagggtgcacagggggtttctggaaac

SEQ ID NO: 15166 - DNA, 119 bp, homo sapiens
gatgcactcccagcagaacaggtggccgcagggcgtggctgttgggtgcctgcgctcctccaggcacaggtgcacagggggtttctggaaacggctctctcctccaaggaggccctggg

SEQ ID NO: 15167 - DNA, 119 bp, homo sapiens
acgcacctgcggtgagacaggccgcggtgcagcctccactccttcctggctcgctgccgctgcctgaaacgtacagctgcagccccatggacagcaccaggtgcagcagtgagatgacc

SEQ ID NO: 15168 - DNA, 119 bp, homo sapiens
ttcctggctcgctgccgctgcctgaaaccgtacagctgcagccccatggacagcaccaggtgcagcagtagatgacccccagcagcctgtagctaacacgggccctcaggtcctctccg

SEQ ID NO: 15169 - DNA, 119 bp, homo sapiens
cccatggacagcaccaggtgcagcagtgagatgacccccagcagcctgtagctaacacgggccctcaggcctctccgggcaggctgcggacacggagctgtaaggcagatggcgccaca

SEQ ID NO: 15170 - DNA, 119 bp, homo sapiens
agcctgtagctaacacgggccctcaggtcctctccgggcaggctgcggacacggagctgtaaggcagatgcgccacactcatcaggaccctgaggggatctggcctcagcgcctgctgg

SEQ ID NO: 15171 - DNA, 119 bp, homo sapiens
acttacgtacgtgatccccgtgagcctcttggccaggtggtagaagacaccgtggatgtaaaaccaggcacatgtagccgctggaggcaggcgaggccctgtctgaggacgaagaccgc

SEQ ID NO: 15172 - DNA, 119 bp, homo sapiens
aaaaccaggcaacatgtagccgctggaggcaggcgaggccctgtctgaggacgaagaccgcccgcagcacgccctcctctgctgctcagtcagggtggccgtgtggtgacgcatccagc

SEQ ID NO: 15173 - DNA, 119 bp, homo sapiens
gcccgcagcagcgccctcctctgctgctcagtcagggtggccgtgtggtgacgcatccagcgccgcgccctgagcagccacgcccacctggccccaggctcccctgcaagggtcgccca

SEQ ID NO: 15174 - DNA, 119 bp, homo sapiens
cactgtcggggtcagcctgcagctcctgctccagggggagcagggccttgtccagcaggtagggcaggaggcatgcagtgtcaccagcacgccacggcgcagcgaggagggcacatgta

SEQ ID NO: 15175 - DNA, 119 bp, homo sapiens
tagggcaggacggcatgcagtgtcaccagcacgccacggcgcagcgaggagggcacatgtatccgcgatggtccacctggatgatgctgacgtactcctcccccagggtctggtagcct

SEQ ID NO: 15176 - DNA, 119 bp, homo sapiens
cctcacccgccaggctgtgcagggcgccgcccgccgcgctccgcagcccaccgcggtagtactcgtcctctgcgccgcgcggatcacctccggggggctggcggcggccggggccatgg

SEQ ID NO: 15177 - DNA, 119 bp, homo sapiens
gcgctccgcagcccaccgcggtagtactcgtccttctgcgccgcgcggatcacctccggggggctggcgcggccggggccatggccgcgggttcgggtggtcccgagcagccacgccgg

SEQ ID NO: 15178 - DNA, 119 bp, homo sapiens
ctgcgccgcgcggatcacctccggggggctggcggcggccggggccatggccgcgggttcgggtggtccgagcagccacgccggccacgcccacgcccagacgggcgagaactgatgac

SEQ ID NO: 15179 - DNA, 119 bp, homo sapiens
ccacacctggaaggagtcctctctgaaccgcagcagctccgggtggtcgctgtgcaggtggaatgtcctcgggaggggtaggggttggtgtaggtgatcctcttgttgacacccttccc

SEQ ID NO: 15180 - DNA, 119 bp, homo sapiens
gctccgggtggtcgctgtgcaggtggaatgtcctccgggaggggtaggggttggtgtaggtgatcctctgttgacacccttcccttcgcccgcagccaacatgatctcaaaggcctgtg

SEQ ID NO: 15181 - DNA, 119 bp, homo sapiens
acagaccttggagatgagcggctggcggcagcagaggcacacgagccaggaggccaccagctggtggcatccacgtccaccaggttgagatggacaaagcggctgccggccctaagggg

SEQ ID NO: 15182 - DNA, 119 bp, homo sapiens
ggcacacgagccaggaggccaccagctggtggcaatccacgtccaccaggttgagatggacaaagcggcgccggccctaaggggcctcacgccaacatgcaggtcctgcaccccacgag

SEQ ID NO: 15183 - DNA, 119 bp, homo sapiens
tccacgtccaccaggttgagatggacaaagcggctgccggccctaaggggcctcacgccaacatgcaggcctgcaccccacgaggcggcagcacgaagacacctttggggtctgtcttc

SEQ ID NO: 15184 - DNA, 119 bp, homo sapiens
ccgtaccttcagctcctggggatgagaggtgaaagctctcactttcctcactgtctgtgtcccccgaagacaagggacaggcgggtcagctggcctgcgacgcaggagacatccacgcg

SEQ ID NO: 15185 - DNA, 119 bp, homo sapiens
aaagctctcactttcctcactgtctgtgtcccccgaaggacaagggacaggcgggtcagctggcctgcgcgcaggagacatccacgcgctgcagggagtggaggtagacctgccacgtc

SEQ ID NO: 15186 - DNA, 119 bp, homo sapiens
cccgaaggacaagggacaggcgggtcagctggcctgcgacgcaggagacatccacgcgctgcagggagtgaggtagacctgccacgtctgtgtgggtgtcgccagccagcgatccctgc

SEQ ID NO: 15187 - DNA, 119 bp, homo sapiens
acctgcctggaaatgtgtgccagggcggcaggcggatggccttcttcaggaaggagagctccgggtgatgaagcggaagacctggtccaccacgtggggctgcagctccacagtcaggc

SEQ ID NO: 15188 - DNA, 119 bp, homo sapiens
ggaaggagagctccgggtgatagaagcggaagacctggtccaccacgtggggctgcagctccacagtcagcagagcacggcgatgggcttgccaccactcgctcggaacaagacctgtg

SEQ ID NO: 15189 - DNA, 119 bp, homo sapiens
ccgcacctgcaccatggccagctgccctgcagagaagctctggaacttgaaggggacgtgggcggtctctgggggcgcaggtagagctggggggccaggctgccacgcaggtggaacat

SEQ ID NO: 15190 - DNA, 119 bp, homo sapiens
tctggaacttgaaggggacgtgggcggtctcgtgggggcgcaggtagagctggggggccaggctgccaccaggtggaacatgtcctcctccaccggtgtgtgcaggccagcagcaccct

SEQ ID NO: 15191 - DNA, 119 bp, homo sapiens
cgcaggtagagctggggggccaggctgccacgcaggtggaacatgtcctcctccaccggtgtgtgcaggcagcagcacccttgaagtccctccactcctgactgtccacgatgacgctg

SEQ ID NO: 15192 - DNA, 119 bp, homo sapiens
cgctaccttcatctggacggcagcagatccgatgagcagcagggagtctccgtcccagacgtcaatctgagggtctgcacggccaggtagcgggcaaagcagcgccgctcacctggctt

SEQ ID NO: 15193 - DNA, 119 bp, homo sapiens
tcccagacgtcaatctgcagggtctgcacggccaggtagcgggcaaagcagcgccgctcacctggcttcggaacccagggcccaccatgtacctcagctggaagccaggagaccctgtc

SEQ ID NO: 15194 - DNA, 119 bp, homo sapiens
ccacacctcctggaagtggtcctggacgtggagctccagcagctcttcctcaaacttctccagggagggtacagggtgaagaataagtcatccaagtgccccgtgatgggcttctggag

SEQ ID NO: 15195 - DNA, 119 bp, homo sapiens
tggagctccagcagctcttcctcaaacttctccagggaggggtacagggtgaagaataagtcatccaaggccccgtgatgggcttctggaggcgaggctttcggagagcgtcgcctgaa

SEQ ID NO: 15196 - DNA, 119 bp, homo sapiens
tgttacctgcctaattaccggtccgtccagccacttgaggacacactggaatgccgtggattccttccaggctggcgcgctctctgtgggtggggagggacaagcacgttttgggtgaa

SEQ ID NO: 15197 - DNA, 119 bp, homo sapiens
acttgaggacacactggaatgccgtggattccttccaaggctggcgcgctctctgtgggtggggagggaaagcacgttttgggtgaagatcctgtgccagtcgttcatcctgcccgcct

SEQ ID NO: 15198 - DNA, 119 bp, homo sapiens
ttccaaggctggcgcgctctctgtgggtggggagggacaagcacgttttgggtgaagatcctgtgccagcgttcatcctgcccgcctgagggtcccgtgggcttcccggatgatctgtg

SEQ ID NO: 15199 - DNA, 119 bp, homo sapiens
cgttacctaggagaccgacccgccgcggccgcgccggaggccacggagcccacgcttttcagagagtctcactcgacggacccagaggcccggcggccggtgctcaacggagccacaag

SEQ ID NO: 15200 - DNA, 119 bp, homo sapiens
ccacggagcccacgcttttcagagagtctccactcgacggacccagaggcccggcggccggtgctcaacgagccacaagcctgaggaccgaggactggccgaggggcgcgccccgtccg

SEQ ID NO: 15201 - DNA, 119 bp, homo sapiens
acccagaggcccggcggccggtgctcaacggagccacaagcctgaggaccgaggactggccgaggggcggccccgtccgctgccacccgcgggaggagcctcggaaggcggcgcaccgc

SEQ ID NO: 15202 - DNA, 119 bp, homo sapiens
cctgaggaccgaggactggccgaggggcgcgccccgtccgctgccacccgcgggaggagcctcggaaggggcgcaccgcgccgcacactcagtccaagaacccgcctcgcgtcactgtc

SEQ ID NO: 15203 - DNA, 119 bp, homo sapiens
ggaggatgatgatgtgagccatgtggacgaggaggactgcctgggggtgcagagggaggaccgccggggggggatgggcagatcaacgagcaggtggagaagctgcggcggcccgaggg

SEQ ID NO: 15204 - DNA, 119 bp, homo sapiens
aggaccgccggggcggggatgggcagatcaacgagcaggtggagaagctgcggcggcccgagggcgccacaacgagagtgagcgggactagggctgcgcctgctgcctccagccctgag

SEQ ID NO: 15205 - DNA, 119 bp, homo sapiens
cccgagggcgccagcaacgagagtgagcgggactagggctgcgcctgctgcctccagccctgaggatggatctagtgtgcccgtgcgtggccataccctgcctccctctctggccctgg

SEQ ID NO: 15206 - DNA, 119 bp, homo sapiens
ggccctgggagggcagcttggagcccaggtagggggcagagctgtcctcagctgcactgcggcctggtgcagtgtggggagtcacacttctgtccacctggcctcctctcgcctggccg

SEQ ID NO: 15207 - DNA, 119 bp, homo sapiens
ctctagcagaaggcccgagacatgtatgcagaggagcggaagaggcagcagctggagagggaccaggctcagtgacagagcagctgctgcgagaggggctccaagccagtggggacgcc

SEQ ID NO: 15208 - DNA, 119 bp, homo sapiens
gagcggaagaggcagcagctggagagggaccaggctacagtgacagagcagctgctgcgagaggggctcaagccagtggggacgcccagctccgaaggacacgcttgcacaaactctcg

SEQ ID NO: 15209 - DNA, 119 bp, homo sapiens
aaccatacttccggtttgtcgttgctataggaaccgctacggcgtttgaaagtgtccgggttgcttaggtccctacaggtagcgcctctggatacatgcgtggtctgctgacccagaga

SEQ ID NO: 15210 - DNA, 119 bp, homo sapiens
ttgtcgttgctataggaaccgctacggcgtttgaaagtgtccgggttgcttaggatccctacaggtagccctctggatacatgcgtggtctgctgacccagagagaaacgaaaggtggg

SEQ ID NO: 15211 - DNA, 119 bp, homo sapiens
ttgcaggagcgagacttggaagcgctggtcaaaaggtttaaaacagacctccacaactgcgtagcctatttcaggaaccgcggctgctgaaggagaaggttcgaggtctctttgagaag

SEQ ID NO: 15212 - DNA, 119 bp, homo sapiens
ggtcaaaaggtttaaaacagacctccacaactgcgtagcctatattcaggaaccgcggctgctgaaggaaaggttcgaggtctctttgagaagtacgtgcagcgagcagacatggtaag

SEQ ID NO: 15213 - DNA, 119 bp, homo sapiens
cgtcaggtggagatcgcagggctgaacacagacctgcagcaggagtacacccggcagcgggagcacctgagaggaacctggccactctcaagaagaaggtggtcaaggagggcgagctg

SEQ ID NO: 15214 - DNA, 119 bp, homo sapiens
gcagcaggagtacacccggcagcgggagcacctggagaggaacctggccactctcaagaagaaggtggtaaggagggcgagctgcaccgcacagactacgtccgcatcatgcaggtacc

SEQ ID NO: 15215 - DNA, 119 bp, homo sapiens
acccaccaaaccgggcatagacatctgtcacagcctggctcagtgcaaggtcaatgaggccccggcccagcagaagtgggggaagacaatgagcagcttcctcagcacggcgttgaacc

SEQ ID NO: 15216 - DNA, 119 bp, homo sapiens
catagacatctgtcacagcctggctcagtgcaaggtcaatgaggccccggcccaggcagaagtgggggagacaatgagcagcttcctcagcacggcgttgaacctgagcagcgtctgaa

SEQ ID NO: 15217 - DNA, 119 bp, homo sapiens
tagtacctgcgccaggaagtccttgtggctgcggatggtgtgttggaatctcttgaccagcagcgcctgacatgctggaggaccagctgtgtccccgtgttgagctgcgggcctgggca

SEQ ID NO: 15218 - DNA, 119 bp, homo sapiens
cttgaccagcagcgcctgcacatgctggaggaccagctgtgtccccgtgttgagctgcgggcctgggcatctggctctgggggaggctggccctctgggtgagcagccggcgcccctgg

SEQ ID NO: 15219 - DNA, 119 bp, homo sapiens
agcagccggcgcccctggggagcagacattggagtcctggggtgtctgtccagccttctctctgggaccaagcaggggtgtcgggggttgacgttttctcttttctgctgagcgccacc

SEQ ID NO: 15220 - DNA, 119 bp, homo sapiens
ccccagagctccctggtgacagtctgtggctgagcatggccctcccagccctgggcctggacccctggacctcctgggccttttcctcttccaactgcttcagctgctgctgccgacga

SEQ ID NO: 15221 - DNA, 119 bp, homo sapiens
gacccctggagcctcctgggccttttcctcttccaactgcttcagctgctgctgccgacgacgaccgcgggggaggcgggcaggggcccatgcccagggtcagatactatgcaggtaag

SEQ ID NO: 15222 - DNA, 119 bp, homo sapiens
tcacagtggatggaagttggggaagctggcatagttggagccagtgctctgcctcctgtggaggaggtgaaagactcggaagcggctgtgcgaccatcctgtgccagttaaaggtggcc

SEQ ID NO: 15223 - DNA, 119 bp, homo sapiens
tagttggagccagtgctctgcctcctgtggaggaggtgaaaagactcggaagcggctgtgcgaccatccgtgccagttaaaggtggccgtccctgtcccggagacactactcaggtgac

SEQ ID NO: 15224 - DNA, 119 bp, homo sapiens
ggaggtgaaaagactcggaagcggctgtgcgaccatcctgtgccagttaaaggtggccgtccctgtcccgagacactactcaggtgaccaggtgcaatgtacaagcatgtccaggtaag

SEQ ID NO: 15225 - DNA, 119 bp, homo sapiens
tcttgggtctcctcgtcaggcctaggtggggaggttccagggcccggcgctccggtcaccggcctatcatccccctgcagaaggctccgcttctgggcagggaagcggccggggtcagt

SEQ ID NO: 15226 - DNA, 119 bp, homo sapiens
ccggcctatcattccccctgcagaaggctccgcttctgggcagggaagcggccggggtcagtcggctttggcgcccggaattcgggcatgctccaggaccgcagtggcggcggtgtgtc

SEQ ID NO: 15227 - DNA, 119 bp, homo sapiens
cagtcggctttgggcgcccggaattcgggcatgctccaggaccgcagtggcggcggtgtgtcccgctcccgtcctcggagatggtcctgatgtcgctggcgaagggcgagatgcgcgcg

SEQ ID NO: 15228 - DNA, 119 bp, homo sapiens
tgtcccgctccacgtcctcggagatggtcctgatgtcgctggcgaagggcgagatgcgcgcgcgggtctgaaggtggccaggctgccgcggggccgcaggctccactggcgcgtcagct

SEQ ID NO: 15229 - DNA, 119 bp, homo sapiens
cgcgcgggtcttgaaggtggccaggctgccgcggggccgcaggctccactggcgcgtcagcttgtgggctcctcttcctgcttcatcctctccaggacctcctgcagcaccgagcggaa

SEQ ID NO: 15230 - DNA, 119 bp, homo sapiens
agcttgtgggcctcctcttcctgcttcatcctctccaggacctcctgcagcaccgagcggaagagctggacacctcctgcacctcgggctcctgctccgccagcagctgccggaacctg

SEQ ID NO: 15231 - DNA, 119 bp, homo sapiens
gtgactgccgcgcggcgcgggggaggagaccttcatctgttcacgcggtagcgcggattgcggttcgcgcgcgcgccaccggggaaggagcggtgggccgaggggttggaggtggggcc

SEQ ID NO: 15232 - DNA, 119 bp, homo sapiens
tgcggttcgcggcgcgcgccaccggggaaggagcggtgggccgaggggttggaggtggggccccaggagacctcgggctgtgggccgggagagcggagtcggggagtggggcgggggag

SEQ ID NO: 15233 - DNA, 119 bp, homo sapiens
ggccccaggaggacctcgggctgtgggccgggagagcggagtcggggagtggggcgggggagcgaggtgcgccggggagcctgggatatggcgcggccagacgatgaggagggggcggc

SEQ ID NO: 15234 - DNA, 119 bp, homo sapiens
ggagcgaggtggcgccggggagcctgggatatggcgcggccagacgatgaggagggggcggcggtggcgccggacacccgctcgcgaaaggatacctcccgttgccgaggggcgcgccc

SEQ ID NO: 15235 - DNA, 119 bp, homo sapiens
cggcggtggcgcccggacacccgctcgcgaaaggatacctcccgttgccgaggggcgcgcccgttgggaggagagcgtggagctgcagaacgggcccaaagcgggcaccttcccggtga

SEQ ID NO: 15236 - DNA, 119 bp, homo sapiens
gcccgttgggaaggagagcgtggagctgcagaacgggcccaaagcgggcaccttcccggtgaatggggcccccgggacagcctcgctgccgcctcgggagttctgggcgggcctcagac

SEQ ID NO: 15237 - DNA, 119 bp, homo sapiens
gtgaatggggccccccgggacagcctcgctgccgcctcgggagttctgggcgggcctcagactccactgccccagaagaggagacccaggcccggctgctgcctgcgggcgcgggagct

SEQ ID NO: 15238 - DNA, 119 bp, homo sapiens
gctcactctagaaatccatgggtggagtcgccagacctcatctggagttggtatctgggagagccaggacgttattacgagctggtgtagaccagacaacctgaagactggttggagtg

SEQ ID NO: 15239 - DNA, 119 bp, homo sapiens
tggagttggtatctgggagagccaggagcgttattacgagctggtgtagaccagacaacctgaagactgttggagtggcagatgaaagcctgggaggcagcacgccatctggagctgtc

SEQ ID NO: 15240 - DNA, 119 bp, homo sapiens
agggccagtgggtgggaagagcccccaagagctctgtgcgggattctaggctcccctgtgacagccgcgcaggaagcaggcgggcgctccccggccacaggcctgttgttctcggaagg

SEQ ID NO: 15241 - DNA, 119 bp, homo sapiens
attctaggctcccctgtgacagccgcggcaggaagcaggcgggcgctccccggccacaggcctgttgtttcggaagggagaaagctggacatttccccacgtaactcccagctctgggc

SEQ ID NO: 15242 - DNA, 119 bp, homo sapiens
gcgctccccggccacaggcctgttgttctcggaagggagaaagctggacatttccccacgtaactcccactctgggcctagagtgcgtgcatggcgaagtccccggagaactctaccct

SEQ ID NO: 15243 - DNA, 119 bp, homo sapiens
gctggacatttccccacgtaactcccagctctgggcctagagtgcgtgcatggcgaagtccccggagaatctaccctggaggagattctggggcagtatcaacggagtctccggggtga

SEQ ID NO: 15244 - DNA, 119 bp, homo sapiens
tggcaggctttaatccagtgtgaccagttgaggaaggagctggagaggcaggcggagcgacttgaaaaaaacttgcatctcagcaagagaaaagggccattgagaaagacatgatgaaa

SEQ ID NO: 15245 - DNA, 119 bp, homo sapiens
gaggcaggcggagcgacttgaaaaagaacttgcatctcagcaagagaaaagggccattgagaaagacatatgaaaaaggaaataacgaaagaaagggagtacatgggatcaaaggtact

SEQ ID NO: 15246 - DNA, 119 bp, homo sapiens
ctccaggctaaggcagctggataagcacagccaggccacagcccagcagctggtgcagctcctcagcaacagaaccagcttctcctggagaggcagagcctgtcggaagaggtggaccg

SEQ ID NO: 15247 - DNA, 119 bp, homo sapiens
ggataagcacagccaggccacagcccagcagctggtgcagctcctcagcaagcagaaccagcttctcctgagaggcagagcctgtcggaagaggtggaccggctgcggacccaggtact

SEQ ID NO: 15248 - DNA, 119 bp, homo sapiens
ctggcctggtttagctttaaaaaaaaaaatctttcttgtgcttactgccgtgtccccactgcctggtgtcggtgacattgggtgatggcggggcgttggaccacaggactggtgtgtga

SEQ ID NO: 15249 - DNA, 119 bp, homo sapiens
tccccactgcctggtgtgcggtgacattgggtgatggcggggcgttggaccacaggactggtgtgtgagtgccgcctagagatggggtgacctggtgatctgggagtgatctggggagc

SEQ ID NO: 15250 - DNA, 119 bp, homo sapiens
caggactggtgtgtgaggtgccgcctagagatggggtgacctggtgatctgggagtgatctggggagccaggctggagacggggagggtagctactgcagctcctgccctggtgccgca

SEQ ID NO: 15251 - DNA, 119 bp, homo sapiens
gagtgatctggggagcccaggctggagacggggagggtagctactgcagctcctgccctggtgccgcactctgtcccgggaggtggcgctggcccagactgtcccatcccatgcctcag

SEQ ID NO: 15252 - DNA, 119 bp, homo sapiens
ctgccctggtgccgcacttctgtcccgggaggtggcgctggcccagactgtcccatcccatgcctcaggccccctcctgctgcactgggccagccgtgcttgccagtcccagcgggttc

SEQ ID NO: 15253 - DNA, 119 bp, homo sapiens
aatgggctgacagctgtgcccgaggtccagggcacaacggagaggggagtgctcacatggcgagcacacgtgagaggagaccaggctcgcgggagctgctgctatttgttatttccagg

SEQ ID NO: 15254 - DNA, 119 bp, homo sapiens
atggcgagcacacggtgagaggagaccaggctcgcgggagctgctgctatttgttatttccaggggactggagcctggagagtgggcagctctgctgatggggattaggagaagcagag

SEQ ID NO: 15255 - DNA, 119 bp, homo sapiens
tttccaggggactgggagcctggagagtgggcagctctgctgatggggattaggagaagcagagagattacactcatcttacagagtcagcggtcccgccacccacagcctcgcagccc

SEQ ID NO: 15256 - DNA, 119 bp, homo sapiens
aagcagagagatttacactcatcttacagagtcagcggtcccgccacccacagcctcgcagccctcgaactcggaggcccccacgcccaattaacagacaggagactgaggccccagga

SEQ ID NO: 15257 - DNA, 119 bp, homo sapiens
cgcagccctcgaacctcggaggcccccacgcccaattaacagacaggagactgaggccccaggaggggagaggtccccgcacctggcctgagaatacttgggtcacctcctgcctgaca

SEQ ID NO: 15258 - DNA, 119 bp, homo sapiens
ccccaggaggggaggaggtccccgcacctggcctgagaatacttgggtcacctcctgcctgacactggggccagtccgctgccagcaggacgggtggcgatggggtgggagacgggatg

SEQ ID NO: 15259 - DNA, 119 bp, homo sapiens
gcctgacactgggggccagtccgctgccagcaggacgggtggcgatggggtgggagacgggatgggggcgggaacccagcagcctgtctctctggtcccgctccccagtggtggtggcc

SEQ ID NO: 15260 - DNA, 119 bp, homo sapiens
acgggatgggggcagggaacccagcagcctgtctctctggtcccgctccccagtggtggtggcctggccgaccacggttgctccatgacctcggcctaggccaaggcgtggtggctgtc

SEQ ID NO: 15261 - DNA, 119 bp, homo sapiens
tggtggcctggcctgaccacggttgctccatgacctcggcctaggccaaggcgtggtggctgtcaccaggcacgtccccggttctcgggttgggccgaggagggggcccgggagggcgg

SEQ ID NO: 15262 - DNA, 119 bp, homo sapiens
tggctgtcaccagggcacgtccccggttctcgggttgggccgaggagggggcccgggagggcggcaggccaggctggcggccaggccctgtccagagcctgtgcatgttccttggccag

SEQ ID NO: 15263 - DNA, 119 bp, homo sapiens
gagggcggcaggctcaggctggcggccaggccctgtccagagcctgtgcatgttccttggccagcagcccagggacgcctcctccagggcgaagccatctgcgaaggtgggagcaaagg

SEQ ID NO: 15264 - DNA, 119 bp, homo sapiens
ttggccagcagccgcagggacgcctcctccagggcgaagccatctgcgaaggtgggagcaaaggcatgagcccgaaggacgcttgcagccccgggcccgggcccaggaggcgggggagg

SEQ ID NO: 15265 - DNA, 119 bp, homo sapiens
agcaaaggcatgaggcccgaaggacgcttgcagccccgggcccgggcccaggaggcgggggaggcctggacggccggcggtccggggcccaaccagggctccaggggcagcgacatggc

SEQ ID NO: 15266 - DNA, 119 bp, homo sapiens
gggggaggcctggcacggccggcggtccggggcccaaccagggctccaggggcagcgacatggccgggggcgggcgaacggcagcgctggggcctcggggagtctcggagctgccacgg

SEQ ID NO: 15267 - DNA, 119 bp, homo sapiens
gacatggccggggggcgggcgaacggcagcgctggggcctcggggagtctcggagctgccacggcacccagcctgactccagccgctcctggcggcgccacttggcccggcggttctgg

SEQ ID NO: 15268 - DNA, 119 bp, homo sapiens
cctcacctgcacgcgcacctcaggtaggtgcaccttggctgccagctcctcacggctgtacacatccggtagtgagaggcctcgaacgcccgctccagctggtgcagctggtaggtggt

SEQ ID NO: 15269 - DNA, 119 bp, homo sapiens
gtacacatccgggtagtgagaggcctcgaacgcccgctccagctggtgcagctggtaggtggtgaaggtgtgcggttcctccggtgcttcttcttgggggcctcctcgcccggccccag

SEQ ID NO: 15270 - DNA, 119 bp, homo sapiens
ggtggtgaaggtggtgcggttcctccggtgcttcttcttgggggcctcctcgcccggccccagacccccccctcggttgccggcccctcgcccgggctcaggaacatggctcccacctg

SEQ ID NO: 15271 - DNA, 119 bp, homo sapiens
ctgtacctcttctgatcgcaggaggctggcagattcccagtggatacggtgggtgatcttggagctgcgctgggcagttggagggacacatcaaggttcagttcctggtggtcaggggc

SEQ ID NO: 15272 - DNA, 119 bp, homo sapiens
gggtgatcttggagctgcggctgggcagttggagggacacatcaaggttcagttcctggtggtcagggggtccttttggtattgagccaaggcttggaacaccatgaaggtggcctaga

SEQ ID NO: 15273 - DNA, 119 bp, homo sapiens
cctcacctgccctctgggcggtctgctggccactgctgctcgtgaaggtcagccctgcgtcggagaagaaccggcgtaatccttcccactgcccggggtgcagccgatgtctgccttct

SEQ ID NO: 15274 - DNA, 119 bp, homo sapiens
tctgctggccactgctgctcgtgaaggtcagccctgcgtcggagaagacaccggcgtaatccttcccacgcccggggtgcagccgatgtctgccttctccaccacgtcccagatctgcg

SEQ ID NO: 15275 - DNA, 119 bp, homo sapiens
acttaccgagcccacgcaggagtccttgacgtccacccacacggagtcggccaccacctccctctggccctggcaccgatcagcgtgtagtacgccaccaggcggaaggaagggatgaa

SEQ ID NO: 15276 - DNA, 119 bp, homo sapiens
ggccaccacctccctctggccgctggcaccgatcagcgtgtagtacgccaccaggcggaaggaagggataagtcggtggtgatggacaggggcagcaccaccaggtcctggccgggctc

SEQ ID NO: 15277 - DNA, 119 bp, homo sapiens
caccaggcggaaggaagggatgaagtcggtggtgatggacaggggcagcaccaccaggtcctggccgggtctcgcacctggcgtcccgccttcaacagcctgcccttgttcatgatctg

SEQ ID NO: 15278 - DNA, 119 bp, homo sapiens
actcacatgggactccccagagccagggggaggtgggttagtagcaggagcagcaggctgggacctgagtgggtcccatggtgctgggacagtgcagggtcagagggacagagggacag

SEQ ID NO: 15279 - DNA, 119 bp, homo sapiens
gggaggtgggttagtagcaggagcagcaggctgggacctgaggtgggtcccatggtgctgggacagtgcgggtcagagggacagagggacagagggagaggatggggaggagtgagcag

SEQ ID NO: 15280 - DNA, 119 bp, homo sapiens
ggcctgtggttgggtgggatgggggtgtgggtgggggctggagttaagcgtgagcccctctttccatacctgtccctggatacaccagcaagacctggtctgactggagttgagaaact

SEQ ID NO: 15281 - DNA, 119 bp, homo sapiens
ggatgggggtgtgggtgggggctggagttaagcgtgagcccctctttccataccctgtccctggatacacagcaagacctggtctgactggagttgagaaactcgtttaaaacaggcag

SEQ ID NO: 15282 - DNA, 119 bp, homo sapiens
gagcagctggtgtttctgtccctctgattatctgggcttcctgctccccctaaccctggagggtggggtggggtgaaattagatgcaaggaactctggggccctctggctgttcaatcc

SEQ ID NO: 15283 - DNA, 119 bp, homo sapiens
attatctgggcttcctgctccccctaaccctggagggtggggtgggggtgaaattagatgcaaggaacttggggccctctggctgttcaatccaaccctcccacccccccgaccaaaaa

SEQ ID NO: 15284 - DNA, 119 bp, homo sapiens
cgcgctgggcggcggcggcggcggccctcgggctggctgcgctagctgcggcgccgcgacccccgcccacccctgcttcccgcgtctctccgcgcccgcccgcccgggaacctcagccc

SEQ ID NO: 15285 - DNA, 119 bp, homo sapiens
agctgcggcgccgcgacccccgcccagcccctgcttcccgcgtctctccgcgcccgcccgcccgggaactcagcccaagatctctgccgctgtctgtgacgcccccgcagcccgccgct

SEQ ID NO: 15286 - DNA, 119 bp, homo sapiens
ctctccgcgcccgcccgcccgggaacctcagcccaagatctctgccgctgtctgtgacgcccccgcagccgccgctcattggcctaggccgccctgactgacggctcagcgccgcctcc

SEQ ID NO: 15287 - DNA, 119 bp, homo sapiens
gccgctgtctgtgacgcccccgcagcccgccgctcattggcctaggccgccctgactgacggctcagcgcgcctcccattggccctcccgcgaccttcccgcgccactataggctctca

SEQ ID NO: 15288 - DNA, 119 bp, homo sapiens
gctgacactagaggtggggttagcgcttggaagcaccgaccaacgtgagcgcaacgcggcagggacaccgaccccggcggcgcccagcccctcggattgccagtcactgctcgctttgg

SEQ ID NO: 15289 - DNA, 119 bp, homo sapiens
acgcggcagggacacctgaccccggcggcgcccagcccctcggattgccagtcactgctcgctttggggacggaggtgcccagtcctgcggggcacccgacgtcctgtcgccgacaggg

SEQ ID NO: 15290 - DNA, 119 bp, homo sapiens
gttggatctcccgagcgctaacattccagaactcggatggggcgaaggggagggagggatgggccaccccacgtgacctccccgcgtggagccccgcctaccactgatccagggggtgg

SEQ ID NO: 15291 - DNA, 119 bp, homo sapiens
gagggatgggccacccacacgtgacctccccgcgtggagccccgcctaccactgatccagggggtggcactccggccgggacgagcggggtgggcgggtcctaggaaaccctacccggc

SEQ ID NO: 15292 - DNA, 119 bp, homo sapiens
gatccagggggtggcagctccggccgggacgagcggggtgggcgggtcctaggaaaccctacccggccgccttggcagcgcctaaggcggagcgcgcggctctgcagcctgcttgcccc

SEQ ID NO: 15293 - DNA, 119 bp, homo sapiens
aaaccctacccggccgcccttggcagcgcctaaggcggagcgcgcggctctgcagcctgcttgccccgggttggcacccacggaggatggggaccgcaccctcagcttcgcagggagcc

SEQ ID NO: 15294 - DNA, 119 bp, homo sapiens
agcctgcttgccccggagttggcacccacggaggatggggaccgcaccctcagcttcgcagggagccacgtggaggccagggcggtgcagagacacgacgtgtgactcggagtgcgcct

SEQ ID NO: 15295 - DNA, 119 bp, homo sapiens
cttcgcagggagccaccgtggaggccagggcggtgcagagacacgacgtgtgactcggagtgcgcctgggaggatggacgagggagcgggggaccgctaacggggctccctctgcgcgc

SEQ ID NO: 15296 - DNA, 119 bp, homo sapiens
ctcggagtgcgcctggggaggatggacgagggagcgggggaccgctaacggggctccctctgcgcgcccgtccgcagaggcgcacgtcgagggtcccgggcgggctccgtggacgttgg

SEQ ID NO: 15297 - DNA, 119 bp, homo sapiens
ctccctctgcgcgccccgtccgcagaggcgcacgtcgagggtcccgggcgggctccgtggacgttggcgtagcgccgagcgagtcacggaccatgaagagcgttcgtgccgcgcggccc

SEQ ID NO: 15298 - DNA, 119 bp, homo sapiens
tccgtggacgttggcggtagcgccgagcgagtcacggaccatgaagagcgttcgtgccgcgcggcccaagccgggatgggggttagccacatcctgccgcgctgagggggaggctaacg

SEQ ID NO: 15299 - DNA, 119 bp, homo sapiens
gggcccagccggagcccaccgcgatggcgagggaggagtgcaaggcgctgctggacgggctcaacaagagactgcgtgctaccaccacctggtgctgaccgtcggtggctcggcggact

SEQ ID NO: 15300 - DNA, 119 bp, homo sapiens
cgggctcaacaagacgactgcgtgctaccaccacctggtgctgaccgtcggtggctcggcggactcgcaaacctgcggcaggagctgcaaaagacgcgccagaaggcgcaggagctggc

SEQ ID NO: 15301 - DNA, 119 bp, homo sapiens
tcggcggactcgcagaacctgcggcaggagctgcaaaagacgcgccagaaggcgcaggagctggcggtgccacctgcgcccggctgactgctgtgctgcgcgaccggggcctggccgcc

SEQ ID NO: 15302 - DNA, 119 bp, homo sapiens
aggagctggcggtgtccacctgcgcccggctgactgctgtgctgcgcgaccggggcctggccgccgacggcgcgccgagttcgagcggctctgggtggccttctcgggctgcctggacc

SEQ ID NO: 15303 - DNA, 119 bp, homo sapiens
cctggccgccgacgagcgcgccgagttcgagcggctctgggtggccttctcgggctgcctggacctgctgaagcggacatgcgacgcgcgctggagctgggcgccgcgttcccgctgca

SEQ ID NO: 15304 - DNA, 119 bp, homo sapiens
tgcctggacctgctggaagcggacatgcgacgcgcgctggagctgggcgccgcgttcccgctgcacgcgcgcggcggccgctggtgcgcacaggtgtggctggcgcctcctccggcgtg

SEQ ID NO: 15305 - DNA, 119 bp, homo sapiens
tcccgctgcacgcgccgcggcggccgctggtgcgcacaggtgtggctggcgcctcctccggcgtggcgggcgcgcgctgagcacccgcagcctgcggctcgaggcggagggcgacttcg

SEQ ID NO: 15306 - DNA, 119 bp, homo sapiens
ctccggcgtggcggcgcgcgcgctgagcacccgcagcctgcggctcgaggcggagggcgacttcgacgtgcggacctgcgggagctggagcgcgaggtccttcaggtgggcgagatgat

SEQ ID NO: 15307 - DNA, 119 bp, homo sapiens
ggcgacttcgacgtcgcggacctgcgggagctggagcgcgaggtccttcaggtgggcgagatgatcgacacatggagatgaaggtcaacgtgccccgctggaccgtgcaagcccggcag

SEQ ID NO: 15308 - DNA, 119 bp, homo sapiens
gcgagatgatcgacaacatggagatgaaggtcaacgtgccccgctggaccgtgcaagcccggcaggcgggggcgccgagctcctgtccacggtcagcgccggcccctcctcggtcgtgt

SEQ ID NO: 15309 - DNA, 119 bp, homo sapiens
agcccggcaggcggcgggcgccgagctcctgtccacggtcagcgccggcccctcctcggtcgtgtccttcaggagcgcggggggggttgcgaccccaggaaggccctggccgccatcct

SEQ ID NO: 15310 - DNA, 119 bp, homo sapiens
tcggtcgtgtccttgcaggagcgcggggggggttgcgaccccaggaaggccctggccgccatccttttcgcgccgtgctgctggcggctgtggccctagccgtgtgcgtggcgaagctg

SEQ ID NO: 15311 - DNA, 119 bp, homo sapiens
ccgccatccttttcggcgccgtgctgctggcggctgtggccctagccgtgtgcgtggcgaagctgagctacggacacccgacggccgcctgctgctgccgctccctcccctgagaaaag

SEQ ID NO: 15312 - DNA, 119 bp, homo sapiens
acacaggatgccaggccaaggtggagcaagcggtggagacagagccggagcccgagctgcgccagcagacgagtggcagagcggccagcgctgggaactggcactgggtcgcttttggg

SEQ ID NO: 15313 - DNA, 119 bp, homo sapiens
gagccggagcccgagctgcgccagcagaccgagtggcagagcggccagcgctgggaactggcactgggtgcttttgggattacctgcgctgggtgcagacactgtctgagcaggtgcag

SEQ ID NO: 15314 - DNA, 119 bp, homo sapiens
cggccagcgctgggaactggcactgggtcgcttttgggattacctgcgctgggtgcagacactgtctgacaggtgcaggaggagctgctcagctcccaggtcacccaggaactgaggtg

SEQ ID NO: 15315 - DNA, 119 bp, homo sapiens
ccgcagggcgctgatggacgagaccatgaaggagttgaaggcctacaaatcggaactggaggaacaactaccccggtggcggaggagacgcgggcacggctgtccaaggagctgcaggc

SEQ ID NO: 15316 - DNA, 119 bp, homo sapiens
ggaggaacaactgaccccggtggcggaggagacgcgggcacggctgtccaaggagctgcaggcggcgcagcccggctgggcgcggacatggaggacgtgtgcggccgcctggtgcagta

SEQ ID NO: 15317 - DNA, 119 bp, homo sapiens
gcaggcggcgcaggcccggctgggcgcggacatggaggacgtgtgcggccgcctggtgcagtaccgcgggaggtgcaggccatgctcggccagagcaccgaggagctgcgggtgcgcct

SEQ ID NO: 15318 - DNA, 119 bp, homo sapiens
gcagtaccgcggcgaggtgcaggccatgctcggccagagcaccgaggagctgcgggtgcgcctcgcctccacctgcgcaagctgcgtaagcggctcctccgcgatgccgatgacctgca

SEQ ID NO: 15319 - DNA, 119 bp, homo sapiens
gcgcctcgcctcccacctgcgcaagctgcgtaagcggctcctccgcgatgccgatgacctgcagaagcgctggcagtgtaccaggccggggcccgcgagggcgccgagcgcggcctcag

SEQ ID NO: 15320 - DNA, 119 bp, homo sapiens
cctgcagaagcgcctggcagtgtaccaggccggggcccgcgagggcgccgagcgcggcctcagcgccatcgcgagcgcctggggcccctggtggaacagggccgcgtgcgggccgccac

SEQ ID NO: 15321 - DNA, 119 bp, homo sapiens
cctcagcgccatccgcgagcgcctggggcccctggtggaacagggccgcgtgcgggccgccactgtgggtccctggccggccagccgctacaggagcgggcccaggcctggggcgagcg

SEQ ID NO: 15322 - DNA, 119 bp, homo sapiens
cgccactgtgggctccctggccggccagccgctacaggagcgggcccaggcctggggcgagcggctgcggcgcggatggaggagatgggcagccggacccgcgaccgcctggacgaggt

SEQ ID NO: 15323 - DNA, 119 bp, homo sapiens
cgagcggctgcgcgcgcggatggaggagatgggcagccggacccgcgaccgcctggacgaggtgaaggacaggtggcggaggtgcgcgccaagctggaggagcaggcccagcagatacg

SEQ ID NO: 15324 - DNA, 119 bp, homo sapiens
cgaggtgaaggagcaggtggcggaggtgcgcgccaagctggaggagcaggcccagcagatacgcctgcagccgaggccttccaggcccgcctcaagagctggttcgagcccctggtgga

SEQ ID NO: 15325 - DNA, 119 bp, homo sapiens
gatacgcctgcaggccgaggccttccaggcccgcctcaagagctggttcgagcccctggtggaagacatcagcgccagtgggccgggctggtggagaaggtgcaggctgccgtgggcac

SEQ ID NO: 15326 - DNA, 119 bp, homo sapiens
ggtggaagacatgcagcgccagtgggccgggctggtggagaaggtgcaggctgccgtgggcaccagcgcgcccctgtgcccagcgacaatcactgaacgccgaagcctgcagccatgcg

SEQ ID NO: 15327 - DNA, 119 bp, homo sapiens
gggcaccagcgccgcccctgtgcccagcgacaatcactgaacgccgaagcctgcagccatgcgaccccagccaccccgtgcctcctgcctccgcgcagcctgcagcgggagaccctgtc

SEQ ID NO: 15328 - DNA, 119 bp, homo sapiens
catgcgaccccacgccaccccgtgcctcctgcctccgcgcagcctgcagcgggagaccctgtccccgcccagccgtcctcctggggtggaccctagtttaataaagattcaccaagttt

SEQ ID NO: 15329 - DNA, 119 bp, homo sapiens
tcccccaccttggccgggattaccctccgagttccaggccatgacaaatgacatcactcccggcccaggttaaaatctccccatgtgaggggatgtgtttccttcagcctctgctgtct

SEQ ID NO: 15330 - DNA, 119 bp, homo sapiens
cggcccaggcttaaaatctccccatgtgaggggatgtgtttccttcagcctctgctgtctggccgctcttctaggtcctgggccacgggagagccccgtccctcctttctgaaggtgag

SEQ ID NO: 15331 - DNA, 119 bp, homo sapiens
ccccaggcgcccccaggaagcagcggcgggagcgcaccaccttcacccggagccaactggaggagctggggcactgtttgccaagacccagtacccagacgtctatgcccgtgaggagg

SEQ ID NO: 15332 - DNA, 119 bp, homo sapiens
cacccggagccaactggaggagctggaggcactgtttgccaagacccagtacccagacgtctatgcccggaggaggtggctctgaagatcaatctgcctgagtccagggttcaggtggg

SEQ ID NO: 15333 - DNA, 119 bp, homo sapiens
ctgcaggcagcagctgtcggaggaggagctggagcggctggaggaggcctgcgacatggcgctggagctaacgcctccaagcaccgcatctacgagtatgtggagtcccggatgtcctt

SEQ ID NO: 15334 - DNA, 119 bp, homo sapiens
ggagcggctggaggaggcctgcgacatggcgctggagctgaacgcctccaagcaccgcatctacgagtagtggagtcccggatgtccttcatcgcacccaacctgtccatcattatcgg

SEQ ID NO: 15335 - DNA, 119 bp, homo sapiens
gctggagctgaacgcctccaagcaccgcatctacgagtatgtggagtcccggatgtccttcatcgcaccaacctgtccatcattatcggggcatccacggccgccaagatcatgggtga

SEQ ID NO: 15336 - DNA, 119 bp, homo sapiens
ccccaggtgggctacgaactgaaggatgagatcgagcgcaaattcgacaagtggcaggagccgccgccttgaagcaggtgaagccgctgcctgcgcccctggatggacagcggaagaag

SEQ ID NO: 15337 - DNA, 119 bp, homo sapiens
tgaaggatgagatcgagcgcaaattcgacaagtggcaggagccgccgcctgtgaagcaggtgaagccgcgcctgcgcccctggatggacagcggaagaagcgaggcggccgcaggtgag

SEQ ID NO: 15338 - DNA, 119 bp, homo sapiens
ccctagatcgaggaggacgcctaccaggaggacctgggattcagcctgggccacctgggcaagtcgggcgtgggcgtgtgcggcagacacaggtaaacgaggccaccaaggccaggatc

SEQ ID NO: 15339 - DNA, 119 bp, homo sapiens
ctaccaggaggacctgggattcagcctgggccacctgggcaagtcgggcagtgggcgtgtgcggcagaccaggtaaacgaggccaccaaggccaggatctccaagacgctgcaggtatg

SEQ ID NO: 15340 - DNA, 119 bp, homo sapiens
tcttaccttcaggtcgccggggcaccgccccctcctgctctgtgggactgggaggccgggctggtcgtgagtacagcagcggaagccacaggtcgggcagggaggagtggggggccctg

SEQ ID NO: 15341 - DNA, 119 bp, homo sapiens
gctggtcgtggagtacagcagcggaagccacaggtcgggcagggaggagtggggggccctgcgtgggtagctgatgccgcctcaggttgcccaggctgctgcaggcaaaggggcagtgg

SEQ ID NO: 15342 - DNA, 119 bp, homo sapiens
tgcgtgggtacgctgatgccgcctcaggttgcccaggctgctgcaggcaaaggggcagtggggacagcgtagggcttctcgccagtgtgggtgcgggtatgtcgtgtcaggttgacgag

SEQ ID NO: 15343 - DNA, 119 bp, homo sapiens
ggggacagcggtagggcttctcgccagtgtgggtgcgggtatgtcgtgtcaggttgacgagctgggctgggcgtaggggcagcggccacagcggaacggcttctctccgctgtgtgtct

SEQ ID NO: 15344 - DNA, 119 bp, homo sapiens
agctgggctgaggcgtaggggcagcggccacagcggaacggcttctctccgctgtgtgtctgcatgtgcgcttcaggtggctcgagtagtgggacacgaaggtgcagaggcggcatgag

SEQ ID NO: 15345 - DNA, 119 bp, homo sapiens
ctgcatgtgccgcttcaggtggctcgagtagtgggacacgaaggtgcagaggcggcatgagtacagtagcgtgggggcagcaggggccccccacccggccctcctgccccacaacacgg

SEQ ID NO: 15346 - DNA, 119 bp, homo sapiens
ggcccctcacctgtcggccccccacacagctggcaggctgggcctggcctctcacccctggcctcccctgacccctggctggctcctcaacttcactctccgcacttagtgcccggccg

SEQ ID NO: 15347 - DNA, 119 bp, homo sapiens
ggcctcccctggacccctggctggctcctcaacttcactctccgcacttagtgcccggccgcccccagatcatcgtcgctcagcccatagggaagcccaggcctggcccccagagagtc

SEQ ID NO: 15348 - DNA, 119 bp, homo sapiens
ccttacctgttctggccgagctgggattcataagaggtgctggtggggtccaaggtgggaggctgcggtggccacctggctggcggtcagaagctgtcctcctgaggaaaggcagaggg

SEQ ID NO: 15349 - DNA, 119 bp, homo sapiens
gagctgggattcataagaggtgctggtggggtccaaggtgggaggctgcggtcggccacctggctggcgtcagaagctgtcctcctgaggaaaggcagagggttgagggcacacagagc

SEQ ID NO: 15350 - DNA, 119 bp, homo sapiens
tgggttggggggctggggaccttgcactgagcaggtgcactctcggggggagggttgggcaacttgggcggtgcggtggggaagttcgccgctttgtggtgggtgggcttagcaccctg

SEQ ID NO: 15351 - DNA, 119 bp, homo sapiens
ggcaacttgggctggtgcggtggggaagttcgccgctttgtggtgggtgggcttagcaccctggggctccaggtgggctggggggcgtctgcacagcagaggggcttggctgggcaggt

SEQ ID NO: 15352 - DNA, 119 bp, homo sapiens
accctggggctcacaggtgggctggggggcgtctgcacagcagaggggcttggctgggcaggtctgtaaaggagggaaggctccggcgcctcttgtctgcttgaggcacccagtgtgtc

SEQ ID NO: 15353 - DNA, 119 bp, homo sapiens
gcaggtctgtaagaggagggaaggctccggcgcctcttgtctgcttgaggcacccagtgtgtcctcgtggagaggcctttctgcccacaggggggcttctctctcggctctgccttggt

SEQ ID NO: 15354 - DNA, 119 bp, homo sapiens
tgtgtcctcgtgggagaggcctttctgcccacaggggggcttctctctcggctctgccttggtctggccggctggactctgaggtcctgttttgtccagatggagggccggagtggtgc

SEQ ID NO: 15355 - DNA, 119 bp, homo sapiens
cttggtctggccaggctggactctgaggtcctgttttgtccagatggagggccggagtggtgccaggcgtggccttccggggctgcctgtagaggctggtggccttctctgcctgactc

SEQ ID NO: 15356 - DNA, 119 bp, homo sapiens
tggtgccaggcgatggccttccggggctgcctgtagaggctggtggccttctctgcctgactccaagtccacccttcacctcggggctttggctggtggctggtgggctgctcaggtcc

SEQ ID NO: 15357 - DNA, 119 bp, homo sapiens
tgactccaagtcccacccttcacctcggggctttggctggtggctggtgggctgctcaggtccagggctgcttcctgggctggcagctgctcctgccactccctggccctgtgctgtga

SEQ ID NO: 15358 - DNA, 119 bp, homo sapiens
aggtccagggctggcttcctgggctggcagctgctcctgccactccctggccctgtgctgtgaggcttgtcaggctggcggtgctcttgctgggcagcaagtccagggggctcacagag

SEQ ID NO: 15359 - DNA, 119 bp, homo sapiens
gcacagtccagggcagttctcgggtactcaacacccctcagctcaccccacctcactctcccgcgcgcgcccagtgagtactgggctcgctcggggcgaccccccgttgggggctccta

SEQ ID NO: 15360 - DNA, 119 bp, homo sapiens
caccccacctcactctcccgcgcgcggcccagtgagtactgggctcgctcggggcgaccccccgttggggctcctacctgtgcggccgcgctgcgctccgggcccgggcagcgagggga

SEQ ID NO: 15361 - DNA, 119 bp, homo sapiens
ctcgctcggggcgaccccccgttgggggctcctacctgtgcggccgcgctgcgctccgggcccgggcaggaggggagtgcgcaggggagggcagccccgtgggtctgatctggcgaagt

SEQ ID NO: 15362 - DNA, 119 bp, homo sapiens
ccgcgctgcgctccgggcccgggcagcgaggggagtgcgcaggggagggcagccccgtgggtctgatctgcgaagtccggcagcggccgcggcggcaggaggaggaggagaaagggagg

SEQ ID NO: 15363 - DNA, 119 bp, homo sapiens
agagagctgagggaggcgcgagcgctgagcccagcgttgcgagcccggcggtagagcgcgcagcgcagcaggtccgcgccccctgctccaggggccctctttgccgcccccgcttgccc

SEQ ID NO: 15364 - DNA, 119 bp, homo sapiens
agcgcgcagcgcagcgaggtccgcgccccctgctccaggggccctctttgccgcccccgcttgccctccttgccagctcctcgtttcccagactcgcggggaccccacgccagagagga

SEQ ID NO: 15365 - DNA, 119 bp, homo sapiens
ccccgcttgccctcccttgccagctcctcgtttcccagactcgcggggaccccacgccagagaggacacttgacatgtgatgtcctggatgcgcttcagccttggggatgctcccactc

SEQ ID NO: 15366 - DNA, 119 bp, homo sapiens
tattaccgatgccccagcgggctgagccactttctcctcctcttcgtcctccaagatcgcctccgctgcgccagggcctttaaggggtcttcgcgttcgtactgggcgacccgcgctcc

SEQ ID NO: 15367 - DNA, 119 bp, homo sapiens
gcctccgctgccgccagggcctttaaggggtcttcgcgttcgtactgggcgacccgcgctccagtgatggatttaccggggtctggagactggaggccaccagcttcgccactcggtgg

SEQ ID NO: 15368 - DNA, 119 bp, homo sapiens
gtgggaggtggccatcgccccgcctccgaggcctgagcgcctgcgctggcccgggacgggaaagctggtcggcccctggcaacccgggggcgcctagctagggagccggttgctatggg

SEQ ID NO: 15369 - DNA, 119 bp, homo sapiens
ctctaccttataatccaaggctgagagtttttccagtcttttgtttacatcagaagactccatcttcttgtaaactgaataaaacatagtttgttttgtgccaaaaatgataagatgat

SEQ ID NO: 15370 - DNA, 119 bp, homo sapiens
agtttttccagtcttttgtttacatcagaagactccatcttcttggtaaactgaataaaacatagtttgtttgtgccaaaaatgataagatgataaaactgtctgtgagaagagctaaa

SEQ ID NO: 15371 - DNA, 119 bp, homo sapiens
aggaggctgcagcggcggcggcggcgaacgtggacgacgtagtggtcgtggaggaggtggaggaagaggggggcgggagttggactccgactctcactacgggccccagcatctggaaa

SEQ ID NO: 15372 - DNA, 119 bp, homo sapiens
ggtcgtggaggaggtggaggaagaggcggggcgggagttggactccgactctcactacgggccccagcactggaaagtatagacgacgaggaggacgaggaggccaaggcctggctgca

SEQ ID NO: 15373 - DNA, 119 bp, homo sapiens
tccgactctcactacgggccccagcatctggaaagtatagacgacgaggaggacgaggaggccaaggccggctgcaggcgcaccccggcaggattttgcctccgctgtcgcccccgcag

SEQ ID NO: 15374 - DNA, 119 bp, homo sapiens
acgaggaggacgaggaggccaaggcctggctgcaggcgcaccccggcaggattttgcctccgctgtcgccccgcagcaccgctactcggagggcgagcggacctccctggagaaggtga

SEQ ID NO: 15375 - DNA, 119 bp, homo sapiens
ctttaccatgaccgggaagatgatggcagccaccgtggatttgaggatccagagcaccgccaggcagagatctgcaccagggtgaagaggtggatccggcgcagcggcacgtgccgcag

SEQ ID NO: 15376 - DNA, 119 bp, homo sapiens
ccgtggatttgaggatccagagcaccgccaggcagaggatctgcaccagggtgaagaggtggatccggccagcggcacgtgccgcaggaaggcatggtccggctggtgcttggctggca

SEQ ID NO: 15377 - DNA, 119 bp, homo sapiens
cagaggatctgcaccagggtgaagaggtggatccggcgcagcggcacgtgccgcaggaaggcatggtccgctggtgcttggctggcatcaggaagagcttgcagcgttcccagaactag

SEQ ID NO: 15378 - DNA, 119 bp, homo sapiens
tcctacctgactcccagaaactggggctgctccccaggggcactggtctctgtctccatcttgaggctgcgatgtgggcgatggagatgaccgtggcagccacgtaccaggggagcccc

SEQ ID NO: 15379 - DNA, 119 bp, homo sapiens
aggggcactggtctctgtctccatcttgaggctgtcgatgtgggcgatggagatgaccgtggcagccactaccaggggagccccataaaggagcacaaagccatgaggatgcccaccca

SEQ ID NO: 15380 - DNA, 119 bp, homo sapiens
cgatgtgggcgatggagatgaccgtggcagccacgtaccaggggagccccataaaggagcacaaagccagaggatgcccacccagaacaggtccagatggtagccggcagccttctgca

SEQ ID NO: 15381 - DNA, 119 bp, homo sapiens
acctacttgctgaagtcgaagaggagcttctcaaagatgaggatgggccccgtgctgctgagaatgatggaggctgtcccgagaagaggcagaacaaggagccagccatggcagtgccc

SEQ ID NO: 15382 - DNA, 119 bp, homo sapiens
gcttctcaaagatgaggatgggccccgtgctgctgagaatgatgagaggctgtcccgagaagaggcagacaaggagccagccatggcagtgcccaggaagctctccatcactccctggg

SEQ ID NO: 15383 - DNA, 119 bp, homo sapiens
cctcacctatgatctgtggtaaggagccactgtccaaatccagcagcaccgtccccgtctgcaggcaggacggagctcgaagaggctgtgcagggatagtgtggacacgtggggcttgc

SEQ ID NO: 15384 - DNA, 119 bp, homo sapiens
ccccgtctgcaggcaggtacggagctcgaagaggctgtgcagggatagtgtggacacgtggggcttgctcagcgttcgccgccttcctctaccttttcttcaaactttatccacctgga

SEQ ID NO: 15385 - DNA, 119 bp, homo sapiens
acgcaccgccttgtactcgtattgcagactacgggcggttacatccgccatggccgcggctgctcggagcttcagaccaccacgcctccctaccgcaagctgcaaacggccgcagatct

SEQ ID NO: 15386 - DNA, 119 bp, homo sapiens
gcggttacatccgccatggccgcggctgctcggaggcttcagaccaccacgcctccctaccgcaagctgaaacggccgcagatctctgctcccgccgcgccggaacgacgcaggaaaga

SEQ ID NO: 15387 - DNA, 119 bp, homo sapiens
ggcttcagaccaccacgcctccctaccgcaagctgcaaacggccgcagatctctgctcccgccgcgccgaacgacgcaggaaagacgcactggggaaggaaaagaaacgggttcccttc

SEQ ID NO: 15388 - DNA, 119 bp, homo sapiens
ttccaggctgtcgcgcctcatcttcttgctgcgcaggtgggctgccaggcatgtgcaccaccaggaccaggaccggactcttttcctgatcgtttccgtggagccgagcttaaggaggt

SEQ ID NO: 15389 - DNA, 119 bp, homo sapiens
ggtgggctgccaggcatgtgcaccaccaggaccagggaccggactcttttcctgatcgtttccgtggagcgagcttaaggaggtgtccagccaagaaagcaatgcccaggcaaatgtgg

SEQ ID NO: 15390 - DNA, 119 bp, homo sapiens
ggaccggactcttttcctgatcgtttccgtggagccgagcttaaggaggtgtccagccaagaaagcaatcccaggcaaatgtgggcagccaggagccagcagacagagggagaaggtaa

SEQ ID NO: 15391 - DNA, 119 bp, homo sapiens
ccatacctgttgcttcagctcctgattgcggcgccgcagggcctggagaggatctcgctgtcgtctcgcagcatctccctggctgcggtgctctgattgctccagttgccagggaaacc

SEQ ID NO: 15392 - DNA, 119 bp, homo sapiens
ctcgctgtcgtctcgccagcatctccctggctgcggtgctctgattgctccagttgccagggaaaccaacggcggcgccagaaggtgacgccatcgatgtgcgcccgcctcccagcccc

SEQ ID NO: 15393 - DNA, 119 bp, homo sapiens
ctcggcactcactgcccgggccgcccggacagggagcttcgctggcgcgcttggccggcgacaggacagttcgggacgtccatctgtccatccgtccggagagaaattacagatccgca

SEQ ID NO: 15394 - DNA, 119 bp, homo sapiens
cttcgctggcgcgcttggccggcgacaggacaggttcgggacgtccatctgtccatccgtccggagagaattacagatccgcagccccgggatggggccggccccgctgccgctgctgc

SEQ ID NO: 15395 - DNA, 119 bp, homo sapiens
cgggacgtccatctgtccatccgtccggagagaaattacagatccgcagccccgggatggggccggcccgctgccgctgctgctgggcctcttcctccccgcgctctggcgtagaggtg

SEQ ID NO: 15396 - DNA, 119 bp, homo sapiens
ctcaccttcaattcctgcgagtccatggctgccccgaggccgggccgcggggctctggggattgtctcgcgcagcctaaaggaagacgcagaattcagctcccctagcctcccggagcg

SEQ ID NO: 15397 - DNA, 119 bp, homo sapiens
ccgcggggctctggggattgtctcgccgcagcctaaaggaagacgcagaattcagctcccctagcctccggagcgctctagcgccccgggccccagcgggaggggcggggtcgcgccgc

SEQ ID NO: 15398 - DNA, 119 bp, homo sapiens
gctcctacagcagtgcctgcacgcccggctgcaaattcgcccagccaatggggacgttgcggcccagtggtggaggtccaaagaggactggtgatctacgtgtgctttttcaagggagc

SEQ ID NO: 15399 - DNA, 119 bp, homo sapiens
ggctgcaaattcgcccagccaatggggacgttgcggcccagtgggtggaggtccaaagaggactggtgactacgtgtgctttttcaagggagctgataaagaacttcttcccaaaatgg

SEQ ID NO: 15400 - DNA, 119 bp, homo sapiens
actcacccgccgggcgctcgggctgaatgggccgccaccgcagtgctcgctcgctcagcaccacgtcacactgtccctcccgatctcgaagatgccccggagcagaatccgctcggccg

SEQ ID NO: 15401 - DNA, 119 bp, homo sapiens
agcaccacgtcacaactgtccctcccgatctcgaagatgccccggagcagaatccgctcggccgccgccccgtctgctgcggggacgttaacagcgccggaggcacagcggcagcctcc

SEQ ID NO: 15402 - DNA, 119 bp, homo sapiens
ctcggccgccgcctccgtctgctgcggggacgttaacagcgccggaggcacagcggcagcctccggggggcctcttcctcccggccgccctccagggcactcacccggttcctgcgcct

SEQ ID NO: 15403 - DNA, 119 bp, homo sapiens
ctgcgcctcctccagggcatggcggagtcgcaggctgggcccgagccaggggtccggggaggcctttgggaaggaggtggagggcgcggcagccccagctctagccgcgtccagcgctg

SEQ ID NO: 15404 - DNA, 119 bp, homo sapiens
gctcaccaggtggccctcctccagccgagcccccgagtcagtcctcatggtgctctccccgcggggctgcccggcgcaaccgccggcggcccgagcccagctccccgcgacgcagcggc

SEQ ID NO: 15405 - DNA, 119 bp, homo sapiens
gagtcagtcctcatggtgctctccccgcggggctgccccggcgcaaccgccggcggcccgagcccagctcccgcgacgcagcggcctccgggacctgtgggacgccggggcttcgtggc

SEQ ID NO: 15406 - DNA, 119 bp, homo sapiens
ctctagagaaaaagtgccaccaaacagcactttgaccaagacgctgacgctgctgcccttgctggctaaaatcgagaaaggagaggcattgccctggatgggaaaatcaagcacgagga

SEQ ID NO: 15407 - DNA, 119 bp, homo sapiens
ctttgaccaagacgctgacgctgctgcccttgctggctaacaatcgagaaaggagaggcattgccctggtgggaaaatcaagcacgaggacacaaaccttgcctccagcaccatgtgag

SEQ ID NO: 15408 - DNA, 119 bp, homo sapiens
accacctgctcactctgtcccttcgcctgctgctgggaccatgggggctggggccagtgctgaggagaacactccagggagctggaaaagaagctgaaagaggacgctgagaaggatgc

SEQ ID NO: 15409 - DNA, 119 bp, homo sapiens
gctgggaccatgggggctggggccagtgctgaggagaagcactccagggagctggaaaagaagctgaaaaggacgctgagaaggatgctcgaaccgtgaagctgctgcttctgggtagg

SEQ ID NO: 15410 - DNA, 119 bp, homo sapiens
ccgcaggatgttcgatgtgggcgggcagcgctcggagcgcaagaagtggatccactgcttcgagggcgtacctgcatcatcttcatcgcggcgctgagcgcctacgacatggtgctagt

SEQ ID NO: 15411 - DNA, 119 bp, homo sapiens
cgggcagcgctcggagcgcaagaagtggatccactgcttcgagggcgtgacctgcatcatcttcatcgcgcgctgagcgcctacgacatggtgctagtggaggacgacgaagtggtgcg

SEQ ID NO: 15412 - DNA, 119 bp, homo sapiens
ggaccgtagtgtctaccagccccagaaacatgggcttatggccacaggagttcagtggagcaagagcagggaggagagacgtggacaggtgcccaaagccagtcggagggcctgggctt

SEQ ID NO: 15413 - DNA, 119 bp, homo sapiens
ggcttatggccacaggagttcagtggagcaagagcaggggaggagagacgtggacaggtgcccaaagccgtcggagggcctgggctttctcagaaggtgatggagagtcttggaagccc

SEQ ID NO: 15414 - DNA, 119 bp, homo sapiens
gcagacctgcttgccgtcccgccggtgcttcacaagcgtcacctctccatagctccccttgcccacgaccgcaggtagcagtaggcggccaggggcatgttcccagcgctggcccagag

SEQ ID NO: 15415 - DNA, 119 bp, homo sapiens
ccatagctccccttgcccacgacccgcaggtagcagtaggcggccaggggcatgttcccagcgctggccagagtcgggatgcggcggcagcggcgggtagggcagcgggcggcaacaag

SEQ ID NO: 15416 - DNA, 119 bp, homo sapiens
ggggcatgttcccagcgctggcccagagtcgggatgcggcggcagcggcgggtagggcagcgggcggcacaagaagctcggttcatgcccgagagggggcagtgggggcggctgttgag

SEQ ID NO: 15417 - DNA, 119 bp, homo sapiens
ggcgggtagggcagcgggcggcaacaagaagctcggttcatgcccgagagggggcagtgggggcggctgtgaggcagccgggcccgggcgggattgctggggcccggcccgcgacgacg

SEQ ID NO: 15418 - DNA, 119 bp, homo sapiens
agagggggcagtgggggcggctgttgaggcagccgggcccgggcgggattgctggggcccggcccgcgagacgccgctgccatagcgatccgggccgggagcagttctgcgcatgctcc

SEQ ID NO: 15419 - DNA, 119 bp, homo sapiens
gccgcctccacctcggccgccgcaatggcgacggtcggggagcgcaggcctctgcccagtcctgaagtgtgctgggacagtcgtggaatctgtgggttgaggcttccaaacttcctggg

SEQ ID NO: 15420 - DNA, 119 bp, homo sapiens
tcggccgccgcaatggcgacggtcggggagcgcaggcctctgcccagtcctgaagtgatgctgggacagcgtggaatctgtgggttgaggcttccaaacttcctgggaaggacggtgag

SEQ ID NO: 15421 - DNA, 119 bp, homo sapiens
ttccctcccggcttttcctcccgacttatccactttaggggcgtctcggagtgccggaggcccccggggagagcggggtgccggtgtccgctccgggctcggatgggaagtggtgggag

SEQ ID NO: 15422 - DNA, 119 bp, homo sapiens
gggcgtctcggagtgccggaggcccccggggaagagcggggtgccggtgtccgctccgggctcggatggaagtggtgggaggagcgacccgggatgttcagtctgatggccagttgctg

SEQ ID NO: 15423 - DNA, 119 bp, homo sapiens
gggtgccggtgtccgctccgggctcggatgggaagtggtgggaggagcgacccgggatgttcagtctgaggccagttgctgcggctggttcaagcggtggcgggagcctgtcaggtagg

SEQ ID NO: 15424 - DNA, 119 bp, homo sapiens
aatatagaattcacattttatatagctctctcaaaaattaatttttattccttaagcattttaaaaacatttaaaaaatgttttgtaaatccaggtgtattttaacaattaaatgccta

SEQ ID NO: 15425 - DNA, 119 bp, homo sapiens
taagcattttaaaaacattttaaaaaatgttttgtaaatccaggtgtattttaacaattaaatgcctatttgttatatgttatacttttattcttaattctgaattttgacattttcac

SEQ ID NO: 15426 - DNA, 119 bp, homo sapiens
aacaattaaatgcctattttgttatatgttatacttttattcttaattctgaattttgacattttcacaaataaaaataatttatatcaatattctgtttctcttttcaattggtagat

SEQ ID NO: 15427 - DNA, 119 bp, homo sapiens
attttgacattttcacacaataaaaataatttatatcaatattctgtttctcttttcaattggtagattaaatgatttcctttgggtaataaaataggtaaagattttaaaatatgatt

SEQ ID NO: 15428 - DNA, 119 bp, homo sapiens
gacaggttcttgaaagtgatgtttattactaatgaaaatagtacagttgtatacataggaaaacatcctatttattcataaagactttaaaatgtttatttctaattatccaataataa

SEQ ID NO: 15429 - DNA, 119 bp, homo sapiens
ttgtatacataggaaaacatccttatttattcataaagactttaaaatgtttatttctaattatccaatataagactagaacatttcaataaaatagtacagttaacatgaatttattt

SEQ ID NO: 15430 - DNA, 119 bp, homo sapiens
atgtttatttctaattatccaataataagactagaacatttcaataaaatagtacagttaacatgaattatttgattcaaaccctggataaaatgtcattataaacaaggtgaaaaaga

SEQ ID NO: 15431 - DNA, 119 bp, homo sapiens
aaatagtacagttaacatgaatttatttgattcaaaccctggataaaatgtcattataaacaaggtgaaaagaaaagtccttcattatccatactcgatattaaacatatattactgta

SEQ ID NO: 15432 - DNA, 119 bp, homo sapiens
aatgtcattataaacaaggtgaaaaagaaaagtccttcattatccatactcgatattaaacatatattatgtatgtacactattgcttaagtatcatcacatagtcctgatatatgaaa

SEQ ID NO: 15433 - DNA, 119 bp, homo sapiens
cgcgcctcggcggaacgagttgcgcagcaggcgggccttgggcttcacctccaccgggatctcgcaggctcgccgccgcccgccccgtacgtgtcctcgatcacttccccgcccgcggg

SEQ ID NO: 15434 - DNA, 119 bp, homo sapiens
gggcttcacctccaccgggatctcgcaggcctcgccgccgcccgccccgtacgtgtcctcgatcacttcccgcccgcggggctcacgagcgacgaggcggtccccatggcgtccgttgc

SEQ ID NO: 15435 - DNA, 119 bp, homo sapiens
gcccgccccgtacgtgtcctcgatcacttccccgcccgcggggctcacgagcgacgaggcggtccccatgcgtccgttgccgctactacctagtgagtaccagcaggactgggcagcgg

SEQ ID NO: 15436 - DNA, 119 bp, homo sapiens
ggccaacgggcctcgagccgaggcagcagtgggaacgactcatcctttttccagccctggggcgtggctgggtcggggtcggggtcggggccggtgggggccccgcccccgtctcctgg

SEQ ID NO: 15437 - DNA, 119 bp, homo sapiens
aacgactcatcctttttccagccctggggcgtggctggggtcggggtcggggtcggggccggtgggggcccgcccccgtctcctggcctgcccccttcatgggccgcgatgatggcggc

SEQ ID NO: 15438 - DNA, 119 bp, homo sapiens
gctggggtcggggtcggggtcggggccggtgggggccccgcccccgtctcctggcctgcccccttcatggccgcgatgatggcggccctgtacccgagcacggacctctcgggcgcctc

SEQ ID NO: 15439 - DNA, 119 bp, homo sapiens
tctctgttttaggagttcacatatagttcagcatttattgtttaggagtataattttattttatctaaataatagtctattttttcttttgtattttgttataatcttaagcaacaaag

SEQ ID NO: 15440 - DNA, 119 bp, homo sapiens
agtataattttattttatctaaaataatagtctattttttcttttgtattttgttataatcttaagcaaaaagaaaaaaccctaatatttgaatctatttatgtctttcaatttaaatt

SEQ ID NO: 15441 - DNA, 119 bp, homo sapiens
tattttgttataatcttaagcaacaaagaaaaaaccctaatatttgaatctatttatgtctttcaatttaattcacttcagtttttgttattgtaatatatttacttttacatggttat

SEQ ID NO: 15442 - DNA, 119 bp, homo sapiens
ccgttcgtgctgcccgcctagaaagggtgaagtggttgtttccgtgacggactgagtacgggtgcctgtaggctcttgcggaagtccatgcgccattgggagggcctcggccgcggctc

SEQ ID NO: 15443 - DNA, 119 bp, homo sapiens
ctgagtacgggtgcctgtcaggctcttgcggaagtccatgcgccattgggagggcctcggccgcggctcgtgcccttgctgctgagggccacttcctgggtcattcctggaccgggagc

SEQ ID NO: 15444 - DNA, 119 bp, homo sapiens
cattcctggaccgggagccgggctggggctcacacgggggctcccgcgtggccgtctcggcgcctgcgtacctccccgccggcgggatgtggcgactacgtcgggccgctgtggcctgg

SEQ ID NO: 15445 - DNA, 119 bp, homo sapiens
agtactttgggaagaaactgagccctgagaatgtggccgcggcctgcgaggacgggtgcccgccggactcgacagcctccgggacctctgccaggtggaggagagcacggcgctgctgg

SEQ ID NO: 15446 - DNA, 119 bp, homo sapiens
cccgccggactgcgacagcctccgggacctctgccaggtggaggagagcacggcgctgctggagctggtcaggatatgcaggagagcatcaacatggagcgcgtggtcttcaaggtcct

SEQ ID NO: 15447 - DNA, 119 bp, homo sapiens
ctggagctggtgcaggatatgcaggagagcatcaacatggagcgcgtggtcttcaaggtcctgcggcgctctgcaccctcctgcaggccgaccgctgcagcctcttcatgtaccgccag

SEQ ID NO: 15448 - DNA, 119 bp, homo sapiens
ccagcgcaacggcgtggccgagctggccaccaggcttttcagcgtgcagccggacagcgtcctggaggatgcctggtgccccccgactccgagatcgtcttcccactggacatcggggt

SEQ ID NO: 15449 - DNA, 119 bp, homo sapiens
gtcctggaggactgcctggtgccccccgactccgagatcgtcttcccactggacatcggggtcgtgggcacgtggctcagaccaaaaagatggtgaacgtcgaggacgtggccgaggtg

SEQ ID NO: 15450 - DNA, 119 bp, homo sapiens
taggacaccgcagcggaggagagggagctggcaccatgcggtagaagacccagcggccgccgcgagtgtaggaggcagggcctggtggggcctgggtctgggccttgaccaaggaggca

SEQ ID NO: 15451 - DNA, 119 bp, homo sapiens
catgcggtagaagacccagcggccgccgcgagtgtgaggaggcagggcctggtggggcctgggtctgggcttgaccaaggaggcagagaaaggtggcccaaggagggccctggggtgag

SEQ ID NO: 15452 - DNA, 119 bp, homo sapiens
ctccaggtgctgctgtggtcggccaacaaggtgtttgaggagctgacggacatcgagaggcagttccacaggccttctacacggtgcgggcctacctcaactgcgagcggtactccgtg

SEQ ID NO: 15453 - DNA, 119 bp, homo sapiens
gtttgaggagctgacggacatcgagaggcagttccacaaggccttctacacggtgcgggcctacctcaatgcgagcggtactccgtgggcctcctggacatgaccaaggagaaggtgag

SEQ ID NO: 15454 - DNA, 119 bp, homo sapiens
cctcaggagttctctcgtttccacgaagagatcctgcccatgttcgaccgactgcagaacaataggaaaagtggaaggcgctggctgatgagtatgaggccaaagtgaaggctctggag

SEQ ID NO: 15455 - DNA, 119 bp, homo sapiens
ttcgaccgactgcagaacaataggaaagagtggaaggcgctggctgatgagtatgaggccaaagtgaagctctggaggagaaggaggaggaggagagggtggcagccaagaaaggtctg

SEQ ID NO: 15456 - DNA, 119 bp, homo sapiens
cccctcgtgcagaaggccgcgctagccggctcttcagcagcgagtgcagattgctcccccgcggccgcaatctcccgtttgcgccgcgttcagctgctcccgaacaacttttctgccgg

SEQ ID NO: 15457 - DNA, 119 bp, homo sapiens
ccccgcggccgcagatctcccgtttgcgccgcgttcagctgctcccgaacaacttttctgccggcccagggccccagggcgtcgcagcgccgcgtgcggcccactcacgggccggtgag

SEQ ID NO: 15458 - DNA, 119 bp, homo sapiens
ttccaggcaggatggactccaacactgctccgctgggcccctcctgcccacagcccccgccagcaccgcgccccaggcgcgttcccgactcaatgccacagcctcgttggagcaggaga

SEQ ID NO: 15459 - DNA, 119 bp, homo sapiens
cctgcccacagcccccgccagcaccgcagccccaggcgcgttcccgactcaatgccacagcctcgttgggcaggagaggagcgaaaggccccgagcacccggaccccaggctggccctg

SEQ ID NO: 15460 - DNA, 119 bp, homo sapiens
cccgactcaatgccacagcctcgttggagcaggagaggagcgaaaggccccgagcacccggaccccaggtggccctggccctggtgttagagacgcagcggcccccgctgaaccccagg

SEQ ID NO: 15461 - DNA, 119 bp, homo sapiens
aaaggccccgagcacccggaccccaggctggccctggccctggtgttagagacgcagcggcccccgctgaccccaggcccagcataccaggagccgggaaagagcagacggcaccggta

SEQ ID NO: 15462 - DNA, 119 bp, homo sapiens
ttgcaggtggggaagcactacctgcagttggccggcgacacggatgaagaactcaacagctgcaccgcttggactggctggtcctcgccgcgaagcagggccgtcgcgaggctgtgaag

SEQ ID NO: 15463 - DNA, 119 bp, homo sapiens
gacacggatgaagaactcaacagctgcaccgctgtggactggctggtcctcgccgcgaagcagggccgtgcgaggctgtgaagctgcttcgccggtgcttggcggacagaagaggtggg

SEQ ID NO: 15464 - DNA, 119 bp, homo sapiens
cttcagccaagaactacatcgcgctggatgactttgtggagatcactaagaagtacgccaagggcgtcaccccagcagcctgttcctgcaggacgacgaagatgatgacgagctggcgg

SEQ ID NO: 15465 - DNA, 119 bp, homo sapiens
gatcactaagaagtacgccaagggcgtcatccccagcagcctgttcctgcaggacgacgaagatgatgagagctggcggggaagagccctgaggacctgccactgcgtctgaaggtgag

SEQ ID NO: 15466 - DNA, 119 bp, homo sapiens
actcacaccatgaggaagacgcctccggtgttggagacacagcctcgggtggtcggggtggcatgcctgcatagccgcacacgccacacagtaagcccaggtagtaaaaaatcacgatg

SEQ ID NO: 15467 - DNA, 119 bp, homo sapiens
tcgggtggtcggggtggcatgcctgtcatagccgcacacgccacacagtaagcccaggtagtaaaaaatacgatgagggtcagcagagagcagatgaccaggccacccagccacctgga

SEQ ID NO: 15468 - DNA, 119 bp, homo sapiens
actcaccgtgcacccggctcccgctcctgctcccgccctagtcaccgctgccgccgcccttcccttagccgccagaccctggctcgtgaattatttatgacccggcttctgggaccacc

SEQ ID NO: 15469 - DNA, 119 bp, homo sapiens
gcccttcccttagctcgccagaccctggctcgtgaattatttatgacccggcttctgggaccaccgcgaggctttcggagagcccgcctcccactgccggccgcggaggggctcaggcg

SEQ ID NO: 15470 - DNA, 119 bp, homo sapiens
tgggaccaccgcgacggctttcggagagcccgcctcccactgccggccgcggaggggctcaggcggcgcgcggccggaccctcggacgtggcgggaggcaggagaaaggcccgggtgcc

SEQ ID NO: 15471 - DNA, 119 bp, homo sapiens
ggctcaggcggcgctgcggccggaccctcggacgtggcgggaggcaggagaaaggcccgggtgcccgggggacccgttgcggcttcctctgtcccggacggggacctaggtatggggcc

SEQ ID NO: 15472 - DNA, 119 bp, homo sapiens
cccgggtgcccggggggacccgttgcggcttcctctgtcccggacggggacctaggtatggggccgccgaatggaaaggattccttaaacatactcaccgcggcgggagagctgagagc

SEQ ID NO: 15473 - DNA, 119 bp, homo sapiens
gtatggggccgccgtaatggaaaggattccttaaacatactcaccgcggcgggagagctgagagcatggcaggtgccgcgtggggatctgcctcagtcacttaaagatcgcgaaacccg

SEQ ID NO: 15474 - DNA, 119 bp, homo sapiens
gcgcttggcccggcccctcgaggcaccgcctttcaattagcactcgctgattggtcgctgctcgcgcggctcctgggtgacgggaacgcggtagcctgcttggtggagaccgggtgcgc

SEQ ID NO: 15475 - DNA, 119 bp, homo sapiens
tggtcgctgctcgcgcggtctcctgggtgacgggaacgcggtagcctgcttggtggagaccgggtgcgctgcgtacttcatagttcgcgtagcggctcgagcgtggagatgaaggtaaa

SEQ ID NO: 15476 - DNA, 119 bp, homo sapiens
gcctccgggcctccagtgcaatcactacgccctggggcccggaaaccgttttccggtctttcgctttcgctggggcgtggaggccgcggtgctgcgtaggccgggccgggcgcaggaac

SEQ ID NO: 15477 - DNA, 119 bp, homo sapiens
ctttcgctttcggctggggcgtggaggccgcggtgctgcgtaggccgggccgggcgcaggaacagcccctggcgccctctctggccgccgcccgggcgggaaacgtcgttccggggacc

SEQ ID NO: 15478 - DNA, 119 bp, homo sapiens
aggaacagccccgtggcgccctctctggccgccgcccgggcgggaaacgtcgttccggggaccgggcgacccgcagcggggagcgcgccaggtccgcgcggggaagtgggcggtgtgcg

SEQ ID NO: 15479 - DNA, 119 bp, homo sapiens
gggaccgggcgaccccgcagcggggagcgcgccaggtccgcgcggggaagtgggcggtgtgcggccggcccgcctcgcaccacgcccccgcgggcccgcactttcccggagtgcacccc

SEQ ID NO: 15480 - DNA, 119 bp, homo sapiens
tgtgcggccggcaccgcctcgcaccacgcccccgcgggcccgcactttcccggagtgcaccccgcggccccagccggggcgatggcggggctctggctggggctcgtgtggcagaagct

SEQ ID NO: 15481 - DNA, 119 bp, homo sapiens
caccccgcggccgccagccggggcgatggcggggctctggctggggctcgtgtggcagaagctgctgcttggggcgcggcgagtgccctttccctggccggcgccagtctggtcctgag

SEQ ID NO: 15482 - DNA, 119 bp, homo sapiens
cctgagcctgctgcagagggtggcgagctacgcgcggaaatggcagcagatgcggcccatccccacggtgcccgcgcctacccactggtgggccacgcgctgctgatgaagccggacgg

SEQ ID NO: 15483 - DNA, 119 bp, homo sapiens
caataaaatacccatagaatatacaaaaaagaaactaacagaaaacaatttaaaatattttaaatgacaaacaattaaatgacaattaacaataatgttagcctataaagctattttct

SEQ ID NO: 15484 - DNA, 119 bp, homo sapiens
tgaaggatactggttcttagtcaattctcataaaaattatctcttaaaactatgacattattggagcacataccaaaaactaatcaggtctctgtaccatggttcttacaaatttaaga

SEQ ID NO: 15485 - DNA, 119 bp, homo sapiens
ttggagcacaataccaaaaactaatcaggtctctgtaccatggttcttacaaatttaagatgagccttcagaggccggagtcatattcccttactttcctgcccaaagcatccattcct

SEQ ID NO: 15486 - DNA, 119 bp, homo sapiens
tgagccttctagaggccggagtcatattcccttactttcctgcccaaagcatccattcctgtttcttccccaaggcttcaggctacagggcagaagacagaagatctcctggcctccat

SEQ ID NO: 15487 - DNA, 119 bp, homo sapiens
gtttcttcctccaaggcttcaggctacagggcagaagacagaagatctcctggcctccatgaaactttgttatttagagattcagggttggtaaaaggtagttggtttttcttttcact

SEQ ID NO: 15488 - DNA, 119 bp, homo sapiens
gaaactttgcttatttagagattcagggttggtaaaaggtagttggtttttcttttcactcctaggctaaccctgcataggtgttttaaaatagggttcataattgagttctcaggtga

SEQ ID NO: 15489 - DNA, 119 bp, homo sapiens
cctaggctaaaccctgcataggtgttttaaaatagggttcataattgagttctcaggtgagactgatttcttctcaatgaaaagatttttttttttcctattagattcatctgtatatg

SEQ ID NO: 15490 - DNA, 119 bp, homo sapiens
gactgattttcttctcaatgaaaagatttttttttttcctattagattcatctgtatatggttgtttctaaaactcagagggtaataaaggaggaggcaagatagagggtttttattga

SEQ ID NO: 15491 - DNA, 119 bp, homo sapiens
gttgtttctcaaaactcagagggtaataaaggaggaggcaagatagagggtttttattgaaagtaggtttgcaaacttggcttgaaaggtacttatcattttaaaaattatgcctaatg

SEQ ID NO: 15492 - DNA, 119 bp, homo sapiens
aagtaggttatgcaaacttggcttgaaaggtacttatcattttaaaaattatgcctaatgatgcatcaatacaaaaacatataatacatcaatagtcaaccctttccccataaaggcaa

SEQ ID NO: 15493 - DNA, 119 bp, homo sapiens
atgcatcaaatacaaaaacatataatacatcaatagtcaaccctttccccataaaggcaaagttactgaaaatgtttatttttcctctggtaatggctaatccaggtaataatatgaaa

SEQ ID NO: 15494 - DNA, 119 bp, homo sapiens
agttactgagaaatgtttatttttcctctggtaatggctaatccaggtaataatatgaaagcaaatggaaattcacattgcttctttcattgcttctgtcccttaaacctgttaatctt

SEQ ID NO: 15495 - DNA, 119 bp, homo sapiens
gcaaatggaaaattcacattgcttctttcattgcttctgtcccttaaacctgttaatctttcagaaccaattactgaggtgctggcctgtgcatggaaacccaatgatatccaggtctt

SEQ ID NO: 15496 - DNA, 119 bp, homo sapiens
tcagaaccacattactgaggtgctggcctgtgcatggaaacccaatgatatccaggtcttacaggtccaggcccagtggacagacaggccctggtcctccacgctggccaccatgtctt

SEQ ID NO: 15497 - DNA, 119 bp, homo sapiens
acaggtccagggcccagtggacagacaggccctggtcctccacgctggccaccatgtcttcgatggcatccagtccagcttgctgaggatgctgccagtgctctcagacacgctgtcca

SEQ ID NO: 15498 - DNA, 119 bp, homo sapiens
cgatggcattccagtccagcttgctgaggatgctgccagtgctctcagacacgctgtccacaccgcccacccaaaaggatgctctggctcttcctcttcagttggagacaagtcctatt

SEQ ID NO: 15499 - DNA, 119 bp, homo sapiens
cttacttgtagaagggaattgtgactctcatgaagaatcttatggatttctgaaggtatcgtccagggatcaccacagtctcctctctttcatactctacacacacctgcttggtttga

SEQ ID NO: 15500 - DNA, 119 bp, homo sapiens
gaatcttatggatttctgaaggtatcgtccagggactcaccacagtctcctctctttcatactctacaccacctgcttggtttgaggtgcaagcccagcacttccatgtttttttgtat

SEQ ID NO: 15501 - DNA, 119 bp, homo sapiens
actcaccacagtctcctctctttcatactctacacacacctgcttggtttgaggtgcaagcccagcactccatgtttttttgtatgctgcagactatgacacggagcattagagccttt

SEQ ID NO: 15502 - DNA, 119 bp, homo sapiens
cttaccatgtggccaaggtgagccttgaggttgcccaaaagacttcctcttatggatataactcggtttgacatatatttgacttttccaggtcgatttattagaaaactgtgaccatg

SEQ ID NO: 15503 - DNA, 119 bp, homo sapiens
aggtgagccttgaggttgcccaaaagacttcctcttatggatataactcggtttggacatatatttgactttccaggtcgatttattagaaaactgtgaccatgttgattctctctata

SEQ ID NO: 15504 - DNA, 119 bp, homo sapiens
cttaccctcttggagaagggcagtgttgacaactggaagactgagtagggctgggtttgttaggcaatgtttctgtggtagagttggtagctgtactgactcagataacagttcattca

SEQ ID NO: 15505 - DNA, 119 bp, homo sapiens
gttaggcaatggtttctgtggtagagttggtagctgtactgactcagataacagttcattcatcagacctacgcttgtgagattcgacgactatagtgttcagagagcagcaatctgta

SEQ ID NO: 15506 - DNA, 119 bp, homo sapiens
cttactggattgcttctgggacagaaaggatcatgttcttgccctctcttttctgccagctcatttaagactttgccattctttcttttcgttttcttttcatccaggcttgaatctct

SEQ ID NO: 15507 - DNA, 119 bp, homo sapiens
cagctcatttaagtactttgccattctttcttttcgttttcttttcatccaggcttgaatctctcttcttccttgtcagttctttgtgaatgtctgccagaataatgctgaattctgag

SEQ ID NO: 15508 - DNA, 119 bp, homo sapiens
attacctggaggtgcccatagcttgttctgttaagccaagttcttcactggaaactccgtctttaattaaaggtcatcaataatgtctgcaatatcagtcaatccagtcatctggagcg

SEQ ID NO: 15509 - DNA, 119 bp, homo sapiens
agcttgttctgttaagccaagttcttcactggaaactccgtctttaattataaggtcatcaataatgtcgcaatatcagtcaatccagtcatctggagcggatgtactgaaacacttca

SEQ ID NO: 15510 - DNA, 119 bp, homo sapiens
aataccaggagaagtagtattctgatcactggaactggaaaggctgacagctgaatcggcagtaggaaaacacaggttttctgaccagaataattttctgttattgaaaattcaggttc

SEQ ID NO: 15511 - DNA, 119 bp, homo sapiens
ggaactggaaaggctgacagctgaatcggcagtaggaaacacacaggttttctgaccagaataattttcgttattgaaaattcaggttctgaagtctcctttttgtcactttgatcttc

SEQ ID NO: 15512 - DNA, 119 bp, homo sapiens
agtaggaaacacacaggttttctgaccagaataattttctgttattgaaaattcaggttctgaagtctctttttgtcactttgatcttcttcatccatatgggtcaaaaaacgcactaa

SEQ ID NO: 15513 - DNA, 119 bp, homo sapiens
tctaccttatcacaatgtagatctagcatttcaggcttggggaaatcctgttctatgttttcagcaatgtctgtattgctagcaactgctcgtcaattttctgaagcttagcactgaga

SEQ ID NO: 15514 - DNA, 119 bp, homo sapiens
tgttctatgttttcagcaatgttctgtattgctagcaactgctcgtcaattttctgaagcttagcactggatgctctagttggtgagctgcagagcttggtgcagggcaagctgcagag

SEQ ID NO: 15515 - DNA, 119 bp, homo sapiens
attttctgaagcttagcactgagatgctctagttggtgagctgcagagcttggtgcagggcaagctgcaagacaccttgcagccgtttccacaatagataatcttctgcagagtctgac

SEQ ID NO: 15516 - DNA, 119 bp, homo sapiens
cttggtgcagggcaagctgcagagacaccttgcagccgtttccacaatagataatcttctgcagagtctactttgtgctctgtcctttgaatcggaactctggttttggcagacctaaa

SEQ ID NO: 15517 - DNA, 119 bp, homo sapiens
attaccttgactcttaaaattatgtgggggaacagcattagtaactgaagctgccatataatgtaactcgcagacgatggaactgctagatgatcgctttgctgtttgataacattatc

SEQ ID NO: 15518 - DNA, 119 bp, homo sapiens
cattagtaactgaagctgccatataatgtaactctgcagacgatggaactgctagatgatcgctttgcttttgataacattatcatttgaaggctcttctctcacaggtaattcctgta

SEQ ID NO: 15519 - DNA, 119 bp, homo sapiens
caaaccaagtttgttactgtatgaggtattgagggtgaccaaggtttctctgacatttcactggaaagctcagatttagatagacatctgggaccaagagctgaggagcagtcaaaggc

SEQ ID NO: 15520 - DNA, 119 bp, homo sapiens
gttactgtatgaggtattgagggtgaccaaggtttctctgacatttcactggaaagcttcagatttagaagacatctgggaccaagagctgaggagcagtcaaaggctcatgttctgaa

SEQ ID NO: 15521 - DNA, 119 bp, homo sapiens
tataccttgggtttcttaatgatttctgaatcatcattattaattatggaattctctggtcgaaaagtccatttggttttctcctcagtttctcacatcttttttcttgcagctctttc

SEQ ID NO: 15522 - DNA, 119 bp, homo sapiens
ttctgaatcatcattattaattatggaattctctggtcgaaaagtcacatttggttttctcctcagttttcacatcttttttcttgcagctctttctcagctcttcttctttgcctgtt

SEQ ID NO: 15523 - DNA, 119 bp, homo sapiens
cttgcctttttttactgtcctttccttgtcttacttcaggtggttctattttgacctttagaagttgaagtgtccagcatcaccttgttcaaataaattatgtgttagtttctgttggc

SEQ ID NO: 15524 - DNA, 119 bp, homo sapiens
ttagaagttgaaggtgtccagcatcaccttgttcaaataaattatgtgttagtttctgttggctttgttaaacgcaatgaggttttcaagtgggataagttgtgtttttttgcactaca

SEQ ID NO: 15525 - DNA, 119 bp, homo sapiens
attaccctattttctggggacaaatgtgaatgaagtaatgacaatcttgggtattttctttcttctgcttaggttggataggtgttgagggaactgtaatagatgctcttgaggttgat

SEQ ID NO: 15526 - DNA, 119 bp, homo sapiens
ttctttcttctgctataggttggataggtgttgagggaactgtaatagatgctcttgaggttgatggaacatattaggaggtttaagtggcaggtatagtaacggaagtccaaaggaat

SEQ ID NO: 15527 - DNA, 119 bp, homo sapiens
tgaggttgatggaaacatattaggaggtttaagtggcaggtatagtaacggaagtccaaaggaatggtgggagatatctcaagggtccctggcttaacatcaaatagtttttctggttt

SEQ ID NO: 15528 - DNA, 119 bp, homo sapiens
ccaaaggaatggtgaggagatatctcaagggtccctggcttaacatcaaatagtttttctggttttataacactgaagagtcctgttgaggtgtcaaattttcttgtccaacatattga

SEQ ID NO: 15529 - DNA, 119 bp, homo sapiens
tttctggttttataaacactgaagagtcctgttgaggtgtcaaattttcttgtccaacatattgatccagttcacatgattaggaatttctgtaattacagtttctgcccacgtcttct

SEQ ID NO: 15530 - DNA, 119 bp, homo sapiens
aacatattgatccaagttcacatgattaggaatttctgtaattacagtttctgcccacgtcttctgctcacttctttttttctggcttcagtgttatactggcttacattcaaatggga

SEQ ID NO: 15531 - DNA, 119 bp, homo sapiens
cacgtcttctgctcaacttctttttttctggcttcagtgttatactggcttacattcaaatgggatgctgagtagtttgtgctgctctctgtggcagagcaggttggaaggagtcagat

SEQ ID NO: 15532 - DNA, 119 bp, homo sapiens
tcaaatgggatgctggagtagtttgtgctgctctctgtggcagagcaggttggaaggagtcagataatcccaagcctctcttggttgtggcaaaggcctgaagggaacttgtggaatac

SEQ ID NO: 15533 - DNA, 119 bp, homo sapiens
ggagtcagataatccccaagcctctcttggttgtggcaaaggcctgaagggaacttgtggaatacttccgtatgtaagaaaaggggctggaattcttgtttagacttaaattgaagcaa

SEQ ID NO: 15534 - DNA, 119 bp, homo sapiens
tgtggaatacttcctgtatgtaagaaaaggggctggaattcttgtttagacttaaattgaagcaaaggaagccatcaccaggactaaatgtttttgcatgtgggataagtctaggtgcc

SEQ ID NO: 15535 - DNA, 119 bp, homo sapiens
attgaagcaaaggaaagccatcaccaggactaaatgtttttgcatgtgggataagtctaggtgccttctaacaacagaaggtgtggacaaaaggtagaggtgagtatttccagcaggag

SEQ ID NO: 15536 - DNA, 119 bp, homo sapiens
tctaggtgccttctgaacaacagaaggtgtggacaaaaggtagaggtgagtatttccagcaggagctggtaaaacgaagtggatggtaagttttgagatgatggaattggtcctttttt

SEQ ID NO: 15537 - DNA, 119 bp, homo sapiens
ccagcaggagctggataaaacgaagtggatggtaagttttgagatgatggaattggtccttttttccgggctggccatttaattgacataaaggaatactcccatgtggaacattctgg

SEQ ID NO: 15538 - DNA, 119 bp, homo sapiens
attacctgtacgtttccagtactattttgaccagatgggatagttccttcatggcagtgtgggctgttctgcgaggctctctggcgttctctcccattgactgtggtttaataaaaaat

SEQ ID NO: 15539 - DNA, 119 bp, homo sapiens
ccttcatggcagtgtgggctgttcttgcgaggctctctggcgttctctcccattgactgtggtttaataaaaatctctccttaagatttttgttgctgtcttcaacatcaccacatcct

SEQ ID NO: 15540 - DNA, 119 bp, homo sapiens
tctcccattgactgtggtttaataaaaaatctctccttaagatttttgttgctgtcttcaacatcaccaatcctcttaggtttgattcttggctttcccctaaatgcacagactgagac

SEQ ID NO: 15541 - DNA, 119 bp, homo sapiens
ttgttgctgtcttcaacatcaccacatcctcttaggtttgattcttggctttcccctaaatgcacagacgagactgctgtacaagttgttgtgtatctgggagattagcaaaggatgat

SEQ ID NO: 15542 - DNA, 119 bp, homo sapiens
tggctttcccctaaatgcacagactgagactgctgtacaagttgttgtgtatctgggagattagcaaagatgatcctactatttgcattaggctcatgaagttgatctgttgcagcttg

SEQ ID NO: 15543 - DNA, 119 bp, homo sapiens
cttacctgaactaatttaaacatttcatcttgcagcatctgcctaacggactccgaacaatctggtaacgagccgtgaattcatttctctgggtcttctgaggtgttggagcaggtggt

SEQ ID NO: 15544 - DNA, 119 bp, homo sapiens
cctaacggactccgaacaatctggtaactgagccgtgaattcatttctctgggtcttctgaggtgttgggcaggtggttgtgaagcaacattgactccatttgatatcagaagtggaac

SEQ ID NO: 15545 - DNA, 119 bp, homo sapiens
catttctctgggtcttctgaggtgttggagcaggtggttgtgaagcaacattgactccatttgatatcaaagtggaactgaggaagatttttctttatatgtagaaatctgtgcactgc

SEQ ID NO: 15546 - DNA, 119 bp, homo sapiens
ctgaccttcatagtctgatatgtgcatatccatttcctcttctgtaaatgcttctacttctaaaagatttcatcaatatctataaattcttttttagtattatgagtgatggaaataat

SEQ ID NO: 15547 - DNA, 119 bp, homo sapiens
ttctaaaagattctcatcaatatctataaattcttttttagtattatgagtgatggaaataatatcatcttgatttcttttatatcaggattttttgcttcagttggcattctactgaa

SEQ ID NO: 15548 - DNA, 119 bp, homo sapiens
cttacttcaagatattttgacaagatttattctgaccatttctttcctcagttccacctggagttgctatgcaactgaaccgccagcatctgatttgctctccctctcaatattgggtc

SEQ ID NO: 15549 - DNA, 119 bp, homo sapiens
ttctttcctcagttccacctggagttgctactgcaactgaaccgccagcatctgatttgctctccctctaatattgggtccaatctgacacccagtgtcacgattctctaccatctaaa

SEQ ID NO: 15550 - DNA, 119 bp, homo sapiens
cttaccttaataatggcattttttgccttatatgtagcaaaatagggttgttccaaaagccataatgattaagaatggcagctgtagaggtctttacacgaattactggactgtactca

SEQ ID NO: 15551 - DNA, 119 bp, homo sapiens
ccataatgatgtaagaatggcagctgtagaggtctttacacgaattactggactgtactcagaggatgatcagttataccagaatcacagagtagccttctattagaccaccttatcat

SEQ ID NO: 15552 - DNA, 119 bp, homo sapiens
cagaggatgactcagttataccagaatcacagagtagccttctattagaccaccttatcatccattccacagtcttcctatactgccaaaagtgtttagtgctaaaggaagatcttctt

SEQ ID NO: 15553 - DNA, 119 bp, homo sapiens
atccattccagcagtcttcctatactgccaaaagtgtttagtgctaaaggaagatcttcttgagggttatatcattgcactgaatagctttgaaaatacatcttctagttttaatggac

SEQ ID NO: 15554 - DNA, 119 bp, homo sapiens
ttgagggttaatatcattgcactgaatagctttgaaaatacatcttctagttttaatggacttgggagtcaaaaaatgtggtttgatgatctctggattagacatttctctctagtgtc

SEQ ID NO: 15555 - DNA, 119 bp, homo sapiens
acttgggagtccaaaaaatgtggtttgatgatctctggattagacatttctctctagtgtcatcttgtatttgtaaattgacctttgttttaaaccaaataatccactcattccttcat

SEQ ID NO: 15556 - DNA, 119 bp, homo sapiens
tcatcttgtattttgtaaattgacctttgttttaaaccaaataatccactcattccttcattcttattgcttcattcgaaggatattgtaaaaaaggtttgatcccttgattaaccagt

SEQ ID NO: 15557 - DNA, 119 bp, homo sapiens
attcttattgacttcattcgaaggatattgtaaaaaaggtttgatcccttgattaaccagtactgatgagaaagtttctggttttctaaatgcatgccatattcatcatttaaagagga

SEQ ID NO: 15558 - DNA, 119 bp, homo sapiens
gtactgatgatgaaagtttctggttttctaaatgcatgccatattcatcatttaaagaggatgattttttgattcataggactcaggagcaacaacaaagcaagaaccagctctaaaca

SEQ ID NO: 15559 - DNA, 119 bp, homo sapiens
gatgatttttctgattcataggactcaggagcaacaacaaagcaagaaccagctctaaacacattctggttttagttttgctctgatgtcgttttaatgttgtatgtacatcaaaaagt

SEQ ID NO: 15560 - DNA, 119 bp, homo sapiens
cacattctggcttttagttttgctctgatgtcgttttaatgttgtatgtacatcaaaaagtaaagaattagttcatgttctctaagctttccagaaaaactagttagaaatggaatgtc

SEQ ID NO: 15561 - DNA, 119 bp, homo sapiens
gtaaagaattaagttcatgttctctaagctttccagaaaaactagttagaaatggaatgtcagcatcccggaataaggtaggtctctttcaagaatgtaactcaaaaacagatcaagga

SEQ ID NO: 15562 - DNA, 119 bp, homo sapiens
tcagcatccctggaataaggtaggtctctttcaagaatgtaactcaaaaacagatcaaggaatttaataattcatcatcatcacgttcaaattcccaaacacctattacaggaagtgta

SEQ ID NO: 15563 - DNA, 119 bp, homo sapiens
gaatttaatatattcatcatcatcacgttcaaattcccaaacacctattacaggaagtgtattttgtgaaacttttcatgatcttctttctttgtaggattttctttctgattacacat

SEQ ID NO: 15564 - DNA, 119 bp, homo sapiens
tattttgtgataacttttcatgatcttctttctttgtaggattttctttctgattacacattttcctttatcagttggcttatgaattgatgttaattccatgtgatttggggcatttc

SEQ ID NO: 15565 - DNA, 119 bp, homo sapiens
tgtacctttgatagatatttatcctacttttttcttcaaccgacaaagcttcagagaacgtatctgcatactgtgaaccacagaatctcctagttctgtgagtgtacttctgctcaaac

SEQ ID NO: 15566 - DNA, 119 bp, homo sapiens
aagcttcagagaacgtatctgcatcactgtgaaccacagaatctcctagttctgtgagtgtacttctgccaaactagtccccagggaatatctgtcaacacctggagcctcatctggtt

SEQ ID NO: 15567 - DNA, 119 bp, homo sapiens
ctagttctgtgagtgtacttctgctcaaactagtccccagggaatatctgtcaacacctggagcctcattggtttctcttcttcaattggttcccatatattcacttcaaaagagccta

SEQ ID NO: 15568 - DNA, 119 bp, homo sapiens
atctgtcaacacctggagcctcatctggtttctcttcttcaattggttcccatatattcacttcaaaaggcctatatttctctgcacacgttttagagctttcaccctcactttctgga

SEQ ID NO: 15569 - DNA, 119 bp, homo sapiens
gttcccatatattcacttcaaaagagcctatatttctctgcacacgttttagagctttcaccctcacttctggatagaatgcatgacaacagacatcatttcctcagtctggggtcctg

SEQ ID NO: 15570 - DNA, 119 bp, homo sapiens
attacctttctgattggtggcagttctccaataaggctcaaaattatatcctgaataagttcttccatataaaaaaccgagagaaaggcagcattctataagcccattccactgcacta

SEQ ID NO: 15571 - DNA, 119 bp, homo sapiens
cctgaataagttcttccatattaaaaaaccgagagaaaggcagcattctataagcccattccactgcacaagacagtgctcaatcatacaagaatcaaactccacttcaaggtcctaaa

SEQ ID NO: 15572 - DNA, 119 bp, homo sapiens
caaacctattgctctaatggaaacttcatcaagcttgtggtctccagctgctccaggtctaaaaaatgcatacctcctttacagtaattaagtaatgactgaggaaaaggactcagtga

SEQ ID NO: 15573 - DNA, 119 bp, homo sapiens
caagcttgtggtctccagctgctccaggtctaaaaaatgcgatacctcctttacagtaattaagtaatgctgaggaaaaggactcagtgaaggaagggatcctttcattcgaatctaaa

SEQ ID NO: 15574 - DNA, 119 bp, homo sapiens
cataccttctgcatgacttttcttgcccacctcaactgcaatatataccactgtgctacaggaaaagaaactgagccgcccggaaaagcaggagaacacgctgaaggattccagatacc

SEQ ID NO: 15575 - DNA, 119 bp, homo sapiens
ctacaggaaaagaacactgagccgcccggaaaagcaggagaacacgctgaaggattccagataccttctgcgattatttttttcagcttttaaaagaagatcatcaccatcttcctgag

SEQ ID NO: 15576 - DNA, 119 bp, homo sapiens
cttacttcactaagaatagctggctggggacagtacaatggaggagctggaagatacaagccgaatggcctaagccccacagtcttttactgaagtccttggcagagtctatcagaagt

SEQ ID NO: 15577 - DNA, 119 bp, homo sapiens
tacaagccgaatggcactaagccccacagtcttttactgaagtccttggcagagtctatcagaagttgaatgtctccgaaagaatatctgcatcggccataactgatgctttcagtact

SEQ ID NO: 15578 - DNA, 119 bp, homo sapiens
tctatcagaagttgaaatgtctccgaaagaatatctgcatcggccataactgatgctttcagtacttctgtactgaaccaaatagcagatttgcatcttcctcttcaatgggatctatc

SEQ ID NO: 15579 - DNA, 119 bp, homo sapiens
cacacctgtaaactgtttatattttgagcccatttcattttttgcttccaaagaggctggttgacctaaacacactgcagtttttcctgaaaaatctgtgctggagtcatacggagtgg

SEQ ID NO: 15580 - DNA, 119 bp, homo sapiens
catttcattttttgcttccaaagaggctggttgacctaaaacacactgcagtttttcctgaaaaatctggctggagtcatacggagtggtagattcagactctttttcttggacctgaa

SEQ ID NO: 15581 - DNA, 119 bp, homo sapiens
catacctcatgaaattgctatcacgtttacagaacagctggaaagccacaccaattgaaacagacgtctccagtctccaagtttatatgccaaccacacagcctctggaaccaggccac

SEQ ID NO: 15582 - DNA, 119 bp, homo sapiens
acagacgtcttccagtctccaagtttatatgccaaccacacagcctctggaaccaggccaccaataaatgtaattcaagtgcatattcaactgtccacacattagagagattctgatct

SEQ ID NO: 15583 - DNA, 119 bp, homo sapiens
accaataaatagtaattcaagtgcatattcaactgtccacacattagagagattctgatctctaacaacctggccaccttagagtgttgcagaggaataagtcgaaaggactgctctgt

SEQ ID NO: 15584 - DNA, 119 bp, homo sapiens
attacctgttttaatatgaagtgggggaagaacattcacatgatgagggggcaaaatgcaaagctgctgttggtgaaataggcagccatgaaacgagccatggactggacgactctcac

SEQ ID NO: 15585 - DNA, 119 bp, homo sapiens
cattcacatgatgagggggcaaaatgcaaagctgctgattggtgaaataggcagccatgaaacgagccaggactggacgactctcactgctgcctcaggatgaacaccgcccaccattc

SEQ ID NO: 15586 - DNA, 119 bp, homo sapiens
tgctgattggtgaaataggcagccatgaaacgagccatggactggacgactctcactgctgcctcaggagaacaccgcccaccattccacactcaaaatgagactttgcagcacctaag

SEQ ID NO: 15587 - DNA, 119 bp, homo sapiens
catacctgaaaaatctttattttcttttacaggtagttgggaccatctcaggatttctcttgctagctgtcacacaatccttgagcatcatttaaattatagctatagaggtggcagta

SEQ ID NO: 15588 - DNA, 119 bp, homo sapiens
tctcttgctagctgatcacacaatccttgagcatcatttaaattatagctatagaggtggcagtataaggagaaagataatagcgtatctgaagaaaatacgtccttcttcctcctgaa

SEQ ID NO: 15589 - DNA, 119 bp, homo sapiens
ctgaccattgatagatttaagttctaaggtttgattcaagcaatctccagtactctgtaggttagcctgaaatgacataacagggacttgacagtagatgcttcatgtgtcatcttttc

SEQ ID NO: 15590 - DNA, 119 bp, homo sapiens
gtactctgtaggttagcctgcaaatgacataacagggacttgacagtagatgcttcatgtgtcatctttcagttaactgactatcagcttcaggaactcttcgatttaattgtgcttga

SEQ ID NO: 15591 - DNA, 119 bp, homo sapiens
atgcttcatgtgtcatcttttcagttaactgactatcagcttcaggaactcttcgatttaattgtgcttataccataaagtttttttgtacagtattctccagagaataagcaatctgc

SEQ ID NO: 15592 - DNA, 119 bp, homo sapiens
tatacctgtgtcctggctgttgcacaggatttactacttgaggatgaatcttgaaaaatgagttccaagccagtttttctgaaaaccactatcttgaaacatctgaaaaataggtacca

SEQ ID NO: 15593 - DNA, 119 bp, homo sapiens
agttccaagaccagtttttctgaaaaccactatcttgaaacatctgaaaaataggtaccaccaatgagtttgagctgttattttacttccatcagctgatgctgaaataacttcaggtt

SEQ ID NO: 15594 - DNA, 119 bp, homo sapiens
ccaatgagtcttgagctgttattttacttccatcagctgatgctgaaataacttcaggttgaagaatgttacaccatttaaattgtcagctaccattttgagtaaataaaaacaagcta

SEQ ID NO: 15595 - DNA, 119 bp, homo sapiens
gaagaatgtatacaccatttaaattgtcagctaccattttgagtaaataaaaacaagctaaaagtttcttgagaataactgacccttttgttgctgagtcagcaaaagttttacagtat

SEQ ID NO: 15596 - DNA, 119 bp, homo sapiens
aaagtttctctgagaataactgacccttttgttgctgagtcagcaaaagttttacagtatttgaggtcactttatcaaatgccccacatcttgtttgtatcttatatcccaataatgga

SEQ ID NO: 15597 - DNA, 119 bp, homo sapiens
ttgaggtcagctttatcaaatgccccacatcttgtttgtatcttatatcccaataatggattgataaacctgatgaaaaagttgaaagatacaaagtatccatgcattatgtcttgagc

SEQ ID NO: 15598 - DNA, 119 bp, homo sapiens
ttgataaacactgatgaaaaagttgaaagatacaaagtatccatgcattatgtcttgagcttttgcttaaacaagatcaagtttaggaaaaggacattttataaattgaagaatgtaaa

SEQ ID NO: 15599 - DNA, 119 bp, homo sapiens
ttttgcttaaaacaagatcaagtttaggaaaaggacattttataaattgaagaatgtaaaaaaaatgaggatacaaactactatgtaatttaacattaaatttttttctgtcacagttt

SEQ ID NO: 15600 - DNA, 119 bp, homo sapiens
aaaaatgagtgatacaaactactatgtaatttaacattaaatttttttctgtcacagtttttgaaattctatagtccacgctgcaagtagacttttctggatagaatgcagttctgtaa

SEQ ID NO: 15601 - DNA, 119 bp, homo sapiens
ttgaaattcctatagtccacgctgcaagtagacttttctggatagaatgcagttctgtaatggttctattgtctcctcactatcatcctttgcatgtatcgtatcaaacatagatgcaa

SEQ ID NO: 15602 - DNA, 119 bp, homo sapiens
tggttctatctgtctcctcactatcatcctttgcatgtatcgtatcaaacatagatgcaaattccaatctccttccttcatactactacacagcacatcatctcttttgttccaaaaag

SEQ ID NO: 15603 - DNA, 119 bp, homo sapiens
attccaatcttccttccttcatactactacacagcacatcatctcttttgttccaaaaaggacataagtgtctggaaagtgtctgccttcgttagtttcttctgcttcaaaatcctaaa

SEQ ID NO: 15604 - DNA, 119 bp, homo sapiens
agtacctgaaaatctgctgcattttcatttattgtttcttctgcctgcaagaatttggggacagtgaaacggctgaactttcatttccttggtgttctaacaggctagaccttagggaa

SEQ ID NO: 15605 - DNA, 119 bp, homo sapiens
ctgcctgcaagaatttggggacagtgaaatcggctgaactttcatttccttggtgttctaacaggctagccttagggaattcagtgatcgcaagttcagtcctttgccttttggctaaa

SEQ ID NO: 15606 - DNA, 119 bp, homo sapiens
tataccttagacaatatcacactttgatatattttctcaagcctctgggttgaatcaagtagaagtgattcatgtgtactgatggagataggctatcaagaaatcgaagggttgtgacc

SEQ ID NO: 15607 - DNA, 119 bp, homo sapiens
gggttgaatcaagtagaagtgatctcatgtgtactgatggagataggctatcaagaaatcgaagggttggaccatatatccatcagatataacgaggtagggtaaccgtgagtgtgctt

SEQ ID NO: 15608 - DNA, 119 bp, homo sapiens
gctatcaagaaatcgaagggttgtgaccatatatccatcagatataacgaggtagggtaaccgtgagtggcttttatagaaaatctctgtctcatagggtcactatcagaagctgatga

SEQ ID NO: 15609 - DNA, 119 bp, homo sapiens
acgaggtagggtaaccgtgagtgtgcttttatagaaaatctctgtctcatagggtcactatcagaagctatgaatcaacagaattatttgaatcttgaaacgtaaactgctgtggtcta

SEQ ID NO: 15610 - DNA, 119 bp, homo sapiens
ctcacctatacgttattagtggatgaagaggaataaattctgctgggccaaattctatagagcaaccaatgtaattaatgttagcaattcaccttggcaggtcaataaaaccagagagc

SEQ ID NO: 15611 - DNA, 119 bp, homo sapiens
attctgctgggccaaattctatagagcaaccaaatgtaattaatgttagcaattcaccttggcaggtcataaaaccagagagccacgttttaacatacaagccagaaaaagactatcat

SEQ ID NO: 15612 - DNA, 119 bp, homo sapiens
taattaatgttagcaattcaccttggcaggtcaataaaaccagagagccacgttttaacatacaagccaaaaaagactatcatgcgtccagctgatatcacctacccagtaggacctat

SEQ ID NO: 15613 - DNA, 119 bp, homo sapiens
ctgaccttggggtctttctgattaagagttactgccagggtaaggccatctcttgaaaaggcagaaattgagctcctcttgactttactgattcacatttaggaattaaactacagaga

SEQ ID NO: 15614 - DNA, 119 bp, homo sapiens
atctcttgaaaaggcagaaattagagctcctcttgactttactgattcacatttaggaattaaactacaagatgacagtcttgttgagcccaatgaacatggtatggcaatgatctaaa

SEQ ID NO: 15615 - DNA, 119 bp, homo sapiens
tttacctcattttttataaaaacagcattcactacagcttctttatcttcggtggaaggcaagagaactcttcttcaggtatgacctgggaccaccgacccgccaatgaaaggctttta

SEQ ID NO: 15616 - DNA, 119 bp, homo sapiens
tttatcttcggtggaaggcaagagaactgcttcttcaggtatgacctgggaccaccgacccgccaatgaaggcttttagaagataagatattctttaattccaaatattcccaaagaaa

SEQ ID NO: 15617 - DNA, 119 bp, homo sapiens
tgacctgggaccaccgacccgccaatgaaaggcttttagaagataagatattctttaattccaaatattccaaagaaatatgcatccagaaggtgttatgagcacaattcttttcccat

SEQ ID NO: 15618 - DNA, 119 bp, homo sapiens
gataagatattctttaattccaaatattcccaaagaaatatgcatccagaaggtgttatgagcacaattttttcccatttccagatacatacaagtacagtctcaaagagcttgctaaa

SEQ ID NO: 15619 - DNA, 119 bp, homo sapiens
ttaaccattactggatgttgttaggacaataacatccttcaagaaaggctgcagactaggaattttctttttatctttcctgatagcaaattaatttcatttatgaatttatcatccaa

SEQ ID NO: 15620 - DNA, 119 bp, homo sapiens
caataacatccttcaagaaaggctgcagactaggaattttcttctttatctttcctgatagcaaattaattcatttatgaatttatcatccaaaagaaaaacggcttctttttcctaag

SEQ ID NO: 15621 - DNA, 119 bp, homo sapiens
cctacctttcccaaccaggagacacgtggccatggttttttctgcttaatacctgttgatgtcaagattctaatcttatctccatgtttgttaagctatcaatgaccaattaagtaaaa

SEQ ID NO: 15622 - DNA, 119 bp, homo sapiens
gagacacgtggccatggttttttctgcttaatacctgttgatgtcaagatttctaatcttatctccatgttgttaagctatcaatgaccaattaagtaaaacagtcccaagattctgta

SEQ ID NO: 15623 - DNA, 119 bp, homo sapiens
gttacctccgccaggggcagggtccggccagtcaggcgcgagaaggctaggcgaggccgactgcgcgggtgaagacgccaggccgacagctgcgggccctaccgccagccctgacgcga

SEQ ID NO: 15624 - DNA, 119 bp, homo sapiens
gcgagaaggctaggcgaggccgactgcgcggggtgaagacgccaggccgacagctgcgggccctaccgcagccctgacgcgagcctgcgtcctggcgacggcggagggcgggcaggggg

SEQ ID NO: 15625 - DNA, 119 bp, homo sapiens
gacgccaggccgacagctgcgggccctaccgccagccctgacgcgagcctgcgtcctggcgacggcggaggcgggcagggggcgcgggcgctgccacggcgcctgctcagaaccggccg

SEQ ID NO: 15626 - DNA, 119 bp, homo sapiens
cagactccgtggttgaggcattttattggacctttggcaattggtggtggggaggcatctgctccaactgtgcggggccctgcagatgggaccatctcaggctgggtccttgtagccca

SEQ ID NO: 15627 - DNA, 119 bp, homo sapiens
aggcatctgctccaactggtgcggggccctgcagatgggaccatctcaggctgggtccttgtagcccagagcacagactggactaagcctcctgggccttgtatgaaaaaggtgttgta

SEQ ID NO: 15628 - DNA, 119 bp, homo sapiens
gggtccttgtagcccaggagcacagactggactaagcctcctgggccttgtatgaaaaaggtgttgtactggccgtttttgccagtaataatcaataaaataaccataataaaaatcaa

SEQ ID NO: 15629 - DNA, 119 bp, homo sapiens
tgaaaaaggtgttgtacctggccgtttttgccagtaataatcaataaaataaccataataaaaatcaaagctctgttctgaccactcttcaggtcttccgctgaaacggaaaagtgcaa

SEQ ID NO: 15630 - DNA, 119 bp, homo sapiens
ccataataaaaatcaaaggctctgttctgaccactcttcaggtcttccgctgaaacggaaaagtgcaaacaattgaagtacatatgcagtttgtcttaacctcaaatagtgccagtccc

SEQ ID NO: 15631 - DNA, 119 bp, homo sapiens
aaacggaaaagtgcaaagcaattgaagtacatatgcagtttgtcttaacctcaaatagtgccagtcccattcctttcctctgatagtttgttcagttcagcagatgcagaggggctggc

SEQ ID NO: 15632 - DNA, 119 bp, homo sapiens
aaatagtgccagtcccacttcctttcctctgatagtttgttcagttcagcagatgcagaggggctggccgttctccttttgatttcctccacaaggtcttctcttcggacatccacctg

SEQ ID NO: 15633 - DNA, 119 bp, homo sapiens
ctcacctcttccctgctcgtcactgaacggagcttgatgaccccatccttgagttcctgctcgccgatgtagccaccagtgggatgcctgcctcctcacagtactgtaactggttcagt

SEQ ID NO: 15634 - DNA, 119 bp, homo sapiens
tgaccccatccttgagttcctgctcgccgatgatagccaccagtgggatgcctgcctcctcacagtacttaactggttcagtagctttgggttcttcttgtacagcagctcagcctgca

SEQ ID NO: 15635 - DNA, 119 bp, homo sapiens
cctacctctagtctctgttccacgatggagaaaatccgctccaccccaatgctgagccccacacatggcccttgcgccctttggggtcgaacatgcccactagcccatcatagcgtcct

SEQ ID NO: 15636 - DNA, 119 bp, homo sapiens
cccaatgctgagccccacacatggcaccttgcgccctttggggtcgaacatgcccactagcccatcatacgtcctccagcagccacactgcccacacccaggggctcttcccctgcctg

SEQ ID NO: 15637 - DNA, 119 bp, homo sapiens
cgaacatgcccactagcccatcatagcgtcctccagcagccacactgcccacacccaggggctcttccctgcctgggctggggtctgtagcagcactgcctcatagatcaccccagtgt

SEQ ID NO: 15638 - DNA, 119 bp, homo sapiens
ctgcccacacccaggggctcttcccctgcctgggctggggtctgtagcagcactgcctcatagatcacccagtgtagtaatccagccctcgagcaaggctcaggtcaaaggagatctgt

SEQ ID NO: 15639 - DNA, 119 bp, homo sapiens
ctcactttgtcatcaatgccaaatagggtcaggtactcaaagagcaacttcaggtctcccaggccctccaggcctgcttgttttgggatagtttaggatcctggagcagctgttccacc

SEQ ID NO: 15640 - DNA, 119 bp, homo sapiens
ccaaatagggtcaggtactcaaagagcaacttcaggtctcccaggccctccaaggcctgcttgttttggatagtttaggatcctggagcagctgttccaccagggataccccacctggg

SEQ ID NO: 15641 - DNA, 119 bp, homo sapiens
ctcacacactggtagaattcccggtatcggccacgggtcatggctgggttatcccgccgatatacctttctatgtggtagcgtttaatgttggtcagtttattcattgccaaataccga

SEQ ID NO: 15642 - DNA, 119 bp, homo sapiens
attcccggtatcggccacgggtcatggctgggttatcccgccgatatacctttgctatgtggtagcgttaatgttggtcagtttattcattgccaaataccgagcaaaaggaacctgat

SEQ ID NO: 15643 - DNA, 119 bp, homo sapiens
ctcaccagctcggcgctggccttctgctgcttgaggcctcgcacgcgctctccctgaagtttcaccagccctccagcgccgcacgctctgccatcccggctgtccacttgagccgcctg

SEQ ID NO: 15644 - DNA, 119 bp, homo sapiens
agtttcaccagctcctccagcgccgcacgctctgccatcccggctgtccacttgagccgcctgctgtctgacctgcggtggttgccccagcctcagcaaggatgacttccggctatcga

SEQ ID NO: 15645 - DNA, 119 bp, homo sapiens
cgcctgctgtctcgacctgcggtggttgccccagcctcagcaaggatgacttccggctatcgagtcgctggtcgcacgcctagagagcctccgccgagcacaaaaattatttccggctc

SEQ ID NO: 15646 - DNA, 119 bp, homo sapiens
tatcgagtcgctgggtcgcacgcctagagagcctccgccgagcacaaaaattatttccggctcctcccgaagtgccgaagctggctactaagggaacttgggaggatcccacctcagcc

SEQ ID NO: 15647 - DNA, 119 bp, homo sapiens
cggctcctcccggaagtgccgaagctggctactaagggaacttgggaggatcccacctcagccttcgtgctagtgaggtgcgcaaacgcccgagttttccctggtgcgcgggttccgcc

SEQ ID NO: 15648 - DNA, 119 bp, homo sapiens
tcagccttcgtgactagtgaggtgcgcaaacgcccgagttttccctggtgcgcgggttccgcctttgcatgccctccacccttcctggtgtctgacccgcctccttcccaggccttttg

SEQ ID NO: 15649 - DNA, 119 bp, homo sapiens
tccgcctttgcagtgccctccacccttcctggtgtctgacccgcctccttcccaggccttttgttcctgcccggaaagccggcgtcctgccgcgcgatgcccctgctcggacttcttcc

SEQ ID NO: 15650 - DNA, 119 bp, homo sapiens
cttttgttcctgtcccggaaagccggcgtcctgccgcgcgatgcccctgctcggacttcttcccaggaggcctgggcttcgctgctcagccagctcctgcgaccgccctgcgcttcgtg

SEQ ID NO: 15651 - DNA, 119 bp, homo sapiens
acaaatcatatcaatatggtttactgaatgaatggctagacctatcaggaaaacagcctacttttttcccctacaatataattaaaagtttgtaattctcattccttaagtggtacttt

SEQ ID NO: 15652 - DNA, 119 bp, homo sapiens
acttttttccccctacaatataattaaaagtttgtaattctcattccttaagtggtactttgcaaggtgccattaacagacaaaataacctcggaagccctggagcacctgtcttcaag

SEQ ID NO: 15653 - DNA, 119 bp, homo sapiens
ttgcaaggtgtccattaacagacaaaataacctcggaagccctggagcacctgtcttcaagataagacacagacacaggcggtggaaatgtggaaatacgcattccccagagcagatgt

SEQ ID NO: 15654 - DNA, 119 bp, homo sapiens
agataagacagcagacacaggcggtggaaatgtggaaatacgcattccccagagcagatgtttcagttctgaatttccatcgccttttgtgcaggcaagcggaggaaagttttcaaaag

SEQ ID NO: 15655 - DNA, 119 bp, homo sapiens
gtttcagttcctgaatttccatcgccttttgtgcaggcaagcggaggaaagttttcaaaagaatctcggtgactaggagggaagggaagccaatagcgaagggaaaggtacattttcac

SEQ ID NO: 15656 - DNA, 119 bp, homo sapiens
agaatctcggctgactaggagggaagggaagccaatagcgaagggaaaggtacattttcacggtaagttgaggcatcaccaaaggagaacatggttgtgcccacccagagtgagaagca

SEQ ID NO: 15657 - DNA, 119 bp, homo sapiens
attattttctggaaatcttcaagatttgaaacaaaagagaaaacctactcttaagatgggggtggtgtggacctttgcgtgctgaatttgggaggatactttaagcctggcagagacag

SEQ ID NO: 15658 - DNA, 119 bp, homo sapiens
taagatgggggtggtgtgtgacctttgcgtgctgaatttgggaggatactttaagcctggcagagacaggtaataacacccccagcagctctctgggtacttcctgtagagggagatct

SEQ ID NO: 15659 - DNA, 119 bp, homo sapiens
taagcctggcagagacagggtaataacacccccagcagctctctgggtacttcctgtagagggagatctaaaacctcagggttttgaatgcctcgcccacaaaggcaggatacacaagg

SEQ ID NO: 15660 - DNA, 119 bp, homo sapiens
tcctgtagagggagatctaaaaacctcagggttttgaatgcctcgcccacaaaggcaggatacacaaggggacagaagataacgagctttctgggtctccagaatgacagactagcact

SEQ ID NO: 15661 - DNA, 119 bp, homo sapiens
aaggcaggatacacaagggggacagaagataacgagctttctgggtctccagaatgacagactagcactagtggccaccacagtgggcatcacatccaaacttcaatcttgacaggttc

SEQ ID NO: 15662 - DNA, 119 bp, homo sapiens
tttcactctctgggagcttatagtcaaaataattgcaacaggaagacatattgatatcctttaaaagatcagcccatccgtccacagcatttgagaagtggcctctctttgcctcacat

SEQ ID NO: 15663 - DNA, 119 bp, homo sapiens
cctttaaaagatgcagcccatccgtccacagcatttgagaagtggcctctctttgcctcacattttaccggtgcttcaggatgttacacaggtgagaatttgcttctgtacagaacaaa

SEQ ID NO: 15664 - DNA, 119 bp, homo sapiens
tcacattttaccaggtgcttcaggatgttacacaggtgagaatttgcttctgtacagaacaaagaggatagcaacagagaggggagccatcaggggatcacaatgtgacagacaccgtt

SEQ ID NO: 15665 - DNA, 119 bp, homo sapiens
aacaaagaggatcagcaacagagaggggagccatcaggggatcacaatgtgacagacaccgtttcgaaacacataaaatcatgcaccgaatcctgttctgcctgaattcaaggctgaca

SEQ ID NO: 15666 - DNA, 119 bp, homo sapiens
accgtttcgaaaacacataaaatcatgcaccgaatcctgttctgcctgaattcaaggctgacaaatttcaccattacattttttatgttgtaactgacctgtgtatccatttaaagatg

SEQ ID NO: 15667 - DNA, 119 bp, homo sapiens
ctgacaaatttccaccattacattttttatgttgtaactgacctgtgtatccatttaaagatgtcataaaataatttcaataattattgtaaatctaggaaagtattactacccaaatg

SEQ ID NO: 15668 - DNA, 119 bp, homo sapiens
aagatgtcataataataatttcaataattattgtaaatctaggaaagtattactacccaaatgtattctaacattttggaagcacaatgttatttattgcttttgcatgaaaaaataat

SEQ ID NO: 15669 - DNA, 119 bp, homo sapiens
caaatgtattctgaacattttggaagcacaatgttatttattgcttttgcatgaaaaaataattgttaggaaaaattaatggacctgcatgtaagtactcaacatgctcacataattaa

SEQ ID NO: 15670 - DNA, 119 bp, homo sapiens
aataattgttagtgaaaaattaatggacctgcatgtaagtactcaacatgctcacataattaaactggtaattatattccacacatttgcggtgtttcctggggaaaaaaaagtatcgt

SEQ ID NO: 15671 - DNA, 119 bp, homo sapiens
aattaaactggtgaattatattccacacatttgcggtgtttcctggggaaaaaaaagtatcgtgggagtaaatctttgaaagaattgggaagaaaataaacacacattaaagacactga

SEQ ID NO: 15672 - DNA, 119 bp, homo sapiens
tatcgtgggagttaaatctttgaaagaattgggaagaaaataaacacacattaaagacactgagaacgtttagaactggagaaagaaaggttcttactgattatcttcagagtagagca

SEQ ID NO: 15673 - DNA, 119 bp, homo sapiens
cactgagaacgttttagaactggagaaagaaaggttcttactgattatcttcagagtagagcaagaaggggtcatggatttaaatccaggtggacagaaactaattattcgctctaaaa

SEQ ID NO: 15674 - DNA, 119 bp, homo sapiens
agagcaagaaggtggtcatggatttaaatccaggtggacagaaactaattattcgctctaaaaaagtcaataacataaaagacagaatctatagccaataaacaacatgacagaaacca

SEQ ID NO: 15675 - DNA, 119 bp, homo sapiens
ctaaaaaagtcagataacataaaagacagaatctatagccaataaacaacatgacagaaaccaaaaccacacaagaaaaattacctacgtatttcttcctagcctaggactctgatttc

SEQ ID NO: 15676 - DNA, 119 bp, homo sapiens
aaaccaaaaccaacacaagaaaaattacctacgtatttcttcctagcctaggactctgatttcacttacttccacaagggaattagagaaaacacgattttttgttttgttctgttttc

SEQ ID NO: 15677 - DNA, 119 bp, homo sapiens
gatttcacttacattccacaagggaattagagaaaacacgattttttgttttgttctgttttcttggtcagtagcctaaagtcttaagaatttttgtataatttaaatagcaccacagg

SEQ ID NO: 15678 - DNA, 119 bp, homo sapiens
gttttcttggtcgagtagcctaaagtcttaagaatttttgtataatttaaatagcaccacaggaaaaatcctgagcaactaatgaatgttatttggtctcttttcattcggatttatac

SEQ ID NO: 15679 - DNA, 119 bp, homo sapiens
cacaggaaaaatccctgagcaactaatgaatgttatttggtctcttttcattcggatttataccaagccaatatgatcgtgctggtcctggctaaccactaaaggttaaaaaaaaaaaa

SEQ ID NO: 15680 - DNA, 119 bp, homo sapiens
ttataccaagcccaatatgatcgtgctggtcctggctaaccactaaaggttaaaaaaaaaaaaaaagataaagataaaatgaatgcaggccatttaaatcattccatactttttcaaga

SEQ ID NO: 15681 - DNA, 119 bp, homo sapiens
aaaaaaaaagataaaagataaaatgaatgcaggccatttaaatcattccatactttttcaagagattgacctgacattattacagcccagggtgttccttttgttttcaaataagtaat

SEQ ID NO: 15682 - DNA, 119 bp, homo sapiens
aaacacaaacccctttaaagcatttaaggtattatttaaactttggccatcactgctgttcagggtgcttagttgtacatcgatgaagcaccttctgtctcagggttcacaagccccag

SEQ ID NO: 15683 - DNA, 119 bp, homo sapiens
gttcagggtgctgtagttgtacatcgatgaagcaccttctgtctcagggttcacaagccccagacaaggcagctagtcaacccctgagacgctggtaggaagccatgatccagttgttg

SEQ ID NO: 15684 - DNA, 119 bp, homo sapiens
ccccagacaagggcagctagtcaacccctgagacgctggtaggaagccatgatccagttgttgaaggtgcttcagtcccagcctgagcaggaaaagaaatccaggctttctgactggag

SEQ ID NO: 15685 - DNA, 119 bp, homo sapiens
ttgttgaaggtggcttcagtcccagcctgagcaggaaaagaaatccaggctttctgactggagagctgagccccctgccctaattggactgatttcctgattcatttattttttttaaa

SEQ ID NO: 15686 - DNA, 119 bp, homo sapiens
ctggagagctgaggccccctgccctaattggactgatttcctgattcatttattttttttaaaaaatgcttcctaggagatgcagcaaaaatcacaccagtctcctgtggctcccccaa

SEQ ID NO: 15687 - DNA, 119 bp, homo sapiens
tttaaaaaatgctttcctaggagatgcagcaaaaatcacaccagtctcctgtggctcccccaaatcatccgacagaaaagaagagagaagttggcagttttcagcatattaatagcaaa

SEQ ID NO: 15688 - DNA, 119 bp, homo sapiens
ccccaaatcatctcgacagaaaagaagagagaagttggcagttttcagcatattaatagcaaacgacaattagtaactatgtactttaatcttcaacattcataattgcacaaagcatc

SEQ ID NO: 15689 - DNA, 119 bp, homo sapiens
agcaaacgacaaattagtaactatgtactttaatcttcaacattcataattgcacaaagcatcactggtatttaaataatacatgtcaattaatctaatgaagaaactggcaaagtaga

SEQ ID NO: 15690 - DNA, 119 bp, homo sapiens
agcatcactggtcatttaaataatacatgtcaattaatctaatgaagaaactggcaaagtagaatgttaaagcaatacctcgagcacgtaaagaatgtttgatattaacacttaacatg

SEQ ID NO: 15691 - DNA, 119 bp, homo sapiens
agtagaatgttaaaagcaatacctcgagcacgtaaagaatgtttgatattaacacttaacatgcaaaaccagattagaacagctcttttgagcatggttatttaaaatccttaccaaca

SEQ ID NO: 15692 - DNA, 119 bp, homo sapiens
aacatgcaaaacgcagattagaacagctcttttgagcatggttatttaaaatccttaccaacagggcaagcaagcactgtggagaaatacacataaatatatccaacctgccagatctc

SEQ ID NO: 15693 - DNA, 119 bp, homo sapiens
ccaacagggcaaagcaagcactgtggagaaatacacataaatatatccaacctgccagatctctcaggtagtgcacaccaattctaacaggtctggctgacctggctttccacatatat

SEQ ID NO: 15694 - DNA, 119 bp, homo sapiens
gatctctcaggtgagtgcacaccaattctaacaggtctggctgacctggctttccacatatatacagtgtttctaatactccaaagttgtctgacgatgggaacgcagaatcggaacaa

SEQ ID NO: 15695 - DNA, 119 bp, homo sapiens
atatatacagtggtttctaatactccaaagttgtctgacgatgggaacgcagaatcggaacaaggagggagaccatttactttcaaaatagaatccggcagggaagtctcaactcctga

SEQ ID NO: 15696 - DNA, 119 bp, homo sapiens
gaacaaggagggaagaccatttactttcaaaatagaatccggcagggaagtctcaactcctgacaagtccctttaaaacagcataaccagaactttcttacagagaaaaatcttttttc

SEQ ID NO: 15697 - DNA, 119 bp, homo sapiens
tcctgacaagtcacctttaaaacagcataaccagaactttcttacagagaaaaatcttttttccttaaaatgtatatgtggcaaaaatggctgaaaatcttgtccatgctaggggaaag

SEQ ID NO: 15698 - DNA, 119 bp, homo sapiens
tttttccttaaaaatgtatatgtggcaaaaatggctgaaaatcttgtccatgctaggggaaagctgagttggaaaaatgtgcatttttctatctatgctgtaaagaaaatacaaagcca

SEQ ID NO: 15699 - DNA, 119 bp, homo sapiens
ggaaagctgagtgtggaaaaatgtgcatttttctatctatgctgtaaagaaaatacaaagccagagcatttggcattagcaaaggctgaactaagttctcaggcaataaatttatgggg

SEQ ID NO: 15700 - DNA, 119 bp, homo sapiens
aagccagagcattttggcattagcaaaggctgaactaagttctcaggcaataaatttatggggaaacatacaggctcctcattaaagctatgtgtacgttggctgaattttatacaaga

SEQ ID NO: 15701 - DNA, 119 bp, homo sapiens
atggggaaacatgacaggctcctcattaaagctatgtgtacgttggctgaattttatacaagattcttgatcttgtggaaaattgggcatggcttgacatctgaacaatgtccctggtt

SEQ ID NO: 15702 - DNA, 119 bp, homo sapiens
acaagattcttgaatcttgtggaaaattgggcatggcttgacatctgaacaatgtccctggtttgtttgtttctaaagcatcggaaaatgttgcactttggaaatcaagtagagaagaa

SEQ ID NO: 15703 - DNA, 119 bp, homo sapiens
ctggtttgtttgatttctaaagcatcggaaaatgttgcactttggaaatcaagtagagaagaataaacaactctaaaacagaactgggctgaatctgaaagttatttttccatatgtct

SEQ ID NO: 15704 - DNA, 119 bp, homo sapiens
gaagaataaacacactctaaaacagaactgggctgaatctgaaagttatttttccatatgtctctatgaatatttattacgtttatttctcatacaaacacagcccccatgctagaaat

SEQ ID NO: 15705 - DNA, 119 bp, homo sapiens
ggtggcgagaaaatagtactgttaaggcaaatcttaccccgtagcagttaccagcaggacaggcaatttcagtgggcttttcagaagctggttgccatgacaaagagcacaatttattc

SEQ ID NO: 15706 - DNA, 119 bp, homo sapiens
gacaggcaattttcagtgggcttttcagaagctggttgccatgacaaagagcacaatttattcctcagtccttatcacagctacgatcacagaccataaaaattaacaccgctcttttc

SEQ ID NO: 15707 - DNA, 119 bp, homo sapiens
ttattcctcagtcccttatcacagctacgatcacagaccataaaaattaacaccgctcttttccatctgtttcagagttcctcatccttacctgaggccttttgttcccccaattaaat

SEQ ID NO: 15708 - DNA, 119 bp, homo sapiens
cttttccatctgatttcagagttcctcatccttacctgaggccttttgttcccccaattaaatggaatgatgtcagtcatttagcaattcaattaatgctgattcaaaattccggccaa

SEQ ID NO: 15709 - DNA, 119 bp, homo sapiens
ttaaatggaatgaatgtcagtcatttagcaattcaattaatgctgattcaaaattccggccaaaaccagatctataatcacaacttcctaatcacagttcagtcatgagaatgaaaagt

SEQ ID NO: 15710 - DNA, 119 bp, homo sapiens
ggccaaaaccagaatctataatcacaacttcctaatcacagttcagtcatgagaatgaaaagtaagcagaaattgcactaattactcaattagactaatactgtatttctaagcaaggg

SEQ ID NO: 15711 - DNA, 119 bp, homo sapiens
aaaagtaagcaggaaattgcactaattactcaattagactaatactgtatttctaagcaagggcttacgggttgtcagccctgacaaaggacttcggagtcctcttcaccttgtgtgtc

SEQ ID NO: 15712 - DNA, 119 bp, homo sapiens
caagggcttacgaggttgtcagccctgacaaaggacttcggagtcctcttcaccttgtgtgtccacagtgtccaaccaaagctggtattttcaactggccataatttctgtccatctaa

SEQ ID NO: 15713 - DNA, 119 bp, homo sapiens
tgtgtccacagttgtccaaccaaagctggtattttcaactggccataatttctgtccatctaacatggaggactgaagctgggcaatgggcgtcataactgatatactgaccacaagtg

SEQ ID NO: 15714 - DNA, 119 bp, homo sapiens
atctaacatggatggactgaagctgggcaatgggcgtcataactgatatactgaccacaagtgagggccctttggtgggcttcaaggggcacaggccggtgtggtggccagggctttcc

SEQ ID NO: 15715 - DNA, 119 bp, homo sapiens
caagtgagggccgctttggtgggcttcaaggggcacaggccggtgtggtggccagggctttcccatgagggccctcctccccggtgtgaagacacccacatgcatacctttctggctcc

SEQ ID NO: 15716 - DNA, 119 bp, homo sapiens
ctttcccatgagaggccctcctccccggtgtgaagacacccacatgcatacctttctggctccaggaaaatctagtaagggggagcattcagtgagtgtacagctactttcctcatctt

SEQ ID NO: 15717 - DNA, 119 bp, homo sapiens
ggctccaggaaatatctagtaagggggagcattcagtgagtgtacagctactttcctcatcttcaatttagtgagtacacaggcactggcttccatactcaaaacagggcctgcaatat

SEQ ID NO: 15718 - DNA, 119 bp, homo sapiens
catcttcaatttcagtgagtacacaggcactggcttccatactcaaaacagggcctgcaatatgctgggagagagctccttgctgagtgagcctgctggggtggggtctgcaggcggct

SEQ ID NO: 15719 - DNA, 119 bp, homo sapiens
caatatgctgggcagagagctccttgctgagtgagcctgctggggtggggtctgcaggcggctggaaccaaggctcatctgcacccttggaaacagcttctcacaccaagactgcccgg

SEQ ID NO: 15720 - DNA, 119 bp, homo sapiens
gcggctggaacctaaggctcatctgcacccttggaaacagcttctcacaccaagactgcccggagaagcttcatgaagtcaagaacagtgaatgaaaaggtggcagggacaggcacacg

SEQ ID NO: 15721 - DNA, 119 bp, homo sapiens
gcccggagaagccttcatgaagtcaagaacagtgaatgaaaaggtggcagggacaggcacacgggcagagtgactgaagtatttacaaaacaacacagagagacccaacaagctggacc

SEQ ID NO: 15722 - DNA, 119 bp, homo sapiens
cacacgggcagatgtgactgaagtatttacaaaacaacacagagagacccaacaagctggaccttattaaaaaaaacaaaacaaaaaaactaaaaacgtagatacttttttcctataca

SEQ ID NO: 15723 - DNA, 119 bp, homo sapiens
tggaccttattaaaaaaaaacaaaacaaaaaaactaaaaacgtagatacttttttcctatacagtttcaaagacttaaatatgctgtaaacaacagggaggagactagagcctgtcaca

SEQ ID NO: 15724 - DNA, 119 bp, homo sapiens
tatacagtttcacaagacttaaatatgctgtaaacaacagggaggagactagagcctgtcacacctctgtttttatggtcacctgtcaaaatccttcctgaggtggcctcctgagggga

SEQ ID NO: 15725 - DNA, 119 bp, homo sapiens
gtcacacctctggtttttatggtcacctgtcaaaatccttcctgaggtggcctcctgaggggagaggaatggagacagggacagggaagaggcctatcccatacatatgtcatggtctt

SEQ ID NO: 15726 - DNA, 119 bp, homo sapiens
aggggagaggaactggagacagggacagggaagaggcctatcccatacatatgtcatggtctttcctctcagaagtttctggaaatgacccaacttgggaaatgctcaggggttctgaa

SEQ ID NO: 15727 - DNA, 119 bp, homo sapiens
ggtctttcctctgcagaagtttctggaaatgacccaacttgggaaatgctcaggggttctgaaaagaggagaacatttatttgcctaagtgagacaaagtctttacttccagggtttgc

SEQ ID NO: 15728 - DNA, 119 bp, homo sapiens
tctgaaaagaggaagaacatttatttgcctaagtgagacaaagtctttacttccagggtttgccttgcagtgaccactgctgagggagcgggggtttgagtggctggcggggccgccac

SEQ ID NO: 15729 - DNA, 119 bp, homo sapiens
gtttgccttgcaggtgaccactgctgagggagcgggggtttgagtggctggcggggccgccacctggcaattctgagcgcttcgggcaccaggcaccttggactctcttccggaggagt

SEQ ID NO: 15730 - DNA, 119 bp, homo sapiens
cttactaggatgatctgcaggcccttgctcctcttccagataatattctatcttttttaagtcttctgggtaaatctccatttattctcagctggtaggggtggccctttggggctgga

SEQ ID NO: 15731 - DNA, 119 bp, homo sapiens
tttttaagtcttctggggtaaatctccatttattctcagctggtaggggtggccctttggggctggatctttccgggcagacccaggaggaagggcctgctggcaagatgctggcaggg

SEQ ID NO: 15732 - DNA, 119 bp, homo sapiens
cctttggggctggatcgtttccgggcagacccaggaggaagggcctgctggcaagatgctggcagggaacagtaatcagtccttccgggaatttctgagctaagacttttagacctagg

SEQ ID NO: 15733 - DNA, 119 bp, homo sapiens
cttacctccaacaatgtggcactgctggtaagaatctctatcacgcacatctagcagcaggaaggggcatcaggataaggtttgtctttggtatggggctctgctttcttcactggccc

SEQ ID NO: 15734 - DNA, 119 bp, homo sapiens
acgcacatctagcagcaggaaggggcagtcaggataaggtttgtctttggtatggggctctgctttcttactggccctttgtctagatccagttccccaacaccactgatgacactgca

SEQ ID NO: 15735 - DNA, 119 bp, homo sapiens
agtacctctgaagagttgagcggctggagtcccctgctcctgcgttgtttatgaactgctcagggctcgcgactgctcacctggatttcctttcccattggtcctggcagtggtttcag

SEQ ID NO: 15736 - DNA, 119 bp, homo sapiens
gctcctgcgttgtttatgaactgctcagggctcggcgactgctcacctggatttcctttcccattggtctggcagtggtttcagcatcagggtctgaagctgcagaatcattgtctaat

SEQ ID NO: 15737 - DNA, 119 bp, homo sapiens
tctccattaattacaaacatttcagggtaattacacttaacactttattttgtatcagctgaccctcacacaatgcagggaggtaggccatcatgccctctatttgttttccccctaaa

SEQ ID NO: 15738 - DNA, 119 bp, homo sapiens
gctgaccctcaccacaatgcagggaggtaggccatcatgccctctatttgttttccccctaaaggagaagctgagaaacaagttttttgcaattatacaaatatttggtgaaattcaga

SEQ ID NO: 15739 - DNA, 119 bp, homo sapiens
cctaaaggagaaggctgagaaacaagttttttgcaattatacaaatatttggtgaaattcagaccaaattgagaggactactgatgagttcttttcactatagacattcattctatcca

SEQ ID NO: 15740 - DNA, 119 bp, homo sapiens
ttcagaccaaatctgagaggactactgatgagttcttttcactatagacattcattctatccaagaatgggaaaaaaggagaatggaggatttcttccttgctttaattggacaaatga

SEQ ID NO: 15741 - DNA, 119 bp, homo sapiens
tatccaagaatggggaaaaaaggagaatggaggatttcttccttgctttaattggacaaatgagatagcggatggctgacacaaaaatacccctaaaaatggtttgagaaagtatgaaa

SEQ ID NO: 15742 - DNA, 119 bp, homo sapiens
aaatgagatagcaggatggctgacacaaaaatacccctaaaaatggtttgagaaagtatgaaaagtagctttttatcccactgtgtaaactgcttacatcttaactatgcagcctatct

SEQ ID NO: 15743 - DNA, 119 bp, homo sapiens
atgaaaagtagcatttttatcccactgtgtaaactgcttacatcttaactatgcagcctatcttactgttctaattgcatctgaagatagtttctgactaccttttaaaaagattggaa

SEQ ID NO: 15744 - DNA, 119 bp, homo sapiens
ctatcttactgtatctaattgcatctgaagatagtttctgactaccttttaaaaagattggaaatgaatcatttcataattcacttatttataaacatggctttgtttcatacaaaaga

SEQ ID NO: 15745 - DNA, 119 bp, homo sapiens
ttggaaatgaatccatttcataattcacttatttataaacatggctttgtttcatacaaaagaagcctaaagactatccaagaaccaattttttttaaaaaaaattgaaattacacatt

SEQ ID NO: 15746 - DNA, 119 bp, homo sapiens
aaaagaagcctaaaagactatccaagaaccaattttttttaaaaaaaattgaaattacacattactgccgatacattttcccagataagactttttgatcaaaaagaaaaaaaaaagtc

SEQ ID NO: 15747 - DNA, 119 bp, homo sapiens
cacattactgccagatacattttcccagataagactttttgatcaaaaagaaaaaaaaaagtcagtggcccccattgcttcctaactaaagctgaaactccttgctctagcactggaca

SEQ ID NO: 15748 - DNA, 119 bp, homo sapiens
aaagtcagtggctccccattgcttcctaactaaagctgaaactccttgctctagcactggacaccaactactacctcttaatgttgccttaattacttaacttgacaaactcttagtct

SEQ ID NO: 15749 - DNA, 119 bp, homo sapiens
tggacaccaactcactacctcttaatgttgccttaattacttaacttgacaaactcttagtcttgcatttctaacgtatcaccttgccacatactcgtaagagctcactcagcaggaag

SEQ ID NO: 15750 - DNA, 119 bp, homo sapiens
ggaaaaatacacatttgctgaatgaaatttactatggagatctactaactgaaaaatccttataatgagtattttataatgcaaatacttcccaatttggtctgagtttctgcacacct

SEQ ID NO: 15751 - DNA, 119 bp, homo sapiens
ccttataatgagttattttataatgcaaatacttcccaatttggtctgagtttctgcacacctgatttttttaaactatgtacaacttgacttatatacagtatatgttatgtgctaca

SEQ ID NO: 15752 - DNA, 119 bp, homo sapiens
acacctgattttctttaaactatgtacaacttgacttatatacagtatatgttatgtgctacatatatgctcatattgcttcacgacttaagcaacctataaatgtataaggtagcatt

SEQ ID NO: 15753 - DNA, 119 bp, homo sapiens
gctacatatatgactcatattgcttcacgacttaagcaacctataaatgtataaggtagcatttagctttactttgtttacttacaactaaagttgtgataaaagatatataacaaaac

SEQ ID NO: 15754 - DNA, 119 bp, homo sapiens
agcatttagcttctactttgtttacttacaactaaagttgtgataaaagatatataacaaaactttacattagaatcaagaggaagaaacaacccgactatagcaacagtgctgtgcaa

SEQ ID NO: 15755 - DNA, 119 bp, homo sapiens
caaaactttacaattagaatcaagaggaagaaacaacccgactatagcaacagtgctgtgcaaacacaggtgcaactgattcagtgaatgagtcattcattagattttttccattgttt

SEQ ID NO: 15756 - DNA, 119 bp, homo sapiens
gtgcaaacacagagtgcaactgattcagtgaatgagtcattcattagattttttccattgttttcctatatttaataacattatttatactgagccaataagaaaagcaagtgattttg

SEQ ID NO: 15757 - DNA, 119 bp, homo sapiens
ttgttttcctataatttaataacattatttatactgagccaataagaaaagcaagtgattttgtgcagcgtaatctaaagtagatgagatttataaggcacgaactcagttgctaagag

SEQ ID NO: 15758 - DNA, 119 bp, homo sapiens
attttgtgcagcagtaatctaaagtagatgagatttataaggcacgaactcagttgctaagagacaactcatggctttatttttcttcaatatttccctcctctatggagaagttctct

SEQ ID NO: 15759 - DNA, 119 bp, homo sapiens
taagagacaactccatggctttatttttcttcaatatttccctcctctatggagaagttctcttggcttgaagagcagaaagcatgaaaagaggcacagtggtcctttgttaacctcaa

SEQ ID NO: 15760 - DNA, 119 bp, homo sapiens
cggaagaaacagaattaaacaacaaataaaaatgaagagtacctagtctataatgagtttgatgcttacgtcaaggctattagcaaatattcaggaaaagtaaagcctaaagaagaaaa

SEQ ID NO: 15761 - DNA, 119 bp, homo sapiens
gtttgatgcttacagtcaaggctattagcaaatattcaggaaaagtaaagcctaaagaagaaaagagggatgaatagtttgtctagagataataaaaggaaggtgaatttttaaaaaga

SEQ ID NO: 15762 - DNA, 119 bp, homo sapiens
gaagaaaagagggaatgaatagtttgtctagagataataaaaggaaggtgaatttttaaaaagacaaaataaggctagaaaagactgagtggagaaagcctacagaatttcagaaagct

SEQ ID NO: 15763 - DNA, 119 bp, homo sapiens
taaaaagacaaaaataaggctagaaaagactgagtggagaaagcctacagaatttcagaaagctaaagaattggaaattagattgaatatagatagaaatgggaggacaatgcagccaa

SEQ ID NO: 15764 - DNA, 119 bp, homo sapiens
agaaagctaaagaaattggaaattagattgaatatagatagaaatgggaggacaatgcagccaatgaaaactgtggggactaataaagggagagccctgtggtttggaaagtgtccctt

SEQ ID NO: 15765 - DNA, 119 bp, homo sapiens
gcagccaatgaaagactgtggggactaataaagggagagccctgtggtttggaaagtgtcccttaatcacctgcagtgctgcaaaacagaaacccagagagggtgcttgagaatataca

SEQ ID NO: 15766 - DNA, 119 bp, homo sapiens
tgtcccttaatcagcctgcagtgctgcaaaacagaaacccagagagggtgcttgagaatatacaagaacctgcggtggtgactgaacaaaacgcagccagggatttcatcagaagcata

SEQ ID NO: 15767 - DNA, 119 bp, homo sapiens
aatatacaagaaccctgcggtggtgactgaacaaaacgcagccagggatttcatcagaagcataatccatcatggcacagtctggcagtgctggggagctggtaagatacacacaggca

SEQ ID NO: 15768 - DNA, 119 bp, homo sapiens
ctcacctcagggttcccaatgtgcctccggagggacatattttctccaaccgaccacgttcggggttctgcctcacgggttgcctctaaccctagcttcctacccccacaaccttgttc

SEQ ID NO: 15769 - DNA, 119 bp, homo sapiens
acgttcggggttctagcctcacgggttgcctctaaccctagcttcctacccccacaaccttgttcagcccctccctataccctcttctccgattggcccgtcttccccggccggccaat

SEQ ID NO: 15770 - DNA, 119 bp, homo sapiens
aaccttgttcagccgcctccctataccctcttctccgattggcccgtcttccccggccggccaatggggccccgtttactctctcatctcagggtcgcagaagggcaagacgccgctca

SEQ ID NO: 15771 - DNA, 119 bp, homo sapiens
gccggccaatgggggccccgtttactctctcatctcagggtcgcagaagggcaagacgccgctcaatggtgccaagggcaacgcgggacgccggctagcgaggccttttgttctctggg

SEQ ID NO: 15772 - DNA, 119 bp, homo sapiens
gcgccagcgcagccattggtccggctactctgtctctttttcaaattgaggcgccgagtcgttgcttagttctggggattcgggcggagacgagattagtgatttggcggctccgactg

SEQ ID NO: 15773 - DNA, 119 bp, homo sapiens
gagtcgttgcttagtttctggggattcgggcggagacgagattagtgatttggcggctccgactggcgcggacaaacgccacggccagagtaccgggtagagagcggggacgccgacct

SEQ ID NO: 15774 - DNA, 119 bp, homo sapiens
gctccgactggcgcgggacaaacgccacggccagagtaccgggtagagagcggggacgccgacctgcgtcgtcggtcctccaggccacgccagcgcccgagagggaccagggagactcc

SEQ ID NO: 15775 - DNA, 119 bp, homo sapiens
acgccgacctgcgtgcgtcggtcctccaggccacgccagcgcccgagagggaccagggagactccggccctgtcggccgccaagcccctccgcccctcacagcgcccaggtccgcggcc

SEQ ID NO: 15776 - DNA, 119 bp, homo sapiens
gggagactccggcccctgtcggccgccaagcccctccgcccctcacagcgcccaggtccgcggccgggcttgattttttggcggggaccgtcatggcgtcgcagccaaattcgtctgcg

SEQ ID NO: 15777 - DNA, 119 bp, homo sapiens
gtccgcggccgggccttgattttttggcggggaccgtcatggcgtcgcagccaaattcgtctgcgaagagaaagaggagaaggggaagaacatccaggtggtggtgagatgcaggtagg

SEQ ID NO: 15778 - DNA, 119 bp, homo sapiens
tatagaccatttaatttggcagagcggaaagctagcgcccattcaatagtagaatgtgatcctgtacgaaagaagttagtgtacgaactggaggattggctgacaagagctcaaggaaa

SEQ ID NO: 15779 - DNA, 119 bp, homo sapiens
gcggaaagctagcgcccattcaatagtagaatgtgatcctgtacgaaaagaagttagtgtacgaactggggattggctgacaagagctcaaggaaaacatacacttttgatatggtaac

SEQ ID NO: 15780 - DNA, 119 bp, homo sapiens
ttcaggatcccttggctggtataattccacgtacccttcatcaaatttttgagaaacttactgataatgtactgaattttcagtcaaagtgtctctgttggagatctataatgaagagc

SEQ ID NO: 15781 - DNA, 119 bp, homo sapiens
catcaaatttttgagaaacttactgataatggtactgaattttcagtcaaagtgtctctgttggagatcataatgaagagctttttgatcttcttaatccatcatctgatgtttctgag

SEQ ID NO: 15782 - DNA, 119 bp, homo sapiens
attttcagtcaaagtgtctctgttggagatctataatgaagagctttttgatcttcttaatccatcatcgatgtttctgagagactacagatgtttgatgatccccgtaacaaggtaat

SEQ ID NO: 15783 - DNA, 119 bp, homo sapiens
gtcagagaggagtgataattaaaggtttagaagaaattacagtacacaacaaggatgaagtctatcaaatttagaaaagggggcagcaaaaaggacaactgcagctactctgatgaatg

SEQ ID NO: 15784 - DNA, 119 bp, homo sapiens
taattaaaggtttagaagaaattacagtacacaacaaggatgaagtctatcaaattttagaaaagggggagcaaaaaggacaactgcagctactctgatgaatgcatactctaggtaag

SEQ ID NO: 15785 - DNA, 119 bp, homo sapiens
ggttgatcttgcaggaagtgaaaacattggccgttctggagctgttgataagagagctcgggaagctggaatataaatcaatccctgttgactttgggaagggtcattactgcccttgt

SEQ ID NO: 15786 - DNA, 119 bp, homo sapiens
gttgataagagagctcgggaagctggaaatataaatcaatccctgttgactttgggaagggtcattactcccttgtagaaagaacacctcatgttccttatcgagaatctaaactaact

SEQ ID NO: 15787 - DNA, 119 bp, homo sapiens
tgttgactttgggaagggtcattactgcccttgtagaaagaacacctcatgttccttatcgagaatctaactaactagaatcctccaggattctcttggagggcgtacaagaacatcta

SEQ ID NO: 15788 - DNA, 119 bp, homo sapiens
acctcatgttccttatcgagaatctaaactaactagaatcctccaggattctcttggagggcgtacaagacatctataattgcaacaatttctcctgcatctctcaatcttgaggtaag

SEQ ID NO: 15789 - DNA, 119 bp, homo sapiens
tttaggttacagagttgtttatggataataaaaatgaacttgaccagtgtaaatctgacctgcaaaataaacacaagaacttgaaaccactcaaaaacatttgcaagaaactaaattac

SEQ ID NO: 15790 - DNA, 119 bp, homo sapiens
ttgaccagtgtaaatctgacctgcaaaataaaacacaagaacttgaaaccactcaaaaacatttgcaagaactaaattacaacttgttaaagaagaatatatcacatcagctttggaaa

SEQ ID NO: 15791 - DNA, 119 bp, homo sapiens
aacttgaaaccactcaaaaacatttgcaagaaactaaattacaacttgttaaagaagaatatatcacatagctttggaaagtactgaggagaaacttcatgatgctgccagcaaggttt

SEQ ID NO: 15792 - DNA, 119 bp, homo sapiens
tatagctgcttaacacagttgaagaaactacaaaagatgtatctggtctccattccaaactggatcgtagaaggcagttgaccaacacaatgcagaagctcaggatatttttggcaaaa

SEQ ID NO: 15793 - DNA, 119 bp, homo sapiens
ccattccaaactggatcgtaagaaggcagttgaccaacacaatgcagaagctcaggatatttttggcaaaacctgaatagtctgtttaataatatggaagaattaattaaggatggcag

SEQ ID NO: 15794 - DNA, 119 bp, homo sapiens
gctcaggatatttttggcaaaaacctgaatagtctgtttaataatatggaagaattaattaaggatggcgctcaaagcaaaaggccatgctagaagtacataagaccttatttggtaag

SEQ ID NO: 15795 - DNA, 119 bp, homo sapiens
tataggtaatctgctgtcttccagtgtctctgcattagataccattactacagtagcacttggatctctacatctattccagaaaatgtgtctactcatgtttctcagatttttaatat

SEQ ID NO: 15796 - DNA, 119 bp, homo sapiens
gcattagataccattactacagtagcacttggatctctcacatctattccagaaaatgtgtctactcattttctcagatttttaatatgatactaaaagaacaatcattagcagcagaa

SEQ ID NO: 15797 - DNA, 119 bp, homo sapiens
gatctctcacatctattccagaaaatgtgtctactcatgtttctcagatttttaatatgatactaaaagacaatcattagcagcagaaagtaaaactgtactacaggaattgattgtta

SEQ ID NO: 15798 - DNA, 119 bp, homo sapiens
accagaatgtactcaagactgatcttctaagttcactggaaatgattttatccccaactgtggtgtctaactgaaaatcaatagtcaactaaagcatattttcaagacttcattgacag

SEQ ID NO: 15799 - DNA, 119 bp, homo sapiens
gactgatcttctaagttcactggaaatgattttatccccaactgtggtgtctatactgaaaatcaatagcaactaaagcatattttcaagacttcattgacagtggccgataaggtaac

SEQ ID NO: 15800 - DNA, 119 bp, homo sapiens
caaagatagaagatcaaaaaaaggaactagatggctttctcagtatactgtgtaacaatctacatgaacacaagaaaataccatttgttccttggttgagtcacaaaagcaatgtggaa

SEQ ID NO: 15801 - DNA, 119 bp, homo sapiens
gtgtaacaatctacatgaactacaagaaaataccatttgttccttggttgagtcacaaaagcaatgtggaacctaactgaagacctgaagacaataaagcagacccattcccaggtatg

SEQ ID NO: 15802 - DNA, 119 bp, homo sapiens
tataggaaatctaaggatatagtcaacaaaatgacttttcacagtcaaaaattttgtgctgattctgatgcttctcacaggaactcagaaattttaaccaagaaggtacaaaattggtt

SEQ ID NO: 15803 - DNA, 119 bp, homo sapiens
tgctgattctgatggcttctcacaggaactcagaaattttaaccaagaaggtacaaaattggttgaagatctgtgaaacactctgataaactcaatggcaacctggaaaaaatatctca

SEQ ID NO: 15804 - DNA, 119 bp, homo sapiens
aattggttgaagaatctgtgaaacactctgataaactcaatggcaacctggaaaaaatatctcaagagatgaacagagatgtgaatctctgaacacaagaacagtttatttttctgaac

SEQ ID NO: 15805 - DNA, 119 bp, homo sapiens
atatctcaagagactgaacagagatgtgaatctctgaacacaagaacagtttatttttctgaacagtggtatcttccttaaatgaaagggaacaggaacttcacaacttattggaggta

SEQ ID NO: 15806 - DNA, 119 bp, homo sapiens
tacaggttgtaagccaatgttgtgaggcttcaagttcagacatcactgagaaatcagatggacgtaaggagctcatgagaaacagcataacatttttcttgatcagatgactattgatg

SEQ ID NO: 15807 - DNA, 119 bp, homo sapiens
gatggacgtaaggcagctcatgagaaacagcataacatttttcttgatcagatgactattgatgaagataattgatagcacaaaatctagaacttaatgaaaccataaaaattggtttg

SEQ ID NO: 15808 - DNA, 119 bp, homo sapiens
tattgatgaagataaattgatagcacaaaatctagaacttaatgaaaccataaaaattggtttgactaacttaattgctttctggaacaggatctgaaactggatatcccaacaggtac

SEQ ID NO: 15809 - DNA, 119 bp, homo sapiens
taaaggtacgacaccacagaggaaaagttatttatacccatcaacactggtaagaactgaaccacgtgacatctccttgatcagctgaaaaggaaacagcctgagctgttaatgatgct

SEQ ID NO: 15810 - DNA, 119 bp, homo sapiens
aacactggtaagaactgaaccacgtgaacatctccttgatcagctgaaaaggaaacagcctgagctgttatgatgctaaactgttcagaaaacaacaaagaagagacaattccggtaaa

SEQ ID NO: 15811 - DNA, 119 bp, homo sapiens
cacagcataaaaaatcacatggaaaagacaaagaaaacagaggcattaacacactggagaggtctaaagggaagaaactacagagcacttggttacaaagagcagattacctctgcgag

SEQ ID NO: 15812 - DNA, 119 bp, homo sapiens
ggcattaacacactggagaggtctaaagtggaagaaactacagagcacttggttacaaagagcagattactctgcgagcccagatcaacctttaattcacttgggggttggcaatttta

SEQ ID NO: 15813 - DNA, 119 bp, homo sapiens
agagcacttggttacaaagagcagattacctctgcgagcccagatcaacctttaattcacttgggggttgcaattttatttttaaagaaaacttaaaaataaaacctgaaaccccagaa

SEQ ID NO: 15814 - DNA, 119 bp, homo sapiens
agatcaacctttaattcacttgggggttggcaattttatttttaaagaaaacttaaaaataaaacctgaaccccagaacttgagccttgtgtatagattttaaaagaatatatatatca

SEQ ID NO: 15815 - DNA, 119 bp, homo sapiens
gatataaggcagtactgtaaattcagttgaattttgatatctacccatttttctgtcatccctatagttactttgtattaaattgggtttcatttgggatttgcaatgtaaatacgtat

SEQ ID NO: 15816 - DNA, 119 bp, homo sapiens
atccctatagttcactttgtattaaattgggtttcatttgggatttgcaatgtaaatacgtatttctagtttcatataaagtagttcttttataacaaatgaaaagtatttttcttgta

SEQ ID NO: 15817 - DNA, 119 bp, homo sapiens
acgtatttctagttttcatataaagtagttcttttataacaaatgaaaagtatttttcttgtatattataagtaatgaatatataagaactgtactcttctcagcttgagcttacatag

SEQ ID NO: 15818 - DNA, 119 bp, homo sapiens
cttgtatattattaagtaatgaatatataagaactgtactcttctcagcttgagcttacataggtaaattcaccaacatctgtccttagaaaggaccatctcatgttttttttcttgct

SEQ ID NO: 15819 - DNA, 119 bp, homo sapiens
acataggtaaatatcaccaacatctgtccttagaaaggaccatctcatgttttttttcttgctatgactgtgtattttcttgcatcctccctagacttccctatttcgctttctcctcg

SEQ ID NO: 15820 - DNA, 119 bp, homo sapiens
cttgctatgacttgtgtattttcttgcatcctccctagacttccctatttcgctttctcctcggctcacttctccctttttatttttcaccaaaccatttgtagagctacaaaaggtat

SEQ ID NO: 15821 - DNA, 119 bp, homo sapiens
tcctcggctcactttctccctttttatttttcaccaaaccatttgtagagctacaaaaggtatcctttctattttcagtagtcagaattttatctagaaatcttttaacacctttttag

SEQ ID NO: 15822 - DNA, 119 bp, homo sapiens
aggtatcctttcttattttcagtagtcagaattttatctagaaatcttttaacacctttttagtggttattctaaaatcactgtcaacaataaatctaaccctagttgtatccctcctt

SEQ ID NO: 15823 - DNA, 119 bp, homo sapiens
ttttagtggttatttctaaaatcactgtcaacaataaatctaaccctagttgtatccctcctttcagtattttcacttgttgccccaaatgtgaaagcatttcattcctttaagaggcc

SEQ ID NO: 15824 - DNA, 119 bp, homo sapiens
ctcctttcagtatttttcacttgttgccccaaatgtgaaagcatttcattcctttaagaggcctaactcttcaccctgacagagttcacaaaaagcccacttaagagtatacattgcta

SEQ ID NO: 15825 - DNA, 119 bp, homo sapiens
gaggcctaactcattcaccctgacagagttcacaaaaagcccacttaagagtatacattgctattatggagaccacccagacatctgactaatggctctgtgcccacactccaagacct

SEQ ID NO: 15826 - DNA, 119 bp, homo sapiens
ttgctattatgggagaccacccagacatctgactaatggctctgtgcccacactccaagacctgtgcctttagagaagctcacaatgatttaaggactgtttgaaacttccaattatgt

SEQ ID NO: 15827 - DNA, 119 bp, homo sapiens
agacctgtgccttttagagaagctcacaatgatttaaggactgtttgaaacttccaattatgtctataattatattcttttgtttacatgatgaaactttttgttgttgcttgtttgta

SEQ ID NO: 15828 - DNA, 119 bp, homo sapiens
ttatgtctataatttatattcttttgtttacatgatgaaactttttgttgttgcttgtttgtatataatcaatgtgtacatgtatctttttctcgattcaaatcttaacccttaggact

SEQ ID NO: 15829 - DNA, 119 bp, homo sapiens
tttgtatataatacaatgtgtacatgtatctttttctcgattcaaatcttaacccttaggactctggtattttgatctggcaaccatatttctggaagttgagatgtttcagcttgaag

SEQ ID NO: 15830 - DNA, 119 bp, homo sapiens
aggactctggtatttttgatctggcaaccatatttctggaagttgagatgtttcagcttgaagaaccaaacagaaggaatatgtacaaagaataaattttctgctcacgatgagtttag

SEQ ID NO: 15831 - DNA, 119 bp, homo sapiens
ttgaagaaccaaaacagaaggaatatgtacaaagaataaattttctgctcacgatgagtttagtgtgtaagtttagagacatctgactttgatagctaaattaaaccaaaccctattga

SEQ ID NO: 15832 - DNA, 119 bp, homo sapiens
gtttagtgtgtaaagtttagagacatctgactttgatagctaaattaaaccaaaccctattgaagaattaatatatgctacttcaagaaactaaattgatctcgtagaattatcttaat

SEQ ID NO: 15833 - DNA, 119 bp, homo sapiens
tattgaagaattgaatatatgctacttcaagaaactaaattgatctcgtagaattatcttaataaaatatggctataatttctctgcaaaatcagatgtcagcataagcgatggataat

SEQ ID NO: 15834 - DNA, 119 bp, homo sapiens
cttaataaaataatggctataatttctctgcaaaatcagatgtcagcataagcgatggataatacctaaaaactgccctcagtaaatccatggttaataaatgtggtttctacattaac

SEQ ID NO: 15835 - DNA, 119 bp, homo sapiens
tcgggaaggctatatttagcaggtttccggaagttgccggactggctgtgaggcggtcctgcctcgctgcttcagtccctagtgtctgggtccccgccctccagccgcctttgagtcgt

SEQ ID NO: 15836 - DNA, 119 bp, homo sapiens
gcggtcctgcctcgctgccttcagtccctagtgtctgggtccccgccctccagccgcctttgagtcgtgctgggtcctcgcccttgcctcagaaccgcgaagaaaggaagctcgcgtgt

SEQ ID NO: 15837 - DNA, 119 bp, homo sapiens
gccgcctttgagtcgtgcctgggtcctcgcccttgcctcagaaccgcgaagaaaggaagctcgcgtgttgctagaaaacctagttgggagtgcgaggcagagaacgttcagcacctttg

SEQ ID NO: 15838 - DNA, 119 bp, homo sapiens
aaggaagctcgcgtgtttgctagaaaacctagttgggagtgcgaggcagagaacgttcagcacctttgtcctcccgaaccctcgggacagaggcagggttctgagggcagggattcccc

SEQ ID NO: 15839 - DNA, 119 bp, homo sapiens
acgttcagcacctttgttcctcccgaaccctcgggacagaggcagggttctgagggcagggattccccccgtcttggccccaccgcccgggctgggcactaaactcgggccgcggcggg

SEQ ID NO: 15840 - DNA, 119 bp, homo sapiens
agggcagggattccccctcgtcttggccccaccgcccgggctgggcactaaactcgggccgcggcgggggagcgaggcgggctccggagggagctgacgcctgatgatggcgcaggtag

SEQ ID NO: 15841 - DNA, 119 bp, homo sapiens
gctagacacaacttcgaaaccagctaattcatgagttgatgcaccctgtattgagtggagaactgcagctcggtccatttcagtagaagggagctccctcttaataggcgcctctaact

SEQ ID NO: 15842 - DNA, 119 bp, homo sapiens
ctgtattgagtggagaactgcagcctcggtccatttcagtagaagggagctccctcttaataggcgccttaactctttagtggcagatcacttacaaagatgtggctatgaatattcac

SEQ ID NO: 15843 - DNA, 119 bp, homo sapiens
ggagctccctcttaataggcgcctctaactctttagtggcagatcacttacaaagatgtggctatgaatttcactttctgttttctttccagaaagtggtttggcaaaagaaaaggtaa

SEQ ID NO: 15844 - DNA, 119 bp, homo sapiens
aatagctgagaagcttcagcttattgatgatcagtttgcagatgcttaccctcagcgtatcaagttcgatctttagaaataaagctaaatgagtataagagagaaatagaagagcaact

SEQ ID NO: 15845 - DNA, 119 bp, homo sapiens
tgatcagtttgcagatgcttaccctcagcgtatcaagttcgaatctttagaaataaagctaaatgagtaaagagagaaatagaagagcaacttcgggcagaaatgtgtcaaaaggtaag

SEQ ID NO: 15846 - DNA, 119 bp, homo sapiens
tgcagttgaagttttttaaagataccgagatagcaaaaattaaaatggaagcaaaaaaaaagtatgaaaggagttaaccatgttccagaatgattttgaaaaagcttgtcaagcaaaat

SEQ ID NO: 15847 - DNA, 119 bp, homo sapiens
gcaaaaattaaaatggaagcaaaaaaaaagtatgaaaaggagttaaccatgttccagaatgattttgaaaagcttgtcaagcaaaatctgaagctctcgttcttcgggaaaagagtacc

SEQ ID NO: 15848 - DNA, 119 bp, homo sapiens
tgaaaaggagttaaccatgttccagaatgattttgaaaaagcttgtcaagcaaaatctgaagctctcgtcttcgggaaaagagtacccttgaaagaattcacaagcaccaagaggtggt

SEQ ID NO: 15849 - DNA, 119 bp, homo sapiens
tttagcttgaattagagtctgtcaaagcccagtctttggcaataacaaaacaaaaccatatgctgaatgaaaggttaaagagatgagtgattattcactactaaaagaagagaaactgg

SEQ ID NO: 15850 - DNA, 119 bp, homo sapiens
aataacaaaacaaaaccatatgctgaatgaaaaggttaaagagatgagtgattattcactactaaaagagagaaactggagcttctggcacaaaataaattacttaaacaacaactgga

SEQ ID NO: 15851 - DNA, 119 bp, homo sapiens
gagatgagtgattattcactactaaaagaagagaaactggagcttctggcacaaaataaattacttaaaaacaactggaagagagtagaaatgaaaacctgcgtctcctaaaccgtatg

SEQ ID NO: 15852 - DNA, 119 bp, homo sapiens
cttaggcctagctcagccggctcctgaacttgcagtctttcagaaagaactacggaaagccgaaaaggcatagtggttgagcatgaggagttcgaaagctgcaggcaagctctgcacaa

SEQ ID NO: 15853 - DNA, 119 bp, homo sapiens
tcctgaacttgcagtctttcagaaagaactacggaaagccgaaaaggctatagtggttgagcatgaggattcgaaagctgcaggcaagctctgcacaaacaactgcaagacgaagtgag

SEQ ID NO: 15854 - DNA, 119 bp, homo sapiens
tgcagccctagagaatgaagtgtactgcaatccaaagcagtctgtgatcgatcgttctgtcaatggattataaatggcaatgtggtgccttgcaatggtgagataagtggggatttctt

SEQ ID NO: 15855 - DNA, 119 bp, homo sapiens
tctgtcaatggattaataaatggcaatgtggtgccttgcaatggtgagataagtggggatttcttgaacatccttttaaacaggaaaacgttctagcacgtatggttgcatcaaggatc

SEQ ID NO: 15856 - DNA, 119 bp, homo sapiens
gggatttcttgaacaatccttttaaacaggaaaacgttctagcacgtatggttgcatcaaggatcacaattatccaactgcatgggtggagggtagttcccctgattctgaccttgagt

SEQ ID NO: 15857 - DNA, 119 bp, homo sapiens
atcaaggatcacaaattatccaactgcatgggtggagggtagttcccctgattctgaccttgagtttgtgccaatactaaggcaagggtcaaagagcttcagcaagaggccgaacgctt

SEQ ID NO: 15858 - DNA, 119 bp, homo sapiens
gaccttgagtttgtagccaatactaaggcaagggtcaaagagcttcagcaagaggccgaacgcttggaaaggctttcagaagttaccatcggagagtcattaaaaactctgccaaaagc

SEQ ID NO: 15859 - DNA, 119 bp, homo sapiens
ccgaacgcttggaaaaggctttcagaagttaccatcggagagtcattaaaaactctgccaaaagcccacagcagcaaagagcccaccatctctgcacttgctggaagccttcaaaaaca

SEQ ID NO: 15860 - DNA, 119 bp, homo sapiens
tgccaaaagcccactagcagcaaagagcccaccatctctgcacttgctggaagccttcaaaaacattactccagttccccggaaagacatatttttggagaggacagagttgtctctga

SEQ ID NO: 15861 - DNA, 119 bp, homo sapiens
ttcaaaaacattacttccagttccccggaaagacatatttttggagaggacagagttgtctctgagcagctcaagtgggcacacttgaagaaaggaatgacgtcgtggaagcactgaca

SEQ ID NO: 15862 - DNA, 119 bp, homo sapiens
ttgtctctgagcagcctcaagtgggcacacttgaagaaaggaatgacgtcgtggaagcactgacaggcatgcagcctcgaggctccgcgggggcacttcctccagacgcctctcttcca

SEQ ID NO: 15863 - DNA, 119 bp, homo sapiens
agcactgacaggcagtgcagcctcgaggctccgcgggggcacttcctccagacgcctctcttccacacccttccaaaagcaaaaagaagcctcgaaagtgaaatgtatctggaaggtaa

SEQ ID NO: 15864 - DNA, 119 bp, homo sapiens
cttaggtctgggcagatcacacattgcttcccccagtccttgtcctgacagaatgcccctaccatcaccactgagtctaggcacagcctctccatccctcctgtctccagccctccgga

SEQ ID NO: 15865 - DNA, 119 bp, homo sapiens
cacacattgcttcccccagtccttgtcctgacagaatgcccctaccatcacccactgagtctaggcacacctctccatccctcctgtctccagccctccggagcagaaagtggggtaag

SEQ ID NO: 15866 - DNA, 119 bp, homo sapiens
attaggtgtagatcagaaacaaattgaagaacaaaaggaagaagaaaaaatacgggaacagcaagtgaagaacgaaggcagagagaagaaagaaggcagagtaacctacaagaagtttt

SEQ ID NO: 15867 - DNA, 119 bp, homo sapiens
aatacgggaacagcaagtgaaagaacgaaggcagagagaagaaagaaggcagagtaacctacaagaagtttagaaagggaacgaagagaactagaaaaactgtatcaggaaagggtaat

SEQ ID NO: 15868 - DNA, 119 bp, homo sapiens
tatagaagatgattgaagaatcactgaagattaaaataaaaaaggaattagaaatggaaaatgaattagaatgagtaatcaagaaataaaagacaaatctgctcacagtgaaaatcctt

SEQ ID NO: 15869 - DNA, 119 bp, homo sapiens
ttaaaataaaaaaggaattagaaatggaaaatgaattagaaatgagtaatcaagaaataaaagacaaattgctcacagtgaaaatcctttagagaaatacatgaaaatcatccagcagg

SEQ ID NO: 15870 - DNA, 119 bp, homo sapiens
atgaattagaaatgagtaatcaagaaataaaagacaaatctgctcacagtgaaaatcctttagagaaatcatgaaaatcatccagcaggagcaagaccaggagtcggcagataaggtgc

SEQ ID NO: 15871 - DNA, 119 bp, homo sapiens
tttagtttaacaggcttttctcatgaagaactagacgactcttggtaaccatgtttgctgcccagcttcaacttacataccgtgagaagttacgtaacatttactcctttgtaaatgtt

SEQ ID NO: 15872 - DNA, 119 bp, homo sapiens
aaccatgtttgctgcccagcttctaacttacataccgtgagaagttacgtaacatttactcctttgtaatgtttccctatcatcagacaaaactcaataaaaatgtgtgtaatccaatg

SEQ ID NO: 15873 - DNA, 119 bp, homo sapiens
acgtaacatttactcctttgtaaatgtttccctatcatcagacaaaactcaataaaaatgtgtgtaatcaatgtgggtttttttttccataattaattttgataccatagtgtgtgaac

SEQ ID NO: 15874 - DNA, 119 bp, homo sapiens
actcaataaaaatgtgtgtaatccaatgtgggtttttttttccataattaattttgataccatagtgtggaaccaagaataatctagtcacgtgaaacctcttctccagtcatagtatt

SEQ ID NO: 15875 - DNA, 119 bp, homo sapiens
attaattttgataccatagtgtgtgaaccaagaataatctagtcacgtgaaacctcttctccagtcatatatttctcattcattataataaaagtaactggcttttaacctccttattt

SEQ ID NO: 15876 - DNA, 119 bp, homo sapiens
ccaggcctcccgcaccacccccttcccgccgcgctctctcccgcccccgcgcttccggccccgcccgccccgcgcggaggactgtgggagcggcttccttggattccgcgcttggcaac

SEQ ID NO: 15877 - DNA, 119 bp, homo sapiens
ccccgcgcttccggccccgcccgcccccgcgcggaggactgtgggagcggcttccttggattccgcgctggcaacggctcggcgtcgcgctttggccaaccgctgcgtcgtccctgggc

SEQ ID NO: 15878 - DNA, 119 bp, homo sapiens
gagcggcttccttggattccgcgcttggcaacggctcggcgtcgcgctttggccaaccgctgcgtcgtcctgggcccgaataactgtcgcccgcttccctcagcgtgaggtaggagaag

SEQ ID NO: 15879 - DNA, 119 bp, homo sapiens
tttaggattaaaataatgcagaatattggagttacatttattcaggctggtcagtattcagatgctattattcatatgagcacataatgagcatggcaccaaatctgaaggcaggctac

SEQ ID NO: 15880 - DNA, 119 bp, homo sapiens
agatgctattaattcatatgagcacataatgagcatggcaccaaatctgaaggcaggctacaacctaacatctgttattttgctattggagaccgagaaaaaatgaagaaggcattcca

SEQ ID NO: 15881 - DNA, 119 bp, homo sapiens
acaacctaactatctgttattttgctattggagaccgagaaaaaatgaagaaggcattccaaaaattgatactgttccattagaaattgatgaagataaatatatttcaccaagtgtga

SEQ ID NO: 15882 - DNA, 119 bp, homo sapiens
cttagggaaaggattttgcacaagccagcagctatgcagatatagctgtgaactctgatagatataatcagcagctcttactaataaagggaatacagtttttgcaaatggtgattatg

SEQ ID NO: 15883 - DNA, 119 bp, homo sapiens
gatatagctgtgaactctgatagatataatccagcagctcttactaataaagggaatacagtttttgcaatggtgattatgagaaggccgctgaattctataaagaggctctaagaaat

SEQ ID NO: 15884 - DNA, 119 bp, homo sapiens
tcttactaataaagggaatacagtttttgcaaatggtgattatgagaaggccgctgaattctataaagagctctaagaaatgattcttcttgtactgaagcactttataatattggtaa

SEQ ID NO: 15885 - DNA, 119 bp, homo sapiens
ataagatatgaattaatggaaaatcccagtcaagctattgaatggctaatgcaggtggtcagtgttattcaaccgatcctcaagttttatctaagctaggagaattatatgatcgtgaa

SEQ ID NO: 15886 - DNA, 119 bp, homo sapiens
atggctaatgcaggtggtcagtgttattccaaccgatcctcaagttttatctaagctaggagaattatagatcgtgaaggagataaatctcaagcatttcaatattactatgaggtagg

SEQ ID NO: 15887 - DNA, 119 bp, homo sapiens
cctagatgcctcctatgtggacccacttggccctcaaatagaacgaccaaaaactgcagccaagaaaagatcgatgaggatgattttgctgatgaagaattaggagatgatttgcttcc

SEQ ID NO: 15888 - DNA, 119 bp, homo sapiens
aactgcagccaagaaaaggatcgatgaggatgattttgctgatgaagaattaggagatgatttgcttccgaataatattcactttaatatttattaaaggaaagaaattgccttatgag

SEQ ID NO: 15889 - DNA, 119 bp, homo sapiens
aggagatgatttgcttccagaataatattcactttaatatttattaaaggaaagaaattgccttatgagtcatcctcatgttaaaccttggattaaatatctaacctgtaattattttt

SEQ ID NO: 15890 - DNA, 119 bp, homo sapiens
aagaaattgccttatgagatcatcctcatgttaaaccttggattaaatatctaacctgtaattatttttttcactgtcaaaacttaagtaagtgtattctattctgtatgtatgcattt

SEQ ID NO: 15891 - DNA, 119 bp, homo sapiens
taacctgtaattattttttttcactgtcaaaacttaagtaagtgtattctattctgtatgtatgcatttagttgtttttttcttttaaggaataaaaacaggtaaaactaatactttag

SEQ ID NO: 15892 - DNA, 119 bp, homo sapiens
gagactggtgagagctagggcaggaagagggggagaccccctaaaaaactagcaagaggcacacaaggagtctggaaggaagagctcccttgactgtggggaggacctggggcaattgc

SEQ ID NO: 15893 - DNA, 119 bp, homo sapiens
cacacaaggatgtctggaaggaagagctcccttgactgtggggaggacctggggcaattgcttttcttcgtgttctctctctctgatgttgctttggatgccagatgctgataagggtg

SEQ ID NO: 15894 - DNA, 119 bp, homo sapiens
gcttttcttctgtgttctctctctctgatgttgctttggatgccagatgctgataagggtgtcagcgtgctgattgtttctgcttcagcagtcaagcagggcaggtatgagaagcaata

SEQ ID NO: 15895 - DNA, 119 bp, homo sapiens
tgtcagcgtgcctgattgtttctgcttcagcagtcaagcagggcaggtatgagaagcaataaagcagaacaggagattcaaagtcaaaatgacaaggtccttaaagcattttcaggccc

SEQ ID NO: 15896 - DNA, 119 bp, homo sapiens
taaagcagaaacaggagattcaaagtcaaaatgacaaggtccttaaagcattttcaggcccctattttggtcattttagcttttcccccaatttatcttccgcttcaattaaatggctc

SEQ ID NO: 15897 - DNA, 119 bp, homo sapiens
ccctattttgagtcattttagcttttcccccaatttatcttccgcttcaattaaatggctcttcagcttctatggtggcctttatagccttctgtggtccaccatccctacgttgccaa

SEQ ID NO: 15898 - DNA, 119 bp, homo sapiens
tcttcagctttctatggtggcctttatagccttctgtggtccaccatccctacgttgccaacactttgttggtttagtttcttctcaaaaaatgctccatcgtagacttcagagaattg

SEQ ID NO: 15899 - DNA, 119 bp, homo sapiens
aacactttgtatggtttagtttcttctcaaaaaatgctccatcgtagacttcagagaattgggtcccccgtgagagaaggtaggctgggcacaactgacttttttcatccctaacagtg

SEQ ID NO: 15900 - DNA, 119 bp, homo sapiens
tgggtccccctgtgagagaaggtaggctgggcacaactgacttttttcatccctaacagtggctttgtggtgagtgtccagactcgggtggtttgtgttgtgagtactgtaggtggatg

SEQ ID NO: 15901 - DNA, 119 bp, homo sapiens
tggctttgtgggtgagtgtccagactcgggtggtttgtgttgtgagtactgtaggtggatgggaggcgtcttagaagtagagtgtccagtctttgtttcctcaaacaggaagaaaagtt

SEQ ID NO: 15902 - DNA, 119 bp, homo sapiens
tgggaggcgtccttagaagtagagtgtccagtctttgtttcctcaaacaggaagaaaagttagaagtaagagagggtgggccttcccattggggtctaagctgtacccttttcatgcag

SEQ ID NO: 15903 - DNA, 119 bp, homo sapiens
ttagaagtaaagagagggtgggccttcccattggggtctaagctgtacccttttcatgcagtttgtcttgggatgggttgacttctggtcttctcaaggaggggaagtggccaagctgt

SEQ ID NO: 15904 - DNA, 119 bp, homo sapiens
agtttgtctttgggatgggttgacttctggtcttctcaaggaggggaagtggccaagctgtctttgattagctctttgggaacacctggacttggaaagggccttggctcctgaaagct

SEQ ID NO: 15905 - DNA, 119 bp, homo sapiens
gtctttgattcagctctttgggaacacctggacttggaaagggccttggctcctgaaagctagctctgttttgacctcacctaataaggctgttactcccaatcccaaggatagacagt

SEQ ID NO: 15906 - DNA, 119 bp, homo sapiens
ctagctctgtgtttgacctcacctaataaggctgttactcccaatcccaaggatagacagtgggagggggaattcttcatactgagcttcaaaagccacttggcctgagtcttcagtta

SEQ ID NO: 15907 - DNA, 119 bp, homo sapiens
gtgggaggggtgaattcttcatactgagcttcaaaagccacttggcctgagtcttcagttaaggacgaaactgagactcagcttcctggagacttggctctggggctaagctggtcctt

SEQ ID NO: 15908 - DNA, 119 bp, homo sapiens
taaggacgaagactgagactcagcttcctggagacttggctctggggctaagctggtccttggctcaagcctgaaggtccttgtagttctctgacaccttctagagtgaaagtactggc

SEQ ID NO: 15909 - DNA, 119 bp, homo sapiens
ttggctcaagccctgaaggtccttgtagttctctgacaccttctagagtgaaagtactggctggcctgctaccttggggcaggggattttgctttctggaaagaagtgatccagaggcc

SEQ ID NO: 15910 - DNA, 119 bp, homo sapiens
gctggcctgcttaccttggggcaggggattttgctttctggaaagaagtgatccagaggcccatggactaaaggcatagtggtttttcaggagctgtggggaaaaattctctccgagtt

SEQ ID NO: 15911 - DNA, 119 bp, homo sapiens
cccatggactaaaaggcatagtggtttttcaggagctgtggggaaaaattctctccgagttgctgttaagccaggaggccagattcctcagatgggactccagtttcctccccaggaca

SEQ ID NO: 15912 - DNA, 119 bp, homo sapiens
ttgctgttaaagccaggaggccagattcctcagatgggactccagtttcctccccaggacagatgtctgcatggtaccctttattttatttccttctggatctgtgatttcccattggc

SEQ ID NO: 15913 - DNA, 119 bp, homo sapiens
cagatgtctgccatggtaccctttattttatttccttctggatctgtgatttcccattggcacagctctccatcctgcttcccatgctgcctgcttccttggggctgactttgagttct

SEQ ID NO: 15914 - DNA, 119 bp, homo sapiens
gcacagctctgccatcctgcttcccatgctgcctgcttccttggggctgactttgagttctgggtccaggcacctgactggggcaagagccctcctgagcctgtgccttccccagggca

SEQ ID NO: 15915 - DNA, 119 bp, homo sapiens
ctgggtccagggcacctgactggggcaagagccctcctgagcctgtgccttccccagggcagactgcctctgctctctgggctttgctgctgcttttgagaagtgttcttccgtccctc

SEQ ID NO: 15916 - DNA, 119 bp, homo sapiens
cagactgcctcctgctctctgggctttgctgctgcttttgagaagtgttcttccgtccctccaggtcctccttctgaaggaacatctctccttgcccttgtgattctctttcctgttcc

SEQ ID NO: 15917 - DNA, 119 bp, homo sapiens
tccaggtcctgccttctgaaggaacatctctccttgcccttgtgattctctttcctgttccccttcctcgctgctcctccacccgcctcccaagggcagatctctgctttcttggcaga

SEQ ID NO: 15918 - DNA, 119 bp, homo sapiens
ccccttcctctgctgctcctccacccgcctcccaagggcagatctctgctttcttggcagagggagccttaccacttcccacagacacacttccgctaccctggtctccacactgcctg

SEQ ID NO: 15919 - DNA, 119 bp, homo sapiens
gagggagcctctaccacttcccacagacacacttccgctaccctggtctccacactgcctgctgcctcaaactgcctctgcttctgtcagaagcatctggggctggctgtggggacaga

SEQ ID NO: 15920 - DNA, 119 bp, homo sapiens
tgctgcctcagaactgcctctgcttctgtcagaagcatctggggctggctgtggggacagacccttgcctcttgactctcccagggacacacagcctcctgctgcctgaagtctgccat

SEQ ID NO: 15921 - DNA, 119 bp, homo sapiens
gacccttgccatcttgactctcccagggacacacagcctcctgctgcctgaagtctgccatctctggcttttctgaactggcacaccttttggctctgatttttctggggctctgcctt

SEQ ID NO: 15922 - DNA, 119 bp, homo sapiens
atctctggctttttctgaactggcacaccttttggctctgatttttctggggctctgcctttctcttctgagagtccccttttccatcctgccttgacacccctttgacagggattctt

SEQ ID NO: 15923 - DNA, 119 bp, homo sapiens
tttctcttcttgagagtccccttttccatcctgccttgacacccctttgacagggattctttcagtcactcccagggacaggtctcagccttggcactgctgtcagatttatacacacc

SEQ ID NO: 15924 - DNA, 119 bp, homo sapiens
tttcagtcacttcccagggacaggtctcagccttggcactgctgtcagatttatacacacctgcatcagaacatcccatgggcacacgtcagcggccctgcccccagtgctgaccagtc

SEQ ID NO: 15925 - DNA, 119 bp, homo sapiens
cctgcatcaggaacatcccatgggcacacgtcagcggccctgcccccagtgctgaccagtctctgggagtagctttaggttggtcagggcgctgtctgtctaggtgagagacggaatct

SEQ ID NO: 15926 - DNA, 119 bp, homo sapiens
tctctgggagctagctttaggttggtcagggcgctgtctgtctaggtgagagacggaatctgctggggcgtggtctcccatggacagacggattgtagctcatggcttgttttttcccc

SEQ ID NO: 15927 - DNA, 119 bp, homo sapiens
ctgctggggcagtggtctcccatggacagacggattgtagctcatggcttgttttttccccatcttcagagtgaattcttctgtgtctgcagctggagctttttcttgggttatgtgtt

SEQ ID NO: 15928 - DNA, 119 bp, homo sapiens
ccatcttcagtagtgaattcttctgtgtctgcagctggagctttttcttgggttatgtgttctgggaagaacctgtctttgggtcttgtctcaggtcccccttctctgttgcttccaag

SEQ ID NO: 15929 - DNA, 119 bp, homo sapiens
ttctgggaaggaacctgtctttgggtcttgtctcaggtcccccttctctgttgcttccaaggaatgtcctctgccacttcactactcatgctgctgggcaagtctgagatcttgggggc

SEQ ID NO: 15930 - DNA, 119 bp, homo sapiens
aggaatgtccctctgccacttcactactcatgctgctgggcaagtctgagatcttgggggcctgagcagggattccctcaagtccttgttctcccaaatacaaatagtttcctgttgtt

SEQ ID NO: 15931 - DNA, 119 bp, homo sapiens
gcctgagcaggggattccctcaagtccttgttctcccaaatacaaatagtttcctgttgttgacacagtttgccatcccttttgatacgtcttctcccagggaagtgagtctccccttt

SEQ ID NO: 15932 - DNA, 119 bp, homo sapiens
ttgacacagttttgccatcccttttgatacgtcttctcccagggaagtgagtctccccttttctagagcttctccctctgctctgctgattcactccctgccttttggtccaatccctt

SEQ ID NO: 15933 - DNA, 119 bp, homo sapiens
tttctagagctttctccctctgctctgctgattcactccctgccttttggtccaatcccttcccagtagtccttcacttacctcccagggacagatcttggctttttcactggtagcag

SEQ ID NO: 15934 - DNA, 119 bp, homo sapiens
ttcccagtagttccttcacttacctcccagggacagatcttggctttttcactggtagcagcttcctgtcttcccagggacacacttcacctggcctgcagcccatatgatccagttcc

SEQ ID NO: 15935 - DNA, 119 bp, homo sapiens
agcttcctgtgcttcccagggacacacttcacctggcctgcagcccatatgatccagttcctggaacccgcttttggtccatcagcatctagagtacctggatgctgagaacaggcccc

SEQ ID NO: 15936 - DNA, 119 bp, homo sapiens
cctggaacccagcttttggtccatcagcatctagagtacctggatgctgagaacaggcccctggacccaactcccccagggacaagccacctcccactctggggttggcttctgtggct

SEQ ID NO: 15937 - DNA, 119 bp, homo sapiens
cctggacccacactcccccagggacaagccacctcccactctggggttggcttctgtggcttctctggacagtaacagctctctccctgggtccaagatctgcagaaaccttgcctgta

SEQ ID NO: 15938 - DNA, 119 bp, homo sapiens
cttctctggagcagtaacagctctctccctgggtccaagatctgcagaaaccttgcctgtatcatttgggatttcctaatggcctcagctcccaaagccctttcctcccctgctccagc

SEQ ID NO: 15939 - DNA, 119 bp, homo sapiens
tatcatttggagatttcctaatggcctcagctcccaaagccctttcctcccctgctccagcacccacctccagggacagatttctgccttcccagcagtcaagttttcctccacatcca

SEQ ID NO: 15940 - DNA, 119 bp, homo sapiens
gcacccacctcccagggacagatttctgccttcccagcagtcaagttttcctccacatccaaagggcaatgtcggcagctttgcttcccacactgcctgacatctggagaagggtttgg

SEQ ID NO: 15941 - DNA, 119 bp, homo sapiens
caaagggcaaatgtcggcagctttgcttcccacactgcctgacatctggagaagggtttggggtctctcgtgtcttgaggacgtggttgtggggagaagctgccagggtccacactctc

SEQ ID NO: 15942 - DNA, 119 bp, homo sapiens
ggggtctctctgtgtcttgaggacgtggttgtggggagaagctgccagggtccacactctcccaggggcgaccgcttcttgcttttggatctgcccctcaggcttttcccaagctgtga

SEQ ID NO: 15943 - DNA, 119 bp, homo sapiens
tcccaggggccgaccgcttcttgcttttggatctgcccctcaggcttttcccaagctgtgacatcttcgtttccgattttccaggcattttctccttgtccttttgagattctcctcct

SEQ ID NO: 15944 - DNA, 119 bp, homo sapiens
gacatcttcgatttccgattttccaggcattttctccttgtccttttgagattctcctcctcttggcactgtgctgatgtccattcctctcttgttctttcatttacctcccagggaca

SEQ ID NO: 15945 - DNA, 119 bp, homo sapiens
ctcttggcacctgtgctgatgtccattcctctcttgttctttcatttacctcccagggacagatttctgtttggcaggtgttgcttcctgtgcctccggcctgagatcttcctgtggac

SEQ ID NO: 15946 - DNA, 119 bp, homo sapiens
cagatttctgttttggcaggtgttgcttcctgtgcctccggcctgagatcttcctgtggacacacctgcttgctctgcttcctccattgcataggaattggctaccagctttggatgag

SEQ ID NO: 15947 - DNA, 119 bp, homo sapiens
acacacctgcgttgctctgcttcctccattgcataggaattggctaccagctttggatgaggaattgtcagacatgggctggagtgcccagggaccgtgctctccctgggacaaactga

SEQ ID NO: 15948 - DNA, 119 bp, homo sapiens
aggaattgtctagacatgggctggagtgcccagggaccgtgctctccctgggacaaactgactcctgctttgacttaatttctgcactgctttcacagtttgttcccccatctctccaa

SEQ ID NO: 15949 - DNA, 119 bp, homo sapiens
gactcctgctgttgacttaatttctgcactgctttcacagtttgttcccccatctctccaaagcttcctttctggaggctttttccttttcttgaagagattctctacctgtccccaga

SEQ ID NO: 15950 - DNA, 119 bp, homo sapiens
aaagcttccttttctggaggctttttccttttcttgaagagattctctacctgtccccagactcagcattcctgccccatcacgttatcatccagctcccagggacagatctctgcttt

SEQ ID NO: 15951 - DNA, 119 bp, homo sapiens
gactcagcatttcctgccccatcacgttatcatccagctcccagggacagatctctgctttctggatagaggagcatctcctgcctcccacagacacacttcagcaatgccactgccca

SEQ ID NO: 15952 - DNA, 119 bp, homo sapiens
ttctggatagcaggagcatctcctgcctcccacagacacacttcagcaatgccactgcccaaactccctaacactctgagcttcctggggcctgaattgagactgctgaggggccccgg

SEQ ID NO: 15953 - DNA, 119 bp, homo sapiens
caaactccctgaacactctgagcttcctggggcctgaattgagactgctgaggggccccggaaatctgtctctcccatggacaaagagactccaagtctcctcccggtttctgttcttt

SEQ ID NO: 15954 - DNA, 119 bp, homo sapiens
ggaaatctgtactctcccatggacaaagagactccaagtctcctcccggtttctgttctttccaaaaggtgctttcctggttttctgcttttcctgagggagatccttcactgcctctt

SEQ ID NO: 15955 - DNA, 119 bp, homo sapiens
ttccaaaaggttgctttcctggttttctgcttttcctgagggagatccttcactgcctcttgggctggttcccatcctcgcctccttcacttgcctcccagggacacggctctgccttg

SEQ ID NO: 15956 - DNA, 119 bp, homo sapiens
ttgggctggtttcccatcctcgcctccttcacttgcctcccagggacacggctctgccttggtgatgtcggggtatgagcttctgggccagcagcttcccacccaggcttctccacctt

SEQ ID NO: 15957 - DNA, 119 bp, homo sapiens
tggtgatgtcaggggtatgagcttctgggccagcagcttcccacccaggcttctccaccttcctggcctcacactgtcccccgcctcagatttgtctctgattctgccagggtcctgag

SEQ ID NO: 15958 - DNA, 119 bp, homo sapiens
ttcctggcctccacactgtcccccgcctcagatttgtctctgattctgccagggtcctgaggagctgaccaggggacagacctcctcgatcggcactctcccagggacacactgcttcc

SEQ ID NO: 15959 - DNA, 119 bp, homo sapiens
aggagctgacccaggggacagacctcctcgatcggcactctcccagggacacactgcttcctgctccctaccagcctctctggctttttccgcatcatgggaaccacatctatgggctc

SEQ ID NO: 15960 - DNA, 119 bp, homo sapiens
cctgctccctcaccagcctctctggctttttccgcatcatgggaaccacatctatgggctctgattttcccgggcctcccctctctttttttgggagtcacctgggtcttgtcttagtg

SEQ ID NO: 15961 - DNA, 119 bp, homo sapiens
tctgattttccccgggcctcccctctctttttttgggagtcacctgggtcttgtcttagtgccctcgacctggggctccttcactcgtctcccaggggcagatttcggccttgttgcca

SEQ ID NO: 15962 - DNA, 119 bp, homo sapiens
tgccctcgactctggggctccttcactcgtctcccaggggcagatttcggccttgttgccactgtctggtgacgcgtttctgattcagtgacctcccaggggcatacctctgccaccct

SEQ ID NO: 15963 - DNA, 119 bp, homo sapiens
cactgtctggctgacgcgtttctgattcagtgacctcccaggggcatacctctgccaccctgtggtcaggctgccgagggactggaggccagctttgggcagttcctgccacccgacag

SEQ ID NO: 15964 - DNA, 119 bp, homo sapiens
ctgtggtcagcgctgccgagggactggaggccagctttgggcagttcctgccacccgacaggggtttctttgattgcttgatgtttttgtccctggaaacttgcctcagcatggcaagc

SEQ ID NO: 15965 - DNA, 119 bp, homo sapiens
aggggtttcttttgattgcttgatgtttttgtccctggaaacttgcctcagcatggcaagccctgttttcctgctctctcagctttccgttcccctagaccctgggtcatcctcctgcc

SEQ ID NO: 15966 - DNA, 119 bp, homo sapiens
gccctgttttacctgctctctcagctttccgttcccctagaccctgggtcatcctcctgcctctgtcttttgttccctgctgccctcccgttgacagacttggagcatcctgctggtgt

SEQ ID NO: 15967 - DNA, 119 bp, homo sapiens
cctctgtcttcttgttccctgctgccctcccgttgacagacttggagcatcctgctggtgtgagcgttcgttggttctggagggactccttgtcatcggaggggataagagcggcctgc

SEQ ID NO: 15968 - DNA, 119 bp, homo sapiens
gtgagcgttctgttggttctggagggactccttgtcatcggaggggataagagcggcctgcttactcacgccttgggccggcctagcctgggcgatcgggagggtgcccccatactctc

SEQ ID NO: 15969 - DNA, 119 bp, homo sapiens
gcttactcaccgccttgggccggcctagcctgggcgatcgggagggtgcccccatactctctcccgcagcccgctgttctgcccctcgggactctcctccacactctccttctctctgt

SEQ ID NO: 15970 - DNA, 119 bp, homo sapiens
tctcccgcagtcccgctgttctgcccctcgggactctcctccacactctccttctctctgtaggtgctcgagaacgggtcagagctttaatcgccagccccaggctgcgcatggaaccc

SEQ ID NO: 15971 - DNA, 119 bp, homo sapiens
gtaggtgctccgagaacgggtcagagctttaatcgccagccccaggctgcgcatggaaccctgctgaacggggccttgaggctgtgggatttagggaagatcttgggcctgtcttcgtc

SEQ ID NO: 15972 - DNA, 119 bp, homo sapiens
cctgctgaacaggggccttgaggctgtgggatttagggaagatcttgggcctgtcttcgtccacatcatagcttccctctggtgatgtgcatcctctgcgtccatctcattctccccag

SEQ ID NO: 15973 - DNA, 119 bp, homo sapiens
tccacatcattagcttccctctggtgatgtgcatcctctgcgtccatctcattctccccagccctgctttctctactgcaacagagagggccctccagagcctggctcgagctggggca

SEQ ID NO: 15974 - DNA, 119 bp, homo sapiens
agccctgcttttctctactgcaacagagagggccctccagagcctggctcgagctggggcaggggagtgtggcctcgctctggccctgaggggccttcctggggcacattttcttgctt

SEQ ID NO: 15975 - DNA, 119 bp, homo sapiens
caggggagtggtggcctcgctctggccctgaggggccttcctggggcacattttcttgcttggctggcattctgcgttctcccaggggcagatgtaggtgagtaagttggggctttgtg

SEQ ID NO: 15976 - DNA, 119 bp, homo sapiens
cagcagagctggagccaaggtggaggtgggagatagcatccttggctctcccaggcccccagacagggcaagatgggggtagaaacctggtgcctgatgggtggatgaggcagccttct

SEQ ID NO: 15977 - DNA, 119 bp, homo sapiens
cccagacagggccaagatgggggtagaaacctggtgcctgatgggtggatgaggcagccttctcctagctcctcatgaagcctcccagaggtgtgagagctgtccacgctgctgctctt

SEQ ID NO: 15978 - DNA, 119 bp, homo sapiens
ccttctcctagcctcctcatgaagcctcccagaggtgtgagagctgtccacgctgctgctcttggcagggaaggtggagctgacaggggggcccctcgaggccgctccagcctcctggc

SEQ ID NO: 15979 - DNA, 119 bp, homo sapiens
gctcttggcaggggaaggtggagctgacaggggggcccctcgaggccgctccagcctcctggctgatggctccgcaccaggctggccatggctgccttggccttcttccgctcctcccg

SEQ ID NO: 15980 - DNA, 119 bp, homo sapiens
cctggctgatggcctccgcaccaggctggccatggctgccttggccttcttccgctcctcccgctccttgcttgccggtaggtctcctccaggtaggcctggctggccatgagcaaggc

SEQ ID NO: 15981 - DNA, 119 bp, homo sapiens
ctcccgctcctttgcttgccggtaggtctcctccaggtaggcctggctggccatgagcaaggccttttcctggagctggccacactgagcgacttctgcagagaggcgggccgggctct

SEQ ID NO: 15982 - DNA, 119 bp, homo sapiens
caaggccttttccctggagctggccacactgagcgacttctgcagagaggcgggccgggctctgggtagctctctcccaccgtcaggttgtgggcgctggctgacctgaagcccagggc

SEQ ID NO: 15983 - DNA, 119 bp, homo sapiens
ggctctgggtagcctctctcccaccgtcaggttgtgggcgctggctgacctgaagcccagggcagggggccctccaccgactcccggctctctgttcgagaggccttcttggccagctt

SEQ ID NO: 15984 - DNA, 119 bp, homo sapiens
cagggcagggggcccctccaccgactcccggctctctgttcgagaggccttcttggccagcttcctcctagcagtgagtcaagaagaggcgggtcctgctccctgcgctggtcataggt

SEQ ID NO: 15985 - DNA, 119 bp, homo sapiens
cagcttcctcctcagcagtgagtcaagaagaggcgggtcctgctccctgcgctggtcataggtgctgcggacttgtgcagagctggtgtcccctcgggttcctggaggctggagctgag

SEQ ID NO: 15986 - DNA, 119 bp, homo sapiens
ataggtgctgcgggacttgtgcagagctggtgtcccctcgggttcctggaggctggagctgaggagccgcggcgggaggagccgggcaggctgccgtggcctggggatcctgagtcccg

SEQ ID NO: 15987 - DNA, 119 bp, homo sapiens
gctgaggagccggcggcgggaggagccgggcaggctgccgtggcctggggatcctgagtcccgggagtgtgcctggccagggcctcggggaattccgccaggtacctcatgaaggagcg

SEQ ID NO: 15988 - DNA, 119 bp, homo sapiens
gtcccgggagtgctgcctggccagggcctcggggaattccgccaggtacctcatgaaggagcggcccagccctggcatgagctgcctcgcttcttgggcaggtgggggttgtttgcggc

SEQ ID NO: 15989 - DNA, 119 bp, homo sapiens
ggagcggcccagtccctggcatgagctgcctcgcttcttgggcaggtgggggttgtttgcggccatttcttggttttgtggacctctagctgggcatagagcttcttcagctcgtcctg

SEQ ID NO: 15990 - DNA, 119 bp, homo sapiens
catacccgaatgtctccagggtccaggctgtgctcactccaggctgaggcgatgctgctgccaaggtagagcctgagtgctgcaggtccagctcgtcctcacacacctcatccaccatc

SEQ ID NO: 15991 - DNA, 119 bp, homo sapiens
tccaggctgaggcgatgctgctgccaaggtaggagcctgagtgctgcaggtccagctcgtcctcacacactcatccaccatctcctcccggggaggagcccccagcttccagaactggc

SEQ ID NO: 15992 - DNA, 119 bp, homo sapiens
ctcacctggctgtgtggaaggcagcggaaagcagtagctcattgtgcagggcgatgcccatgtagcgtgctcatggaaggccgagagcacagcccgtgtggcgtagcagaggaagctgc

SEQ ID NO: 15993 - DNA, 119 bp, homo sapiens
agcagtagctcattgtgcagggcgatgcccatgtagcgtggctcatggaaggccgagagcacagcccgttggcgtagcagaggaagctgccccagcacagcagcagcagctcagctgtg

SEQ ID NO: 15994 - DNA, 119 bp, homo sapiens
ctcacccacaaccatgatgtagtcccagcggtcgtggtgacagaggtagaaatggcggccactgggagttggcctcggatcaccagaggtgcgtgctggatgcctcgctccagggcgcc

SEQ ID NO: 15995 - DNA, 119 bp, homo sapiens
aggtagaaatggcggccactgggagtgtggcctcggatcaccagaggtgcgtgctggatgcctcgctccgggcgcccacggtccacacagccaggaagcccagcacaggtagcaggagc

SEQ ID NO: 15996 - DNA, 119 bp, homo sapiens
gaggtgcgtgctggatgcctcgctccagggcgcccacggtccacacagccaggaagcccagcacaggtacaggagcagccccaggcgccgcagcagccgcccgctgctcagaagggcac

SEQ ID NO: 15997 - DNA, 119 bp, homo sapiens
cacagccaggaagcccagcacaggtagcaggagcagccccaggcgccgcagcagccgcccgctgctcagagggcactccgctgggccgttcgagacagaaacagctgcagcactctgcg

SEQ ID NO: 15998 - DNA, 119 bp, homo sapiens
cttgccttgttccggcggcagcggtaggagaccagcatgctcaggaagatggccagcatgcagcaggccggcaggccagcacagcggcccgcagcaccgcggcctcttccaccaggcac

SEQ ID NO: 15999 - DNA, 119 bp, homo sapiens
aggaagatggccagcatgcagcaggcctggcaggccagcacagcggcccgcagcaccgcggcctcttccccaggcacggtgtggcatccatgcagctggtgcagccctcaggacatggc

SEQ ID NO: 16000 - DNA, 119 bp, homo sapiens
gcggcccgcagcaccgcggcctcttccaccaggcacggtgtggcatccatgcagctggtgcagccctcagacatggcagacactgcagcagtctcccagatctgccttctgggaacccg

SEQ ID NO: 16001 - DNA, 119 bp, homo sapiens
gcatccatgcagctggtgcagccctcaggacatggcagacactgcagcagtctcccagatctgccttctggaacccgaattgcccggtagtctggaagtcactctcctctaaccctata

SEQ ID NO: 16002 - DNA, 119 bp, homo sapiens
cttacctgacttctgggctgaggtctggcttgagtccatagaaggtggcagagagtgtgatcagccatcaggtcggagccgtccctcctggcattccaggaaaggaggagacagcctca

SEQ ID NO: 16003 - DNA, 119 bp, homo sapiens
gatcagccatccaggtcggagccgtccctcctggcattccaggaaaggaggagacagcctcacctgctggtgtcccccacatatccatctgcctgcggccacttggggctgccgaggct

SEQ ID NO: 16004 - DNA, 119 bp, homo sapiens
ctcacctgctgcgtgtcccccacatatccatctgcctgcggccacttggggctgccgaggctccctaggcattggtcaacactcgcttcttcagggcaggggtgtccaggtccccagga

SEQ ID NO: 16005 - DNA, 119 bp, homo sapiens
ggctccctaggtcattggtcaacactcgcttcttcagggcaggggtgtccaggtccccaggagggttctctcctgcacccagttcccagacaagtcctgcaggatggtttcctccccag

SEQ ID NO: 16006 - DNA, 119 bp, homo sapiens
aggagggttctcctcctgcacccagttcccagacaagtcctgcaggatggtttcctccccagtccgggtgcctgcagggccagctgtaggtggctggcccctggtggagggttaaaggt

SEQ ID NO: 16007 - DNA, 119 bp, homo sapiens
ccagtccgggtggcctgcagggccagctgtaggtggctggcccctggtggagggttaaaggtcagcaaaccctgtacactcttgggtccccctcggccacgctgcggaccagtgcctgg

SEQ ID NO: 16008 - DNA, 119 bp, homo sapiens
aggtcagcaaagccctgtacactcttgggtccccctcggccacgctgcggaccagtgcctggtaccattcacatcctcctccacactggactcacggatgtcgttggcttgcagcagca

SEQ ID NO: 16009 - DNA, 119 bp, homo sapiens
ctggtaccattccacatcctcctccacactggactcacggatgtcgttggcttgcagcagcatgttgagaaattggcggcctgggcaagggtgcccgctgccccctgtaggcttggggg

SEQ ID NO: 16010 - DNA, 119 bp, homo sapiens
agcatgttgagaaaattggcggcctgggcaagggtgcccgctgccccctgtaggcttggggggagccctgcatggctcctgccccacgcgcttcatagcgctcactgcaattcacctgt

SEQ ID NO: 16011 - DNA, 119 bp, homo sapiens
gggggagccctggcatggctcctgccccacgcgcttcatagcgctcactgcaattcacctgtgatagctctgggcatctccagagtagagataagcgagggcggcctcggccccctcta

SEQ ID NO: 16012 - DNA, 119 bp, homo sapiens
ctgtgatagctgctgggcatctccagagtagagataagcgagggcggcctcggccccctctaggggcactgcatgggtacagatcctggcttgacttgggaagacagagggggcagaga

SEQ ID NO: 16013 - DNA, 119 bp, homo sapiens
tctaggggcacctgcatgggtacagatcctggcttgacttgggaagacagagggggcagagagcggatggccgtggaccccccagagcccaggcacagacaaaacagcagcccagcagc

SEQ ID NO: 16014 - DNA, 119 bp, homo sapiens
gagagcggatgggccgtggaccccccagagcccaggcacagacaaaacagcagcccagcagcccccacaaggagggggcatgaccgctcccctggtgcccatccttggggcagctctca

SEQ ID NO: 16015 - DNA, 119 bp, homo sapiens
cgggctctcagaaaataaactgctttattggaattacaggagtgttggtggccggtgggcagagcctagagggggtgcagccgccaaggcccgggtgtcccagctgttgctcaggagcc

SEQ ID NO: 16016 - DNA, 119 bp, homo sapiens
tgggcagagcctagcagggggtgcagccgccaaggcccgggtgtcccagctgttgctcaggagccgtggccctgcaggagtatggggaggatatgatgtgtggggagcaggggggcagg

SEQ ID NO: 16017 - DNA, 119 bp, homo sapiens
ctcaggagccgtgggccctgcaggagtatggggaggatatgatgtgtggggagcaggggggcaggtgcccagccctccagctgcagcttcctgaggttctagaagtttctcaggcttta

SEQ ID NO: 16018 - DNA, 119 bp, homo sapiens
ggggggcaggtgccccagccctccagctgcagcttcctgaggttctagaagtttctcaggctttacaattgtagttgggagaatacgatggaagggtgaacccgactcccttcaaagga

SEQ ID NO: 16019 - DNA, 119 bp, homo sapiens
tcaggctttacaatgtgtagttgggagaatacgatggaagggtgaacccgactcccttcaaaggaatgatccaaaaatctagtggagctgccgggcacccagaggcaggtgggacagag

SEQ ID NO: 16020 - DNA, 119 bp, homo sapiens
cttcaaaggaatgaatccaaaaatctagtggagctgccgggcacccagaggcaggtgggacagagcaagtgcagacgggtcacaccctccgccggcccgggccgctgcgttctcgccca

SEQ ID NO: 16021 - DNA, 119 bp, homo sapiens
tgggacagagcaaggtgcagacgggtcacaccctccgccggcccgggccgctgcgttctcgcccagctcgtcgcgtattccaacacagacatgttttttcccagcaaaaatgctggctt

SEQ ID NO: 16022 - DNA, 119 bp, homo sapiens
ttctcgcccagctctgtcgcgtattccaacacagacatgttttttcccagcaaaaatgctggctttgcccagctgacaaaaaaattccagaagatgcctttctgcagcagcacgctggt

SEQ ID NO: 16023 - DNA, 119 bp, homo sapiens
atgctggctttgccacagctgacaaaaaaattccagaagatgcctttctgcagcagcacgctggtcctgggcccaggcccctcaggggtcgtcatctgcctcttccaccacctcctcgt

SEQ ID NO: 16024 - DNA, 119 bp, homo sapiens
gcacgctggtcctggggcccaggcccctcaggggtcgtcatctgcctcttccaccacctcctcgtccagtccctggcgtcctccatgctgttgtggcggacctgctcggggacggtgcg

SEQ ID NO: 16025 - DNA, 119 bp, homo sapiens
acctcctcgtccagctccctggcgtcctccatgctgttgtggcggacctgctcggggacggtgcgtggcgtgggagacccagcccccggtgcacggcgtccacggcctgcgggctcacg

SEQ ID NO: 16026 - DNA, 119 bp, homo sapiens
ggacggtgcgtggcagtgggagacccagcccccggtgcacggcgtccacggcctgcgggctcacgtagtggacatgttggccaagggaagccgccgccgcatctcctccaggaatctgt

SEQ ID NO: 16027 - DNA, 119 bp, homo sapiens
ctcaccgtctggtattcctccttccgcacgtagtgctccaccaggaagccatagacgtccccgatgcggtggtgctgtccaggtctggttcctccaggagcagctcacactgcttgatg

SEQ ID NO: 16028 - DNA, 119 bp, homo sapiens
gtgctccaccaggaagccatagacgtccccgatgcggatggtgctgtccaggtctggttcctccaggagagctcacactgcttgatggactccttggggtcctctgtgtacgtcctgcc

SEQ ID NO: 16029 - DNA, 119 bp, homo sapiens
cacacctgcgggcctggatgaacctcttcaccagtgccatcctgctctgcagctgcgccagcctggtctctggtccagggggctcttggccttggccttggccaggcacttgtaggcct

SEQ ID NO: 16030 - DNA, 119 bp, homo sapiens
ccagcctggtctcctggtccagggggctcttggccttggccttggccaggcacttgtaggcctcggtcacgccccgtgggctttgtcgtagttctggtattcatcaatctccacctgta

SEQ ID NO: 16031 - DNA, 119 bp, homo sapiens
tgcacctgggcacaagcgtcataaaagccagccaggaggtccagggcccgccccttggtgtagaagccgtgatgttcttcatgatctccggctccttccgccagtccagggactgcagg

SEQ ID NO: 16032 - DNA, 119 bp, homo sapiens
cccttggtgtagaagccgatgatgttcttcatgatctccggctccttccgccagtccagggactgcaggagttagcagccatgatgtagatttccttctgcctggacacgctcgcgaag

SEQ ID NO: 16033 - DNA, 119 bp, homo sapiens
cagtccagggactgcaggtagttagcagccatgatgtagatttccttctgcctggacacgctcgcgaagacgtgattttctccgtgtctccggatttgagcagcgccctcatggcctag

SEQ ID NO: 16034 - DNA, 119 bp, homo sapiens
ctcaccttcagcttgttgccggcctgcgtgtacttcttggtggccaggtggtagctgccctggcgcatgagcagtctgctatctgctccagcagctcccgccgcgactcctcaggcagg

SEQ ID NO: 16035 - DNA, 119 bp, homo sapiens
tggtagctgccctggcgcatgcagcagtctgctatctgctccagcagctcccgccgcgactcctcaggcggtccgaggagtccttggccacggtcatcttttccgccatctcctcggtg

SEQ ID NO: 16036 - DNA, 119 bp, homo sapiens
tcccgccgcgactcctcaggcaggtccgaggagtccttggccacggtcatcttttccgccatctcctcgtgatgctcatgttctgccccaggcacagctgcagggcttcctgatactgc

SEQ ID NO: 16037 - DNA, 119 bp, homo sapiens
cgtaccttcctggcagccagcagcagctctaccgccctctcgtactgactgtgctcgatgaagaagtcgagcagcgggccaggagcgcagggtctgacgtctcatccaggtcctctgct

SEQ ID NO: 16038 - DNA, 119 bp, homo sapiens
ctctcgtactgactgtgctcgatgaagaagtcggagcagcgggccaggagcgcagggtctgacgtctcaccaggtcctctgctatgagctgtagggccacaaactgctgggtggcaaag

SEQ ID NO: 16039 - DNA, 119 bp, homo sapiens
cagcgggccaggagcgcagggtctgacgtctcatccaggtcctctgctatgagctgtagggccacaaacgctgggtggcaaaggccagctccagggccttggagaagtggccagcctgc

SEQ ID NO: 16040 - DNA, 119 bp, homo sapiens
ctcaccttgtggtacagcatgaccgccctgtccatctgcacgcccttctcctcgtagtatcgggccgcccgatcatgtcctcgggggagctcagcagggccaagttcatgagctggtcg

SEQ ID NO: 16041 - DNA, 119 bp, homo sapiens
tgaccgccctgtccatctgcacgcccttctcctcgtagtatcgggccgcctcgatcatgtcctcggggggctcagcagggccaagttcatgagctggtcgtccaggccgttctcctgca

SEQ ID NO: 16042 - DNA, 119 bp, homo sapiens
ggtaccttgcacaggcggatggcattcttgaaggcctgtgcccgggtgtagaagtgcaccgcctgcccgcctcctcctggctctcgtactggcgggcgaggtggtaggaggccgccagg

SEQ ID NO: 16043 - DNA, 119 bp, homo sapiens
cctgtgcccgggtgtagaagtgcaccgcctgcccgacctcctcctggctctcgtactggcgggcgaggtgtaggaggccgccaggtttcctgtctcgttggctatttgcgcagcctaga

SEQ ID NO: 16044 - DNA, 119 bp, homo sapiens
cttaccttctggacattgccctggaagcagtggatgcggaccagggagaagtggtcccgggccagctcgagtagtgcagcgcggcgtccatctcgccctggctctccaggtactgcgcc

SEQ ID NO: 16045 - DNA, 119 bp, homo sapiens
gaagcagtggatgcggaccagggagaagtggtcccgggccagctcgtagtagtgcagcgcggcgtccattcgccctggctctccaggtactgcgcccaccaccgccacagggtcctgcg

SEQ ID NO: 16046 - DNA, 119 bp, homo sapiens
ctcactaactgagggcccggctgcagtcggcgctggcctccaggtgcccggcatagcggtggtaggtgcgcgcaggtgcacgcgatcgtggtgctcggctacctggagggcctcctgcc

SEQ ID NO: 16047 - DNA, 119 bp, homo sapiens
caggtgcccggcatagcggtggtaggtgctgcgcaggtgcacgcgatcgtggtgctcggctacctggaggcctcctgccaccggcccgcagcctggtagaacttgttcaggaggtcgtg

SEQ ID NO: 16048 - DNA, 119 bp, homo sapiens
acgcgatcgtggtgctcggctacctggagggcctcctgccaccggcccgcagcctggtagaacttgttcggaggtcgtggcgcttgcacttcctgtacagctgctcggcgtcctcctga

SEQ ID NO: 16049 - DNA, 119 bp, homo sapiens
ctcaccagcatgcccagctgcgtggccagcacggccacgcgggcctctagctccggctcctgctccgcccacgcagcgctcgggccccgcgggcatggcccatgttccccaggcacacc

SEQ ID NO: 16050 - DNA, 119 bp, homo sapiens
ccacgcgggcctctagctccggctcctgctccgcctcacgcagcgctcgggccccgcgggcatggcccagttccccaggcacaccttggccacgtccagccgctgggtcttcacgcaca

SEQ ID NO: 16051 - DNA, 119 bp, homo sapiens
ctcacgcagcgctcgggccccgcgggcatggcccatgttccccaggcacaccttggccacgtccagccgtgggtcttcacgcacatgcgcgccatgttctcccagacggcctcactgtg

SEQ ID NO: 16052 - DNA, 119 bp, homo sapiens
ctcaccttttgatgagcttgatggatttgaaggcttcgtccatgtctcctatggtgacaaagaagctgagtggagcatggcgtcccgggtggccttgtcgcagtcctccagccccacaa

SEQ ID NO: 16053 - DNA, 119 bp, homo sapiens
ctcctatggtgacaaagaagctgaagtggagcatggcgtcccgggtggccttgtcgcagtcctccagcccacaaagtctcgcaggggtctcctggacaccatctgagggatgtggtggc

SEQ ID NO: 16054 - DNA, 119 bp, homo sapiens
tggccttgtcgcagtcctccagccccacaaagtctcgcaggggtctcctggacaccatctgagggatgtgtggcacccaggctccacctcgtcttctctgtctgcttcttcgggctaaa

SEQ ID NO: 16055 - DNA, 119 bp, homo sapiens
cgtacctttcttgtgaagtagtaataaggcacttccatccccaggagactgtgggaggtggcaggccggggaagctctcatgaagcaggaagccgtgctcttcggaaatgaagaaggac

SEQ ID NO: 16056 - DNA, 119 bp, homo sapiens
aataaggcacttccatccccaggagactgtgggaggtggcaggccgggggaagctctcatgaagcaggagccgtgctcttcggaaatgaagaaggacaggatcaaaacatctgcctggg

SEQ ID NO: 16057 - DNA, 119 bp, homo sapiens
cgtaccgcagggccagcgcgcccatcttggggctgcccgtttgcagactgaggctgggagcgcggcgtccctgcacggcttcgcatacaaacagccggggctcactctggtcccagaag

SEQ ID NO: 16058 - DNA, 119 bp, homo sapiens
ggagcgcggcgtctcctgcacggcttcgcatacaaacagccggggctcactctggtcccagaagtggttacgggaacataatttttcagtccctcatccacaaagaggtggctcctaaa

SEQ ID NO: 16059 - DNA, 119 bp, homo sapiens
cttacttattagtctcttgctcattaaaggacagcgtctctctccgatcaatttgtccagtcttgaagtaaagacggtcactgtgtccatttcaacatcgtagaagcagattttggaat

SEQ ID NO: 16060 - DNA, 119 bp, homo sapiens
cattaaaggacagcgtctctctccgatcaatttgtccagtcttgaagtcaaagacggtcactgtgtccattcaacatcgtagaagcagattttggaatcagggctgttgtcagcctagg

SEQ ID NO: 16061 - DNA, 119 bp, homo sapiens
tttaccttcgggaaagatcaaagcttttaaagtgagccaagtctgtccctacaaccaggaaattcccacgatgtccaagaagcagggattcccctcagtctccgagaaaaggaggagtt

SEQ ID NO: 16062 - DNA, 119 bp, homo sapiens
caaagcttttaaagtgagccaagtctgtccctacaaccaggaaattcccacagatgtccaagaagcaggattcccctcagtctccgagaaaaggaggagttgtttgacagtcccctgag

SEQ ID NO: 16063 - DNA, 119 bp, homo sapiens
gtcaccttggtggcaaacactccactgatgtgcatgtcggtgcgcaggctgtgtgcgacccccgtggacggaagcacacattcagcagactcggggagacctgcatggcggccacttgc

SEQ ID NO: 16064 - DNA, 119 bp, homo sapiens
gctgtgtgcgacccccgtggacaggaagcacacattcagcagactcggggagacctgcatggcggccactgctggtggaagtgtgacgacatggcccgctcgctgaggatggccacgga

SEQ ID NO: 16065 - DNA, 119 bp, homo sapiens
gggagacctgcatggcggccacttgctggtggaagtgtgacgacatggcccgctcgctgaggatggccaggagatgacgctgttcactgccagcaggttcttcctggaaccccacttca

SEQ ID NO: 16066 - DNA, 119 bp, homo sapiens
tgtacctggatttgcgtgatgtttccttggagctcggtaggggtctgaagggcccacctgtccttgcccctgccccggggctgcccaggaagtctggtactttcctccacatggctact

SEQ ID NO: 16067 - DNA, 119 bp, homo sapiens
gtaggggtctgaagggcccacctgtccttgccctctgccccggggctgcccaggaagtctggtactttctccacatggctactcgccctctgtcggtaccagcggccagaagacctaca

SEQ ID NO: 16068 - DNA, 119 bp, homo sapiens
ctcaccttcatcacttcttctgctttgccctcaggaggcaccgtgtacagggacagccggaggttctcttgaccaccaccagtgcctccctcttctccatgtagaacagcatctgaatc

SEQ ID NO: 16069 - DNA, 119 bp, homo sapiens
ggaggcaccgtgtacagggacagccggaggttctctgtgaccaccaccagtgcctccctcttctccatgagaacagcatctgaatcgtgctgtctgcggacaccacctgagtggtcttg

SEQ ID NO: 16070 - DNA, 119 bp, homo sapiens
tctgtgaccaccaccagtgcctccctcttctccatgtagaacagcatctgaatcgtgctgtctgcggacccacctgagtggtcttgcccttctcatccacatagtgcactgtccctggg

SEQ ID NO: 16071 - DNA, 119 bp, homo sapiens
ctcaccgtccatcagactgacaaagaacaacagcccctcgtgagaccccatcttcagcaaacttccagactgctcttcttccagttaaacatgtccagggctttctcatcaccgctcac

SEQ ID NO: 16072 - DNA, 119 bp, homo sapiens
cccctcgtgagaccccatcttcagcaaacttccagaactgctcttcttccagttaaacatgtccagggcttctcatcaccgctcacagctgcctttgccaactgaaccaggtccctgaa

SEQ ID NO: 16073 - DNA, 119 bp, homo sapiens
cttactcgccaggaggggggagccggaagatgcagtgcgtgaggtgtttcccatactcgtgtttcagcaaggcgtcccttgcactcggcccctttggtccaacctccacaagagcaaga

SEQ ID NO: 16074 - DNA, 119 bp, homo sapiens
gaggggggagccggaagatgcagtgcgtgaggtgtttcccatactcgtgtttcagcagaggcgtcccttcactcggcccctttggtccaacctccacaagagcaagacaccaagctgga

SEQ ID NO: 16075 - DNA, 119 bp, homo sapiens
ctcaccctgtccccagacagcaggcagtttccactggggctccaacggagcacggtgatgtcggctgtggtgtcaggggcatcgtgtgctgctccttgtcctgcttgttaaacaccgtc

SEQ ID NO: 16076 - DNA, 119 bp, homo sapiens
gatgtcggctgtgtgtgtcaggggcatcgtgtgctgctccttgtcctgcttgttaaacaccgtcacttcccagtctcccagcccacagccagcaccagccgcgtcgggtgccagcacag

SEQ ID NO: 16077 - DNA, 119 bp, homo sapiens
acaccgtcacttctccagtctcccagcccacagccagcaccagccgcgtcgggtgccagcacagggaagaacccggaacggcctctcgacgtgtgtatctggcacgcactccccctgca

SEQ ID NO: 16078 - DNA, 119 bp, homo sapiens
ctcacttgctccaggtaaatatccacgctgcctgttgaggttgtgctgatgtaagcaactgccaagaatgatggacagggtgccagctgataaatgagggtgaccctgctgcatccggg

SEQ ID NO: 16079 - DNA, 119 bp, homo sapiens
ttgaggttgtgctgatgtaagcaactgccaagaatggatggacagggtgccagctgataaatgagggtgccctgctgcatccggggcttctatctggtggtcataatagagggccatga

SEQ ID NO: 16080 - DNA, 119 bp, homo sapiens
tggatggacagggtgccagctgataaatgagggtgaccctgctgcatccggggcttctatctggtggtctaatagagggccatgacggaactcaggcctcctcagcgctgaaacctgca

SEQ ID NO: 16081 - DNA, 119 bp, homo sapiens
ctcacctctgccaggccgctgagccgccgcgcgttgccgggacaacggcgcgccaggaacgcggaaataccgaaggtgagcgaggcggccccgaggactcccgaagcgccccgagcggc

SEQ ID NO: 16082 - DNA, 119 bp, homo sapiens
gacaacggcgcgccaggaacgcggaaatagccgaaggtgagcgaggcggccccgaggactcccgaagcgcccgagcggccggaaagagccgaaggcgatcgggcacgcacgtgcagctc

SEQ ID NO: 16083 - DNA, 119 bp, homo sapiens
gcgaggcggccccgaggactcccgaagcgccccgagcggccggaaagagccgaaggcgatcgggcacgccgtgcagctccgaggcccgagcgtcgggggccaggttattccgctctgca

SEQ ID NO: 16084 - DNA, 119 bp, homo sapiens
ttaactgcctcagacgtgcttccacacttctcagaactcaggttcgcgcccgattccacactccgagctccacgccgttttcttctcacgtatccgtcaacactgctgcggccaatcac

SEQ ID NO: 16085 - DNA, 119 bp, homo sapiens
cagaactcaggttcgcgcccgattccacactccgagctaccacgccgttttcttctcacgtatccgtcacactgctgcggccaatcacagcacgggccctggcctattggctgtctgtc

SEQ ID NO: 16086 - DNA, 119 bp, homo sapiens
gctaatcgcatggattccctttattgaactgtactagttactgcagtcagattaagtcacatttaaaagagaccatccagttgcactgaaaccgattatattcattacatagttttaat

SEQ ID NO: 16087 - DNA, 119 bp, homo sapiens
aagtcacatttaaaagcagaccatccagttgcactgaaaccgattatattcattacatagttttaatcatgtccggtgaactggcaaatccaatcaaagcattagtctttaattaaaaa

SEQ ID NO: 16088 - DNA, 119 bp, homo sapiens
tacatagttttaatcactgtccggtgaactggcaaatccaatcaaagcattagtctttaattaaaaaataaaaggaaatattcagacaatagccaagcaatcacatcacgatgcacaat

SEQ ID NO: 16089 - DNA, 119 bp, homo sapiens
tctttaattaaaaaattaaaaggaaatattcagacaatagccaagcaatcacatcacgatgcacaattactagaattgcaattaaaaagtagttaaccgaagggggtggggggtggggg

SEQ ID NO: 16090 - DNA, 119 bp, homo sapiens
tcacactaattcttttttaaaaactatcaatataatacatgaaggaacaaaggacaatagccttaaaaacaggtttctctaactctagaaatgtagtctgcggcggaaagtctaaaagc

SEQ ID NO: 16091 - DNA, 119 bp, homo sapiens
gacaatagccttaaaaagcaggtttctctaactctagaaatgtagtctgcggcggaaagtctaaaagcaactagctgtagcaggacaataaaaaatactgagcatggaatacttttaat

SEQ ID NO: 16092 - DNA, 119 bp, homo sapiens
cggaaagtctaaaagcacactagctgtagcaggacaataaaaaatactgagcatggaatacttttaatcctgccattaatattcatttccagctgcttataatagcagcgcctcatggc

SEQ ID NO: 16093 - DNA, 119 bp, homo sapiens
atggaatacttttaatctctgccattaatattcatttccagctgcttataatagcagcgcctcatggccaatcattagagttttacatctgggttgcaaatgacactttgattggatgt

SEQ ID NO: 16094 - DNA, 119 bp, homo sapiens
agcagcgcctcatggccaaatcattagagttttacatctgggttgcaaatgacactttgattggatgtatgttcaaatggccctccccacggcgtctccggcaagccttctgcggagag

SEQ ID NO: 16095 - DNA, 119 bp, homo sapiens
cactttgattggatgtaatgttcaaatggccctccccacggcgtctccggcaagccttctgcggagagggtcctgttgagcgatccctcactgtgcgtgctggctcatcgtgtggttct

SEQ ID NO: 16096 - DNA, 119 bp, homo sapiens
cttacctgtgaaacacacggggcatttgaaggtgccgcccatgccctcgaagctgtgctcaatgaggtgcagaggagcttggccggggagtcgaacatctggttgcacagcttacactc

SEQ ID NO: 16097 - DNA, 119 bp, homo sapiens
catttgaaggtgccgcccatgccctcgaagctgtgctcaatgaggtgacagaggagcttggccggggagcgaacatctggttgcacagcttacactcgtggttgatgccttcctctgca

SEQ ID NO: 16098 - DNA, 119 bp, homo sapiens
cttacccggggcactggcgatgtctgggtgcctttccggggcccactggtctccggcgtgaggtcacggggtccacctgcatgtggctctccaggtcttcggcactctcaaacttgaca

SEQ ID NO: 16099 - DNA, 119 bp, homo sapiens
gaggtcacggtggtccacctgcatgtggctctccaggtcttcggcactctcaaacttgacactgcactcgggcaacggaggccggcacagggccggtcggcgggctcgggcggggccag

SEQ ID NO: 16100 - DNA, 119 bp, homo sapiens
cactgcactcggggcaacggaggccggcacagggccggtcggcgggctcgggcggggccaggccacccactgtccgttggcgctgcgggccatgcagccggcgcagaggccgtagggca

SEQ ID NO: 16101 - DNA, 119 bp, homo sapiens
aggccacccacctgtccgttggcgctgcgggccatgcagccggcgcagaggccgtagggcagcccattgcgtcaagcttcaccaggtcctgcttgctgcggaactccttgaggcacagg

SEQ ID NO: 16102 - DNA, 119 bp, homo sapiens
cagcccattgacgtcaagcttcaccaggtcctgcttgctgcggaactccttgaggcacagggcgcactttagagcttctgcagcccctggccattgggggaggacgccgctgagctgcc

SEQ ID NO: 16103 - DNA, 119 bp, homo sapiens
gggcgcacttgtagagcttctgcagcccctggccattgggggaggacgccgctgagctgcccgccagctctgcatgtggaaggtgccatggatcttgagctcaagcgtggaagtgactg

SEQ ID NO: 16104 - DNA, 119 bp, homo sapiens
cccgccagcttctgcatgtggaaggtgccatggatcttgagctcaagcgtggaagtgactgtctgcatgagaccacacagcggaagcccgtgagtgagttgcgcaggtcagggtgcatc

SEQ ID NO: 16105 - DNA, 119 bp, homo sapiens
tgtctgcatgcagaccacacagcggaagcccgtgagtgagttgcgcaggtcagggtgcatctggcagtgtcaataaactcctcctcgctctgcaggggcatcttgcagatgcgacaggt

SEQ ID NO: 16106 - DNA, 119 bp, homo sapiens
tctggcagtgctcaataaactcctcctcgctctgcaggggcatcttgcagatgcgacaggtgcccgtgtcaggctcttgctgtgggtcaccttgtgttcggtgagcgtcagcagcgaag

SEQ ID NO: 16107 - DNA, 119 bp, homo sapiens
gtgcccgtgtccaggctcttgctgtgggtcaccttgtgttcggtgagcgtcagcagcgaagggaagcgccaccacagatgggacacatgtagtgcttggcagggccccggtgcgtctgc

SEQ ID NO: 16108 - DNA, 119 bp, homo sapiens
agggaagcgctcaccacagatgggacacatgtagtgcttggcagggccccggtgcgtctgcaggtgctccgtagcccgttctccgagaagaaagtccgtgaacaaacgttgcacttgtg

SEQ ID NO: 16109 - DNA, 119 bp, homo sapiens
gcaggtgctcccgtagcccgttctccgagaagaaagtccgtgaacaaacgttgcacttgtgactgccctgataaactcagccttcttgcgtgagccatcatcctcgcccggccggatat

SEQ ID NO: 16110 - DNA, 119 bp, homo sapiens
tgactgcccttgataaactcagccttcttgcgtgagccatcatcctcgcccggccggatattgtggtccgcagccggtgattctgcagcagcacctccatggtgtaggccgccccacag

SEQ ID NO: 16111 - DNA, 119 bp, homo sapiens
attgtggtcccgcagccggtgattctgcagcagcacctccatggtgtaggccgccccacagatgtcacaccgtacatgggctccgacgcgtccacgtcatcctcgctggcctcatggct

SEQ ID NO: 16112 - DNA, 119 bp, homo sapiens
agatgtcacagccgtacatgggctccgacgcgtccacgtcatcctcgctggcctcatggctgttaggtgctcagggttcttaagcagcatgccctgcaggtcagcaggctcagctttct

SEQ ID NO: 16113 - DNA, 119 bp, homo sapiens
ctgttaggtgcctcagggttcttaagcagcatgccctgcaggtcagcaggctcagctttcttggtggccttgggggtaccccattggccgtgccgttctcggtcgcagcatcaaacaca

SEQ ID NO: 16114 - DNA, 119 bp, homo sapiens
cttggtggccattgggggtaccccattggccgtgccgttctcggtcgcagcatcaaacacacagtgctttcccgcaggtgcttctccagcaggatgatggcgtggaaggccttgctgca

SEQ ID NO: 16115 - DNA, 119 bp, homo sapiens
cacagtgcttctcccgcaggtgcttctccagcaggatgatggcgtggaaggccttgctgcagaacttacgttatacttcttgctgtgtgtggtgatgtggcactgcagctccacctcgg

SEQ ID NO: 16116 - DNA, 119 bp, homo sapiens
cagaacttacagttatacttcttgctgtgtgtggtgatgtggcactgcagctccacctcggtgctgaagtctccccacagaagatgcacttgtgagccttggccgggttgcccaggtgg

SEQ ID NO: 16117 - DNA, 119 bp, homo sapiens
ggtgctgaaggtctccccacagaagatgcacttgtgagccttggccgggttgcccaggtggctgtgtttacgtgcacctgcaggtcagcctccttgcggaagtcccagttgcaggccgt

SEQ ID NO: 16118 - DNA, 119 bp, homo sapiens
ggctgtgtttgacgtgcacctgcaggtcagcctccttgcggaagtcccagttgcaggccgtgcagcggtcatcttcttctcattgctgtgcttcaccgccaggtgcacctggatggaca

SEQ ID NO: 16119 - DNA, 119 bp, homo sapiens
gtgcagcggtacatcttcttctcattgctgtgcttcaccgccaggtgcacctggatggacaccttggagcgaagacctcctgacacagggtgcagtggtacaacacaaaggtgtgcatg

SEQ ID NO: 16120 - DNA, 119 bp, homo sapiens
caccttggagtcgaagacctcctgacacagggtgcagtggtacaacacaaaggtgtgcatgtccagcagtgcttctgcaggtcatccaccgaggaaaattgcttgtcgcagctctcgca

SEQ ID NO: 16121 - DNA, 119 bp, homo sapiens
tgtccagcaggtgcttctgcaggtcatccaccgaggaaaattgcttgtcgcagctctcgcacacatagtggtcgacgtggtcatgtaatgcactgtcaggtgctgcaggagggactcct

SEQ ID NO: 16122 - DNA, 119 bp, homo sapiens
cacacatagtgggtcgacgtggtcatgtaatgcactgtcaggtgctgcaggagggactcctgggagtcaagtcctctttgcactgggggcacgcttgcttccgcagcagcagctccagg

SEQ ID NO: 16123 - DNA, 119 bp, homo sapiens
ctgggagtcaaagtcctctttgcactgggggcacgcttgcttccgcagcagcagctccaggtgcagcttaggtgggtctggaagctctcaaagttggagaacttgaggtcgcattgatt

SEQ ID NO: 16124 - DNA, 119 bp, homo sapiens
ggtgcagcttcaggtgggtctggaagctctcaaagttggagaacttgaggtcgcattgattgcaaggatctccccattggagatggagttggcgcttgctgagagccgctgccgcttcg

SEQ ID NO: 16125 - DNA, 119 bp, homo sapiens
ttgcaaggatactccccattggagatggagttggcgcttgctgagagccgctgccgcttcggggaagaccctccacatcggacgagactgggctctgctcggccttggacttcttgctg

SEQ ID NO: 16126 - DNA, 119 bp, homo sapiens
cggggaagacacctccacatcggacgagactgggctctgctcggccttggacttcttgctgtgggccagggaatgttcttgtggttctccttgatgtgcttggtgagtttcaggatgga

SEQ ID NO: 16127 - DNA, 119 bp, homo sapiens
tgtgggccagtggaatgttcttgtggttctccttgatgtgcttggtgagtttcaggatggagccaaagagggggagttggtgcagtaggggcaggaatagacctccatgaaggactgcg

SEQ ID NO: 16128 - DNA, 119 bp, homo sapiens
gagccaaagatgggggagttggtgcagtaggggcaggaatagacctccatgaaggactgcgtgggctgcccaccggagactctagtttggcactgcccacactgcagtgggcctgctgg

SEQ ID NO: 16129 - DNA, 119 bp, homo sapiens
cgtgggctgcaccaccggagactctagtttggcactgcccacactgcagtgggcctgctggatgtgctcgtgagggaggactcagtaaggaaacccatggagcactggttgcagaagaa

SEQ ID NO: 16130 - DNA, 119 bp, homo sapiens
ggatgtgctcggtgagggaggactcagtaaggaaacccatggagcactggttgcagaagaaagcattataccgtcagaggggttggcgttggggccgcagtgggagacgcggatgtgct

SEQ ID NO: 16131 - DNA, 119 bp, homo sapiens
aaagcattattaccgtcagaggggttggcgttggggccgcagtgggagacgcggatgtgctcctgcaggtattgatgtcggcgaacatctcggggcagtagttgcagtggaaggcagag

SEQ ID NO: 16132 - DNA, 119 bp, homo sapiens
ctcctgcaggctattgatgtcggcgaacatctcggggcagtagttgcagtggaaggcagagatgttgccaactgcatcacagggtaggcatggttcttgtgcagcttgcgaacgtgctc

SEQ ID NO: 16133 - DNA, 119 bp, homo sapiens
agatgttgccaaactgcatcacagggtaggcatggttcttgtgcagcttgcgaacgtgctcgttgaggtgtagagggtgggcatggagtccaggcagatctgacatgtgtggctctgct

SEQ ID NO: 16134 - DNA, 119 bp, homo sapiens
tcgttgaggttgtagagggtgggcatggagtccaggcagatctgacatgtgtggctctgctggggcttgccgcgtggatggtcttcaggtggatctccagcacggccaggctgttaaag

SEQ ID NO: 16135 - DNA, 119 bp, homo sapiens
ctggggcttgtccgcgtggatggtcttcaggtggatctccagcacggccaggctgttaaagtcccgcttgaacaataggggcagctatagaccaccttggtccagccctgcccgtcatc

SEQ ID NO: 16136 - DNA, 119 bp, homo sapiens
agtcccgcttggaacaataggggcagctatagaccaccttggtccagccctgcccgtcatcccgcatctcttctgcccccgcagcggcttcaaggtggagtccggggtggagccacgct

SEQ ID NO: 16137 - DNA, 119 bp, homo sapiens
tcccgcatcttcttctgcccccgcagcggcttcaaggtggagtccggggtggagccacgctccacagagcgctggagtcgggtgtggcgctgctcatggaggccacgctgcccagtaca

SEQ ID NO: 16138 - DNA, 119 bp, homo sapiens
ctccacagaggcgctggagtcgggtgtggcgctgctcatggaggccacgctgcccagtacagggtcgggctgacactgtggttgctggagtcgggctgccggtggctgtccaggtggca

SEQ ID NO: 16139 - DNA, 119 bp, homo sapiens
cagggtcgggactgacactgtggttgctggagtcgggctgccggtggctgtccaggtggcagtagacacttccactgaggagaactgctcagggcacatggggcacttgtgtttctggt

SEQ ID NO: 16140 - DNA, 119 bp, homo sapiens
cagtagacaccttccactgaggagaactgctcagggcacatggggcacttgtgtttctggttggcgtggcttggtggatatgggcgagcagtgtgttctcgtcgacgaagacctcaggg

SEQ ID NO: 16141 - DNA, 119 bp, homo sapiens
gttggcgtgggcttggtggatatgggcgagcagtgtgttctcgtcgacgaagacctcagggcagtgaatcactgcaggtccgccttctcggacagctgcgggtggcgggtgagcacgtg

SEQ ID NO: 16142 - DNA, 119 bp, homo sapiens
ggcagtgaatgcactgcaggtccgccttctcggacagctgcgggtggcgggtgagcacgtgcttctccactcctccgtctggctgaaggtgtcctcgcagtagtcgcacatgaagtcgt

SEQ ID NO: 16143 - DNA, 119 bp, homo sapiens
tgcttctccagctcctccgtctggctgaaggtgtcctcgcagtagtcgcacatgaagtcgtccttcttgcttccttctccgacttggccagatgctccttgttctttttgtgggcctgc

SEQ ID NO: 16144 - DNA, 119 bp, homo sapiens
gtccttcttggcttccttctccgacttggccagatgctccttgttctttttgtgggcctgcatgtggcttgcagcgagctggtggaggagaagccgcgcttgcacacagtgcacttgaa

SEQ ID NO: 16145 - DNA, 119 bp, homo sapiens
gcatgtggctctgcagcgagctggtggaggagaagccgcgcttgcacacagtgcacttgaagggcttgcggagctgtgggtcttcaggtggatcttgaggtggtcgctgcgggagaagg

SEQ ID NO: 16146 - DNA, 119 bp, homo sapiens
aagggcttgctggagctgtgggtcttcaggtggatcttgaggtggtcgctgcgggagaaggctgcctcgactcgtggcagtgatacttcttgtcgcccgtatgcagcttgatgtgccgg

SEQ ID NO: 16147 - DNA, 119 bp, homo sapiens
ggctgcctcgcactcgtggcagtgatacttcttgtcgcccgtatgcagcttgatgtgccggtcacggctctcttgtgcttgaagaggcggctgcagtaggtgcacttgaacggcagctt

SEQ ID NO: 16148 - DNA, 119 bp, homo sapiens
ggtcacggctcctcttgtgcttgaagaggcggctgcagtaggtgcacttgaacggcagcttgtcgctgtgatctgctcgtgcctcttcaagtagctcaagcggatgaaggacttgtcgc

SEQ ID NO: 16149 - DNA, 119 bp, homo sapiens
ttgtcgctgtggatctgctcgtgcctcttcaagtagctcaagcggatgaaggacttgtcgcagaactggaagggtatggcaggcccgtgcccccttcctcctcgccgaggccgaggtca

SEQ ID NO: 16150 - DNA, 119 bp, homo sapiens
gcagaactggcaagggtatggcaggcccgtgcccccttcctcctcgccgaggccgaggtcacaaccatcccgatcatctgcgtgggtgacgcaacatccttgctggagggagacgaggc

SEQ ID NO: 16151 - DNA, 119 bp, homo sapiens
attacctccaggacagcggtgggcccggtggtccgtcaggtctgccagagactcgaagtcctgctgacatgatcgcaggtgtaaattgattcatcctccatgtcttcatcatcctcatt

SEQ ID NO: 16152 - DNA, 119 bp, homo sapiens
cagagactcgaagtcctgctgacagtgatcgcaggtgtaaattgattcatcctccatgtcttcatcatctcatttctctcctcttgacttgtcacgctgttcctgtcttccagcgcacg

SEQ ID NO: 16153 - DNA, 119 bp, homo sapiens
ttcatcctccatgtcttcatcatcctcatttctctcctcttgacttgtcacgctgttcctgtcttccaggcacggctggttttctgatcgcactctggctctccttctaggcctcctgc

SEQ ID NO: 16154 - DNA, 119 bp, homo sapiens
cttaccaaaactacctggactccaattccaagttctttaaggacgcaacaaaacctccttaatcttcgacccaaaattagtcacctgtgatactcaagtaggggtttgactaagcattt

SEQ ID NO: 16155 - DNA, 119 bp, homo sapiens
caacaaaacctccttaatcttcgatcccaaaattagtcacctgtgatactcaagtaggggtttgactaacatttctctctgacctttgaaaaggccactggggaagaaagcaaagggac

SEQ ID NO: 16156 - DNA, 119 bp, homo sapiens
atactcaagtaggggtttgactaagcatttctctctgacctttgaaaaggccactggggaagaaagcaagggacatgataaaatgaggatgcctgaaaggagggtccccgctgcaacag

SEQ ID NO: 16157 - DNA, 119 bp, homo sapiens
aaaggccactggggaagaaagcaaagggacatgataaaatgaggatgcctgaaaggagggtccccgctgaacagtggtcctcttcagggggacattccggagggtttgattttcttctc

SEQ ID NO: 16158 - DNA, 119 bp, homo sapiens
cccccatgatgcagtgggagtccgagcctctgcgtcgtccgcttgggacgcgccggcggaggagtggcggcggaggagtggcgcgctgagacgccgctcgaagcgccgagtcgcggggc

SEQ ID NO: 16159 - DNA, 119 bp, homo sapiens
cgcgccggcggaggagtggcgcgcggaggagtggcgcgctgagacgccgctcgaagcgccgagtcgcgggcagcagaggcgtaaggagtaggcggggcgagccggctgggctcagggtc

SEQ ID NO: 16160 - DNA, 119 bp, homo sapiens
gctcgaagcgccgagtcgcggggcagcagaggcgtaaggagtaggcggggcgagccggctgggctcaggtccaccagctcacccgggtcgaggggcaatctgaggcgactggtgacgcg

SEQ ID NO: 16161 - DNA, 119 bp, homo sapiens
ggcgagccggctgggctcagggtccaccagctcacccgggtcgaggggcaatctgaggcgactggtgaccgcttatccacttccctcctcccgcctccccctggggtggcgctcgctgg

SEQ ID NO: 16162 - DNA, 119 bp, homo sapiens
caatctgaggcgactggtgacgcgcttatccacttccctcctcccgcctccccctggggtggcgctcgcggtgacgtagtgagtgtgatggccgccgcgaggccgggaaggtgaaggtg

SEQ ID NO: 16163 - DNA, 119 bp, homo sapiens
ataagtcaggactggtggagtcaacacagtcaatcaatagccaacctcaacctgagacaggacagaagaaactcagaatctttttgtcttttggacttcagccatgtccatgatgccta

SEQ ID NO: 16164 - DNA, 119 bp, homo sapiens
aatagccaacctcaacctgagacaggacagaagagaactcagaatctttttgtcttttggacttcagcctgtccatgatgcctaccctgtgaagatctctcaccatccaaaaaagtaag

SEQ ID NO: 16165 - DNA, 119 bp, homo sapiens
tgcagcgcaatgtccctgctcttctctcgatgcaactctatcgtcacagtcaagaaaaataagagacactggctgaggtgaatgcatccccacttaagcactttgtcactgccaagaag

SEQ ID NO: 16166 - DNA, 119 bp, homo sapiens
actctatcgtcacagtcaagaaaaataagagacacatggctgaggtgaatgcatccccacttaagcacttgtcactgccaagaagaagatcaatggcatttttgagcagctgggggcct

SEQ ID NO: 16167 - DNA, 119 bp, homo sapiens
catggctgaggtgaatgcatccccacttaagcactttgtcactgccaagaagaagatcaatggcattttgagcagctgggggcctacatccaggagagcgccaccttccttgaaggtaa

SEQ ID NO: 16168 - DNA, 119 bp, homo sapiens
tccagacacgtacaggaatgcagaactggaccccgttaccacagaagaacaggttctggacgtcaaaggtacctatccaaagtgagaggcatcagtgaggtgctggctcggaggcacat

SEQ ID NO: 16169 - DNA, 119 bp, homo sapiens
tggaccccgttaccacagaagaacaggttctggacgtcaaaggttacctatccaaagtgagaggcatcatgaggtgctggctcggaggcacatgaaagtggctttttttggccggtaag

SEQ ID NO: 16170 - DNA, 119 bp, homo sapiens
tctaggacgagcaatgggaagagcaccgtgatcaatgccatgctctgggacaaagttctgccctctgggttggccacaccaccaattgcttcctgcgggtagagggcacagatggccat

SEQ ID NO: 16171 - DNA, 119 bp, homo sapiens
agttctgccctctgggattggccacaccaccaattgcttcctgcgggtagagggcacagatggccatgagcctttctccttaccgagggctcagaggaaaagaggagtgccaaggtgag

SEQ ID NO: 16172 - DNA, 119 bp, homo sapiens
atcagactgtgaaccagctggcccatgccctccaccaggacaagcagctccatgccggcagcctagtgatgtgatgtggcccaactctaagtgcccacttctgaaggatgacctcgttt

SEQ ID NO: 16173 - DNA, 119 bp, homo sapiens
agctggcccatgccctccaccaggacaagcagctccatgccggcagcctagtgagtgtgatgtggcccactctaagtgcccacttctgaaggatgacctcgttttgatggacaggtaag

SEQ ID NO: 16174 - DNA, 119 bp, homo sapiens
tccaggtgcggcggcagcacatggagcgttgtaccagcttcctggtggatgagctgggcgtggtggatcatcccaggccggggaccgcatcttctttgtgtctgctaaggaggtgctca

SEQ ID NO: 16175 - DNA, 119 bp, homo sapiens
gtggatgagctgggcgtggtggatcgatcccaggccggggaccgcatcttctttgtgtctgctaaggagtgctcaacgccaggattcagaaagcccagggcatgcctgaaggaggtaat

SEQ ID NO: 16176 - DNA, 119 bp, homo sapiens
tccaggagtgcatctcccagtctgcagtgaagaccaagtttgagcagcacacggtccgggccaagcagatgcagaggcggttcgactcatcatggactccctgcacatggcggctcggg

SEQ ID NO: 16177 - DNA, 119 bp, homo sapiens
tctcccagtctgcagtgaagaccaagtttgagcagcacacggtccgggccaagcagattgcagaggcggtcgactcatcatggactccctgcacatggcggctcgggagcagcagtaag

SEQ ID NO: 16178 - DNA, 119 bp, homo sapiens
ttcagggtttactgcgaggaaatgcgtgaagagcggcaagaccgactgaaatttattgacaaacagctgagctcttggctcaagactataagctgcgaattaagcagattacggaggaa

SEQ ID NO: 16179 - DNA, 119 bp, homo sapiens
ggaaatgcgtgaagagcggcaagaccgactgaaatttattgacaaacagctggagctcttggctcaagatataagctgcgaattaagcagattacggaggaagtggagaggcaggtgag

SEQ ID NO: 16180 - DNA, 119 bp, homo sapiens
gacagatggcttgaaacccctccttcctgtgtctgtgcggagtcagatagacatgctggtcccacgccatgcttctccctcaactatgacctaaactgtgacaagctgtgtgctgactt

SEQ ID NO: 16181 - DNA, 119 bp, homo sapiens
ctggtcccacgccagtgcttctccctcaactatgacctaaactgtgacaagctgtgtgctgacttccagaagacattgagttccatttctctctcggatggaccatgctggtgaatagg

SEQ ID NO: 16182 - DNA, 119 bp, homo sapiens
gtgctgacttccaggaagacattgagttccatttctctctcggatggaccatgctggtgaataggttccgggccccaagaacagccgtcgggccttgatgggctacaatgaccaggcaa

SEQ ID NO: 16183 - DNA, 119 bp, homo sapiens
ctcaggtccagcgtcccatccctctgacgccagccaaccccagcatgcccccactgccacagggctcgccacccaggaggagttcatggtttccatggttaccggcctggcctccttga

SEQ ID NO: 16184 - DNA, 119 bp, homo sapiens
gcccccactgccacagggctcgctcacccaggaggagttcatggtttccatggttaccggcctggcctcttgacatccaggacctccatgggcattcttgttgttggaggagtggtcag

SEQ ID NO: 16185 - DNA, 119 bp, homo sapiens
tgcaggtgtggaaggcagtgggctggcggctcattgccctctcctttgggctctatggcctcctctacgctatgagcgtctgacctggaccaccaaggccaaggagagggccttcaagc

SEQ ID NO: 16186 - DNA, 119 bp, homo sapiens
ctttgggctctatggcctcctctacgtctatgagcgtctgacctggaccaccaaggccaaggagagggcttcaagcgccagtttgtggagcatgccagcgagaagctgcagcttgtcat

SEQ ID NO: 16187 - DNA, 119 bp, homo sapiens
tggaccaccaaggccaaggagagggccttcaagcgccagtttgtggagcatgccagcgagaagctgcagttgtcatcagctacactggctccaactgcagccaccaagtccagcagtga

SEQ ID NO: 16188 - DNA, 119 bp, homo sapiens
cccagggaactgtctgggacctttgctcatctgtgtcagcaagttgacgtcacccgggagaacctggagaggaaattgccgccatgaacaagaaaattgaggttcttgactcacttcag

SEQ ID NO: 16189 - DNA, 119 bp, homo sapiens
ctcatctgtgtcagcaagttgacgtcacccgggagaacctggagcaggaaattgccgccatgaacaagaaattgaggttcttgactcacttcagagcaaagcaaagctgctcaggtgag

SEQ ID NO: 16190 - DNA, 119 bp, homo sapiens
tgcaggaataaagccggttggttggacagtgagctcaacatgttcacacaccagtacctgcagcccagcgatagtgggcacctgaggcggagtctgcgtggagaggggcggtgctgcca

SEQ ID NO: 16191 - DNA, 119 bp, homo sapiens
gcagcccagcagatagtgggcacctgaggcggagtctgcgtggagaggggcggtgctgccagccctaaggccatgtgggctcccccaggggcacgtgtggctcctgccccctggccact

SEQ ID NO: 16192 - DNA, 119 bp, homo sapiens
cagccctaagtgccatgtgggctcccccaggggcacgtgtggctcctgccccctggccactgccaagagatgaagcacccagtctcgtaccattttgagccctccagcactacttattt

SEQ ID NO: 16193 - DNA, 119 bp, homo sapiens
ctgccaagagaatgaagcacccagtctcgtaccattttgagccctccagcactacttattttcccccactttgcctgctgttgctggaagagctggctcatacccccaaaggacacttt

SEQ ID NO: 16194 - DNA, 119 bp, homo sapiens
tttcccccacctttgcctgctgttgctggaagagctggctcatacccccaaaggacactttcagcgacactatggacagcatggtaccaaggagttaagttgaggctttttccagcttt

SEQ ID NO: 16195 - DNA, 119 bp, homo sapiens
ttcagcgacagctatggacagcatggtaccaaggagttaagttgaggctttttccagctttctctggttatttgattgcttgataaggcctcaggatctcagcattgcacaatgcctca

SEQ ID NO: 16196 - DNA, 119 bp, homo sapiens
ttctctggttcatttgattgcttgataaggcctcaggatctcagcattgcacaatgcctcatggaagccttgagggtatcacacagacacccccaccttcctccagcctgtgcgcacct

SEQ ID NO: 16197 - DNA, 119 bp, homo sapiens
catggaagcctttgagggtatcacacagacacccccaccttcctccagcctgtgcgcacctgccctcctgcagcccagcacacctgcaggtgtaagggacgattggagtttcttcccag

SEQ ID NO: 16198 - DNA, 119 bp, homo sapiens
ctgccctccttgcagcccagcacacctgcaggtgtaagggacgattggagtttcttcccagagagtctgcccagaaggactgtggcttgtgtgtgtccatctcgcctgttggctcagtg

SEQ ID NO: 16199 - DNA, 119 bp, homo sapiens
agagagtctgtcccagaaggactgtggcttgtgtgtgtccatctcgcctgttggctcagtgcttcatccatttgcagagcctcagacacgtcttggtggtgaggctcagttacccctgg

SEQ ID NO: 16200 - DNA, 119 bp, homo sapiens
tgcttcatcccatttgcagagcctcagacacgtcttggtggtgaggctcagttacccctgggcttaggcgaggcgggccctgtgctgggggtggtagaaaggatgctgctgaggcagct

SEQ ID NO: 16201 - DNA, 119 bp, homo sapiens
gggcttaggctgaggcgggccctgtgctgggggtggtagaaaggatgctgctgaggcagctggaggagtggagtagctcagaggggagggctgttggatgtatggggagctggcagagc

SEQ ID NO: 16202 - DNA, 119 bp, homo sapiens
ctggaggagtgggagtagctcagaggggagggctgttggatgtatggggagctggcagagcaggtggcatcactgggacaaggagggacttgcctctcttctcattattgtgtcctttg

SEQ ID NO: 16203 - DNA, 119 bp, homo sapiens
gcaggtggcagtcactgggacaaggagggacttgcctctcttctcattattgtgtcctttgctttagtgcagtcctggacttgtgcaggcctgttttgtgtagatctgttttggaagat

SEQ ID NO: 16204 - DNA, 119 bp, homo sapiens
tgctttagtgtcagtcctggacttgtgcaggcctgttttgtgtagatctgttttggaagatggcatggttaggtggttgaaggatgtagtagaaggatggatggtggaaggtggggacg

SEQ ID NO: 16205 - DNA, 119 bp, homo sapiens
atggcatggtctaggtggttgaaggatgtagtagaaggatggatggtggaaggtggggacgttggtggcggctgaggtgcatgggccccacacaggacagctggagaatgggccgtcca

SEQ ID NO: 16206 - DNA, 119 bp, homo sapiens
cgttggtggctggctgaggtgcatgggccccacacaggacagctggagaatgggccgtccacttggcctgttctgcgaggggctcatgggtctgagagcccccacccactaggcttgat

SEQ ID NO: 16207 - DNA, 119 bp, homo sapiens
cacttggcctcgttctgcgaggggctcatgggtctgagagcccccacccactaggcttgattgcatcccgttgtgccctttaagagacatgtttccaccccacccccaaccttgtccca

SEQ ID NO: 16208 - DNA, 119 bp, homo sapiens
attgcatccctgttgtgccctttaagagacatgtttccaccccacccccaaccttgtcccaagtgccctgactaaatttcctgtgccagtgactgcagttggccaagggacaatgtgga

SEQ ID NO: 16209 - DNA, 119 bp, homo sapiens
caagtgccctggactaaatttcctgtgccagtgactgcagttggccaagggacaatgtggaaaacccaggtccatctttccaccctccctgatctccagaaccttcgactgaccccctt

SEQ ID NO: 16210 - DNA, 119 bp, homo sapiens
gaaaacccagtgtccatctttccaccctccctgatctccagaaccttcgactgacccccttgtctttatctgatgttgagttttgggattgttactggttgaagtgggggcagatgcct

SEQ ID NO: 16211 - DNA, 119 bp, homo sapiens
ttgtctttatgctgatgttgagttttgggattgttactggttgaagtgggggcagatgcctgtcaccaagtgttgactgtgtgagaaaagcagtttgggtgacaaatcctgtgtggcac

SEQ ID NO: 16212 - DNA, 119 bp, homo sapiens
ctgtcaccaaggtgttgactgtgtgagaaaagcagtttgggtgacaaatcctgtgtggcacaagttggacgcttcctagaaataagcaacacctctcccaaaaagcagcccacaaggca

SEQ ID NO: 16213 - DNA, 119 bp, homo sapiens
acaagttggatcgcttcctagaaataagcaacacctctcccaaaaagcagcccacaaggcaggggcccacagcccagccatcactcatctttgaggaaatgagttggtagcctctgtgc

SEQ ID NO: 16214 - DNA, 119 bp, homo sapiens
caggggcccagcagcccagccatcactcatctttgaggaaatgagttggtagcctctgtgcactgtttgtggccacatcacaggtgatgtcctgttcacatacctgcttgtatttaaag

SEQ ID NO: 16215 - DNA, 119 bp, homo sapiens
gcactgtttggtggccacatcacaggtgatgtcctgttcacatacctgcttgtatttaaagccctcagttgtcctgttgtgtggggcgaagtgatggactctgccaggtggacatgctg

SEQ ID NO: 16216 - DNA, 119 bp, homo sapiens
agccctcagtctgtcctgttgtgtggggcgaagtgatggactctgccaggtggacatgctgtgggtggagttcccggcgtgtgccgggcctgaatggacaggggccacttcacagcatg

SEQ ID NO: 16217 - DNA, 119 bp, homo sapiens
tgtgggtggatgttcccggcgtgtgccgggcctgaatggacaggggccacttcacagcatgtcagggaaatcactgtcacacaattccaatggattttgtgctctttttgaaaaaaaaa

SEQ ID NO: 16218 - DNA, 119 bp, homo sapiens
tgtcagggaaaatcactgtcacacaattccaatggattttgtgctctttttgaaaaaaaaaaattctttgcgtaaacatgaattttttttcaatgtagcccctggggaatgaatgaaat

SEQ ID NO: 16219 - DNA, 119 bp, homo sapiens
aaaattctttagcgtaaacatgaattttttttcaatgtagcccctggggaatgaatgaaattttgagctcttcaatacgtaaaattaaatttataccactgagggagagaccctttctg

SEQ ID NO: 16220 - DNA, 119 bp, homo sapiens
attttgagcttcttcaatacgtaaaattaaatttataccactgagggagagaccctttctgaaagaagttggccaaaagcactttaatgctgctgacattgttgtttttatgttcattt

SEQ ID NO: 16221 - DNA, 119 bp, homo sapiens
tgaaagaagtatggccaaaagcactttaatgctgctgacattgttgtttttatgttcatttgctggagccaagacgtgctgacacagtgagttttctctgatgtatttaaggtgatgta

SEQ ID NO: 16222 - DNA, 119 bp, homo sapiens
ttgctggagcgcaagacgtgctgacacagtgagttttctctgatgtatttaaggtgatgtatttgcttggttactcctgtatcattgctcataatattggaaactaaaataaaacctag

SEQ ID NO: 16223 - DNA, 119 bp, homo sapiens
gcagtatttttcttatgctgagttttataagacataagcaaattatcatttaaacatttatttaatatagttaaaatgtaatacataaagagaaaaaatgaacacaaatgtcaaacaga

SEQ ID NO: 16224 - DNA, 119 bp, homo sapiens
tatttaatataggttaaaatgtaatacataaagagaaaaaatgaacacaaatgtcaaacagaagaaaacctttatattttattttggtcaacaaaaagtctgtgcataactcagcagca

SEQ ID NO: 16225 - DNA, 119 bp, homo sapiens
cagaagaaaaccctttatattttattttggtcaacaaaaagtctgtgcataactcagcagcaggcctgattaaattaaaccaaagctgcattgtgatggccatcaatgtacagactgcc

SEQ ID NO: 16226 - DNA, 119 bp, homo sapiens
agcaggcctgaattaaattaaaccaaagctgcattgtgatggccatcaatgtacagactgcctgtctggttagcacatcaaaagtctaatcaaggctcaaaccaccatccttagaaatc

SEQ ID NO: 16227 - DNA, 119 bp, homo sapiens
tgcctgtctggcttagcacatcaaaagtctaatcaaggctcaaaccaccatccttagaaatccaatataatatatatgaaaaaggctttctttctcagttaaattagataagtcttaaa

SEQ ID NO: 16228 - DNA, 119 bp, homo sapiens
aatccaatatatatatatatgaaaaaggctttctttctcagttaaattagataagtcttaaagttgggaactactaaaaacaataaaaatttaaaactgtattttgctaaagggtatag

SEQ ID NO: 16229 - DNA, 119 bp, homo sapiens
accagaaacactaaaatgtgtttacatgtgaaagaatcatcacgttgatttacgtcaaagaacatcatattgtttatcttaatgcttggcatagttggttttaaggttttagaaatatt

SEQ ID NO: 16230 - DNA, 119 bp, homo sapiens
agaacatcatatttgtttatcttaatgcttggcatagttggttttaaggttttagaaatatttttgaattattattaaacaataggaacgtactgtacagaatatttcaaaactgctac

SEQ ID NO: 16231 - DNA, 119 bp, homo sapiens
tatttttgaatttattattaaacaataggaacgtactgtacagaatatttcaaaactgctaccaagaaacaagtacaaattctacctagcaatataggtttcttatcaacatacctttt

SEQ ID NO: 16232 - DNA, 119 bp, homo sapiens
ctaccaagaaaacaagtacaaattctacctagcaatataggtttcttatcaacataccttttttcctcatggtttcaaactgacaaaggtgtagggagaaaataattgaatggtttctg

SEQ ID NO: 16233 - DNA, 119 bp, homo sapiens
ttttttcctcactggtttcaaactgacaaaggtgtagggagaaaataattgaatggtttctgaaggccaactagccctttagccaagagttctgcttctgaattacatagaacatcttg

SEQ ID NO: 16234 - DNA, 119 bp, homo sapiens
tctgaaggccacactagccctttagccaagagttctgcttctgaattacatagaacatcttggtccacaacaatggaatggatttttggagagagtgtcaatttagggctaaagaaata

SEQ ID NO: 16235 - DNA, 119 bp, homo sapiens
cttggtccacagacaatggaatggatttttggagagagtgtcaatttagggctaaagaaatacagggtggaatgaagccctcaacaaaagctccaaaagggcacagaaactggtaagtg

SEQ ID NO: 16236 - DNA, 119 bp, homo sapiens
aatacagggtgagaatgaagccctcaacaaaagctccaaaagggcacagaaactggtaagtgacctaaaatggagagacaggtgaggagaaaatacatagtaaatgctggctcgttatt

SEQ ID NO: 16237 - DNA, 119 bp, homo sapiens
agtgacctaaatatggagagacaggtgaggagaaaatacatagtaaatgctggctcgttattgcattttttctctcccttctctcatccattcatcttcttaagactgccttctgtgtc

SEQ ID NO: 16238 - DNA, 119 bp, homo sapiens
tattgcattttattctctcccttctctcatccattcatcttcttaagactgccttctgtgtccttttgcgggaaattatcttaccctttaacatttgttccttcactattttaacaaaa

SEQ ID NO: 16239 - DNA, 119 bp, homo sapiens
tgtccttttgcagggaaattatcttaccctttaacatttgttccttcactattttaacaaaaagcctatagaaaaataataaattcaaggctattactaaaagcttgaataaaaataac

SEQ ID NO: 16240 - DNA, 119 bp, homo sapiens
aaaaagcctataagaaaaataataaattcaaggctattactaaaagcttgaataaaaataacaacaagcctatgctccaatcagtaaactcgtttcttggaataaaatcttcatttgtg

SEQ ID NO: 16241 - DNA, 119 bp, homo sapiens
taacaacaagccctatgctccaatcagtaaactcgtttcttggaataaaatcttcatttgtggaaatggatgatgtctcttagtagacagtgttcatttagggtgtgatactctcactt

SEQ ID NO: 16242 - DNA, 119 bp, homo sapiens
tgtggaaatggaatgatgtctcttagtagacagtgttcatttagggtgtgatactctcacttttagaagaggaaaaattactaaatattaatatgtgaaaagtaaggactttccttctg

SEQ ID NO: 16243 - DNA, 119 bp, homo sapiens
acttttagaagcaggaaaaattactaaatattaatatgtgaaaagtaaggactttccttctgagggattttgctttatggacttgactttgtttatccttatagtatatcactgcctta

SEQ ID NO: 16244 - DNA, 119 bp, homo sapiens
tctgagggattattgctttatggacttgactttgtttatccttatagtatatcactgccttacataacttggatatgatgcccagtttctaatgatttgtccaaaatcgtctgagaaaa

SEQ ID NO: 16245 - DNA, 119 bp, homo sapiens
cttacataactgtggatatgatgcccagtttctaatgatttgtccaaaatcgtctgagaaaaccaggccatacaaatatagtgaaaacctcttgaaaatacaattattatagacccaca

SEQ ID NO: 16246 - DNA, 119 bp, homo sapiens
aaaaccaggccaatacaaatatagtgaaaacctcttgaaaatacaattattatagacccacataaataagtctaatctgaagtctgatagctgattttatgttgaatatacgtctttta

SEQ ID NO: 16247 - DNA, 119 bp, homo sapiens
cacataaataaagtctaatctgaagtctgatagctgattttatgttgaatatacgtcttttaaaaagtgtcttattgaacataaaatgtaaaataacattctggaaacaagtataaata

SEQ ID NO: 16248 - DNA, 119 bp, homo sapiens
tttaaaaagtgttcttattgaacataaaatgtaaaataacattctggaaacaagtataaatattacattattctgagtccagatactttctaaactgtagaagtgcaggatggatttga

SEQ ID NO: 16249 - DNA, 119 bp, homo sapiens
aatattacatttattctgagtccagatactttctaaactgtagaagtgcaggatggatttgacttatccttagtaatacagactcatgaaaagttatgctgcaaaaaatgctgaacctc

SEQ ID NO: 16250 - DNA, 119 bp, homo sapiens
ttgacttatccattagtaatacagactcatgaaaagttatgctgcaaaaaatgctgaacctcctctgataatgatctttaagatggagagactgaggaagctaagtgaatgttcatgtt

SEQ ID NO: 16251 - DNA, 119 bp, homo sapiens
cctcctctgataaatgatctttaagatggagagactgaggaagctaagtgaatgttcatgttcactgcttaaattttccttataattggtaaaaaggctacccataatagaattcacat

SEQ ID NO: 16252 - DNA, 119 bp, homo sapiens
tgttcactgctgtaaattttccttataattggtaaaaaggctacccataatagaattcacattttcaataatttatagtttatcatcaaatagagtaaatgaattaagatttcattttt

SEQ ID NO: 16253 - DNA, 119 bp, homo sapiens
acattttcaatgaatttatagtttatcatcaaatagagtaaatgaattaagatttcatttttaaaaataagagacatatttatttgtaataactctctttttttggtaataactatctt

SEQ ID NO: 16254 - DNA, 119 bp, homo sapiens
ttttaaaaataaagagacatatttatttgtaataactctctttttttggtaataactatctttaacaatctattatttatttttacccatggggaatgcataagtacaaacattgttag

SEQ ID NO: 16255 - DNA, 119 bp, homo sapiens
tctttaacaatgctattatttatttttacccatggggaatgcataagtacaaacattgttagcttatttacatttattaaaaatacagactctttatactaatgcagaaggataagcct

SEQ ID NO: 16256 - DNA, 119 bp, homo sapiens
ttagcttatttaacatttattaaaaatacagactctttatactaatgcagaaggataagcctcttcttccactctaaaaatctcttctttgctgtaaagaattctcagtgcatgtgagc

SEQ ID NO: 16257 - DNA, 119 bp, homo sapiens
gcctcttcttcccactctaaaaatctcttctttgctgtaaagaattctcagtgcatgtgagctaagacttggagcactcagtagagaggtgtgtgggatgaccagacagaatcactagg

SEQ ID NO: 16258 - DNA, 119 bp, homo sapiens
gagctaagactctggagcactcagtagagaggtgtgtgggatgaccagacagaatcactaggttttctcgttttcaactagctgaaaataggaactctagttctaaatattcaaagtct

SEQ ID NO: 16259 - DNA, 119 bp, homo sapiens
taggttttctctgttttcaactagctgaaaataggaactctagttctaaatattcaaagtctaaatattgaaaaataaggagaggggatatgacaaaatgcttttcaaaatacatgcct

SEQ ID NO: 16260 - DNA, 119 bp, homo sapiens
gtctaaatattagaaaaataaggagaggggatatgacaaaatgcttttcaaaatacatgcctgaggtgaactgcttgtatgtttgcatgtggtagcttccagaggaaatcttcagtttt

SEQ ID NO: 16261 - DNA, 119 bp, homo sapiens
ctgaccttttcagccatgtgcagctgctcctgaaccctgagtagatcgtgcttggctgtcgccagattccctccagtgacttctggttttctgtcttgtcattaagtgtcttctgaaac

SEQ ID NO: 16262 - DNA, 119 bp, homo sapiens
accctgagtagatcgtgcttggctgtcgccagattctcctccagtgacttctggttttctgtcttgtcataagtgtcttctgaaactcactctttaaggcagcgacagtgttttctaag

SEQ ID NO: 16263 - DNA, 119 bp, homo sapiens
ttctcctccagtgacttctggttttctgtcttgtcattaagtgtcttctgaaactcactctttaaggcacgacagtgttttctaagttacttaagtcttgggcctttataaaatcctat

SEQ ID NO: 16264 - DNA, 119 bp, homo sapiens
attaccggttttcaagttcagagatgtctgtctgtagcttaagataccacttctcagcttgtgcaaacactgtcgcagaagtaacacattggtataggcagtgttgatgagctcagatt

SEQ ID NO: 16265 - DNA, 119 bp, homo sapiens
gataccacttctcagcttgtgcaaacagctgtcgcagaagtaacacattggtataggcagtgttgatgactcagattccacctcactatgaaccacagcttgtaatccattgaggactt

SEQ ID NO: 16266 - DNA, 119 bp, homo sapiens
acacattggtataggcagtgttgatgagctcagattccacctcactatgaaccacagcttgtaatccatgaggacttcagagacttcatctatggtgaaggtgtcctccaccagcctga

SEQ ID NO: 16267 - DNA, 119 bp, homo sapiens
gatacctgctctccttgaggtcttggaagcaggaatctacagttttgagtctcaagcctctctttgaacagcaaaacgcatataattaataacttcattttgatggtgctcatttaggc

SEQ ID NO: 16268 - DNA, 119 bp, homo sapiens
tgaggtcttggaagcaggaatctacagttttgagtctcaagcctctctttgaacgagcaaaacgcatatattaataacttcattttgatggtgctcatttaggcccaactctgcctgaa

SEQ ID NO: 16269 - DNA, 119 bp, homo sapiens
ctcaccatggcggcaggcagcggcggcagcctaaaggaacgggagaggccaggcggtgccccgccaagctgggatcgccgagggtagttggaccacagaaaatggggaaggagggtagg

SEQ ID NO: 16270 - DNA, 119 bp, homo sapiens
taaaggaacgggagaggccaggcggtgccccgccaagcctgggatcgccgagggtagttggaccacagaaatggggaaggagggtaggttgtttagaagcctctggttgctaacggaaa

SEQ ID NO: 16271 - DNA, 119 bp, homo sapiens
ctttagccctggtattgatgtcaccacagagctggacagctggattgacaagttttgtctggatgctgagtgtttgtgctggtggccaactcagagtccaccctgatgcagacggtaac

SEQ ID NO: 16272 - DNA, 119 bp, homo sapiens
atctaggaaaagcacttcttccacaaggtgagtgagcgtctctcccggccaaacatcttcatcctgaacaccgctgggatgcatctgcctcagagcccgagtacatggaggaggttcgt

SEQ ID NO: 16273 - DNA, 119 bp, homo sapiens
ggactaatgcagtacaatcctcctagggggcgctctcgcagaaggctttcaagtgaggatgtttgagttcagaattttgagaggagatttgaggtgagtcctctgattctggtatctgg

SEQ ID NO: 16274 - DNA, 119 bp, homo sapiens
tgctgtaggtgtcgactgcaatggccgaggagatcaggcgcctctctgtactggtggacgattaccagaggacttccacccttctccagtagtcctcaaggtttataagaatgtgagtc

SEQ ID NO: 16275 - DNA, 119 bp, homo sapiens
tggtggcaggagctgcaccgccacatagaggaaggactgggtcgaaacatgtctgaccgctgctccacgccatcaccaactccctgcagaccatgcagcaggacatgataggttagtgc

SEQ ID NO: 16276 - DNA, 119 bp, homo sapiens
tttttcgttaggtgtttggagcatctactaaacagattgatgtttaccgaagtgttgtttgtccaattcggatgaagttattatgggctataattgcactatctttgcgtaagtaaaag

SEQ ID NO: 16277 - DNA, 119 bp, homo sapiens
aacacttgttaatctttacaggtatggccaaactggcactggaaaaacttttacaatggaaggtgaaagtcacctaatgaagagtatacctgggaagaggtatttattgtttataacat

SEQ ID NO: 16278 - DNA, 119 bp, homo sapiens
gatattgttttctagtcgttcccactcagttttctctgttacaatacatatgaaagaaactacgattgaggagaagagcttgttaaaatcggaaagttgaacttggtaagcatccacct

SEQ ID NO: 16279 - DNA, 119 bp, homo sapiens
tttccatgacaggaaactctgagtacattggaatatgctcatagagcaaagaacatattgaataagcctaagtgaatcagaaactcaccaaaaaagctcttattaaggtaactgtgaat

SEQ ID NO: 16280 - DNA, 119 bp, homo sapiens
cattcctcttgtgtaggagtatacggaggagatagaacgtttaaaacgagatcttgctgcagcccgtgaaaaaatggagtgtatatttctgaagaaaattttaggtaagcccttggcta

SEQ ID NO: 16281 - DNA, 119 bp, homo sapiens
ttaaactttattttagagtcatgagtggaaaattaactgttcaagaagagcagattgtagaattgattgaaaaattggtgctgttgaggaggagctgaatagggtaagcacttaaaatg

SEQ ID NO: 16282 - DNA, 119 bp, homo sapiens
cttacaggaactttgcaagttaatgaatctttggacagagagattctgtgctttggaggaaaagtgtgaaatatacagaaaccacttagtagtgtccaggaaaatatacagcagtaagc

SEQ ID NO: 16283 - DNA, 119 bp, homo sapiens
gttactcttgtgatgacttttaagcccttggacttagtcactcatccagtttcttcttttaggatgtggtgtagaagaggcagttctggggcagtatactgaagaacctctaagtcaag

SEQ ID NO: 16284 - DNA, 119 bp, homo sapiens
agccatctgtagatgctggtgtggattgttcatcaattggcggggttccatttttccaggtatgtcatacagataacccttccacatctgatgtaagtcattcatttactattcattat

SEQ ID NO: 16285 - DNA, 119 bp, homo sapiens
tgcgccagctctggaatcgcacagcagagatggtgcacatcgctctttaattttcttgttaggtgaagccttcaaattgcctgatgaaagttgaatcaggaatgaagataaaagtacac

SEQ ID NO: 16286 - DNA, 119 bp, homo sapiens
aacaatgcagaaagcggtacttagcctcacaaagatggaaacattccaaaaacgtgaagtactgttgtccaagattctttctaagcctaaaattacacttttactagtccgattttctg

SEQ ID NO: 16287 - DNA, 119 bp, homo sapiens
ttttttcgagaaactgcagtaggcttcttggaagtagaccaagggtgtccaatctttggcttccctgggcacatcggaagaagaattgtcttgggccacacatgaaattcacaaacact

SEQ ID NO: 16288 - DNA, 119 bp, homo sapiens
ctgcagtaggcttcttggaagtagaccaagggtgtccaatctttggcttccctgggccacatcggaagagaattgtcttgggccacacatgaaattcacaaacactaaggtagccgatg

SEQ ID NO: 16289 - DNA, 119 bp, homo sapiens
agtttttcctaggtacaaatgatgcaaaatgtgcacctggctccagagacagatgaagatgatctttatccggctataatgactacaatccaatctatgatatcgaggtaacaaaagct

SEQ ID NO: 16290 - DNA, 119 bp, homo sapiens
tgaatgttaaatttgcgttttcattttaggaattggagaatgatgcagcttttcagcaagctgtgaggatagtcatggcagaagacctccagtaagtgaaaaaaattttttttaaattg

SEQ ID NO: 16291 - DNA, 119 bp, homo sapiens
tcctgttaactatgttctttttcctccccaagataactgctaaaatatcaagcacggcagttactagactatagctactggatatggggtaggtttttgtaagctgaaaatattaagat

SEQ ID NO: 16292 - DNA, 119 bp, homo sapiens
gaatctttttaacttaacttttctgtttactagtccaagacatctctggcatcatcaataggaagaccatgacaggggctattcaggtatctctattggatgcatgttcattttgtgcc

SEQ ID NO: 16293 - DNA, 119 bp, homo sapiens
gaataaatgattcccattctctttaaaggatggagttactagacccatgacagcagtgagagcagctggtttaccaaagcagctttgagaggtttgttacactgtctctactaataatc

SEQ ID NO: 16294 - DNA, 119 bp, homo sapiens
tattaactcttgaattgtgtctcaggctctgcatttgacccccttagtcagtcaaggggccctgcttccctttggaagccaagaaaaaagataggtatgtaagtccttatgttgttgtt

SEQ ID NO: 16295 - DNA, 119 bp, homo sapiens
ttttgtctttaatagcccagaggaaaaaataaagcaattagagaaggaagtaaatgagttggtagaagaagctgtattgccaatagttgtggagacttaaaattggtaagttcataaac

SEQ ID NO: 16296 - DNA, 119 bp, homo sapiens
gatttcaggccttagaaaaggcaaaagatgcaggaagaaaagagagagtcctggtgagacagcgagaacagttacaactccagaaaatatcaatttggatttaacttactcagtaagta

SEQ ID NO: 16297 - DNA, 119 bp, homo sapiens
cttccttaggttcttttcaatttggccagtcagtattcagttaatgaaatgtatgccgaagcacttaaccttatcaagttatagtcaaaaataagatgtttagcaatgcaggtaagtgt

SEQ ID NO: 16298 - DNA, 119 bp, homo sapiens
tctaaaatatcaaagagtggaaaaatgagagtattatacattcattaaatttttttaaattaggaatatgaaaatgaatatgggaaatatctatttaaagcaaagaaattattccaaag

SEQ ID NO: 16299 - DNA, 119 bp, homo sapiens
ccattaaattctaccgaatggcattagaccaagttccaagtgtcaataagcaaatgaggtaagtttatacaatagataataattgtaaaatttaagtgtttttctgaaacaagataact

SEQ ID NO: 16300 - DNA, 119 bp, homo sapiens
tttttcttccattttattttaccaggatgatcctcatactaacttagtaactgaagctataaaaaatgacacctcaggcaaatggaacgtgaaaggtaatattttaaacttaataacgt

SEQ ID NO: 16301 - DNA, 119 bp, homo sapiens
tggtttatttgatataggaaagccatggcagaaaaatatattatgacatctgcaaaactcattgctccttaattgaaacatcttttgctgcaggttatgattggtaagagagaaagtct

SEQ ID NO: 16302 - DNA, 119 bp, homo sapiens
tcccttataggtgcgtggaagtggtgaaagcttctcaatatgtagagctagccaatgatctggaaataacaaagcagttacatacttgagacaaaaagactataaccaagtaagtttta

SEQ ID NO: 16303 - DNA, 119 bp, homo sapiens
agatattccatttctaggctgtagagatcttaaaagtgttggaaaaaaaggacagtagagtgaaaagtgagctgcaaccaatctctcagccctgtattatatggtaagtttttttacta

SEQ ID NO: 16304 - DNA, 119 bp, homo sapiens
tttaaggccttacctatgagaaactaaatcggctagatgaggctttggactgtttcctgaaacttcacgaatcctacgaaacagtgccgaagttctttaccagatagcaaatatgtatc

SEQ ID NO: 16305 - DNA, 119 bp, homo sapiens
caagaagtaaattatatgttgccattgaagttgtattgttacattccatatttgttttacagtcatatagtattttccttgtaatattgaagtcattgagtggcttggagcctattaca

SEQ ID NO: 16306 - DNA, 119 bp, homo sapiens
ttgacacccaattttgggaaaaagctattcagtactttgaaagagcttctcttatacagtaagtaatcataggattttatgtttagttaatgtcatgtcttgagtttttttaatcccta

SEQ ID NO: 16307 - DNA, 119 bp, homo sapiens
atctctaatttcatctcatttatttattttataggcctacacaagtgaaatggcagctgatggtagctattgtttcagaagaagtggtaaatgctttagttttattcattttatagata

SEQ ID NO: 16308 - DNA, 119 bp, homo sapiens
atatatttttctcttgtttgtttataggtaactaccaaaaagcattagatacttacaaagatactcacaaaaatttccagaaaatgtcgaatgtaagtggcattacataatgtaacttt

SEQ ID NO: 16309 - DNA, 119 bp, homo sapiens
aatttaggtctgcgtttcttagttcgtctctgcacagatcttggattaaaagatgctcaagaatatgccgaaaactgaagaggttggaaaaaatgaaagaaataagggaacaggtatct

SEQ ID NO: 16310 - DNA, 119 bp, homo sapiens
tttaaacttgtcttctctttgctctagcgcataaagtcaggcagagatggcagtgggggctcccgtggcaaagagaaggaagtgctagcggtggtaagtattttctctttccctgaaaa

SEQ ID NO: 16311 - DNA, 119 bp, homo sapiens
gcataatgtagttttatgttttctcaacatattaaacaaatgcatttttattttcgtgttttcagatagggccagaactatagtgccagtagtaaaggtgaacgactaagtgccagact

SEQ ID NO: 16312 - DNA, 119 bp, homo sapiens
cagagctttacctgggacaaatgaaccttatgaaagtagcagtaacaaagaaataggcaagtactctcccccagttcctccaggcatagcaggtctgaagaagaatggtgagatggcca

SEQ ID NO: 16313 - DNA, 119 bp, homo sapiens
ggggacactcacttatccttcattttattcacgtagagctccagggacggcaggtcctccgacagcatctgggcacctcgaagcggtgcgtgtccgacttctcgtagctgtgagagaag

SEQ ID NO: 16314 - DNA, 119 bp, homo sapiens
ctggcctgggaggacagaggtgaggaggcggagtgggcgagtggacgaggggtggcctcaccttgctgggaggatgctgatggtgctcccgctgctgctgcaccgcagagaagcgatgc

SEQ ID NO: 16315 - DNA, 119 bp, homo sapiens
cccccaccccagggaccagctccgccaggctcctgcagctacagtgtgctttggcctctctgcagggagaagagggacctcagtgcccgccagaggcccagttcccaattctccgccca

SEQ ID NO: 16316 - DNA, 119 bp, homo sapiens
gagcagcaacttacctgccaggttcgaacttgaactcggtttgactccaccgtgtaaacgttttcttcagcattgctaacacaggcgtctcacacaagaaggtccctaaaatgaaagac

SEQ ID NO: 16317 - DNA, 119 bp, homo sapiens
tctgtccgggtgaaaagaacccacctgcactccgtatcgcggctccagaaagctcgaagatcgccacctccttccgttccagactgcgacagcatcctgaaaagaaccacggacattcg

SEQ ID NO: 16318 - DNA, 119 bp, homo sapiens
gcctcacctttgactttacagtaacacacacagttcatattctctcctttctcaaagccaaacttctcactggactcagtatataattctctcctcgttctatgtcccagaatctacaa

SEQ ID NO: 16319 - DNA, 119 bp, homo sapiens
aggcagactctcacctgagggcagcctccccgacggccatcacgagaaggctgccttcaatcaaagcgagtctgcccggcggccggttttcccgctcagcttgacctgtgtgaggaaac

SEQ ID NO: 16320 - DNA, 119 bp, homo sapiens
cggtgctgacgggggaaccgaggaccatcaggcggcgtggtgcagcggatgtgggcacccacctgcagccggtctggaagaagaacttctgagggcactgtgagcagtcgtagatcttg

SEQ ID NO: 16321 - DNA, 119 bp, homo sapiens
tcctcctgcccgtgcacggcaaagatgtgctgctgcaacttgttggcctggacgaagactagacacagaacggctgtcagggccaagctcaggacaccagcccagcctcctgtggcagc

SEQ ID NO: 16322 - DNA, 119 bp, homo sapiens
gaggaaatgctctcttaccaatcatgtggttggcaacgtggatttggatctctctctcgttctcgaaggcatctggcacttgatgcactggtatgtctttttctgtttggaaaccaaaa

SEQ ID NO: 16323 - DNA, 119 bp, homo sapiens
caactcttccaccagcccccgggcatttacctgctgctgtcacggaggaatcccaggccagcgagaagttgaggcctccccctcttcaactgaaagagagaacagagatgggcctgtga

SEQ ID NO: 16324 - DNA, 119 bp, homo sapiens
ctcagcccaaggcctcccctgctcacccctcttcttatgcatccatgtctttcttcttttacagggtaaatccatccttctccaggaagttttcctgggggaataaatacaaaatttct

SEQ ID NO: 16325 - DNA, 119 bp, homo sapiens
gcctcaccttagggatgaagatcagagccagcgtggtggtgactgtgctgtgggtgtggaagaagaagagaggagggtccagtccgggtgcagagagggaaccagcacaaacctggggc

SEQ ID NO: 16326 - DNA, 119 bp, homo sapiens
cgtacctgtaaagcttgagtatgatggtgccgtagacgatggcaaaacccagcagccgcacccagcgaaagcgatgcagcggaatacactgggcttgaagtataggatgaagacctggt

SEQ ID NO: 16327 - DNA, 119 bp, homo sapiens
gggccagcctgtggccacagactcacaggaaagtaaagcagcaggaatccaaaaaggacagtttccagcggaccactccagatgcccagatcctctgtgaagcaaggagagaggcatgt

SEQ ID NO: 16328 - DNA, 119 bp, homo sapiens
caccacacttacatacccccagaggggcttgccccgtagaatccaggtcggcagcggcagaggtagcggcaagaacaaagccctgactctccaggggaacacactatggggacaacaaa

SEQ ID NO: 16329 - DNA, 119 bp, homo sapiens
ccttacctgggtgctgttgagatcacacaggtgtgtgttagagtaccagcctgggccacttgcacactgttgatgtccacactctggagatctacgtccatctgcacctgccccctacg

SEQ ID NO: 16330 - DNA, 119 bp, homo sapiens
tggcttactgtgccagtcttttcctcagatctttgatttggtcattcttcttggtaagaatctctttcagtttcgataagctgctgtttgctgaaatttcttttctaattcctgcttag

SEQ ID NO: 16331 - DNA, 119 bp, homo sapiens
ggtagctaaaacttgtttcaccttttgatttccttgatcaagctgtaaatcttgcagtgctttttctagtttgacttttcatccagtgcatttgtagcctatagtgaagtttaaacaaa

SEQ ID NO: 16332 - DNA, 119 bp, homo sapiens
aattgtgtcaaaacatttctcagttacctgtatttcaatggtcttcaaccttgacttcaatttctcatttcttcttgaagtcttaaaatttcctttgtgagtaaattcaaattttatta

SEQ ID NO: 16333 - DNA, 119 bp, homo sapiens
cgtttctcaaaataataatattaccttgtttaggagttctgctgttccaccttcattaagtggagcaagtttggctttgtgacatctaagatgggctgaaacaaaataaagaaaccaaa

SEQ ID NO: 16334 - DNA, 119 bp, homo sapiens
gatatggatttagaatgaccaaaaagttacctttttgtttgaagatgtaatctctgctttttcaaattcgcaacttgttctaataattctcttgaagaagaaagcaaagataaaaatta

SEQ ID NO: 16335 - DNA, 119 bp, homo sapiens
tttattcagtttgtgtccagcacacctaagtttgctgccaccctggggcttgcctcccataccttgatccagcatcccacagttctgagacaagctttagtctttcctctagcagcttc

SEQ ID NO: 16336 - DNA, 119 bp, homo sapiens
ttctgtgcagatgccacaagcacctgtgtctccgtggtccgtatcttctcctccaaagcctggggaagggcagataaaagagagctgggctaacaccttcaaggagcaaacaaagcagg

SEQ ID NO: 16337 - DNA, 119 bp, homo sapiens
ttctgttcctcaccatgttgctggacatagtccccaatgcggtcagccacctcaggtgcaaggcccttcctcccaccatctcattcttcacctcttcccaggacacctaggcagacaga

SEQ ID NO: 16338 - DNA, 119 bp, homo sapiens
tgggttgttaccttgtccagcttgtctactgaggagcagatggtacggaacttgctgtcagaaacaccaagatagcaaacatcccatctagaatgcgtcgatcgtttacctgcaaggaa

SEQ ID NO: 16339 - DNA, 119 bp, homo sapiens
tctgaccttgaccaggaagtcgcctatctgaagtgaactcaggatctcgcacatgatcttcaggcactcgcatcagggatcatgggatcaaagttcccagcaatgtcaaaatcctgcag

SEQ ID NO: 16340 - DNA, 119 bp, homo sapiens
catggctgggttatcccgccgatatacctttgctatgtggtagcgtttaatgttggtcagtttattcatgccaaataccgagcaaaaggaacctgatgacaaagagttaaggagaaagc

SEQ ID NO: 16341 - DNA, 119 bp, homo sapiens
ttagaaagatacagtgaggtcatagcgaagggacaggagctccccgccctggtccttcaggtcatagatagcttggagtcttccccatactttcccatcagtgtttcctggagaaaaca

SEQ ID NO: 16342 - DNA, 119 bp, homo sapiens
ttctttgttattcaaatgcccactcatctaccatgtagtttcttcttgcccattcctcacctttagttcaatacaggtgtatcaatgacttctgcaccgtggcgcttgaagcaacggat

SEQ ID NO: 16343 - DNA, 119 bp, homo sapiens
gattacgtcaaacaccttctcgcgaactgccatctgccggggactatagtctcttgtgcccttggagttaaatcagccagagaaccagaaatgaggtttgaaaaccaagaacaatatgt

SEQ ID NO: 16344 - DNA, 119 bp, homo sapiens
caggaatgatattaccttgggggttttgagcacaaatttctgtttgctttcatcaggacccagctgtgcttcagtttcaggagtttcgccacctcctcctcgatctgtggagggaaaga

SEQ ID NO: 16345 - DNA, 119 bp, homo sapiens
ttctttatcccttacctttttggaaggtaactggagactgcgtagcctttcttactgctgctttggctcaccagcttttttctgtatggtgaaagtggcagttcctatacagagagaca

SEQ ID NO: 16346 - DNA, 119 bp, homo sapiens
gaaaacacagggttacagctaccaaactcacctgtctttttcatgcttcatcttttgtctcagccttattcccttgaagtcatgtaaagctgcataaaaaatacccagttggttcatta

SEQ ID NO: 16347 - DNA, 119 bp, homo sapiens
acccaactttaaagaaaattgtgaattaactcttaagatatttacctctcacacaattcatcactgctatcatacctaaaaaaaaaatcattattaataaaaattttgggttttttttt

SEQ ID NO: 16348 - DNA, 119 bp, homo sapiens
atcagcccctacaaaccttcttcagaaatgctaatggtttttgaagctaatgtttttttgaattcagggcagaagagaattcaatgtgatccactggtccaatctgtagaaaaaacaca

SEQ ID NO: 16349 - DNA, 119 bp, homo sapiens
agcatttacctgggtctgtatttgtacttgcatcttgacttcctatagctttcttttttacagaggccagaaatgcaatccagctgaagtattatcatcttgtagcatttcttaaatat

SEQ ID NO: 16350 - DNA, 119 bp, homo sapiens
cttagacattacattaatcatacacatacataccaaaaggaacgtcgaagtcatccaaaggatgggaacacaatgttcttgttgttcctaaatgaattcccacaggattactctatgat

SEQ ID NO: 16351 - DNA, 119 bp, homo sapiens
atagtaggcaaaacttcttacctagaaatttctgaactcgtatctacttgcattgattgaggagtggtagcccaggatgtgaaaaggcttcgatcatactatcaataaaaattaacagg

SEQ ID NO: 16352 - DNA, 119 bp, homo sapiens
catacttttttcccccttaccctttttgttcagtcgatttttcctccataattgtctccagtggttcttcctttgacactgaacctcttctgtgaactcctgttaaaatgaatagtacc

SEQ ID NO: 16353 - DNA, 119 bp, homo sapiens
ccactatttattgacttacttcttctaactgctgtggtaaagtcatcatgcaaatggcaagactgggactctgaaacctccaacagattcttcaatgtcttctagcgataagtgaagat

SEQ ID NO: 16354 - DNA, 119 bp, homo sapiens
taatacctttcacaacacagtgtctgagtctctggtgaagagagtgatatttgtctcttaaaggaaccccacgtcctcaggatagggaaatgctttcacgaaaatttctgctaccttca

SEQ ID NO: 16355 - DNA, 119 bp, homo sapiens
aataccttttctccttttacattttctcttgctttctgatattgcctgcaactataggataacttatcaggacatgcagcatccaacacagagcacaaagttctctgaagcaacctaaa

SEQ ID NO: 16356 - DNA, 119 bp, homo sapiens
attttttaacactctcttacctttctcttcgatttcttgtagagcttttttccacagctgaacagactttcatatgatcctaataaaaaacattcttcccctagaaagtttttaaccaa

SEQ ID NO: 16357 - DNA, 119 bp, homo sapiens
gttcttacctaataagtgtagctggaaccacgggactcttgttactacatcctttaaggctaccacagaagtaacaaaattcagtgtgtttataaataatacctgagttgcctagaaag

SEQ ID NO: 16358 - DNA, 119 bp, homo sapiens
acctcaccttacagatgtaaatacattctcatgccaccgaattgctagaaatgttaacttcaggcattcccagaataaaaagtaaatgaacacaggcagcagtctccaaataactgtag

SEQ ID NO: 16359 - DNA, 119 bp, homo sapiens
tcatcctcttttcctatttttcctagttaaaccaacttaaacaaataaaaaaattcccaccgactgtagtttgatcatttccttaggcttttcagttattggtatagttttcaaacaat

SEQ ID NO: 16360 - DNA, 119 bp, homo sapiens
cttgatctttgttccaaaggaaaagctctcctgtagttagtaccccagccagccaggcatctgtttccaaaatgaaatgcaatacttacaatctagtatttcctttaacatcaccctaa

SEQ ID NO: 16361 - DNA, 119 bp, homo sapiens
atgcaggtgggactgaaggatgatcagcctttgaagtcccaagcagagtatcaccttgctcacctccggaagcatgaagaggttttcaaatccacgctcgcacatggtggtggccgcct

SEQ ID NO: 16362 - DNA, 119 bp, homo sapiens
gactggccagcctttcatcatcgtcatacagaatgatgatcttgccatgggcatttttctaagagtcagtgagttaaggttccaaggcactgggctgatgtcccaagactacgagaaac

SEQ ID NO: 16363 - DNA, 119 bp, homo sapiens
attccttaaaatgcaacaaaggatacatattcaagaatatcatttgaataagggttcattgttctagacgagttgcaattgggtaactgtaagctgcaaagagaagaaaaagtttagga

SEQ ID NO: 16364 - DNA, 119 bp, homo sapiens
ctgctcagggctcggcgactgctcacctggatttcctttcccattggtcctggcagtggtttcagcatcgggtctgaagctgcagaatcattgtctaatatttacaaatgaagaaataa

SEQ ID NO: 16365 - DNA, 119 bp, homo sapiens
tccccacaccctcaattctcattaccttccagcctttgaatctcctcagctgtcacttccagtgtttgacagagagggaagcaacttggatgatctgatagaaaaaagaatgaaatgtg

SEQ ID NO: 16366 - DNA, 119 bp, homo sapiens
tactccagtggaaaaatcaagaaacttaccagctgggcaaaagttgtaacttttagtctcttgaaaagccatcttttttgtatctataatctgaaaaatatggtaagacaagtatttat

SEQ ID NO: 16367 - DNA, 119 bp, homo sapiens
cttccactctcccaaaccatcaagagtgttacttacttttcttaatctcttcgagcttctcagtatattagtcatactgttacctaaaaagaaaataaggggttttagatatactttaa

SEQ ID NO: 16368 - DNA, 119 bp, homo sapiens
taattctaattttctaatctttactcaccagtgtccagtcttgatttgatatgctggtatcttgggttcgtggtatccttttcatcagatactaaaaaataaggaaattcacaattaat

SEQ ID NO: 16369 - DNA, 119 bp, homo sapiens
ttgtcttttagtccaacatgtttaccgtggctgatgtgttgagtcaagatgaactgcgcaaaaagctatccagacgtttaaggatcggggtatactggatacactcaaggtatcggatt

SEQ ID NO: 16370 - DNA, 119 bp, homo sapiens
tacttagtaacctattttttcttaaggtatttactatgcaggatctattacaactcattaaaatcaacctacttccagtctctacaaatcactggtaagatggcttagtttctgtaatc

SEQ ID NO: 16371 - DNA, 119 bp, homo sapiens
tataactgaatagctgaataaaagtgaaatattttcttttaacaggtttcaggatctgataaagaaaataaaaaggtaggagccgtcatctttgtagagaacagcaacagttttctatg

SEQ ID NO: 16372 - DNA, 119 bp, homo sapiens
ttttttaggttttcttatgcattttttaaaagaattggcagaatatcatcaagctaaagagagttgtaaatggaaactcagacaagttcgacatttaacagagattctctgggtaatta

SEQ ID NO: 16373 - DNA, 119 bp, homo sapiens
tatacagattgaaacaaaagaaatttatgctcaaaggcaacttttactaaaagatatggatttgctaagggaagagaagcagagctgaagcaaagagttgaagcttttgaattgtaagt

SEQ ID NO: 16374 - DNA, 119 bp, homo sapiens
ctaaatttgttagctcagctatggtagtttatttactttttatatttttgttaatttcaggaaccagaactccaggaagaaaaacataaaagcataactgaggcacttaggagacagga

SEQ ID NO: 16375 - DNA, 119 bp, homo sapiens
gcagaatataaagagttttgaggagacctatgaccgaaagctcaagaatgaacttctaaagtaattgttagcatttttaaataactaatatgtttaaattaaattggtagaaacataac

SEQ ID NO: 16376 - DNA, 119 bp, homo sapiens
tatttagtcattctgattctcaggtatcaacttgaactgaaggatgactacatcattagaactaatcgatgattgaagatgaaaggaagaataaaggtgatgtttggggggaaaataag

SEQ ID NO: 16377 - DNA, 119 bp, homo sapiens
ggctcttttttcagaaaaagctgttcatttgcaagaggagctcatagctattaattcaaaaaaggaggactcaatcaatctgtaaatcgtgtgaaagaacttgaggtaattgttaagca

SEQ ID NO: 16378 - DNA, 119 bp, homo sapiens
tccttttgaagcaagctgtgatttgttttacattgatttcttttcctattctgaatcttttcagattgacattctgcacagctgaaggcccagattctaggttacaaagcttctgtaaa

SEQ ID NO: 16379 - DNA, 119 bp, homo sapiens
gagtttaactactcaggttgccgatttaaaattgcaactgaagcaaactcagacaggttagagacgtttaacccataaatatttttgtatgtataaagcttctggtgtctgtgaaaatg

SEQ ID NO: 16380 - DNA, 119 bp, homo sapiens
tccaatctagtctttatcgaagacaaactgaacttcaagacaaaagtgaattttcagatgtggacaagcagcttttaaggataatgaggagtttgaatcatcttttgaatgtaagttca

SEQ ID NO: 16381 - DNA, 119 bp, homo sapiens
tgcactgcccttctttgtcttggtgttattattaaggactcatgggacaattgtgcctcatgcagctgcgggaacatgccaaggcagttggaaatgggcgggctttctcctgccgggga

SEQ ID NO: 16382 - DNA, 119 bp, homo sapiens
tatgtctcatgtggacgctgctgcagctgctgtgcccctctcatatcagcacccaagtaagttcttttttgaactaacagtcagcagggtcgcatactaaataccagtccgtgtgctct

SEQ ID NO: 16383 - DNA, 119 bp, homo sapiens
attttccaccctctccatgtaatcagagctcaaaaaagatggtccaagaaggctccctagtggacacgcgcaatctagtgacaaagtcgaaaggtacctgttttccctacacactttca

SEQ ID NO: 16384 - DNA, 119 bp, homo sapiens
gctgtaacctaaccagagctcagcaggcccctttgctgctcctgggaacctcaggccgggccacctgcagagtgcccttggtgtgtgtcccagaggttctgtctgccctggggctctgc

SEQ ID NO: 16385 - DNA, 119 bp, homo sapiens
ctgcaggagtgcccttggtgtgtgtcccagaggttctgtctgccctggggctctgcctatggggcccttcctacaggtggtcctgcaggcctgggctccgcttcaccctcagctggttg

SEQ ID NO: 16386 - DNA, 119 bp, homo sapiens
tgctggagcatctccttggccctggcgagagcctcttctgcagggacaaccacatggggtgtcacccccccccttcccaggagctgccatccgaggcccccacagaacgggccgtgggg

SEQ ID NO: 16387 - DNA, 119 bp, homo sapiens
cactgacaatgagaagccctgccaacactcaccttccacccagccaaggctgaaatgccttctatcccagagcttccgaactggcttcctgtgagtattggttggctttcaaactggct

SEQ ID NO: 16388 - DNA, 119 bp, homo sapiens
ccaccatggacaaaggactttaagacattttgtatatccccatccccacctcaacagagaattaaactcgagaaagaagatattgctattcaacaaatgaaaaaaacaggccaggtggg

SEQ ID NO: 16389 - DNA, 119 bp, homo sapiens
cagcctcatcacaaacagctaactcgacattcagccttatcacaaacagctaacgtgacaacctggtgctggtgcagagctctcgcactcccattaggtaacctggatccggaacaaca

SEQ ID NO: 16390 - DNA, 119 bp, homo sapiens
atagaaatagactctaaggaacagaatattgtatactaccttataattagccttggtagtaagtaaagtgtgtagctcatctgtaaaaataattagagtgcagacatttacaaattgcg

SEQ ID NO: 16391 - DNA, 119 bp, homo sapiens
agagcaaacttacttttcccatcaattctaataatgaattttcaattatttgcacatgccaggttttgtaacgccttcttcttttgcccagaaattttgctgaatttctaaggaaagta

SEQ ID NO: 16392 - DNA, 119 bp, homo sapiens
ccccagcaacgtcatgctcagcagaggggcccccgcccacaagcccaggggaggtaccgtgttgctggaacagtttgcctggatttttctcaccgatgctcttatgtttccaggtactg

SEQ ID NO: 16393 - DNA, 119 bp, homo sapiens
tgccctcactcacctaccaggtgttcttcatgaagaagctgtggaccaccacggtgccagggaaggatccatggccgattccatcttccactattaccaggtgggcacctctgcactct

SEQ ID NO: 16394 - DNA, 119 bp, homo sapiens
gttccttccctagtgtcccaatggatactttttactacaaaggcaacaaaatttcctggatgagccagggagaagaggctcaatgagtcatattagaagcttgaaggtatttatttcca

SEQ ID NO: 16395 - DNA, 119 bp, homo sapiens
cagtcagccagaaaatcctgtctcttccctgcaaggaggagaccgcccggagggagaagcagcagctgctgatgtgcagaggcaggttgctctgaagagtgaggtttgtctccctgttt

SEQ ID NO: 16396 - DNA, 119 bp, homo sapiens
gcctggcagatggctcagtcctactggctttgctcacaagcctttgctgctgcatttcctttcctagcaactggagacagtgaggaagtccaaactgggccgctttggagagtgcagag

SEQ ID NO: 16397 - DNA, 119 bp, homo sapiens
gatctacctttaagctgtcctgtgccataagcagactaaattcttcattgtcagttcagtgctgtggcctgctgggctccatgagagctcatctgtgcatgtgatcaggaatctggttg

SEQ ID NO: 16398 - DNA, 119 bp, homo sapiens
aatatttcaatctcttcctgtataacacttcacaagagctgcttaccatttacaaaatcagctgtcacgttccccttttcattataaacaacaaaagggccagtagcaggcagcataag

SEQ ID NO: 16399 - DNA, 119 bp, homo sapiens
gaagggcagggggaatgagctgaggagggtgaaaagtgatgtgtgtaccttgggctctgctgaatgtgagttcccgttgtagagctaccaagtaccattgggaaggttgtgcactgcac

SEQ ID NO: 16400 - DNA, 119 bp, homo sapiens
ttgggaaggttgtgcactgcacaactctagaaggcaccaattgtgttttaccttgaaagacacaaatctaatttaaaacctcacatgatgtttaggaaaagctgcccataagcactggg

SEQ ID NO: 16401 - DNA, 119 bp, homo sapiens
ctaactgtaaatttaacccaacattcagcctcttttcctgacttccgtcaccaaactgaactccatactacatcaactgaacacctccccatgtaagtgcagaaaggggcctccgacat

SEQ ID NO: 16402 - DNA, 119 bp, homo sapiens
tgcttctttcatgaccttttatctttttcttttcatgcttttagaaaagactcagttaattcattacagctgaaaggtaaaacctgagccttggtacaaacttatctagattcctttga

SEQ ID NO: 16403 - DNA, 119 bp, homo sapiens
ttggtggactcagagccaactggaggttccagggtagcacttacatgctgatgcaaactcagagcctcacatttgaaagacttttatccctgctccttctttcctgttaggatgctgct

SEQ ID NO: 16404 - DNA, 119 bp, homo sapiens
attcatctgacgcccagaaattaccttgtgggtcctctaatttttcaggaaaagtttcattgcatgatatttttcgattggtttaattatgctttcttctaaagagaagacagatggaa

SEQ ID NO: 16405 - DNA, 119 bp, homo sapiens
ccagtgacctcatatcaccttttctcaagtgagcctgaaggtccacaccgtggtcaaattgtgtctcctagtagccacctggacgcattaggtaaggacttcctaattgataagctaga

SEQ ID NO: 16406 - DNA, 119 bp, homo sapiens
ctccttcctcagcttgcatggaggaatttggcccctaagattttggcttccccattggatcatcagtatgaacgcagtcagtatggaactcaaacaagaaagacagtgtatgaaaatta

SEQ ID NO: 16407 - DNA, 119 bp, homo sapiens
ttttgttgtgtctttttttttttttttctctattttcctaggactagtagatgctgcagtcgatgcagcccaggagcaggtgtgtgtataccattgcatggccaatgtttgggtggtag

SEQ ID NO: 16408 - DNA, 119 bp, homo sapiens
agatttaatatgtggactctttcccttcctcctatgactcttttctgcttcaggagaagagactaaggtggaaatggctccttttatccttcctcaggaggtttcctctctgctttgtg

SEQ ID NO: 16409 - DNA, 119 bp, homo sapiens
attggccatctcctagactgacctgagggctcccctttttctcaccttgagtttctccttctgactctgctgggcctccccttcagcctccggggtctctacgccttctggctctggct

SEQ ID NO: 16410 - DNA, 119 bp, homo sapiens
ctggctgggcctccccttcagcctccggggtctctacgccttctggctctggctgggcctcctcttcagctccggggcctctacaccttctaactctggttgggcctccccttctgcct

SEQ ID NO: 16411 - DNA, 119 bp, homo sapiens
ctggggcctctataccttctgactctggctgggcctccccttctgcctctggggcctctacaccttctactctggttgggcctcctcttcagcctcctgggcctctataccttctgact

SEQ ID NO: 16412 - DNA, 119 bp, homo sapiens
gcctctggggcctctacaccttctaactctggttgggcctcctcttcagcctcctgggcctctatacctctgactctggctgggcctccccttctgcatcctgggcctctacaccttct

SEQ ID NO: 16413 - DNA, 119 bp, homo sapiens
gactcaggctgggcctccccttcagcctctggggcctctataccttctgactctggctgggcctcccctcagtctctggggcctctataccttctgccttctgggcctccccttctgcc

SEQ ID NO: 16414 - DNA, 119 bp, homo sapiens
gcctctataccttctgactctggctgggcctccccttcagtctctggggcctctataccttctgccttcgggcctccccttctgcctctggggcctctacaccttctgattctggctgg

SEQ ID NO: 16415 - DNA, 119 bp, homo sapiens
gcctccccttctgcctcctgggcatctacatcttctgactctgggtgggcctccccttctgcctcctggcctccccttcagcctcctgtgcctcctcttctgcctccggggcctctaca

SEQ ID NO: 16416 - DNA, 119 bp, homo sapiens
tctgcctcctggacctccccttcagcctcctgtgcctcctcttctgcctccggggcctctacaccgtctactctggctgggcatccccttctgtcttctgggtctccccttcaacctcc

SEQ ID NO: 16417 - DNA, 119 bp, homo sapiens
tgactctggctgggcatccccttctgtcttctgggtctccccttcaacctcctgggcctcttcaccttcgactttggctgggcctctacaccgtctgactctggctgggcctcctcttc

SEQ ID NO: 16418 - DNA, 119 bp, homo sapiens
tgcctcttgcatctccccttcagcctctggggcctctacatcttctgactctggctgggcctccccttcgcctcctgggtctccacttcaacctccagggcctctacatcttctgactc

SEQ ID NO: 16419 - DNA, 119 bp, homo sapiens
cgtcctccccttcagtctccagggcctctacactttctgtctctggctgggcctccttttctgcctccgggcttctgcaccttctgactctggctggacctcccattctgcctctgggg

SEQ ID NO: 16420 - DNA, 119 bp, homo sapiens
tctctacatcttctgactctggctgggcctctccttctgcctctggggcctctacatcttctgactctgctgggcctccccttcagcctcctgggcatccccttctgcctctggggcct

SEQ ID NO: 16421 - DNA, 119 bp, homo sapiens
aaaagaagacatacacaaagaaaacttacctgaggtttatgagcagagaaagctagtatcagaagagtttgcttaaagtccattattagagctgataatagaaagataaaagtgatttt

SEQ ID NO: 16422 - DNA, 119 bp, homo sapiens
agggcgagggcggcccagacctgcggcccatcctggagcacgtggagatgctgtgcatgggcttcttcagctcgagtacctgctgcgcctagcctccacgcccgacctgaggcgcttcg

SEQ ID NO: 16423 - DNA, 119 bp, homo sapiens
ggttaagggactcccacagtccccaccggcaggaaggacggtacctccatcaggtctataagccacagcgccgctcctggggaggaaggatgagcaaaaggcaaaaagaaaagatacat

SEQ ID NO: 16424 - DNA, 119 bp, homo sapiens
acctacttctcaccaggggctacatctggcacagataacatttcaatattttaacagccagtgtggccagttgacgacagtcatgtttgcatcttacagatgaggcactgagacctgag

SEQ ID NO: 16425 - DNA, 119 bp, homo sapiens
tagatgcacaccaacattcctgggaagaaggggccaccatatgccatgataccatcatacatgaccacgtccagtcctcacctgtcaggatctgggggtgggaagtcactgtggagctc

SEQ ID NO: 16426 - DNA, 119 bp, homo sapiens
gcagccgcctcctgggcggagccaccccacccagcccccactacaccacaaggtgctctgaacggctcaaggaagaggtgggaggggtccccggacccggggccgctcgaggttagccg

SEQ ID NO: 16427 - DNA, 119 bp, homo sapiens
gtcacagcgagccttgtagagatcgcgctcccgggccaggcgggccacctcggcccgcagcgcgtccagtgggcggccaggcgggcgcgctcggcctccagcccgcgccgctgctgcag

SEQ ID NO: 16428 - DNA, 119 bp, homo sapiens
ctctgtgggtggctctgcgggaggctgcgtggcaccctggctcagcatgttccggcagcgcagccgctctcctcctgcttctccgccatgcggttctccagcagcctcagctccctgcg

SEQ ID NO: 16429 - DNA, 119 bp, homo sapiens
gtgctccagcacctcatagtactcctccttcttcagcaggcactggcagtagttgaggatcagagtattatcatcttctccagcttcagccactgcacctcccatggcttctcctgccc

SEQ ID NO: 16430 - DNA, 119 bp, homo sapiens
ttcctcgactcccctctgagatacccctcttttcttcaggattgttctggaaggtccttttcctgaaagtgctgctataggtgactggaagtctgtctaatgctggtggactctgccca

SEQ ID NO: 16431 - DNA, 119 bp, homo sapiens
cactcacaccctctccctcacccccaccaccacccatagcccagcgactcacgtggctcccacctgcctaggcggaggaaggcaggcgtgaactggtagcggacaaagcgcccagcatt

SEQ ID NO: 16432 - DNA, 119 bp, homo sapiens
ggggtccaggtcccgccggttgatgggcaaccgttctgcaatgtaccccagctggggctcagtgggcttaggctgggcccttgtccacccagggttctacccttgggtccccatctatc

SEQ ID NO: 16433 - DNA, 119 bp, homo sapiens
gagacccagggaggggaagagacttacccaagacccacaagtctgttccaggacactggcttcccagccggactggggaggggattctggtgtccccgccaacagcctgctccaggcaa

SEQ ID NO: 16434 - DNA, 119 bp, homo sapiens
cagcctccccacagcccctctccaacccggccccttcagcctccagccccagcagtacctgagccgggtctccgtgatgctgtgaacaggctgcgggatcaccttctctacgcccttca

SEQ ID NO: 16435 - DNA, 119 bp, homo sapiens
ggagagttgaggccaatgttgagactcaccacgttccctcctctccacctatgtctcttggcagaatgactggctgggctcttgtctgctgagtccccggggcaatgcctattcatctt

SEQ ID NO: 16436 - DNA, 119 bp, homo sapiens
catctgtgtctggagcaaagccagtcatcatggatatgtccaatatagacatagtggcatcctggtctcccggtacctggatagtgcagaaagaagggcattgggtcccaaggaggggt

SEQ ID NO: 16437 - DNA, 119 bp, homo sapiens
taggggagccctgagccccctcctcaagaacctgacatacttgacgagttccggaatgtcccaagacaaggcaagacgccaagctggttctgagaagacaaggagtcctgcttgaccgg

SEQ ID NO: 16438 - DNA, 119 bp, homo sapiens
aaggagcaggtggcggaggtgcgcgccaagctggaggagcaggcccagcagatacgcctgcaggccgagccttccaggcccgcctcaagagctggttcgagcccctggtggaagacatg

SEQ ID NO: 16439 - DNA, 119 bp, homo sapiens
atcacgcatttgagaccgtccccgcatgtgcttggccccatggcttctgaacatgttcttttctatgcccgtttgtgtgcaacaatgatctgtgacatcagacagaaaattaaaaacca

SEQ ID NO: 16440 - DNA, 119 bp, homo sapiens
ggtaagtggaaaactggacagggaatatgcacctgtgaacgctgcaccttgcgtgcccagagttctgatcaacttcctaatttcttcactgcacagcacagcaaatgggttcaggtact

SEQ ID NO: 16441 - DNA, 119 bp, homo sapiens
ttaataattttgacttccaagttcagaaatttattagcatggctttttctccagactccaaatacctatggctcagacgtcacctccagagtcaaatcttgtctactggctgtgggaaa

SEQ ID NO: 16442 - DNA, 119 bp, homo sapiens
aacagaaagtaatggccattgttagaatcgacactcagaacaaccctgtctaccaggtacctagtagtggacaagtatcgtgaaaattataaaaaatagaactactttttattgaatgt

SEQ ID NO: 16443 - DNA, 119 bp, homo sapiens
tgcacctgcaggatggtgaagggttgacctgtgtccatttctgcttctggaacagctgggtgatgtttgggacacagaaggagtcttccagggtgttgagttgccacaggggtactccc

SEQ ID NO: 16444 - DNA, 119 bp, homo sapiens
ttgtacttactgaacagctaggttgtatttaaaaggtggggaaaaggggaatgtcttggtagctttatccaccagtagaaacaatacagtaggtagttacaggcagcttctagaagggg

SEQ ID NO: 16445 - DNA, 119 bp, homo sapiens
gcactatctttattatgtagaaaccctaaggtgttcagaaaatatcagaatcatggaggacagaaatacgtctaagactggaggagagggaaacataaggttagtcgttggttactatg

SEQ ID NO: 16446 - DNA, 119 bp, homo sapiens
gagcaaatttatgtttctcatttactttatttatttatcattgttatggtccttaggaaaatgttatttccttatttggaaaatggatataatcaaaatcatggaagaaagtttgtaca

SEQ ID NO: 16447 - DNA, 119 bp, homo sapiens
ttctggaaggccacagctaaatctctacttaccgatggagacttgaatgaccaactcctttagcaaccacagaattaagaaatctgaaaacaggccaggcatgatggctcatgcctgtg

SEQ ID NO: 16448 - DNA, 119 bp, homo sapiens
ttataactatgtgagttctgcattaccaatcttagtaagaagagatatttcctatctgattaggatacaagagactcaggaaaagacaacagacatcctaacagtacaagatcagatag

SEQ ID NO: 16449 - DNA, 119 bp, homo sapiens
aatgaaaggaagaggaggatttgcaacttaaaccttttatgtgtaccagccttccaatgtaaggatattaaaagtaaatatttatgagttatatctcctctttaattagttgtaagatc

SEQ ID NO: 16450 - DNA, 119 bp, homo sapiens
aggcatgagccaccatacccggcgttttttctatacttttaaaaatggctcagagcagcaaaacaagttgaggatttattctgtgaaatgcactgcagagaaaaagaatgggcaaatag

SEQ ID NO: 16451 - DNA, 119 bp, homo sapiens
gctgactcagtggtttaaacccacctaatgccattccagtcttgacagtgtgtgggtgtaatgtagcagccctcaggcgtcatccctgactttatctgaagaaagcacagcttttatta

SEQ ID NO: 16452 - DNA, 119 bp, homo sapiens
cacttcaacttcttccctcatgaaatcttttaaaagaattttaacacatacctgactgcattcccttcctgcttgtcttcttcacaaaagaaatagaaattgcactgggtgcagtggct

SEQ ID NO: 16453 - DNA, 119 bp, homo sapiens
aatttattatggtgcttacttcgatggttctgaaccagtgtcacggcgcccttgaagatttctggcagtttgatgtgtgtggtaagtaatttgttactaataacagttgcataaaccaa

SEQ ID NO: 16454 - DNA, 119 bp, homo sapiens
tatcaaaggcagcaaacttggggctccaaaacggtttctgatgaaagctgctttctggacagttgtgctagaggtgttaggaatgatgctttgccttcggatgcatcacagaaccgtgg

SEQ ID NO: 16455 - DNA, 119 bp, homo sapiens
ctcataggcgtttctttgggaccagatttctttgggaccacagctagacctatgcctgggtaaggacaccacatacacacccagaaaactggcacactccatgcagccagcttgtgtgt

SEQ ID NO: 16456 - DNA, 119 bp, homo sapiens
accctgcccccaggacgacgcccggaagctgatgcacatggcagacactatcgaggagggcacgatgccaaggagatgtcggacatcatccagcggctgtggaaggactccggtatcca

SEQ ID NO: 16457 - DNA, 119 bp, homo sapiens
ctacgtgcccttctccaatgcgacgggtgtggtacgcagccccttcgagtacccacagtactacctggcgagccatggcagttctccatgctggccgcctacatgtttctgctgatcgt

SEQ ID NO: 16458 - DNA, 119 bp, homo sapiens
ttcatggtcctaggtggcttcaccagcaccctctacacctctctgcatggatacttcgtcttcgggccccaggatgcaatttggagggcttctttgccaccctgggcggtatgagccgg

SEQ ID NO: 16459 - DNA, 119 bp, homo sapiens
cttcacccaccagggctccaacttcggtcccatcttcatgaccatcccagcgttctttgccaagagcgcgccatctacaaccctgtcatctatatcatgatgaacaagcaggtgcctac

SEQ ID NO: 16460 - DNA, 119 bp, homo sapiens
agttcccaatgagggtgagattgggcctggggtctcacccctagtgtggggccccaggtcccgtgcctcccttcccaatgtggcctatggagagacaggcctttctctcagcctctgga

SEQ ID NO: 16461 - DNA, 119 bp, homo sapiens
tagtgtggggccccaggtcccgtgcctccccttcccaatgtggcctatggagagacaggcctttctctcgcctctggaagccacctgctcttttgctctagcacctgggtcccagcatc

SEQ ID NO: 16462 - DNA, 119 bp, homo sapiens
acagaaggaggagctgccagggcccaccacatttgacatctacgaattccacttctctgacctggagtgaccgaactggacctggtcaaatgtggcatccagatgtactacgagctggg

SEQ ID NO: 16463 - DNA, 119 bp, homo sapiens
cgtggtccgaaagttccagatcccccaggaggtgggagacaccgcagggcgcatagtcaggtccctgagccgcccaggacatgggggtggggatgtgatcagggcctcaggtgccccag

SEQ ID NO: 16464 - DNA, 119 bp, homo sapiens
ggcaaactgaagagctactacacggacctggaggccttcgccatggtgacagccggcctgtgccatgactcgaccaccgcggcaccaacaacctgtaccagatgaagtaggcacctcag

SEQ ID NO: 16465 - DNA, 119 bp, homo sapiens
actcaccctcggtttctgctgtgggcgctggggacgcagcgtccgcaggacggcagggccgtatcctgcgagcagggttctgatgcagcgggtgagcactgggtgtgtgagcactgggg

SEQ ID NO: 16466 - DNA, 119 bp, homo sapiens
caagaagttcgaccgctacaagtttgagattaccgtgggcatgccattcagcagcggcgctgacggctccgcagccgcgaggaggacgacgtcaccaaggacatcgtgctgcgggccag

SEQ ID NO: 16467 - DNA, 119 bp, homo sapiens
gtagttaaaacaagtatagaaaaatcagtaccaagaaaaaaaaattcacctgaacagaagtgacccaacactactaaaaaaaaaaaaaaaaagaaatcaactttaacctcatcagaact

SEQ ID NO: 16468 - DNA, 119 bp, homo sapiens
gctacgctggcgtaagaggtggcggtggagacgtttcgctggcgtaagaggtggaggtggagacgttacctggcgtaagaggtggaggtggagcgtccttactgcacagggtgtggagg

SEQ ID NO: 16469 - DNA, 119 bp, homo sapiens
cctacctgaggggccatagcatgatgttacaattcttttcaagacagaaagtgtggtcctgactctctcgttgtcagtggttcactcttacacaatgatggcttcttagcttccaaacg

SEQ ID NO: 16470 - DNA, 119 bp, homo sapiens
cttttcaagacagaaagtgtggtcctgactctctcagttgtcagtggttcactcttacacaatgatggctcttagcttccaaacgagacatcttacttcaggtggtaactagtgaagac

SEQ ID NO: 16471 - DNA, 119 bp, homo sapiens
cagttgtcagtggttcactcttacacaatgatggcttcttagcttccaaacgagacatcttacttcaggggtaactagtgaagaccgtttttattttgtaaaccacatttttctattta

SEQ ID NO: 16472 - DNA, 119 bp, homo sapiens
gcagacccgttgtgggtgttactcattttctctcctgagaaggcaccagagccacacgttgattgaacttttcctgctgctgacgaggctgtgccttctgctcccgcgatgcagcgtgt

SEQ ID NO: 16473 - DNA, 119 bp, homo sapiens
ttactcattttctctcctgagaaggcaccagagccacacgttgattgaactctttcctgctgctgacgagctgtgccttctgctcccgcgatgcagcgtgtgccgtcagctcaggtcag

SEQ ID NO: 16474 - DNA, 119 bp, homo sapiens
cactggtcacctccccaatgaccagggcccggcccagcctcttcatgatataggtgaactcctccgcgggccggccgtcacactgctggtcagaatgaccatgctcttcttggagccat

SEQ ID NO: 16475 - DNA, 119 bp, homo sapiens
gcccagcctcttcatgatataggtgaactcctccgcggtgccggccgtcacactgctggtcagaatgacatgctcttcttggagccatagcgttcacctggaagacataaggcccttca

SEQ ID NO: 16476 - DNA, 119 bp, homo sapiens
cgtacctttctcccaggacctggggcaaggtccagatctccgtggtggtgttggaggggcggttgtagaagtgtccacgtgcaggatggtgttccctgggtgcaggtaggagatgatgt

SEQ ID NO: 16477 - DNA, 119 bp, homo sapiens
ggcggttgtagatagtgtccacgtgcaggatggtgttccctgggtgcaggtaggagatgatgtagggaagccagagacctggcctcctgtgcagtgccggagatccagcactaaggcgg

SEQ ID NO: 16478 - DNA, 119 bp, homo sapiens
tgatgtagggaatgccagagacctggcctcctgtgcagtgccggagatccagcactaaggcggaggtgccatgagattcccccacacgtgggccaccaggaactcccccatcatgctca

SEQ ID NO: 16479 - DNA, 119 bp, homo sapiens
aggcggaggtgcccatgagattcccccacacgtgggccaccaggaactcccccatcatgctcagcacctctggcccgggacgctgtccacccgcaggtagcccacattaccctccagaa

SEQ ID NO: 16480 - DNA, 119 bp, homo sapiens
tgctcagcacctcctggcccgggacgctgtccacccgcaggtagcccacattaccctccagaacctcatgcggaggcccctttgcagccaggcaagcagttcctcttctgagaggctgg

SEQ ID NO: 16481 - DNA, 119 bp, homo sapiens
ccagaacctcatggcggaggcccctttgcagccaggcaagcagttcctcttctgagaggctggtgagtgtgggacttgtgggggaggctcgggggtgctgggctcataggagatgacca

SEQ ID NO: 16482 - DNA, 119 bp, homo sapiens
ggctggtgagtgctgggacttgtgggggaggctcgggggtgctgggctcataggagatgaccaggcgagatcgttcagggagctctgcaccccggctgtcagcacactggccagcgtct

SEQ ID NO: 16483 - DNA, 119 bp, homo sapiens
tgaccaggcgaggatcgttcagggagctctgcaccccggctgtcagcacactggccagcgtctgcgggttgagatgctcagaatctcatggctcttgatggcctgctggatggcttcct

SEQ ID NO: 16484 - DNA, 119 bp, homo sapiens
tgcaggtccacactctgctgaagccccacaccactgccactctggaacaggcacctccaccagccacccgtccctccctgtcatttattctcccagctaaagcatgaatctataaaagg

SEQ ID NO: 16485 - DNA, 119 bp, homo sapiens
ccaccagccaccctgtccctccctgtcatttattctcccagctaaagcatgaatctataaaaggaagcttcttctcacaggatccaactcgtcctccaccctcacacaacactccctcg

SEQ ID NO: 16486 - DNA, 119 bp, homo sapiens
ataaaaggaagctctcttctcacaggatccaactcgtcctccaccctcacacaacactccctcgaggaaatgtaatgttccaggaatggcccagcatgtggtaaagggcacagagcttc

SEQ ID NO: 16487 - DNA, 119 bp, homo sapiens
ctccctcgaggaagatgtaatgttccaggaatggcccagcatgtggtaaagggcacagagcttcctataaagctgggctatggctcaaggataaagtctgtggtgggggagtgggagaa

SEQ ID NO: 16488 - DNA, 119 bp, homo sapiens
agagcttcctataaaagctgggctatggctcaaggataaagtctgtggtgggggagtgggagaagctggaatgtcttgattctactgttgaagttaccactgtctaaaatcccctagtc

SEQ ID NO: 16489 - DNA, 119 bp, homo sapiens
tgggagaagctggcaatgtcttgattctactgttgaagttaccactgtctaaaatcccctagtcattatgaaagacagaggacgaaacagccatcctgtcgacttctttgtaaggggca

SEQ ID NO: 16490 - DNA, 119 bp, homo sapiens
ccctagtcattatggaaagacagaggacgaaacagccatcctgtcgacttctttgtaaggggcatcagatcaaagactgccagaacacccacactgatcctacctgcataatgtggtat

SEQ ID NO: 16491 - DNA, 119 bp, homo sapiens
cccaggagcccctcaatcttggatcctgagagaggagttattaccaggctgagcagaacataggcactaagttaggcacggcagacctgcacctgctctgtaacccgtgttatagatta

SEQ ID NO: 16492 - DNA, 119 bp, homo sapiens
taccaggctgagcagaacataggcactacagttaggcacggcagacctgcacctgctctgtaacccgtgtatagattacaatctggaaagtggctgatcatcacaaccacccgctgtga

SEQ ID NO: 16493 - DNA, 119 bp, homo sapiens
cagacctgcacctgctctgtaacccgtgttatagattacaatctggaaagtggctgatcatcacaaccaccgctgtgaagaataaacatacaaagagggaagcagccagcaggggtgag

SEQ ID NO: 16494 - DNA, 119 bp, homo sapiens
tttaggttctaagctgtgcctctgtccatgtaaagtcagaccaggaggaatggaaacacgaaacattgcattgtgtttccctttgtgttgcagtggtggtctcaaggaaaacgacgtca

SEQ ID NO: 16495 - DNA, 119 bp, homo sapiens
aaacacgaaacattgccattgtgtttccctttgtgttgcagtggtggtctcaaggaaaacgacgtcatatcagcatcaatggacagtccgtggtctccgccaatgatgtcagcgacgtc

SEQ ID NO: 16496 - DNA, 119 bp, homo sapiens
ggaaaacgacgtcataatcagcatcaatggacagtccgtggtctccgccaatgatgtcagcgacgtcataaaagggaaagcaccctgaacatggtggtccgcaggggtaatgaagatat

SEQ ID NO: 16497 - DNA, 119 bp, homo sapiens
atgtcagcgacgtcattaaaagggaaagcaccctgaacatggtggtccgcaggggtaatgaagatatcagatcacagtgattcccgaagaaattgacccataggcagaggcatgagctg

SEQ ID NO: 16498 - DNA, 119 bp, homo sapiens
agaggcatgagctggacttcatgtttccctcaaagactctcccgtggatgacggatgaggactctgggcgctggaataggacactcaagacttttgactgccattttgtttgttcagtg

SEQ ID NO: 16499 - DNA, 119 bp, homo sapiens
gatgaggactctgggctgctggaataggacactcaagacttttgactgccattttgtttgttcagtggaactccctggccaacagaatccttcttgatagtttgcaggcaaaacaaatg

SEQ ID NO: 16500 - DNA, 119 bp, homo sapiens
cttaccagagaaatatatgatgaacagtgttttggaaaacttcacaattttattggtaatggttttgtcctttcctctgtgggcagatgctgccatgaggcttgacagaagtgaggaag

SEQ ID NO: 16501 - DNA, 119 bp, homo sapiens
tcacaattttattggtaatggttttgtctctttcctctgtgggcagatgctgccatgaggcttgacagagtgaggaaggtgggcctgggaggcgctgggcctgcgccgagggaactgac

SEQ ID NO: 16502 - DNA, 119 bp, homo sapiens
ggcagatgctgccatgaggcttgacagaagtgaggaaggtgggcctgggaggcgctgggcctgcgccgaggaactgaccaggttgttggattgggttcctagtggtcagtcagcagttg

SEQ ID NO: 16503 - DNA, 119 bp, homo sapiens
ggcctgggaggcgctgggcctgcgccgagggaactgaccaggttgttggattgggttcctagtggtcagcagcagttgaatttgcatcatccatagggaaaacttgggcttgattctgt

SEQ ID NO: 16504 - DNA, 119 bp, homo sapiens
ctcacctttatggggagacgatatttgctgtgcagaaaatggtggcaacagtcacagccttaccaagttctctatgttctccgtggtcttctgagaacctctctttcagcctgcatcat

SEQ ID NO: 16505 - DNA, 119 bp, homo sapiens
tatttgctgtgcagaaaatggtggcaacagtcacagccttaccaagttcctctatgttctccgtggtctctgagaacctctctttcagcctgcatcatcacaatgccaacacatctgat

SEQ ID NO: 16506 - DNA, 119 bp, homo sapiens
cttaggatgggacaagtctgtgaaggctgctgcagcacccaccgtagacccctaatcgtgtgacgtcacaggatggtccgggctgctcacttgccacagtggcctgtttgagcccggga

SEQ ID NO: 16507 - DNA, 119 bp, homo sapiens
cgtgtgacgtcaccaggatggtccgggctgctcacttgccacagtggcctgtttgagcccgggaagccacggggctgctcagctggacaccagccccccgagctgcccatgttggggtc

SEQ ID NO: 16508 - DNA, 119 bp, homo sapiens
gcccgggaagccaacggggctgctcagctggacaccagccccccgagctgcccatgttggggtcacaggcccacctccctggttggggaggggcaactgagagtgtggagaggtgggac

SEQ ID NO: 16509 - DNA, 119 bp, homo sapiens
ttggggtcacaggccccacctccctggttggggaggggcaactgagagtgtggagaggtgggacccagggtgctggtctccgcaggggctggatcagagcctgggatgggcagggtgag

SEQ ID NO: 16510 - DNA, 119 bp, homo sapiens
tgaagcagctggagtgtgggcgtcccgcagactcacctcggaggctggagcctcctcggctgagcgggactggggcttgggtgattttgcctccacccccagcaacgtcatgctcagca

SEQ ID NO: 16511 - DNA, 119 bp, homo sapiens
agcctcctcggctgagcgggacctggggcttgggtgattttgcctccacccccagcaacgtcatgctcacagaggggcccccgcccacaagcccaggggaggtaccgtgttgctggaca

SEQ ID NO: 16512 - DNA, 119 bp, homo sapiens
cccccagcaacgtcatgctcagcagaggggcccccgcccacaagcccaggggaggtaccgtgttgctggcacagtttgcctggatttttctcaccgatgctcttatgtttccaggtact

SEQ ID NO: 16513 - DNA, 119 bp, homo sapiens
tgcagggaccctctgggtgaccgactgccctgtgctgcaggaattgtgccctcactcacctaccaggtgtcttcatgaagaagctgtggaccaccacggtgccagggaaggatcccatg

SEQ ID NO: 16514 - DNA, 119 bp, homo sapiens
tgctgcaggaattgtgccctcactcacctaccaggtgttcttcatgaagaagctgtggaccaccacggtccagggaaggatcccatggccgattccatcttccactattaccaggtggg

SEQ ID NO: 16515 - DNA, 119 bp, homo sapiens
agcaggcctgtccccaggactgagcccagccctgaccgccctgtccccatagtccatcgtcgcctacttaacaagcacgcagggaagtccaaggaggaggccaagctggccttcctgaa

SEQ ID NO: 16516 - DNA, 119 bp, homo sapiens
atcgtcgcctacttcaacaagcacgcagggaagtccaaggaggaggccaagctggccttcctgaagctctcttcaagtggcccacctttggctcagccttcttcgaggtgaaggtacac

SEQ ID NO: 16517 - DNA, 119 bp, homo sapiens
ccttcctgaagctcatcttcaagtggcccacctttggctcagccttcttcgaggtgaaggtacaccatggcttctcagagcagaggaggaggggaacagggcattgataaagcacagag

SEQ ID NO: 16518 - DNA, 119 bp, homo sapiens
gaaggtacaccatgggcttctcagagcagaggaggaggggaacagggcattgataaagcacagagactctccctaggactgtgggaaagagccatggccttggacacctgccctggtga

SEQ ID NO: 16519 - DNA, 119 bp, homo sapiens
aacaggccagatgattgtggacctgcagaagctcaggagtgtctctcaccttactttcctgatgagcattgatgcagaaatgggccctgctgggaacccacccaccggtctggccccta

SEQ ID NO: 16520 - DNA, 119 bp, homo sapiens
gacctgcagaagctcaggagtgtctctcaccttactttcctgatgagcatctgatgcagaaatgggcccgctgggaacccacccaccggtctggcccctaggctgaggctacaggtgag

SEQ ID NO: 16521 - DNA, 119 bp, homo sapiens
ttcaccagatcaaactgcaggctggcccggtagacggtggcatggacggcgaagtagtagaccccaggccctggcaggtgaacttgccggtgacggcgtcgtaatgtccctgctcgttc

SEQ ID NO: 16522 - DNA, 119 bp, homo sapiens
accagcacgcggtcgaagggcaagggtgcgtcagacggcggaggcacccggctctcggagcgcttggcgtgaaggcggatcgcggaggcaccgagcactccccggcaggcccggtgggc

SEQ ID NO: 16523 - DNA, 119 bp, homo sapiens
cgcttggcgctgaaggcggatcgcggaggcaccgagcactccccggcaggcccggtgggccccgcgggtccgcctctcctcgcggcccggggtcccctcgaggtcccggcagtcctgcg

SEQ ID NO: 16524 - DNA, 119 bp, homo sapiens
cgtgcctggaaggccggggtgccccgggcagaggctggggatcttgttgtcgtccagtgggggcgagccgccgccaggcccaggagcagcaggacgaggagtggcctcatagcgctggc

SEQ ID NO: 16525 - DNA, 119 bp, homo sapiens
gggatcttgttgtcgtccagtgggggcgagccggccgccaggcccaggagcagcaggacgaggagtggctcatagcgctggcaccgggagcccggacgccggggtcctctcgcagtctg

SEQ ID NO: 16526 - DNA, 119 bp, homo sapiens
cagaatcctgggacctgcctctctccccaccccggcgcggcccagtcggtccccaccccactgccgtgccctgaggctgagcgctcgcagggccgagcatccggagagcacaggcaggc

SEQ ID NO: 16527 - DNA, 119 bp, homo sapiens
ctctctccccaccccggcgcggcccagtcggtccccaccccactgccgtgcccctgaggctgagcgctccagggccgagcatccggagagcacaggcaggcgcgagagggtgggagcgg

SEQ ID NO: 16528 - DNA, 119 bp, homo sapiens
caccccccctcccggctccccgatggcctccttcggggcgctcgctactccggaccctccagttggtgggctccagcccccgcgcttctccccggccaggcgccccctgccctgccgtc

SEQ ID NO: 16529 - DNA, 119 bp, homo sapiens
tctgtccagatgatgtcgtggtcgtggttgatgaccatggggcggctgagcacgtgcaggtattccatccgttctcctgggtgtccgccagcgttgagatctgcgtgtagtagcctgcg

SEQ ID NO: 16530 - DNA, 119 bp, homo sapiens
gctacctagacgggccagaagtcatctttaggaacttccagattcttggctgtgatctgatagtccaagtgatcagaaggctgtgatctgatagtccaagttgatcagaagtctaattt

SEQ ID NO: 16531 - DNA, 119 bp, homo sapiens
gtcatctttaggaacttccagattcttggctgtgatctgatagtccaagttgatcagaaggctgtgatcgatagtccaagttgatcagaagtctaatttggggtcctagcacaactacg

SEQ ID NO: 16532 - DNA, 119 bp, homo sapiens
tccactttaggaaacagagctgccaattgaaacagaagaagaaaaaaaaaaaaagcagcagacaacacatgtagagtcttgcacacacacaagtgcccaggcaaggtgcttggcagaac

SEQ ID NO: 16533 - DNA, 119 bp, homo sapiens
agcagacaacacactgtagagtcttgcacacacacaagtgcccaggcaaggtgcttggcagaaccgcaggtgggaagagagtaccggcatcgggtttccttgggatcaatttcattacc

SEQ ID NO: 16534 - DNA, 119 bp, homo sapiens
ggcagaaccgcagagtgggaagagagtaccggcatcgggtttccttgggatcaatttcattaccgtgtactttcccattgtggtcatgccatttggcagggggagaatgggaggcttgg

SEQ ID NO: 16535 - DNA, 119 bp, homo sapiens
tcattaccgtgtacctttcccattgtggtcatgccatttggcagggggagaatgggaggcttggccttcttgtgaggcagtgtgagcagaagctgatgccagcatgtcactggttttga

SEQ ID NO: 16536 - DNA, 119 bp, homo sapiens
gggatgagcccagacttgatgttttgggattgtccttattttaacctcaaggtctcgcatggtggggccctgaccaacctacacaagttccctcccacaagtggacatcagtgtcttct

SEQ ID NO: 16537 - DNA, 119 bp, homo sapiens
tttaacctcaaggtctcgcatggtggggcccctgaccaacctacacaagttccctcccacaagtggacacagtgtcttctctgtgaggcatctggccattcgcactccctggtgtggtc

SEQ ID NO: 16538 - DNA, 119 bp, homo sapiens
cctacacaagttccctcccacaagtggacatcagtgtcttctctgtgaggcatctggccattcgcactcctggtgtggtcagcctctctcacacaaggaggaacttgggtgaaggctga

SEQ ID NO: 16539 - DNA, 119 bp, homo sapiens
attttcacttaaaaaattggaggctgaaggggtaagcaaacaaacttttgaagtagacaaagctcatcttaatcaacagactttagagtccagtctttccaaatctgtttttaacgaca

SEQ ID NO: 16540 - DNA, 119 bp, homo sapiens
gtagacaaagctcatctttaatcaacagactttagagtccagtctttccaaatctgtttttaacgacagaacttctccctcccctgccccattttgtcctccccattaaatggtactgt

SEQ ID NO: 16541 - DNA, 119 bp, homo sapiens
tctgtttttaacgacagaaacttctccctcccctgccccattttgtcctccccattaaatggtactgtgcaataaaattcccaagcgacctctttaaatcagcgttctttccgatgctg

SEQ ID NO: 16542 - DNA, 119 bp, homo sapiens
cattaaatggtactgtgtcaataaaattcccaagcgacctctttaaatcagcgttctttccgatgctggtaccacagtcatggaaaagggagatgtgttggacaggcctgtcattacag

SEQ ID NO: 16543 - DNA, 119 bp, homo sapiens
gttctttccgatgctggctaccacagtcatggaaaagggagatgtgttggacaggcctgtcattacaggagtagttggtggtacatccagtctgtatttcttacacaaaattacatcta

SEQ ID NO: 16544 - DNA, 119 bp, homo sapiens
aggcctgtcattacaggtagtagttggtggtacatccagtctgtatttcttacacaaaattacatctaatatttgacatgaggccatttgctatcataagccatcactaggaacttcta

SEQ ID NO: 16545 - DNA, 119 bp, homo sapiens
cacaaaattacatctaaatatttgacatgaggccatttgctatcataagccatcactaggaacttctagctgtctcactcgattgaggctacaatgttgttaggtgctatgaccacaat

SEQ ID NO: 16546 - DNA, 119 bp, homo sapiens
accaaaagaccatatttcaaattaaatcatagtagcgaatgacataccatttacatattacaatctgagctctgaaacagggggaacatataatggtatccagaacatctttacatcaa

SEQ ID NO: 16547 - DNA, 119 bp, homo sapiens
ataccatttacatattacaatctgagcctctgaaacagggggaacatataatggtatccagaacatcttacatcaaaataacctatcatactacaaagttttcacttccaaaaagtgta

SEQ ID NO: 16548 - DNA, 119 bp, homo sapiens
cctgcctccgtggtgccagcctggggtctgctagcaaggggacacgtggttccctccacccaggtcccctcacgccatctccttgcggcccaaggaggagaaagcccacatcggcctga

SEQ ID NO: 16549 - DNA, 119 bp, homo sapiens
cctccacccaggtccccatcacgccatctccttgcggcccaaggaggagaaagcccacatcggcctgagcgccagacgcacatgctggtgccgtgagcccccgactgcatatttcacgt

SEQ ID NO: 16550 - DNA, 119 bp, homo sapiens
gcccacatcggcctgagccgccagacgcacatgctggtgccgtgagcccccgactgcatatttcacgtctttgctccatctcactgagaagacataagatgctctccagagggagtaag

SEQ ID NO: 16551 - DNA, 119 bp, homo sapiens
tccactggcttgagtcatctcttcccaggaaagggtggtgccgtccagccagcacatccccagtggtgtactggatgcagcaggacttggatgtagttgcaccccctgggctggggttt

SEQ ID NO: 16552 - DNA, 119 bp, homo sapiens
ggaaagggtggtgccgtccagccagcacatccccagtggtgttactggatgcagcaggacttggatgtattgcaccccctgggctggggtttccccccggctgatttcctgcggctgct

SEQ ID NO: 16553 - DNA, 119 bp, homo sapiens
tttacttcccagctttgccttcagggacttcagggaaacttcgggctgctcttccgatctccccaactggcatctccatgggaagctggctgactgtctcagccaagttaactttcaat

SEQ ID NO: 16554 - DNA, 119 bp, homo sapiens
cttcgggctgctcttccgatctccccaactgcgcatctccatgggaagctggctgactgtctcagccaattaactttcaatgttgacaggtgcacaacttgctcactctgtgctgttag

SEQ ID NO: 16555 - DNA, 119 bp, homo sapiens
ccatgggaagctggctgactgtctcagccaagttaactttcaatgttgacaggtgcacaacttgctcacctgtgctgttagattagggtcaggggaggtggatggacttctagaccttt

SEQ ID NO: 16556 - DNA, 119 bp, homo sapiens
cccacttgcaattccaaatcaacaaaaaggataaacccatccctgccctgccaccctcacttttgctgtatcactggagagacgtaaaatgattcccatgtcttggtagaggaggatgg

SEQ ID NO: 16557 - DNA, 119 bp, homo sapiens
ccaccctcacttttgctgtcatcactggagagacgtaaaatgattcccatgtcttggtagaggaggatggacacaggtgagctggttctggagctgggctgagagagtccaagcctcat

SEQ ID NO: 16558 - DNA, 119 bp, homo sapiens
cttacctgaaatgcaaaaaagtcctccgcaggcgcattcatgatgttgcaaatctgagagcagtgaagggaataatgaaggtgtgattaggcctgagagggtgcccagtgaagcactgt

SEQ ID NO: 16559 - DNA, 119 bp, homo sapiens
aatctgagagcagtgaaggggaataatgaaggtgtgattaggcctgagagggtgcccagtgaagcactgataccattttcagaaacaccatgttcttgtccaaggcattcacattcttt

SEQ ID NO: 16560 - DNA, 119 bp, homo sapiens
ggtgcccagtgaagcactgtataccattttcagaaacaccatgttcttgtccaaggcattcacattctttcatcaggtagacatagtcgagacagttttcaattattcactgaggctac

SEQ ID NO: 16561 - DNA, 119 bp, homo sapiens
gttacctctagcggcaaaaccagagccagctattaagcagccagaaagctacagtaattgaatacacgacatttctcttttagcacgttctttgttctcctcgtccggaagttgtagac

SEQ ID NO: 16562 - DNA, 119 bp, homo sapiens
aaagctacagtaattgaatacacgaccatttctcttttagcacgttctttgttctcctcgtccggaagtgtagacgtctatttagtttgattatctgtcgtcttagtgaagctgcatct

SEQ ID NO: 16563 - DNA, 119 bp, homo sapiens
ttctttgttctcctcgtccggaagttgtagacgtctatttagtttgattatctgtcgtcttagtgaagcgcatctacaacagtcaggtcatctgatgttccttcaattgttgtatctgt

SEQ ID NO: 16564 - DNA, 119 bp, homo sapiens
caaaaatcttgaaggggagaaagaagagcaaagacgagactatgcaagaagggggaaatagttgagtaatatggtaatgacctggttttattttcttgtgggaaactgtcacccaactg

SEQ ID NO: 16565 - DNA, 119 bp, homo sapiens
atagttgagtaaatatggtaatgacctggttttattttcttgtgggaaactgtcacccaactggcatgatggaagacacatctcttacagaacagtgttttttctaaggatttgcattg

SEQ ID NO: 16566 - DNA, 119 bp, homo sapiens
caactggcatgactggaagacacatctcttacagaacagtgttttttctaaggatttgcattgaccactgagagtgattaatatttacttcattttttacctttcctcctatcaccatc

SEQ ID NO: 16567 - DNA, 119 bp, homo sapiens
gcattgaccacttgagagtgattaatatttacttcattttttacctttcctcctatcaccatctgtagaaaatctgataagcagagtaaagaaataaaaagttaagaaaaagcatttac

SEQ ID NO: 16568 - DNA, 119 bp, homo sapiens
accatctgtagaaaaatctgataagcagagtaaagaaataaaaagttaagaaaaagcatttacttaaaaaaatgaaaacaggaatatgcatgctaattggatagaataattaatatata

SEQ ID NO: 16569 - DNA, 119 bp, homo sapiens
atgactactgctcccggacaggaagtgactggggcgcggggaggaggggggcacagcggcgcaggcgagtccgagaccagatgtgcggctccaactccagatgttcttcatctccgtcc

SEQ ID NO: 16570 - DNA, 119 bp, homo sapiens
gggggcacagcggcgcaggcgagctccgagaccagatgtgcggctccaactccagatgttcttcatctcgtcctacccgccgtccgggctcctcctgcctcggcctgtgccaggctggg

SEQ ID NO: 16571 - DNA, 119 bp, homo sapiens
tgtcttgtatgctgtaaggaccctctagctccccgcccccaggaccacctcaagatgtcaccacaccagagcccttgccatccacctttcttcttcagggctttcttgtcaggactgcc

SEQ ID NO: 16572 - DNA, 119 bp, homo sapiens
acctcaagatgtcaccacaccagaagcccttgccatccacctttcttcttcagggctttcttgtcaggatgccttccccaaccagaaacatggctgctgggctcttcctcgcactggct

SEQ ID NO: 16573 - DNA, 119 bp, homo sapiens
tcttcagggctttcttgtcaggactgccttccccaaccagaaacatggctgctgggctcttcctcgcacggctgggctccctgaggggtccttgtcggcctccccagaccctgcatgtg

SEQ ID NO: 16574 - DNA, 119 bp, homo sapiens
cctaccctgcgtgggtttacgcacagcggggacatctttctgcttcctttccaagtggggtggcataccgtttggggcgccgcggggcctccgggctcaggctttcttcttcatgccca

SEQ ID NO: 16575 - DNA, 119 bp, homo sapiens
ggggacatctttctgcttcctttccaagtggggtggcatacctgtttggggcgccgcggggcctccgggtcaggctttcttcttcatgcccactgagggtagcaaagggatcagcctgt

SEQ ID NO: 16576 - DNA, 119 bp, homo sapiens
cacaggcatatcttggtttactccaaaacgagtgtaaacacttccaagatggtcattgaacacctgcgagtgctggtcctatacgtggtgcttttgcaaacaccctttgaagctcccaa

SEQ ID NO: 16577 - DNA, 119 bp, homo sapiens
tcattgaacacctgcgatgtgctggtcctatacgtggtgcttttgcaaacaccctttgaagctcccaagatgtgggcagaggggcagagagcagggagcaagatgatgattctctagcc

SEQ ID NO: 16578 - DNA, 119 bp, homo sapiens
cctttgaagctcccaaggatgtgggcagaggggcagagagcagggagcaagatgatgattctctagcctactgtctggcatgggcaggccacttataatattctgcggacatgaggact

SEQ ID NO: 16579 - DNA, 119 bp, homo sapiens
tgatgattctctagcctcactgtctggcatgggcaggccacttataatattctgcggacatgaggactgagacagacagggttgcctggtccctggagaacccagaatgctcccaactt

SEQ ID NO: 16580 - DNA, 119 bp, homo sapiens
tgcggacatgaggactggagacagacagggttgcctggtccctggagaacccagaatgctcccaacttcaaatacccagtgacctcatatcaccttttctcaagtgagcctgaaggtcc

SEQ ID NO: 16581 - DNA, 119 bp, homo sapiens
agaatgctcccaacttcaaaatacccagtgacctcatatcaccttttctcaagtgagcctgaaggtccaaccgtggtcaaattgtgtctcctcagtagccacctggacgcattaggtaa

SEQ ID NO: 16582 - DNA, 119 bp, homo sapiens
ccctgattccctttctctctaccccaggggaactctccctggaagagtttatagagggcgtccagaaggccagatgctcctggacacactgacacgaagcctggaccttacccgcatcg

SEQ ID NO: 16583 - DNA, 119 bp, homo sapiens
atagagggcgtccagaaggaccagatgctcctggacacactgacacgaagcctggaccttacccgcatctgcgcaggctccagaatggcgagcaagacgaggagggggctgacgaggcc

SEQ ID NO: 16584 - DNA, 119 bp, homo sapiens
cctggaccttacccgcatcgtgcgcaggctccagaatggcgagcaagacgaggagggggctgacgaggcgctgaggcagccggctgagtgcaccgcccggctgcttctgcactagcggg

SEQ ID NO: 16585 - DNA, 119 bp, homo sapiens
aggagggggctgacgaggccgctgaggcagccggctgagtgcaccgcccggctgcttctgcactagcggtggggtggtatggtggtgcctgttggtggtgttcttgtcttaaccctaga

SEQ ID NO: 16586 - DNA, 119 bp, homo sapiens
gctgcttctgcactagcgggtggggtggtatggtggtgcctgttggtggtgttcttgtcttaaccctagtagaatctaatgaactcagaggcttagctcgcctctttagggtccatggt

SEQ ID NO: 16587 - DNA, 119 bp, homo sapiens
gtgagccaccgtgcccggcaactcctgccttttcttcagtctcaacaccctcccacccctgcctcctacagtctttgtgttctcatttctgatttggtctgtgggaccctcacccctca

SEQ ID NO: 16588 - DNA, 119 bp, homo sapiens
gtcacctcctccatgaagtcctcttgatgtgaacgcgtccactctgatcccctcctgctttcctgaaggggctctctgcactgtgagttttgcacttggtagtgatcctccctttggct

SEQ ID NO: 16589 - DNA, 119 bp, homo sapiens
ctgatcccctcctgctttcctgaaggaggctctctgcactgtgagttttgcacttggtagtgatcctcctttggctcataaattagacatcatctcctgactggattgtgaagcctagg

SEQ ID NO: 16590 - DNA, 119 bp, homo sapiens
cgcacccacaggttgagctcctccgtctggtggtcgtaactgtagtgtgctgagttgttggtgatctgaactggatgcagggccgtggcgagctaggattgcagcagctgaaagggacg

SEQ ID NO: 16591 - DNA, 119 bp, homo sapiens
agtgtgctgagttgttggtgatctgatactggatgcagggccgtggcgagctaggattgcagcagctgaagggacgccgtccaccaggtaccgcccatccacgttgctcttgattcgac

SEQ ID NO: 16592 - DNA, 119 bp, homo sapiens
tggcgagctaggattgcagcagctgaaagggacgccgtccaccaggtaccgcccatccacgttgctcttattcgacttaaagggaaacagacagctggagatgggcttcccgggcttct

SEQ ID NO: 16593 - DNA, 119 bp, homo sapiens
aggtaccgcccatccacgttgctcttgattcgacttaaagggaaacagacagctggagatgggcttcccggcttctcaacaggggccacttcctcccaacccctgcctctggaaaccta

SEQ ID NO: 16594 - DNA, 119 bp, homo sapiens
ggtacctgtagtctgtgggttccctgggaagaatggtgaagagcaagagcttggtgccagcttctccctagactggggaccccaggctgggccttcctggctggtagttcctggttcca

SEQ ID NO: 16595 - DNA, 119 bp, homo sapiens
tgaagagcaagagcttggtgccagcttctccctcagactggggaccccaggctgggccttcctggctggagttcctggttccaaaatgtctgagctcccgcatgttctacctctcaccc

SEQ ID NO: 16596 - DNA, 119 bp, homo sapiens
actggggaccccaggctgggccttcctggctggtagttcctggttccaaaatgtctgagctcccgcatgtctacctctcaccccaagacactgcagctctgctcatcctgcaaccttta

SEQ ID NO: 16597 - DNA, 119 bp, homo sapiens
tttacctggacatagtgatactatcttagagcatttgatgagtactctcataatttatgcttccagaattcattaataatctctgaatgtaacttcagattaacattttggattaacac

SEQ ID NO: 16598 - DNA, 119 bp, homo sapiens
actctcataatttatgcttccagaatttcattaataatctctgaatgtaacttcagattaacattttggttaacactttggattcattttgtcatgcacaatgtcacattgtaatgtat

SEQ ID NO: 16599 - DNA, 119 bp, homo sapiens
aatgtaacttcagattaacattttggattaacactttggattcattttgtcatgcacaatgtcacattgaatgtatgcaccttacatgttaacattcggtgctacaagatgaatctaaa

SEQ ID NO: 16600 - DNA, 119 bp, homo sapiens
tctgcctcctgggactctataacttctgactctggctgggtctgcccttctgcctcctgggccgcctctctgcctcttgggcctctgcaccttctgactctggctcgtcctccccttca

SEQ ID NO: 16601 - DNA, 119 bp, homo sapiens
ctgcctcctgggccgcctcttctgcctcttgggcctctgcaccttctgactctggctcgtcctccccttagtctccagggcctctacactttctgtctctggctgggcctccttttctg

SEQ ID NO: 16602 - DNA, 119 bp, homo sapiens
ctctggctcgtcctccccttcagtctccagggcctctacactttctgtctctggctgggcctccttttcgcctccggggcttctgcaccttctgactctggctggacctcccattctgc

SEQ ID NO: 16603 - DNA, 119 bp, homo sapiens
tctggctgggcctccttttctgcctccggggcttctgcaccttctgactctggctggacctcccattctcctctggggtctctacatcttctgactctggctgggcctctccttctgcc

SEQ ID NO: 16604 - DNA, 119 bp, homo sapiens
ctggctggacctcccattctgcctctggggtctctacatcttctgactctggctgggcctctccttctgctctggggcctctacatcttctgactctggctgggcctccccttcagcct

SEQ ID NO: 16605 - DNA, 119 bp, homo sapiens
tctgcctctggggcctctacaccttctgactctggctgggcctccccttcagcctccggggcctctatgcttcggccccatcactctgtcctggatcttggtcacctcctgccgcagct

SEQ ID NO: 16606 - DNA, 119 bp, homo sapiens
ggcctctatgccttcggccccatcactctgtcctggatcttggtcacctcctgccgcagcttcaccctgaagttgtcctcatgcccagagccttgacccccagtttctcccctttcact

SEQ ID NO: 16607 - DNA, 119 bp, homo sapiens
cttcaccctgcaagttgtcctcatgcccagagccttgacccccagtttctcccctttcacttatgcccttccctcctgctcagcttcccccaactcactgcccgcactggtttcactgt

SEQ ID NO: 16608 - DNA, 119 bp, homo sapiens
cttatgccctctccctcctgctcagcttcccccaactcactgcccgcactggtttcactgttgtgggtttcccttctctctcctgagccattgcatctccctctgcctccccgagtttg

SEQ ID NO: 16609 - DNA, 119 bp, homo sapiens
gttgtgggttttcccttctctctcctgagccattgcatctccctctgcctccccgagtttgggatcttttctctgttgagtctctggctcccctcgccatcctcaccctcgtccactcc

SEQ ID NO: 16610 - DNA, 119 bp, homo sapiens
ctggcctctctaagacagtgcaggccacgtgatccatcctcctagaggcagtgagcaggtgagggaccctaccacagccaggaggaaaaagctaggcgtccactttccgcagccatgct

SEQ ID NO: 16611 - DNA, 119 bp, homo sapiens
gagggacccctaccacagccaggaggaaaaagctaggcgtccactttccgcagccatgctcaaacagaggagaggagacggtcctggagctacaggccctggaacacgacggagaatga

SEQ ID NO: 16612 - DNA, 119 bp, homo sapiens
caaacagagtgagaggagacggtcctggagctacaggccctggaacacgacggagaatgagggcagccacaccgcaggagcatttgctccctgggtgcccgttccggctcccaggccag

SEQ ID NO: 16613 - DNA, 119 bp, homo sapiens
gggcagccaacaccgcaggagcatttgctccctgggtgcccgttccggctcccaggccagcatccacggtggacagagggcaactataactactacatcgaggaagacgaagacggcga

SEQ ID NO: 16614 - DNA, 119 bp, homo sapiens
catccacggctggacagagggcaactataactactacatcgaggaagacgaagacggcgaggaggaggacagtggaaggacgacctggcagaagaggaccagcaggcaggggaggtcac

SEQ ID NO: 16615 - DNA, 119 bp, homo sapiens
ccgagggccccagcgaccctccggccctgctgtccacgctgaatgtgaacgtgggtggccacagctaccgctggactactgcgagctggccggcttccccaagacgcgcctaggtcgcc

SEQ ID NO: 16616 - DNA, 119 bp, homo sapiens
ctgctgtccacgctgaatgtgaacgtgggtggccacagctaccagctggactactgcgagctggccggctccccaagacgcgcctaggtcgcctggccacctccaccagccgcagccgc

SEQ ID NO: 16617 - DNA, 119 bp, homo sapiens
acgaatacttcttcgaccgcgacccggccgtcttccagctggtctacaatttctacctgtccggggtgcgctggtgctcgacgggctgtgtccgcgccgcttcctggaggagctgggct

SEQ ID NO: 16618 - DNA, 119 bp, homo sapiens
tccggggtgctgctggtgctcgacgggctgtgtccgcgccgcttcctggaggagctgggctactggggctgcggctcaagtacacgccacgctgctgccgcatctgcttcgaggagcgg

SEQ ID NO: 16619 - DNA, 119 bp, homo sapiens
ctactggggcgtgcggctcaagtacacgccacgctgctgccgcatctgcttcgaggagcggcgcgacgactgagcgaacggctcaagatccagcacgagctgcgcgcgcaggcgcaggt

SEQ ID NO: 16620 - DNA, 119 bp, homo sapiens
ggcgcgacgagctgagcgaacggctcaagatccagcacgagctgcgcgcgcaggcgcaggtcgaggaggggaggaactcttccgcgacatgcgcttctacggcccgcagcggcgccgcc

SEQ ID NO: 16621 - DNA, 119 bp, homo sapiens
gtcgaggaggcggaggaactcttccgcgacatgcgcttctacggcccgcagcggcgccgcctctggaactcatggagaagccattctcctcggtggccgccaaggccatcggggtggcc

SEQ ID NO: 16622 - DNA, 119 bp, homo sapiens
cctctggaacctcatggagaagccattctcctcggtggccgccaaggccatcggggtggcctccagcacttcgtgctcgtctccgtggtggcgctggcgctcaacaccgtggaggagat

SEQ ID NO: 16623 - DNA, 119 bp, homo sapiens
agtgcttcacgggcgagggccaccaacgcggccagacggtgggcagcgtgggtaaggtgggtcaggtgtgcgcgtcatgcgcctcatgcgcatcttccgcatcctcaagctggcgcgcc

SEQ ID NO: 16624 - DNA, 119 bp, homo sapiens
aaggtgggtcaggtgttgcgcgtcatgcgcctcatgcgcatcttccgcatcctcaagctggcgcgccacccaccggactgcgtgccttcggcttcacgctgcgccagtgctaccagcag

SEQ ID NO: 16625 - DNA, 119 bp, homo sapiens
caagctggcgcgccactccaccggactgcgtgccttcggcttcacgctgcgccagtgctaccagcaggtggctgcctgctgctcttcatcgccatgggcatcttcactttctctgcggc

SEQ ID NO: 16626 - DNA, 119 bp, homo sapiens
agtgctaccagcaggtgggctgcctgctgctcttcatcgccatgggcatcttcactttctctgcggctgctactctgtggagcacgatgtgcccagcaccaacttcactaccatccccc

SEQ ID NO: 16627 - DNA, 119 bp, homo sapiens
actttctctgcggctgtctactctgtggagcacgatgtgcccagcaccaacttcactaccatcccccaccctggtggtgggccgcggtgagtacctttgccctgggctttcccatcctc

SEQ ID NO: 16628 - DNA, 119 bp, homo sapiens
cactaccatcccccactcctggtggtgggccgcggtgagtacctttgccctgggctttcccatcctcttcccagcccagtgagctgctcctccctcccctggttatcagccaccaggct

SEQ ID NO: 16629 - DNA, 119 bp, homo sapiens
gctttcccatcctcttccccagcccagtgagctgctcctccctcccctggttatcagccaccaggctttgcttctgatcctcgtcttcccccccacccccaatcgccgcatacagctaa

SEQ ID NO: 16630 - DNA, 119 bp, homo sapiens
tcagccaccaggctttggcttctgatcctcgtcttcccccccacccccaatcgccgcatacagctaacaaacggcgatggatgtcaaaagtggtggaaagagaactcagcagatcagta

SEQ ID NO: 16631 - DNA, 119 bp, homo sapiens
ttcagacccaatgaaggcagtgatggaagcaggcatccaggagttccctctgttgagaagtccagaggtagacagctggcgatgagcggtgtgcaaaggggaaaggcttcgtgaagcag

SEQ ID NO: 16632 - DNA, 119 bp, homo sapiens
agaagtccagaggtgagacagctggcgatgagcggtgtgcaaaggggaaaggcttcgtgaagcagccctctgtatcagggtggctgggcctgatgagaaaggagaggactccaggcggg

SEQ ID NO: 16633 - DNA, 119 bp, homo sapiens
cgtgaagcagccctcctgtatcagggtggctgggcctgatgagaaaggagaggactccaggcgggcagcgcaagccttccaccgcacgatagccactggaagcccagcaggcggcatga

SEQ ID NO: 16634 - DNA, 119 bp, homo sapiens
tccaggcgggcagctgcaagccttccaccgcacgatagccactggaagcccagcaggcggcatgacacaaacccaaggccaaatgtgccccccagaaaaggcgcactcaagagctcaga

SEQ ID NO: 16635 - DNA, 119 bp, homo sapiens
ggcggcatgacacagaacccaaggccaaatgtgccccccagaaaaggcgcactcaagagctcagaggagaaggtgctctccggctggttctagccgccctggcagtgcccggggggagg

SEQ ID NO: 16636 - DNA, 119 bp, homo sapiens
agagctcagaggaggaaggtgctctccggctggttctagccgccctggcagtgcccggggggaggcggtcatgctgggcagaatcctccccaccatcgtacaccaagaaacaaagtgac

SEQ ID NO: 16637 - DNA, 119 bp, homo sapiens
cggggggaggcggtccatgctgggcagaatcctccccaccatcgtacaccaagaaacaaagtgacacaaccaagctcacaggagggctctattcacatttgccacagagcacagaggag

SEQ ID NO: 16638 - DNA, 119 bp, homo sapiens
acaaagtgacacaagccaagctcacaggagggctctattcacatttgccacagagcacagaggagttgagtcaggagctaggaggctggagacatctaccctgtccgaggactttcagg

SEQ ID NO: 16639 - DNA, 119 bp, homo sapiens
cctaccatgtgggaggcgaatgtttagaaggccgcatagtagaagataatcctgcaagtggccggggaggtgtgctttccttccagtttctgttccacactttctgggcctccattttg

SEQ ID NO: 16640 - DNA, 119 bp, homo sapiens
gaatgtttagaaggccgcatagtagaagataatcctgcaagtggccggggagtgtgtgctttccttccatttctgttccacactttctgggcctccattttgcaccagctctcgctgtt

SEQ ID NO: 16641 - DNA, 119 bp, homo sapiens
taaaggcccttcgggaagaagctctagctggtgatgagagcaaggtttgggggccgctacacttcggcatgcagtgttgggaaggtgagaacacagttctaaagaacaagaattgttga

SEQ ID NO: 16642 - DNA, 119 bp, homo sapiens
gctacacttcggcagtgcagtgttgggaaggtgagaacacagttctaaagaacaagaattgttgagtctaggaatatggggtctggacccccagcacatccccttcataggtctccatg

SEQ ID NO: 16643 - DNA, 119 bp, homo sapiens
gaattgttgagtctgaggaatatggggtctggacccccagcacatccccttcataggtctccatgggttggagagcagggtcaccctcatttttgttgcaggattcacttgcagtgtga

SEQ ID NO: 16644 - DNA, 119 bp, homo sapiens
ggtctccatgggttgggagagcagggtcaccctcatttttgttgcaggattcacttgcagtgtgaatttaattgtgctggcatcagaacctggagaggaaaagacaaaagactgactgt

SEQ ID NO: 16645 - DNA, 119 bp, homo sapiens
tgcagtgtgaatttcaattgtgctggcatcagaacctggagaggaaaagacaaaagactgactgtgtcttgtcctagcaggtttgtcatcagcttcagaaaatgctcagtattcagtgc

SEQ ID NO: 16646 - DNA, 119 bp, homo sapiens
gactgactgtgtctgtgtcctagcaggtttgtcatcagcttcagaaaatgctcagtattcagtgcatgggtttttcatggaccaactttggtcaaagtcctagcattcatctcatctgc

SEQ ID NO: 16647 - DNA, 119 bp, homo sapiens
gatgcttccactccacgatgctgatgcaggaccgtcgcagaggattggccagggtgaggcagaagagtgccgaggtgaccgctgggcactggccactgccactgtcttgtgcttgctgt

SEQ ID NO: 16648 - DNA, 119 bp, homo sapiens
tgaggcagaagagtgcccgaggtgaccgctgggcactggccactgccactgtcttgtgcttgctgtgctgtttcttcgcttaggggtccctaggcctgatgccccactgctttcacctt

SEQ ID NO: 16649 - DNA, 119 bp, homo sapiens
tgtgcttgctgtgctggtttcttcgcttaggggtccctaggcctgatgccccactgctttcaccttccaagctgggggcccggggcacagcccccattcgggaccagggcctgccccat

SEQ ID NO: 16650 - DNA, 119 bp, homo sapiens
tgctttcaccttccacagctgggggcccggggcacagcccccattcgggaccagggcctgccccattggtggactgggctctggggtggtgtctatatggagaaactgtgtcagggagg

SEQ ID NO: 16651 - DNA, 119 bp, homo sapiens
ggcctgccccattggctggactgggctctggggtggtgtctatatggagaaactgtgtcagggagggacgggtattggggcaattgtggctgcttcctacctgatcctgtccctctgtt

SEQ ID NO: 16652 - DNA, 119 bp, homo sapiens
gtctagcaggggcagcagttggatccttgttccccggggccatttccaaaccaatgcttctcatattgatctagtttagagggccctagttccgaggctctgggctgtagtcttgggtt

SEQ ID NO: 16653 - DNA, 119 bp, homo sapiens
tttccaaaccaatgcttctcatattgagtctagtttagagggccctagttccgaggctctgggctgtagcttgggttgggctggcctggctgggtgtctggtcaacccagttgctgcca

SEQ ID NO: 16654 - DNA, 119 bp, homo sapiens
ccctagttccgaggctctgggctgtagtcttgggttgggctggcctggctgggtgtctggtcaacccagtgctgccatagccgtgaccaccaggaaggaccttagaaccggccagtcta

SEQ ID NO: 16655 - DNA, 119 bp, homo sapiens
gcctggctgggtgtctggtcaacccagttgctgccatagccgtgaccaccaggaaggaccttagaaccgccagtctatcaggtccaggatgatctggagtgccgaggctggaccctttt

SEQ ID NO: 16656 - DNA, 119 bp, homo sapiens
tgcagcgcaaaatcaacgtgtgttatcaggtgcaaggaaagatggtacaggaaggggatggataacaggacgtgggaaccactcacaggactgggaatgaagcaagacctaagtttcca

SEQ ID NO: 16657 - DNA, 119 bp, homo sapiens
caggaaggggatggataacaggaacgtgggaaccactcacaggactgggaatgaagcaagacctaagttccagggctgataccaggtgatgtgctatcctgagcaaacacacaatggct

SEQ ID NO: 16658 - DNA, 119 bp, homo sapiens
ggaatgaagcaagacctaagtttccagggctgataccaggtgatgtgctatcctgagcaaacacacaatgctgtcctttgaagaacttgaggactcacacatgcccacggcaccttggc

SEQ ID NO: 16659 - DNA, 119 bp, homo sapiens
ctatcctgagcaaacacacaatggctgtcctttgaagaacttgaggactcacacatgcccacggcacctggcactaggagccagtgatggggccagcccatgccaatggcaagcgtaag

SEQ ID NO: 16660 - DNA, 119 bp, homo sapiens
tttaccgttccgctgaaatcacaagcttggcgagcttcctgggtaagtgttcaaacacacattaaaataagggccgccccgcgccaagcactgcccatccatcacccacaattcagtta

SEQ ID NO: 16661 - DNA, 119 bp, homo sapiens
ttcaaacacacattaaaataaagggccgccccgcgccaagcactgcccatccatcacccacaattcagtacacactcggggaaacccggctgggtggagacaaggtttggtgccctggt

SEQ ID NO: 16662 - DNA, 119 bp, homo sapiens
ctcacgtggctcccacctgcctcaggcggaggaaggcaggcgtgaactggtagcggacaaagcgcccagattggggtccaggtcccgccggttgatgggcaaccgttctgcaatgtacc

SEQ ID NO: 16663 - DNA, 119 bp, homo sapiens
cctgcctcaggcggaggaaggcaggcgtgaactggtagcggacaaagcgcccagcattggggtccaggtccgccggttgatgggcaaccgttctgcaatgtaccccagctggggctcag

SEQ ID NO: 16664 - DNA, 119 bp, homo sapiens
gggaggcgggaaagggggcgggggccagggcttggcgcgccgggagggcccctcgcaccctctccccttccacccgcgggcggcgctccctcgcgggtgctcaccaccggtgatccgct

SEQ ID NO: 16665 - DNA, 119 bp, homo sapiens
ggcccctcgcaccctctccccttcccacccgcgggcggcgctccctcgcgggtgctcaccaccggtgatcgctgcagccccagcacgtcctccggcccgatcggctgcttcctctgcag

SEQ ID NO: 16666 - DNA, 119 bp, homo sapiens
cgcgggtgctcaccaccggtgatccgctgcagccccagcacgtcctccggcccgatcggctgcttcctcgcagcggccccggcctgggccctgggcctgcgtccggctccgactcggac

SEQ ID NO: 16667 - DNA, 119 bp, homo sapiens
ccggcccgatcggctgcttcctctgcagcggccccggcctgggccctgggcctgcgtccggctccgactggacccagattcggattccgcaggcggctgtggtatgggggccacgctct

SEQ ID NO: 16668 - DNA, 119 bp, homo sapiens
tgggcctgcgtccggctccgactcggacccagattcggattccgcaggcggctgtggtatgggggccacctctggcccgagggccccggagcggactccgtcgccgtcccggccccacc

SEQ ID NO: 16669 - DNA, 119 bp, homo sapiens
tacagaaaagcagaagagcaaagccggaaaggacccgtggggtaaatcagagagtgactctatttaccagctctccagcattgtggaaactgcaatgcctcaggctggttgtggcccat

SEQ ID NO: 16670 - DNA, 119 bp, homo sapiens
agagcaaagccggaaaggacccgtggggtaaatcagagagtgactctatttaccaggctctccagcatttggaaactgcaatgcctcaggctggttgtggcccatgctcctgaggtcag

SEQ ID NO: 16671 - DNA, 119 bp, homo sapiens
tccagaggaggctgacggaacgcccaaatggaatggcgctgttcacccatctggctccctgagtgttatatgtttttcacagtacgttaacggggagatgaattcgccgactctgtctt

SEQ ID NO: 16672 - DNA, 119 bp, homo sapiens
tgagtgttatgatgtttttcacagtacgttaacggggagatgaattcgccgactctgtcttgcagaggggtgtgcgtcatcccacgttgcctgggaaaacaagcattaacaagtgtgag

SEQ ID NO: 16673 - DNA, 119 bp, homo sapiens
ctgtctgtgcactctggctgctgtggaataaagtattaagaagaataaagaactgcaattctcatgcatcagagccccttccagccctcccctcaggcagccccagcatgctgtggttt

SEQ ID NO: 16674 - DNA, 119 bp, homo sapiens
actgcaattctcatgcatgcagagccccttccagccctcccctcaggcagccccagcatgctgtggttttctgtctgcaacattttccactgtctgcgagtcccctgtgttcccgggtt

SEQ ID NO: 16675 - DNA, 119 bp, homo sapiens
cccagcatgctgtggtttatctgtctgcaacattttccactgtctgcgagtcccctgtgttcccgggttatctgccctgagagaagagggttgccaagagcatgaagcatctccatgaa

SEQ ID NO: 16676 - DNA, 119 bp, homo sapiens
cccctgtgttcccgggttaatctgccctgagagaagagggttgccaagagcatgaagcatctccatgaaacctgggagtgcagaggctttggatttttgtctcacttcagagaactcat

SEQ ID NO: 16677 - DNA, 119 bp, homo sapiens
atgaagcatctccatgaagacctgggagtgcagaggctttggatttttgtctcacttcagagaactcatgtgcctgagctggtttgaagagaggtcattttgagaaggaatcgatcctt

SEQ ID NO: 16678 - DNA, 119 bp, homo sapiens
gagacctgccctagctttccagctgggaggaggggacgatctggggtccagcaggctcccgggctggggccacttcccgttctccctgggagtggagaccgaccaagcctctctgtggg

SEQ ID NO: 16679 - DNA, 119 bp, homo sapiens
gagtggagaccgaccaagcctctctgtgggcaggactgaggggtgggcctgtatctccagatgttgagcgggcctggccagcccctgagggggcatcctagagggaggtggtgggctcc

SEQ ID NO: 16680 - DNA, 119 bp, homo sapiens
ggcctgtatctccagatgttgagcagggcctggccagcccctgagggggcatcctagagggaggtggtggctcctggtgactggtattaatatgtagggggagacctgaggttgcagtc

SEQ ID NO: 16681 - DNA, 119 bp, homo sapiens
tggagatggtcatcaagatggtggccttggggctgttcgggcagaagtgttacctgggtgacacgtggacaggctggatttcttcatcgtcgtggcggggtaggccccgcctgggagag

SEQ ID NO: 16682 - DNA, 119 bp, homo sapiens
ggcagaagtgttacctgggtgacacgtggaacaggctggatttcttcatcgtcgtggcggggtaggcccgcctgggagaggccacagcgctggcgaaggggccccgcccaccccacagg

SEQ ID NO: 16683 - DNA, 119 bp, homo sapiens
atttcttcatcgtcgtggcggggtaggccccgcctgggagaggccacagcgctggcgaaggggccccgccaccccacagggatccctgtgtcccacctgtaaagaaaaatgggaggtgt

SEQ ID NO: 16684 - DNA, 119 bp, homo sapiens
tgtaccttgaataaagaggtgagtattctttaaaaataatttgccagttagatgaatgactacaagaagcagggaaacatcttctggcaaagaacacttgatacatgagaaggtaaatg

SEQ ID NO: 16685 - DNA, 119 bp, homo sapiens
agttagatgaatgactacaagaagccagggaaacatcttctggcaaagaacacttgatacatgagaaggaaatgtatgaagacacttcaaagtaaaattaaacagtttcaaaatctgta

SEQ ID NO: 16686 - DNA, 119 bp, homo sapiens
cacacttgaaatggagcattctgaatgtgagtgtcttctggtaacagaaagttctgaccgagccatacacaaccttgaaaatgaacacaatgaaatgacctccatttttaaggtacaga

SEQ ID NO: 16687 - DNA, 119 bp, homo sapiens
aacagaaagttctgaccgagccatacaacaaccttgaaaatgaacacaatgaaatgacctccatttttaggtacagacgttcttttttttaatgtgcctctagatatgaaggtacagcc

SEQ ID NO: 16688 - DNA, 119 bp, homo sapiens
aacacaatgaaatgacctccatttttaaggtacagacgttcttttttttaatgtgcctctagatatgaagtacagccattcttgagggaagagttctccttctttctagttttactgct

SEQ ID NO: 16689 - DNA, 119 bp, homo sapiens
gccacctcccccgggaaggtcttctcttcagggcatccttctttccttccatccatgtgtccatctgagtctcccagattcccttctcccttatttcagagacctccagctcccatcac

SEQ ID NO: 16690 - DNA, 119 bp, homo sapiens
cttctttccttccatccatgtgtccatctgagctctcccagattcccttctcccttatttcagagacctcagctcccatcacccctgaaacaaaggagaagacagggtgggtggctggg

SEQ ID NO: 16691 - DNA, 119 bp, homo sapiens
ctcacttcagccaattcccaggatgtcccagggctttccccagaatgacagcagagctaagggcagtgccatccccacccccatccccagggctccctagctgggagggtagttgggag

SEQ ID NO: 16692 - DNA, 119 bp, homo sapiens
taagggcagtgcccatccccacccccatccccagggctccctagctgggagggtagttgggaggcgggcggccctgaagagaggggagggtggtgcagtacctattcatttcagaaatc

SEQ ID NO: 16693 - DNA, 119 bp, homo sapiens
tgggaggcgggctggccctgaagagaggggagggtggtgcagtacctattcatttcagaaatctcagcgcctgggcccggagggatatggtggaagtaagggcagcctccttggtctct

SEQ ID NO: 16694 - DNA, 119 bp, homo sapiens
ggggcagcctgattctccctcaagggatccctgccccacaaaagacctgaacgactctttcctcaggatatctctgtaaatcctgttggccttaccttccacctgggatactcccttcc

SEQ ID NO: 16695 - DNA, 119 bp, homo sapiens
aagacctgaacgactctttcctcaggatcatctctgtaaatcctgttggccttaccttccacctgggatctcccttcctcctagccccagggacccctcatctggggctgggggccctc

SEQ ID NO: 16696 - DNA, 119 bp, homo sapiens
cctgttggccttaccttccacctgggatactcccttcctcctagccccagggacccctcatctggggctggggccctcacagcccccaaggtccaaggtggcctccaagcctcccaggc

SEQ ID NO: 16697 - DNA, 119 bp, homo sapiens
tagccccagggacccctcatctggggctgggggccctcacagcccccaaggtccaaggtggcctccaagctcccaggcctacaacatccccaggaggctgccccacttcagtggcctga

SEQ ID NO: 16698 - DNA, 119 bp, homo sapiens
cctactggcgttagttccagatcttgaggaagctatcccaggaccctgtcgccacagccatgccatcgtagtcacgcccaggcagctgacgcggttgtcatgcccagccaagacacctg

SEQ ID NO: 16699 - DNA, 119 bp, homo sapiens
agccatgccatcgtcagtcacgcccaggcagctgacgcggttgtcatgcccagccaagacacctgggagaaacaacagcagaatcacaccaaagcccagaggcatcgatctcacctgtg

SEQ ID NO: 16700 - DNA, 119 bp, homo sapiens
aagacacctgggagcaaacaacagcagaatcacaccaaagcccagaggcatcgatctcacctgtgtgcctgttgtgacgaggacggatggtgcatctctcatgggacaagacccagagt

SEQ ID NO: 16701 - DNA, 119 bp, homo sapiens
ctcacctgtgtgccatgttgtgacgaggacggatggtgcatctctcatgggacaagacccagagtctccacggccaggaagggagggaaagttgcatccacgtggggaattaacctgca

SEQ ID NO: 16702 - DNA, 119 bp, homo sapiens
ttcaccttagcaggcaagtaaggtgggtgaaaggtaactcctgggaaccacagttgcttatgagaggtctaaggaaccctgtagcacagaatgctgttttcaaggaagagcaagaaggt

SEQ ID NO: 16703 - DNA, 119 bp, homo sapiens
gaaaggtaactcctgggaaccacagttgcttatgagaggtcctaaggaaccctgtagcacagaatgctgtttcaaggaagagcaagaaggttccactgtttgatgcagggatatctgtc

SEQ ID NO: 16704 - DNA, 119 bp, homo sapiens
ctcacagcgcattcccgtgtgtctgccgcagcaaagcacacacagcacaatgctgttctaaggctcaatcacttaatccctcaggatcctcggggcaggttctgtgatttcctgagcca

SEQ ID NO: 16705 - DNA, 119 bp, homo sapiens
cagcacaatgctgttctaaggctcaatacacttaatccctcaggatcctcggggcaggttctgtgatttctgagccagggcactgacatcacaagagggcgagggccaaccagccctga

SEQ ID NO: 16706 - DNA, 119 bp, homo sapiens
ttcaggccttttctctggactctactcttcccgtggattttgggatggtccccagcccttgctgctcagaggtgatcgtgggccttcctgagcagaaccaagccttgttcttggagtgg

SEQ ID NO: 16707 - DNA, 119 bp, homo sapiens
tttgggatggtccccagcccttgctgctcagtaggtgatcgtgggccttcctgagcagaaccaagccttttcttggagtggtgtgacaagtgaacccagaaacagtcttcatcttccct

SEQ ID NO: 16708 - DNA, 119 bp, homo sapiens
tcgtgggccttcctgagcagaaccaagccttgttcttggagtggtgtgacaagtgaacccagaaacagtttcatcttccctggtgaattcagactctttgggctactttttacaggtag

SEQ ID NO: 16709 - DNA, 119 bp, homo sapiens
ttcaccatcaggtgttccaggtgagcaagtcagtttcggtttccttctgaaagacctctttctgaattcctgcatgctcctcgtgtgtttgttttctgctgcagtggggtcatttacgc

SEQ ID NO: 16710 - DNA, 119 bp, homo sapiens
gtttccttctgaaagacctctttctgaattcgctgcatgctcctcgtgtgtttgttttctgctgcagtgggtcatttacgctggccagtccatttggatgaccatatgggcacaggctc

SEQ ID NO: 16711 - DNA, 119 bp, homo sapiens
gctcctcgtgtgtttgttttctgctgcagtggggtcatttacgctggccagtccatttggatgaccatagggcacaggctcctgcgcctccagctgcccagagttcctttctggctgca

SEQ ID NO: 16712 - DNA, 119 bp, homo sapiens
ctcacttgagcaagacaggggtaccctggtgtagggtagggaaggcaggaggtggatccaagagtaaagagcgtggcgtccatcctgggcccatttcagcccacgaggggattaaagtg

SEQ ID NO: 16713 - DNA, 119 bp, homo sapiens
ccaagagtaaagaagcgtggcgtccatcctgggcccatttcagcccacgaggggattaaagtggattaagcaatgacagaattctcctcaaaaaaagaaaatcctgcaaatacatttgt

SEQ ID NO: 16714 - DNA, 119 bp, homo sapiens
aaagtggattaaggcaatgacagaattctcctcaaaaaaagaaaatcctgcaaatacatttgtcagaagcagggaggtcactcaggtcacttccttggttcccgctatgtcctgtgccc

SEQ ID NO: 16715 - DNA, 119 bp, homo sapiens
atttgtcagaaggcagggaggtcactcaggtcacttccttggttcccgctatgtcctgtgccctcatgaccttgggctgcgtgggcatggcctcaggcctggcctggctcagctcagga

SEQ ID NO: 16716 - DNA, 119 bp, homo sapiens
gtgccctcatgatccttgggctgcgtgggcatggcctcaggcctggcctggctcagctcaggagcctttacccagctcagtgctcctgtatggggaccagacaccgacaggccgcagag

SEQ ID NO: 16717 - DNA, 119 bp, homo sapiens
tcaggagcctttgacccagctcagtgctcctgtatggggaccagacaccgacaggccgcagagtgggctaacttcccggctgtgagccgatggccccacaggagacatcctgggaacgc

SEQ ID NO: 16718 - DNA, 119 bp, homo sapiens
gcagagtgggctgaacttcccggctgtgagccgatggccccacaggagacatcctgggaacgcaggatggcgcagtcccaagtcaaggctgtgccgtgacttgtttttctccggagctg

SEQ ID NO: 16719 - DNA, 119 bp, homo sapiens
ctcacgcctccagaatgaaatccccagctaggctgaaacaggctcctgctggctcctgtcctctggcattgcttcaggcgccagacaggggctctttctctctgtgtcttggatcccag

SEQ ID NO: 16720 - DNA, 119 bp, homo sapiens
ctgtcctctggcatgtgcttcaggcgccagacaggggctctttctctctgtgtcttggatcccagggtgcccagcctgctcagcatctgttgggtgtagccgcctgggaaatggacttc

SEQ ID NO: 16721 - DNA, 119 bp, homo sapiens
tggatcccagggtggcccagcctgctcagcatctgttgggtgtagccgcctgggaaatggacttcagcctacaaagagcaagacagtgggtctcgcccagcgtcctggaccatggctag

SEQ ID NO: 16722 - DNA, 119 bp, homo sapiens
ttcacactgaaccgccctagagaacattccatcacagggtgtacacgctgttgttccttcctggggctcccaaaggacttgaagactgtgtcacgtgggttcgctgccccctgcgaggt

SEQ ID NO: 16723 - DNA, 119 bp, homo sapiens
ctgttgttccttcctggggctctccaaaggacttgaagactgtgtcacgtgggttcgctgccccctgcgggtccgtgtctgctgctccttgggaaaccatggcgggccgtgttctcctc

SEQ ID NO: 16724 - DNA, 119 bp, homo sapiens
cgtgggttcgctgccccctgcgaggtccgtgtctgctgctccttgggaaaccatggcgggccgtgttctctctcagcagatggcgctcgggtcccttggaggagagtggggcgcctgcg

SEQ ID NO: 16725 - DNA, 119 bp, homo sapiens
ttcagataatgtaaatgcataccaatcttcaacttaattgtgtgaacttctgcaaatgctgaagtgattgatgggattttcaagataggagttattggaggaagtgagtttagagcaga

SEQ ID NO: 16726 - DNA, 119 bp, homo sapiens
cataccaatcttcaacttaattgtgtgaacttctgcaaatgctgaagtgattggatgggattttcaagaaggagttattggaggaagtgagtttagagcagagatttgaaataggtaaa

SEQ ID NO: 16727 - DNA, 119 bp, homo sapiens
ttcagattgatttgggaatcaatgaaggatttcaagtggagttacgatgtgtctacctgagaggtcattagctatacacaaggaaaatggattagaaagtgggagaacagagtttggga

SEQ ID NO: 16728 - DNA, 119 bp, homo sapiens
caagtggagttacgatgtgtctacctgagaggtcattaagctatacacaaggaaaatggattagaaagtggagaacagagtttgggaaactacttatgattggcacaatcccaggtaaa

SEQ ID NO: 16729 - DNA, 119 bp, homo sapiens
ttcagaagagttgtttaatggtatcattttgaagagtataaaaaagcaaaccaagtttctgctgtgaagtgtcactgtaatggaagatgattacatcagaagaagttcaaatggaaaaa

SEQ ID NO: 16730 - DNA, 119 bp, homo sapiens
aaccaagtttctgctgtgaagttgtcactgtaatggaagatgattacatcagaagaagttcaaatggaaaaaaatgtttgtagttgccttgtggtttcctgataacaagcaaagcaagc

SEQ ID NO: 16731 - DNA, 119 bp, homo sapiens
tcagaagaagttcaaatggaaaaaaaatgtttgtagttgccttgtggtttcctgataacaagcaaagcagcaccatatataacaccacacagtggcaggcatctttacttctgatagtt

SEQ ID NO: 16732 - DNA, 119 bp, homo sapiens
ttcctgataacaagcaaagcaagcaccatatataacaccacacagtggcaggcatctttacttctgatattgcatcctggaactttataataaattcgactcttgggttttgcacatcc

SEQ ID NO: 16733 - DNA, 119 bp, homo sapiens
caggcatctttacttctgatagttgcatcctggaactttataataaattcgactcttgggttttgcacaccaagtggctgagtttttcttgtttattggagttgaacttaaccagttct

SEQ ID NO: 16734 - DNA, 119 bp, homo sapiens
tcgactcttgggttttgcacatccaagtggctgagtttttcttgtttattggagttgaacttaaccagtctcagttctcagaagtgtgctgacataattgaaaggctttcaaagagctg

SEQ ID NO: 16735 - DNA, 119 bp, homo sapiens
aacagggacctgggtttctgctgttctgtttattttgaaggtgtgaaaaggacattgatgagtgtgccttgatccgtgtgtcaatggaggtctgtgccaggacttactcaacaaattcc

SEQ ID NO: 16736 - DNA, 119 bp, homo sapiens
tgagtgtgcctctgatccgtgtgtcaatggaggtctgtgccaggacttactcaacaaattccagtgccttgtgatgttgcctttgctggcgagcgctgcgaggtggacgtaagcagcct

SEQ ID NO: 16737 - DNA, 119 bp, homo sapiens
ttccagtgcctctgtgatgttgcctttgctggcgagcgctgcgaggtggacgtaagcagcctctcctttatgtctctctcttattctggcagaatctttttcagcttctttcttacctc

SEQ ID NO: 16738 - DNA, 119 bp, homo sapiens
gcctctccttttatgtctctctcttattctggcagaatctttttcagcttctttcttacctcattttgctatgaatgacgagccagttgttgagtggggtgaacaggaagattattaac

SEQ ID NO: 16739 - DNA, 119 bp, homo sapiens
cctcattttgcgtatgaatgacgagccagttgttgagtggggtgaacaggaagattattaacatacattgaacattcccaaatgaaaaaaaaagccattgaatttcaagaaatgccttg

SEQ ID NO: 16740 - DNA, 119 bp, homo sapiens
taacatacatttgaacattcccaaatgaaaaaaaaagccattgaatttcaagaaatgccttgattcatttagatctctggggaagaaaaaggaaataaaaaccatctcaataattaagg

SEQ ID NO: 16741 - DNA, 119 bp, homo sapiens
cccacctaagcctctttgcctggagcagcattatctgtagagggagtggctgatctgacacaaaagcctaggcgacccaggcccaggcagtgagggagcacttgtgtccagatggcatt

SEQ ID NO: 16742 - DNA, 119 bp, homo sapiens
tgacacaaaagcctgaggcgacccaggcccaggcagtgagggagcacttgtgtccagatggcattctgtcgcttcctcctccagccggtgctcagtgtggcacaaactgggcaagacca

SEQ ID NO: 16743 - DNA, 119 bp, homo sapiens
agatggcattctgtccgcttcctcctccagccggtgctcagtgtggcacaaactgggcaagaccattctacccaaccctctgctgagccctaggtgtacctgctgttggcaaatgtttc

SEQ ID NO: 16744 - DNA, 119 bp, homo sapiens
ggcaagaccattctcacccaaccctctgctgagccctaggtgtacctgctgttggcaaatgtttccagcgcctggtgggtggctcctggatggagatcccctctttctatcagctccct

SEQ ID NO: 16745 - DNA, 119 bp, homo sapiens
caaatgtttccagctgcctggtgggtggctcctggatggagatcccctctttctatcagctccctcctaagggaaggggtgattctgggtgctgaggacagggacctgtgaagatacat

SEQ ID NO: 16746 - DNA, 119 bp, homo sapiens
tcagctccctcctacagggaaggggtgattctgggtgctgaggacagggacctgtgaagatacatctcccctttgccccaccacatcccttgcctgtcttcctctctgcttatctaaat

SEQ ID NO: 16747 - DNA, 119 bp, homo sapiens
gaagatacatctccgcctttgccccaccacatcccttgcctgtcttcctctctgcttatctaaattattccttccctcaaggcaagctcaagagcagacagttctgactttcagaagga

SEQ ID NO: 16748 - DNA, 119 bp, homo sapiens
ttatctaaattatttccttccctcaaggcaagctcaagagcagacagttctgactttcagaaggaggggtgtccagggagaagaggaacatggaacagaaagcattgacgttgaggtat

SEQ ID NO: 16749 - DNA, 119 bp, homo sapiens
cgcacctcaggtaggtgcaccttggctgccagctcctcacggctgtacacatccgggtagtgagaggcccgaacgcccgctccagctggtgcagctggtaggtggtgaaggtggtgcgg

SEQ ID NO: 16750 - DNA, 119 bp, homo sapiens
tccgggtagtgagaggcctcgaacgcccgctccagctggtgcagctggtaggtggtgaaggtggtgcggtcctccggtgcttcttcttgggggcctcctcgcccggccccagaccccca

SEQ ID NO: 16751 - DNA, 119 bp, homo sapiens
gtggtgaaggtggtgcggttcctccggtgcttcttcttgggggcctcctcgcccggccccagacccccacctcggttgccggcccctcgcccgggctcaggaacatggctcccacctgg

SEQ ID NO: 16752 - DNA, 119 bp, homo sapiens
ccctggtggaacagggccgcgtgcgggccgccactgtgggctccctggccggccagccgctacaggagcggcccaggcctggggcgagcggctgcgcgcgcggatggaggagatgggca

SEQ ID NO: 16753 - DNA, 119 bp, homo sapiens
ctacaggagcgggcccaggcctggggcgagcggctgcgcgcgcggatggaggagatgggcagccggaccgcgaccgcctggacgaggtgaaggagcaggtggcggaggtgcgcgccaag

SEQ ID NO: 16754 - DNA, 119 bp, homo sapiens
cagccggacccgcgaccgcctggacgaggtgaaggagcaggtggcggaggtgcgcgccaagctggaggacaggcccagcagatacgcctgcaggccgaggccttccaggcccgcctcaa

SEQ ID NO: 16755 - DNA, 119 bp, homo sapiens
tgtcactggggaggctgggggagctagacaaaattcacacgggaggggcagggatgagacaatattgtgcctgggtctgtgcaaacgttgggaccagaatccactataagtttcattct

SEQ ID NO: 16756 - DNA, 119 bp, homo sapiens
aatattgtgccctgggtctgtgcaaacgttgggaccagaatccactataagtttcattcttcggagacaggaagctctgcactggaggccgggactcaggcgtggaagagaatcttctc

SEQ ID NO: 16757 - DNA, 119 bp, homo sapiens
tcggagacacggaagctctgcactggaggccgggactcaggcgtggaagagaatcttctccttattcacggggaggctgtgtcttgtgcaaacaagtcatagaaacttgatgggagttg

SEQ ID NO: 16758 - DNA, 119 bp, homo sapiens
cttattcaccggggaggctgtgtcttgtgcaaacaagtcatagaaacttgatgggagttggggagggacgaaggatgcatgcaaggttctgggaaggagtgagaagtagtgaaggccaa

SEQ ID NO: 16759 - DNA, 119 bp, homo sapiens
aagaagaccagtttagtggattaatgtctaatttacatatagtaataaagacaaactttgaatctttactattaaatgcccactttataccatggtgtaattgtttgaattatgggtga

SEQ ID NO: 16760 - DNA, 119 bp, homo sapiens
actttgaatctttacatattaaatgcccactttataccatggtgtaattgtttgaattatgggtgagtgacagtatagagatgtagatgcactagatatatctataaataaaatagtgc

SEQ ID NO: 16761 - DNA, 119 bp, homo sapiens
aattatgggtgagtgtacagtatagagatgtagatgcactagatatatctataaataaaatagtgctttaggtaacaatattctttggctgacttaaatgcctgtggttgactcttaga

SEQ ID NO: 16762 - DNA, 119 bp, homo sapiens
ataaaatagtgctttaaggtaacaatattctttggctgacttaaatgcctgtggttgactcttagaaaaactaaaatgaaaatggccccactattattgtcaatcttaacacagagctt

SEQ ID NO: 16763 - DNA, 119 bp, homo sapiens
ttgactcttagaaaagactaaaatgaaaatggccccactattattgtcaatcttaacacagagcttgtgggaaggtccctatactgctgactgtcagcatctccaggtccacgatatgt

SEQ ID NO: 16764 - DNA, 119 bp, homo sapiens
aacacagagcttgtgcggaaggtccctatactgctgactgtcagcatctccaggtccacgatatgttctttggtcctgataatgacttcacgagcacaagcattgcacttacaggactt

SEQ ID NO: 16765 - DNA, 119 bp, homo sapiens
cctaccttggcacacgttgtgttcactttgctcgtagcctgctgcacactggatacggtgggaagggttgagggaatgcgctgagggtcagctgggttccgccggatgacaaagttatt

SEQ ID NO: 16766 - DNA, 119 bp, homo sapiens
gatacggtgggaagggttggagggaatgcgctgagggtcagctgggttccgccggatgacaaagttattcggccagtctgcatttcagggcctgcgactgcagcagcactggccacaaa

SEQ ID NO: 16767 - DNA, 119 bp, homo sapiens
ccggatgacaaagttatttcggccagtctgcatttcagggcctgcgactgcagcagcactggccacaaaccacccccgggcaacactccactggttgccatgctgctggcagctacaac

SEQ ID NO: 16768 - DNA, 119 bp, homo sapiens
agcagcactggccacaaaaccacccccgggcaacactccactggttgccatgctgctggcagctacaacccggtggttgcccctgaggttccttctgctggttgtgtttcctgctgagg

SEQ ID NO: 16769 - DNA, 119 bp, homo sapiens
gctgctggcagctacaaccccggtggttgcccctgaggttccttctgctggttgtgtttcctgctgaggtgttcattattgacaataatctgggctgttttcggaaggcagaggtatcc

SEQ ID NO: 16770 - DNA, 119 bp, homo sapiens
ttgtgtttcctgctgaggctgttcattattgacaataatctgggctgttttcggaaggcagaggtatccccatagtggttgacacacttcattccacctttacaagcgtctgggacaat

SEQ ID NO: 16771 - DNA, 119 bp, homo sapiens
cggaaggcagaggtatcctccatagtggttgacacacttcattccacctttacaagcgtctgggacaattcacattcatcaatatctgtggtcagtaataaaataagtcaggaatcttc

SEQ ID NO: 16772 - DNA, 119 bp, homo sapiens
cacagacaggacaggaagagtgacacaagagatggagacagaaggcaatgatcacatggaagtctttgagctggctcacctttgcattgctgtctcacaggatcccactcatatccgtc

SEQ ID NO: 16773 - DNA, 119 bp, homo sapiens
aggcaatgatcacatggaagtctttgaagctggctcacctttgcattgctgtctcacaggatcccactctatccgtcagtgcattgctgtgaagaaaacatcaaaggtggggccaggag

SEQ ID NO: 16774 - DNA, 119 bp, homo sapiens
gcattgctgtctcacaggatcccactcatatccgtcagtgcattgctgtgaagaaaacatcaaaggtgggccaggagacagttaattggtgtgtccattccctaagaaatcactctaaa

SEQ ID NO: 16775 - DNA, 119 bp, homo sapiens
ttgctgtgaagaaaacatcaaaggtggggccaggagacagttaattggtgtgtccattccctaagaaatactctaaaagcttcattcttatggcaacaatccttgtgctaaagtcctag

SEQ ID NO: 16776 - DNA, 119 bp, homo sapiens
cttacttgagaatgcatgtcatgtacacaaagaaggccatgtgtctttatggtgtttaacgttcttactgacttgagtcttattctgcacgtattggttttatctgcatgtggtaggag

SEQ ID NO: 16777 - DNA, 119 bp, homo sapiens
tgtttaacgttcttacttgacttgagtcttattctgcacgtattggttttatctgcatgtggtaggagtcaggttttccagttccttacacccattaatttgttgaatgttttggaaac

SEQ ID NO: 16778 - DNA, 119 bp, homo sapiens
ctgcatgtggtaggagtccaggttttccagttccttacacccattaatttgttgaatgttttggaaacagtaactttctttggttttagtttttgaacggatcccatttttagccctgc

SEQ ID NO: 16779 - DNA, 119 bp, homo sapiens
catactcaacttccaatctgctttctcatctcccctccccctcctgaaccttctcggtagccaacgaacaggcagcaaagacgtaaaaactgctgtagaattgcatttcacgttactcc

SEQ ID NO: 16780 - DNA, 119 bp, homo sapiens
tctgctttctcatctcccctccccctcctgaaccttctcggtagccaacgaacgaggcagcaaagacgtaaaactgctgtagaattgcatttcacgttactccatcctgctacgctgtt

SEQ ID NO: 16781 - DNA, 119 bp, homo sapiens
cttactctaactgatcaaatgaccaatcagctggattcaggcttttcaggctacagatgactttgatcacagccctgcacatatcagaagcgtccccacagatgttctaaacacaaatg

SEQ ID NO: 16782 - DNA, 119 bp, homo sapiens
ctacagatgactttgatcaacagccctgcacatatcagaagcgtccccacagatgttctaaacacaaatcggctgctgacaccctgacgctgcaaacaacagcaagggcatagagagga

SEQ ID NO: 16783 - DNA, 119 bp, homo sapiens
agatgttctaaacacaaatgcggctgctgacaccctgacgctgcaaacaacagcaagggcatagagagggaccttgatgattcagtgtgattcttcaacagatttctcttcttcacttt

SEQ ID NO: 16784 - DNA, 119 bp, homo sapiens
cagcaagggcatagagaggagaccttgatgattcagtgtgattcttcaacagatttctcttcttcacttcctcattggcttcatctttttccttgtaagaatcctggctgttggtatca

SEQ ID NO: 16785 - DNA, 119 bp, homo sapiens
agatttctcttcttcactttcctcattggcttcatctttttccttgtaagaatcctggctgttggtatcataaaataattttcttccccattctctctttcttctattttttcttcttc

SEQ ID NO: 16786 - DNA, 119 bp, homo sapiens
cacaccaactgtaacctcaacttcctactcacaacatagagaaaagcccagcattttccaccagcaggcttgccaggtactcatatacctgaagaggctcagaaagtttcagctgttac

SEQ ID NO: 16787 - DNA, 119 bp, homo sapiens
caccagcaggccttgccaggtactcatatacctgaagaggctcagaaagtttcagctgttactggaccagtaaccagaagacttggataccaagagtactttctaccttctactcacaa

SEQ ID NO: 16788 - DNA, 119 bp, homo sapiens
ttactggaccaggtaaccagaagacttggataccaagagtactttctaccttctactcacaaagagagaacctggtattttctatcaacagaccttgccaggtagtcacatacctgaag

SEQ ID NO: 16789 - DNA, 119 bp, homo sapiens
acaaagagagaaacctggtattttctatcaacagaccttgccaggtagtcacatacctgaagaggcacaaaagtttcacctgttcttggaccagctgaccagaagactgggacaccaac

SEQ ID NO: 16790 - DNA, 119 bp, homo sapiens
tggacctcatccaccacgaagaggttgatgttctgcacgttcttgcgctgcttccatcgccgggaaagttgtcccacttctcaggggtgctgatgataatgttccctttgcccagcagc

SEQ ID NO: 16791 - DNA, 119 bp, homo sapiens
cgctgcttccatcgccgggaaagtatgtcccacttctcaggggtgctgatgataatgttccctttgcccgcagcttcaggtctgtgctggtctcgcctgtcaggagtaccaccttcttg

SEQ ID NO: 16792 - DNA, 119 bp, homo sapiens
ctgatgataatgttccctttgcccagcagcttcaggtctgtgctggtctcgcctgtcaggagtaccacctcttgttgagcctgtcctggaacttctcgtaccagtccatgtatacctgg

SEQ ID NO: 16793 - DNA, 119 bp, homo sapiens
cagaggtctctcagtttagcccctccctgatatcagagaagatcctgctgcggctactcaagtacccagtgtcattcaggaactcaagtttgacgagcacaataagtactacgcccgcc

SEQ ID NO: 16794 - DNA, 119 bp, homo sapiens
caagtacccagatgtcattcaggaactcaagtttgacgagcacaataagtactacgcccgccattaccttacacccgaaataagccggccgactacttcatcctcatcctgcaggtgag

SEQ ID NO: 16795 - DNA, 119 bp, homo sapiens
atcacctactctattatgacgcaggcaccgttttaacaggtcttctgccatgtcatattttgctgattgatgtaaatatcagcaagtagcagccaactcttctcaaactcttcagcatc

SEQ ID NO: 16796 - DNA, 119 bp, homo sapiens
ttgctgattgaatgtaaatatcagcaagtagcagccaactcttctcaaactcttcagcatcaatagcatccaattcattttcgcaatacgcttcagctggtttctggctcgtggagtct

SEQ ID NO: 16797 - DNA, 119 bp, homo sapiens
tcaatagcattccaattcattttcgcaatacgcttcagctggtttctggctcgtggagtctgtttcaagtcatataagccgttgccattcccaagagcgctgggatatgctccttctat

SEQ ID NO: 16798 - DNA, 119 bp, homo sapiens
caaagcatgctgcagtaaaatacaaactaagcaaagactcaccgatgaaactcggatgttgaagccggtcaagggcatggtgaggacgcacaggatctcgtgagtaggtttcataacta

SEQ ID NO: 16799 - DNA, 119 bp, homo sapiens
tgaagccggtacaagggcatggtgaggacgcacaggatctcgtgagtaggtttcataactaggatgttctgacttgatatttaggattgtcttacctttctccaaccctctaacacctg

SEQ ID NO: 16800 - DNA, 119 bp, homo sapiens
taggatgttcttgacttgatatttaggattgtcttacctttctccaaccctctaacacctgaccaacacccaaggtggtagaagttgccagggacagataacatggcagccagcgggaa

SEQ ID NO: 16801 - DNA, 119 bp, homo sapiens
tgaccaacaccccaaggtggtagaagttgccagggacagataacatggcagccagcgggaagaccagcagtccgaaccgaaccatgttatcttcaagaagatctcccgggacaaatcgg

SEQ ID NO: 16802 - DNA, 119 bp, homo sapiens
tttttaaactaatcatcttgagaaagagatgaagtcacaggtaatgaagttgaacattaagggatgggagaccctggatgttgtgagttcgggtgcaagggccatgagagctgggctgt

SEQ ID NO: 16803 - DNA, 119 bp, homo sapiens
ttaaactaatcatcttgagaaagagatgaagtcacaggtaatgaagttgaacattaagggatgggaagacctggatgttgtgagttcgggtgcaagggccatgagagctgggctgtgtc

SEQ ID NO: 16804 - DNA, 119 bp, homo sapiens
tataaaataaataaaatgcaaggagaaaagctgttccagtgggaaaggcagggaggcaggaattacacgagtgatcatgaactgcatgtatctaggccttatctctcaaattgtaaagt

SEQ ID NO: 16805 - DNA, 119 bp, homo sapiens
cagtgggaaaggcagggaggcaggaattacacgcagtgatcatgaactgcatgtatctaggccttatcttcaaattgtaaagtcacctaaaaggtagacattttctaggtacagctatg

SEQ ID NO: 16806 - DNA, 119 bp, homo sapiens
tgatcatgaactgcatgtatctaggccttatctctcaaattgtaaagtcacctaaaaggtagacatttttaggtacagctatgatatagaatttagactaacaaatgtctctctctccc

SEQ ID NO: 16807 - DNA, 119 bp, homo sapiens
tgcaggagcaggtttagctgacaagtgcgcagatctcctcttgggctcttgcttcgccaccccttcggcgaactgaccttcctcttgggcatcttggcggcaggaggggcacttgctgg

SEQ ID NO: 16808 - DNA, 119 bp, homo sapiens
tgcttcgccaccccttcggctgaactgaccttcctcttgggcatcttggcggcaggaggggcacttgctggcacctgtgggccacggagctgagagccttcgcgaagctgggctgcctg

SEQ ID NO: 16809 - DNA, 119 bp, homo sapiens
cggcaggaggggcacttgctgggcacctgtgggccacggagctgagagccttcgcgaagctgggctgccggctactggcactcctcccgctgcccgagctgctgagacccctatttcag

SEQ ID NO: 16810 - DNA, 119 bp, homo sapiens
cttcgcgaagctgggctgcctggctactggcactcctcccgctgcccgagctgctgagacccctatttcgttttgaaagtctttctgttaattagtaccttgaaaccatgagcatgtaa

SEQ ID NO: 16811 - DNA, 119 bp, homo sapiens
cacgcctctcaactacatcctgctcaacctagccgtggctgacctcttcatggtcctaggtggcttcacagcaccctctacacctctctgcatggatacttcgtcttcgggcccacagg

SEQ ID NO: 16812 - DNA, 119 bp, homo sapiens
ctgacctcttcatggtcctaggtggcttcaccagcaccctctacacctctctgcatggatacttcgtctcgggcccacaggatgcaatttggagggcttctttgccaccctgggcggta

SEQ ID NO: 16813 - DNA, 119 bp, homo sapiens
tccagggagggaatgtgaagccccagaaagggccagcgctcggcagccaccttggctgttcccaagtcctcacaggcagggtctccctacctgcctgtcctcaggtacatccccgaggg

SEQ ID NO: 16814 - DNA, 119 bp, homo sapiens
tggctgttcccaagtccctcacaggcagggtctccctacctgcctgtcctcaggtacatccccgagggctgcagtgctcgtgtggaatcgactactacacgctcaagccggaggtcaac

SEQ ID NO: 16815 - DNA, 119 bp, homo sapiens
ggtacatccccgagggcctgcagtgctcgtgtggaatcgactactacacgctcaagccggaggtcaacacgagtcttttgtcatctacatgttcgtggtccacttcaccatccccatga

SEQ ID NO: 16816 - DNA, 119 bp, homo sapiens
caagccggaggtcaacaacgagtcttttgtcatctacatgttcgtggtccacttcaccatccccatgatatcatctttttctgctatgggcagctcgtcttcaccgtcaaggaggtacg

SEQ ID NO: 16817 - DNA, 119 bp, homo sapiens
tggaggagccatggtctggacccgggtcccgtgtcctgcaggccgctgcccagcagcaggagtcagccacacacagaaggcagagaaggaggtcacccgcatggtcatcatcatggtca

SEQ ID NO: 16818 - DNA, 119 bp, homo sapiens
agcaggagtcagccaccacacagaaggcagagaaggaggtcacccgcatggtcatcatcatggtcatcgtttcctgatctgctgggtgccctacgccagcgtggcattctacatcttca

SEQ ID NO: 16819 - DNA, 119 bp, homo sapiens
tcatcatggtcatcgctttcctgatctgctgggtgccctacgccagcgtggcattctacatcttcacccccagggctccaacttcggtcccatcttcatgaccatcccagcgttctttg

SEQ ID NO: 16820 - DNA, 119 bp, homo sapiens
tctacatcttcacccaccagggctccaacttcggtcccatcttcatgaccatcccagcgttctttgccagagcgccgccatctacaaccctgtcatctatatcatgatgaacaagcagg

SEQ ID NO: 16821 - DNA, 119 bp, homo sapiens
gccagggagaggacgacaaagggcccccccgggagcaggagcctctgcagagcacccgggagaccccaccagaagcactgcgacaccatggtggcagccccaggacctgcccgccgagc

SEQ ID NO: 16822 - DNA, 119 bp, homo sapiens
cacccgggagaccccacacagaagcactgcgacaccatggtggcagccccaggacctgcccgccgagcccggggcctggcacacaggcacatgggagggggcgcgccgggagcgctgag

SEQ ID NO: 16823 - DNA, 119 bp, homo sapiens
gacctgcccgccgagccacggggcctggcacacaggcacatgggagggggcgcgccgggagcgctgagcccagtgacactgccatcccctccagtccctgacacagttcctgggctggt

SEQ ID NO: 16824 - DNA, 119 bp, homo sapiens
cgccgggagcgctgagcgccagtgacactgccatcccctccagtccctgacacagttcctgggctggtcgtgatgaacaccgacacctacgacaagatgaacaagctggagaaccgcaa

SEQ ID NO: 16825 - DNA, 119 bp, homo sapiens
cagttcctgggctggtcagtgatgaacaccgacacctacgacaagatgaacaagctggagaaccgcaagacatcgcacaggacatggtcctttaccacgtgaagtgcgacagggacgag

SEQ ID NO: 16826 - DNA, 119 bp, homo sapiens
agctggagaaccgcaaggacatcgcacaggacatggtcctttaccacgtgaagtgcgacagggacgagaccagctcatcctggtgcggcggggcaggacgtccaggggtcacccagggg

SEQ ID NO: 16827 - DNA, 119 bp, homo sapiens
gtgcgacagggacgagatccagctcatcctggtgcggcggggcaggacgtccaggggtcacccaggggtacggctgtgtggcaggggcaggtcgtccaggggtcacccaggggtctcgg

SEQ ID NO: 16828 - DNA, 119 bp, homo sapiens
ggcaggtcgtccaggggtcacccaggggtcacggctgtgcggtgggggcaggtcgtccaggggtcacccggggtcacagctgtgcggcgggggcagggcatccaggggtcacccagggg

SEQ ID NO: 16829 - DNA, 119 bp, homo sapiens
caggggtcacccaggggtcacagctgtgcggcgggggcagggcatccaggggtcacccaggggtcatggtgtgcagcagaggcaggtcatccagggctcacccaggggtcatggctgtg

SEQ ID NO: 16830 - DNA, 119 bp, homo sapiens
caggggtcatggctgtgcagcagaggcaggtcatccagggctcacccaggggtcatggctgtgcggcggggcaggtcgtccaggggtcacccaggggtcacggctgtgcggcaggggca

SEQ ID NO: 16831 - DNA, 119 bp, homo sapiens
gctgtgcggcgggggcaggtcgtccaggggtcacccaggggtcacggctgtgcggcaggggcaggtcgtcaggggtcacccaggggtcatggctgtgtggcacaggcaggtcgtccagg

SEQ ID NO: 16832 - DNA, 119 bp, homo sapiens
ggggcaggtcgtccaggggtcacccaggggtcatggctgtgtggcacaggcaggtcgtccaggggtccatgaggggtcacaggggtcatggctgtgcagcagaggcaggtcatccaggg

SEQ ID NO: 16833 - DNA, 119 bp, homo sapiens
tccaggggtccattgaggggtcacaggggtcatggctgtgcagcagaggcaggtcatccagggctcaccaggggtcatggctgtgcggtgggggcaggtcatccaggggtcacggctgt

SEQ ID NO: 16834 - DNA, 119 bp, homo sapiens
ccagggctcacccaggggtcatggctgtgcggtgggggcaggtcatccaggggtcacggctgtgtggtggggcaggtcgtccaggggtccatccaggggtcacccagaggtcatggctc

SEQ ID NO: 16835 - DNA, 119 bp, homo sapiens
cctgtccctggagacgacccggaaggagatcgtcatgtgagcgcgggcggagggggcacgaggggtcctccctcgcagggaccgggcccactcaccagctggttaaccctgcagccctc

SEQ ID NO: 16836 - DNA, 119 bp, homo sapiens
aggggtccttccctcgcagggaccgggcccactcaccagctggttaaccctgcagccctccccagacgcctggagcaggaagagcccgtcgcggcagcttgtcgagggctgtgaaacaa

SEQ ID NO: 16837 - DNA, 119 bp, homo sapiens
cccagacgctctggagcaggaagagcccgtcgcggcagcttgtcgagggctgtgaaacaaatgcgccgtcttatttccccccagctctcagggagatggtgcagagctggggagcacac

SEQ ID NO: 16838 - DNA, 119 bp, homo sapiens
aaaagggagagacagagggaaaataccaagctcaccactccagtagcacaggaagagagaagaccgcaaacctacccatgctttctgccgttgaatgtgctatgaactccagttcccaa

SEQ ID NO: 16839 - DNA, 119 bp, homo sapiens
gcacaggaagagagaagaccgcaagacctacccatgctttctgccgttgaatgtgctatgaactccagtcccaaaggtggcccatgtaacaccctagaacctaaccaatcctaggtact

SEQ ID NO: 16840 - DNA, 119 bp, homo sapiens
gttgaatgtgctatgaactccagttcccaaaggtggcccatgtaacaccctagaacctaaccaatcctagtactcttcctcctccctggagtggatcaagggctggtgtgagcttgtaa

SEQ ID NO: 16841 - DNA, 119 bp, homo sapiens
ggctctaaggaatacttcaagtatgtccagcatctgtttggaggtgggggataggagtttgcaaagcaatacacattcccagtgagtgcttctctatttgtgtaaatggtaacaccttc

SEQ ID NO: 16842 - DNA, 119 bp, homo sapiens
tttgtttgatttcaactctctgtctaccttactctctttttggcaataatgaaaaggtaaattgatcaaagagaggaaataggcacaaaattggggcagagagagttcatcattccttt

SEQ ID NO: 16843 - DNA, 119 bp, homo sapiens
aatgatgagtctgctgggggcccttgttgaagactttccagtaaaataaaaaagcataaacatgttaagaaacctcttccccttttcctcatgtttagaagtttttttcttatgtgaga

SEQ ID NO: 16844 - DNA, 119 bp, homo sapiens
aaggtgcagcccccagcaagcagcagcccctccacgcctatgtccctagcccccacttggcaagagagtctctggcttccccaccccagaaaccgttctttccactgtaagccctgagc

SEQ ID NO: 16845 - DNA, 119 bp, homo sapiens
cactccccaaaccgccaggtcattttgacagctttagcaatgtcctccgctctggcctctgacatgcgcctctgccccaggcagccctggcggtctggatcaccatcctccgcttcatg

SEQ ID NO: 16846 - DNA, 119 bp, homo sapiens
cacttcctcctccctccagccctgaggaaatcctagaaactgcttagggtgatcccaagctgtcctggcgcacagggagctcaagtgggctctgtgtggcaggaggcctcgggaagtcc

SEQ ID NO: 16847 - DNA, 119 bp, homo sapiens
agactatttcatgtcagtctggtggttggcggcacaaatcaggatcagactccctctccccgcggtgtgatggagaaagaggaggatgacatgcggaaaagtcacgagacttgaccaga

SEQ ID NO: 16848 - DNA, 119 bp, homo sapiens
gcacaaatcaggatcagactccctctccccgcggtgtggatggagaaagaggaggatgacatgcggaaagtcacgagacttgaccagaacacggaccacaaggactccacttccctctc

SEQ ID NO: 16849 - DNA, 119 bp, homo sapiens
ctgccacaataaagataataaaaaataaaactaagacactgccaatagggataggtatgagatattcacattacaactggggccaggtgcggtggctcacatctgtaatcccagcactt

SEQ ID NO: 16850 - DNA, 119 bp, homo sapiens
agatgaacttgcacttcaaacccccacaatacacagccttttcttaaagatgatctcttatcttgggaaggagaggtgttcaatttcaatttcatgatttgtttcccccttaaaagcca

SEQ ID NO: 16851 - DNA, 119 bp, homo sapiens
aagctctgctttctgcttgacctttggaagtcctatgagggaccatttacggtttcctcagtaatttccccaggatgaatttccttctcatcactctgcctcaggtagtgctctgaagg

SEQ ID NO: 16852 - DNA, 119 bp, homo sapiens
gtaatttccaccaggatgaatttccttctcatcactctgcctcaggtagtgctctgaaggtcgtccttttgaacaaacgcagcaaagcaagccacaccatgggtgagatcaaccaagtt

SEQ ID NO: 16853 - DNA, 119 bp, homo sapiens
tcgtcctttctgaacaaacgcagcaaagcaagccacaccatgggtgagatcaaccaagttgccgtggagaatacctggaggagaaccctcagtttgccaaggagtactttgacaggaag

SEQ ID NO: 16854 - DNA, 119 bp, homo sapiens
gccgtggagaaatacctggaggagaaccctcagtttgccaaggagtactttgacaggaagttgcgggtgaggtgctgggagaaatcttcaagaacagccaggtgccagtccagtccagc

SEQ ID NO: 16855 - DNA, 119 bp, homo sapiens
ttgcgggtggaggtgctgggagaaatcttcaagaacagccaggtgccagtccagtccagcatgtccttcctgagctgacccaggtggaggagtcagccctgtgcttggagctgctgtgg

SEQ ID NO: 16856 - DNA, 119 bp, homo sapiens
atgtccttctctgagctgacccaggtggaggagtcagccctgtgcttggagctgctgtggaccgtgcagaggaggggggcaccccagagcagggggttcacagggccctgcagaggctg

SEQ ID NO: 16857 - DNA, 119 bp, homo sapiens
accgtgcaggaggaggggggcaccccagagcagggggttcacagggccctgcagaggctggcccacctgtccaggctgaccgctgcagcatgttcctgtgccggtcccggaacggcata

SEQ ID NO: 16858 - DNA, 119 bp, homo sapiens
gcccacctgctccaggctgaccgctgcagcatgttcctgtgccggtcccggaacggcatacctgaggtgcctctaggttgctggatgtcacccccacctccaagtttgaggacaacctg

SEQ ID NO: 16859 - DNA, 119 bp, homo sapiens
cctgaggtggcctctaggttgctggatgtcacccccacctccaagtttgaggacaacctggtgggccctacaaagaagttgtgtttccattggacattgggatagtgggttgggctgct

SEQ ID NO: 16860 - DNA, 119 bp, homo sapiens
gtgggccctgacaaagaagttgtgtttccattggacattgggatagtgggttgggctgctcacacgaagaaactcataatgtcccagatgtgaaaaaggtaggtggccttatgacagtg

SEQ ID NO: 16861 - DNA, 119 bp, homo sapiens
atgattttgtgccactttgacaaatatgtgactgtctctttcagaacagccatttttctgacttcatggcaagcaaactgggtatgtcactaagaacctgctggcaaccccgatcgtgg

SEQ ID NO: 16862 - DNA, 119 bp, homo sapiens
acttcatggacaagcaaactgggtatgtcactaagaacctgctggcaaccccgatcgtggtgggcaaggggttcttgctgtgatcatggcagttaacaaagtaaatgcatctgaatttt

SEQ ID NO: 16863 - DNA, 119 bp, homo sapiens
tgggcaaggaggttcttgctgtgatcatggcagttaacaaagtaaatgcatctgaattttccaaacaggtgaagaggtaatgctaaccctgggcatctggttggaggctcaggaaattt

SEQ ID NO: 16864 - DNA, 119 bp, homo sapiens
tccatagcatactttattctaactgttttctttttgatacctactttcagatccttatgtggtcagccataaagtatttgaagaactcacagatgttgagcgacagtttcacaaagcgc

SEQ ID NO: 16865 - DNA, 119 bp, homo sapiens
ggtcagccaataaagtatttgaagaactcacagatgttgagcgacagtttcacaaagcgctctacacggtagatcatatctgaactgtgaacgatactccattggactgctggacatga

SEQ ID NO: 16866 - DNA, 119 bp, homo sapiens
tctacacggttagatcatatctgaactgtgaacgatactccattggactgctggacatgaccaaggagaggttcttattattctacacattttgtctcatctcacatcgcctatataac

SEQ ID NO: 16867 - DNA, 119 bp, homo sapiens
actaaaaaggcaaaaaaataacttgaggtcccttctcgtttgtagaaaggacctgtagacgaaactggtgggtcattaagaatgttttgtccctgcctattgtcaacaagaaagaagat

SEQ ID NO: 16868 - DNA, 119 bp, homo sapiens
gaaactggttgggtcattaagaatgttttgtccctgcctattgtcaacaagaaagaagatattgtgggatggctacattttacaacaggaaggatggaaaacctttcgatgagcatgat

SEQ ID NO: 16869 - DNA, 119 bp, homo sapiens
attgtgggagtggctacattttacaacaggaaggatggaaaacctttcgatgagcatgatgaatacattccgaggcaagtgcaataataagataatggaagtcaatgcaattcacaaaa

SEQ ID NO: 16870 - DNA, 119 bp, homo sapiens
atttttctttcactgaagagaattagaatcaccttttatccatttcagactctcacacaatttcttggaggtctcttttaaatactgacacctacgataagatgaataagctagaaaac

SEQ ID NO: 16871 - DNA, 119 bp, homo sapiens
tttcttggatggtctcttttaaatactgacacctacgataagatgaataagctagaaaacagaaaggacttgctcaggaaatgctcatgaaccaaaccaaagccactcctgaagaaatt

SEQ ID NO: 16872 - DNA, 119 bp, homo sapiens
agaaaggacattgctcaggaaatgctcatgaaccaaaccaaagccactcctgaagaaattaagtccatttggtaagtgggaaattcagtcctgtggacataagatgttacctaaccaca

SEQ ID NO: 16873 - DNA, 119 bp, homo sapiens
gaaaacagatgaatgtaatctgaaacaacccatccttatttcaacagaaagaggacttgccagacccacctcagcagaactgtacgaattccgcttcagtgacttcccccttacagagc

SEQ ID NO: 16874 - DNA, 119 bp, homo sapiens
cagacccacgctcagcagaactgtacgaattccgcttcagtgacttcccccttacagagcacggattgataaatgtggaatacgactgttttttgaaataaatgtggtggagaaattca

SEQ ID NO: 16875 - DNA, 119 bp, homo sapiens
acggattgattaaatgtggaatacgactgttttttgaaataaatgtggtggagaaattcaaagtacctgagaggtcagagggtatttaatttaaaatactgtgtgattctgtggctctg

SEQ ID NO: 16876 - DNA, 119 bp, homo sapiens
ttaactgtatgatttatgtagtttctgacctaaaattccttttaggagttctcacggtttcacaaagaatcacacctatgctgagtggtcttcagaataacagagtagaatggaaatca

SEQ ID NO: 16877 - DNA, 119 bp, homo sapiens
cacaaagaaatcacacctatgctgagtggtcttcagaataacagagtagaatggaaatcactagctgatagtatgatgcaaagatgaaggtcattgaagaggaggcaaaaaagcaagaa

SEQ ID NO: 16878 - DNA, 119 bp, homo sapiens
ctagctgatgagtatgatgcaaagatgaaggtcattgaagaggaggcaaaaaagcaagaaggaggagccaaaaaggttagatgggctctgtttttgctccctgtaatgtagccagaagc

SEQ ID NO: 16879 - DNA, 119 bp, homo sapiens
gattttactagctgctgaagattcaggaggtggtgatgacaaaaagtccaaaacatgtttaatgttgtatattatctaactggtctaaacttcaaatatcattttacctttgaagaaaa

SEQ ID NO: 16880 - DNA, 119 bp, homo sapiens
aatgttgtaatattatctaactggtctaaacttcaaatatcattttacctttgaagaaaaccagaaaacttcaaaagaacttcaacaaatcatcacgtaacaggatcttcagaaaaact

SEQ ID NO: 16881 - DNA, 119 bp, homo sapiens
ccagaaaacattcaaaagaacttcaacaaatcatcacgtaacaggatcttcagaaaaactaccctgtgatatgaagaaaatatatattgctagcccaaaaatcccaggggcaaaataaa

SEQ ID NO: 16882 - DNA, 119 bp, homo sapiens
accctgtgactatgaagaaaatatatattgctagcccaaaaatcccaggggcaaaataaagttcaacaaagtgcaaaatatgacaaaaataggtacatttttggtgccaatttatttta

SEQ ID NO: 16883 - DNA, 119 bp, homo sapiens
gcctgccttttccgggggcgggggcctggcccgcgcgctcccctcccgcaggcgccacctcggacatcccgggattgctacttctctgccaacttcgccaactcgccagcacttggaga

SEQ ID NO: 16884 - DNA, 119 bp, homo sapiens
cggacatccccgggattgctacttctctgccaacttcgccaactcgccagcacttggagaggcccggctccctcccggcgccctctgaccgcccccgccccgcgcgctctccgaccacc

SEQ ID NO: 16885 - DNA, 119 bp, homo sapiens
ggcccggctcccctcccggcgccctctgaccgcccccgccccgcgcgctctccgaccaccgcctctcggtgaccaggttccaggggagctgagcgagtcgcctcccccgcccagcttca

SEQ ID NO: 16886 - DNA, 119 bp, homo sapiens
gcctctcggatgaccaggttccaggggagctgagcgagtcgcctcccccgcccagcttcagccctggctcagctgcagcgcgagccatgcgcccccagtgcaccccggcccggcccacc

SEQ ID NO: 16887 - DNA, 119 bp, homo sapiens
cggggccattctgctgaccgcccagccccgagccccgacagtggcaagttgcggctactgcagttgcaactccggccaacccggaggagccccagcggggagcgcagtgctgcgccccc

SEQ ID NO: 16888 - DNA, 119 bp, homo sapiens
ccgcccccgcgcgccccgcagcagccgggcgttcactcatcctccctcccccaccgtccctcccttttccctcaagtcctgaagttgagtttgagaggcgacacggcggcggcggccgc

SEQ ID NO: 16889 - DNA, 119 bp, homo sapiens
tcccttttctcctcaagtcctgaagttgagtttgagaggcgacacggcggcggcggccgcgctgctcccctcctctgcctccccatggatatgcactgcaaagcagaccccttctccgc

SEQ ID NO: 16890 - DNA, 119 bp, homo sapiens
gctgctcccgctcctctgcctccccatggatatgcactgcaaagcagaccccttctccgcgatgcaccggagtaccggcgcccggctcctgtcccggctcggggctctccgtcccaacc

SEQ ID NO: 16891 - DNA, 119 bp, homo sapiens
tgtggggtgttgtgtttttttcttgtctctccccagcagggcacgggggtgtgaaccagctcggggggggtttgtgaacggccggcccctacccgacgtggtgaggcagcgcatcgtgg

SEQ ID NO: 16892 - DNA, 119 bp, homo sapiens
tcgggggggtgtttgtgaacggccggcccctacccgacgtggtgaggcagcgcatcgtggagctggcccccagggtgtgcggccctgtgacatctcccggcagctgcgggtcagccacg

SEQ ID NO: 16893 - DNA, 119 bp, homo sapiens
agctggcccaccagggtgtgcggccctgtgacatctcccggcagctgcgggtcagccacggctgtgtcacaaaatcctgggcaggtgagggcttcgcagctgtcccgggagacgccttg

SEQ ID NO: 16894 - DNA, 119 bp, homo sapiens
ccgccggctttcccggcgcaggtactacgagaccggcagcatcaagccgggtgtgatcggtggctccaacccaaagtggcgacgcccaaagtggtggacaagattgctgaatacaaacg

SEQ ID NO: 16895 - DNA, 119 bp, homo sapiens
tggctccaagcccaaagtggcgacgcccaaagtggtggacaagattgctgaatacaaacgacagaacccactatgttcgcctgggagattcgagaccggctcctggccgagggcatctg

SEQ ID NO: 16896 - DNA, 119 bp, homo sapiens
acagaacccgactatgttcgcctgggagattcgagaccggctcctggccgagggcatctgtgacaatgaacagtgcccagcgtctcttccatcaacaggtgagcaagccacccgggttt

SEQ ID NO: 16897 - DNA, 119 bp, homo sapiens
gctaacgccccgagtgtccatgtgttctccagatgtgtctgagggctcagtccccaatggagattcccaagtggtgtggacagtttgcggaagcacttgcgagctgacaccttcaccca

SEQ ID NO: 16898 - DNA, 119 bp, homo sapiens
agattcccagagtggtgtggacagtttgcggaagcacttgcgagctgacaccttcacccagcagcagctgaagctttggatcgggtctttgagcgtccttcctaccctgacgtcttcca

SEQ ID NO: 16899 - DNA, 119 bp, homo sapiens
gcagcagctggaagctttggatcgggtctttgagcgtccttcctaccctgacgtcttccaggcatcagacacatcaaatcagaacaggtgaggagggagctttctgcttgcagaagtag

SEQ ID NO: 16900 - DNA, 119 bp, homo sapiens
agccctttctctgtgcgtgcatcaatagagagctgtcacttttctctctcctcccaggggaacgagtacccctcccagccctgacccctgggcttgatgaagtcaagtcgagtctatct

SEQ ID NO: 16901 - DNA, 119 bp, homo sapiens
aacgagtactccctcccagccctgacccctgggcttgatgaagtcaagtcgagtctatctgcatccaccaccctgagctgggcagcaacgtgtcaggcacacagacatacccagttgtg

SEQ ID NO: 16902 - DNA, 119 bp, homo sapiens
gcatccaccaaccctgagctgggcagcaacgtgtcaggcacacagacatacccagttgtgactggtaaggggcttccaggagggtgggggcactgcgttcagtggagggtgcctcagcc

SEQ ID NO: 16903 - DNA, 119 bp, homo sapiens
tccaggttccccttattattatagtgccgccccccggggctccgcccctgccgctgctgccgctgcctagaccgccactagttaccgcggggaccacatcaagcttcaggccgacagct

SEQ ID NO: 16904 - DNA, 119 bp, homo sapiens
cgctgcctatgaccgccactagttaccgcggggaccacatcaagcttcaggccgacagcttcggcctcccatcgtccccgtctgaccccaccccggagggagggaggaccgacgcgacg

SEQ ID NO: 16905 - DNA, 119 bp, homo sapiens
tcggcctccacatcgtccccgtctgaccccaccccggagggagggaggaccgacgcgacgcgatgcctccggccaccgccccagcctcaccccatcccacgacccccgcaacccttcac

SEQ ID NO: 16906 - DNA, 119 bp, homo sapiens
cgatgcctcccggccaccgccccagcctcaccccatcccacgacccccgcaacccttcacatcaccccctcgaaggtcggacaggacgggtggagccgtgggcgggaccctcaggcccg

SEQ ID NO: 16907 - DNA, 119 bp, homo sapiens
cccagctcgtcccggcctccaccaagccagccccgaagcccgccagccaccctgccggactcgggcgcgcctgctggcgcgcgccggatgtttctgtgacacacaatcagcgcggaccg

SEQ ID NO: 16908 - DNA, 119 bp, homo sapiens
tcgggcgcgacctgctggcgcgcgccggatgtttctgtgacacacaatcagcgcggaccgcagcgcggccagccccgggcacccgcctcggacgctcgggcgccaggaggcttcgctgg

SEQ ID NO: 16909 - DNA, 119 bp, homo sapiens
cagcgcggcccagccccgggcacccgcctcggacgctcgggcgccaggaggcttcgctggaggggctggccaaggagattaagaagaaaacgactttctgcaggaggaagagcccgctg

SEQ ID NO: 16910 - DNA, 119 bp, homo sapiens
aggggctgggccaaggagattaagaagaaaacgactttctgcaggaggaagagcccgctgccgaatcccgggaaaaattcttttcccccagtgccagccggactgccctcgccttccgg

SEQ ID NO: 16911 - DNA, 119 bp, homo sapiens
ccgaatccctgggaaaaattcttttcccccagtgccagccggactgccctcgccttccgggtgtgcccttcccagaagatggaatgggggtgtgggggtccggctctaggaacgggctt

SEQ ID NO: 16912 - DNA, 119 bp, homo sapiens
gtgtgccctgtcccagaagatggaatgggggtgtgggggtccggctctaggaacgggctttgggggcgtaggtctttccaaggttgggacccaaggatcggggggcccagcagcccgca

SEQ ID NO: 16913 - DNA, 119 bp, homo sapiens
tgggggcgtcaggtctttccaaggttgggacccaaggatcggggggcccagcagcccgcaccgatcgagcggactctcggctcttcactgctcctcctggcctgcctagttccccaggg

SEQ ID NO: 16914 - DNA, 119 bp, homo sapiens
ccgatcgagccggactctcggctcttcactgctcctcctggcctgcctagttccccagggcccggcacccctgctgcgagacccggctctcagccctgccttgcccctacctcagcgtc

SEQ ID NO: 16915 - DNA, 119 bp, homo sapiens
cccggcacctcctgctgcgagacccggctctcagccctgccttgcccctacctcagcgtctcttccaccgctggcctcccagtttcccctcctgccagtccttcgcctgtcccttgacg

SEQ ID NO: 16916 - DNA, 119 bp, homo sapiens
tcttccacctgctggcctcccagtttcccctcctgccagtccttcgcctgtcccttgacgccctgcatctcctccctgactcgcagccccatcggacgctctcccgggaccgccgcagg

SEQ ID NO: 16917 - DNA, 119 bp, homo sapiens
ccctgcatcctcctccctgactcgcagccccatcggacgctctcccgggaccgccgcaggaccagtttcatagactgcggactggggtcttcctccagcagttacttgatgccccctcc

SEQ ID NO: 16918 - DNA, 119 bp, homo sapiens
accagtttccatagactgcggactggggtcttcctccagcagttacttgatgccccctcccccgacacaactctcaatctgccggtggtaagaaccggttctgagctggcgtctgagct

SEQ ID NO: 16919 - DNA, 119 bp, homo sapiens
cccgacacagactctcaatctgccggtggtaagaaccggttctgagctggcgtctgagctgctgcggggggaagtggggggctgcccactccactcctcccatcccctcccagcctcct

SEQ ID NO: 16920 - DNA, 119 bp, homo sapiens
gctgcggggtggaagtggggggctgcccactccactcctcccatcccctcccagcctcctcctccggcagaactgaacagaaccacaaaaagtctacatttatttaatatgatggtctt

SEQ ID NO: 16921 - DNA, 119 bp, homo sapiens
cctccggcaggaactgaacagaaccacaaaaagtctacatttatttaatatgatggtctttgcaaaaagaacaaaacaacacaaaagcccaccaggctgctgctttgtggaaagacggt

SEQ ID NO: 16922 - DNA, 119 bp, homo sapiens
gcccggccccgtagagtccctgtcgcccgccggccctgcctgtagatacgccccgctgtctgtgctgtggagtcgccgctcgctgggggggaagggggggacacagctacacgcccatt

SEQ ID NO: 16923 - DNA, 119 bp, homo sapiens
tgtgctgtgagagtcgccgctcgctgggggggaagggggggacacagctacacgcccattaaagcacagacgtcctgggggaggggggcattttttatgttacaaaaaaaaattacgaa

SEQ ID NO: 16924 - DNA, 119 bp, homo sapiens
aaagcacagcacgtcctgggggaggggggcattttttatgttacaaaaaaaaattacgaaagaaaagaatctctatgcaaaatgacgaacatggtcctgtggactcctctggcctgttt

SEQ ID NO: 16925 - DNA, 119 bp, homo sapiens
agaaaagaaatctctatgcaaaatgacgaacatggtcctgtggactcctctggcctgttttgttggctcttctctgtaattccgtgttttcgctttttcctccctgcccctctctccct

SEQ ID NO: 16926 - DNA, 119 bp, homo sapiens
tgtctcctcacccgtggatcgtgacgactcgaaataacagaaacaaagtcaataaagtgaaaataaataaaatccttgaacaaatccgaaaaggcttggagtcctcgcccagatctctc

SEQ ID NO: 16927 - DNA, 119 bp, homo sapiens
aaataaataaaaatccttgaacaaatccgaaaaggcttggagtcctcgcccagatctctctcccctgcggccctttttatttgagaaggaaaaagagaaaagagaatcgtttaagggaa

SEQ ID NO: 16928 - DNA, 119 bp, homo sapiens
tcccctgcgagccctttttatttgagaaggaaaaagagaaaagagaatcgtttaagggaacccggcgccagccaggctccagtggcccgaacggggcggcgagggcggcgagggcgccg

SEQ ID NO: 16929 - DNA, 119 bp, homo sapiens
cccggcgcccagccaggctccagtggcccgaacggggcggcgagggcggcgagggcgccgaggtccggccatcccagtcctgtggggctggccgggcagagaccccggacccaggccca

SEQ ID NO: 16930 - DNA, 119 bp, homo sapiens
aggtccggcccatcccagtcctgtggggctggccgggcagagaccccggacccaggcccaggcctaaccgctaaatgtccccggacggttctggtctcctcggccactttcagtgcgtc

SEQ ID NO: 16931 - DNA, 119 bp, homo sapiens
aaataaagaataaaattttgtatgtcactccccatggctccaagtttgtctctccctgtctctgagatggcctcccctccattggtcgatccccaaaagccccttcaatgatcctccca

SEQ ID NO: 16932 - DNA, 119 bp, homo sapiens
tctgagatgggcctcccctccattggtcgatccccaaaagccccttcaatgatcctcccaactacactccgctgccacctccaactcctttgccgagacccccttggcggcagctgaac

SEQ ID NO: 16933 - DNA, 119 bp, homo sapiens
gcggggcggggcggagccgggcccagctggccgaacccggggaatgcgagcgccagcccccgccgcaggcagtcccagctggatctccggccagagcccgaggctgctgcgccgggcgg

SEQ ID NO: 16934 - DNA, 119 bp, homo sapiens
cgccgcaggccagtcccagctggatctccggccagagcccgaggctgctgcgccgggcggctgcagcctcgctccagcgcccgcgccgtgccctgcatcccgggagcccggctggaccc

SEQ ID NO: 16935 - DNA, 119 bp, homo sapiens
ctgcagcctccgctccagcgcccgcgccgtgccctgcatcccgggagcccggctggacccgcggcggctggccggtaggaggcgggcggagggaggcgtgtgcttctgtgtgtgtgtgt

SEQ ID NO: 16936 - DNA, 119 bp, homo sapiens
cttcttgccttcctgtccaggtgttccccctcccctccctggggcagcagccaccatgttctcgtgtgtaagccctatgaggaccagaactactcagccctgaggcgggactgccggcg

SEQ ID NO: 16937 - DNA, 119 bp, homo sapiens
ctcgtgtgtgaagccctatgaggaccagaactactcagccctgaggcgggactgccggcgcaggaaggtctcttcgaggaccccctcttccccgccactgacgactcactctactataa

SEQ ID NO: 16938 - DNA, 119 bp, homo sapiens
caggaaggtgctcttcgaggaccccctcttccccgccactgacgactcactctactataagggcacgccgggcccgccgtcaggtggaagcgacccaaggtcagtgtctggtcccagct

SEQ ID NO: 16939 - DNA, 119 bp, homo sapiens
ggggcatccgcatgctcctccgcccctcacgctctctcctcgccttctccgcagggcatctgcgaggaccccgcctctttgtggatggcatcagctcccacgacctgcaccagggccag

SEQ ID NO: 16940 - DNA, 119 bp, homo sapiens
tgcgaggacccccgcctctttgtggatggcatcagctcccacgacctgcaccagggccaggtgggcaacgctggtttgtggcagcctgctcgtcacttgcctcccgggagtcgctgtgg

SEQ ID NO: 16941 - DNA, 119 bp, homo sapiens
gtgggcaactgctggtttgtggcagcctgctcgtcacttgcctcccgggagtcgctgtggcaaaaggtgggcctcgggcagagtgggcagggtgctggggagtgtgaacgcagcctgtg

SEQ ID NO: 16942 - DNA, 119 bp, homo sapiens
ccctccccctacccaggtcatcccagactggaaggagcaggaatgggaccccgaaaagcccaacgcctagcgggcatcttccacttccacttctggcgcttcggggaatgggtggacgt

SEQ ID NO: 16943 - DNA, 119 bp, homo sapiens
caacgcctacgcgggcatcttccacttccacttctggcgcttcggggaatgggtggacgtggtcatcgagaccggctgcccacagtcaacaaccagctcatctactgccactccaactc

SEQ ID NO: 16944 - DNA, 119 bp, homo sapiens
ggtcatcgatgaccggctgcccacagtcaacaaccagctcatctactgccactccaactcccgcaatgattttggtgcgccctagtggagaaggcctatgccaagtaggtgccagcagc

SEQ ID NO: 16945 - DNA, 119 bp, homo sapiens
aagtctttccacattgcttcccagactggcaggctgttaccaggccctggatggaggcaacacagcagagcactggtggacttcacgggtggtgtttctgagcccatcgacctgaccga

SEQ ID NO: 16946 - DNA, 119 bp, homo sapiens
cacagcagacgcactggtggacttcacgggtggtgtttctgagcccatcgacctgaccgagggtgacttgccaacgatgagactaagaggaaccagctctttgagcgcatgttaaaggt

SEQ ID NO: 16947 - DNA, 119 bp, homo sapiens
gggtgactttgccaacgatgagactaagaggaaccagctctttgagcgcatgttaaaggtgcacagccgggcggcctcatcagtgcctccatcaaggtgagaacacggcagtccccaga

SEQ ID NO: 16948 - DNA, 119 bp, homo sapiens
tgagcaactgtgtccctccacaggcagtgacagcagctgacatggaggcccgcctggcgtgcggcctggaaagggccacgcatacgccgtcactgatgtgcgcaaggtgcgcctgggcc

SEQ ID NO: 16949 - DNA, 119 bp, homo sapiens
gcggcctggtaaagggccacgcatacgccgtcactgatgtgcgcaaggtgcgcctgggccacggcctacggccttcttcaagtcagagaagttggacatgatccgcctgcgcaacccct

SEQ ID NO: 16950 - DNA, 119 bp, homo sapiens
acggcctactggccttcttcaagtcagagaagttggacatgatccgcctgcgcaacccctggggcgagcggagtggaacgggccctggagtgacacgtgaggcctggggatgggggtgc

SEQ ID NO: 16951 - DNA, 119 bp, homo sapiens
ctcagcccctccccacatccaggatgaccttcgaggacgtgtgccggtacttcacggacatcatcaagtccgcgtgatcaacacatcccacctgagcatccacaagacgtgggaggagg

SEQ ID NO: 16952 - DNA, 119 bp, homo sapiens
tcatcaagtgccgcgtgatcaacacatcccacctgagcatccacaagacgtgggaggaggcccggctgctggcgcctggacgctgcatgaggacccgcgacagaaccgcggtggcggct

SEQ ID NO: 16953 - DNA, 119 bp, homo sapiens
cccggctgcatggcgcctggacgctgcatgaggacccgcgacagaaccgcggtggcggctgcatcaacccaaggacaccttcttccagaacccacaggtgggcgttctcaggaaccccc

SEQ ID NO: 16954 - DNA, 119 bp, homo sapiens
tctctctctctccttggccacacctgcagtacatcttcgaagtcaagaagccagaagatgaagtcctgactgcatccagcagcggccaaagcggtctacgcgccgggagggcaagggtg

SEQ ID NO: 16955 - DNA, 119 bp, homo sapiens
aagtcctgatctgcatccagcagcggccaaagcggtctacgcgccgggagggcaagggtgagaacctggcattggctttgacatctacaaggtgaggccagccgggtcccctgccgtgg

SEQ ID NO: 16956 - DNA, 119 bp, homo sapiens
agaacctggccattggctttgacatctacaaggtgaggccagccgggtcccctgccgtgggtggggagaggagggagctggagtttggactgcccatgcctgaggaagaacgctctaga

SEQ ID NO: 16957 - DNA, 119 bp, homo sapiens
cagcccctcccgcctcctgcaggtggaggagaaccgccagtaccgcatgcacagcctgcagcacaaggcgccagctccatctacatcaactcacgcagcgtcttcctgcgcaccgacca

SEQ ID NO: 16958 - DNA, 119 bp, homo sapiens
gcacaaggccgccagctccatctacatcaactcacgcagcgtcttcctgcgcaccgaccagcccgagggcgctatgtcatcatccccacaaccttcgagccaggccacactggcgagtt

SEQ ID NO: 16959 - DNA, 119 bp, homo sapiens
gcccgagggccgctatgtcatcatccccacaaccttcgagccaggccacactggcgagttcctgctccggtcttcactgatgtgccctccaactgccggtacttgggggctggcttgag

SEQ ID NO: 16960 - DNA, 119 bp, homo sapiens
caccccatctcccactccctctccctaggggctaactcttatgtgatcatcaagtgtgagggagacaaatccgctcggctgtgcagaagggcacctccacaccagagtacaatgtgaaa

SEQ ID NO: 16961 - DNA, 119 bp, homo sapiens
ggagacaaagtccgctcggctgtgcagaagggcacctccacaccagagtacaatgtgaaaggcatcttcaccgcaagaagctgagccagcccatcactgtacaggtgagccccctggtc

SEQ ID NO: 16962 - DNA, 119 bp, homo sapiens
ggcatcttctaccgcaagaagctgagccagcccatcactgtacaggtgagccccctggtccagaggccactcctgggctcctagcctgaggcttccccactcagggggacaagcccagg

SEQ ID NO: 16963 - DNA, 119 bp, homo sapiens
ccaggtctggaaccaccgagtgctgaaggatgaatttctgggccaggtgcacctaaaggctgacccggaaacctccaggccctgcataccctccacctccgggaccgaaatagccggca

SEQ ID NO: 16964 - DNA, 119 bp, homo sapiens
tgacccggacaacctccaggccctgcataccctccacctccgggaccgaaatagccggcagcccagcaactgccaggcactgtggccgtgcacattctcagcagcacctccctcatggc

SEQ ID NO: 16965 - DNA, 119 bp, homo sapiens
gcccagcaacctgccaggcactgtggccgtgcacattctcagcagcacctccctcatggctgtctgacactgcccacctacctggctctgaccgttcccaccaccatctgcatgtcccc

SEQ ID NO: 16966 - DNA, 119 bp, homo sapiens
tgtctgacacctgcccacctacctggctctgaccgttcccaccaccatctgcatgtccccactgggcctagtctagcctgggagccaggatactggggtccttttcccactcttccact

SEQ ID NO: 16967 - DNA, 119 bp, homo sapiens
ccttgctgagatttcaaatagtcctccccacctcaactgtcaccactgctaagggactctatccattgacacattttcctaaggccctgctgtctgccgaggagcgccaagaagatgtc

SEQ ID NO: 16968 - DNA, 119 bp, homo sapiens
atccattgagcacattttcctaaggccctgctgtctgccgaggagcgccaagaagatgtcacttgtttaacacgaactgccacatccccaagctccgttcttgcccctcgtgtcctagg

SEQ ID NO: 16969 - DNA, 119 bp, homo sapiens
acttgtttacacacgaactgccacatccccaagctccgttcttgcccctcgtgtcctaggcccaacccacctcccagacctcactttccccatcagcaatacctggtgttctcccacct

SEQ ID NO: 16970 - DNA, 119 bp, homo sapiens
cccaacccagcctcccagacctcactttccccatcagcaatacctggtgttctcccaccttgaaaggaccttggctcctgccgggttcctgctcaggctggaattgggaaaatatgcag

SEQ ID NO: 16971 - DNA, 119 bp, homo sapiens
tgaaaggactcttggctcctgccgggttcctgctcaggctggaattgggaaaatatgcaggtgacatttttcattctctaatcccatcctctcacccatccatttcctcactcagtgga

SEQ ID NO: 16972 - DNA, 119 bp, homo sapiens
gtgacatttgttcattctctaatcccatcctctcacccatccatttcctcactcagtggagatttgccaatgaataaacgacacctttgaggccccaggtgaagcggggccctactccg

SEQ ID NO: 16973 - DNA, 119 bp, homo sapiens
gatttgccaaatgaataaacgacacctttgaggccccaggtgaagcggggccctactccggcctctgcctgggcctcgcctctgtcctcaggtcctctcagaggcagatacctagggga

SEQ ID NO: 16974 - DNA, 119 bp, homo sapiens
gcctctgccttgggcctcgcctctgtcctcaggtcctctcagaggcagatacctaggggagctgctgctcctgctcattctagcttccgattccattcccagcccctgcgttaaggtcc

SEQ ID NO: 16975 - DNA, 119 bp, homo sapiens
gctgctgctgcctgctcattctagcttccgattccattcccagcccctgcgttaaggtccctggagaggggcgtcagtgggggtgaggaagggcatcttcctgactcctctgcccagtg

SEQ ID NO: 16976 - DNA, 119 bp, homo sapiens
ctggagaggtggcgtcagtgggggtgaggaagggcatcttcctgactcctctgcccagtgctggaaggacatgcctgggttagtgggccaggggccaggcagctgggggcctttgggga

SEQ ID NO: 16977 - DNA, 119 bp, homo sapiens
ctggaaggagcatgcctgggttagtgggccaggggccaggcagctgggggcctttggggaccagaagggagatgtgctcccagagcctctctgctgtaagaccccagcttttcctggaa

SEQ ID NO: 16978 - DNA, 119 bp, homo sapiens
ccagaaggggagatgtgctcccagagcctctctgctgtaagaccccagcttttcctggaagatgggacttggggtgtgtggtgctcaccagagtcaggccacccactgggctcggcagg

SEQ ID NO: 16979 - DNA, 119 bp, homo sapiens
gatgggactctggggtgtgtggtgctcaccagagtcaggccacccactgggctcggcaggagatagggaccccatcacctgaccacagccccccaccaacattcccccaaaatgcagcc

SEQ ID NO: 16980 - DNA, 119 bp, homo sapiens
agatagggagccccatcacctgaccacagccccccaccaacattcccccaaaatgcagcctaggaggcccagtgctcttcttcctgcccagaccaaaatgttccttttagtcctcaatg

SEQ ID NO: 16981 - DNA, 119 bp, homo sapiens
taggaggccgcagtgctcttcttcctgcccagaccaaaatgttccttttagtcctcaatgttttatatttttttgttttgaaaatctcaattttaatcaggggttttaaaagaaaattg

SEQ ID NO: 16982 - DNA, 119 bp, homo sapiens
ttttatattctttttgttttgaaaatctcaattttaatcaggggttttaaaagaaaattgaaagcctgacctccatttttcttcttggctccagttttgctggtcctctggagaactct

SEQ ID NO: 16983 - DNA, 119 bp, homo sapiens
aaagcctgaacctccatttttcttcttggctccagttttgctggtcctctggagaactcttcgtgagcatggtgccgtgacccacttgggatctctgctgtgcccttctcgggcttcca

SEQ ID NO: 16984 - DNA, 119 bp, homo sapiens
tcgtgagcactggtgccgtgacccacttgggatctctgctgtgcccttctcgggcttccagaccaggtgagcaaatgaaaaagtgcagttaattcaagaacaggaatccctgtgtcctt

SEQ ID NO: 16985 - DNA, 119 bp, homo sapiens
gaccaggtgtagcaaatgaaaaagtgcagttaattcaagaacaggaatccctgtgtccttgctgggattccttttgggaacctgactttccgactccagatcctgctgtctggatcagt

SEQ ID NO: 16986 - DNA, 119 bp, homo sapiens
gctgggatttccttttgggaacctgactttccgactccagatcctgctgtctggatcagtgttctggctgaggtgctggattctctgattttgcctcctcactctgtgtctggctttgc

SEQ ID NO: 16987 - DNA, 119 bp, homo sapiens
gttctggctggaggtgctggattctctgattttgcctcctcactctgtgtctggctttgctcctgggtctggccctgggccatatgaggggccaggaaatgaacgacaaggaggataag

SEQ ID NO: 16988 - DNA, 119 bp, homo sapiens
tcctgggtcttggccctgggccatatgaggggccaggaaatgaacgacaaggaggataagagtgttcttcttgaaagccgggacttcccctcaagaacctgggcctggggccgggactc

SEQ ID NO: 16989 - DNA, 119 bp, homo sapiens
agtgttctttcttgaaagccgggacttcccctcaagaacctgggcctggggccgggactctgcatgactggagcaagtcacttaaacctcctgtgcctcgatttcccccttctacaaag

SEQ ID NO: 16990 - DNA, 119 bp, homo sapiens
tgcatgactgggagcaagtcacttaaacctcctgtgcctcgatttcccccttctacaaagtggggccaagattcttgtgtgtcagcactgttactaccgagtgctgagtaagggcaaaa

SEQ ID NO: 16991 - DNA, 119 bp, homo sapiens
atatatatatatacattcatgtaatcaccacttctcgatgtctatttcaaatcaaggctcctgagtaggggtgaagtgagccagcttgcacctcaggctaacacataggactttgctca

SEQ ID NO: 16992 - DNA, 119 bp, homo sapiens
ctgagtagggggtgaagtgagccagcttgcacctcaggctaacacataggactttgctcagccatgtccctgggatacaggggcacaccaggaccaagtggcagacctgtgggcttcag

SEQ ID NO: 16993 - DNA, 119 bp, homo sapiens
gccatgtcccctgggatacaggggcacaccaggaccaagtggcagacctgtgggcttcagcctcggggcggggcatgcctgccaccccctgacaaaaacaggttccacagtgctaccct

SEQ ID NO: 16994 - DNA, 119 bp, homo sapiens
cctcggggccggggcatgcctgccaccccctgacaaaaacaggttccacagtgctacccttgcttcctgcccttgaggtgggccaggctggctcctggctatgcagggatctctggtcc

SEQ ID NO: 16995 - DNA, 119 bp, homo sapiens
tgcttcctgccccttgaggtgggccaggctggctcctggctatgcagggatctctggtccccaggagacttgggggccaggcaggtaaggatcaggggtgataggggagagcaattact

SEQ ID NO: 16996 - DNA, 119 bp, homo sapiens
ccaggagaccttgggggccaggcaggtaaggatcaggggtgataggggagagcaattactttgttcacttatgcacccgcgggggcctgggagtccccatttgcaggtgggtagggcct

SEQ ID NO: 16997 - DNA, 119 bp, homo sapiens
ttgttcactgtatgcacccgcgggggcctgggagtccccatttgcaggtgggtagggcctccagcccacccacccagacctaggcttccctcttctcaggatccaccacagggttaggg

SEQ ID NO: 16998 - DNA, 119 bp, homo sapiens
ccagcccacaccacccagacctaggcttccctcttctcaggatccaccacagggttaggggacaggaagctgttctattctcaataaatcttacaaaattccaaaaagactttcctgtg

SEQ ID NO: 16999 - DNA, 119 bp, homo sapiens
agatcttcttttttttatctttcactgtctaaggaggctgaaagggaaacatcagccgcccggggggagtaaaatgagtgacaacactactctgcctgctccagcttcaaaccagggtc

SEQ ID NO: 17000 - DNA, 119 bp, homo sapiens
cggggggagttaaaatgagtgacaacactactctgcctgctccagcttcaaaccagggtcctaccacccacgcaaaggccctcccaagttcaagcagaggcagactcgccaattcaaga

SEQ ID NO: 17001 - DNA, 119 bp, homo sapiens
ctaccaccccacgcaaaggccctcccaagttcaagcagaggcagactcgccaattcaagagtaaacctcaaagaaaggtgtgaaagggtaagaccaaaatgaaaagaaaaactttctat

SEQ ID NO: 17002 - DNA, 119 bp, homo sapiens
cttgcagatatcacagtgatttgtccatgggaggcattcagccacctggaattgcatgagctcgctcagttgggattatctgaagtgccagaggttctgccactctcaatgacatctgc

SEQ ID NO: 17003 - DNA, 119 bp, homo sapiens
ctcgctcagtttgggattatctgaagtgccagaggttctgccactctcaatgacatctgctgtaattttgttgcttttgccctgttgatctgccggagtcttgaaattcagctgattgg

SEQ ID NO: 17004 - DNA, 119 bp, homo sapiens
tgtaattttggttgcttttgccctgttgatctgccggagtcttgaaattcagctgattggaagtggttttttgactttcaaggtcattccctatcagttactactaagagttctcttac

SEQ ID NO: 17005 - DNA, 119 bp, homo sapiens
aagtggtttctttgactttcaaggtcattccctatcagttactactaagagttctcttactgtcagaattctcttgcagtacagctcaaaatagtggatgcatttcaaacttgaccacc

SEQ ID NO: 17006 - DNA, 119 bp, homo sapiens
tgtcagaatctctcttgcagtacagctcaaaatagtggatgcatttcaaacttgaccaccttttcctacagctagttagaagtcatcaatatttctctacattttgtttatctgtaagt

SEQ ID NO: 17007 - DNA, 119 bp, homo sapiens
ttttcctaccagctagttagaagtcatcaatatttctctacattttgtttatctgtaagtcctttaaattatttttgctaggcattcattatgattaatagtagacttttaagacaaca

SEQ ID NO: 17008 - DNA, 119 bp, homo sapiens
cctttaaatctatttttgctaggcattcattatgattaatagtagacttttaagacaacatttatgtcatccccacctcctcatatttaataaaggagatatttaccttgaatgttggt

SEQ ID NO: 17009 - DNA, 119 bp, homo sapiens
tgttaaaatgtgaatatgagcttataaagaatgtgttttcaattttcagattgtgaaccatgcctttaggaagaggaacattgagccccggcacttgtgccggggagctctgcctgaag

SEQ ID NO: 17010 - DNA, 119 bp, homo sapiens
tgcctttagtgaagaggaacattgagccccggcacttgtgccggggagctctgcctgaagggattaccacgaacttgaatgtgtaaccaatagtactcttgccgctatcatacgccagc

SEQ ID NO: 17011 - DNA, 119 bp, homo sapiens
ggattaccagcgaacttgaatgtgtaaccaatagtactcttgccgctatcatacgccagctgagcagtcgagtaagccatcttttttctgattaccaatgacattaactttttgttagc

SEQ ID NO: 17012 - DNA, 119 bp, homo sapiens
ccgcttcatcagctccctaacagatggccttctccattcattttattctacaggcaaacatgctgaagaatatttggtgagttgtttaatgaggctaacaacttctacatcagagcaaa

SEQ ID NO: 17013 - DNA, 119 bp, homo sapiens
tgctgaagacatatttggtgagttgtttaatgaggctaacaacttctacatcagagcaaattctcttcagacagaattgatcgccttgctgtcaaagtcacccagctggattcaacagt

SEQ ID NO: 17014 - DNA, 119 bp, homo sapiens
ttctcttcaagacagaattgatcgccttgctgtcaaagtcacccagctggattcaacagtggaagagggaggtaattgcctgaaagcagtgagctagaagtgatgttgacaagatggta

SEQ ID NO: 17015 - DNA, 119 bp, homo sapiens
aatatttctatataactcaacttgggggattttctctaaatagtctcactacaggatatcaacatgaaaaagctttcaaaagttccacagtccaagaccagcaagtggtttcaaagaac

SEQ ID NO: 17016 - DNA, 119 bp, homo sapiens
aacatgaaaaaagctttcaaaagttccacagtccaagaccagcaagtggtttcaaagaacagcattcctatcctgttgctgatatttacaaccagagtgataagccaccgcctctgaac

SEQ ID NO: 17017 - DNA, 119 bp, homo sapiens
agcattcctaatcctgttgctgatatttacaaccagagtgataagccaccgcctctgaacatcctgacacatacaggtatagcttcatgagtcccagagcctctccttgagatgagggg

SEQ ID NO: 17018 - DNA, 119 bp, homo sapiens
tggcatgctctctttcctttcctggacatcaggagcaaaagcgtatagatggcaccacccgtgaggtgaaaaggttagaaaagccagaaacaggcgccaggagtggaatatgatggcat

SEQ ID NO: 17019 - DNA, 119 bp, homo sapiens
gtgaggtgaaaaaggttagaaaagccagaaacaggcgccaggagtggaatatgatggcatatgacaaaggcttagacccgacaacaggttgtctcagagtgtgtaccatggagcgtctt

SEQ ID NO: 17020 - DNA, 119 bp, homo sapiens
atgacaaagagcttagacccgacaacaggttgtctcagagtgtgtaccatggagcgtcttccgagggatcctgtccccagatactaggtgtgtgtgtgtcactgctccctcagccctga

SEQ ID NO: 17021 - DNA, 119 bp, homo sapiens
ttgttttcaaatgccaggtcacatgcatcggacgttacggattactcttacccggctactcccaaccatctctgcacccccagcctgtgaccccttcctatgcagctggtgacgtgcca

SEQ ID NO: 17022 - DNA, 119 bp, homo sapiens
cccaaccattctctgcacccccagcctgtgaccccttcctatgcagctggtgacgtgccaccacacgggctgcaagccaggctgcggagcatgagtaccggcccccatctgcctcggcg

SEQ ID NO: 17023 - DNA, 119 bp, homo sapiens
ccacacgggcctgcaagccaggctgcggagcatgagtaccggcccccatctgcctcggcgaggcacatgccctcaacagacctcagcagccgccccccccgcctccccctcaggcccca

SEQ ID NO: 17024 - DNA, 119 bp, homo sapiens
aggcacatggccctcaacagacctcagcagccgccccccccgcctccccctcaggccccagaggggtccaggcctctgcaccgatggctccagcagactacgggtaactcagcatgcct

SEQ ID NO: 17025 - DNA, 119 bp, homo sapiens
gactatgtgcctcatatctctctcaggatgctcccagcgcagataattgagtattacaacccatccggacacctcctccgccacctcctcctgtgattccctcagcacaaactgccttc

SEQ ID NO: 17026 - DNA, 119 bp, homo sapiens
ccatccggaccacctcctccgccacctcctcctgtgattccctcagcacaaactgccttcgtcagcccttccagatgcccatgcagcccccgttccctgcatcagccagctccacgcac

SEQ ID NO: 17027 - DNA, 119 bp, homo sapiens
gtcagccctctccagatgcccatgcagcccccgttccctgcatcagccagctccacgcacgcagctcctctcacccaccctccaccgggctcctggtcacagccccgccacccccgggc

SEQ ID NO: 17028 - DNA, 119 bp, homo sapiens
gcagctcctcctcacccaccctccaccgggctcctggtcacagccccgccacccccgggcccaccacctccccgccaggccctcctggtcccgggtcttctctttcgtcctccccaatg

SEQ ID NO: 17029 - DNA, 119 bp, homo sapiens
ccaccacctcccccgccaggccctcctggtcccgggtcttctctttcgtcctccccaatgcatggcccccagtagctgaggcgaagcggcaagagcctgcacagccaccaatcagtgat

SEQ ID NO: 17030 - DNA, 119 bp, homo sapiens
catggccccccagtagctgaggcgaagcggcaagagcctgcacagccaccaatcagtgatgctcgaagcacctcctcgctgctattcgaatgggtaagtggagcccccagacacacagc

SEQ ID NO: 17031 - DNA, 119 bp, homo sapiens
aaccacgtgttgtgtctgcaggaattcaactgaaaaaggtgcaggagcagcgggagcaggaggccaagcggagccagtggggaatgacgtggccacgatcctgtcccggcgcattgccg

SEQ ID NO: 17032 - DNA, 119 bp, homo sapiens
aggccaagcgggagccagtggggaatgacgtggccacgatcctgtcccggcgcattgccgtggagtacacgactctgacgacgactcagagttcgacgagaacgactggtccgactgag

SEQ ID NO: 17033 - DNA, 119 bp, homo sapiens
tggagtacagcgactctgacgacgactcagagttcgacgagaacgactggtccgactgagcaaaggccgcggagaggccgcgtgtgggagcgtgttgaagattttaagtggtctctaca

SEQ ID NO: 17034 - DNA, 119 bp, homo sapiens
caaaggccggcggagaggccgcgtgtgggagcgtgttgaagattttaagtggtctctacacccaaatagggtattctaatcccgtagcatagcaccttttgtataaacaatgtgatatt

SEQ ID NO: 17035 - DNA, 119 bp, homo sapiens
cccaaatagtggtattctaatcccgtagcatagcaccttttgtataaacaatgtgatattgcttctgcaatccaaaaattctgggtcttttcagtatttactgtgtaatacttaagtgc

SEQ ID NO: 17036 - DNA, 119 bp, homo sapiens
gcttctgcacatccaaaaattctgggtcttttcagtatttactgtgtaatacttaagtgccactaaacaagcaaattgtgctgcacatgaggaaataggctgtcactatcacattgtcc

SEQ ID NO: 17037 - DNA, 119 bp, homo sapiens
cactaaacatagcaaattgtgctgcacatgaggaaataggctgtcactatcacattgtcctgaaaacagatctgctttcctcttggccatgagagtatttagtgcagtttgggtttact

SEQ ID NO: 17038 - DNA, 119 bp, homo sapiens
tgaaaacagcatctgctttcctcttggccatgagagtatttagtgcagtttgggtttactcttactgataatataactctgcagacttgctgtgtgtttgtgaagctgcctggtgttag

SEQ ID NO: 17039 - DNA, 119 bp, homo sapiens
cttactgatcaatataactctgcagacttgctgtgtgtttgtgaagctgcctggtgttaggtctctgcagactaatgactatgtcagagtgatgtcttccaaccagtaagtgatattgt

SEQ ID NO: 17040 - DNA, 119 bp, homo sapiens
gtctctgcaagactaatgactatgtcagagtgatgtcttccaaccagtaagtgatattgtttcaccgcttggtttttccttttgtttttttaaaggatgtgtttctgaataagttggtt

SEQ ID NO: 17041 - DNA, 119 bp, homo sapiens
ttcaccgctttggtttttccttttgtttttttaaaggatgtgtttctgaataagttggttttagagggaaggttcaacaaacagggagaatccagtgtttctgctttcagtttcttggc

SEQ ID NO: 17042 - DNA, 119 bp, homo sapiens
ttagagggaaaggttcaacaaacagggagaatccagtgtttctgctttcagtttcttggcttggtagccctgagtgaatctgatgctctgctgaataatttcattacctctgcacatgc

SEQ ID NO: 17043 - DNA, 119 bp, homo sapiens
ttggtagcctctgagtgaatctgatgctctgctgaataatttcattacctctgcacatgcctgtcaaattgaaattggaagggcccttttcaggctgggttccctgtgggcatttgctt

SEQ ID NO: 17044 - DNA, 119 bp, homo sapiens
ctgtcaaatatgaaattggaagggcccttttcaggctgggttccctgtgggcatttgcttagtaaatgctgttgatggtttttgcaagagaattcagcagctcaacagtaatgaaagtg

SEQ ID NO: 17045 - DNA, 119 bp, homo sapiens
agtaaatgcctgttgatggtttttgcaagagaattcagcagctcaacagtaatgaaagtgaagaacagatccattttccttcctggggccattggggatgacactcaagatacttgcca

SEQ ID NO: 17046 - DNA, 119 bp, homo sapiens
aagaacagagtccattttccttcctggggccattggggatgacactcaagatacttgccagtctctccatgtgggcaccagccggccagaacagatgcgagcagtccatgactctggga

SEQ ID NO: 17047 - DNA, 119 bp, homo sapiens
gtctctccagtgtgggcaccagccggccagaacagatgcgagcagtccatgactctgggagctacaccgtgagctgggcagagctgcggcacagggcctgggctgcaaaggagccctgc

SEQ ID NO: 17048 - DNA, 119 bp, homo sapiens
gctacaccgctgagctgggcagagctgcggcacagggcctgggctgcaaaggagccctgctcctttagttcctgacacctgtgtcctgagtgagccgcaggagttcttagctcctcagc

SEQ ID NO: 17049 - DNA, 119 bp, homo sapiens
tcctttagtttcctgacacctgtgtcctgagtgagccgcaggagttcttagctcctcagcgagcaacaggagcactttagatggcacctttcaccacttggtcagaattttaaaagctt

SEQ ID NO: 17050 - DNA, 119 bp, homo sapiens
gagcaacagagagcactttagatggcacctttcaccacttggtcagaattttaaaagcttaggtttagggaaagtagatattgacagctattcacctttcacggtgctggggccagatt

SEQ ID NO: 17051 - DNA, 119 bp, homo sapiens
aggtttaggtgaaagtagatattgacagctattcacctttcacggtgctggggccagattagggatcaccccgtgaggagggccttcaccctgttctagaagcacatggttgtcctcct

SEQ ID NO: 17052 - DNA, 119 bp, homo sapiens
agggatcactcccgtgaggagggccttcaccctgttctagaagcacatggttgtcctcctgttgttggccattaaatgataaaaagcacctcatgagattcccttgatcagccctgcag

SEQ ID NO: 17053 - DNA, 119 bp, homo sapiens
gttgttggcacattaaatgataaaaagcacctcatgagattcccttgatcagccctgcagctgtagtacgtgctgtgccctcacctccacccttcctgttgttcccacgtgggcaatac

(The sequence listing continues in the following parts.)
